United States Patent Application Publication US 2026/0062700 A1 - sequence listing, part 5

SEQ ID NO: 11335 - RNA, 963 nt, synthetic construct
  source 1..963: mol_type = other RNA
atgtccatcgatattgagacaacattgaaaaaagcctaccctgactttgaaattttactgaagtcacggccagcgacacattacaaggtgtataaaatccccaaacggaccattggctacagaattatagctcaaccgacccctagggtaaaagcaatccagagcgatatcatcaaaattctgaaggagtatgtgtacattcatgacgctgctactgcatatgttgatgggcgaaatattctcgacaacgccaaaatccatcagaactcagtgttccttctcaaactggacctcgtaaatttcttcaatcggatcactcccgaaattctgttcaaggccctgagcagacaggggctgcacatctccgatgacaacaagaacatactacggcaattttgtttctggaatcgtagtaaaaggaagaacggcgctttggtcctgtcagtgggagccccaagctctcccttcatttctaatgtggtgatgaagtcttttgacgaggagcttactagcttttgcgaatccaataagatcaactatagtcgctacgcagatgacctaaccttctccaccaatgaacgcgacgtgcttggtttggcccaccagaaagtgaagacaaccctttcacacttctttggcacccgcatcataatcaacaacaacaagatcgtttactcctcgaaggcccataacaggcacgtcactggcgtcacgctcacgaacgataataagctctctattggacgagagagaaaaaggtacatttccagtctggtcttcaagttcaaagaaggaaaattaagcggggatgacatcaatcacctcaagggtctgatagggtttagctttaacatagagcctctgtttattggcagattggagaagaagtatggtaaaagcaccatcaagagtatcaagaagtattctgaaggaggagttaatggcacagatctgactgagtga

SEQ ID NO: 11336 - RNA, 939 nt, synthetic construct
  source 1..939: mol_type = other RNA
atgtctatcgatattgaaactacgctccagaaagcttatcctgactttgacgaactgctcaaatccagaccagcaacccattacaaagtgtacaaaatacccaaaaggaccattggctatagaataatagcccagcccacctctcgggttaaggccattcagcgtaatatcattgagatcttacggcaacatgcacacatccacgacgctgcgaccgcttacgttgacggcaagaacattctgcacaatgcaaaaatccatcaaaactccgtgtacctgctaaaactggaccttgtcaacttttttaacaagattactcctgagatcttgttcaaggccctggcccgccagcaccttgacatatcagacgaggataagaacatactgaagcagttctgtttttggaacagaagtaagcggaaaaatggggccctggtgcttagtgttggtgccccgagcagcccattcatcagcaatctggtaatgaattcgttcgatgaagagatttcctcattctgcaaaaaaaacaagatctcctacacacgatatgcagacgatctgacattctcaaccaatgagagggatattctgggactcgcgcaccagaaagtgaagactacactaatccgcttttttgggacaaggttaatcatcaacaataataaggtcgtctacagctcaaaggcccataaccggcacgtaacgggagtgactttgacaaacaacaataagttgagcattggccgagacagaaaacgttatattacttccctggtgttcaagttcaaggagggcaagctctctaatgtggatattaaccatcttcgcgggctcatcagtttcgcttacaatatcgagcccacctttattgagaggttggaaaaaaagtatggtgatagcaccatcaaatctatcaagaagtatagtgaaggaggctga

SEQ ID NO: 11337 - RNA, 939 nt, synthetic construct
  source 1..939: mol_type = other RNA
atgtccatcgatctcgagtctgagttgaccgaaaaatttgctgatctgcagcaattactgaagtccaggccgtctacacattacaaagtctacaaaattcccaagcggacaattggcttcaggctcatcgctcagccaactaaaaaagttaaggatgtgcagagaatcatcgttgagaacttatcaaagattgcgctcgtgcatgacgtcgccaccgcatatattaagggccggaatatcctgtacaacgccagtttgcatcaagatagtgactacctgcttaaactggaccttgaggactttttcaacagtatcacgcccgatttcttctttaaggagttggagagacagtccatcagtctgagcataaacgacaaatttctcatcgagcagctgtgcttctggaaccggtcaaagaagcgtaatggcgcactagtactttccgtaggatctcccagcagcccttttatctccaacgttgtcatgtatagcttcgataagaagctgcacggcatatgtctggccgaaaaaataaattactcacgctatgccgacgatatgaccttttctacaaaggaaaaggattccctcaaattcattcacaatgaagtgaaggggttgctgcaggagtatttcgggaatcgcattctcattaaccagtcaaagattgtgtattccagcaaggctcacaatagacacataactggaattactctgaccaacaatgacaaactgtcaatgggcagggacaagaagcgctacattagcagcctggtgtacaaatttaagaacggtcagctggactttgacgatattcaaagtctcaaaggactaatcgggtacgcacgatctatcgaacctgtgttccttttacgaatacagaagaaatatggtccatcgatcatcgaggaaatcaataaatattctagcgaagagtga

SEQ ID NO: 11338 - RNA, 939 nt, synthetic construct
  source 1..939: mol_type = other RNA
atgataatcgatttaaagggtgagctttcagaaaaggtagatgacctgcaacagctgctcaaatcaagacccagcacacattacaaggtgtataaaatcccaaagcggagtattggctttcgacttattgcgcagcctacaaagaaactcaaacacatacagaagctaatagtggatctgttattgaataaggtgaaggtgcataagaacgccacggcttacatcaaggggaaaaatatctccttcaacgcatccatccataaaaatagcgagtatttgctgaagttggatctggagaacttctttaacagcataaagccaggaatgttctttaaggagctggagaggcagaacatccggttgagcaacgaggatacagccattctggaacaattctgcttttggaaccgaagtaaaagaaaaaatggggccctggtattgtcagtgggagctccgagtagtcccttcatttccaatgtcctgatgtatacatttgaccaggaactgtatgaattctgtgcttccaaaaaaatcgcctactcaaggtatgcagacgacatgacctttagcaccaaggaaaaaaacgttctcttaagcatccacaaacacgtcgactttcttctcatcaagtacttctctaagaatctaaggattaacgacctgaaagtggtctactcttctaaagctcacaatcggcacgtgactggcgttactctgaccaatgacaatgagatctccattggtagagataaaaagcgcctcatctctgccatggtttacaacttcaagaataattcgctaggccttgatgacacccatacgctccagggactgatcgggtatgccttctctattgagcctgattttattaagcgtctccaggcaaagtacggctccaccatacttgaagacattaacaagaacctgctgcgcacttga

SEQ ID NO: 11339 - RNA, 945 nt, synthetic construct
  source 1..945: mol_type = other RNA
atgaattatcttctgctcaagaacgtagctacagatattaagttcttcgagactttgtatagcagcccttctaaccattacaaggtgttcaaaatccccaagcggtcaattggatttcgtataattgctcagccaaccaagaacgtgaaggactaccagagaaagattgttcgggtgttggagccattaactgccattcattccgctgcgacagcctataagaagaatcaagggattaaggacaacgcgtttatccataaaaatagtgagtttctgctgaaactggatctggtgaactttttcaactccatcacccccgaaatgtttttcaatgccctgaacgtgcagaagattaaatacagcgagaacgatcggatggccatgtctgagtacctgttctggaatatcaacgagaggcgagcagacaataaaaaacttgttctgagtgtgggcgcaccttccagtccttttataagcaattttgtcatgttcgccttcgataaaaaaattagccaattttgcctcgccaactctataaactattcacgctacgctgacgatctgacgttttctacgaaggataaaaatgtcctcttcaatgttatctcagaagtgcagactaccctcaaggcctgttttggccacaagcttaaaataaataccagcaagaccatcttctcctccaaagcccacaacaggcatgtaactggaattacactgaccaacaacaatcagttgtccataggtagggagaggaagcgatacatctcggcactagtccacaaggcttcacttaatatgttgcccaaagaagacatccatcacttacagggcctcatcagttttgcacgccacatcgaaccgaccttcatccagagactagaacgcagatatgggaaggacatcatccacaacatcattaatacagacctggacaaattctga

SEQ ID NO: 11340 - RNA, 948 nt, synthetic construct
  source 1..948: mol_type = other RNA
atggagtttaagatcgttcaggccctgatcaaggagtttcctgagctgaaagagcttgtcaagaagacgccttccacccattacaaagtcttcaaaatcccaaaacgtacgatcgggtttaggactatagcccagcctacctcatctttaaaagacgttcaacggaaggttgtggatttactgctgccccacgttaaggtgcatcatgccgctaaagcctacataaaaaagtgctccattaaagacaacgcggctgtccacctcaatagccagtatctgttgaaactggactttgaaaatttcttcaactctatcactcccattatgcttttcaaagtgctcgcagagcagggagtgagtgtctctaagagcgatagcaagattttgagcgagatcctattctggaatcggtcgaagaagatcaacgcacccctcgtgctgtctattggtgcaccaagctccccgctgattagtaacatcgtgatgtacagttttgacagaaagatcgaagatatatgcaaagccctggacattaattattccaggtatgctgatgacttgacatttagcaccaacattaaatcagtgctcttcaatcttgtggacatggtcaatgaagccctccagattgaatttgagggtgagatcaatatcaactcatctaaaacagtgttctcttcgaagaagcacaatcgccacgtaactggcataacattgaccaactcaaacaagcttagtattgggaggattcggaagcgatatatctccgcgctggtgcataagttcaaaaccaaccaactgaacgatttaactgagattaaccacctaaagggactcctgggctttgcttactacatcgaacccaatttcatagtaagactcacaaagaagtacggctccgacattatgatccgcatcagaaagttcaatagcgaagatctgaaatga

SEQ ID NO: 11341 - RNA, 948 nt, synthetic construct
  source 1..948: mol_type = other RNA
atgaagctgtccgttctgagccatatctcaccagaagtgttcccagtcgaattcagtcactatctggctaaaaaacccagtggtcactacaaggtgtacaagatacctaaacggacttttggatttcgagttattgcccagcccactcccgagttaaaatgtatccaaagagccatcgtggaacagatgaaaccttatgtccagatccattcgagcgccaaggcctatattaacggcattaacattaaggagaacgcaagcgctcacgtagagtcttcttacctcttgaagctggacctggaaaatttcttcaattccctgaccccctctatgtttttaaaggcactcaattatcaggagattgagctagtcaataatgacattgagccgctgattgagctgcttttttggaaccgaaccaagaaaaagtcacctaatctcgtgctttctgtgggagctccaagcagtccgttcctgtctaactttatcatgtacgagttcgacaaaatcgtgacatcctattgcacaaagtcaaacataaactactcaaggtacgcggatgatctgacgttctccaccagcgaaaagaatctcctgttcgttatccctaaatatatcgaaaacaccttgcgtgatctcttcgacgatagaattaaactcaatcgctccaagacctttttctcgtccaaagcacacaacaggcatgtaacaggaatcacaatcagtaacaataacaagctgtctctagggagggacaggaaacggtacatccgggccctgttgcacaagtttagcatcagaagcctcgataatgaagatgacatagaacatttgaagggccttattggctttgctaaaactgtggagccaatattcatcgataagatgaagaaccgctatggtgagaaagtctttattgacctttttcgctactccgggggggactga

SEQ ID NO: 11342 - RNA, 948 nt, synthetic construct
  source 1..948: mol_type = other RNA
atgaagctaccaatactgagcaggatcagttccgaggtgtttccctccgaattcagtcactacctggccaagctgccatctagccactacaaagtgtacaagatccccaagaggacgtttggttttcgagtgattgcacaacctacaccagagcttaaatgtattcagcgggagatcgtaaagcagattaagccttacgtgaagatccacaacgtggcaaaagcctatgttgatggcgtcaatataaaagacaacgcttatgtccatgtgaaatcgaattatctgctgaagcttgatctggaaaacttcttcaattccctcaccccgtccatgtttctctcagccctgaactatcaggagattgagttggtgaacaaagaagtggaccctctgatcgagttactcttttggaataggactaagaagaagcgccctaatttgatactgagcgttggtgcccccagctccccgttcctgagtaactttatcatgtacgagttcgataagatagttatgaaccactgcatgaaattgaatatcaactattcgcgttacgcggatgatctaactttctctacatcagagaaaggcgttttgtgcatgatcccaaagttcattgaaaaagtactctgtgacctgcatgacggcaagattaaactcaactacagtaaaagcgtcttctcatctaaagctcataacagacacgtgaccggaatcacactgtccaataacaataagcttagcctcggccgggaccgaaagcgctatattcgggctctcctgcataaattttcaaccgagtctttacagtatgaggacgatattaatcacctgaaagggttaatcggatttgcaaagatggtcgaacccagcttctttgaaaaaatgaagaccagatacgggtctaaggtgttcgtcgaccttttcagatacgggggagaacattga

SEQ ID NO: 11343 - RNA, 948 nt, synthetic construct
  source 1..948: mol_type = other RNA
atgcaagtctctatccttagtagaatacccccagaagctttcccaaatgggttgtcacaatacctgggcgagaaaccgagctcacactacaaagtttataagatcccaaagcggacatttggctttagagtgattgctcagcctacccccgaactgaaggacatccagcgagcaatcactacgcagatcaaaccttttgtccagattcacagctctgcaaaagcatatgtagagggagtctcaataaaggacaatgccattgtccacgtgcagtccaactacttgctcaaactagatctggaaaacttctttaactcactcacccccaccatgttccttgacgctttaaattaccagaatatccgtctggttgacggagaggttgagtctctgatggagctgctgttttggaaccgcactaagaagaagacacccaatctgatcctgagtgtgggcgccccttcaagcccatttttgtccaaccttatcatgtatgagtttgacacaattgtgtccagtcactccgcgaaactcaatgtgaactatagtcgatatgccgatgatttaactttctctaccagcgagaaagatgtgctcttctcctttccgcagttcattgaaaacgtgctgaacgatctgtacgatgggagaatcaaactgaatcatagcaagtccgtgttctcttccaaggcccacaacaggcatgtgaccggcataacgctcagtaataacaataagattagcctgggacgggacaagaagaggtacattcggagcctcctgtataaattctcggtacaggccctccaagatgaggaggacattaagcatttaaaggggctaataggtttcgccaagacagtcgaacctagcttccttgaacgcatgaaagctaggtacggtatctctatcttcaaagatttgtttcgctacgacggcgacgactga

SEQ ID NO: 11344 - RNA, 948 nt, synthetic construct
  source 1..948: mol_type = other RNA
atgaaattgcctatcctgtctagaattcccccagatatctttcccaaggggttcaatgactacctggcatccaatccttcggcccactacaaagtgtacaaaattccgaagaggacattcgggtttcgtgttattgcacaacctacaccagagctgaaaaatattcagaggtctatcatcaatcgaattaagcctctcgtgcgcatacacaattccgctaaagcctatgtggacaacgtgggtatcaaagagaacgccagcgttcacattaagagtaattatctcctgaagctggacttggaaaacttttttaacagcctgacacctcccatgctgctcaatgccatcgactaccagaacatcgaactagtggatgaggagatctatccattggtcgaactcctgttttggaatcggactaagaagaagacacccaatctggtgctatccgtaggggctccaagttcaccgtttcttagcaacttgataatgtacgagtttgatcgcattgtcaccgagtactgcggactgaacgatgtgaactattcccggtatgccgacgatctcactttctccacccttaataagggagttctctttaacattccatcattcattgaagagtgtcttcacgaattattcaaaggcaagatcaagctgaaccgcagtaaaactaccttcacctctaaagcgcataatcggcacgtcacgggaataaccctggctaacaataacaagatttctttaggccgagaaagaaagagatatataagggctcttcttcataaattctcaacgaacagcatcaaagataaggaggacatcgagcatctcaaaggcctgataggcttcgcaaagtatatcgagcccagcttctttgacaagatgaaagtaaaatacggtgaaaagctgatcttcaagttgttaaagtacgacggcatctcatga

SEQ ID NO: 11345 - RNA, 948 nt, synthetic construct
  source 1..948: mol_type = other RNA
atgcagctctctattctgtcatgttttactcctgaggactttgaaaccgaccttaatcagtatctggctgagaaaccatcacatcactacaaagtgtacaagattccaaagcggactattggtttccgcgtaattgcacaacccaccccgaaattgaaatccatccagagaaagattgtggagaagatgatgtcgtacctcgtcgtgcactccgctgcaaaagcctacgtgaagtcttgttccataaaagacaacgctttagttcatgccaactctaacttcctgcttaagctggacctggaaaatttcttcaattccttgacgcccgatatgttgaagagagcggtgcagtaccaggggttttccatcgtcgagaaggaagccaacgctctcaacgaactgctattctggaacaagtctaaaaagaagaaagcgaacttgtatctgtccgttggcgcccccagttcccctttcttgagtaacgtgatcatgtttgagtttgatgaagcagtaactaaactatgcaagcaactcgggattagttatagcaggtatgcagatgatctgaccttcagcacatctgtcaaaaatgtcctttttgaagtgccaaagataatcgaagagatcttactccagatgttcggtggaaaacttaagctaaattacagcaagacaaggttttcaagcaaggctcataaccggcacgttacaggcattacccttacaaataataacaagctgagcttagggagagagcgcaaacgatacatcaggtcactgctgcacaaatttagcaattctctgctcagtgaggatgacatcaattcgctgaagggactcataagcttcgccatgaacgtggagcctgccttcatcgccaaaatgaaggcacactatggcaccgccctgtttgacgagctgaaccgttataactgcggaaataattga

SEQ ID NO: 11346 - RNA, 948 nt, synthetic construct
  source 1..948: mol_type = other RNA
atgcaactctcgattctgtcacggatctcccaggaggatttcaattctagcctgaatcagtatctggcagagagcccaagtactcactataaggtgtacaagatcccgaagaggtcatttggatttagggtaatagcccaaccaactccccagctgaagaatattcagcgcaagatagttggcgaaattaaaggctacatgcatgtccactctgccgccaaagcatacgtgaaagactgtagtattaaggacaacgccatcgtgcatgtcaactctaactatttgctaaaactcgatcttgagaacttctttaacagccttacacctgcaatgttagcccgggccctgaagtatcaggggttgtcattactggaatccgaagtcgctgctctcaatgaactgctgttctggaacagaacgaagaaaaaatctcccaatcttgtcctttccgtgggtgctcccagctccccattcctctccaatgtgatcatgtacgaatttgacgaagccgtgtctaagttttgcagcgagtctgggctgagttattcgcgatacgctgatgatctgacatttagcacatcaatcaaagacatcctgtttgaggtgcctaaattcatcgagagtattctgttccagctcttccagggcaaattgaaactgaactactccaagacaaccttctcaagcaaagcccataataggcacgtaactggcgtgaccctgaccaataacaataagctatccctcggccgtgagagaaagagatatatccgcgctatgttgcacaaattcagttgtgaagagctgtgcgactatgacgttcaagcgttgaagggattaattagctttgcacttaacatagagcctacctttgttgacaagatgaagggtcggtacggggcgaagctcttcgacgatctattcaagtacaataacggagataactga

SEQ ID NO: 11347 - RNA, 954 nt, synthetic construct
  source 1..954: mol_type = other RNA
atgaagcttagcattttgtcccggatatcccaagaggccttctgtagtaatttaacacaatacctcgccaaaaacccaagcaagcactataagacatacaagatccccaagcgccgatttggattccgtatcattgcacagcccactcctcagttgaagctgattcagcgcaagatcgtagagatgctcaaagtacaccttaaggttcatccggcagctaaggcgtacgtcaaaaactgctcgatcaaagataatgccgaagtgcacgtgaactcaaattatcttctgaaactggatctggaaaacttctttaattccctcacacctgacatgttagcgaaatcactcttttatcagggagtcatgttctccgaaaacgaggtggctgggctgaatgaactgctcttttggaaccgaaccaagaaaaagaccccaaatctggtcttgagtgtgggtgctccctcctcaccatttctgtctaatatcatcatgtacgagtttgacgacattgttagcgcccggtgctctgaactgcaggtgagctattcaagatacgctgacgatctaaccttcagtacgttggagaaagggatacttttcgacatctctgagcttattgagagcgttctgttcgagctgtatcagggcagggtgaagctcaattacagcaagacaactttttctagtaaggcccacaaccggcatgtcactggcattaccctcaccaacaacaacaagctctctctaggaagggagaggaaaagatatatcagggcattgttacataagttctccaacgaggccctgtctgattatgatatacaagtgctgaaagggctaattggttttagcagatccattgaacctatgttcatcgaaaaaatgaagatacgctacggcatcgaactgttcgcaaaactgtacaaacagacgaattcgaatggcgacacttga

SEQ ID NO: 11348 - RNA, 945 nt, synthetic construct
  source 1..945: mol_type = other RNA
atgaaactgaatattgagaaagtcctggccgaaaaaaatccaaatttgaatatcggcgagctcctagctagtataccgagcaagcattataaggtgtataagattccgaagcggactatcggttttagattgatcgcgcaaccaacacccaaaatcaagaacatacagcggtccattattgccgaactggcccctctgctcaagattcataaatctgcaacagcgtatatccagggcaagtccattcttgataatgcccgcgttcacagggcctcaaactacctgttaaagctggacctggaaaatttctttaactctataacgcctgacatcttcatcaatagtttgaaaaaccagggcatcgagctcagtgctaagaattcaaacctactgatccaactgcttttttggaataggagccgaaagagaaatggaaatctcgtactgtcagtgggggctccttcttctccattcatttccaacattatcatgtacgacttcgacaaaaaactgtaccagtactgcaagtcgatcggagcaagctacaccagatatgcagatgatctcacttttagtgcaaaggaaaagtcggtgctccagcgcatccccaacgaggtgaaaaggttgctgttcaaagagtttagcaacgaaatccggcttaacaactccaaaaccgttttctctagcaaggcccataaccgacacgtgaccgggatcaccctttccaataacaacaagctgtccctggggcgggatcgcaagaggtatatatctgccctggtccacaagttcacactctcattgttagatgaggacgacattttacacctcaaaggcctaataggacttgctaaatttattgaacccgagtttatcgagagacttgagagcaagtacggcaatagcttcattctgaacctgaaccgttacctcattaaagattga

SEQ ID NO: 11349 - RNA, 957 nt, synthetic construct
  source 1..957: mol_type = other RNA
atgagcctcgacctccattcgtacctgtcacagtttgatagtgacttggacgcatttctcctgaccaggcctagtaagcattataaagcctacaagattccgaagcgcaaagtgggttttcgggtgatcgctcagcctaccccaaaggtcaaaatgctgcaaaggaaacttgtgaaacagttatctacaatcctcgacgtacacgacgcggcatatggctacagagtggggagaggcataaaacagaacgccgaaaagcacgtggacagcgaatatctcctgaaaatggatatcagcaacttctttaactccctctcaccaaatgtatttttcgatgccatccactctcagaatattcggctttcaaaacaagacagggagattctgcgcgaaatatgcttttggaatcgtaccaagcggtcaacggggaagttggttctctcagtgggggctcccagtagtccctttatcacaaacgtgatcatgttctccttcgacgagaaggtgagcaagtactgtgagaagatcggcgtcacctataccaggtatgctgatgatctgacattcagcagtaaggaaaagaatcttctgcagaaggtgcgtgagcagatagtcagagacttagaatccctgtactctggtgttttagtgattaacgaggccaaaactatattctccagcaaaggcaataacagacacgttactgggatcgtattgactaacaataatagactgagcattggacggcgccgaaagaggtacctatccgctctagtccataagttcaagtgcaacgagctggatgcacttgattctcgaatgctgcagggatggttgtctcaagcccgccacatcgaaccttccttctatgagcggctggaggttaaatacggaaaggagattctgaaacagatttcctctttcaatatcgaagtcgaagatgagcccggcacatga

SEQ ID NO: 11350 - RNA, 954 nt, synthetic construct
  source 1..954: mol_type = other RNA
atgaagattgaaatcccatatcaggatataggaattagcaggatcaaactcgcctccactgctagacgctcgccactgaagtacaaagtgtataagatccccaaaaggcgctcaggcgtccgagtgattgcccaaccaacccctgaggtcaaagatctccagagaaagcttgtcgactttttgcggacccagcttacagtgcacagttgtgcgaccgcctacgaacctgggaaaggcattcgggaaaacgctcagcaacatgtgaataacccctacctgttaaagatggacttcagtaacttctttaacagcatcactcccgagattttcaaaaatgctctgttgcacgattccgttgagatcgacgataacaccctcatgttgcttatcaacatattcttctggtgccctgggaagaaactgtctggaaaactggtcctctcagttggtgccccttcctctccgttcatatccaattacgtcatgaagaagtttgatcagctcctgagcgttctgtgcgaacaggctggtattacctatacacgatatgcagacgacatgacgtttagtacacaaagagagaatgtactgttcacactgaaagagcagatcgccacgctgatagtgcagagtggctatgaaaacatcaccatcaatgaatccaagacagtgttttccagcaaggcacacaatcgccatgttactggggtgactctgaccaatgataaccagctctcagtgggcaggaaaaataagcggtacgcaagctcactaattttccgttttaagttaggcgaattgtctacagacgagactcttatgctaaaagggctcttagcccattactttcacatcgaacccgagttcaagctgtctatgcaaaagaagtacggagtagagattatcagcgacattgtgaactatcaggagctgatcaacgagtctgacagctga

SEQ ID NO: 11351 - RNA, 954 nt, synthetic construct
  source 1..954: mol_type = other RNA
atgaaaattgacattccctataaggatatcggtatcaatgaaaagaagttattcctaacagcccatcggattccgctcaaatacaaggtgtacaaaatacccaagcgccactccggagttaggataattgctcagcctacccctgaagtgaaagaaatacagcgcaaactcgttggcttcctgcggacccgtctgagaatccataactgcgcaacagcatatgaggccggcaagggcattaaagagaacgctctgaaacacgttaaaaaccagtatttgctgaaaatggacctcgcgaatttctttaactccatcacgccagatatctttcagaatgccttagcccacgattcagtggaactggacgagactacctggacaactctcgtcaatgtgtttttttgggctccaggtaagaaattgactgggaaactggtactcagcgtgggagcaccatcgtcacctttcatctccaactacatcatgaagaggttcgatgagcaggtatctgacctatgcgagaagagcggtgtcacttacacccgatatgcagacgatataactttcagcacgaaccaacagaacattctgttctcccttaaagagaatatcgggagtctgttgcaagcgaatggctataagtcaatcaacatcaacgagagtaaaaccgtcttttctagcaaggctcataataggcatgtgacaggagtgacccttacaaatgacgggaagttgagtgtcggccgagataagaagcgctatgccagctctctcatctttcggttcagattagccgagctttgtcatgacgacattctttttctgaagggactgctggctcactacttccacatcgagccctccttcagattttctatggaaaagaaatacgggaagaacattattcacgccctgatgaagtaccagggcgatgtgcacgaacccgacaattga

SEQ ID NO: 11352 - RNA, 939 nt, synthetic construct
  source 1..939: mol_type = other RNA
atgcaattagagcgaaagttatgtgagtctttcaaccttacccctctgcagctgagcgtgttgagttccaaagcaccaaagaagtatagggtctactatatcccaaaaagaacatcagggcttcgcgctattgcgcagcctactaaagagttgaagaatattcaacggtttctggctagtgaactcgatgcctactgccctatccatcccgccgcaatggcttaccgaaatgggaagtcaatcaaagacaacgctgaatgtcacaagaataacccgtacctgctaaagatggacttccagaatttctttaacaagataaagcccgacattttcttcgaaaagcttaacgccctcgatgtgaagtatgatggaaaagacaagaaacacctacgtaattttctgttctggaaaccaggtcagaagcgctccataacacatatcctcagtataggcgcaccttcctctcccttcgtgagcaactttgtcatgtttgacttcgattttgagatctcgaaatggtgcgccgaattcgatattgtttacaccagatatgctgacgacattactttttctacggcccggaagaatattctgttcagcgtccccaagattgtaaagaacatcttgagcaaacatgcgtcaggcattaccatcaacgaagcaaaaacaatcttcacgtcaaaagcccacaatagacacgtgaccggagttacaatcaccaacgatggaaaactcagcatcggcaggaagaaaaagaaatatctgttctccctggtgtttaaatactctattggcgagctgactagggatgagatcttttacgccaaggggctgatgagccattgcatgcacatcgagaagaatataatctcccggatgaagaataagtatggagccgacgtgattaacaaatttctcaaagaaggtggcgacgagtga

SEQ ID NO: 11353 - RNA, 984 nt, synthetic construct
  source 1..984: mol_type = other RNA
atgctggccgccatctctgctgctagcataagtgagatgaatatcatgcaactggagaggaaattatgcgaaaaatttgagttgaccccactcagactcagcattctgagctcaaaggcgcccaagaaatatcgggtttactacattccaaaacgcaactctggcttgcgggcaattgcccagcccactaaagaacttaaggacatacagcgatttctgatctccgaattggagccatatctgcctgtgcatcctagcgccatggcttaccgcaaaggtgtgagtattagagataacgctgagtgtcacaagaataatccatacctcctgaagatggatttccagaacttcttcaacaagataaaaccgaatgttttcttcgataagctgaatgacttcggctttgagtacgactataaggacaagatttacctccacaactttttgttctggaagcccggccagaagcggtccatcacctacgttctttctgtcggcgcccctagtagtccctttatctccaactttgtgatgttcgagttcgatatggctgtatcaaaatggtgcgcagaatttaatatcatctataccagatacgcagatgatgtcacattcagcacttccaggcgaaatatcctcttttccgtacctaaaatggtgaaaaatatgcttgcccaatatgcatctggaattacaattaacgaagcaaagacggtcttcacatcaaaagcccacaacaggcacgtgaccggtgtgactattaccaatgatgggaagttatcaataggacgcaaacgtaagaagcacctattcagcctgctgtttaaatattccatgggggaactgacaaaagacgagattctgtatgcgaagggcctaatgtctcattgtatgcatatcgaaaagaacatcatcgccaggcttaagatgaagtacggatcggagctcatcaacgacttttttaaagacgggggggacgagtga

SEQ ID NO: 11354 - RNA, 984 nt, synthetic construct
  source 1..984: mol_type = other RNA
atgctggccgctatagttgcggctagcatctttgagatagacattatgcaactggctaaaaaactttgcgagaagtttagtctgacaccattaaagctttccatgctgagcactaaagcacctaaaaagtaccgggtctattatattcctaagcgaacaagcggctttagggccatcgctcagcccactaaggaactgaaggaaatccagaggtttttggtgtcagaactcgaacccatactaccgattcattcatccgccatggcatacagatgtgggatctccatcaagaacaatgcagagaaacacaaaaacaacagcttcattctcaaaatggacttccaaaacttcttcaacaagatcaaacccggaatcttcttcgagaagttcaataatctggatatccagtgcaattctcatgataggtatctacttcacaacttcttgttttggaagcccggccagaagagaagtgtcacccacattctgagtgtgggggctcctagcagcccattcatctcgaatttcgtaatgtttgacttcgattcagccatttctgaatggtgtgcaaaatttgacatcgtgtacacccggtacgccgatgatatcactttcagtacctccagaaagggaatcttattttccgtgccaaagattgttaagaacatgctcgcggagtatgcatctgggatcaccctgaacgaagccaaaacgatttttacctccaaagcccacaatcggcacgtgactggagtaaccatcacaaccgacggcaagctgtcaattggccgcaagaaaaagaaatacctgtactctctcgtctttaaatatacaaaaggtgagctcacgaatgaagaaatattgtacgccaaggggttgatggcttattgcattcatattgagcgtaacatcataactcgccttaagaagaaatacggctctgaggtgattaatcagtttctgaaggagacaggtgacgagtga

SEQ ID NO: 11355 - RNA, 936 nt, synthetic construct
  source 1..936: mol_type = other RNA
atgcaaattgaaaagctactgtgcgagaaacataaggtaaccacgttgcagctgtcggtgatcgctgcgaaagccccaaagagatacagggtgtactatatacctaagagaacgaccgggtttcgggtgattgcacagccgacaaaaaagattaaggaaatccagcgtactctagtcgcctacctgaaggattttctcccagtgcattcctccgccactgcctatcagaataacatcagcattaaggacaacgccaatcggcacaaaagaaacgactacctgctcaagatggactttcagaacttcttcaacaaagtgaagccagagcttttcttcgcaaaactgaataagctggactttaatatcacacggaaggatgaatccctcttgcgcgatttcctgttttggaagcctggtcaaaagcggtctaaaactcacatactgtctgttggcgctccctcttcacccttcatcagcaactttgttatgtacgagttcgacaaagctatgcatgagttttgtgtttcaatgggagtcgtgtacaccagatatgccgatgacataacattcagcacttccagtaagggcatgctttttgtcattcccaggattgtgaaggcacttctcgcggaacatgccagcggccttaccgtcaatgagtctaaaaccgtattcagttcaaaggctcacaataggcacatcacaggcgtcacaatcactaacgaaggtaagttgagcataggaaggaagaaaaaacgacatttatcaagtctgatcttccgctattccttaaacgagctgaccgaggaagaggtgttaaatgcaaaagggctgctcagctattgcatccacattgagcctgatttcattctccgcatgaaagtgaaatacgggcacgatctgatcaataaatttttggctgaaggagcccgatga

SEQ ID NO: 11356 - RNA, 945 nt, synthetic construct
  source 1..945: mol_type = other RNA
atgactgtccaaatcgaaaaaatcctgtgcgaccacctggactaccccacatacgagctgacttctattgccattagggcacctaagaagtatcgggtttactacattcccaagagaaatggtggcttacgcgtcatatcgcagcctacaaaacagctgaaaaagatccagcgcgtactggtggcccacctcactaatctgctccccgtgcactcttcagcaatggcttatcggagggggatctcaattaagcataacgctatcctgcacaaggagaatacgtttcttctgaagatggacttccagaacttctttaacaagatcaagccggacttcttctttagcaggctaaacagtatcgacatcaatcttgtcgccaacgatgcgttcctcttaaagaactttctgttttggaagcccggccaaaaaagatccgtgacctatattttatctgtgggcgctcctagttcaccatttataagcaacttcgtgatgtacgagttcgatgaggccattaatgagtggtgcaaaaatcacggaataacatattcccgatacgccgatgacatcaccttctccaccaacaaaaaagatcttcttttcagtgtaccaaagattgttaagagctttctggctaagcatacacagggcatgaccattaatgaagccaaaaccgtgtattcaagcaaagcacataaccgccatgtgactggggttacgatcaccagtgaaggtaaattgtccgtgggcagaaagcgaaagaaacatctgtcctctctcctgcacaaatatagcctcaacttgctaaacccagaggaaattttgcgggcgaaggggttgatgagccactgtatcaatatcgagaaagatttcctgctcaggatgaaaaaaaagtacggaaaggatatagtcgacaattttatgcgtgaaggaaattacgactga

SEQ ID NO: 11357 - RNA, 933 nt, synthetic construct
  source 1..933: mol_type = other RNA
atgcagctaacctccaagataatcaaaaagttcaactacgagcgccttgcctttgagcagctgttaaacgaagccccgaaaaagtacaaggtctactacattcctaagagaggagccggttttagagttattgctcagccaacaaaggaactgaagaacgtgcagagatttatcgtctctcttcttgaacctattctccccgttcaccacaaagcaatggcgtatcaactcaacaagtcaatcaaggataatgcctacctccacaaggataattcctatgtactgaagatggatttccagaatttcttcaacaaaatcaagcctgacctgttcctcaccaaaattgaagcaagcaacctggagttggagtccctggataagttcgtgctgcggaatctcctgttttggcggcctggcaccaaacggtcaatcaccttgatccttagcataggggctcccagctctcccttcataagtaactttatcatgtacgacttcgaccgaaatgtggacgactggtgtctgaatcatggcgtggtgtactcgcgatatgctgatgacattactttttctacgaacaccaaagatctgctcgtgagtgtcccaaagatggtgaaaaaaatgttgtctgagtatgttcccggtctgacagtcaacgagtccaaaactatatttacgagcaaggcacacaatcgccatgtcactggggtgacactcacaccagaaggcaaactgtcagtgggaagggaaaggaaaaggatgctgtatgccaaaatgcatcaatattacctagggatgttgagtaccgaggacatcaacaaggttcgtggattagtaactttcgctaattacattgagggcgactttattttcaggcttaagaagaagtatggcaatgagttaatcgatcgctttctgaaagaagggtgctga

SEQ ID NO: 11358 - RNA, 936 nt, synthetic construct
  source 1..936: mol_type = other RNA
atgcagctgacgagtaagatcattagcaagttcaactacaatcggctggcttttcagctcctgttgaacgaagctcctaagaaatacaaggtatattacatccccaaaagaggcgccggatttagagtcatcgcccagccaactaaagaactgaagaacgtgcagcgttttattgtgtctctcttgcaacctaaactccccgtccaccataaagcaatggcatacgaatataagaagtctatcaaggacaatgctctcctacacaaggataacaattacatcctgaagatggattttcagaacttcttcaacaagatcaaacccgacatatttttctctaagcttgagaacacgggcctgaagctggactccttcgatgagaataccctccgcaatttgctcttctggcggcctgggaaaaaacgctccacaaccctgatactttcagtcggggccccatcatcaccgtttatttccaactttgttatgtacgacttcgataagtctctagatgattggtgtaggaataacggtattacatatagtcgctatgccgatgacattacatttagcaccaatatcaaggacatcctctgcagggtacctaaggtggttaaaaagatgctgagcctgcacgtgcccggcctttcgataaatgagtccaaaactatcttcactagtatggcgcataacagacacgtgactggagtgaccttgacaccacagggaaatcttagcatcgggcgagacaggaaacgaatgctgttcgcaaaaatacataagtattccttgggcttactgagtagcgaagagattaacaagaccaaaggcatgattgccttcgctaactatctggagggtgactttttacttcggctgcaaaaaaagtacgggtgcgagttaattaccaaattcctgatggaaggaaataagtga

SEQ ID NO: 11359 - RNA, 936 nt, synthetic construct
  source 1..936: mol_type = other RNA
atgcaactgacatctaagatcattagcaagttcaattacagcaaccttgcgttccaccttctcctggccgatgcccccaagaagtacaaagtgtattacattccaaagcgggggtccggcttcagaatgatcgcccagcccaccaaagaactgaaacatgtacagagattccttgtaagcttactcgaaccaaatttgcctgtgcactataaggctatggcctaccagaagaataagtccataaaggataacgccctgctgcacaaaggcaataactacattctcaagatggacttccagaatttcttcaacaagattaaacccgagctgtttttctctaagctgcaaaacgctaatatcaccctcgagtccggagatagggctgttttacgcaacctgctcttttggcggcccggcacaaaaaggagtatgacactgatcctctctattggggcgccatcgtcaccgttcatcagcaactttgttatgtacgacttcgatcgcaaaattgatgactggtgcgagtccaataatattgtctacagtcgatatgcagatgacatcactttttctacaaacagtaaggacttactatcgtctgtccctaaagtcgtgaaaaagatgctggcaactaacgtgcctgggctgagcatcaacgagtcaaaaactatatttaccagtatggcccataacaggcatgtgaccggagtgacccttacgtcagacggtaaactgtcaatcggacgcgacagaaagcggatgttgtatgcaaaaatacacaagtatagcctgggactcttgtcctccgaagagatcaataaagttcgagggctaatcagctttgctgattacttggaagaggactttcttctgcgtctaaggaagaaatatggtcacgacctgatagataagtttatgaaggaaggcggcttgtga

SEQ ID NO: 11360 - RNA, 930 nt, synthetic construct
  source 1..930: mol_type = other RNA
atgacaatacgcaaagagctcagtaagaaactggaactgcctgagttgcagatcgttctcttctgtattaatgcgagtaaaaagtacagagtgtactctattcccaagcggaaggtcgggcggaggattattgcacagcctacaaaagagcttaagaaatatcagcgtgtgttggtcgagatcttacagccgtacctgaaagttcacgaatgcgcatatgcgtacaaaaccgacatcagcattaaggataatgctgaacaacacagaaggaacacttatatcctgaagatggatttccagaactttttcaacaagattaagcccgagctgtttttttccaaggtggattcggtcagcataaaattatctagagaagatcggagtctgctgatggacattcttttttggaaacccggttccaagcgatcaacggccctcgtcctttctgtaggggcacctagctctccctttatcagcaacttcatcatgttcgattttgacaaggccatatttgaatactgcaagaacatcggtgttacatatactcgctatgctgatgaccttaccttcagcaccaataaaaaggacgtgttgttcggggtgcctgtagtggtgaaggccgctctgtccgcacttgccccaggaatgatcattaacgactccaaaacagtgttcagctcaaaagcccacaaccggcatgtgaccggagtcacgatatctaatgagggcgaactcagcctgggaagaagtaagaaacgatatatatcctcactcatccataagtactctctgggcaccctgccagactccgagatcgactacctaaggggcctcctgtcctatgcccaacacatcgagccaatgttcctgactaggctaaagaataaatacggcgagaagttgattaatcatatccgctcaggcgcttga

SEQ ID NO: 11361 - RNA, 939 nt, synthetic construct
  source 1..939: mol_type = other RNA
atgagtatctccattctgcttgctaaaaagcttaacatcaccgaacatcaacttcattcattctgtctcaatgctccaaagaaatacaaggtgtatacaatccctaagaggtctatgggaaagaggattattgcccagcccactaagaccctgaaacgtgtccaaagagaggccttgggaattcttttgccctttctggaggtgcacttctctagctacgcttataagaaagggctggggattaaagataatgccatgctgcacaaagataattcctatttgctcaagatggacttccagaacttcttcaacaagataaaacccgacgtgtttatggccaaactgcggaacaagatcccagacatctcgtacagcgatgaagaattgctgaagaacgtttttttctggaagccggggctcaagaaaagtaaaaccttgatcctctccatcggcgcaccttcaagccctcacatctcaaatttcgtgatgtttgaatttgactctgagattgagagcctatgcaggggtttaggtgttgtctacactcgctatgctgacgatctgacttttagcacaaacaaaaaagacgtgctgtttcagctgcccaagattatacggggactcctgtccacatgcatgccatctttaacgatcaacgacagtaaaacggtttttagcagtaaggcacacaatcggcatgtcaccggcgtaacaataaccaacgacggcatgctgtcactaggaagaaaaaagaaaagatacctttcctcgctgatcttcaagtattccctcaatcagattaattacgaggatttctctcacctccgagggatgctgggtcatgcaaagtacatagagcctgcgttcgtatttcgcatgaaggccaagtatggcgccgagctggtggataagatcattttaggcgaaagctacgagtga

SEQ ID NO: 11362 - RNA, 936 nt, synthetic construct
  source 1..936: mol_type = other RNA
atgtccatttataatcagctatgcgagaagatgaaagttgaccctgctgatctggactttttctcccacaatgcccccaaaaagtacaaggtttactccattccaaaacggactgtgggccacagactgatagcacaacctacatccgaattgaaggaataccagagagcactggtgtctatcctcgagaaatcattgccgattcatgagtccgcctacgcatatcggaaaaacatcggcataaaacagaatgccctgaagcatgtcgctaattcatacctgctgaaaatggacttccagaacttcttcaataaaatcaagccagagatcttcttcagcaaactcctcaaagccaatattgaaattagcgacgacgatcgcaagattttaaagaaccttctcttttggaagccaggactgcgtagaagcgtaacccttgtactgagtgtgggcgctccatcaagccccctgatcaccaactttgtcatgtactactttgacgaacacatgacgaactggtgtaaaaaaaacaagatttcctacacacggtatgcggatgacataaccttctcgacaaacaccaagtctattttgtttagcgtgccctctatagtcaggactatcttgaagcaagagattcctggaatgtcaatcaacgagagcaagaccattttcagcagtaaggcccataaccgccacgtgactggtgtgactttaaccacggataacaaaatctctctcggacgaaagaagaagaaagaaatcagtgcccttttacaccgctttacactgaagatcctccctcccgaggatatctctttccttatcggtctgctgagtcacgctaagaatatcgaaccgatatttctgtctaggatgaaatccaagtatggggaggatacattttataatctaaggggggactatcatgtttga

SEQ ID NO: 11363 - RNA, 936 nt, synthetic construct
  source 1..936: mol_type = other RNA
atggaaatcctttctgctgtgagcaaagagttgggcgtcaatgtaaatgagctgcggaggctaagttcagtcgcaccaaaaaaatacaaggtgtatactatccccaagcgccaatcaggctttcggcttattgcccagccgactagcgaaattaagcgcatccaacgagaagtggttaaaatcttggcatctaagctgattgtgcatgatgccgccaaggcctacaaggttagcatcggcatcaaagacaacgctaagattcatatggctaattcctatctcctgaaaatggactttcagaacttcttcaacaagataaagcctgccctgttgtttgataagctcagatcacagggagttgtgctctctggtgaggacaaggaattccttgaagggatattgttttggaaacctggaaaaaaacgctctattaccctggtgttatccgtcggtgcccctagtagccccttcgtgtcgaatttcgttatgtacgacttcgacaactacataaacaactggtgctccgtaaggaacatctcatactcccggtacgccgatgatattaccttctctaccgacgagaaaaatatcttatttgaagtgccaaaggtggtcagattcgcgctatcgctgtgtgccaaaggaatttctctcaatgagagcaaaacagtgtttacaagcaaagctcacaataggcatgtcacgggcgtaacactgactgtcgatggggagctgtccctgggaagacagaaaaagcgtatgatctccagtctgcttcacaaatataccctggggctcttagcaaaggaagatgtgatcagcctgaagggttttgtgggccacgcgctctatatagagcccaagtttatcgcacgaatgaagattaagtatggcaaggaggttattcacgctctgttcagtgaggaggggatgtga

SEQ ID NO: 11364 - RNA, 948 nt, synthetic construct
  source 1..948: mol_type = other RNA
atgaacatcttaactactctccgtgagcagcttctcaccaataatgttattatgcctcaggaattcgaacggttggaagtaagaggtagccacgcttataaagtatattctatcccaaagcggaaagctggccgccgtacaatcgcacatccatcctccaagttaaaaatttgtcagcgacatctgaatgctattctgaaccctctgctgaaggtgcacgactcaagttacgcctatgtcaagggaagatcaattaaggacaatgccctggtccattcccacagcgcatacgttctgaagatggatttccagaactttttcaactcgatcacccccacgatactgaggcagtgcttaattcagaatgatatcctgctcagtgttaatgagcttgaaaagctagagcagctgatattttggaatcccagtaagaaaaggaacgggaagcttattctctcagtggggagtcctatttctccactgatttcaaatgccattatgtacccctttgacaagatcatcaacgatatatgcaccaaacacggcatcaactacacgcgctatgcagacgatatcaccttctccactaacataaagaataccctgaataagctcccggagatagtggagcaattgatcatccaaacatacgccgggagaattatcatcaacaagaggaagaccgtgtttagcagcaaaaaacacaacaggcacgtgacaggaattactctaacaaacgactccaagatctctattggcagatctcggaaacgctatatttcttccctcgtgtttaagtacatcaacaaaaacttggacatcgatgagatcaatcatatgaaaggtatgttggccttcgcgtataatattgaacccatctacatacaccggcttagccataaatacaaagtgaacatcgtcgagaagatactgcgaggaagcaattga

SEQ ID NO: 11365 - RNA, 948 nt, synthetic construct
  source 1..948: mol_type = other RNA
atgaacattctgacgaccttacgggaacagctgctggcgaataatctgctaatgccacaagaatttgagaaactggaggctaagggctcccatgcctataaagtatattccatccctaaacggaaggccgggagaaggactatagcacacccgtcaaagaaattgaagatatgccaaagacagttatctcatattttgtcccccttactcaatatccacgatagctcttacgcatatattaagggccgatcaattaaggataatgcactggtacatagccactgcgactatctgttgaaaatggatttccacaactttttcaactcaatcacaccttctattctcaggaaatgtcttgttcagaatgagatcctgattaccgagtacgacatcaacaaaatagagcagctcatattctggaacccttcaaaaaagcgctatggtaagcttatactgagcgtcggatcgcccatcagtccactcatcagcaatgccatcatgtatccctttgataaagtgatctctgaaacctgtaccaaaaacgggatcaggtacacaaggtacgccgacgacattacttttagtacgaatcgcgacaacgtcctgcacaatatccccgaacttgtggagcacgtcctaaacaagatctactttggacagatcattatcaataagcggaagaccttctttagctccaagaaacataatcgacatgtgacaggcatcacactcactaacgacaataaggtgtctattgggagaagccgtaaacggtacattagtagtttggttttccgttacattaacaagaacctcgatattgatgacattaatcacatgaagggtatgcttgctttcgcttataacatcgaaccaatgttcatccacagactgtcccataagtacaaggtgaacatcgtggagaaaatactgcgcggacacgactga

SEQ ID NO: 11366 - RNA, 948 nt, synthetic construct
  source 1..948: mol_type = other RNA
atgaagatcgtgcccattcttcagcagcagctgacaaaacggaaaaccgtgagcgacgcagactttaggaaattgcttgctctgggatctcatgcgtacaaggtgtataccattcctaagagaaaggccggtcaccgccttatcgcccacccatctaagagcctgaaagaatgtcagaggcaactgaccagcattctggagctctatttacctgtctcagactctagttacgcttatatgaaaggcaggtctataaaggataacgccctggttcatgttcactcttcctatattctcaagatggacttccaggacttcttcaattcaatcactccggagatctttcgacagcatctggagcgtaatgacataattattagcgagacggaatttaagatccttgagcaactcatcttctggaatccttccaagcgcaaatatgggaagctaatcttaagtgtagggagtcccatctcaccattcatttccaacacgatcatgtattacttcgacgagtacatcaacaacctgtgtagccaactaaatatcaattactcacggtacgccgatgatctgacatttagcaccaaccagaaggatatactctttagtctgccacagtttgtgtcggatattttgcacaaagaattctcagggagaatagtgattaaccaccggaaaactgttttttcctccaaaggtcacaaccgccacgtcacaggagtcactataaccaaccagaataaactgtccattggcaggaaaagaaagcgatatatttccagcctggtattcaattgcatcaacaacaatctcagtaatgaggaaatcatgcatttgaagggcttgctggcatactgctacaatatagaacccatgtttattcatcggctttctagaaagtacaagttcaacatcatcaagaacctcgtgaaaaaggatgactga

SEQ ID NO: 11367 - RNA, 990 nt, synthetic construct
  source 1..990: mol_type = other RNA
atgtgcttggggtgtttctatgttggcgggaagctgaagatactgcctctgctggagcagtccctggcaaataacgaagtcgtgagcaacagcgatttcagaaagctgcaaatgctggggtcacacgcttataaagtctacaccattcccaagagaaaggcaggaaaacgggtgatagcgcatccaagcgttaagttaaagaagtgccagtccaacttagtgagcatcctggaattgtatctacctgtgcatgacagtagttacgcctacgtgaagggtcgatctattaaggataacgccctggtacacgctaaatctgactatttgctgaagatggacttttacgactttttcaatagcattactcctcccctgctttctgagcatctcgataaggttggacttacagtagacttatacgaactggctaagcttaaccagctgctcttctggaaccccagtaagaaaaaacacggaaagttgatcctgagtgtgggcgccccatctagccccttcatatccaatacgatgatgtacttcttcgacgaaaaaatctccaagctctgtgcaaagaataacatcaattattcgcgctacgccgatgacttgaccttttcctctaataaaaagggcattttgttcctcctcccagatgtggtgaagaaaatcctcaagcaggagttcaaggacaaaatcgtcattaatgactccaagaccatctttagttcaaaaaagcacaatcgccacgtgacaggactaactataaataacaacggctcaatttctctgggcagaaaaaggaaaaaatacatctcaagcctggtttttgagtaccttaataataggcttgatgagggtgaattttatcacctgatcggtctactcgcctttagctataacgtcgagccgatgtttcttcatcgtctctcccggaaatacaaagtgaacgtcatcgattcaattctcaaaaaagggaggctgaacgagtga

SEQ ID NO: 11368 - RNA, 954 nt, synthetic construct
  source 1..954: mol_type = other RNA
atgaaaatcctgtcaatactcgagctgcggctgtctgagcgggagaagataagttacgcagatttcttgaaactgcagaacctgggaagccatgcgtaccgcgtttactcaattccaaaacgcaaagcagggaatagaacaattgctcacccttccagcaagctcaaggagtgccaacggcagcttgtgagcatcctcgagatgtatctgcccgtacacgagtccgcttatgcttatatgaaaggcaggagcattaaagataatgccctggtccattccaagtctgcctacttactgaagatggactttcaggacttcttcaactccatcacccctgaaaccctcgaaaggcacatgcggaagttgggccttacattacctatcaacgaacagaaggccctggagcaattagtattttggaacccatctaagcgtaagtatggcaaactcattctgtccgtgggatctccgattagcccctttattagcaacagtgtgatgttctttttcgatcagaaaatgttcgacatctgtaccaagcacaatatcaattactcccgttatgccgacgatcttacttttagtactaattccaaggggctacttttcagtatccccgagctcgtgaagcaggccataaaacaggaattcaatggggaattggtcattaacgattctaagacgatatttagctcgaaagcacataacaggcatgtcaccggtatcactatcaacaataacggccagatttcactaggccgacaaagaaagagatatgtgagttctctggtttaccagtataccaaaaacgaactgagcgaggaggaaatcgaccgcttgaagggtttgctgtcattttgccacaatgtggagccctacttcctgtcaagactcacacgaaagtacaaactgaatatcgttgacgaacttctaaggaagggaacaaagaaatga

SEQ ID NO: 11369 - RNA, 945 nt, synthetic construct
  source 1..945: mol_type = other RNA
atggagtctaagctgtttcatacactgtgtacaaacttgaaccttagtacctctgaattaatggagttcattagtaatgcccccatctcctacaaagtgtattcaattccgaaaaagaacggcggaagacggacaatagcgcacccctcaaagaagctaaaaaagatccaacgggaactgctcgtcctacttgagaaaactttacagattcaccagtctgccttcgcttacatcaaggggaaaaacatcataaacaatgccgagcttcacaagaataataaatacctcttgaagctggacttctatgatttcttcaatagcatctccgacgtgatttttatcaattatctggacaagatcgggctgagcctgtccgaactggactccaaattagtgagccatatctttttttggaacccaaataacaaggataagacccataaaaagctcatcctgagcgtaggctcaccctctagccctatgatctcgaacgctatcatgtatttcttcgacagcgagatcaaaattcactgcgattctatgtccatagtttatactaggtatgcagacgacctgagtatcagcggaaatgacaaggataaactgaaagagatcacccagtttatacgctctcgcctgtacgacctctttaacgggaaaattatcctcaatgatctcaagaccattcttgtctcacctggctacaataagtttattactggtatcacccttacaccacagggaggattgtccattggtaggaagagaaagaagtacattttcgggttgatctacaagtacataaagaacgaactgaaagatgatagcattagtcacataaagggcatgctctcatttagttattccattgaaccttcgttcattcgacgtctggagttgaaatacggcaaagatacgatcagaaggataattaacgagaaatga

SEQ ID NO: 11370 - RNA, 945 nt, synthetic construct
  source 1..945: mol_type = other RNA
atggaatctaaatttttccacaccttgtgtaagaagctgaacctgagtactagtgagctgatggaatttatttcaaatgccccagtgtcctacaaaatctattccatccctaaaaagaacggcggcagaagggtaattgcccaccctgccaaaaagctgaaaaagattcagcgagagctgctcctcctgcttgaaaaggatctgaagatccatcagtctgcgtttgcatacatcaagggcaaaaatatcatacagaatgctgagccacacaagaataacaagtacttactcaagttggatttctacgatttcttcaacagcatttcggacgacatctttattaactacctcgacaaaattggactggtgcttaatgagctggataaagagttggtcaaacacatctttttctggaatccgaacagcaaagacaaaaggcacaaaaagcttatcttatctgtcggaagccccagctcgcctatgatcagcaatgcaattatgtacttcttcgactcagagattaaaacgtattgcgacagcatctctattgtgtatacacgctatgccgatgacctgagcatctcagggaacgacaaggataacctgaaggacgtgatcatgtttatccggtccaagttgtatgatctatttaacggccggatcattctcaatgatctcaaaaccacattgatctctcccgggtacaataagttcgttaccggaattactctaaccacacaaggcggtctttccatcggcagaaaacggaaacgttatatattctccctggtgtacaagtacatcaagaacgaattaaaggaagacgctgtcctccatatgaaggggatgatatccttttcacatctggttgagcccagtttcataataaggctggagagtaaatatgggaagaacataatcaaccgcattattaatggtaagtga

SEQ ID NO: 11371 - RNA, 957 nt, synthetic construct
  source 1..957: mol_type = other RNA
atgaagagtaaacggaaattcgaactgttttataagctccacgagggcgagcgttttagttccaagcttaatgagctgatcgctttaacacctactgctcccatctcatataaggtgtactcaatcccaaagaagaaaggcggccgaagaactatcgcacaccctaccaaaaagctgaaggaaatccagaaaaaactgctggagcttttacagctccaaatccacaaatccgcctatgcgtacagaaaaggacggaatattgcccagaatgccgaaacccataaagaaaacaagttcttgcttaagctggattttcacgacttcttcaatagcataaacaacatcatcttcacccgccatctggataagattggaatccactataatgaggacgacaaatggctgataaaccatatcttcttctggaaccccaacaagaaggataactcccacaagaaactgattctctctgtgggagccccaagtagcccaactatatccaatgctgtcatgtactttttcgataaggaaattgaggagtactgcgagtccaaatcaatgaagtactcaagatatgcagacgatattagcatcagcgggaataacaagaacgagctgaagacaatcattcctgtcatacgcgagaaattgaacgaactgtttaacgggcgaatcattctgaatgaactaaagaccgtaatcataagcccgggctataataaattcattacagggatcacactcacgtctcagggctcgatcagtattggtaggaagaggaaacgctatattttttccctggtgtacaaatacaagatcaatgagctctctaaggacctcatcccccatttaaaaggtctactgctctttagcaagaacattgaaccctcttttattgttaggttggagttgaagtacggaaaggagataattcggaggattcttgacgaaaaatga

SEQ ID NO: 11372 - RNA, 1038 nt, synthetic construct
  source 1..1038: mol_type = other RNA
atgcagagtcccgctttcgttccttgccctggggcggctccatttgcaagttttagcaaagagtcctatgcccagggactgccgtgggcactacagctcgaggccatgatgctgttttcagatcggatttgtgacgaactcggctactccaagcgtcagctcaactcatttctgaagaatgcaccccgcaaatatcgggtgtactccatacctaaaaggactgtgggatacaggacaattgcacacccctctaaaaagctcaaggagatccaaagagtgtgcgacgctctactgcaggatattttacctgtgcatcattgtgcatacgcctataaaaagggttgcagcattaaaaagaacgccatgcttcacgtctctcaatcatatctgctgaagatggatttctctaatttcttcaacagcatcactccagatatgttctggtctaaggtagacggtttcaagattgggataaataaaaaggagagaggaaaattgaccaaggctatgttctggcagcccaaccgccacgactccgacaagttgaaactttcaatcggcgccccaactagtcctctgatcagcaattttgtcgcgtacgagtttgattgtttcctcagcgaatggtgcatttcccaaggaatcatctacagcaggtacgccgacgacttgacattttctaccttcaatgccggcattttattctccgttcccagagtggtaaaggcctttctgaacaagtatttcgacggcatcacaataaacgaggctaagacgaagtttagttcaaaaaagcacaacagacacgtgaccggcatcaccctgaccgatgatggtcggatcagccttgggcgaggggagaaaaggcgaattttccattttgttcatgtgttttccctgggcgaactggatccggatctcctgccaaaactccgcgggaaaattgtcttctatgaacacatccagccaggctttatcaaacggcttagtgacaagtacacagaagagttgatatcttcgttactgaatggagactga

SEQ ID NO: 11373 - RNA, 939 nt, synthetic construct
  source 1..939: mol_type = other RNA
atgctgttgatcgagaagatcatcaaggaatctaagctctctaggcctgaactgacaattctcagccataaagccccgtatatgtacaaagtttatgccattcctaagcgccgaagtggctaccgcatcatagcccatcctgccaaacccctgaaattaattcagaggctcattctccagctgctggaaccctctgtgaagattcacgacaacgtccatgcttacgtgaaaggccggtccattattactaacgcaacagtgcataagaaaaataagtacttgctgaagatggacattaacaacttcttcaacagcatcaaacctgaattgttctggtcttccctgaacaaacaggacatcatgcttccaaaaatacaccaaaagaccattgagagattaatcttttggaatcccagcaagaagaaagatgggaaactcattctaagcgtcggggctccaacctccccattcatctcgaatatcgtgatgttttcattcgacagtaagctcagtagcgtatgcgataagctggggatctcatactctagatacgccgacgatctcaccttttcaaccaagaagaagaacatactgttcaatctgccccacatcgtgaagatccttttgcaagaagagttctccggagcaatgaccataaatgagcagaaaactgttttttcgagcaaggctcataacagacacgtgactggtattacaatcacaaatgacaagcagctttccataggacgagctcggaaaaagtatatttatcacctgatccaccaggccacgctgggcaacttggatgatgagcgtatgaatcaccttctgggactgatatccttttgtaggtcaattgacgcaaacttcttagacaagatcgcgaataagtatggtagcagttttgtcaaagatctaatcaaacgggagcttaaatga

SEQ ID NO: 11374 - RNA, 951 nt, synthetic construct
  source 1..951: mol_type = other RNA
atgctccagaggctttacagtaagctgcagaaaaagttggagatccccagatacaaaatagaatccttcagtagttcagcaccgaacaggtataaggtttacacaattccaaaacgcacatcgggtagacgtgtcatcgctcatccttccagagaattgaaaaaataccagcgggcgctcgtaagcatcctgactccccttctctctgttcacaaatgctcattcgcctacaaaaagggcgtgagcatcaaagaaaatgcacttgagcatgcaaaaaatagctatctcctgaagatggactttaatgactttttcaactctatcgatcctgaactgttctttttgatgaataagtccaatggggtcgagttttctgacagtgaaaagaagctgattcaaaacctagtcttctggaacaagaccaagtcctatgagcagaaactcgtcctgtctgtgggggccccatcaagccccttcatcagcaactttgtgatgttcaagttcgacgaactgatcgagaagtttagtaagaagaacaacatcacatacacccgctatgctgatgacattaccttctctactaataagcggaacgccttattcttgattccagaggaggtaaataatattctgagagagcactacggctatcgcataacagttaactccaccaaaactgtgtttagctcaaaggcccacaaccgacatattactggaattacgatcaacaatgaaggacaactgtccataggtagggataggaagcgaatgatctcttccctaatacataagtactcaatcaaagtgcttgacatctcggatttccagtatttacagggcctgctcagctttgcttctcacgtggagcctcggtttctggattccatgacccggaaatatggacacgagacgattaccaatattgtgaaaggggatttttacgacagctga

SEQ ID NO: 11375 - RNA, 945 nt, synthetic construct
  source 1..945: mol_type = other RNA
atgatgtttaaattgtacttcaagcttagcaagaagttggaactgtctcgcagtcgaatcgaatcatttagtaaaaatgcacccaacatgtacaaggtgtatacaatccccaaacgtacatccggaagacgggtaatcgctcacccaagcagggagctgaaagtctatcaaagagcgctggtcgagatccttgcctcaagtttcgaaccgcaccattgtagcttcgcttaccgtaaacagctttcgattaaagagaacgcactggtccactcaagaaatagctatctactcaagatggacttttcagaattcttcaattctatcgagcccgacatgctgttttctgctgccaaggttcgcaacatcggactgagcgatgccgagaagagactagtggaaaatctcgtcttttggaataagaccaaatcccataacaccaaattggttctctccgttggggcccctagtagcccactcatatcaaatttcatcatgttcgagtttgacaggctcatgtatgaattctccaagaataacagcatcgtgtataccaggtacgcagatgatattaccttttccacgaaccggaagaatactctgttcgatgtgcctaacgaggtgaaccgagtgctgtcgaaattttacgactaccgcatttctataaactccacgaagactgtgttctcctctaaagctcataacaggcacatcactggcgtaacaataacaaatgacgggaaactttcaattggccgctcccggaaacggatgatctcaagcttaattcatcagttcactctgaagaagatagatagctgcgacttttcttacctgcagggcctgttaagctttgcctcccacattgagccttctttcatcttctctatgaagagtaagtatggtgatgagattattacccagatcattaagggtgactttagttga

SEQ ID NO: 11376 - RNA, 987 nt, synthetic construct
  source 1..987: mol_type = other RNA
atgttgcagctgtccgccgcccctttctccctttctcgtgccatgttcaagttgtatttcaagctggcccagaagctggatgtgtctcggcggagaattgatactctggcatctggcgccccaaataagtacaaagtctacacaatacccaagcgcactagtggattacgagtgattgcacatcccagcagagaggtgaaagtctaccagagggcacttattaagatcttgcaggacgttctcagggtacaccattgcagttatgcctataagaagaagctatccataaaggacaatgcgttaaggcatgcttctaatcggtacctcctcaagatggactttaacgactttttcaacagcatcacccctgaagtctttgaggatgcactgaaccacgtggaagtggatttcagtgaagctgaaacgaagctcatcaagcacctagtgttctggaacaaaaacaagtcatttccaccacatcttgttctgtcagtcggtgcccctacctcccccctgatctcaaacttcataatgtatgagttcgataaggctatgtacgacttctgtgaagagaatctgattacctacacccgatatgctgacgatattaccttttctaccaacgttaaggatattctcttcaaggtaccgaataaagtgaataagatcttggaggagaaatttaacggagcgatttccatcaaccaaagtaaaactatcttcagcagtaaagctcacaatagacatattacaggcattacaatcacaaaccagggttcacttagcatcggcaggagccgcaaaagaatgatatcctcgctgatccacaaatttatgatcggcgagatcgactattctgactttaaatacctgcagggcctgctcagcttttcgagccacatcgaacccagctttatttcctcaatgcgcaaaaaatacggggaggggataatcggacaagtgattaaaggggacttcaatgagtga

SEQ ID NO: 11377 - RNA, 963 nt, synthetic construct
  source 1..963: mol_type = other RNA
atgctgaaaatctttctaaagctgcagaacgaactcgcttcttcaaaaaatgacggtgtgctgcccacacgagccagaatcgaaagtttcgcgaggagagctacaaactgctataaggtatatagcattcctaaacgcacgagtggagtgcgggtcattgcacaccctagcaaggaactgaagaattatcagcgggcactgatttcaatccttgagcagcaacttgaaccccattccgcgagctacgcttaccaaaaagggaagtccattaagctcaacgcccagaaacacacgaagaagaaatttctgctaaagatggacttcaacgatttcttcaacagcattaccccacagatattcctcacagaattacgctatcgacggatttttttaagtaaggccgaagagaaattgctgattaacctgttcttttggaataagaccaaaagcgaggacaaaaagctcgtgttatctgtaggcgcaccttcctccccgatgctgtctaacttcattatgtacaggtttgatgagttggttagtaagtacgctaaggagaatagcatcgtctacacccgctacgccgatgaccttaccttctcaactaacattaaaaacgtcctgttctcggttccagaatatatcaaaggaatattgcgcgacctctaccagcactatatcactataaacgactctaaaaccatctttacatccatggcccacaatcggcacgtgaccgggattactataactaataactttgagctgagcatcggaagagagcgtaaacgtctcatttccgccatgatccataagtttaagatcggcgttctgaatgaggatgatctttgttacttgcagggcctgctctcatttgcaataaatatcgagcccaatttcatcaataggctgtctagaaagtatggtaaagagatcgtgcatgtgatcaggaagggcgggttgtga

SEQ ID NO: 11378 - RNA, 957 nt, synthetic construct
  source 1..957: mol_type = other RNA
atggcccagaagctgttcagtaaactgatagacattctgcccttagtgagcgctagccggtcaaagatcgaacgcttttctctgacagcccccaaccggtataaagtctactccattcctaagagaacctccggccgccgaatcatcgcacacccctcaaaagaactgaagatataccaacgagccttgctgtcttctctcgagtacctcttagattctcacgatagcgcttacgcgtataagaaagaccggaacattaaagcaaacgctaaaagacatgttaggaaaaagtacctgctgaagatggatttcaacgatttcttcaattctatcactccagatatgctcttcacccagtttgtaaaagaagaagtcattttctccgaggccgaaaagaggctgctaaagaacctcttgttctggaataaaactaagtcctttgacggaaagatggtgctttccgttggggccccaagcagtcctagcgtgagcaatttcatcatgaaggagttcgatgagtttgtgtatcggtatagtaaggagaagagtatcatctacaccagatatgctgacgaccttacgttcagtaccaataaaaaagacacgctatttgacatgccgaattttatcaagaaggtgcttggcgaggtgtttgagcataaactcacaattaatgagtccaaaaccatttacacatccatggcacataataggcacgtaacaggcgttactctcactaacaagtcgacactctcaattggtcgtgagaagaaacgcttaatctcattgctggtccacaagtacaagataaacgagatcgatgaatccgacttcaactatcttcacggactgctgagcttttcgcatcacattgaacctagctttaccaaaaggttgtctaaaaagtatgggtcagacatactgaaaaatattatcaaggggatctactgcgaatga

SEQ ID NO: 11379 - RNA, 933 nt, synthetic construct
  source 1..933: mol_type = other RNA
atgaggattaagctctttagtaacctgcagacgaaactcaattgtagccgcaaaaaaatcgagactttttctgagaaggctccctataagtataaggtgtacaccatccccaaaaggtcatccggactgagggtgatcgctcaccctagcaaagaactgaaggtgtatcagcgagccctactctcggtactgggggatcacttgatcagccataagagttccttcgcctacaaactcaatacaggaattaaggacaacgcataccagcatatgcacaattcttaccttctcaaacttgactttagtaacttcttcaacagcatcgttcccgatatgctcctggccgcactaaactttcgggggatcgaagtttctgatgccgaactgcgattattgtccaacctgctcttttggaataagacaaaaacgtccgataacaaactagtactgtctgtgggagccccgtcatcacctgcgatatccaactttatcatgtttcggttcgataaagtggtctttaagtattgcaaggagaagtctatcatttacacaagatacgccgatgacttgaccttcagcacaaatataaaggacgcacttttcgagcttccacgttatattaacggcttattgggtagtatgttcgaccaccgcattatgctcaatgaacgcaaaactgtgtttagttctaaggctcacaaccgtcatgtcaccggcattaccatcaccaacgagaataatctgtccgttggccgggctagaaagagaactgtgtccagcctggtccacaaatatagcctgaataagttagaccaattcgagttcgagcagttgcgggggatgctgtcattcatactgcatatcgagccacatttccttcacagactggaaaagaagtacggtaggagcctgctgataaaaattcgctcatga

SEQ ID NO: 11380 - RNA, 984 nt, synthetic construct
  source 1..984: mol_type = other RNA
atgctcctgatctccttgcaggaatttagcctgaccatccggctttataaagcctttgaagacgaactaggtgtaactcggagccgtctcatgaatttcgccaaaactgctcctaagcgatataaagtttacacaatccctaagagaaccagtggatatagagtcatagcgcatcccagcaaatcgctgaaaaagatccagaagttcctggctgggtttttggctgacatcttcattactcacccaaattccttcgcatataagaagggggtgtcaattaaggataatgcttcggtgcatctcggcaccaaatatctgcttaagatggacttctctaactttttcaacagtattaccttcgacctgctggtgtcctcctgcaaagaatgtgaggtgaaaatttcactggcagagctccgcttactcgaggggctgttattttggaacaaaaccaagaccattaacggcgacttggtgctgtcagtgggagcccccaccagtccacttgtttctaacttcgtcatgtacaagtttgatatcttcatctccgactactgcaagatcaacaacattaactacagccgatacgccgatgacatcacattttccactaatgacaagaataagctctttggtgtcacaagggtagtgaaagatatactcagcgagcactactcaaataagataactgttaacaacgtcaagacaacattttctagcaaagcacataaccggcacatcaccggcgtcacattaacgaacgataataagttgagtgtcggcagagagaggaaacgcctgatttctaccctaatccacaagtacgttattaatgacatagagaagcaagatgtgacttatctgcagggaatgctttctttcgccatccacgtggaaccggatttccgcgggaaaatgagcaagaaatacggctctaatgtagtgacggagattctgaaactgagggtggagaatgatgaatga

SEQ ID NO: 11381 - RNA, 960 nt, synthetic construct
  source 1..960: mol_type = other RNA
atgactattaggctgtatcgcgccttcgaggaagactttggtattactagggcgagattgacaacttttgcaaagaccgctccaaagaagtataaggtgtatacaataccgaaacgtagctcgggataccgggtcatcgcccatccttccaaatcactgaaggagaagcaaaaattcctcgtagcctttttgtcagattttttcgtttctcacagcaattccttcgcgtacaagaagggagtgggaatcaaagataatgccaggatgcatcttggcaccaaatatctgctgaaaatggatttcagcgacttcttcaacagcatcacagtcgacctgcttgccctagcatgcgacgagaatggtatcaaagtcagttcggctgaactcaagctgttggaatccctccttttctggaacaagacaaaaactatccggggctcccagaacctcgtcctgtccgttggggcccctacctctcccctagtttccaactttgtgatgtacaagtttgatactttgatgagtgactactgtagtcagaatgagatcaactattcacgatatgctgatgacattacgttcagcaccaataaaaagaatcacctgtttcaggtgacacgcgtagtgaaggatatactgtctgaccactacagtaacaagattacagtgaacaacatcaagactgtgttctctagcaaagcacataataggcacgtgacgggcatcaccatcacaaacaacaataagttatcagtggggcgagagagaaaaagactcatatccaccctcattcataaatacaccataggcagcatcgacatcgatgacacggtctacctgcagggcttactttctttcgctattcacgtggaacccgattttcgggtgaaaatgtctaataagtacgggtttgaggtaattaataccattctgaagctgcgcgttgaaaacgacaaatga

SEQ ID NO: 11382 - RNA, 951 nt, synthetic construct
  source 1..951: mol_type = other RNA
atgaaacttaagctgtacagggctctgtatgaatcactttctataactcgatcttcactcaataggtttgccgagagtgctcctaaaaagtacagagtgtataccatccccaagcggacaagtggccagcgagtgatcgcacatcctagtaagcagcttaaggccgtgcagaaagagctggtgaagatcctagtctttcctctgaagtcccacgagacagcttatgcatacaaaaagggattgagcataaaagacaacgcagaacagcatctcaatacagcctacctattaaaaatggacttcagcgactttttcaattccattactccagcggtcttattcttgatttgcgagaacaacaacataaagtggtcagatgccgaaaagcgcctgctcaagaatctgctgttttggaataagaccaagagctttaatgggaaacttgtgttgagcgttggagccccatcttcccccctcatctccaatttcgtcatgtatgactttgatgtgaagatttccgacttctgtaagaagaacaaaatcaactacactcgttatgccgatgatataacattctcaaccaatgttaaggagatactgttcgaggtcccgaaattagtaaaaacgctgctgaacgagatttacaataacctgatcaccattaacgacctgaagactatcttttcttctaaaaggcacaatcggcacgtcacaggcgtaaccattagcagtgaaaacaaactctccatcggtcggagccgcaagcgcatgatctcatccttgattcacaaattcaagatcaatgtgatctctcaagaagatacgtgctatctccaagggctgctggctttttcgatcagcgtggagcccattttcatcgagagaatgaagaacaaatacaccgagagcgttatccataacattctcaaaattagagtggaaaacgaatga

SEQ ID NO: 11383 - RNA, 942 nt, synthetic construct
  source 1..942: mol_type = other RNA
atgcaactgcatctctataagaatattacggagatgttgtcttggagccgaagtcagataacaagctttgcccgtaacgcgcctaataagtacaaagtgtacactattccgaaaagatcttctgggcagagactgattgctcatccatctaggaagttgaaacttctgcagcgggcgctagtggagattctgtcaaacaatctgatcccacatgagtgcgcttttgcctaccgcaacagtatttccattaaggaaaacgcacagtatcatctcgacaaccagtatctgttaaagatggacttctcggatttctttaactccataacaccagacatcttgttctccgtctgcgaaatcaaagaaatcacgctgagcgaagccgagaagtggcttctccaacgggcctttttttggaataagacaaagagtcacgatggcaagctcgttttatctgtcggtgcccccagcagccccctaatctccaatttcatcatgtatccgttcgatgaggctataaacctgtattgtacccagcacagtatatactatacacgatacgctgacgacctgaccttctccaccaagattaaaaacaccctgttcaatatacccgatatcgttaaatgggccctgaaaaagcactacgcaagtcagattagcatcaatgagtttaagactgtgttctcatcaaaagcacacaatcggcacatcactggcataactatcaccaacgataataagctttccgtaggaagggaaagaaagaggatgatcagctcacttatccacaagtataaaattgggattgtgaacgaagaggagaaaacctacttgcaaggactcctctcattctctttccatattgaacccatgtttaaaatccgcatgtccaagaaatacagccctgagatcattaacgagatcctgaagtttcgcaaatga

SEQ ID NO: 11384 - RNA, 942 nt, synthetic construct
  source 1..942: mol_type = other RNA
atgcagctgcatctctatagatcaatcatcgacaagttatcctggtcacggagtaggattacgagcttcgcacggaatgcaccaaataagtacaaggtgtatactatccctaagaggagttctggtcagcgccttatagctcacccatctaagaaccttaagctcatccaaaagaaatggattgagatactgtccgacatatttgtctcccatcaaagcgcctttgcctacaaagataacatggggatcagggagaatgcccagcatcatatgaaaaaccagtatctgctgaagatggacttcaccgactttttcaattccatcacaccggaaattttcttttctatttgcctgaagaaggaaataatcatgtccaacgccgaaaaatggctgctgcagcagaccctgttttggaacaaaaccaaatcttatgacggcaagttggtgttgagcgtcggagcacctagctcacctctcgttagcaattttgtgatgttccccttcgacgagatcattagcgagtattgtaacagtcaccacattaaatactctcgatacgctgatgacctgaccttctcgacagatgagaaaaattgcctattcacgatccccaacttggtgaaaagtgctcttcagaaaatttacgcctaccagatctctatcaacgagttcaaaactatcttttcctcaaaggcccataatcgtcacatcacaggaattacaataaccaacgataatgatctcagcattggcagagggaggaagcgcatgatttccagtctcattcacagataccgaataggtgtaatggacgatattgaaaaggctcacctgcaaggctttctggcgttctcgttctatattgaacccttatttaagactcggatgatcaagaaatactcaagcgaggttatcactgatatcctaaaatttcgcaagtga

SEQ ID NO: 11385 - RNA, 1143 nt, synthetic construct
  source 1..1143: mol_type = other RNA
atgtcctcccgggcccttagacaaacacaaatctactggggcaccataccagtggcggttaagaacttcccccgagctggcgttcggacaagtcaccctgatcgggggaaattctccaccgccagctttagcaaaggtgaaagtccggtgttgtcctttcagtacagacacttttatctcagaatctgcacggatatgcaccagaagttgtactctaaactggtagacaaacttgacagtactaggagtactatcaacagcttttcaaaaaacgcgcctaataagtacaaagtctacactatccctaaacggacctctgggcatagggttatcgcacatcccagtaaggagctgaaaaagtatcagagggccctggtcagtatcctgtctgatattcttaacatacacccaacctcttatgcatacagaacaggcttttcgatcaaggataatgcatataagcacaggaagaatcagtacctgctgaagatggacttttccgacttcttcaacagcatagagccaaagctgctgttctttgtgttcgacgaatgtgaaattcatttctcatcatctgagcttcgcctgctggaaaagctgctcttctggaacaagaataagtccgtggacgcaaaattggcccttagcgtaggagctccaagctcacccctcatttcgaatttcatcatgtgtatcttcgacgagaaaattaactacttttgcgagaaaaacggcataacttatacgcgatacgctgatgatctcaccttttcaagcaacaagaagaatatcctgttcaatgtgcccaatattgtcaagaacctactcaaggaggagtataaaaatctcatcttagtgaacgacctgaaaacatgtttttctagcaaggcccataaccgtcacatcaccggggtgacaatcaataatgacgctgagttgtccattggaagagatcgcaaaaggttaatcagcgccatgattaataactataagaagggcattctcctgtccgaggattttgactatttacgcggaatcttgtcattcgccaataacattgaacctgatttcatttctcgcatgaaacgtaaatacggtaaatgcattctgctaaagataaagaaggggctaccgaacgaatga

SEQ ID NO: 11386 - RNA, 948 nt, synthetic construct
  source 1..948: mol_type = other RNA
atgcgccagcagttatacagcaagctccaaatcaagctggggcgcagccgaagtagcatcaagagctttgcaaacaatgctcctaacaaatataaggtctacaccatacctaagcggacctccggcagaagagtaattgcacatccttcaaaacttctgaaagactatcagcgggcactgacagatatcctcaagccagctctaaccgtgcaccccgctgccttcgcctaccgtactggatttagcataaaagataacgctcagatgcataagaaccatcagtacttgttgaagatggacttcaatgacttctttaactccattgatccagagctgttcgaagatattctcattaggcggggtattaggtttagtaacgccgagatgtcactgctaacccgtctgcttttctggaataagactaaaagtcacgacgaaaaactcgtcttgtcagtgggggcaccgagctcccccctgatatctaacttcgtgatgtccatcttcgatgccaaaatgaaactgcattgcctcaagcggcagatcacatacacgagatacgctgacgacctcacgttttcgacaaataaaaaagacgtgctgtttaacatcccccagttggtgaaagacacactcactaaggattactcacacaagattctgatcaacgagcttaagaccatctttgcctctaaggcccacaatcgccacatcactggagtgactatcaataatgcctctgagctgtccatagggagagaacgaaagaggttgatcagtgcgttagtccataagtatacagttaagcaactggataccgacgacattcactatgttcagggccttttaagctttgcgcaaaatattgaaccacacttcgtagatcgcctttctaagaaatatggcttcgatgttctgtctaaactgattagggacaaaggtgatgagtga

SEQ ID NO: 11387 - RNA, 945 nt, synthetic construct
  source 1..945: mol_type = other RNA
atgcacaataaaatattctccaagcttcaggcctcaacaagtagagcaaggagcaccatcgaatcttttagccgtaatgccccgaataagtataaggtgtactccatacccaaaagaacctccggttctcgaaccattgcccacccctctaaagaattgaaatattaccagagggcactagctatcattctcaggcccattctgacagtgcacatccgggcttacgcctacagaaccgggctttcaattaaagacaatgccgcgatacacgccaagaataagtacttgctcaagatggactttaacgacttctttaattccatcacaccagtaatgtttttcaaaatatgcgacaagcgtaagatcaagttcagcgctagcgaacaacgcttattaactagaatgctgttctggaacaaaagtcgatcagctaacgagaaattggtgctgagcgtgggagcccctacgagtcctctggtcagcaacttcacaatgagtctattcgattttctgctccacgatgaatgtctttctcgcggcatcacttattctaggtacgcagatgatatcactttttccaccaaccacaagggtattctgtttgatatccctctgtatgttaaagctgtccttgcggagcggtatgactacggaataacaattaacgagtcaaaaaccgtgttcagttcgaaggcccataatcggcatattacggggatcactattaacaacgagggcaagttatctctgggccgcgagagaaagcgcgttatctcaagcctcgtccatcaatttaaactgaacaagctcgcaatcgaggacttcgcatacttgcaggggctgctggccttcgcgcagcatattgagccagcttttatcatccggctgaaaaacaagtatggcgaatccactgtgtccaacattaataagggactcaatatctga

SEQ ID NO: 11388 - RNA, 954 nt, synthetic construct
  source 1..954: mol_type = other RNA
atgcaccataagatctactctaagctgcagctgaaattgaagaccagccggtcctccattgataactttgccttgaatagccccaacaagtacaaggtttatactattccaaagcggacggcaggttttagagtcatcgctcatcccagtagagagttgaagtgttatcagcgccatcttgttgagattctcacaccccacctgaagaatcacagtagcagtatcgcctatacaaaagagaagagcattcgtgaaaatgccctgatacatgtgaggaacgactacttactcaaaatggactttaatgacttcttcaacagcatcaccccagaactgttcttccacatttgcagagtgcaggaggtattcttctcgcaagccgaggagaggctgctgaccaaactgctattttggtccaagtctaagtccaaagatgagcatctcgtgctgagtgttggggcaccttcaagtcctctgattagcaattttacgatgtacacattcgacgaacttataacatcaatatgccacgagaatggcatctcatacaccaggtacgcggatgatattaccttctccacaaaccgaaagaacattctcttttctatcccgtctttggtgaaatccattctcctgaacaagtacgagtataagatcactatcaatgactcaaagactgtattctcatccaaggctcacaatcgccacgtcaccggcatcactcttaacaacgaagggcagttatctctcgggcggaaccgtaaaaggatgcttagctccatgattcacaaagaaaaaatcggttctctgagcttagacgattttacttatatgcgcggactaatctcgtttgcaaaacatatagaacctgcttttatcttccgaatgagagtgaaatatggaaacgaaaccgtggataacataatcaaaggcgtccggaatgtgacaaattga

SEQ ID NO: 11389 - RNA, 948 nt, synthetic construct
  source 1..948: mol_type = other RNA
atgtatcaaaagctctacagtaaactgcagaacgagcttaagcggtcccgttctagcatcgagtccttcagtaaaacagcacccaacaggtataaagtttacacgatacctaaacggactagcggacaccgcgtcattgctcatcctagcagagaattaaaactttttcagaaagccctgaacaccttactgctggatacattgaagacgcatttctgttcggtggcgtacgccaagggcctctcgataaaagataatgcccttaggcacgctggcaatagctatctcctgaagttggacttcaatgacttcttcaactcaattgagcctgacctgttttttgttatctgtgatctgcaggaaatcaatttctccaacgccgagaaacggctcctgacacagctctgcttctggaacaaaaccaagagcaacaatactaagctggttctctctgtgggtgctcccagctctcccatgatttcaaacttcgtgatgaccgtatttgatgagctgatgtataagcattgccgagtccaaggcattacctatacaaggtacgccgatgacttaacattcagcaccaataaaaagaacatccttttcgacatcccaacttttgtggaagcggtcctagtggcatattacgcctccaagatttctatcaatccggagaagacatgctactcctcaaaaaaacacaataggcatgtgactggaattaccatctctaatactggggaactcagtttgggccgcgagagaaaaagaatgatctccgcaatgctgcacaacttcaaggtagggcgattggattcagatgactacgcatacctgcagggactactgagttttgctcgccacatcgaaccaaagtttgtggacaagtttagaaagaagtatggggacggcctgattgacaccataaccaagggtaactttaatgagtga

SEQ ID NO: 11390 - RNA, 963 nt, synthetic construct
  source 1..963: mol_type = other RNA
atgagactccacttgtatgctaaactcacagaaattcaatcacgcaataggaggcagatcgacaacttcctgtataacgccccaaaccgctacaaggtctattcgattcctaagcgcaatgggggggagcgggtaattgcacagccttctggcgaattgaaggattttcagcacaacctgatcaatatcttagagagcaatttcctcatacattccagtgctgtggcgtataagaagggattcggcattaaacataacgcagctatgcatagtggtaatccgtacttgcttaagctcgacttcactgacttttttaacagtataacgccagagctcttttttatggcgtgcgtgtggaatagatatgatctgtcaacagccgagaagcgggtctttacaaaaggactcttttggaataaagccaaatcccagtccggccgtctttctctgagcgtgggtgccccctcctctcccttagtttccaatatcatcatgtacctgttcgatgaggaattttctagacgatgtgaaaagaggggcatcgtgtacacgaggtacgctgacgacttgactttctcaacccaccataaaaacagcctgtttagcctgcctgacgaggttagggtgttcctgaacaaaaactaccataaccggattaccctaaacgagaggaagactattttcacatccagagcccacaatagacacgtaaccggcgtcacccttactactcaaggagggctcagtgtggggcgcgaacggaagcgattcataagctctctgatccacaagtacaccttgggtatccttgagcccgatatggcatactatctacagggcctgttaagcttcgccatttacatagagcccgaattccggacccgactgagcaaaaaatattcacaggaaacaatcctggagctgctgaagcttcgtaaggaggatggaaccgagaatgaatga

SEQ ID NO: 11391 - RNA, 987 nt, synthetic construct
  source 1..987: mol_type = other RNA
atgcggttaaacctctacgctaaactgaccgagatacaatcaagaaatcgaagacagattgacagttttttgttcaatgcccccaatcgatataaggtctatagcattcccaagaggaatgggggcgaacgcattatagcccatcctagttcagaattgaagtcctttcagcactctctaattgacatcctggaaagcaatttccttattcacaaatccgccgtagcgtataaaaaaggctggggaatcaagcacaatgcggcactccacagtaacaacccctacattctcaagctggacttcacagatttcttcaactctatcaccccggacctgctcctgatggcctgtgcctggaatggatacacgctgagcatcgccgaggagagagtgttaactaagagtctgttctggaacaaagctaagtcacaatcaggtaggttgtccctgagtgtgggagcacctagctctcctctcatctctaacatagtgatgtacttgtttgatgagacattctcatccttatgcgaacagcgggagattatttacagcagatacgcagacgatctgacctttagcactcagcataaaaatatcctgttttccctgccagatgaggttaggacctttcttaacaagaactatcacaaccgtatcacacttaatgagaggaagacagtgttcacctctcgcgctcacaaccgccatatcacagggatcacccttacgactaaaggcaccctcagcgtcggccgcgagagaaaacggtttatttcgagcctgattcataagtacaagctaggccttctggaaccagaaatgacttattacttgcaggggctactctcctttgctatctatattgaaccagagttccgtacacggatgtccaagaaatactctcaggagataatcctggagatcatcaagctgaggaaagaagatggtacctacaaaaagctcaagatctatcagactcatatatga

SEQ ID NO: 11392 - RNA, 963 nt, synthetic construct
  source 1..963: mol_type = other RNA
atgaggctgaatctgtatgcgaaactcatagagatacagagccgctctcggcgcgcaatcgactcattcctctacaatgcacccaaccgatacaaagtttatagtatacccaagaggaacggcggagagagaatcatcgctcatccctctagagaactcaagaccttccaatacgatctgatcaggattttagaacctcactttcgcattcatacatcagctgtcgcttataagaagggcagtggcattaaacagaatgccgccatgcactcccacaacccatacattctcaagatggactttaccgacttttttaacagtattactccggacctgttgttcatggcatgtgcttggaatgaatgcaatctctctgcagctgaacagcgcgtgttgactaagggcctgttttggaataaggccaagtcccagagcggacggctctccctttctgtcggtgccccaagtagccctttcattagcaacatcatcatgttcctgtttgacgagacgttttcgagattgtgcgaacagcgggggatagtttatagcagatatgccgatgacctaacattcagcactcaccataaaaacatcctgttcacgctgcccgatgaggtacgcatcttcctaaacaagaactatcacaatcgtattactctgaacgagcgtaaaacggtgtttacctctagggcccacaatcggcatattaccggcatcaccttgacaactcagggttcattaagcgtggggcgagagcgaaaaaggttcatctcctcccttattcataagtacacactgggaatcttagaacctgagatgacttactatcttcaagggcttctgtcatttgcgatccacatagaaccagagttcaaaaccaggatgatcaacaaatactccaccgatgccgtgatggagattatcacactgcggaaaaaggatgagacatacagaacctga

SEQ ID NO: 11393 - RNA, 966 nt, synthetic construct
  source 1..966: mol_type = other RNA
atgaggttaaacctgtacgcaaaactcgtcaagattcagccgcgcaatagacgccaaattgactctttcctgttcaacgcccccaatcgctacaaggtctataccattcctaagcggaacgggggcgagcggattattgcgcaccccagcagagagttgaagacattccagtacggtctgataactatactggagactcacttcaggatccacgaatctgccgtggcgtataagaagggcctcggaatcaaacagaacgccacactgcatagcaacaatccatatatcctgaagatggatttttcggatttcttcaattctatcacccccgacctgctgttcatggcctgtgaatggaatgattatgaactgtccagcgctgagaaaagggtgttgacaaaagggcttttttggaacaaagctaagaaccagtccggacggttgagtctctcagttggcgctcctagctccccactgatcagcaacgtgataatgtatctctttgacgactcctttaccaacttttgccagcaacgcgagataacatattcacggtacgcagatgatctcacttttagcacccaccacaagaacgccctatttgatcttccaaatgaagtgcgtcatttccttaataaggagtaccaaaatcgtattacgctgaatgagagaaagaccgtattcacctcacgagctcacaatcgccatatcactggagtgactttaaccactcagggtagtctgtctatcgggcgagagcgaaaaaggttcatctcctccctcattcataagtacaaattaggcctcctggaccctgacacatcatattacctgcagggcttgcttagttttgccatctacatcgaacccgactttagagttaggatgtctaaaaagtacagtacaaacaccgtcacggaaattatcaaactaagaaaagaagacgaggcataccggaagcagtga

SEQ ID NO: 11394 - RNA, 966 nt, synthetic construct
  source 1..966: mol_type = other RNA
atgcggcttaacctctacgcgaaactgatcgagattcagcctaggtcacggaggcagattgaccgcttcctggccaacgcacccaataaatacaaggtctacaccatccctaagcgcgatattggtgagagaattatcgctcagcccagtcgtgaactcaagaaattccagcactatatcataagcatcctcgaatccttgttcgaaatccacacctccgcaatcgcttataggaagggcacggggattaagcagaatgctaatatgcattcagccaacccgtacatacttaagatggacttcagcaattttttcaactcgattactcccgacttatttttcctggcgtgtaagtggaacaactattctctctccgccgcagaggagcggttattgactaaggctcttttttggaataagtctaaaacacaggatgggagactggccctgtccattggcgctccaagtagcccactcgtaagcaatataatcatgtatctgttcgatgaggagttcaacaccctgtgcaaagacaatggtatcgtctactctcgatatgcagacgatctgacgttcagcacctctcacaaaaacctgctgttctccctaccagacaaagttagggcctttctgtttaagcattataacaatcggatcactctgaacgaaagaaaaacagtgtttacatcaaaggcccacaacagacacattacaggagtgaccctaactaatgagggcacactgagtgttgggagggagcgcaaacgattaatctctagcctggtgcataagtacaagctaggccttttggaacctgatatggtgtactatctccaaggattgctttcatttgcatcctacattgagcccaattttcgctttcggctggctagaaagtacagtgccgaaaccatcactaaactcataaagttgcgtaaagccgatggaaagttcaagaaacaatga

SEQ ID NO: 11395 - RNA, 963 nt, synthetic construct
  source 1..963: mol_type = other RNA
atgcgtctgaacttgtacactaagctggtgaaaattcagccccgaaatcgtcgacaaatagactctttcctgtataacgctccgaacagatacaaagtgtacagtatcccaaaacggaatggcggcgagcgaattatagcacacccctcccgcgagctgaaaaatttccagtacaacttgatagacatcctggaacctttactcaagatccatcctaatgccctagcgtacaggaagggactaggtataaagaaaaatgccagcttgcacgcccagaattcgtacatcttaaaactcgacttctccgacttttttaattcaattacccccgatctgcttttcaccgcatgtactaagaatgaatatgaactgagttccgcagaaaaaagggtcctgacaaagggactcttctggaacaaggctaagtcacagtcagccagactctccctttctgtaggggccccaagctctcctctgatctccaacattatcatgtactattttgacgagacgttcacggatatctgcaaccagagggagatagtgtatacaaggtatgccgacgacttgacctttagcaccaataagaagaacatcctctttaatttgcccgatgagattcgcttctttctgaacaaggagtacaaaaacctcattacactgaacgagcggaagaccgtcttcacttctagagctcataaccggcacattaccgggattacaatcacaactgagggtagcctaagtgttggccgggaacgcaaaaggctgattagcagcctgatccacagatacaccctggattctctgtcaccagatatgacttattacctccaagggttacttagttttgctatctatatcgaacctgacttccgggatagaatgtccaaaaagtatagctcgcatatcatcaccaagcttattaaacttcgcaaggaggatggaacatactgcgaatga

SEQ ID NO: 11396 - RNA, 963 nt, synthetic construct
  source 1..963: mol_type = other RNA
atgcatctgaatttatacgccaagcttgatggagtgcagtcgctcacgagaaagcaaatcgattcattcctggccaatgctcctgaccggtataaagtctactctattcccaaacggaacggaggtgagaggataatagcgcaccctgcaaagcgattaaagcagtttcagtaccacattgtagacattatggaagaagtttgtgagatccatccctgcgcaatggcctatagcaagggcaaaagcatcaaagagaatgcactgagccatgccgataaccagtatatcttgaagcttgacttttccgatttcttcaactctatcacaccagagatgctcttcaaagctctgaccgacaataacctgaacgttactaaagcagaagaacgcgccttgtctaagtccctgttctggaataagtccaaaaccgtgaacagtcgactggccctatcagtgggcgcaccttcaagtcccctcatcagcaatattgtgatgtactcctttgacgctttcttcgccaacttttgcaagcagcacggcatgcactttactaggtatgctgatgatttgaccttctccacaaatattaagggggttttgttccgtattcccgacatggtccggaagtatctcaacgagtactacaaaaacaacatcacactaaatgagaggaagactgtgtttacctccaaggcgcacaacagaagagtcacggggataactattacaccgcaaggtaccctgagcctgggcagagaacgcaaaaggctgatcagtgtgctgatccacaaatatacacttgggatcctcgaatcagacaccttaagctatctccagggaatgcttgcctttgctttccatatagagccagtgttttacgagtctatgaaacgcaagtacagttctgaaaccatttacaatctgatgccaatccggaagaaaaatgtagagtcgactagctga

SEQ ID NO: 11397 - RNA, 951 nt, synthetic construct
  source 1..951: mol_type = other RNA
atgaagctgcacttatatgcgaagctcaccaaagatctggacaagtcaagaagcgccgtagagcggtatatctataatgcacccatgaagtataaggtgtacactattcccaagaggacatcaggacagcgagtgatcgcgcatccagctaggaaacttaaggtgtttcagagggctctaattaaggtcattgagccacactttaatttacacataaaggccatggcataccgcaatgggatcgggatcaagcacaatgctgccatacatcagaacaataactacctgctgaaactcgacttcaacgacttctttaattcaattactcctgacctcctgtttacacacttcctcaagaaagagattttgttgtccgatgccgaaaagaaactgctgactaacacctttttctggaacaagcctaaaaaaaaggacggcaagctagtgctgtccgtcggagccccgagtagtccattcatttctaacttgatcctgttccctttcgatgagctgatcgacgactattgctcgaaaaaaaacattagctactctcggtacgccgacgatctgaccttcagcacctccgagaagaacatcctatttcagttgcccagccttgtcaaacggcatctgtcgagcatttacaagaacaaaatcaccattaacgagttcaaaaccgtgttttcttccaaagcacataatagacatgttacaggcgttacgatcacaaacaccggggagctgagcattggtcgtgaaagaaaacgcttgatcagctccttaatacacaagtttaagatcggtgagctcaatcttgatcttactaggtatctgcaaggacttctgtctttcgcttcagatatagagcccagtttcaagagtcgaatggaactcaagtactctctctccacgatcgaaaaaatcatagaatttcgcggcgaaaatgaatga

SEQ ID NO: 11398 - RNA, 963 nt, synthetic construct
  source 1..963: mol_type = other RNA
atgaagctgcacctgtatgccgagctgacgaagaaattgaataggtcacgcaattctgttgagcgattcatcagcaacgctccgatgaaatacaaggtctacaccatccccaaaagaacatccgggcagcgcgttatcgcacaccctgccaaaaaattaaaggtgctgcaaagagcattggttgccgtcctccagccacacttttctattcatgacaaagccatggcgtataggaaaggccttgggataaaacaaaacgccacattacatcagaagaatgactacctgctgaagctcgatttcaatgattttttcaactcgatcacacccgaaatttttattaagtactgcacccagaaggagattgaactgagtgacgctgaaaagaaactcctgatcaagacattcttttggaataaaacgaagaagactgatggaaaacttgtattgtcagtgggcgcaccaagtagccccttcctcagtaacgtgctgatgttcggatttgacgagttcatcgaaaactactgttcccagaaaaatataagctatagtcggtacgccgatgacctcaccttctctacttcagataaaaatgtcctcttccacatccctaagttagtgaaaacccaacttgggctgatgtttttcaaccagattaccatcaacgaatttaagaccgtgttttcctccaaggctcacaataggcacgtaactggcgtgacactgaacaacaatggtgaactatctattggccgcggccgaaagagattgataagctcccttatccataagttcatgcacggtgagctagacattgagctgactcgtcacctgcagggactccttagctttgcttccgatattgaacctatattcaagtcacggatggagattaagtattctcataagctgatcgagagcatcgtgaaatttcggggggaacatgagcaggagaaccagtga

SEQ ID NO: 11399 - RNA, 960 nt, synthetic construct
  source 1..960: mol_type = other RNA
atgaagttaaatctctatgctaagctcacagacaaactcggccggagccgaaatactgttgaacgctacatctcaaatgggcctatgaagtataaagtgtacaccattccgaaacgtacctccggacaacgagtgattgcacaccctgccaagaagcttaaggtgatacagagggccctagtcagcgttctggagccccacttgaaaatccatcataaggctatggcttataggaaaggcctgggaataaaggataacgccgtcctgcataaagagaacgagtatttgctcaagctggatttttcggactttttcaattccattacacccgaactgttcatcaactactgcatgcagaatgatattacactttctactgcggagaagaacctgctgatcaaaacctttttctggaataagacgaagaaaaacgatggaaagctggttctaagtgtgggtgcaccaagctctccattcatctctaacacaatcatgtacttctttgacgaggccatcgacaagtactgtatcactaaaaacattacctactccagatatgccgacgacttaacgttctccactcctgataagaatgtgcttttccatattcccacactggtaaaaaaacagctcgggattatcttcagtaaccagatcaccattaacgctttcaagaccattttttcatcaaaagcccacaaccggcacgtaactggcgtcacaatcaataacgatggcgagatatccattggtcgcgagagaaaaagattgatatcaagcctgatacacaagtttatcttgggccagctggacatcgaacacattcgctatttacagggactgcttagctttgcaaccgacattgaacccaaatttaaaagtcggatgatatccaagtactctaatcaggtgatcgagaacctcatcaagttcagggggagcgatgaacaaaccaattga

SEQ ID NO: 11400 - RNA, 951 nt, synthetic construct
  source 1..951: mol_type = other RNA
atgaaactgcacttgttttctaacctggtgaaagagactaaattctccagaaacgcgattgagcggtacatatataatgcacctatgaagtacaaggtgtacaccatccccaagaggtcttccgggcaacgggttattgctcatcccgccaagaaattgaaaatcctccagagggctctggtaagtatcctaatgccttttcttaatatccacgaccgcgcaatggcttaccgaaagggtattggaataaaacataatgcgaccatgcacaaaaataacgagtacattctgaagattgacttcaacgacttcttcaatagtattacgccagatatgatactggaacggttttctaagaacaacatcgaattatctagcgcagagaagaaacttatcatcaagtgctttttctggaacaaaacgaaaagaattgacgggaagctcgtgctatcagtaggcgccccctcgtccccgtttctgagtaatgttctgatgtttgatttcgatgagttctttagcaactattgcaaagaaaacagcatcgtgtactctaggtatgcagacgacatcacatttagcagctcaaaaaagaatgtcctcttcattattcctgatcttgtcaagaaacagttggccatactgttcaagaacaagatcaccataaatgagtttaagaccatcttctcatccaaagcccacaatagacatgtgaccggcgtgacaataaacaataacggtgaactctctctcggacgcgagcgaaagcgcttcattagcgccctgattcacaagtttactttgaaaacactgtcccttgatcaggcccaacagttacagggcatgatttcctttgctagtgatatcgagccatcgttccgtctgagaatggaaaagaagtattcagagggaatcatctgtaagatcgtcaagttcagggggagctatgaatga

SEQ ID NO: 11401 - RNA, 948 nt, synthetic construct
  source 1..948: mol_type = other RNA
atgtctgtacacctctacaagcgccttagcgaggctatggcaacccctcggaacactattgatagctatatacgtaacgccccgatgaaatacaaagtgtataccattcccaaacgaacatctggtcaacgggtaatcgcccacccagcgatacgcctgaaaaagattcagagggccctggtcgtgctgctccaggagtacatgttcatccaccaaaaagccatggcatacaaaacagggtctagcataaagaaaaatgccgaactacatagaaccaatgactacattttgaagatcgatttcaacgactttttcaatagtatcacaccagacctctttgttaattactgtaataacctagggctgaaactgaccagtgctgagatgaacgcactgattaagatcctcttttggaacaaaagcaagaaaaatgatggcaaactggtcctgtctgtgggcgctccttcctcacctttcatctccaatgtgatactttacagtttcgatgaaatcgtggacaattattgcaacgaacggaacattgtttactcaagatatgcggatgacttgtcgttctccactaaagagaagaacattttattctcagtgcccgagttcattaagaagcagctcaacaagctgtttagcaatgctatcaccatcaatgaactgaagactacgttttccagtaaagcccacaaccgccatataacgggagtcacaatcgacaacgatggaagactttcaatcgggagggaaaggaagaggtatatctctagcctcattcataagttttccttgaagaagcttgagtttaacgatgctaagcacttgcagggcctgttcgccttcgcctgcaatattgaaccccgatttaaggcaagaatggagaagaagtattccaaactgatcattgacgacttaatcaagctcaaagagttactgtga

SEQ ID NO: 11402 - RNA, 954 nt, synthetic construct
  source 1..954: mol_type = other RNA
atgcagatttacgagtttctttgtaaggaactgctggtcagcaaacaggaaattaatgagtttgtgctgagcgcaccaaaaaagtacaagcggtacacaatccccaaaaggacttctgggaaacgtgtgatcgcacagcctgcgaagaggctcaaagactatcagcgcgctcttatcaaactgctggagcagatattgcccgttcatgacgcagccttcgcttacaagaagaacatcggtatcaaggagaatgcccggaggcaccagaaatccagttacctactgaaaatggacttcagagactttttttactccattactccggatctgttctttgctatactgaagaagctagacatagtattcagccctcaggattgctatctcttaacacaggtgttgttcttcaatccaagcaagaagaccggaggtaaactgatcatgtctattggcgcgccttcgtctccctttatttccaactcaatcatgttcttcttcgacaaggctatttatgagtcttgtctgaagaagggcatatgctacaccagatacgccgatgatttgaccttttcctccaacaagaaaaacgccttatttgagttacccgtcctggtaaagcaactcctcgtcgagcatttttgcggctgcatcacgattaacgaaagtaaaacggtgttctcaagcaagagccataacaggcacgtgaccggaatcacaattaccaacgacgatagattgtcaattggaagacagcgaaaacgatatatcagtagtctgattcacaaattctctctgaatcaacttgccgacgaagatatcaattatcttcaagggctcctcgcctttgcttgtcacatcgaaccaaatttcaaacaacgcatgatcgacaagtattccgcagaaacaatctcacagatagtgacttgtgttcgccggggggatgagaaggcctga

SEQ ID NO: 11403 - RNA, 942 nt, synthetic construct
  source 1..942: mol_type = other RNA
atgcagatatacgatttcctctgtaaggagatatcggtatcaaaacaagagatttatgacttcgtgagttccgctcccaagatgtacaaagtttataccattcctaagcggactagtggcaaacgcgtcatcgcccaacccgcgaagagattgaaagactaccagagagccttggtcaaactgctagagaaagtcctgccagtgcatgatgccgcctttgcatacaagaagcaagtgggaatcaaagagaacgcaatgaaacaccagaagtcttcatatctgctgaagatggatttccagaacttcttttatagcattacaccgaccctgttcttcagcattctttataagctgaacatagatctgtcaagtgaagaccgttacctccttacgcagattctattcttcaatccttccaagaaaacaggaggtaagctggttctctccataggggctccatcttcccccttcatcagcaatagcattatgtatttcttcgacatgtccatctatgagtactgtatcaacaataacatcaactacacgcggtatgcagacgacctcacatttagttgccagaagaaggacatcctctttgccgtgcctacacatgtaaaacagcttttggttgaatactttgatggcaggatcaccatcaacgaaagcaaaactgtgttttcttcgaagtctcacaataggcacgtgaccggtgtgacccttactaatgataacagactgtccatcgggcgacagaaaaagcggtacattagcagcttaatccatcagttttctctcaatcagctggccgacgaagatatctcatacttacaaggcctgttggcatttgcttgccacattgagcccaattttaagcagcgaatgattgacaaatactctgcggaaataattgctaagatcatcactcgcaagaggaccctgtga

SEQ ID NO: 11404 - RNA, 960 nt, synthetic construct
  source 1..960: mol_type = other RNA
atgcaactctatcagttcctctctaccgagctttcaacatccaagcaggagattgacaaattcattctctcagcacctaagatgtacaagatctacactattcccaagaggacaagcggaaaacgaactatcgcacatccagctaaaaaactgaaggaataccaaagaaccctgattagtctgctcgaacagtctctgccagtccacgatgtcgccttcgcctataaaaagaacacaggcatcaagcagaacgctgcgcagcatcagcaatccaaatatctgctgaaaatggattttcaggatttctttcactcgatcaaacccaaactttttctgtccattctcgaaaagctcaaggtggacctgactcaagaagataggtacctgttaagccagatcttgttctggaatcccagcaaaagaagtgggggcaagctgatattatcaattggtgcaccttcctctccgtttatttccaacgttatcatgttcttcttcgaccaggctttgtatactgagtgccatcggcagaatattacctacaccaggtacgccgatgacataagtttttctaccaatacgaagaacactctttttgagatccctcacctcgtaaaaaagctgttggtgaaccactttaatggagccatcaccgtgaatgagtctaagacagtttttagctctaaagcccataatcgtcatattaccgggataacgctgaccaacgagaataaattgtcgatcgggagacagaagaaacgctacatcagtagcctaatacaccagtttagcttaggacaactgccaacagaagacatccagtatctacaaggcctgcttgctttcgcctgtcacatagagcctgagttcaagcagaagatgatcaagaagtatagcttcgaaacaatcaaccagatctccacttcagtggaaggtgaggacgagcccattcgccggtga

SEQ ID NO: 11405 - RNA, 951 nt, synthetic construct
  source 1..951: mol_type = other RNA
atgcacatatgccaggccttgtgcgctgagctcaagcttgacaaaactcaggtgattgattttgcattagagtccccaaaaatgtacaaggtatacgccatcccgaaaagaacttctggcaaacgtattatcgctcacccagcaaagcgcgttaaggtggcccagcacgctcttttgaggcagatgaaggttatcttccccattcaccattgcgcctttgcgtatcaggagggtttaagcattaagctgaatgcccaggagcattgtcataaccagtatcttctgaagatggacttccagaatttctttaactccatcacagcgccactgttcgttcggatgctagacaaactctccattaagatctcgccccaagatacctttctgatcgaacatctcgcattttggtgtcctagtaaggaaactggtgggaaacggatcttgtccgtgggagcccccagctcaccttttatatcaaactggataatgtacgggttcgacaaaatcgtgttcgaactgtgtcggaaagaaaacattgtgtacacaaggtatgccgacgatttgaccttcagtaccaataagaaaaacgtcctctacaagatccctaagcagatcaagtctattcttcgcgagcaactggatggcggcatcgtcataaatgatgtgaagacgatattcaccagtaaaaagcacaacagacatgtaacaggcattacgttaactaatcagggactgctgtctatcgggagaaagaggaaacgacacatctccctcctgctgcacaagttttcactcgggctgctgggaaccgaggatattctcagcctgaggggccttctaacctttgctaaccacatcgaaagcgacttcaaagcacgaatgacaaagaaatacagctctcaagtgattcaacagctgttggcttatgaccgcgtccacaatcatgagtga

SEQ ID NO: 11406 - RNA, 951 nt, synthetic construct
  source 1..951: mol_type = other RNA
atgctcatctgccagagcctttgcacggagctgaatctcaaccaaacacagttgatagattttgcaattgaagctcccaagatgtacaaagtgtatgccataccaaagcgaacctctggcaagcgtattatcgctcatcccgcaaaaagagtcaagattgcccaacgggccttactcacacagatggaaactatttttcctatccacaggtgcgccttcgcatatcagcaggggctgtccatcaagctgaacgcccagcagcattgtgacaaccaattcctgctcaaaatggacttccagaacttctttaattccataaccgcgcctctgtttgtgtcaatgcttgataaactctctatcaacatctccagccaggatctgttcttgatcgaacatctggctttttggtgtccaagcaaagaaaccggaggaaaaaggatcctgtcaattggcgcgcccattagtccgttcataagcaattggataatgtacggtttcgacaaaactatctttgacctatgccggaaagagaatatcgtctacacaagatatgccgatgatttgacgttctcaactaacaagaagaatatcttacaccggatgccaaaaaaaattaagtcaatcctcagagacgagctgggggggaacattgtgatcaacgacattaagactatcctgacatctaagaagcacaatcgccacgtgacaggtataaccattaccaatcacggcgacctctccgtaggccgcgataggaagcggtacatttctctacttatccacaagtttagccttggactgctgtccgaggaagacatcgctagtttatgtggcctgttcagtttcgcaaatcatattgagcctgattttaaggaccgaatggttaaaaagtacaccgcccaagttattcagaagttgttttcgtacgatcgcgtgtataaacatgagtga

SEQ ID NO: 11407 - RNA, 936 nt, synthetic construct
  source 1..936: mol_type = other RNA
atgcacttggcacactttctgagcaccagcctgagcatttccaaccaggaaattataaccttttcctcttcagccccaaaccgctacaaggtttactcaatccctaagaggactagcgggaagcgaacaatagcacatcccgcaaagaaactgaagctcgtgcaacggctcctatcgaaccacctgtccacgatccttccagtgcatgagtccgctttcgcgtaccggaaaggcctggggatcaaagataatgcgcagtaccacatgaacggacgatatctcttgaaaatggacttccagaatttctttctgtctatcgtgcccgagctattattcatcacactgaaaaagaacgccatcgaattcagtgaagaggacgagtttctcatgtcccggctgcttttctggaggccttccaaatcaagttctggcaaacttgtcctgtctataggtgcccccagctcccctctgattagcaatttcatcatgttccagtttgaccaggagatggcagccaagtgcaagtctaagggcgtgcgctactcaagatacgctgatgatctgacttttagtacaaatgtgaagggtgccttgtttgacctgacttccctcgtcaaggagctgctcgaaaagcaccttctcggatatattgctattaacgagacgaaaacagttttttctagcaaggcccataatagacacgtaaccggcgttaccttaaccaacgatgggcagttaagcattggacgtcagaggaagagattcatcagctctcttatccatcagtatagtctagggaaactgcccgctgaggacttgtcatatctccagggattgatagcttatgccaatgacatcgaaccggtattcgtcaaacgcatgtcgaagaagtacagtccacaaactatggatcaactgattaaaggcgtgaaatga

SEQ ID NO: 11408 - RNA, 945 nt, synthetic construct
  source 1..945: mol_type = other RNA
atggattttttcgagagactggctcgcgacctggatattagcgaacaagatgttcgcgggtttgccttgactgcgcccaaccgctacaaaatctacaggatccctaagagaacctctgggtcccgggtgattgcgcatccttcgcggatgctgaaggcctatcagcgattgatcattagctacgtcactgagttgctcccagtgcacagttgtgcctacgcataccgacagggcgttggaattaaggacaatgcacgtgtgcatgccaaaagcagctatctgctgaagatggacctacagaacttctttaactccataaatccaagtctcttctttgacgtggttgagaaggtcggactggaagtcgctgatcgggataagtggttacttacaaaactcctgttctggtcacctaataaatcttcttccgggcgtcttatactcagcgtcggggccccgagttcacccttagtgtccaatttcatcatgtatccctttgatattaggatgtctgagtattgtttcgcaaacggcctgaaatacaccagatacgctgacgacataaccctctccaccaacaagaggggttgcttgttcgatctgccagactacatcaaaggcgtgcttgccaatgagtatcagggtaagttgtccgtaaatgaaagtaaaaccgtgttcagttccaaggctcacaaccggcacgtcacaggtatcacaatcactaacaaaggctcactatcaatcggaagacagagaaaaaggtacatttcgtctctgatctatcaattttctagcgatcagctcgaccccgacgatacgctgcacctgaagggcctcttatcatttgcatttgacgtggagcctgaccttcggaggcgcttcgaaaagaagtatacaagcaaggtaattcatcagatactgacgtgcgaaaaaggaaatgattga

SEQ ID NO: 11409 - RNA, 945 nt, synthetic construct
  source 1..945: mol_type = other RNA
atgaagatcgtggagtttctgtccaataaaacaggcaagaacatccaggctctaattcgtctgatcgatcaggcgcctagaatgtacaaagtctacaagatcccaaaaaggtctgttggcttcagggtgattgctcagccgtccaaagagataaaggaactgcagcggtttaccgtcgaaatgctggaaaaaattctgccagttcacgagaaggcgatggcctatcaaaaaggaaaggatatccggtcaaacgccctgctgcacgtgaagaatgactatattctcaagatggactttgaggatttcttcaattctataaaccccgaggtattccacaagtctttggaaatagatgagatcagcattaacaataccgaactgtatttcctcaccagactgctgttctggaaccccagtaaaaggaagaacgggaaactcatcctttcagtcggagctcccagcagtcctatcatctctaattacataatgcaccgattcgactgcgcaatcgaggagttttgtaattccaacgcaattatgtactctagatacgccgatgatatgacattctctacttccaaaaagaaccatctgtttagcatacctgaaatcgtgcgaaagaccttacgcaataagtactataaacgcatctccatcaaacaaagcaaaactatcttttcctcaaaggcccataatcgccatattactggggtgacgctcaataacgaaggaaagatatcaattggtaggagcagaaaacggatgcttagttcgctaatttttaaggccagcaaaaatgctattgacgacgagagtctttccagcttgacaggtcagctcggccaggccttttatattgacaacttcttcaaggagagtatgatcaaaaagtacggggagagcttgattaagtcaatcttaggcaagaaaaacgaaaaggcatga

SEQ ID NO: 11410 - RNA, 945 nt, synthetic construct
  source 1..945: mol_type = other RNA
atgtacattgttgagtatttaagcaagaagaccgggcgcggaatgcaggagctctcaagactggtggatcaggccccccgcatgtacaaagtctacaagattccaaagaggtcagccggctttcgagtgattgctcagccctctaaggacattaaggagcttcagagatttgccgtagagatcctaaagcagatactgcctgtgcacgataaagccatggcttatcaaaagggtaaggatatcaaaaccaacgcactgctccatgcgcgcaacgattatatcctgaagatggacttcgaagacttctttaactctatcaacccggaactgtttaacatttctgtcgagaaggacaaaatcaacataacaaagaatgagctgtactggttgactaggctcctcttctggaacccttccaaaagaaaaaatggcaagctgattttatccgtgggagcacccagttctcctctggtgtccaactacataatgtatagattcgattgcgctattgaagaatactgcaatagcaatagcatcacctacagccgatatgcagacgacatgacgtttagcaccagcaagcggaatgtgttgtttatgattccagagatagtgaggaaaatcctgaagaacaactcatataagcggatcagtatcaagcaatctaagacagtcttcactagtaaagctcataatcggcatgttactggagtcacaatcaataatgaaggcaaagttagtgtcggcaggagccgtaaacggatgctaagttctctgatcttcaaagcctccaaaaatgaactcgatcacgaggtactttcctcattgacagggcagctggggcaggccttctacattgacgtgtgtttcaaggagtccatgatcaaaaaatatggcgcgtcgataattaagtccatcctttcaggtaaccacgaaaaaacctga

SEQ ID NO: 11411 - RNA, 945 nt, synthetic construct
  source 1..945: mol_type = other RNA
atgaccattgtcaaatatctgagtgagaaaacaggcactgaaatccaagaactgaataaactcattagccaagcaccccggatgtacaaggtgtacaaaatccccaaacggtccctgggtttcagagtgatcgcacagcccgccaaaagcatcaagaaactgcaaaggtttgcagtcgagattcttgagactattcttcctgttcacgagtctgctatggcttatcagaaggacaaggatattaagaagaacgctcttctgcacgtaaaaaacaactacatactcaagatggactttgaggactttttcaactcaattaatccggaactctttattaagtcactgaagaaagacaagatcctcatcagtaagatcgatttaaaccacctgaccaaattgcttttctggaatccaagcaagagaaagaatggaaagctgattctgtctgtcggcgcgccttcctctccattgatcagcaattatatcatgtacaggttcgattgcgacatagaggaatattgccagctcaaaaacatcacttattcacggtatgccgacgatatgaccttttccacaaaggaaaaagatcgtttattcgagatacctgggttcgtgaagaaaaccctaaagaaacagagttacaagaagatcagtatcaagcagtctaagacgattttttcttcgaaagcccataaccgccatgtgaccggagttacactgaacaatcagggcaatctgtcaattggcagggccagaaagcgcatgttatccagcttcatctacaaagcctgtaagaatgaattgaaccaggaagagctgctgagcctcgtgggacagctagggcaggccttttacatagataagatcttcaagaagtccatggagcgaaaatacggcttgctcacaattaaatccatactggggggtaacaatgagaaaatctga

SEQ ID NO: 11412 - RNA, 945 nt, synthetic construct
  source 1..945: mol_type = other RNA
atgcaaatcgcggaatatctaagtacaaagactggcaagtctgtccatgatattgggagtctgatttctaacgcccctagaatgtacaaagtgtaccgcatccccaaaaggacaggcggttaccgagttatcgcccaaccaagcaaggtgattaaaagcttacagcggcatgcagtcgagatgctcagagactacctgcccgtgcacctccatgcaatggcgtaccaaaaaggaaaggatatcaaactcaatgctcaggtccactgcaagaatgaatatatactgaagatggacttcgaagacttttttaactccattaatcctgagctgtttaaaaagtgtctgaaacttgatggcttgcacttcagtgagtctgatatcaacctccttattaagctgctattctggaatccctctaagcgaaagaatgggaaacttatcctcagcgtaggagccccatcctcgccgctgattagcaactatatcatgtaccggtttgactgtgccatcgagaagtattgcaaacaggagaatattacctattcaaggtacgctgacgatataaccttctccacacttaaaaaagaccagctgttcatcatacctgacattgttaataagaccctgaaacagaactcctataagcgtatatcaattaagctctccaagaccgtgttttctagcaaggcccataataggcacgtgactggagtgactttgaacaacgacggggatatctccatcggccgggctagaaagcgcatgttgagttccctgatatttcaggctatgcacggaaaactggacaacgatgagttgtcatctttaaaggggcagctgggtcaggcattctatattgatagcaagttcaaggcctcgatgcacaaaaagtacggcatcagcattatcaacaaaatcatcggcggaaactcagaaaaaacgtga

SEQ ID NO: 11413 - RNA, 957 nt, synthetic construct
  source 1..957: mol_type = other RNA
atgaatctgctagatctgctaaatagggagttaaataagactaccttcagcatctcagagagcgacatactgattttctctatgaatgcccccaagaaatatagagtttatagcatcccaaagcgatccgctgggacgcgtatcattgcacatccctcaaaagagttaaaagtctaccagaggcacctcgtagacctctttaaaaacatcctccctacgcaccacaccgcctatgcttatcgacagggcctctctattaaggagaacgcggaatgtcacaagaagaacaaatatctcctcaagatggatttcgagaatttcttcaactccatcaatccgctgattctgaaaaacgagctggtgaagaacaagatcaaattcaccaaggaagatttcaagctgcttgaacagctctgcttctggtgcccctccaaaaagataggcggcaaattgattcttagtgtcggagcaccttcgtctccctccatctctaactttatcatgtaccagtttgacgagatagtcgaaaattggtgtaagcagcggaaaattacatacacacgctacgcagatgatatcagtttttctacaagcctgaaagacgccctgtttgaagtgcctaaattggtagagagtacccttactagcaactttggaaagagaatctcggttaaagcctctaaaaccgtgttcagctcaaaggctcacaatagacatattactggtgtgaccattactaatgaaggggagctgtcaattgggcgcgacaggaagcggtacattagttccttgatccataagtttaagctgaacatgctggctcaacaagacatcgagcaccttaaaggcttgctgggtttcgcctttcatgtggaaccagtgtttcgcgagcggatgatcaacaagtacagcaagaagacaatggatgaaataaaccagttcaggtccgagtcctga

SEQ ID NO: 11414 - RNA, 927 nt, synthetic construct
  source 1..927: mol_type = other RNA
atgagtatcctcactctgctctcgaatgacctgggcatctccgaaaacgaactgaaagctttattggtcaatgcccctagaaaatataaggtttactcaatccccaagaggactggaggacggagaaccatcgcacagcctattccagcattgaagcaagcgcagcgcagctttaataagtgcatcaacctgaatgtgcacgaagctgccatggcctaccggacagggctgtccattaaggagaatgccaatatacaccggatgaacccttaccttcttaagatggatctggagaactttttcaatagcatcacaccctctctgctgtggctgaaccttaaaaagcagaacatcgagttcaacttgtatgataatcactacctggagaatctgctattctggcgcccccgcaaaagcagcaagattatattatccgtcggggctccatctagtccgtacgtgtcaaactccctaatgtataactttgacataacagttcacgaactctgctctaacatgcacattaagtactccaggtatgccgacgatctgactttcagtaccaaggagaaaaatcatttgtttgaagtgcccaaagctattaacaacctgctcctgaaggaattcggtaacaacttaaccattaataccagcaagaccgtgttcagttctaaagcccacaaccgacatgtgacgggtgtcacaattaataatcaggggaatttgtccctaggcagggagaaaaaacgatacatcaaacacctcgttcataagtttagctttgatctccttgatgactcagaggtgccatatctgaaaggactgctctcacatgcaaaccatattgagcctgacttcatagtacgtcttcagaagaagtattctgacgagatcatccaatgtctcgtaaatggcacgaacagatga

SEQ ID NO: 11415 - RNA, 933 nt, synthetic construct
  source 1..933: mol_type = other RNA
atggatctcattgacgccttgtctagctctcttaagatcaacaagtcaactcttcaggatttctgtaccttagctccaaataagtaccggatttatagcatacccaagaggaattccgggtataggataatagcgcatcccagtaaagagttgaagaagtatcagagaactctgaatgacctgatcaagaacatcctgccggtgcattccagcgcttttgcataccgcaacggtctagacattaaaaagaacgccctaagacacgccaagaatccctacttactgaaaatggattttcacgatttcttcaatcgcattacaccagacgtgttttggaaacaagttggaaacaaattcctgagcctgaccagaaaggatgccgatattttcgagaagttgattttctggaaccggagcaaaaaaaatgacgggaaactgattctttcagttggtgcccctacctcacctctcatttccaattccgtgatgtataacttcgactgcagcataagtgaatggtgtgtcaagaatgacatcacatacacgcgatatgcagatgatatcaccttctcaacccgtaaaaagaatatcctcttcacagtgcctgaaaagatcaagaacgagatcattatgcactttgggaacgctatgctgatcaacgacggcaaaactatcttttcttccaaagcacacaatcgacacattacaggaatcactataacgaacgagggaatcccatcgctcggcagggagaagaagcggtacatctatcatctgctgcatcagtacagtcttaacctgttagaacacgatgacatcctccacttgaagggccagtttagctttagttgctacattgacaaatctctgatgcatcgcgctgaaaaaaagtattcctctgagctggtccaaaaactcatccactacgtatga

SEQ ID NO: 11416 - RNA, 948 nt, synthetic construct
  source 1..948: mol_type = other RNA
atgcagttgattgacttcctgtcaagcaagttggagaagacgccccaggaaattgaaaagttcgcgctaaccgctcccaagatgtacaaaatttacaccatccccaaaaggaaggccggccacagaattatagcacacccgagcaaaaacttgaagtcataccaacaccttgtgatagactatattaagatcaagcttccaatccacggcgccgcccaagcatataaaaccgggcattccattaaaaccaacgccctggcccacatcaacggagaatacctgttaaagatggacttcaataacttcttcaactctattacaccagagctattttcattagagtgtgcgaaaaggaatatagatctgactcggtccgaactgtctttgatcaagaaactcatcttctggaatccatctaaaaaaaaaggcggaaagttaatcctgagcgtcggtgctcccacttcccctctgattagtaactttgtcatgtatggattcgattatcttctgtccgaatattgccacaagaattacatttcgtacacaagatatgcagatgacctgacatttagcactcgcaagaagaacaatctgtttcagatccctagtatagtgaaagatttcctctccgccgaactcaacaagcgtatctcggtgaatgagagcaagactatctttagctctaaggcccacaaccggcatatcacgggcgtaaccctgaccacagagaacaagctctccgttggccgagagagaaaacgctatatctactctctcctgcacagcttttccctggggaacatggcaaagcctgatatagagcatctgcaggggctttttagtttcgcttgccatatcgacgagacatttaaatctcgggctgagaataagtactcaaaactcatcattagtcagcttcatgagggtaggctcaataatgaaaaatga

SEQ ID NO: 11417 - RNA, 1014 nt, synthetic construct
  source 1..1014: mol_type = other RNA
atgactaccctgagacaacatttactcacttcccctctcgttgccgagctggccttctcgctcctgtcttcttcctctaaaaaagttaccaaacccgacgtggataagtggttgattctgtcactggctaaggtgatgcttagtggccctaagatgtatagagtctacacaatacctaagaaaaacggcgggaaacgaacaattgcacatcccagtaaagtgctcaaagtgtttcagaaagggcttgtggaatttttgatcaataaactaccagtgcacgatgccgcgtatgcttatcggaagaacatctcaatcaaggacaacgccttccagcacgtaaagaattcatattttctgaggatggacctggctgatttctttaattctatcgacacgagtctgttcgaggaacagatcgagaagcataaagtccagcttgccgactcagacaaggtcttacttcgcaggtccgctttttggtccccaaagaagattaactctggaaacctgatactgagcgtcggagcgccaagctctcctatgatctccaatttcatcatgttctcgtttgacgaaacgattaccagcatttgcgagcccctgaagattaaatacacccgatatgcagatgatctctttttcagcaccagtcataaggatgtcttattcaaaatgccgaaactgatacaatacgtgctctactccgagttcggtaagaagattactatcaatgaggtgaagacatctttctcaagcaaagcacacaacagacacattgcagggataacaatcactaataacgacactttgtccctgggacgggaacgcaaacgtacaattagtagtatgattcacaagtacagcttgggcaattgtaccgatttcgaacttgccaagctccagggcctgttgagctttagcaagcacatagagcccctgtttatcgagcggatgaaaaagaagtactcagtttccctaatcgacgtaatcatcagcggtcagtggaggaagtga

SEQ ID NO: 11418 - RNA, 1017 nt, synthetic construct
  source 1..1017: mol_type = other RNA
atgactacactgcgccaccacctcttaacctcaccgctcgtggcagaacatgccttcagcttactatcatcctcgagctctaagaaagttaccaagtctgacgtggagaaatggctgactattagtatagccaccgtaatgactagcggccctaaaatgtataaggtgtacacgatccccaagaaaaacgggggcaaacgcactatcgcccacccttccaaagttctgaaagtttttcaaaagggcctggtcgagttcctcgtgaataagctgccagtccacgatgctgcatatgcctacaggaagaacatatctattaaagacaacgccctgcagcatgcgaaaaatgcttattttctgaggatggacttagccgacttctttaactcaattgacgtgaatctgttcgagaaacagatagagaagcacaaaattgagttggctgcggccgacaaagcacttctccgacggagcgctttctggtcgccaaagaagatgagtagtggcaatttgattctatccgtgggtgctccttctagtcccatgattagcaacttcatcatgttctcctttgatgaaacaatcacgagtgtgtgcgatccccttcgtatcaagtacactcgctacgcagatgatctctttttctctaccgagcataaaaacatcctgttcaagatcccctctctgattcagtatgtcctgacctctgagtttggaaagaaaattgccatcaatgaagtgaagacctccttttcaagcaaggcccataacaggcatatcgctggggtaacaatcacaaataatgataccctcagtttgggaagagaacgaaagagacttatctcatccatgattcacaagtacagcctggggaactccaatgacattgagcttgcaaaacttcagggactcttgtcatttagcaagcacatagaaccactgttcatcgacagaatgaaggagaagtacagcatatccctggtcgaaaacatcatcacaggtcggtggcggaagtga

SEQ ID NO: 11419 - RNA, 1017 nt, synthetic construct
  source 1..1017: mol_type = other RNA
atgacaaccctgaaacatcatttactcacaagtcctctggtggccgagcaggcattcagcctgctctcgaccagcagctctaaaaaagtgaccaaactggatgtcgaaaaatggctgacagtcagccttgccaaggttatggtgtccgggccaaaaatgtatcgggtgtatacaatacccaaaaaaaacggaggaaagaggacgatcgctcacccatccagagccctgaaggtaattcaacgaggcttagtggagtttctgaatgacaagctgcccgtccatgacgctgcctacgcctaccgcaaaaacatctcaatcaaagataacgcgctccagcacgttactaatccctattttctacgcatggatctcgctgacttctttaacagtatcgacgttaaccttttcgaagagcgtattgaaaaacacaaaattcagctcagtgcagcagataaagcactgatcaggaggagcgccttttggagcccgaaaaagactaacactggaaccttgatcctttctatcggggcccccagttcccctctgatcagcaatttcattatgtttagcttcgacgagacaatttcttccatctgcgccccactgaagatcacttacactcggtatgctgatgacctgttcttttcgaccaagaataagaacatactgttcaagattccttccttgattcaatacgtactctctaccgaattcggcaagaagttgaccataaatgaggtgaagactagtttctcaagcaaggctcataatcgccacattgcaggtgtgacgataacaaataatgacaccctgtctctcgggagagagaagaagcgaatcatttcatctatgattcacaagtactccttgggcaagtccgatgatatagagcttgcgaaattacagggtttgctgtcattttccaagcacatcgagcctctatttatcgaacggatgatgaagaagtactctgtgaaccttgtcgacaagattatctcaggccagtggagaaaatga

SEQ ID NO: 11420 - RNA, 1023 nt, synthetic construct
  source 1..1023: mol_type = other RNA
atgaaaaagctgactatcttctttgccagttccccatttatagaggcctggctgcacattgtgaaacccagcgatgaagaaaactttacgagtgaacagaagattgcccacatcaagcaatcaattgccttgataatgcggagcggcccaaaaatgtacaaagtctatagcatccccaagcgaaatgggggcaaaagggtaatcgcacaccctgcagccatgctgaaggcattccaaagagatctctgcttgcacctcgctaacctacttcctgtgcattccgccgcaacagcttaccagcctgcctcatctgtgaaaatcaatgcccttgcgcacgcctccaaccattacctggtcaaaatggatctcgctaacttcttcaattcgatcgatgttgacatatttgcggccgagctccgccggcacaaaatcgctttgaccctgaaggagctgtcatttatcagacaatgtaccttctggagcccatccaaaacaagcactggtaggcttattctaagtgtgggagcgcccaccagtccgctgatttccaacttcgttatgcatgcattcgatgacatcatccagaagatttgcgagccactggctgtcacttacacccggtatgctgacgatctctttttttctactaatgtgcgcgacatttcttttaaaatccccgacttagtggcttatgtgttggcaaagacatacgagaaccacttctctataaatcaggccaagactagattttccagccgcgcccataatcgacatgtaaccggtgtcacaatcaccaatgaaggcgccttatctgttgggaggcagcgtaagaggattatttcaagccttatacacaagtacaccctgcagaaaatcaacctggctgaaacaaagattctgcaggggctgctcagttgggcattctgtattgagcctacgttcgtcatttctatgcggaagaagtattccgacaacgtgatccagtcaataatcagcggaaattggaacaacgacagagcttga

SEQ ID NO: 11421 - RNA, 1014 nt, synthetic construct
  source 1..1014: mol_type = other RNA
atgaagaagatcacaaatttcttcgttacatccccttttgttgatgcctggctccagaccacagttccctccgtgggcgagctgtcgaccgaacagagggtcgcctgtatagggcacaatctggccctgatcacccggagcggtccgaaaatgtataaggtgtattctattcccaagcgaaatggtggaaagcgagttattgcccatcccgccgccatgctgaaggcatttcaaagagatctcaacctccacttagttagtcttctgccagtacacaacgctgctactgcttaccgggtaagcagtagcgtaaaaactaatgcaaaggcacacgcgagcaatccatacctgctcaaaatggacctgtacaatttctttaactctatcgacgtcgatattttcgtcgctgaattaaggcgtcatcggattactctggcagtgaaagagttgtcatttatccgccagtgcaccttctggtccccttccaagacatctaccggccggcttatactatcagtgggagcccctacttcccccctcatttccaactttgtcatgtatgagtttgacaacattatccacaaaatctgtgaaagtctctctgtgacctatacgaggtacgccgacgatctgtttttcagtacaaacgtgcaggacgtgttattcaaaattcctgatcttgtgacctatgtgttgacgaacacgtacaacgggaaattctcaaccaatcaaaccaagactagattttcaagcaaagcacacaacaggcatgtgaccggcgtgacaataactaatgaaggcagattgtctttggggagacagcgcaagcgtatgatttcagctctgattcatcagcattgccttaagaagatcaatctggtcgagactaaaaaactacagggcctgctgagctgggcgtccaacatcgagccaacattcgtgatctctatgcgcaaaaagtacagcgataaggtcatacaaagtatcatcagcggaaattggaacgacgactga

SEQ ID NO: 11422 - RNA, 1017 nt, synthetic construct
  source 1..1017: mol_type = other RNA
atggcaaaacttatagagcagcttatacactcaactcccgttacagcttacgccaatagcgtcctttctgaatacactgataagtttacagccaaggacattgagatcatcgccactcaaacactaaatgacgtgaaggcaaggggacctaaaatgtacaaagtgtacaccattccaaaacgcaatgggggaaaaagattgattgcacatccatccaagcctctgaaggccacccagcgggctctggtagagcttttgcagaaacaactgcccgtgcacgaggccgcttttgcttatcgcgatggggtatcaatcaaggataacgctttcgcgcattcaaagaacccgtattttctgaaaatggatctctccgacttctttaatagcatcgataccgaactcttcgaggaccagctgaagtctcactctatttttatccggaataagaaactgcttcacaataccatcttctggagccccgcgaaagaactcaacaataagttaaagctcagtgtgggtgccccctcttcccctctgatatccaacttcatcatgtacaacttcgatgaggcaatcagcacgatttgccactcctcaaacattaaatatacgagatacgccgacgatttatttttcagcaccaataccaaaaacctactcttcaacattcctagtttggtcaactatctcctggagaagcagtatgacaacaaactgtccgtgaacgaaagcaagacatcatttagttctaaggctcataacaggcatattactggagtcaccataactaatgacaacaatctgtcgatcggcagaaaaaagaagcgatacatttccagtctcgttcataaatacaagctgggcagcttagacgttgaaaatatcgaaacactgcaggggctgctgggctttgcaaagcacgtggagccaagcttcatgataaggttgtgtaagaagtatagtcagaacacaatcgactctatcacccgtggtgcctggaaaaataatgagaagtga

SEQ ID NO: 11423 - RNA, 1014 nt, synthetic construct
  source 1..1014: mol_type = other RNA
atggctaagctgatcgaccagttaatcaactcgagttttgtggtgagttacgcgtatagcgtcctatcagcctgcacagggaaatttactcaggaggacgtcaagttactcgcaacacagaccattaacgatgtaaaagctcgggggcccaagatgtataaggtgtataccatccccaaaaggaacggcggtaagcggcttatagcccaccctagtaaaccactgaaagccacgcagcgcgctctcgtcgaagtgttacaaaaaaagcttccagtacatgaagccgcgtttgcatacagaagcggattgagcatacgtgacaacgccctggttcactccaaaaacaggtacttcttgaaactcgacttgtccgacttcttcaatagcatcgatgttgatctttttgaaagccaactggcatcaaatcgcattttcatcaggaataagaccctgctcaaccagattattttttggtccccgactaaggatctgcagtctaaattgaagctgtctgttggggccccctcttcaccactgatctccaacttcattatgtaccggtttgacaaagatatgtccaaaatctgtgactctctcaacgtgagatataccagatacgcagatgacctgtttttttcgacgaatatcaaggatatcctgttcgacatacctgaactcgtgaactacatacttgataagcgatacgacaataagctactggtgaataaaagcaagacatctttctcctcaaaggctcacaataggcacattaccggagtcactattacaaatgagggaaagctcagtatcggccgaggaaagaaacgctacatcagttcactggtccacaagtataacctgggcttgctggagtatgaggatatggaaaaactccaggggctgctaggcttcgctaagcatattgagcctagcttcattatcaaacttagcaagaagtattcccatcaatctgtggagtacatagccaaaggtggctggaagaataacgagtga

SEQ ID NO: 11424 - RNA, 1020 nt, synthetic construct
  source 1..1020: mol_type = other RNA
atgactaagctgaagaatcaactgataaattccacatccgttcgcagctatgcttacgatgtcctttcagaacagagtaccagaattagtgaggacgacattgaagccttggcacagaaaaccgtgcacgacgtctgggataatgggccaaagatgtacaaggtgtatacaatccctaaaagatccgggggacgacgcacaatcgcccatccatccaagcccctgaaggcagtccaaaaagctcttgtggaactgtgggaagcggagttgcctattcatagcgcagcgttggcttaccagaaagggaagtcgattaaggagaatgccgagtgtcaccggtataacaaatttctactcaaggtggacttatctgagttctttaattccatcgacattgaggtgttcgaaagccagttactgggcaacaacataaaatttgacaagagggattctcgactgataagaaacatcctgttttggtcgcctcagaaatccctgtctagtaagctcgtgctgtccgttggtgccccgtcctctcccttcattagcaactttgtgatgtatacgtttgactcattaatctctgaagtatgcgaatctttgaacattatctacactaggtatgccgatgatatgtttttcagtacccaggttaagaacactctcttcaaagtcccagagattatctcattcctgctgaaaaacaagtacaacaataagttgctcatcaacgaatctaaaaccattttctcaagcaaagcccacaatcgccacgtcacgggaatcaccatcacaaatgataacaaactgtcactcggcaggagccgtaagcggtacataagtagcatggtgcataagtataaactcggcatgcttgattttgaggacatcgagcagctgcaaggccttctgggattcgctaagaatatcgagcccgagttcctagtacggctcaaaaagaaatacagcagcgagactgtgaacatcattcttaatggtaagtggaagaatgaaaagtga

SEQ ID NO: 11425 - RNA, 1029 nt, synthetic construct
  source 1..1029: mol_type = other RNA
atgacaaaaatcgcaaaacagctcctgagctcgccttttatccattcctatgcctataaggaacttgatgaactgatggacaacgtaacccagaaagatattgactcattcgtggaactgactgtggatgatgcgattatcaacgggcccaaaatgtataaagtctacgcaattccgaaacggaatggcgggcgacgtatcatcgcccacccctctcaaccattgaaggcagtacagcgagacttgattgaaatcttaaagtcccagctgcctattcatgacgccgcctttgcctaccagcaaggcaagtctataaaaggcaacgccgaggtccacaggttcaataagtttttcctaaagatggatctgtctaacttctttaacagcatcgatgtcgacctcttttataatcacttggacctgaactcagttaatatcgacattgaggacaagagcacgatcaaaaacattatattctggcgccctcagaagaacgagactggagagctgcgcttgagcgttggcgctccctccagtccactcataagtaacttcatcatgtacaagttcgattctattatcagtgaggtgtgcgcttcctttaagataaaatacacaaggtacgctgatgacctgttctttagtacgaccgtgaagggtgtgctttttaagatacccgatatcgtggaattcattttgaagagcaagtacgacgatgtgctcaccattaataagagcaagacctccttctcttcaaaagcccacaacagaaatatcactgggattaccattacaaatagcaatgagctctccctgggtagaaatagaaagcggtacataagtgcgttagtccacaagtatcggattggactcctagacgataatgctacagagtccctgcagggccttctggcatttgctaaaaacatcgagccaaagttccttatgaggctgaaaaacaaatatagcaacgacgttatcgagtctatcatctcaggacgctggaaaaatcatgaatcagaggaatga

SEQ ID NO: 11426 - RNA, 984 nt, synthetic construct
  source 1..984: mol_type = other RNA
atggaaaacatcttcaattacctgctgagctcgcctaacgttgtggatttcagcaatgaaagcaagaaaaccaagcaacctaaactccctcaggacattctgcatgatgttctgctctacggccctaagatgtacaaggtgtataccatcccaaaaaaaaatggcggcaagcgagtgattgctcaccccagcagggggctgaaggtggttcagcgcgacttggtagtgtttcttgaaaaaatcctccccgtccataattctgcctacgcgtatattaaaaaccgatccatcaaggacaatgcccactatcattccaagaacagataccacctgaagatggacctctccaacttttttaacagcatcgacaccgaactgtttttcacacaacttgatactaatggggtaactttcaacagtgatgagatgtaccttttacagaggagcctgttttggagtccaactaagtctgagattggaaagctcattacgtccgtaggagccccgagttcgcccctgatatctaactttatcatgaacacgtatgacttcatgataagcgacatctgcaaatcattagaggtcaaatactcacgctacgcagatgacatgttcttcagcaccaatatcaaagatatactgttcactcttccaaacattgtggattacattctcgacacaatctattcaggcaagttgagagtgaacagtgcaaagaccaaattctcatccaaggctcacaatcggtatatcacaggactcgtgatcacaaatgacgccaaagtctctatagggcgttctaggaagcggctgatttcctctttagtgcacaagcatcagctgggcctgctagagccagactcagttagttccctgcagggtttgttggggtttgtgagatccgtcgagcccgaatttcttgatcgcttggtgaagaaatacggtgattatgagatccagcggattataaaaggactagtctga

SEQ ID NO: 11427 - RNA, 1011 nt, synthetic construct
  source 1..1011: mol_type = other RNA
atgaagaagctgctaaactatctggcttcccccgagacggcagataacttgaaaaaatatttcgagctcgcctatccacaaattaagtacgatgaggatgttttcaatctgatggcgaagcaccacattgagacactccttaaaagtgctcctaaaatgtacaagatctacaccattcccaaaaggaacggcggaaatcggacaatcgcgcacccagcaaagggcctgaaagccactcagcgtgaccttagtaaatacctggttgacattcttcctgtgcattcatgcgcttttgcatacaccaagaacaaaagcataaaggataacgccctcgtgcattccaagaataaatttcttctcaagatggacctggtcaactttttcaacaacatcaatgacactctcctgaataatgaactggttgagaatgacatcccgctaactaccctggagataactcaggtcaataaactgtcattctggtgtcctacaaaggacgacgatggaaagatgatcttgagcgtgggtgcccctatcagccccttaatctcgaacttcatcatgtatagattcgatagcaagttatctgagttggcagtcaacaacaaagtgaagtattctcgctatgccgacgatatcttcctttctacaaacgctcccaacgtgctgggcttgttcgtgaatgtggtggagctgctcctgctggaattatacgggggtaagctggtaatcaataaaaccaaaacggtcttttcctcgaaggccaacaatagacatgtaacaggcctcaccatcaataattccggggaagtatccctcgggaggaaacggaagcgagtgatttcttctttggtccacaagtttagcattggcattctggatagcagcgaaattgaaagtctgcgcggacttctctcattttcctcatctgtggaaccagaattcataaccagattggagaaaaagtacacctttaagctaattgacaagatagttagggggctgagttga

SEQ ID NO: 11428 - RNA, 1002 nt, synthetic construct
  source 1..1002: mol_type = other RNA
atgaaaaagcttttagactatctcaccagttctgataacctcaaaaactaccttaaactgacatatccccaaatttcctatgatgacgatgtctttcttatcatgggaaagtaccacctatcttctctctacaaaagcgcccctaaaatgtacaagttctacactatccctaaacggaatgggggacgtcgcgccatcgcccatccatctaagaaactgaaggtaacacagcgcgatctgtcaacttaccttgagaaaattctgccggtccacgactgtgcattcgcgtatagaaagaataagtccatcaaggataacgccctgatccacgtggggaataagtttttgctgaagatggacctggttaatttctttaactcaatcacccccaaaatgctcattaatgagataaaggagtcagatctgtcatttgaggagtccgaactcgactacatcaaaaaattagctttctggtgccccagcaaagaagataacggcaaactgattctaagcgtgggggctccaagctctcccttgctcagcaacttcatcatgtatagatttgactccgtcctgagcgaggtagccaagtctaataaggtgaagtactccagatacgctgacgatatctttctgagtaccaatgtgccaaatgtcctcaagctgttcgttaacattgtgaaaatcatcttgaaggagatgtatcatgatgagctgataatcaatgaaatgaagacagtgttctcaagcaaggcacacaatcggcacgttaccggtattacgattactaacgacaacaagataagcttgggtcggcagaataaacgaatgattagttcgctggtgcataagtactccttgggcgtgcttgacacaagtaaaatcataaggctaaggggcctcatctctttcgcatccagtattgaacctgacttcataattaggctggaaaacaagtatacctttaacctgatcaacaagctgattaaaggattagactga

SEQ ID NO: 11429 - RNA, 1020 nt, synthetic construct
  source 1..1020: mol_type = other RNA
atggaggaactgcagaagtcactgttagcatccaaccctgtcaaagaattcttttctcagaaggcatctcatatattcggagagagcggtcagaagttgcccatggctgctgagtctttggcactggccgccctccaaaacgttaaagtgcagggctttaagatgtataaggtttacaccatcccaaagaggtcaggcggaaatcgagtgatagcacatcccagcaaagaactcaaagctttccaaagagggctcgtcgatatcctggagagtgaactacctatccacagctgcgctcacgcctatgttaagcgtaaatccattaaatcgaacgccatggcccatgccaaaaatcagtacctacttaagatggacttccttaacttctttaactcagtggatatcgagttactggccaaagcctgttccggcaacaagaaaatcgaagaagttgggttgatgcagttcgcgaatctggtcttttggagtccgacaaagcagagagatggaaagctcgtactgtctgtcggtgctccaaccagcccattgttgtcaaactttgtgctgtacgagttcgacaatctcattagtctggtgtgtaactccatgcatgtgacatatactagatatgccgatgacctcttctttagcacgaacgaagcagatattctcaagtccgttcccaatatcgtgaagtacttcctggactacatttacggcgataaacttcgggtgaatgacgcgaaaactgccttttcctctaaggctcacaatcgccacgtgaccggtctagtaattgcgaactccgggcgcatcagtctgggacgagaacggaagcggtttatcaagagtcttgtgtacaagagcacaaaaaatgagctggacgtggaggagttaaactcacttatgggcctgctgtctttcagccaacacgtagagcctgacttcataatgaggctggtctgcaaatttggccaggacgcagtcgattatattgtgaatgctcagtggagggggtga

SEQ ID NO: 11430 - RNA, 927 nt, synthetic construct
  source 1..927: mol_type = other RNA
atgaacattatcgagattatctccaaaaagacaatgctcgcttcctccaacgtaattacgtttattcatactgcaccctatagatacaagaagtactacctgccgaagaacaacggcggttccagggaaatcgctcaaccttctagggaactgaaaatcatgcaacggttgattcttcagctgctgctaccatatttacccgttcacgaaaatgccttcgcctacgtggagggcaaatccataaagaggaatgccctgatgcaccggaacaatgagtactttctgaagatggacttttcagatttcttcaactcaatcaaacctatcgacctacgaaatgttttgttgaagaatggttatgagactattcccctcaatttaaacctcatagacaatctgttcttctataagaagacaaagaagagcgggcttagtttaagcgtcggagctccttcatctccattgataagtaacgcggtactgtacgactttgacgtccgagtgagtgaattgtgtaagcaggaagacatcacctatacaagatacgcagatgaccttactttctcttgcaacgagaaaggcaaacttctcgtgtttcagaaggagatagccaagatcctgcgcaaaattcagagtccaaagctgaagctgaacgataagaaaaccatctacgcttcaagaagcgttagccgccgcgtgaccgggattgtgataaataataatggcgagctgagcctgggaagacataagaaaaggatgatctcctcgcttgtgcaccggtacaccctgggaaaactcatccccgatgacatccacaaactgaaagggtatctcgcctatgccaaacatattgagtctggctttatcgtgtctatgcgtaacaaatacggggcagatgtcattgatagcatcctcaagtataactga

SEQ ID NO: 11431 - RNA, 927 nt, synthetic construct
  source 1..927: mol_type = other RNA
atgaacattatcgagatcatttccaagaaaactatgcttagttccagcaacgtgattacctttatccacacagctccataccggtacaaaaaatactacctcaagaagaactcaggcggtgtgcgtgaaatagcccagccttcaagggagctcaagatcatgcagaagctcattttggagttactggtaccgtacttaccagtccatgaaaatgcattcgcttatgttgagggcaaaagcattaaaaggaacgccctgatgcatcacaagaacgagtattttcttaaaatggacttcagcgacttctttaatagtatcaagcccctcgatctgcgcaacacgttgaccgacaatggatttgaaacaatacctgtgaacctgaatctgatcgataagttgttcttctacaagaagaccaaaaagtccgggctgagtctatccgtaggcgcgcctagctctcccctgatctctaacgcagtcctttacgattttgacatcaaagtcactgaactgtgcgagagacaagatataatttacactcgatatgcagatgacctcacattctcgtgtaatgagaagggcaagctgattggatttcagaaagaaattgtgaggattctgagaaaaatgaagagccccaaacttaagatcaacgacaagaagaccatttatgcctctcgagctgtttctcggcgcgtgactgggatcatcataaataataacggcgatctgagtctgggtcggcacaaaaaacgcatgatttcatctctcatccacagatataccctgaatcagttaaataacgacgacatcctcaagctaaaggggtatatatcctatgccaaacacatcgatattaacttcgtgtccagcatgaacaaaaagtacggagccgagacattgaattcaatcaccaagcataattga

SEQ ID NO: 11432 - RNA, 927 nt, synthetic construct
  source 1..927: mol_type = other RNA
atgaacattattgacattatctcgaagaagacactcctcccatcaccgaatgtgatggtgtttatcaataccgcaccctacagatataagaaatactacctgcctaaaaactcaggcggagtgagagagattgcacagccaagtcgcgaactgaaggttatgcagaggattatcatcgaaaagattgccgattttctgcccatccacgaatccgcctttgcatatgtgaaagggaagtcaatcaaggagaacgcccagaaacacaaaaggaacgagtactttcttaagttggatttctccaacttcttcaattctataaagcctagcgatctgcggcgggtcctgatcaagaatggatttgagaataacactttcaacctgttgctcatcgacaagatcttcttctacaaaaaaaccaagaagagcggactgactctcagcgtcggtgcccccagtagccctctaatatctaacgccgtgctatatgaatttgatgtgaaagtcacggagttgtgtaataaggaggggattacatatacacggtacgctgacgatcttactttttcttgcaacgagaaaggtaaacttataggcttccagaaatccatcattaaaatcctcaggaagataccatcaccccatctgagactgaatgacaaaaaaaccatctataccagtaagtccgtaagccgacgtgttactggcatcgtgataaacaatgatggccaattaagcctggggcgaaagaacaagcgcatgatttctagtttaatccaccattacacactgaataagttgaacgctgaggacgtttacaagctgaaggggtacctttcttatgcgaagcatattgaaacgaccttcataaactccatgaccatcaaatatggcgtagacaccattaatgctattctcaaatccaattga

SEQ ID NO: 11433 - RNA, 927 nt, synthetic construct
  source 1..927: mol_type = other RNA
atgaacatcatcgacataatctctaagaaaactatgctgccttcgtcaaatgtcataacatttatcaacaccgcaccttatcggtacaagaagtactacctgaagaaaaacaatggaagtcttagggaaatcgcccagccttctcgggagctgaagatcatgcagaaactgatcctcaatattctgtcggaatttcttccagttcatgagaatgctttcgcctatatcgaagggaaaagcattaagctgaatgcactcaaacacaaggaaaacaaatacttcttgaagatggacttctccgatttttttaattccatcaaaccgatagacctgcgcaatatcctcattaagaacggcttcgagagtaatatgtacaacctcaaactgatcgacaacctgttcttctataaaaagactaagaagagtgccttgagcttaagcgtcggggcaccatctagccccctgatttcaaatgcggtgctgtaccagtttgatattgaactcagcgagatttgcaggaacgagaatataacatacacgagatatgctgatgatctgactttctcctccaacgagaagggaaagcttattgattttcccaaagtagtctacttgatccttagaaaaatgcatagccccaagataaaagtgaataactcaaagaccatctacacctctaaagccgtgtccaggcgcgtaacagggattaccatcaacaaccagggcgaattgagcctgggccgacacaaaaaacgtgtgatttgtagtctaatccataagtttctccaaggagagttagacaatgacgaaattcacaagttaaagggttatctgtcatatgctaagcacattgagatcaacttcattaagtctatggagaagaagtatggtgtggagctcctaaactccataaaaaaagtggtttga

SEQ ID NO: 11434 - RNA, 933 nt, synthetic construct
  source 1..933: mol_type = other RNA
atggacatcataaaaaaaatagcggatgagacacttatgcccgtatcaaaggttagcgcatttatttttaccgctccttatcgctataaagtctacccaatccccaagaggaacggaggctttagggagatcgcacagccgtcgcgcgcccttaaattcatgcagcggatagtgatcgctgaattggagaaagtgttgaaggtacatgaaaacgcgtacgcctacgtcaaaggccgatccattaaagacaatgtggagaagcatcaacggaattcttatattcttaaggtcgatttctgcgagttctttaactctatcagtccctgtgacttggaactctgcctcaaaaacaacggtttagattccctgttatcttccaaggagctgctgaacaagctcttcttttacaaaaagtccaaaagaagtgccctgtctatgtccattggggctccaagcagtccatttctgagcaacgccatcatgtacaacttcgattccgtgatcagcgacatgtgtagcaataagaacattacttacacccggtatgcagacgacctgacgttcagtactaatgagaaaggcattctgtatgagtttatccatgaaatcgacaaagtcctggaaggcatagatagccctaagctaaaactcaacgacaaaaagaccatattcgcctctaagaagtgcaatagacacatcacaggcattgtgatcaataatgagggagaactgtcgatcggtagagataagaagcgttacctgtcatcacttgtgcacaaattcagcctaaatgccctcaatgaggaagagattgaacacctcaagggatatctggcttatgttaacaagatcgaaccttcctttatctcagggatgaagaggaagtacggggttgaggtggtgaactctattattacattcaatcccttgtga

SEQ ID NO: 11435 - RNA, 942 nt, synthetic construct
  source 1..942: mol_type = other RNA
atggtcatagacgattgcataaccaagatgctgaaaaatcaacttctgctgagcgatgctgagttactctattttgcgtccactgctcctcaccggtacaagaagtacttcattccaaaaagaaacggggtggacctacgcgagattgcgcacccttctagccagttgaaatatgtacaaagactgctggttgagtctatggtaaagactttcccaattcactcaagtgctgtggcatatcggaaaggcatctctatccgtgataacgcaactctgcatcttaagaacaattacttgctcaaaatggactttgagaacttcttcaataacatcacacccgaaatcttcttcgacgcttgtgaagacaacaatattagctactccgagaaggacaagaacctccttaagaacattctgttctacaagaagagacgcgcaagtggactgagtttgtcaattggtgccccgtcgtcccccttagtctccaactttatcatgtatcagtttgacgttcttgtgtctgacttttgcgccgcccggaatatcgtgtatagtaggtacgccgatgatctcttcttttcaaccaggaaaagcgatgagctctcccaggtggccgggttcataaaggaaatcctccgaacaatgtacaggggaagactgaaaattaatgacgcaaagacaatccataccagcaagaaaaataagaggcttgttacgggcgtggtcttgtcatctgaggacaaactgtctatcggacgagaaaaaaagcggttttacagcagcatgatccacaaattcaccctgaagctgctggatggggatgagatccataagctccagggttatctgtcgcacgccaaaaacatagaacccctatttatttcccgcatggaaaaaaaatacggccataaggctttagccgagattatgtcctataattga

SEQ ID NO: 11436 - RNA, 951 nt, synthetic construct
  source 1..951: mol_type = other RNA
atgagtttgcttgcatttctgtcggacaacctgatgttccattcttctgagttgaaaaagttcatctccacagctccacatcgctataagcactatccaattccaaagcgctcagggaacggcttccggataatcagtcagcctagcaaggaactcaagtttatccaaaaaattctggtagagcacctcgaagaggtggtgatcattcaccacaaagcgttagcgtacagaaaagggctcagcattaaagacaatgccctcctgcacaaggccaatccctacctgttgaaaatggacttcaaggactttttccctagcatcgtccctgagctgttctttgacgccctactgaagcaggatatccatttttctaagcaggactacgcactcctccagaaggtgttttttatgaagaagactagaaagagcccctttatactatccattggagctcctagttccccattaatcagcaacgcagtgatgtttgaattcgataaacagatcgatgaactgtgccaaaaacggaatattacctattcacggtacgctgacgatctagtgttctcatcgaaaatcgatggtgcactctttgacctgcccaaactcgttgagggcgttcttgacaaagattactttggcctgatccgcataaacaaggataaaacagtcttcagctctaaagcccataaccgacatatcaccggagtaaccattacgaatgacaacaagctgtccattggtagggataagaagaggttgttgtcctctaaggttcaccgatatagtcttaaccagctggaggccgaactggccgccaagctttccggagagatatcattcgctatattcatcgagccgagctttaaagctttcctgattagaaaatacgggagggatgtggtcgagtctttactgcgtttcaatttcgaaaatactcccgaactttga

SEQ ID NO: 11437 - RNA, 936 nt, synthetic construct
  source 1..936: mol_type = other RNA
atgaacctcattaagtttctcaaggaaactacgttaatccctgaagatgaattactcaagtttgcctccaccgcgccccataggtacaaggaatacgacatcccaaaaaggaacggtaaaggggtccgccatattgcccagccctcaaaagagctgaaattcttccagaagatcattgtgaactatctgagcgacattctgccggtgcacgaaaaagccacggcttataagcaaagagtgggcatcaaggaaaatgcactgtaccactgtggaaacgagttcattttgaagatggactttgaaaacttcttccctagcatcacaccagacgttctctttcacctctttaaacggcttgatatcaaatttgacaagactgatgagttcttcctggagaagttgttgtttaaaaaaggcaggcgcgatcgtaacagttatctgtctattggttcaccttccagcccctttatttccaattgcatcatgtacttcttcgacatagaggcagaccgcgtgtgctggaacagaggcattacatattctaggtacgctgacgatatcacccttagtaccaagaagcggaataacctgtttgatatgcccaagctactcaatgagatgctgactagagagcttctgggcttcattaaggtcaataaagacaaaaccgttttctcaagcaagcgccacaatagacatatcaccggagtaacactgaacaatgacggagatatttccttgggccgagatcgtaaacggcttatctcgtccatgatacaccgatttaaatctggacagctggatagcatacaaacagccgagctgcaggggtttatctctttctcatactatatagagccactattcctcaacaggttaaagctgaagtatgggactgatatcatcgaccggataaagagttacaatctgttgtga

SEQ ID NO: 11438 - RNA, 936 nt, synthetic construct
  source 1..936: mol_type = other RNA
atgagtatctatgtcttcctttctgactcactccttattagcgaaagtgatttggagaaattctcttcaacagcaccttatcgctataaagtctatgatattcccaagcgcaatgggaaaggcttcaggaccattgctcacccctcgaaggagttaaagctgattcagcgcttatgtgtgcagtacctggagaataagctatacgtgaatgatgccgctacaggctacagacggggactgtccataaaggataacgcagccgcccacagcaaaaataagtacttgctgaagatggactttgaggacttttttccatccatcaagccacttctgtttttctacatttgcaaacagcgagagataaaattcaccgtgaaagaaaaggctttcctcaggtatatcctgtttaggaaaagcagaggagaagacgttttccgtttaagtatcggtgctccgtcttcccctctgatctccaattttgtgatgagcacattcgacgagatcgtgctgaagtattgcatcaacaacaagatcacctacactagatacgccgatgacctcgccttctcaactaatgtacgtaacagccttttcgacgtacccaagaccatacaggagcggttgcatgatgcaacaagaggaaccatcaaggtgaactcttccaagacggttttttcatctcgaaaacataaccggcatataacgggcgttactctaacaaatgacgggctgctctctctgggacgcaaaaagaagagggagatttcgagtctggtccacaaatttagcatcggtactctcgaacaaaccaaaatttccaacttgcaaggccagctgagcttcgcctatcacatcgaacctgaatttctcatacggctgcagaaaaagtacggccaggcgatcattgataagattaaggggaaaactgacaaatga

SEQ ID NO: 11439 - RNA, 930 nt, synthetic construct
  source 1..930: mol_type = other RNA
atgaatatagaagaatacttaactgagctcttgtacgtgggccccgacttactctataagtttgcgagtacatcatctcggagatataaaacctaccagatcaaaaaacggtctggaaaaggcgttagaaccatagctcatcctagtaaggaactcaagtacatacagaggctgctggtcgagaaactggaacagctactgcccgtcagcgataacgcctacgcatacattaaggggaagtctatcagagataacgctcagcagcatgtcaacaacaagtatttcctcaagatcgacttttccgattttttctatagcatcacaccggacatttttttcttcatgctgaagaagcacaagatagagtattcccaaaaggaccagtttctacttaagaatctgctgttctggcgaaaagaacgggatggcggtctgactctttctattggcgctccatcatccccattgattagcaacttcgtgctttatgacttcgacaaaagcattaactcatggtgccagggtaataagatcgtgtatacgaggtacgccgacgatattagcttttcaacaaataaacgcaacgccttgtttgacgtgctcgccaatgtaaaaaaaaccctcaatgactgtgggctggagaacatcaagattaacgattccaaaaccatcttttctagtaaggcacataatcgacacatcacaggggttactattaccaatgataacaaactgagcatcggacgcgagaagaaaaggctcctgagttccatgatccaccacttttcccaaggaaacctgcctaaggagaagtacgaggaattatcgggccatctggcccacgcattcttcattgatcccgacttcaagaatttcgtgatcaagaaatacggaaatgaggtgcttaaaaacttgtttcaacgtaagtga

SEQ ID NO: 11440 - RNA, 933 nt, synthetic construct
  source 1..933: mol_type = other RNA
atgataatcgaacatttgagtgagacgttattcctcgccgaacatgatattgttcgatttagcctgtcctcacctcaccgctacaaggtttatgagattcctaaaagaaactctagcaaaacccgcactattgctcacccctctaaggagctgaagttcatccagcgggctcttgtggagttcttgtcaaaaatcctccctatccatgaggcagcattcgcatacaagaaaggcatgggcataaaggataatgcaaaacagcattcgaaatccaaatacctactcaagatggacttcaaggatttcttcccaagcattacgccagaccttttttttagggtggccgaggattacggcatcgaatttaatgagaatgacaggattgtgctaacaggccttctgttttggaaaccgaagcgctccgatgggctggtattatccatcggagcccccacctctcccctgatctccaacttcgtcatgtttgagtttgacaaaaaggtaagcagtgactgcctgaacaagaagattacatataccagatatgcagacgacatcaccttcagcactcgggtcaaagatgccctgtttgaaataccacccttcattagctcggtgttgaatgaaactgtgaagggtattgagctgaaccctgaaaaaacaatctttacctctcgagcgcacaaccggcacgtgactggggtcacactgactaacgacggtgagatatctgttgggcgtgagaaaaagagactcatctcatcaatgatccacaagagtaagtacagtaaactgtcttccgaagctgctgccaatctgctcggacttatctcctatgcgacccacattgaaccagagttcatggataggatgatcaagaagtacggagccgaagtgatccaagctataaaggccagggccattggcagctga

SEQ ID NO: 11441 - RNA, 933 nt, synthetic construct
  source 1..933: mol_type = other RNA
atgatcataaagcacctgtctgatacactcttcctcgccgaacacgatattgtacgcttctctttatccagcccccatcgctacaaagtatatgagatcccaaagaggaatagtaaaaaaacccggacgattgcccatcccagtaaggagcttaagttcatccaacggaccctggtggattacctgtctaagattttacccgtgcatggcgcggcttttgcatataaaaaggggataggtatcaaggacaacgcaaggcagcacgccaagtccaagtacctcctgaaaatggacttcaaagattttttcccatccattactcctgagttgtttttcagcgttgccaaggcccacggtatagaattcaacaaggaggataggattgtgctgaccggcctgttgttttggaaaccggaaggctcagatggcctcgtgttaagtatcggggccccaacatcacctctgattagcaacttcgttatgtatatctttgaccagaaactctctgacgagtgcctcaatagaaaggtcacttacacacgctacgctgacgacatcacctttagcactaggatcaaaaatacactattcgaactgcctcatctaattacttcgttgcttaccaaaaccgtcgatggagtggtcattaatcccgataaaactgtgtttacttcccgggcgcataacagacacgttacaggcgtgaccttgaccaatgagggagagctttctatagggcgagagagaaagcgactgatctcgtcaatgatccacaaaagtaagtttagcaaactgagctccgaagacgcatctaacctgctcgggctgatctcatacgctacgcacatcgaatcccagttccttgaccgtatgacaaagaagtatggagctgaggtcctgcaggcaattaaggacagagccgtgggaagctga

SEQ ID NO: 11442 - RNA, 933 nt, synthetic construct
  source 1..933: mol_type = other RNA
atgatcatcgagtacttgtccgaaagtcttttcatggccaaatatgacatcgtaaatttcgccttaacaagcccccatcgttacaaggtctacgaaattcccaaaaggaatagtaaaaacactcgcaccatagctcatccttctaaagaactgaagttcatccagcgggagcttctgaagaaattgatcgaaatcttgccagtgcacgatgctgcctttgcttatcaaaaagggatcggaattaaggataatgcgaataagcatagcaacagtaagtatctccttaagatggatttcaagaactttttccccagcattacccctagcctgtttttttctatagctgagaagaacggtatcgtctttgacaaaaatgatcagctggtgctgaagggccttttgttctacaaatccaaagccaacaaggagctcactctatcagttggtgcacctacctcaccactgattagcaatttcctcatgcacatttttgaccaaaagatttcctacgaatgttccctgaagaaagtgacctatacacgatatgccgacgacatcacgttctcgacgaacattaagaacatcttatttgagctgccggagattatcatgcagctgctccaggagacagtggtcggcgtggaaataaatccagagaagaccattttcacatcaaaagcacacaatcggcacgtaactggcgtgacactaactaacgagggggggctgtctattggaagagataagaaaagactgatctctagcatgatccacaagtctaaatttaataccctcgcaaacgacgatgcatgctacttactcggcctgatatcccacgcgagtcatattgaacccgagttcctggaaaggataatcaagaaatacggactcgaggttatacagaacattaagctgtcagccatcacttcctga

SEQ ID NO: 11443 - RNA, 933 nt, synthetic construct
  source 1..933: mol_type = other RNA
atgattatagagtatttgtctgaatccctgctgattgccgaacatgatttgacgtcattcgccttgaccgctcctcacaggtataaagtatacgagatcgcgaaacggaattccaaaaaaacacgtacaatcgcacatccatctaaagaacttaagttcatacagcggtctttggttgagctgtttgagaagagcctagacattcataaggcggcctttgcatacaaaaaggggttcgggattaaagataacgctaaggcccatattaactcgaagtacttactcaagatggacttcaaaaactttttcccttcaattaccccctcactcttttttaccgtggccgagaagaagggcgttgtatttacagctgccgatagggccatccttacgggcctggtgttttggaaacctcagggaagggacgatctgatcctgagtatcggtgcacccacttccccaatagtgagcaacttcgtcatgaattattttgatgaggccgtgttcgatctctgcattaaccgcaaaataacatacacccggtacgctgacgatattaccttctccaccaagctgaaagacaatctctttgatcttcccaagataatcgagactattctgaatgagacagtccagggtatcgaggtcaattccgaaaaaaccatcttcacctcaaaagcccacaatcgccacgtgacaggagtgactctcactaacgacaatcacatcagtgtgggaagagacaagaagcgactaatctctgcaatgatccaccaaagtaagttcaagagcctgactccggaagacgctagccacatcctgggccttattagcttcgcgattcatatcgaaccagaatttctcgacagaatcctgagaaagtatggcgccgaggttttaaacaacatcaaggctaaggcaggcgggatttga

SEQ ID NO: 11444 - RNA, 933 nt, synthetic construct
  source 1..933: mol_type = other RNA
atgattatcaattacctctctgacagtctgtttatgtccaaagatgatatagtgcggttcagtctaacggcccctcacagatacaaagtgtatgagattcccaagcgaaagtccggtcagaagcgcgtgatagcccatccttcaaaagaacttaagttcatccagcgctctctgattgacattctgaaactctacctccctgtccatgatgcagctttcgcttataggaagggaatcgggattaaggagaacgcaaagcagcacttgaactccaaataccttctgaagatggactttgagaactttttcccctcaattaccccagccctcttttttaaaaccttagaagagcatggattcgtcttggatggcgacgacaaactggttctctctggtctgcttttctggaaaaagaaggattttgacgggttgactctgtctataggtgctccgacaagtcccttggtcagcaatagcgtcatgtacctgtttgacaaaaagattagcgagatctgtctttcaagaaagataagctacacgaggtatgctgacgacatcaccttctctaccaacattaagaacattttgttcgacatcccagaactggtgtcttccgttcttaacgagctagtggatggcgtgaaactgaattgcaagaagactatcttcacaagcaaagcccacaatcggcatgtgaccggggtaacactgactaatgatggcaagctgagcatcggccgagaacggaaacgtctgatttcatcgatgatccaccaaagcaagttctgcaatctcacaatggatgaagcatccaagttactgggactcatcagtcatgccgagcacatcgagccaggatttctgaagaggatgatccacaaatatggcgaggaagttttaaacaatatcaaatccagagcgtccggggtatga

SEQ ID NO: 11445 - RNA, 936 nt, synthetic construct
  source 1..936: mol_type = other RNA
atggacattcttcaacacataagtgacttgctcctcacaaagaaaagtgagattatatccttcagcttaacagctccataccgatacaagatctacaggattgctaaacggaatagcgataagaagagaactatagcgcatccctccaaagaactgaagtttattcaacgtgccatcactgagtatctcagcgataagctccctgttcacgaatgcgcctttgcatataaaaaggggtcaagcataaaaaccaacgcacagattcatctacacaccaagtatctgctgaagatggactttgaaaacttcttcccatccatcacccctaggttgttcttcagcaagctccgacttgcaaacattgacctgacggcggacgacaaagtcatcctggagaatattctttttttcaagtccaaacgcaactcaaacctaagactgtctatcggagcccctagttcaccgctgatcagtaacttcgtgatgtatttttgggatatagaagtgcagaagatttgttcgaaaatcggcgttaactatactaggtacgccgatgatctcacattttccaccaataataaggacgtgttgttcgatatccccgatatgctggagaatatcttaccaaaatactctctgggtaagatccggatcaatcatgagaaaacagtgttttcctctaaggggcacaatcgccacgtcacgggaattactctgaccaacgacaacaagctgtctatcggccgcgagagaaaacggaagatatcagccatgattcaccattttatcaatggtaagctgcccgctgatgaatacaataagctgattggcttattggccttcgctaaaaacatcgagccctctttctacaagagcatggtaattaagtatgggcctgacaacatccataaacttcagaaacagaaagacaaatga

SEQ ID NO: 11446 - RNA, 960 nt, synthetic construct
  source 1..960: mol_type = other RNA
atgaatatttctaagcacctgtgcgagaaattggtaatggatgaggacgagatctttaagtttagtataactgccccctacagatacaaagtgtatgagattccgaaaaggaattcgccaaagaaacgcactatagcccaaccaagcaaggagcttaagttcatccaacggattattatctccttactgaaggacgtgctgcccattcatgctagctgctatgcttaccggaagaatttatctatcaaacacaacgcacttgttcatctgaataccaagtacctcctgaaaatggactttgaggattttttcccctccatctcccctcatctgttctttgaaatccttaaactcacaaagatccagttcgaagataatgacctcatcctcctcgaaaagctgttgttttttaagccaaaacgtaactctactcttaggctcagtataggtgcccctagttcccccttcatcagcaatttcgtgatgtattttttcgacattgaggtgcagagtctctgtgacgctcacggcattaactattcacgatatgccgatgaccttacattctcaacgaacaacaaagatctgctgttcgacatgcctattatcgtgtctgacattctgtctaaacattcctttgattccatcaagatcaacaacagaaagaccattttttcaagcaaaggtcacaaccgacacgtaacagggataacactgaccaatgaatccaacttgtcagttggcagagagaaaaagcgcctaataagcgtcatgatccactatttcgtcaccgggaggttggatgtggacgatgttctaaagctgcagggaatgctgagcttcgcacggtttgtggaacctaagttctacttgagcatgtgtaagaaatacggcctggtcaatatcaagaagctgaacagtttacagattgcgtctggagataaaagctcatacatctga

SEQ ID NO: 11447 - RNA, 915 nt, synthetic construct
  source 1..915: mol_type = other RNA
atgagcaagcccgaaataattcgattctgcttaaccagccctcacagatataaaacgtacaagattcctaagaggaactcagatcaaaaaagaacaatcagccacccaagtaaagagctcaaatttatacagcgtgtgctgaacgattatctgcgcgaaaaactgccgattcatgactgcgcctacgcctataagcagggactgaatattaaagacaatgctgaagttcatgcctctaccaaatatttcctcaagatggacttcgaagacttctttccatcaatcacccccgatttcttttttacaatgctggacaaagcggggctcgagattaatgaaatcgatagtatccttctgaagaacttcatcttctgtaaagcaagtcggaagtcaggcctttttctgagcatcggggccccttcctcccccctaataagcaacttcgtgctttttgggtttgacgagaatatcaaaaggttttgcgcagagaaaaacattaattacactcgctacgctgacgatttgactttcagctccaacatcaagaattccctatttgaggtgcccgagatcgttaaattctacctggacaaggagactaatggcaagattaagatcaataagaggaagaccgtattctcttctaaagctcacaatcggcacgtcactggtgtgaccttaacaaacgatgagaagttgtctgtcggcagaaaccgaaaacgcctgatttccgcaatgatacaccattttaagtgtggtaagctcgatccaacagagattgataagctgaagggcctcatgtcgttcgtgaactatattgaaggagacttttacaggcggatgatcatcaaatacggatcagaaacgatcgacaagttgaacaactataaacaggtcaagcgggatgccaagtga

SEQ ID NO: 11448 - RNA, 924 nt, synthetic construct
  source 1..924: mol_type = other RNA
atgaatattttcgagcaactgagcgacatcttatgtgtggacgccaatgagctaatggatttcgcttctacctcaccacatagatataaggtgtatactatagcgaaacggaatagcaacaagcgccggttgatagcacacccttcaaaagaattgaaattcatccagaggattctgatcaagattctcgagccaaagctgaaagttaataacgtggcacatgcctatattaaggacaagtccattaaaaccaacgcaatgcagcacgtaaactctaagtatttgcttaagatggacctggaaaatttcttcccctctattaccccaaatcttttttttagctgcctcactaagtctggcgtcgagatcactgaaagagataaggaactcctgacagggtttctgttttggaaacccaggcacagttacaaattgcttctctcaataggtgctccttcctcccctctggttagcaattttatcctgaactcgctggacgaagagctatccgtatactgcgagagcaataagattaagtacacacgctacgctgatgacctgacgttcagtacaaacgtgaaagatatcctcttctccctcccggaggttgtcagcgagagtctgtataataactacaacggagacatcaaggtgaacaaggataaaaccatcttcagcagtaagggatttaatcgacacgtcactggcatcgtgttaaccaacgacaacgtcctgtctatcggtagagaaaaaaaacgtgtgatatcatccacgattcacaaactcaagcttggcgccttggatgacaacgaggtgaatcagctgcagggaatctttgcccatgcctgtttcattgaacccgatttttacaataggatgctgaagaagtacggggctgagacattaaacaaaatcaaaaagtga

SEQ ID NO: 11449 - RNA, 930 nt, synthetic construct
  source 1..930: mol_type = other RNA
atgaagattgtcgatgtgctgagccttaaactgctgatgtccaacaccgacattgttaaatttgccaataccgcaccacatcgctacaaagtgtatcagattcccaagaggaattcttccaagaagcgcacaatcgcccagccttctaaggagctgaaattcctacaacggatcttgtgcggtattctggaagatatcctgcccatccacaattcggcttttgcctacaagaagaacattggaatcaaacagaatgcagaatttcacagcaagaacaaattccttctcaaaatggatttcaagaactttttcccgtcaatcaatcctaacctttttctccggcaaatagagtcacacgctatttctctggacgaggtggataagaagttgctaataaacctcatcttcagaaagccctaccgagagggaattctggagttatccattggcgctcctagctctccactcataagcaacttcatcatgtacaatttcgacaaggccatcagtgaaaagtgtaacagtatgagtatcacttacacgagatatgcagacgatattaccttttctaccaactccgttaacattctgttcaatatccccaaaatcgtggaaagtctcctccatgatatatatcagggggacatctccttaaataaagagaagacagtctttagctcaaaggcgcataatcgtcacgtaactggcataacactgtccaacgacagcaaattgtcaatcggcaggtataagaaaagggtgttaagctctaaaatccaccattacttgctgggtcatctcaaagaagacgagattcagaaattgaagggagaactggccttttccttccacatagaaccaattcttaaaaagcgattcatccggaagtatgggaaagagtgctttctgaagctggacaaggagctttga

SEQ ID NO: 11450 - RNA, 927 nt, synthetic construct
  source 1..927: mol_type = other RNA
atgaaaattatcgagctgttgtcttctatgttgcttatggaaaacagcgacatcatcaaattcagtaacagtgcaccatatcgatataaggtttatcagatccccaagcgcaactcactgaaaaagcggactatagcacaaccctccaaagaactgaagttcatacagaagttgctctaccaaatactgggcaaggaacttcccgtacacaagagcgcctttgcttaccagaagtatataggaatcaaacagaacgccgagcagcacgtgaagaataggtttctcttaaagatggacttcaagaacttctttcctagcgtcaatcctgagctgttttttatagagattgagcattacggcatcgagctggacaaaattgataagtccctactcaccaatttaatcttccggaagccatatcggaaagggggtctggagctctctattggggctcctatttctcccctcatctcgaattttgtgatgtacagattcgacgatttcatttccatcaagtgcaatgaaatgaacgtgaagtacaccagatatgccgacgatctgaccttttcatccaactgtaaagacatcttattcgaaattccaggcatagtcgagaaagcgctgtttgatatctacaagggtaacatcgttatcaacaagagtaaaaccattttcagctcaaaggctcacaatcgtcatgtgactggaattacactcagcaatgacgattctctatccattggaaggaataagaaaaggattcttagcgcaagcctgcattattacacactggggagattgacgaaagaagagatccagaagctgaaaggctacctcgccttttcattctacatcgaaccgaacctggagtccaaacttattcgcaaatacggcaaagagtgccttgataatctgatgaaggaatga

SEQ ID NO: 11451 - RNA, 924 nt, synthetic construct
  source 1..924: mol_type = other RNA
atgaacattctttcttccatcagcgacaaattactcatgaataattcagacctgctggagttttcaaggacgtgtccccatagatataaaatctacacaatccctaagcggaactctaagaaaaaaagggtaatcgcacagccaagcaaagaactgaagtttattcagcggatacttatacagaatttggaaaacaagctgcccatccataacatggcgtttgcctatagaaaggggattagcatcaagaacaacgctcagaaacacttgtacaacgactatctgctcaagatggacttcaaagatttctttgagtccattaccccgaagatcttttttcgcgaactggagaagcacaagatcatcctctcatctgaagatattaagtttcttacaggagtcatcttccgaaaggagaaaaatgagctcctgctgagcattggctcccccatttccccactaatcagcaatttcgtgatgtttagtttcgacaagatagtctacgaactttgcctcaaaaaagagataacttacaccagatacgccgatgatattaccttcagtactaatcgcaaaaacatactgttcaacatcccttcgatgatcgaagacgtgctgttagcaaattacgaaggagagatcatcctcaataaagaaaaaaccagattcaccagtaaggcccacaataggcacgttactggcgtgacactgagtaatgagaacaaattaagcatcggccgtacaaagaagcgagagttgattgtggccttgcactacttcataaacaataagctggacatcgactctattgagaaactgaggggggagctcgcttttgctttctatattgagcctgatttcaagaaccggctaattaagaagtatggtcaaaactccctggatcgcattcggcataataactga

SEQ ID NO: 11452 - RNA, 930 nt, synthetic construct
  source 1..930: mol_type = other RNA
atgaatatcgttgattaccttagcgacttaatattgatggatcgccgcgaactgttgaaattttcttctacatcaccgtaccgatataaagtgtatgagattcccaaaaggaactcgaatggaaagcgaactattgctcaaccaagtaaagagctgaaatatatccagagggccctcttgaaattctttgacggggtcattccaatccacgatagtgtgttctcttacaaaaagggaatatccatcaaagacaacgcctgctgtcatgtaaactacaaatacctgctcaagatggatttcaaagacttttttccttccattaccccctcgatcctgttcaatgagtttgagaaatataagctgtacttcaatgacgacgacaaaaagctgctatctggtctgcttttttggaagaagaaccggaagaatgatttcttacagctcagtattggcgcccctaccagccccttcatttccaacttcatcctctactcattcgacaaggccatcagtgatatatgcagcgaaaagaacgtggtgtattccagatatgcggatgacatcacattttcaagcaatgtcaagaatgtgctcttcgaatttcctaagatcgtcatcgaactgctgtaccagctatacaacggcaacattaagatcaacaaagacaagaccgttttttccagccgggcacacaaccgtcatgtgactgggattacgcttagcaatgatgggttcctgagcatcggcagagaaaagaaaaggaagctgtcttcctgttttcactactacattacccggaaattatcaaagatcgagatagacaagctgaagggcgagctggcattcgctttttatattgagccagatttcaagaatcgcctcatgggaaagtatggtgaaaaaacattggagctccttatgagagagtga

SEQ ID NO: 11453 - RNA, 930 nt, synthetic construct
  source 1..930: mol_type = other RNA
atgacaatcctcgatatcctgatggacactctgttgctcgatatgcaagaattgaagaagttcgcctctacatccccctataggtataaagtgtatcagatccctaagcggaacagcaaaaaaaagagaaccatcgcccacccatccaaggaacttaaattcattcaacgggctcttaatggcattctgagtaatattcttccagtccacgaggccgtgttcagctacaaaaaggaagttagtattaaggacaacgctcagaagcatctcaagtcacagtacctcctgaagatggattttaagaacttctttcctagcatcactccagaaattttcttcgaccagctggacaaaaataatatttcatactccgtggaagacagagagattatcagtcgcctgttattttggaaaccctctcggtataaagaatacttaagtctctccatcggagcaccctcttcaccgctgatatccaatttcattatgtacagctttgacaagaagataaacgactactgcaacaatatcaacgtcacgtatacccgatatgcagacgatattactttcacgaccaacgtaaggaatatcttgttcgatatccctaatgagattaaaaagatcctactggaggagttttccggtaagatcatcataaacaacaagaagaccatctttagctctaaagcgaataatagacatgttacaggcatacgtctgaccaacgataacaagctatctataggcaggaataagaaacgcgtgctgagcagcaaggtgcatcactactcactcggaaaaatcaacgatgacgaagccaaaaaattacagggggagctggctttcactttttatattgagcccgagtttgagtcgaaacttattaaaaagtacgggctggagacactgctcaagttgaacaaaatatga

SEQ ID NO: 11454 - RNA, 930 nt, synthetic construct
  source 1..930: mol_type = other RNA
atgagcatagttgattacgtgtgtgatgccctttgcatcgaaaaaatgcagttaatgcactttgctgtaacagctccccaccgatacaagaagtacgagatcccgaagagatccgggaacggcacccggaccattgcacaacccagtaagcaactcaagttcattcagcggatcatcatctctgagctcgaaaagattcttactcctcacccatctgccttcgcgtacattaaggggatcagcataaaggacaatgcggagatgcatgttaaaaatcgttacctgctcaaaatggatttcaaagacttctttcccagcattacccccgacctgatgtttcaggagtatgctaggtttggtgtcacattcagccctgaggatagtgcactgttgtcaaacatcctgtttttcaaacttaggaagaatagtaagctgaaactgtccatcggcgcaccatcatcacctttcatctccaacataatcatgcgccactttgacgccgtgatatcagaactgtgccagcataaaaagatctcctatacccgatatgccgatgacatcacgttctccagcaatattaagaacgttctatttgagatccctgaggccattactgtcgcactcaaaaaggaggggtataaatgcattaagatcaacaaggagaagacggtcttcagttccaagagaaacaatagacacgtgacaggtataaccattagcaatgaagacaaactgtctgtgggacgcactaaaaagcggattctcacagctgccgtgcacaaatttagcctgggatatttgtcggaatctgacatcgagaagctgaaaggcgaactatcttttgtattcttcgtggaaccagcctttaaggacaggttaattaaaaagtacggatacgatgtgtgtcataaattgtggaaacatgcttga

SEQ ID NO: 11455 - RNA, 930 nt, synthetic construct
  source 1..930: mol_type = other RNA
atgagcatcatcgactacgtgtgtgacgccttatgtatcgaaaagactcagctcatccaattcgccgtcaccgcaccccacagatataaaaaatacgatatccctaagcggtccggaaacggcacccgaacaattgctcagccaagcaagcaactcaagtttattcagaagatcatcttgctcaaattggagaaattactgacacctcatcagtccgcatacgcgtacgtaaagaataagagcattaaggataacgctacagtgcacattaataaccggtatcttctgaagatggatttcaaggactttttcccatcgatcaccccggagctgatgtttcaggagtacgcacgcttcggaattatgttctcaaacgatgaacagactctgctctcaaacatactgtttttcaagctgaggaaaaatagcaaactgaaactgtctatcggagctccttcttctcccttcatatctaacattgtgatgcgtcattttgacaccgtggtgagtgagctttgcgagaataaaaagatcaagtataccaggtacgccgatgacataacctttagcagcaatattcgggacgtcctgtttgaatttccccagatcattgccaatactctaaaaaacgaaggctatcatgatatcacgctgaacatagagaaaacgatcttctcctccaagcgcaacaatagacacgttactggggtcactctgagtaatgatgggaacttatccattggccgcgacaaaaagcgattgctttcagcctcaattcacacattcagtctaggtaagctctgcgaaaaggacattgagaaacttaaaggtgagctggcttttgccttctatatcgaacccgagttcaaaataaggatgctcaagaagtacgggtccagtacatgctctagattgtggaaagttgactga

SEQ ID NO: 11456 - RNA, 933 nt, synthetic construct
  source 1..933: mol_type = other RNA
atgaacattgtatcctacgtgtgcgataccttgtgtattgacgagaaacagttgatgctgttcgcagccacgtctccacaccgatataaaacctatgaaatccctaagcgctccggaaatggaactcgtacaattgcccacccctctaaacagcttaaatttatccagcgcctggtaatctcccaactggagaagatcgtgtctccacataaggccgcagttgcttatattaaagggctcagtatcaaggataatgcgatattacatgctaagaacagcttcctactgaaaatggacttcaaggattttttccactctatcacccccgaactgatgttccaaacttacgagcagctgggggtttccttcagcatcaaggagcgagaattcctctcgaacattctgttttataaggtgaggaagaatagccacctcaggctttcaataggcgctccgtcaagtccttttatcagcaacatcgtcatgcaccacttcgatgacagtatgtctaaatactgctccgaaaaagagatcatttacacaaggtatgctgacgatttgactttcagcagcaatataaagggtatactgtttcatctgcccgatgaggtgcggtttcacctagacgaaacaggctacaagtcaatcgtcgtgaacattgagaaaaccacttttacaagcaagaaacacaatcggcatgtgactggcattacgatctctaatgattccacaacctcaatcggtagacagcggaaaagaaaccttagtgccgccattcataagtttagtctcggcaatatgaccgaagacgagattgaaaaactgaaaggcgacttatcatttgcattctttgtcgagcctgacttcaagctcagaatgaagcagaaatacggagagaagatatacgggatgctgttcaagaagaactcctga

SEQ ID NO: 11457 - RNA, 939 nt, synthetic construct
  source 1..939: mol_type = other RNA
atgagcatcttcgatagtatcgtggactctctgtgtacgtcacccgaacatcttcgcaactttgccgcgacttccccttatcggtacaaagtctatgacatcccaaaaaggagcgggtctggaaaacgtaaaatagcgcaccccgcaaagcagttgaagtacattcagcgattagccgtgcacgagctggaaaagttcttcaccccacacgaatccgccttcgcttatgtgaaaggcaaatctatcagagacaacgctaaggttcacgtaaggaacgagtatctgctcaagatggatttcaaagacttttttccgagtattacaccagaactgttctttgcacaggtggaaaaattgggcactaccttttgcgatgaagacaaggttttcctgtccaacattctgttctacaagttgcgatcttactcaaagctgaggttaagcatcggggcacctagctcccctttcgtgagtaatattgtcatgcgggaatttgacatcaaaatatctgagttctgcaaaaccaagtccatcgcctatagcagatacgccgatgacctgtgtttttctacaaacatttccggtctactgttcgagctgcctaaactggttaccaaaacactcaagtcgaatggctacgccgagctcaaaatgaataggagcaaaaccgtgtacagctccaagggacataatagacatgtcacgggcgtgactctgagtaatgatgagaagctatcagtcggccgtagtaagaagcgcgagactatagctcgcgtacatcactatctcaacggtagactcacacccgaacaagtggagagccttcaggggtatctttcatttgtctttcacatcgagcccgagtttaagatccggttgcataagaagtacggaaatgaagctattgagatgctcctttcagagcggaagattgattga

SEQ ID NO: 11458 - RNA, 933 nt, synthetic construct
  source 1..933: mol_type = other RNA
atggtaaagatagtgaattttatctcagagtcactctgcattgaggagtccgaactgatctcctttgcacacaccgccccccacaggtacaaaatctatacaataccaaagcgctcaggaaacggccgaaggacgatcgctcacccctctaagcaactcaaatttatccaacgcctcacccttcggcttctgcaggacgtcttacctattcacgaaagtgctctggcgtacaagaagagtatcagcattagagataacgccaatatccatcgtaagaaccagtacttactgaagatggactttaaggatttctttccatctattacaccgagcctgttgtttagagaactagagcgaaagaatatcattgtctcagacgaggacaaaaatttcctggccagcattctctttttcaagcttagatcgaattcttctctcaaactgagtatcggggcaccttcctccccattgatttccaacttcattatgcaccactttgatcagatcttgagctcagagtgcaaaaagatgaagatctgttatacccgttacgctgacgatattacctttagcactaacatcaaggattctctgttcaaaatccctagcatagttaagaacatccttaagaacgagaaataccccgagctaaaggtgaatgaggaaaaaaccgtgttctcttccaaagcccataacagacatgtgacgggaatcacaattacaaacgagggcgcactcagtgtagggcgggaaaagaggcggctgttaagtgcctccctgcataggtatattgagggcaaaatagacggtgaaactaagaatactctgaaaggtcagctgagcttcgccttcttcattgaaccccagttcaaaatacgcctgcagaaaaagtatggggaacgggctttggagaaactcttcagcaatgaatga

SEQ ID NO: 11459 - RNA, 936 nt, synthetic construct
  source 1..936: mol_type = other RNA
atgaacatcctcaatagcgtgtctaaggagagtggcctttcagttaccgacctcctggcattcagcaaaacctgccctcaccgctataaggtctattttattgccaaacgcaatagcgacgctaaacgggttattgctcagcctagcaaggaggtgaagtacctgcagggggctgtgataaagattttcaagagctttgacctggtacatgaggcggccttcgcttacaaggatggcataaacatcaagcaaaatgcccaggtccatgccaatcagaaatacatcttgaagatggacttcaaagacttcttcccgagtatcaccccagatctgctattttcacaactcaatatcgcgaaggtgtttcttagtgaaaaagacaaagagtttctctccggactccttttctggaaacgacgaaggaactcaaaattacggttatcaattggagcaccaagttcccccttgatgtccaacattgtgatgtacttcttcgattcctatatagaaagctactgtagactgaatagaataaggtacacgaggtatgccgatgacctgtgctttagttcttcgatggcaggaggacttgactccgtgaaagatactgtgaacaaagccctgcgctcattttttgggcgcaaaatcagactgaacaccgctaagactattttcgcatctaaggccatgaatcggcacattacaggcatcacactgactaacgatggtaagctctccgtcgggcgtgacagaaagagggagattattgccgcagtccacaaagtgagccagggcaacagccccgattgttctttgaagacactggctggtctgatctcttatgtacattctgtggaaggggattttaaagaccgtctaatcaagaagtacggcgaagttatcgtccagaagatcttcgattccttgcgggagtga

SEQ ID NO: 11460 - RNA, 948 nt, synthetic construct
  source 1..948: mol_type = other RNA
atgatcgaactgaacttgcttaaatcgctgaatacagattttcccctaggcgaggacaacatactctctttcgcacgaactgcaccgcataggtacaagacctatgaaatcctcaaacgagacggtgtgagcaagaggaaaatcgcccagcctagcaaggaagtcaaattactgcagagaagcgcgctgaaagtgttggaaccaatactgcctgtgcatcccctcgctttcgcctatactaaggcaaggtctatcaagcacaatgcgcttatccacaaggagtccaaatttatcctgaagctcgacctgaccaatttttttaactccattactcctaagctcctgcttgagaagtttcataccgctaatattagtctgacgcacaacgaccaggacctgattagtcacctgtttttctggaaggagaaacgcaatgagtctccaaaactgagtgtgggggctccatcatcacccctcttatccaacttcatcatgtacaactttgacacgaagattatcgaagtatgcaaaaaaaacggctgtctgtacagccgctacgccgatgatattaccatttcctcaaccgaaaacttctatcagctcaatctgccattcatcatagccaaaattctacgggaggaattcggggaatccatcaccttgaataacacaaagacaaagtacattagcagtgcctatcggcgtcaagtcactggtgttatactcacaaatgatcaggatatctctatcggacatcgcaaaaagcggcttttgtcaagcaaaattcaccacttcaagatccagagactgttggatcccaatgagattcagaaactaaagggagagcttgcttttgccttctatatcaaacctgagttaaggaagaaattcgagataaagtacggccaaaacaccatcacaaagattctgaagtacaagagactgtga

SEQ ID NO: 11461 - RNA, 942 nt, synthetic construct
  source 1..942: mol_type = other RNA
atgattgagctgaatcttctcaagttccttaacatcgagtttcccctcggcgaggaaaatattatcagttttgtgaataccgcccctcatagatacaaaacctatgagattctcaagaaagatggcaaaaacaaaagaaagatcgctcagcccagcaaagaggtaaagctgttacagcgttcagctctgaaactactcgagccgatactcccaatccatgacctcgcctttgcatacaccaaaaatcgaagcatcaaaaacaacgcgatgatccaccaaaattccaaattcattctgaagactgatctgtcaaattttttcaactcgataacacccaagattttgctcgagcagatacgcaagaccaacatatcagtttcaagtaagaatgaggaacttgtgtccaatttattcttttggaaggaaacacgcaaggacggactgaagttgagcattggagcaccttcgtctccactgttgagcaacttcatcatgtacaactttgacaacaaaatcgtggaggtctgcaagcagtatgactgtgcctattccaggtacgcagacgatatcactatcagctctagtaagaacttttatgaactgaacttcccactgatcattaaaaagatcttgctggaagaattcggtgaatctattaagctgaatagcaacaagacgaagtatatttccaaagcctaccaccggaatgtcactggcataacaatcacaaatgatgggtccattagtattgggagcaataataaacggctgctatcttctaagattcaccacttcaaaaacaacaagataaaggataccaacgagatcttcaagttaaaaggtcagctttccttcgcttttcatatcaggcctcaactgaaggagcagtttgaaaaaaaatatggaaaggacaccatctacaaaattctgaagtacaagtga

SEQ ID NO: 11462 - RNA, 948 nt, synthetic construct
  source 1..948: mol_type = other RNA
atgaaggagctgaacttgctcaatctacttaatctcgaattccctctgggacaggataacatactgagttttagcaggaccgcaccccatagatacaagacttatgaaatcctgaagaaagatggaatctctacacggaaaatcgcccaaccctccaaggaagtcaagcttttgcaacgaagcgccataaaaattctcgaatcaaattttccggtgcactacagcgcatttgcctatgttaagaatcgctccattaagcagaatgccataatacaccagaactcgaactacattttcaagaccgacttgagtaacttttttaactctataacgcctctgattttcctcgaaaagatcaagcagaacaacatcattctttccgacaaaaattcacagctcatcacacatctgttcttttggaaagagaatcgcaatgactcactcaaactatccattggcgctccatctagtccctttatctctaacttcatcatgttcaacttcgatgagaagattctggagatttgcaaaaaacacaactgtgagtactcaagatatgccgacgacataactatttcttcccggaataatttcttcgaattaaacttcaccagcatcatcacagcgttacttaatgaagagtttaagggcaacatcaagctgaatacgaagaagactaagtacattagtaaggcttatcatcgtaatatcactggtattaccatcaccaatgaccacaacatcagcattgggcataggaaaaaaagattgctgagcgccaagatccaccacttcaaaaacaacaagatcaaaaaccagtccgatattctcaaactgaaaggcgagctggcattcgctttttatatcatgccacatttaagggagaagttcgagaataaatacgggaatgataccattctgcagatcctgaagtttaaaacagattga

SEQ ID NO: 11463 - RNA, 1008 nt, synthetic construct
  source 1..1008: mol_type = other RNA
atgagtaactttctacagaaactgaagcagttcgtttaccagctctttaactctaaatctgagaagaatgtgctgaaaatatcgtaccctaccaatatcaaccagcagaagtttaagaacaagaagtcctttttggatttcgcctattctgccccctacaaatataagaactactacattcccaagaggaatagcacccaaaagcgtttaatttcccagccaaccgcagagttaaagtttgtacaaaaggacgtcatcaatcagttgtcagctttcctcccgattcacaactgcgcctatgcatacgtgaagaatcgcaatattaaagacaatgctgaactgcatcggcatagcaattatgtgctgaagttagacttcaagcatttcttccacagcatcagaccaaaaatcctctttaatcagctggaacaccaccagattaagctgtcagaaatcgatcagaccatactgagctttattttcttctggcgagaaaagaaagacagtccccttaaattgtcaattggagccccctcctccccagtcctgagcaactttataatgtatcggtttgacgagatgctgaaccagctgtgcgagaagcaccagtgtatatacagtcggtatgccgatgatatcacaatcagctccaaatatcatttctacgacctaaactttcctcaacatgtgcaaaaccttctggatcaggagttccaaggcaagattaagctcaatacacagaagacaaaataccttacgcgcaaacatagaagatttgtgactgggatcactctgactaacgatgctaaattgtctatcggccgacaacaaaaaaggcttctcagtgcgaagattcaccacttcaagataaacaaactgaatgacgagcagcagatcctgtctctcaagggacagctggcattcgctttctatatccagcctgagcttaaagttcagttttcaaggaaatacggtgaagagctcttgcacaaaatcatgtccgactga

SEQ ID NO: 11464 - RNA, 906 nt, synthetic construct
  source 1..906: mol_type = other RNA
atgtcagattcagagttgtttgacctcgcaaaaacctgccctcacagatacaaggtgtatgagatcgataagaaaaatgggggaaagaggctcattgcccatccatccaaagagttgaagtatatccagaaactcatccttgacattctgaaagcaaacctgtcaatacaccattcggcatacgcctacgtcgccgagaaaaatattaaggagaatgcctctcttcacgtaaacaatagttacctgcttaagatggacttcaaggatttctttccatccattaccccgggcctattcttcgacgaatgtgaaaaacataacatcttcttctccaaagaagacaaggatttgctggccaatattctattttggaagaagaagcacgctaaaaagttggtcctctctataggtgcgccctcttcaccctttatctccaacttcatcatgttctcttttgatgctctcatcagcgagtattgcaatactaacggcatcaaatacagccggtatgctgacgacttaacatttagcaccaataagaaagagaagttaagcaaactgcccaaactgatctccgaaaaactgaattcgctgtaccggaagagtattcgcataaacattgaaaagaccacgtttgttagcaaggcttgtagcaggaaagtgactggattagtcatcactaataacaacacaatctctatagggcgcgaacgaaaacgtcagataagtgccatggtgcaccagtatagcattggtaagatgacaaactccaaggatattgaaaaactggtgggactggtgaattttgcgatctacattgagcctcaattcctgaacttcctccttaaaaagtatggcagagagatcgttaatagtatctacaagctgaagaacaagaacaagtga

SEQ ID NO: 11465 - RNA, 939 nt, synthetic construct
  source 1..939: mol_type = other RNA
atgaacattgatatcaagaggcacttgagaaataacctctttatttcagacctggagatattcgaactgtcgaaaacctgcccccatcggtacaaggtctatgagattaataagaagaacggtggtacgcgcacaattgcccacccctctaaggaacttaagtacattcagaccttaatcatcaatgttctgaagacgcaactacctatccatcggtgtgcatttgcctatgtagctggcaaaaacataaaggagaacgctttgttgcatgtcaaaaatccgtatgtcttaaagatggacttcaaagatttcttcccttccataacacccggcctttttttcaatgagtgcgaaaaacactcactctacctgtcaaaggaggatcagcagctgatcgcaaactttctgttttggaagaaaaagagagcgcacaagcttattctgagtatcggagccccatcctctccattcattagcaacttcataatgtactcctttgatgtggtggtgaatgagtattgtagcgaaaaaggcatcatttacagccgctacgcagacgatctcacattttctacaaaacaggctgggcttctgtcccacctccctaaaattgtgtcagagaagctgaattccctgtacaaaaagtctatacgaattaacagcgagaaaaccactttcgttagcaaagctcacagcaggaaggtgactgggctgatactgaccaaccagaataacgtaagtatcggaaggactaaaaaacgtaacatttccgccatggttcatcaatataagatcgggaaaatcatcgataagaaggaaatcgagaagctaattggactcgtgaattttgccgtgtacattgaaccagacttcctcaatttcttgatcaaaaagtatggcaaagacactatcagtaagatctataagatcgacacctga

SEQ ID NO: 11466 - RNA, 906 nt, synthetic construct
  source 1..906: mol_type = other RNA
atgtccgaaaaagaactgttcaatttctcaaagacctgtccacaccggtacaaagtatatcccataccgaagaaaaatggtggcgagcggatcattgcccaccccgcaaaagagctaaagtatattcaacgagtcattgtcaagatactcaagaccaaactatctatccatcacagctcctatgcttacatgaataacatctcaatcaaggacaatgccgcattgcattccaataacgatttcatcctgaagatggatttcaaagagttttttcccagcatcacacctctgattttttttaacgcactcaatacgcagaatatccacttatccaaaattgatagtgcccttttagcgaatttcctcttttggaagccctacagaaagcaaaaactcgttttgtcaattggcgcccccagctcgcctctgataagcaattttgtgatgtacgaattcgacaatcagatcagttctctttgccgtaatctgaacatcacatacagccgctatgccgacgatctcacctttagtacccaggaaaaaaacgtgctttacgtgcttcctaaacagatccaacagattttgaacactacttacaagaagggaattcgcatcaacccagagaagacatctttcatttcaaaggcttttcagagaaaggtgacgggactcatactgactaacgagaataacattagtatcggcagggacaagaaaaggctgataagctccatgctgcacaagtataagattgggctgaacacccagaaagaggatatcgaaaaactgactgggttgctgtccttcgctttctatatagagccacattttaaggagtctatgatcaggaaatacgaaatcgacacaattaacaaactgttcaagaacaaggagaacccttcttga

SEQ ID NO: 11467 - RNA, 939 nt, synthetic construct
  source 1..939: mol_type = other RNA
atgtccctcctacaattcatcgctaatggcctgtacatcacggaggatgaagccattcggtatattgtaaccatcccccgcagatataagaagttcaacatccggaaaagaaattccaatgagttcaggctcattgcacagcccgccaaacaggtgaaaagtatccagcgaattgtgctcaagtatgttatcagtgattttcacgtgcatgaacgcgcgtttgcatatgaatcatacaaggacataaggaagaatgctctcgttcaccacaataacgactacattctgaaaatggacttcaagaactttttcccgtccatacggccatttcacttgatgaactgtttcgccaatatgaacattaaactggacgagatggattttttcgtcatcgaaaaccttttcttctggaaaccccgtcgcaactcgcctttgcagctgtcaatcggcgcaccttccagccctaagatctctaacgtaatcatgtactcttttgactgcgagatcttttctagatgtaaggagatgggaattgagtattcaagatatgctgatgacctgacttttagtaccacaaaaaagggcattcttttcgatataccaaagatcgtgagggaaattctaaatgaggtcaatctgaaaagcataaagatcaaccatgagaagacaatcttttccagcaaaaagtttaaccgccatgttacaggaataaccatcactaatgacggtggccttagcctggggcgtgagaagaagaggatcttgcgatcaaagattcatcactacatttgcggggtgttaccagatgtggaaatcctgaaactgcggggtgagttagggtacgctaaatttattgaacccagcttcttcaaagccatggtgaataaatacggatatgacgtcatagatagcattgccaagtacggcaactgctcttga

SEQ ID NO: 11468 - RNA, 939 nt, synthetic construct
  source 1..939: mol_type = other RNA
atgaatctgcttcaattcatatccaatggcttgtatctgacagatgatgaagcaatttcttacatcatgaccatcccgaggaggtataagaagttctatattaagaagcgcagttcacaggaatatagacttattgcacagcccgctaggcaagttaaatcactgcagaaggtggttctgaaacatatcgacaaacactttcacgtgcacgaaaatgcctttgcctatgaatacaacaaagacattcgaaagaacgcgttactacactctaagaatcagtttatcctgaagatggacttcaaaaacttctttctcagcataaaacccattctgctgaagaaatatttcaacgagattggcatcgagttggataagaaggacattatcgtgatagagaatctgtttttctggaagctgcgtcgcaatagccctctccgcctcagtattggggctcctagttcgcccaagatctctaacgtggtgatgtacttttttgattgcgagatctccaaaaagtgcaaacagttaggaatagaatactcaagatacgccgatgacctgacattcagcacgaacatcaacaacatcttatttagcattccaaagatcgtgagagagacactaaaccaggtcggactgaacgacattaagatcaatcacaagaagactgtcttctccagcaaaaagttcaatcgacatgtaaccggcgttaccattactaacgataaaaaactgtcacttggtcgggagagaaagcggttgcttcggtccaaaatccatcattacacctgtggtatcctcagtgaaacggagatattgaaactcaggggagagctcgggtttgccaaatttatagagccaacattcttcgaaagcatggtaaataagtacggctacaaagtcattaagtccatcaccacttatgggaatctgtcttga

SEQ ID NO: 11469 - RNA, 933 nt, synthetic construct
  source 1..933: mol_type = other RNA
atgaatctgttacagtttatcgccaatggactatatctgactgaagacgaagccatgagatacatcgttacaattccacggcggtacaaaaagttttacatccggaaaaggaatggcattgactatcgtctcatagcacagcccgctcgccaggttaaatttctccaaaaggctacattgaagtatatggggaagtatttccatatacacgagtccgcgtttgcttataaatctggcaaggacattcggaagaacgctctcgtgcactgtaacaacgaatacattctcaagatggactttaagaacttcttccttagcattaagcctatccaccttaaaaattacttcagtaggatggggataaccctcgatgagaaagatatctttgtgctggagaacttgttcttctggaagttgcgcaggaactccccgttacgactgagcatcggtgccccttcaagtcctatgctgtcgaatgtagtgatgtatctgttcgatgtagagattaacaatcagtgcgaagccttagatgtgacatataccaggtacgccgacgacctgacgttctcatcaaacgttaagggaatcctgtttgatatccccaaaattgtgaaagaggtccttactaaggtcaatatgaagggcatcaaaatcaaccgcgagaagacagtgttttccagcaaaaagttcaacagacatataaccggggtgaccatcactaacaatggtaccctgagtcttggcagagaaaggaaacgtttgctacgctctaaaattcatcactacatctgcggactgctgccagatgtcgaaattctgaagctgagaggagaactcgggtacgcaaaatttattgagcccaagttcttcgagtctatgatgtcccgatatggttacgagataatcgagagcatcgcaaagtacggcaattga

SEQ ID NO: 11470 - RNA, 933 nt, synthetic construct
  source 1..933: mol_type = other RNA
atggaactgctttcttatatatccaagggactgtttctctccgaggaagaggccaagcggtatattgtgaccattccccgtcgatacaaaaaataccccattgcgaaaagaaatggtaatggataccggctgatcgctcaaccagcaaggcaggtgaaggcactccagaaagcagtcattaaccacatgctggccaatctgaaggtgcacgaaaatgcattcgcctatgaagccgacaaaagcattagaagcaatgctttgatgcattgtaacaatgattacctgctgaagatggacttcaagaacttttttatgtcaatcaagccacataacctattgtccgtcttgaaagaatatggcgtagagctgacgggcacggatatcttcgtgttagagaacttattcttctggaaacttagacgcaactcaccgcttcgactgagtgtcggggcgccttcttctcccatcatatcgaataccgtgatgtattttttcgatgaggagattagtaagagatgcaaggaactcgacataacctattctcgctatgctgatgaccttacattttccactaagattaagggtgctctgtttgatgttcctaagttagttcgcgaagtactgaacatcgtgaatttgaggaatatcaaaatcaaccacgaaaagacagtctttaccagccgtaagttcaaccgccatgtgacaggcgttactattactaccgaggggtacctgagtctggggagggaccggaagaggctccttaggtccaaaattcatcactacgtgtgcggggtcctaagcgagaaagaaatcctcacactcaaaggagagctgggctacgccaagttcatcgagcacaagtttttcctcagcatgatcaaacggtacggcaacgccgtgatctcagagatctcaaaatacgagatatga

SEQ ID NO: 11471 - RNA, 933 nt, synthetic construct
  source 1..933: mol_type = other RNA
atggagctgctgaactatattgcaaacggtttattcctcagcgacgaagaggcaaggaagtatatctcaacaattcctaggagatacaagaagtatcacatcctcaaacgaaatggaaaagcctttcgcctcatcgcgcagcctgcccgacaagtgaaaagtctgcagagcgctgtgttgaatcacatttccgacgtgctgcaggtacacgagtccgcgtttgcatacgagagcagcaagggcattaaagccaatgccctgatccactgtagaaatgactatctgctgaaaatggatttcaagaacttcttcttgtcaattaagccgtttaactttctgcgtaacttgaaggagtttggcattgagctgaatgaaacagatgtcttcgtgatcgaaaacttattcttttggaagctgcgccggagttcaccacttcggttatccataggggctccctctagtccgaaaattagcaatgtcgtaatgtacttcttcgacgaaaaaatgaccaagaaatgcgccgctctcggaataacctattcaaggtacgccgatgatttgacgttctccactaaggtcaagggtgtgctatttaacgtgcccaagatcgttagagaaatcctgaatgaagttagtctccggaacatcaagatcaaccatgagaagactgtttttagctcctctaagtttaacaggcatatcacaggagtgaccatcactcccgacgggcatctttctctagggagagagcggaaacgtctgcttcgctccaaaattcatcactatgtgagcggcgtgctctctccaaaagaaatcctgacccttaaaggcgagatgggctacgctaagttcatagagcactcgttctaccagtctatgattaatcgctacggagtcgccgtcatagatgcaattgctaagtacgaaatctga

SEQ ID NO: 11472 - RNA, 933 nt, synthetic construct
  source 1..933: mol_type = other RNA
atggagctactgtcattcatatccaacgggctgctcctgactgaagccgagacaaagaagtatatctccacaatccctagacggtataagaagtaccaaatccccaaacgtaacggacacggcaatcgactgattgctcagccggccaaacaggtcaagttgcttcagaaagccgtgctaaatttcatatgcgaacacctgcaggtacacgaaagcgcttttgcgtacgaggaaaataagtcaatacgggctaatgctcttatacattgttctaaccagtacctcttaaaaatggacttcaggaattttttcctgagtatcaagccccacaatttgattaactacttccaaactaagggagtcgtgcttacggagtccgacatcttcatcatcgagaacttgtttttctggaagcttagacgcaatagtcccttgcggctgtccattggggcaccatccagcccaaagctgagcaacgtgatcatgtataactttgacgagaaaatctctctcaagtgcagcaagatgaacatcatctattcacggtatgcagatgatattaccttctccagccacgtcaaagggagcttattcgaaatccctaggattgtgagagagactctgaatgaggttaacctcaagaacatcaaaattaaccatcagaagactgtgttttcatctcgaaagttcaatcgccatattaccggagtgacaataaccacggaaggtcatttatctctgggtcgtgttcgcaaaaggctgctgaggagcaagattcacagattcattaatgagaaactcaccagtaaggaaacagccagtctcaaaggcgaactgggctacgcaaaatttatcgagtactcgttttatcagtctatgattgacaaatacggctttgataccatcaacaagattgccaaatttcctcaatga

SEQ ID NO: 11473 - RNA, 933 nt, synthetic construct
  source 1..933: mol_type = other RNA
atgaatcttctccagtacatcgcaaatggattgtttctcacagaggatgagacaaagaggttcataataacagctccccggcgatacaagaaatttacgattgcaaagaggaatggccttgaccgcagattaatcgcgcagcctgcacgacaagtgaagtctatacagagagctgtgttgaaacacattcgtgaaaatatcaaggtacatgagcacgcctttgcctacgaaaaggagagggacatcaagaaaaatgcctcactgcacaaagatcatgattacttgctgaagatggacttcaagaacttcttcctgagcataaagcccgttaacctactcaacgtgatcaagatgcaggggatctcgttagaaaacgacgatgtcttcgtgcttgaaaacctatttttctggaaactgaggcggaattcccctctgcgcctgagtatcggagctccatcttccccattcatttctaacgccgtcatgtttttctttgatacggttatgtcagaaaagtgcaaaaaaatcgaggtcacttatactcgctacgccgatgacctcaccttcagtaccaacaggaaaaatgtactcttcgaagtgcctaggttggttcgggagattctgaatgaaactagcctccgaaacattaaaattaaccatgagaagaccgtgttctccagcaagaaatttaatcggcacgtcaccggtgtgaccctcgccaacaacggagtgctttccctggggcgtgaaagaaaaagactgctgagatcaaaagtggactattaccggaaggggctgctgagccccgaggaaattctgaccttaaagggtgagctgggcaacgctaagtttatcgagccggaatttattgagcgcgtcgagagtaaatatggctctgacgttatccgcgagatccaaaagtataatatttga

SEQ ID NO: 11474 - RNA, 933 nt, synthetic construct
  source 1..933: mol_type = other RNA
atgtcacttttgaaatatatcgccgacggcctattcttgacagaggaagagacaaagcgcttcataattaccgtacccaggaggtacaagaggttcacaatagccaaaagaaaagggttagagagaaggctgatagcccagcctgctcgccaggtgaaaagtatccagagagcagtgctgaagtacatccgggatgaaattaaggtacacgaatgtgcttttgcatacgagatcgatcgggatataaaaaagaacgcttttttgcacaaggacaatagctatctcctcaagatggacttcaagaatttctttcttagcatcaagccaatcaatctcctgaatgttattaaaaggcatgggatagaactagagggaaacgatatctttgtcctggagaacctgttcttttggaaacttcgcagaaacagtcctctgagactgagcattggggccccctcctcaccattcatttcgaacgcagtcatgttcttttttgacaagatgctttccgagaaatgcgagcaaatgggtgtggtgtatactcgatatgcggatgacctgaccttcagcacgaatcgcaaaaacatcctctttggaatgcctcggctggtccgtgaagttctgaatgagacgaatctccggaacatcaagattaaccatgagaaaaccgtcttctcctctaaacggtttaatcgtcatgtgaccgggttaactctggccaataacggcgtgttgtctcttggccgagaaaggaaacgcctcttgcggtccaaagttgaccactacaaaaagggcttactgtctcccaaggagattctgattctgaagggagaactcggttacgctaagtttatcgagccggtgttcatcgaacgagtcaagcagaagtatggcagagatgtggtgcaccagatccaaaagtacaacatttga

SEQ ID NO: 11475 - RNA, 939 nt, synthetic construct
  source 1..939: mol_type = other RNA
atgaaactgcttgagattatatccaaaggcctgtatttgacggaagacgaagcaaaacgttacatcgccactatgccaagaagatataagaggtaccatatagcaaagagaaactctgataagaagagactgatcgctcagcctgctcggcaggtcaaaagcattcaacgcagtgtaatttcaatcattcacgacgaaatcttgatacacgagaatgcttacgcctatgcctccggacgggatatcaaaaagaatgctgaaatgcacaggaaaaacaaatacatcctcaaaatggacttcaagaacttttttctgagcataaagccgcacaatctctttcatgtgttcgaacgtcagggaattattctcgatgacgaggacttttttgtttacgggtgtctattcttctggaaacagcgaaggaactctcctctgagactgtcgattggggcccccagcagcccattcattagcaacgccattatgttcttttttgacgatgtgatttccaataagtgcaaagagatggacgtgtcatatacacggtatgccgatgacatgactttcagtaccaacaataagggaatactgttcgatttacccaaactggtccgaaacacactcaacgacgtgggtctgaagaacataaagatcaaccatgagaagacagtcttctcctcaaagaaatttaataggcacgtgaccggcgttactatcaccaatgatgaggcactttctatcggtcgcgaaaagaaaaggttattgcgcaccaagattgattattaccgcaagggcctgctcaatcccggagaggtgatgaagctaaagggcgagcttggctttgcgaaattcatcgaggaagggtttatcgaacggatgattaagaagtacgggatcgaactgatcgagagtatcaaaaagttcgagatcaatgagtga

SEQ ID NO: 11476 - RNA, 936 nt, synthetic construct
  source 1..936: mol_type = other RNA
atgagtttgctggaaaagatcagtaatggcctaatgctgagcaaggctgatgcaaagaattatatttctactatcccccgccggtataaggtctacaccatcaagaagaggaattccgaagaaaccagactaatcgcccaccctagtaaacaggtgaagtccctgcaacgagcgatgctgacttacttcaaagacaagctgccagtgcattcctctgcctacgcgtacatttcaggcaaatcgattaaagagaatgcagaacgccacgtcaacaatagctatatcttgaagatggacttccggcatttcttcttatcaatcgagcctctgcattttatcaacgtgatttataaccacgggtttgagctcaatgaggaagataaattcgttatctggaacctgttcttctggaaaaggagatctaatagcccactgcggttgagcgtcggtgcaccttcttcccccttcatctctaatgccataatgtacttctttgacgaagccatcagcgagacttgcgccaaaatgaacgtaacatatacccgttatgctgatgatcttacattttccacgaacaacgaagatatactctttaacataccccgcatggttaaaggaattctgaaggccaacggcttaagcaaaattaaaatcaacgaggctaagacagtgtacagcagtaaaaagtttaataggcacgtgaccggggtgacactttctaatgacggctgtatctccctcggtcgagaaaggaagagacttctgtcaagtaagattcatcacttttcccagggcagactcagcgacgtagaggttcttaagctcaaaggggagctgggattcgctaaattcattgagccgttgtttatagagcggatgtcaattaagtacggactcgacattataaaccacatccagaagtttaacccatcatga

SEQ ID NO: 11477 - RNA, 936 nt, synthetic construct
  source 1..936: mol_type = other RNA
atgaccctcttggagaaaatcgcaaacggtctgatgctgtcaaaggatgacgccaaaaactacgtgtcaacaattccaagacgttacaaggtttacacaataaacaagcgcaacagtgaagaaaaacgattgattgcgcaccccagcaagcaggtgaaggccctccagcgggcattcatgtctggattcaagaaaaatatccctatccattcatctgcctacgcctatgaaaacgagcgggacataaagaagaatgcccttcagcacgtgtccaatcccttccttctgaagatggatttccgacatttttttttgagcattgagcctaggcacctgatcaaagtcatgaatgaccacggctttgagctgaatgacgaagataagttcgtgatttctcatatgttcttctggaagcgccgctccaactcgctgttaaaactgtctatcggagcccccagcagtccttttatctccaatgccgtgatgtatttttttgacgaggctctcagtattgcttgcaaggatatagatgtcgtatatacgagatatgctgacgacctcactttttcaacctgtcaaagcggggttctattcggcgtcccgaaaatggtgaaaaatatcctgaaagctaacggcctgagcaagattaagatcaacgagaagaagacagttttcagcagtaaaaagttcaaccggcacgtcaccggagtgactctcaataatgagggcgcagtctccctaggcagagaaaggaaaaggctcctgtcctctaagatacatcacttttgcaacgaccttttagatgaagacgagactttgaaactgaagggggagcttggttttgcgaagtttattgaaccatccttcgtagagaagatgaaaaacaaatacggggtggatattatcatggcaatccagaaatacaatccaaactga

SEQ ID NO: 11478 - RNA, 930 nt, synthetic construct
  source 1..930: mol_type = other RNA
atgaaaatcgtaaacttcatctcagacaagtttttcatgccagagcaggaagtacggaactatttgcgcaccgttccaagacggtataaacagtttaccatagacaagaggaatggtgagccccgcttgattgcacagcctgctaagcaggtgaaagcattacaagtgtcagttctgtctgaactcaagcgatacattcccatccatgagtgtgcttacgcttatcaatcaggtcggaatattaaggccaacgccttgcttcatgccaagaacagctatctccttaaaatggactttaagaacttcttcctgagtattaagccagaagtctttctcaatgttctgagtaagcacggaatcgcagtctccgaggacgatgccctgtctattgccaatcttttcttttggaagcttaggagaaattccccgctgagactgagtatcggcgcgccctctagtcctttcatctctaacgcaacaatgtactttttcgacagctatctgtccgctgaatgcaagaaaatagatgtggactattcaaggtacgccgatgatcttactttttccaccaagacgaagggcatactcaaggatattcccttgctggtcaagaaagcgctagagatgaacgatctgaaaaccatcaagatcaacaatagcaaaacagtgttctcctcgaaaaaattcaataggcacgtgacagggattactctgaataacaacggagacattagcctgggccgcaacaaaaaacgttttctctcttcccgaatccactactacagcttaggcctattaaacaatgatgacatactggagctcaaagggctgctgggattcgccaattacatcgaacctatctttctcgagagaatgaaggtgaaatacggcgatgacttgatcgtgagcatacagaagtatattgggtga

SEQ ID NO: 11479 - RNA, 933 nt, synthetic construct
  source 1..933: mol_type = other RNA
atgaatctgtttgggatcgtgtctaactcactgttcttaagcgatatggaaataaggaattacgtctctacgatccctcgaaggtataagcggtacagcattcctaagcgcaatggaattgagtttcggataatagcccagccagcgaagcaggtgaaggtgcttcaaagaatagtgctgccttttctgcagcagattattcccatccatggcaatgcacacgcctacgagaagaacaagtcaattaagaccaatgcactggtgcactctaaaaacgagtatctccttaagatggactttaagaacttcttcctctcgatcaaaccgaacgacttcattgacatcatgaaaaagcacgagattaagattaccgacgacgataagttcattatcgaaaacctgttcttctggaaactaaccagacggtccccactccgtttgtcaataggggctcccagttctccctttatctccaatgccgtaatgtatttctttgacgagatcattagccacgagtgcgaggccctggatgttaaatacacaagatatgctgatgacctgacattctccaccaatgtcaaagacattttgttcctcgtgccaaaaattgtcaaaggcgttctcaaatcctccggcttgaagaatatcaagatcaacacgaacaagaccgttttcagtagcaagaaatttaatcgacatgtcactggaatcactctgactaacgatggtgaagtgtcattgggccgtgagaggaaaagggtaataagcgtgcggatccattactttacactcgggcttctaagtacagatgacatcctgaaactgaagggcgatttagggttcgctaagtttatcgaacccgaatttatctatagaatggaacgcaaatacggactggagaacatcgaaaaacttcgcaagtttatgggttga

SEQ ID NO: 11480 - RNA, 933 nt, synthetic construct
  source 1..933: mol_type = other RNA
atgaccatcgtggagtacatttcccagggactgtttatctccgagtcagagtttgtgtcctataccaatactatgcccagacgttacaaacagttctatatcaagaagcgaaatggagaggatcgactcatcgctcagcccgcaaagacagtgaaaaacttgcaacttacagtggtggggctgctgagggacgaactcaggatacacccagctgccatggcttacgttaagggaaggtctattaaagacaatgcccaaaaacacgtacacaatcagttcctcttaaagatggacttcaaaaacttcttcctgagcatcaagcctgcaatgtttttaatgtgcctcaaaaaacagggcgtgaaccttgatgagagagacgaacacgtgatttcaaacatctttttctggaagcttcggcggaattccacactgcgcttgagcataggcgccccctctagccctttcgttagcaatgtagtgatgtactactttgacgaggccgttgagtctctatgtagaatgctgggagtcgtttacacccggtatgcagatgacctgacgttttcaactaacaagaagaatgtgctattcgaactgcctagtgtcgtgaagaacgtcctgaacgatgtggggttaaaggctattaaggtcaacaaggataaaactgtgttttcgagcaagaagtttaatcgtcatgtcacgggtgttacactgaacaactctggcgagctttccctcgggagggaaagaaaacggaccatcagtgccatgattcaccatcataagttgggtttgctgaataacgaagatgtaactaagctcaaaggctatctggggtttgcgaaatatgtcgaaccactcttcctgacccgcatggaacgcaaatacggtgagcagctgattagtcaaatccagaaattcataccgggctga

SEQ ID NO: 11481 - RNA, 930 nt, synthetic construct
  source 1..930: mol_type = other RNA
atggatattgttgaatttctggctcaggctgtgtttctatctgagaaggagtttgtgtcctatgtgaataccatgcccagaagatacaagcagttttacatcaagaagaggaacggagacgacaggctgattgcccagccggcgcgtaccgtgaaaacactgcaactgaccgtcgtaggtatgttgcagcatgaccttaaaatacatgacgccagcatggcctacgtgaaaggcaaaagcatcaaggacaacgccctccagcatgtgaataaccaatacctactgaagatggacttcaagaacttctttctgtcgattaaaccagagatgttccttacctgtgtaagaaaacagggtctgaaactgtccgaacgcgattcactcattctggcaaatctctttttctggaagctgcgccggaattcttcattgagactttccatcggcgcccccagtagccctttcgtcagtaacgttactatgtattacttcgatgagatggtcagtgatatttgcaatgagtacggaatcacctatactaggtacgcagatgacttaacatttagcacgaataagaaagggattctgttctcactccccccactcatcaaagattcattaaagcaaactgggttgaacgacataaagataaacaacaagaagacggtcttttcttccaagaaattcaaccgacacattacaggcgttacactttctaacgatgacaaaatcagcctgggccgagagaggaaacgcatgatctccgctatggtccaccacttcaagaatgaagtgttagaagtggatgaaatctataaactcaagggatatttgggcttcgcaaattacatcgagcctatgtttatcgctcggctgaaacggaagtatggggagaatgtgattatgcagatccagaagttcatagtttga

SEQ ID NO: 11482 - RNA, 930 nt, synthetic construct
  source 1..930: mol_type = other RNA
atggacattgtggagtaccttgcgcagggggtgtttctgagcgagaaagactttctgagctatgttaatacaatgcccagaagatataagcagttcactgttaaaaagcgtaatggagaggacaggttaattgctcaacccgcccggacagtaaagacgctccagatggtagtcgtgagcttactgaagaatcacctaaacatccatgaagcagccatggcatacgtgaagggcaaaagtataaaggacaatgcaaacgcgcacgtgcagaacaaattcatcctgaaaatggatttcaggaacttctttctctccataaaacctgatatattcttggcctgtatcgaaaagcaggggctgattctttctgatcaggacaaaatggtcttgtcaaacctgttcttctggaagcttagacgaaactccagcttgcgcctttcaatcggcgctccatcttcgccgtttgtgtccaatgtgaccatgttctttttcgacgaactgatttccaagatatgcaaggataaagggattgtttacacacgctacgccgacgatctctcattcagtactaaccaaaaagacatcctcttctccatcccagctctagtgaaagaatctctgaaagtcgttggcctgaagaacatcaaagtcaataatgccaagaccgtcttctcaagtaaaaagtttaaccggcacgtgactggtatcaccttgtccaatgagggcgtagtgagtctgggacgcgaaaggaagcgatctatcagcgctatggtgcatcattttaccttagggctcctggataaggagtctatttacaaactgaaaggctatctcggttttgccaagtacattgagcctagctttgtgctgcggctcaagatcaagtatggagacgaggtcgttctgaagattcagaagtttaacgattga

SEQ ID NO: 11483 - RNA, 948 nt, synthetic construct
  source 1..948: mol_type = other RNA
atgaatatcctgaatcagcttagcaacaccctcttcatggataaggattctctgaagtcatttatttccactgccccacgacggtacaaaaagtacactatccctaagaggaacggcgatggggtaaggatcatcgctcagcccagcaaacagatcaagtcactgcaaaggtatgccgctaatctgcttagtaaacacctacgggtccactacgctgcacatgcttacgtgagaggcaaaggtattaaaaccaacgcagccgcccatcgcaactccaactatatcctgaagatagacttcaaggatttcttccattctattacccccgacattttcctgaagaccctggaaaccaacaacaacatcattgagaacgaggacaaatttattatctcgcacctgttcttttggaagcttcgggggaattccccgttgcgattgtcaattggagcccccactagcccaataatcagcaatgccataatgtattgcttcgacgaggagctcacaaactattgcacagagattaatgtgacatacactagatacgcagacgatttgacattctcttcctttcactccctgagcctagcgacaattcagtccaccgtgcagaggttactgataaagcactataagagaaagatcaagatcaaccgtgaaaaaaccatctattgcaataaggcaatgaatcgcaatattacgggagttatcctgaacaatgaaaatgaactttcactcgggagaaaaaaaaaacgcatgataagtagtctcgtccacaaatttagttacagcctgctcaaccaaaaggagattaactacctcaatggaattttaggtcatgcttctcacattgagcctcagtttatcgagcggttgaaagaaaagtatggccatgacgtgatcgcgaaaatcaagaagtctataacttacgcccacatcacgtga

SEQ ID NO: 11484 - RNA, 948 nt, synthetic construct
  source 1..948: mol_type = other RNA
atgtcaattctgaaccagttatccgccacactgtttatggataaagatagcctcaagagtttcatcagtaccgcccctagacgctataaaaagtacactattccaaagaggtctggcgacggggtaagaattatcgcgcagccgagcaaacaaataaaatccctgcagcgcttcaccgccaacctcttaagcgagcatctgaaggtgcattatgccgcccatgcatatgtccctgggaagggtattaagactaatgctgcggctcacaaaaatagccagttcatccttaagatcgatttcaaggactttttccactccataacacccgatctctttattaaaactctggaagcaaatgaagctaatatatcagaggaagaccggtttatcatcgcacacctcctcttttggaagttacgtggcaacagtccccttcggctatctataggggcaccaacatcgcccctaatcagcaacgctattatgtactgcttcgatgaagagttgaccaactattgcactgatttgaatgtgacatacacgaggtatgctgacgacctgaccttttcctccttccatggcctttctctggccaccatccaaagaacagtgcagaccctgctgataaagcactacaatcgaaagatccggatcaacagggacaaaacaattttttgtaacaaggccatgaacaggactattaccggcgtggtgttgaataattctaatgaactctcactgggacgaaaaaaaaagcgcatgatcagttctctggtccacaaatttagctattccctcctgaaccaaaaagagattaactacttgaacggaattcttggtcacgccttccatatcgagcctcagttcatcgagagactgcaggttaaatacggacacgatgttatcgacaagatcaagcagtcaattacgtacgacgacattacctga

SEQ ID NO: 11485 - RNA, 948 nt, synthetic construct
  source 1..948: mol_type = other RNA
atgtccttacttgagcagttctccagcgccctgtttatggaccgggcaagtcttaaatcgtttatttatactgccccaagacggtacaaacgctacgcaattcctaagaaaaacggaaacgggttccgaacgattgctcagccttctaagcagatcaagagcctgcagcggttcggcatcagcctgctcgcgatctttctgaaaacccattactctgcacacgcctatgtggaaggcaagggcatcaaaactaacgcagccgcccaccagggttcggaccatcttctgaagatggatttcaaggacttctttcactccattacccccgacattttgatgaatacactggacaaaaatggcggcaaggaaattttggatgaagaagatcgtcacattatctcccacctgtttttttggaaattgagaggtaattctcctctgcgcctaagcatcggggctccgacctctcccataatctcaaacgctatcatgtacgattttgacgaagagatcgccgattattgtgcggagctgaacgtcaaatacacacgctatgccgatgacctcacattctcctctaaggacagggagtcactgaccacgatccccaacgaagtcaatattgtgctcaggaagaatttcggaagcaaaattcggatcaataaagagaagactctgcactgcaataagtctatgaacaggtcagttaccgggattgtgttaaataatacaaacgacagtctcagcttagggagaaagaagaagaggatgatctccagtttcgtacataagttctcatttagcttgctcgatcaaaacgaaattaactatctgaacggaatcctaggacatgctgcccatatcgagccacaattcatagagcgacttaaagagaaatacggtcaggatgtgatagcaaagataaaggctagtatagagtacctctga

SEQ ID NO: 11486 - RNA, 945 nt, synthetic construct
  source 1..945: mol_type = other RNA
atgtccttgctagatcacctgagtgaggtctttttcatggataaggccagcctgaaatcttttatttttagtgcgcccaggcgctacaaaaaatatcccatccctaaacggaatggcgaaggagatcgtatcatcgctcagccgagtaaacaaatcaaaagcttacagcgtttcaccattaaccttctcatagactatttaaaggtccaccacgcagcccatgcctatgtgtccggtaagtcaattaagaccaacgcggccgctcacagaaagaactcgtacatcctcaagatggacttcaaggactttttccattcaatcactccagatctgtttctgaaggtactgagcgatcgagataatgacggaaaacttacagaagaggacagcttcctcatatccaatctcttcttctggaaattgaggggtaactctcccctgcgactgtccattggggctcccacgagtccaattatcagcaacactatcatgtacgactttgacgaagagctaaccaattattgccttgagctcaacatcgtgtacacaagatatgccgatgatctgacattttcgtcatctgacagggaatctcttagcatcattcctatagcagttcggagggtgctgatcaagaacttcaaccgcaaaatcagaatcaattccggcaaaaccatcttttgctcaaaggcaatgagccggaacattacaggcgtggtcattaacaataattgtgagctgtcactggggcggaaaaagaagagaatgatttcttccctggttcacaaattctcctattccttgttaacccaggacgagatgaattacctgaatggaattttgtctcacgcccattacatcgagcctgcttttatagaacgcctcaagagtaagtacgggtctgatgtgattgacaagataaagcatagcattactttcccatga

SEQ ID NO: 11487 - RNA, 942 nt, synthetic construct
  source 1..942: mol_type = other RNA
atgacgaatctgtttgaaacccttcaggaacagctaagtctctccgatgacgaattgctgtcttacctacatacagtccctttgcgttacaagagatattacatcgataagcgaaattctactgaaaagcgcttaattgcgcagcccagccgaacagtgaagatactgcaaaagtacgttgcttctgagctcgaggaagttattcctgttcatcagagtgctatggcttactgtaagggacgggggataaaggaaaatgcaaagaagcacgcacacagtcgctatctcctgaaaatggatttaaagcggttcttcgatagcatcacaccgaccattctgtcagacgtgattatgaaacacggaatcgaattgtcagagaaagactatatcctggtatcgcagctttttttttggaaactccggcgtaatagccccctgaggctgagtataggagccccaagctcacctttcgtcagcaacgccattatgtatttctttgatgaggagatctctaaacactgcgaagaattgaacatcgtgtatactaggtacgcagatgacatgacctttagcaccaataaaaaaaacgtgctgttcgagctcgagaggacagtagttaaactgcttagacttaacttcggcaaggacataaaggtgaacaaagagaagactgtccattcctcaaaagcccacaacagacatgtgactggggtgaccttatccaacacaggcaagctctctattggcagggagaacaaacgcaatatcagggtgtccatccatcggttcattaatggtaagaccaatgatagagacgtgcaaaacctcaaaggtaacctggggtttgccaaacacattgagccagagttcgtcaagtccctggaggaccgctacggcgtcgagacgatcaagaagatccagacttttgacatcctgccctga

SEQ ID NO: 11488 - RNA, 933 nt, synthetic construct
  source 1..933: mol_type = other RNA
atgttccagctgttcgacactttccgagaacagctggccctcagcaacgacgagctatcaagttaccttcacaccattcctttcagatacaagagattctacatcgacaagaggaactctgatgagaaaagactgatcgcacagccagccaaagctgtaaaaactttgcagcggtatgccatttccgaaatagaagacgagctgccgatccacagttctgccatggcgtattgcaaaggacgtggaataaaggagaatgcactagtgcacgctaaatcccgctatctcttaaaactcgacctgaagaacttctttgagtctatctccccagagattctgttatccgttattagcaaacatagcattgaactttgtgacaacgataagttcctgatctcaaacctctttttttggaagctgcgcagaaatagtcatctgaagttgtctgtgggtgcaccttcttccccctttatctccaacgtgataatgtacttctttgataaggaccttgcggaaaaatgcaacgaaatgaatgtgagctacacaagatatgcagatgatatgacattcagcacgcaagatagcaatatactctacaagattgagactatcgtgaggaagcttctcaagtttcatttcgacaataaactcaccatcaacaggtcaaaaaccgttcacagttcaaaggctcataaccggcacgtcacaggagtcaccttggataatcacggccgtatctcgttgggcagggataacaaacgcagccttcgggccggcgtgtataattttacccaagggcggctgaataaggatgaggctatgaaactgcgcggtaagctggggttcgccaagtacattgaacccaaatttatcttacgactggagaagacatttgggaaggacgtcattgacgagctgaagaaatataattga

SEQ ID NO: 11489 - RNA, 945 nt, synthetic construct
  source 1..945: mol_type = other RNA
atgactaatatcttcaggggactctgtgagcaactgcttatgtccgagaatgagctgaagagttatatcagctccgttccctttaggtataaacggtattacatacctaagcggaattcaaatgaactgcgtttaattgcccatcccgccaaagtggtcaagtctttgcagcgacatgcagtgagcaagctggagccgctcttaccaatccacaagtgtgccatggcctactgcaaaggcaaagggattaaagaaaatgcgtaccagcacaaaaacaacaggtttctgcttaaaatggacctgagagatttttttggttccatcaacccatctatttttctaggagtgctcaaaaagcacgatttaaccctctctaaggaagatgtattcctattgtctaacctcttcttctggaaattgagaagaaactccccccttcgccttagtgtgggcgcaccttcaagtccttttgtaagcaatgccattatgtacttctttgacaaggagctgcacgagtactgcaacgataatgatatagtgtatacacgatacgctgacgacatgacgttttcaacatcgaagaaggacattctgtttgctctggagaagaccgtgaaagctttcctgaagaagaacttcgggtccttccttcgggttaaccataataaaactttccattccagcactgcccacaatcgccatgtcacagggattaccataaccaacaataaaaagatcagcgttggcagaaatcggaagaggaaaattcgcgcttgcgtgcactcattcaagaatggcttgctgagcaacaacgatgcactcaaactgaagggcgagctcggattcatcaagcacatagaaccagactttatcatcaacctgactaacaagtatggtctggacacgatcaaaaagatccagaccttcgaaagtgtcgacacatga

SEQ ID NO: 11490 - RNA, 945 nt, synthetic construct
  source 1..945: mol_type = other RNA
atgaacattatcgaaagaatctctgaagacttgttgatgccggaaaaagagcttctaaattttagctcgactgctccccgcagatataagaaatatacaatcgccaagcgcaacagcgacgaaaggcgactgatcgctcatccttcaaaggaagtgaaattcctgcagagactccttgtgacacacctggaggacaagctcaccatacatgcaagtgccaatgcttacgtgaaacagaaaggtatcaagtccaacgcattagcgcacaaggacaaccagtacctcctcaaaatggacttcaagaacttctttctctcaatcactcccagtatattgatcgagcaaatgctggcctttgggatcggcctggatgataggaatatcgagtttatcagcgggatcctattctggaaactgcgtagaaatagcccactgcggttatctattggcgccccatcatccccctttatttccaacgtcattatgtacaacttcgaccggctgattgaaaaggagtgcaaagtcatgggcattacttatacccggtacgctgatgatctggccttctcaactaacatcaaggacatactgtttgagattccaaagctggtaaagaatacgctgaagaagctgtacggatctaagattagggttaacacaaagaaaacggtgttctcctccaaaaagtttaacaggcatataacagggattacccttaccaataataacctgcttagtataggacgcaagaaaaaacggttcatcagcagcctggtgcacaagtatacactcgaactcctgtctgatgaggagatccttcagttgaaaggcctattaagccacgtttccaatattgagcctttgttcattggtcgactgagtaataaatacggcaccaacatcatgaccgatctcgcaccttctaagttctttattggaaattga

SEQ ID NO: 11491 - RNA, 945 nt, synthetic construct
  source 1..945: mol_type = other RNA
atgaacattatcgaaagcatttctgaggccctgttgatgcctgagaaagaactgctatcattttcctccacggctccaagacggtacaaaaagtacaccattgctaagcgcaactcagatgagcgcagactgatcgcacacccgtcaaaggaagtcaagtttttgcagaggctcctggttacccatatggaagacaaactgcctatccatgactccgccagtgcatacgtgaagcaaaaggatataaaatcgaacgcattctgccataagaacaaccagtatcttctgaagatggacttcaagaacttctttctatctatcactcccgacattctgttagagcagatgctgtccttcgggatcaagcttgatagcaataacatggattttatcagcggaatgttattctggaaattaaggcggaattcaccactgcggctatctattggagcgccaagttctccctttataagcaatgtggtgatgtacaacttcgactgcatcatcgagaaagaatgtaaacacatggggattacatatacacgctatgccgatgacctgacgtttagtaccaacagcaagaacattttgttcgagatgcccaagctggtcaaaaagactctgaaggagctttatggaactagaatccgagtgaatagcgataagacagtgtttagctccaaaaaattcaataggcacatcactggcgtcacccttacaaataataatctgctcagcgtgggcagggccaagaaacgttacattagttccctcatacacaagtataccctctcactcctgtccgaggaagagatcctccagctgaaggggctcctctcccacgcctctaatattgaacctttgttgatcggtcgactgtctaaaaaatacggtgtagacgttatggctaaccttgctcccaaaaagttctttataggcaattga

SEQ ID NO: 11492 - RNA, 936 nt, synthetic construct
  source 1..936: mol_type = other RNA
atgagcttgattagcgaaatctctgatgatgtgctgatgaccaaagatgaactgctgtcattctctttcactgctccgaggaggtacaagaagtaccatattcttaagcgaaatggaaatgggttaagactgatcgcgcaccccagcaaggaggtaaagttttttcagcgcctcgcaatttctaagctggagatccttttgccaattcatgactgtgccatcgcctacgttaagggcaagagtatacgggataatgcagaggcacacagacggaatcgctatatgctcaaaatggatttcaagaacttcttcatgagcatcacacccgaccttttcattagttctctggaaaggaacgatataaatctcgaagcccaagacatcaaatttctggagggtgtgctgttctggaagctgagacggaattcccccctacgactcagcgtcggggctccttcctcgccttttatttcaaacttcgtgatgacggccttcgacatttttatgtttggctactgcaaggacaaagggatcacatatacgaggtacgccgacgacctgaccttctcaactcgtgagaaagatctcctctttacaatccctaaagtcgtgcgcgatgccctgaaagaatactgcaacagtaagatccgtataaacagcaaaaaaaccgtgtttaccagtaagaaattcaatcggcatgtgacaggtgtcaccattactaacgacgagaagctttccctaggaagagagagaaagcggttaatctccgctatggttcaccactttgtagacgataaatattcattgagccacgaagaaatccagaagctgaaaggctatctgtcttttgctaaatccatagagccagacttcataaacaggttgtccaagaaatatggacgcgagtacatcttaaagattcagtcgtttaactga

SEQ ID NO: 11493 - RNA, 936 nt, synthetic construct
  source 1..936: mol_type = other RNA
atgagcattctgagtgacatatctaaagacgtgctgatgacagaatctgagatccttaacttcagttccactgcccccagaaggtataaaaggtattacattctcaagcgcaatggtaaagatcttcgcctcattgcccacccctctaaggaagtcaagtttttccagcgtctggtaatttccaaactcgacgggaaactgcctattcatcattgcgctatggcttacgtgaagggcaaaagcattaaagacaatgcagacgcccataagaaaaacaagtacctgctgaagatggatttcaagaactttttcatgtccgtgactcctgagctgttcataagtagccttaagaagaacaacattatcctggacaccaacgacttaatctttttggaaggcatcctattctggaaactcagacgaaatagtccattacggctatcagtcggagcaccctcgtcaccgttcatctccaattttattatgaagagcttcgatgactacatcttcaatacatgtaaggagatgaatgttacctatacccggtatgctgacgatatcaccttctcgactaacattaagactctgttgtttacgtttcctgtgattatcaagaacgcgttaaaagaacactgcgataagaagatacgaatcaattcagagaagacgatttttacctcaaaaaagttcaacaggcacattacaggtatcaccatcaacaataataacaacctttccctcggcagaaataaaaagcggctcatatctagcatggttcaccattttatcagcaaagatcacagcttgacagccgatgaaattttgaaactgaaggggcatctgtcctttgcacactttatagagccagatttcatccaacgcctgtctgacaagtacggaaatgaggagatcatcaacatcatcaaacacatatga

SEQ ID NO: 11494 - RNA, 924 nt, synthetic construct
  source 1..924: mol_type = other RNA
atgagaatctccaagaagttagccgacgaactactcttagatgaggccgagctgaggaagttttgtgccacagcgccatatcgatataagaaatacgagatacccaagcggaattccgataagaccaggctgatcgcccagcctagtaaagaagtcaaattcatgcaacggctggtggtgaagtacctgagagacatcctccctgtgtccagacacgccatggcatacgagagtggaacttcgatagtcaagaatgcttctattcacaagaacaacccatatctgctcaagatggatttcaagaacttcttcttgtccatcacaccctccctgttctttgggctgatgtcagatggcggggtcgaattttctgacgacgacaaaatcctgttgagcaacttactcttttggaaattgcgcagaaatagtcccctccggctgtctgtaggtgccccttctagcccattcatcagcaacgtcgtgatgtatcattttgattgccttatggaatcacagtgcgctgcaatgcgtattcgctacagccgatatgccgacgacatgactttctccacccgcgagagggatgctctatcagagatgcccggttttgtgaggtctgtgcttaaacgggactatgacggcaaaattaaggtgaactccgaaaaaactatctttctgagtaaggcaaagcgaaggacggtcacagggataaccattacaaatgatgataccttgagtgtaggacgtgaccgcaaacggaacatttctgctatggttcatcacttcagccttggaaagctgagcgctgaagaggtgcagaagctcaaaggctacctttcatttgttgccgcagttgagccgaatttcatctacagaatgatgagcaaatacggcaataaagtgattgaggcgctgttcatttga

SEQ ID NO: 11495 - RNA, 954 nt, synthetic construct
  source 1..954: mol_type = other RNA
atgagcattttttcaacactggccgacaagttgctgatgtccgaggaggaactgttacggtttgcactcacaatgccccgcaggtataagaagtacgaaatcctcaaaaggaatggcattgacactcggcagattgctcaaccctctcgcgaatcaaagttcattcagcgtatgataatcgacgagctgagaggggtactgagggtgcataaagctgcaacagcctatgagaaagagacagggatccggttaaatgctctgaggcatctgaatagcaggtacctactgaagatggatttcaagaacttctttcctagcatcacacccgaactgttttttgcggtcgccgagtccagtggagtggactttgagcaagccgataaagttttcctggaacacgctttgttcttccgcgccacccgcagatcacggcttagaatgagtatcggcgccccaagctcccctttcatatccaactttgtgatgaataccttcgatcacgctatgatgaagttctgtgtggaaagaaacatcagctatactcgttacgcagatgacttgaccttcactaccaacgaaaaaaatatcctgttcgatctcccaaagatggtggcaactctgctagcggaatattgcttcaagaagatccggattaacagttcaaagacggttttttcgtctaaacggtttaatcgacatgtgacgggtattgtacttaccaacaataacgagctgtctatcggacgagcccgaaagcgcgagatagcctctcttattaactcctttagatacggcgcactcagcgaggatgcaactttgaaactcaaaggtcttatggctcacgcttaccacatcgaaccggactttatcgcgagaatgaaactcaagtacagttatgaggtcgtcaatgccatactgaggtaccctctcgccattcagaccttagagcagtga

SEQ ID NO: 11496 - RNA, 942 nt, synthetic construct
  source 1..942: mol_type = other RNA
atgtcacttgcaagtatcctcgcaaataaactggtcatgtcaaacgcagatttatttggcttcgtactgacaatgccccgcagatataagcagtacaagatcttcaaaaggaatggaattgaaaccaggcatatagcccaaccttctaaggaggccaagtttatccagcgcatcatagtggaggaacttagaaaactcctgccacccatccacaaagctgctacagcttatgagcctggcactggcattaaagccaacgccctgcggcacttgaactcccggtatctgctcaagatggactttaagaatttcttcccaagcattacaccggagttcctcttcctcgccgcggagagctccggtatcaagttcgacgaactagacaaaattctgctcgaaaatgccctgttctacaagagcactagacgtgcccggctgagaatgtctataggcgctcctagtagcccatttatctctaactttgtcatgtcaggctttgataatgatatgttcgattactgcgcaaagcgaaatatctcctatactcgctatgcagatgacctgacctttacgaccaacgagaaagatgtcctttttgagatccccaagattgtggagtctaccttgattaatgcctgttttaggaagatcagaattaacagcaagaagaccatttttagttcgaagaagtacaatcggcatgttactggagttgtgttgacatccgacgggcagttatccgtagggcgcgcgaggaaacgagaagtgtctagtctgataaactccttcaagtacgggaagctagacgaaaaagaacgtcttcatctgaaaggtttgatcgctcacgttcaccacattgagcctgacttcatcttcaaaatgaggaagaaatactcagacgaggtggtgaacagcctgatgaaaccacccacggccggatga

SEQ ID NO: 11497 - RNA, 948 nt, synthetic construct
  source 1..948: mol_type = other RNA
atgaatctcatttcaaaactgacagaaaagctgatgatgacagaggaagaacttttgcgcttcgcattaacgatgccacggagatacaagcagtattttattccgaagagaaacagtaatgagcggcggctgatagcccaaccctcccaggaggccaagttcatacagaggataattattgccgagctgcgagagctgcttacggtccataaagcagcgacagcttatgaaaaggggactggaatcaggctcaatgctatccaccatgtgggcaacagatacctgctcaagatggacttcaaaaatttcttcccctcaatcaccccagagctactgtttatgattctgcgagactgcggcatcaaatatgatgaccgcgatagaaccatcttagagcacgccctatttttcaaaagtacacgacggagccgtctgagactctctgtgggggctccttcctctccctttatttccaacttcatcatgaacatcttcgatgagaacctcgcagcttactgcctgcagcagggtattacctacactcggtatgcagacgacttgactttcacctgtaacaaaaagggaattctcttcaatgtccctgatgtggtgaagcagttttcaaaggaacattgtcacggcaaaatcaggatcaattcttccaagactgtgtttagcagcaaggcctttaataggcatgttaccggaatcgttttgacaaacgacaatcaactgagtatcggccgcgctcgtaaacgcgagatcgcttctcttgtcaactcatttaagtatgggcacttggatctggatgaaagcagcaggcttaaaggtttactcgcctacgcgaaccacattgaacctgactttatcgcccgcatgaagaccaagtactccgcagacgtaattgatgccatattccacctggattcgactcagaaagaccattga

SEQ ID NO: 11498 - RNA, 936 nt, synthetic construct
  source 1..936: mol_type = other RNA
atgaattttcttcagcatatgtgcgacaagctgttcatgtctcaggatgaactgattaacttcgcacgcaccatgccctacaggtacaaaaaataccgagtggggaaaagaaacgggtctgggtataggatcattgcccaaccaagttcagaagccaaatttatccagcgtatcctgctgaaggaattgcgcagattgctcccagtgcacgagtgtgctatggcctacgagcctggagtaggcatccgcaagaatgcaatgaggcatctgcactctgattacttattgaagatggactttaaggacttctttccttccataacacctgacctattcttcttctttactaagaagatcggactggaactgggagagaaggataaggagcttctcgagaatgtgatcttctggaaatcaacacggtcctcatatcttaagctatccattggcgcgccgacaagcccctttatttctaatttcgttatgcacgagttcgacaaaagtatgaaccagttttgtatctccaaagccataacatatacgcggtatgccgatgacctgacctttactagcaacgctaagaatatactctttgagattcccagtctggtgtctggacacctcaagaaggattgcctcggtcttatcaaggtcaacaccaaaaaaactgtgttttcgagcaaagctttcaacaggcatgttaccggcattgtcctcgcaaatgacaatagcctgtcgctgggccgggaacaaaaaagaacgctttcctcaattatccatagatttagcttaggcaagctgtccgaaaaggaaaccagtcgattgaaaggtcacctgagcttcgctcatcacatagagccaaagttcatcgatcggatgaagaaaaaatacgggaacgacttaatcgatctgattttcctccacagctgcgagtga

SEQ ID NO: 11499 - RNA, 927 nt, synthetic construct
  source 1..927: mol_type = other RNA
atgatgagtatcttatccttcgtgtcagatgccctgatgatcgacaaggtagagatgatgatgtttgcccaaacagctccacatcgatataagaagtacttcatcaacaagcgcaatggcgccggggttaggttgatagctcaaccaagcaaggagacaaaattcatccagagggtggtcctgtctaaactgcgtgagatcctgcccgtccacagatgtgcgatggcttatgagaaatctgttggtattaagctgaacgctatgcaccacaaagacggccgctacctccttaagatggatttccgggacttctttccttcaattatgcctaacatgttcttggccctagccaaagattgcggcgtggaattctctgacgaggacaaagagtttctctcaagaattctgttcttccgtagcacccgaaagtcacttctaaggctctccattggggcaccgacttcccccttcatctccaacttcattatgtacaagtttgacgttgcaatggcagaatattgccaggagaacggcatcaactatactagatacgcagacgatgtgacgttttcttccaatgtgaaaggaatcctgtttgatgtgccagatatagtcaaaaagaatctgcggcagtattgctgtggacagatcaaaataaatccccttaagaccatcttctccagcaaagcttttaatcgccatgtaaccgggatcgtgattaataacgacagctctctcagtcttggccgggaaaagaaaaggatctacagcagtatgattcataagttttcgctgggtttaatggacgaaaaggagcgcgaaagactcaaaggatttctggcgtacgccatctatattgagcctgattttatagaacggatgaagaagaagtacagtagcgatctgattgccgccattatgttgtga

SEQ ID NO: 11500 - RNA, 945 nt, synthetic construct
  source 1..945: mol_type = other RNA
atgtcaattactacagccctttgtgaaaagatgcttacaggaaaaagcgagctgctgtcattttcccacacggtacccaggcgctacaagacctactacatcaaaaagagaaactcaaccgagatgagattgatagcacacccagccaagacagttaaattcatccaacgactggccgtggaggaactgaggaattatttccctatccaccattgtgccaccgcctatgaaaagggcactggcattaagatgaatgcattccaacatcggaggaatcagtacctcctgaagatggacttcaaaaacttttttctgtcgatcacgccggagctcttctttcgagtgagtgaggacctgggggtggtgttcgatagcgaagataaggcactgctggagggacttctgttttggcggctcaggcgcaattctccattgcggctaagcatcggtgctccttcctcccccttcgtgtcaaacctggtgatgtacaagttcgatgctgcactatgcgagatttgcgagtctatgggcgtagtgtatacacgttatgcagacgatttgacattcaccaccaatagaaaagacgtgctcttcgctatacccgacatcgtgagacagaacttaaaggcgcagtgctactctaagatccgtatcaactctgagaaaactgtcttttccagtaaggcttttaatcgccacattactggagtcaccattaccaacgaagggcggctgagtgttggtagggaaagaaaacgcctcgtcagcgcgctcattcataaatttactttaggcgccctgagcgatcagcagatcgaaaatcttaagggccagttggcccacgtcaaaaacatagagcctgacttcgtcgttcggatgaaaaaaaagtattccgatgaagccattgctaaaatctttgcctggaagcgagaggggtttttatga

SEQ ID NO: 11501 - RNA, 939 nt, synthetic construct
  source 1..939: mol_type = other RNA
atgaactttctctcgaagctaaatgatgccctgatgattggggagaaggccctgctttcatttatcctaaccagccctcaccggtataagaaatacgagataaataagcggaacggaaaagggaaacggctcatcgcccatccaagcaaacagctgaaatacatccaaagactgctcgtgaaagaactggaggagcagcttcccgttcatgaaagtgccatggcttataagaaaggggttggcattaagaacaatgccttagcgcacaaggacagcaaatacctcctgaagatggacttcaaagatttcttctattctatcaccccggaaatgtttttcaaggccaccgcaagtaagggcctgcactactctgaatcagacaagctggtgctgagtcatctgctgttctttcgacttaatcgaaactcccctctgactttatcaattggtgcaccctccagcccactcattagtaacttctctatgaacctctttgatgaggctatctccaattactgcgccgagcttgaagtgacttacacgcgttacgctgatgacatcgtgttttccacaaactcgaagaatgcactattttccatacctagcaaagtggagaaaactctgaagtccgaatgtttcggatgtgtcaaggtcaatacaggcaaaaccgtattctcatctaaagcgcacaatcgccacgtcacaggtatcacaatttccaacgagggaaaactctctttgggacgcgataggaagaggaagatatcctctttggtgcataagttcggtctgggcctgcttaacgtaagggagattaatgaactgagaggcttactcgcttttgcatcagacatcgagcccctgttcttggctcgcttgagagggaagtatggcagcaaatgcttgagtagcattagcaactataagcaggaagagtga

SEQ ID NO: 11502 - RNA, 927 nt, synthetic construct
  source 1..927: mol_type = other RNA
atggatatcatgctacttctaaaaaccatgcttgtcattagtgagagtgagatcctgaaattttcagccacagctccacaccgctacaagaaatatagaattcccaaacgaaacggaaacggcaagcggcgcatagcccatccctccaaagagctgaagttcatacagcgactcattgtgaataagctggagagcatcctccctgtacatgactccgcaaaggcatataaaaagggcgttagcatcaaagacaacgccctggcccataagaataccaggtatatgctgaagatggattgtaaagacttcttccctagtattgaaccacagctgttttttaaagtggcatcctcgtgcgggattaatttctctaacttggacaaggaactcttatcaaaccttctcttttataagctcacgcggagatctcgtctgaagctgagtatcggcgcgccttcttcacccttggtaagtaactttgtcatgtacttcttcgacgctgctatctacgaatattgttccgagttaggagttaattacacaagatacgccgatgacttgacatttagcactaatcggaaagaagtgttatttgaattcccaaaggtgatttccgagcaacttaagaagcattgcaatgggtcaattaaagtgaacagcatcaagaccgtcttcagctctaagggtcacaataggcacgttaccgggatcactatcacaaacgatagcaagctgtccctcggtcggtccaagaaaaggaccatctcgagcctgatccacaaatacagcctgggaattttgactgatgagcagaaggattgcctgcgcgggcacatttcttttgctaaattcgtggagccggccttcttcataaggatggagaaaaagtacggcaaggaagtgatacagtcaatcttttctgactga

SEQ ID NO: 11503 - RNA, 942 nt, synthetic construct
  source 1..942: mol_type = other RNA
atgaatctaagtgaaattctggctagctccctcttcatggatgacgaggagattcgctcattcgcagcatcatccccctatcgctacaaggtgtacactattgctaaaagaaattcgcaggaacgaagggtcatcgcacacccttctaaggagctgaagtttattcaaagattgatagtcagcctgctggagaaacggctcccgatccattatactgcaaaagcctacacaaagggactgtcaatcaaagataatgctcagccccatatgaaaagcaaatatcttctcaagatggaccttaaggatttcttccctagcatcaaaccctcactcttctttagggagtgcagggtgcatggggtcgaactttccgagctggacgtcgagctgctggagggatttctgttctggaagcgtcggcgtgcgacccagctggtgttgagcatcggtgccccttcgagtccaattgtatccaactttatcctttaccggttcgacgaagtgataagcgaatactgtatgcgcttgggcattaattacacaagatacgccgacgacttgaccttctctacgaacgaaaaggatctcctgataaagtttcccgcccgggtgcgcaaagtgttaaaccacctgtatgatggacagatcaaggtgaacctgaagaagaccgttctttcttctaaagctcataacaggcacgttacaggcattacattatctaatgacggcaagttgagtgtagggagagagaagaaaaggaagctgtccgcctctatccaccacttcatcatgaaaaagctctccgttgaagaaatcttaaagctcaaaggtgagctagcccacaccacttttattgaaccactctttctggaacgaatgatcgagaagtatgggtatgatgcgataaacgagctaaaacattttagcgacgagtccagttga

SEQ ID NO: 11504 - RNA, 942 nt, synthetic construct
  source 1..942: mol_type = other RNA
atgaatctgtcagagctattggaaagctttctgttcatggaggaggaggagatcgtctcttttgcagcctcctctccctatcggtacaaagtctacagtatcgcaaagagaaacagtgaagagcggcgaattattgcgcacccatctaaggaacttaagttcattcagaggattatcgtggaccagctggcaggacaattgccgatccataacacggccaaagcctatatgaagggtctgtcaatcaaggataatgcacggccacacgccaaatataagtacctgctaaagatggatctcaagaacttctttcctagtataaaaccctcgttgttcttcaaagaatgcaggttacatggcgtagaattaagcgagctggatatcgatttgctggaagggtttcttttttggaagcgtaaacgggccactcatttagtgctttcaataggcgccccttccagccccctggtgagtaacttcatcctgtatagatttgatgaggctatcagcagatactgtaaatctctcggcattaattatactcgctacgccgatgacctgaccttctccacaaatgaaaaggacgttcttctgaagtttcccgctaaggttcgcaagaccctgaactacctctatgatggtcagattaagatcaacctccgcaaaacagtgctgtctagcaaagcgcacaatcgtcacgtcacagggattacacttagcaatgaggggaaactgtccgtgggccgcgagacgaaaaggactctctccgctagcattcaccgattcacccaacagaagctctcggacgacgacatcctcaagctaaaaggaaacctcgctcacaccgtgttcatagagcctgactttttggacaggatgatcaaaaagtacggaagaaatgccatatatgaactgaagcattacaccccatcctcaaactga

SEQ ID NO: 11505 - RNA, 942 nt, synthetic construct
  source 1..942: mol_type = other RNA
atgaacctgtcagagctccttgcttctctgattttcatggatgatgaggagattatctcctttgctgcctcaagcccttacaggtacaaggtctattctattccgaaaaggaacagtgaagaaaggcgtatcatcgcccacccttcgaaggaattgaagttctttcagcgggtcattgtgaagcagctgtccgagcgcctccctatccatagtgccgctaaggcctataccaaggggctaagtataaaggataacgccttgccacatgcaaacagcaagtacttgttgaaaatggacctgaaggacttttttcccagtataaatccctccctattttttaaagagtgccggcgtcatggaattgactttagcgatctggacatcgaactgctggagggcttcctcttttggaagcgacgccgggctactaagctggtgctctccattggggcaccctcttccccactggtgagcaatttcatcctttataagttcgacgaagatatcagcagatactgtaattccattgggatcaactatactcggtatgcagacgatttaaccttctctaccaacaagaaggatgtgcttctgaagtttcccactaaagtgaggaacacactcaatagcctgtacgacggacaaattaaagtgaaccttcgcaaaacagttctgagctcaaaagctcacaatagacacgtaaccggtgtcacattaacaaatgagggaaaattgtccgttggtcgagaagcaaaaagaaatctgagtgcgtctatacactcattcacgctgcagaaattatcaaacgaggagatcttcaaactcaagggccatcttgcccatgccgagttcatagaaccagacttcctggagagaatggtaaagaaatacggccaggaggcgatctgggaactcaaacactacacccactctaagaattga

SEQ ID NO: 11506 - RNA, 939 nt, synthetic construct
  source 1..939: mol_type = other RNA
atgaacttatccgagctcctggcctcactgctgtttatggatgatgaagagatcatctctttcgccacgtcatctccctaccggtacaaagtctactcaattgcgaagcgaaactccagtgagcgtagaatcatagcccatccctccaaagaacttaaatttattcagcggctaatcatacagcaactgacagttatccttcctgtacataaggccgcaatcgcttacactaaaggactctctattaaagacaatgccagacctcatgcgaacagcaaatacctgctgaagatggacctgaaagacttcttcccgtctattaacccctcccttttcttcaaagaatgcaagaagaatggcatcgacttcagcgacttagatatgaagattctggagggtttcttgttttggaagaggcgcaggacaactaatctggtgctgtccattggggcaccttcttccccactagtgagcaacttcatcctctttaagtttgacgagatcattagtaatcactgcgcaattcttggaatcaactatacacgctatgcagacgacttgacattcagcaccaatgagaagaatgtgctgttgtcgtttccagcttacgttagaaaagtgctgaataccctgtatgatgggcagataaaggtcaatctgaagaaaaccgtgttgagtagcaaagcccacaacaggcacgttaccggcgtaactcttaccaacgaaggttgtctcagtgtggggcggaacaaaaagcgccagctgagcgctgctatccactatttttctctgaagaaactctcaaacgaggatatcttcaagttaaagggcagcctcgcccattccgtctttattgaaccagattttttgctccagatggagcgaaagtacggaaaggaaatcatattccaactcattcactatgctctagacgattga

SEQ ID NO: 11507 - RNA, 942 nt, synthetic construct
  source 1..942: mol_type = other RNA
atgtctctgttcgagagtctgtccatgatgctgctgatggatgagggagaattgcggtcatttgctttgacggcaccttataggtacaaggtatatacaatcgccaagcggaactcagaggagcggcgagtgatcgctcatcccagcaaggaactgaagttcgttcaacgcttgattataaaccagcttgagcccaaactgccaattcacccgtccgcgacagcctacatcaaaggaaagtccatcaaagacaatgctctccctcatgtcaatagtaagtacctcctgaagatggatttaaaaaacttcttccctagcattaagcccgagctcttttttaaggaatgtcgacaccacgggatagaactgacggacgtggataaatcgcttctagaaggatttctgttctggaaaacccgcaggtccaataaactgactctatcaattggcgctccaagtagtcctatggtgtcgaatttcattttgcaccggtttgatgagaagatgtccaagttatgcctcgccgagggggtaagatacaccaggtacgcagatgacctgaccttttccactaataaaagaggcacactactgtcttaccagtctaaagtgcgcaggataattggaattctgtatgatggcaacatcaaaatcaatcttaggaaaaccgttcttagcagcaaggcccacaaccgtcatgttaccggcgtgacactgactaacgacggtaatctcagcgtcggcagagaggaaaagcgtaaaatctctgcggccatacatcactattcattcaacatgttggagcatgaagacgtcctccgcctcagcggtagacttgcacacgccagcttcatcgagcccgagtttctggaaaagatgatcaagaagtatgggcaggacaccatctctaaattaatgaagtctgggactgaaccagtgtga

SEQ ID NO: 11508 - RNA, 930 nt, synthetic construct
  source 1..930: mol_type = other RNA
atgaatctcttcgaatcactcagcgcaatgttactaatggatgaaaaggaactgcgctcatttgctcttaccgccccctatagatacaaggtgtacactattgcaaaacgtaatagcgacgacaggcggattatagcccatcccagcaaagagctgaagtttatccagcggcttatcatcaatatgctcttgcccaagctcccagttcactccgctgccaccgcgtacatcaaggggaaatctattaaggacaacgctataccgcacgcatctaaaaagtacctgttgaaaatggacctgaaagactttttcccaagtatcaaaccagatctgttcttcaaagaatgccggcaccacaaaatcgagatctccgagacagataagtcactgctagagggcttcctgttttggaaaacgagaaggtctaaccagttaaagctgagtatcggggcccctagctctcctttcatctcgaacttcattctatatcggtttgatgaggaagtgagcaagttgtgtcgcgccgaaggcgtcacatacacacgatacgccgatgacctgaccttttcaactaacaaaaaaggggtgctcttgagctatcagagcaaggtaaggagaatcatagggaccctttataacggtaacatcaaggttaatctcaagaagactgtgctttcctctaaaggccataataggcacgtcacgggtatcacactttccaacgatggatccatttccttaggacgagagcaaaaacgcaagatttccgctggcatacaccatttctctctgaatctgctggagcatgaggacgtgctgaagctgggcggaaagctggcgcatgcaagttttattgaaccttcgttcctcgagaaaatgattaagaagtatggacaggaggccattagtagattgatgaagactacctga

SEQ ID NO: 11509 - RNA, 951 nt, synthetic construct
  source 1..951: mol_type = other RNA
atgaacttaagtgagacgctgagtacagttctcttcatggatgaggctgagttgaggtcttttgcttcaagtgccccctacaggtacaaagtgtatgcaattaacaagaggaattccgatgaaaaaaggataatcgcccacccttctaaggaactgaagtttatccagagactgattatcaaacaactccagccccgcttaccggtgcatacagtggcaacagcctatattcgcggtaaaagtatcaaagacaatgccctgcctcatgcaaagtcaaaatacctactgaagatggacctgaagaatttcttcccaagcattaagcccgatttgttctttaaggagtgtaaacatcagggtgtgccactaagcgatagcgacaaggaactgctggagggatttctcttttggaagtcccgccgagctaaaggactcagcctgtctatcggcgctccttccagccccctagtgtccaacttcatattatacaggttcgacaaagccatgaatcagctttgccagtccgagggcgtcacttataccagatatgcagacgatcttatcttttctaccaataagaagggcgtactgctggcctaccccccaaaagttagacggctcatagggaccctgtatgacgggaacattaaaatcaacctgcggaaaacggtgctgtcgagcaaagcgcacaaccgtcacgtgacaggcattaccctgaccaacgacggccgcctttctgtagggcgggatgataagcgtaagctttcagccgcgatccatcactacgcttcccacatgttgactcctgaagaggtgcagatccttagaggaaagctgagctatgcagtcttcgtcgaaccggagctgctcgaacggctcattcgaaagtacgggaaacaggtcatagccgacttgcaaaaggttaatccaactttgaatctcaagtcatga

SEQ ID NO: 11510 - RNA, 948 nt, synthetic construct
  source 1..948: mol_type = other RNA
atgtcgatctcaaaattgttgagcaagaacctgttcatggatgagcttgaactgcgctctttcagtcttagctctccttaccgatataaagtgtacaagatccctaaacgcaactcaaaggaacttcggactatcgcacatccgtccaaagagctcaagtttgtgcagagacttatagtaagggagttgggtcagctcttacctgtttccgaagccgccacagcctatatgaaaggcatttccattagggataacgccttagttcacagtaacactagatacctcctgaaaatggacttgaagaatttctttcccagcatcacacctgagatctttttcaatgagtgtctgcgtgctggtgtagaattcgaacagcttgatattgacctgctgagagggtttctattctggaggccacgtcgctctaaaaagctgattttgtcaatcggagccccaagttctcccctggtgtcaaactttatcctgaatcagttcgacgagaatattatcaatttctgcaagaccattggcgtgcggtactcccgatacgcggacgatatgacctttagtacagacattaagggagtcctgttcacgtttcccttaatgatcaaaaagattctcaagaccctgtatggcaacagcataaagataaatcaggacaagaccgtgttcgcaagcaaggcacacaataggcatgtcactggcgtgaccctctctaacgatggctgcgtgacagttgggagagaatccaagcggaagatttccgctagcatccaccactttagcctcgggatcctacagccaaacaacataatccaactgaaagggctcttcgctcattcgacctttatagagccaaaactgaaaaaccaaatggtcgagaagtacggaatcgagatcattgaacggctgatgtcttatcagcccaatgatctgaagaaatga

SEQ ID NO: 11511 - RNA, 939 nt, synthetic construct
  source 1..939: mol_type = other RNA
atgaacatcagcacattactttccgaacacttgttcttggacgatatcgagttgagaagttttgccgatagcgccccttacagatacaaggtgtacaaaatccccaaacgaaacagcgaggagcttcgcacgatcgcacacccctctaaggagcttaaattcgtacagcgactcattgcaaaagagctatcgagcgtgttgccactacaccaggcgtccatggcctacagaaaggggacatctatacgggataatgccctcgtgcattccaactcttcttatctcctgaagatggatctgaaggactttttcccgagtataaagcctgaacttttttttcgggaatgcagcaggtatggcttggagtggacggacctggacaaaactctgttaaatgggtttctgttctggaagcctcgccgcgctaagaaactggtactgtcaattggagcccccagcagtccactggtcagcaatttcgttctgtaccaatttgatgaacacatcgccaactattgtaaagaactcggagtgaactataccaggtatgctgacgacatgaccttctccaccgatagaaaggacctgctgttcaagttccctatacaggtgaggaagaccctgaaggctctctatggctcatccatcaaagtcaatctgaataaaactgtgttctccagtaaggcacacaatcgtcatgtcaccggagttactttatcaaacgaaggcaaggtgacaattggtcgggagcgtaaaagggtcctctccgcttctattcaccattttagcctgggcgtgctcgggcatgacgaaatcctcaagctgaaaggacactttgcgcatctgattttcattgagcccctagttaaggagcaaatgattaaaaagtacggttcaagtctgatcgggcggcttacatcataccagggctctccatga

SEQ ID NO: 11512 - RNA, 930 nt, synthetic construct
  source 1..930: mol_type = other RNA
atgaatatcgaaaagtatttgagcgagaatctgtctataaacattagcgccttgcattccttttcgcgcactgctccgcatcgatacaaagtgtatagcattcccaagcgaaactcaaagggggaaaggattatcgcccacccctccaaagagctgaaattcatccagaagatgatcataaagaagctcactgatatcctgccccttcatgagtccgtgatttcatatcggaagaaaaagtccatagttaacaacgtgatccctcacctgaattcgagctttctgctgaagattgatctaaaagacttctttccatctatcgaaccagacctcttcttcgagcaatgcaaattactcgacatacactttagtgacaatgataagaagctgctgaccggcttcctcttttggaggaaccgtaagagcagcaagctgcagctgtctattggagcgccatcttcccctctgatcagcaacttcatcctgtaccgctttgatgatcggattacaaaattgtgtgcaagctacaatgtcaattacacaaggtatgccgacgatttatccttctcaaccatcagtaacagtatcctactgaaattgtccgaggagatctcagctatgcttcaggagatcttccaggggagattcctgattaatcacgagaagaccattttttcaagcaaagcctctaatagacatattacgggaataacgataaccaattcaggtgaaatgtctttgggtagaaactttaaaaggaacattagtgcatgcatccataagtttacacttaaccagctcccccaggaagaacttcttaagctgaagggccacctctctttctttaaacacgtagaaccttacttcatcttacggatggagagtaaatacggcaagcacattctcgacaaaatccgcaaatcccaatga

SEQ ID NO: 11513 - RNA, 939 nt, synthetic construct
  source 1..939: mol_type = other RNA
atgacaaataatcttaagtctctccgaaaattgctgcaaagtacccttttcctctcagacgacctgatcaacattttcattaccacggcgccctatcgctacaaaatctatgagatcgacaagagatccagtgacgaaaagcgaaagatagcgcatccatcaaaagaactgaagcttatccagaggattatcgttaaggagttgagcaatatgctgccagtacacgactgtgcctatgcttacaggaccgggcgcggcattaaagagaatgccttgattcactccaaaaactcgtatctcttaaagctagatctgtctaatttcttcaacagcctcactcctgagatctttttcgctgaatgccggcgaaataacattgattttgataaggacaacgcaagcattatatcaaactgtctcttctatagagagcacagaaagagttctctcaagctgtctgtgggggccccttcatccccctttatctccaacgtgataatgtactctttcgaccagattatcgagacagagtgcaggaaacgggaaattacgtttaccaggtacgcagacgatatgacattctcgaccagtataaaaaacacactgatcgggttcgatgagctcatcaagaaggtcctgttcgatctgtttaaaggcgctatcagcctaaatcaggacaagactatcttatctagcaaagctcacaaccggcatatcactggcattacaatcagcaacaacgataatatcagcttaggtcgggagagaaaacgtctgatttcctccgccatacatcgcttttcatacggaaaacttgatcaggaagccgtggacaaattgaagggtctgctggcatttgcctactacatagaaccgtcctttattgcaaccatggagaagaagtatggacgcgaaactatcaataagctgaaaaagtga

SEQ ID NO: 11514 - RNA, 948 nt, synthetic construct
  source 1..948: mol_type = other RNA
atgtccaataacccaaagagctttcgcaagctgttgcagtccaccttattcctgtctgatgagctcatcaatactttcatagcaacctctccatataggtacaagatatacgacatagctaagaggaattctgacgaaatgcggagaattgcccaccccagtaaggagctcaaatttattcaacgtatcatcgtgaaggagctatcggatcttctgcctatccacgaatgcgcctacgcttataggcccggacggggtatcaaagagaacgccttattccactcaaagaactcatacctgctgaaactggatttgagcaatttctttaacagccttacaccgaaaattttcttttccgagtgcaagcgaaataacatattttttgacgaggacgatacctcaattatctccaactgtttgttttaccgtgaacaccgcaaagcttctctgaaactaagtgtgggtgccccctccagcccttttatttccaatgcgatcatgtacagcttcgataaacgcattgaagaggtctgtaataataagggggtaagctttactagatatgctgacgacatgactttcagtacaaacacaaagaatgtgctcgtcggattcgaccgaatcgtgaaagaggtgctttttgacatcttcaaagacgcaattttcctcaacaacgataagaccattttctcaagtaaggcacataaccggcatatcacaggggtcaccatctctaatgacgacaacatctcgctgggcagagatagaaaaaggtatatatctagcgcgattcatcacttttcactggataagctgtccgagaacgagattgaaaaactcaagggccttttggccttcgccgaacacatcgaacatagcttcgttgatcggatggttaaaaaatatggcagtgatgtgatgaagaagctgaagaaaacggacaagtga

SEQ ID NO: 11515 - RNA, 939 nt, synthetic construct
  source 1..939: mol_type = other RNA
atgctgattctcgaggaattagcttctaagctgttgatctccaccgccgagcttgtaaagtttgtaaacactgcgccctaccgctataaagtgtactcaatacccaaacgctccggccgaggtctgcgtacgattgcccagccaactgaagtcctcaaggtcattcagagaatggtcctcgactcatatttgaagggacttcctatccacgattgcgccactgcctacagagatggattgagcatcaaagaaaatgcagcagtccacctgggatccaagtacctgctgaagatggacttttctgatttcttcccttctattggcccctcagacctgattacccacattaaaaagcatcggaaggatatagccagagaagatgcctatgcagtgaggaagattttcttttgggctacaaaaaaagaccctgcacataggctgagtatcggtgctccctcatctccattcatcagtaacaccctaatgtatgaattcgactgtaaagttttcgatgagtgtacacgactcggggtccgctataccagatacgctgatgacctgacctttactaccaacgtgaggggcatcctgtttgagttgcctgacatcgtgacaaaaacctgcgccgagattggatatccaacactgcgcgtgaatcaggacaagacagtgttcagcagcaagggcaacaaccggcatgtgacagggcttgttttaacgaatgacaataagatatccctaggccgggaaaagaaaaggtactttcgtagccttatccaccggtactccttagggggtatgagcagtgaggatatatatgcgctcaaaggcaggctggcttttgctaagcacgttgagccgactttctactatgcagtggtgcaaaaatacggggccgagctgatcaagtcgatcatggagtaccagatcctcaaatga

SEQ ID NO: 11516 - RNA, 939 nt, synthetic construct
  source 1..939: mol_type = other RNA
atgttgatcctggaggagttggccagcaagctcctcatctcaaccgctgaattagttacttttgtgaacacagcgccttacagatataaggtctatactatccccaagcgtagcggacggggagtaaggatcatagcccagccaactgaggtgctgaaggtgatgcagcggatggtgctcgattcctatctcaaaggtctgcccgtccacgattgcgctactgcctacagagacggagtctccataaaagaaaatgcaaccgctcacttggactctaagtatctgttaaagatggactttagcgactttttcccctcaatctccccaagcgatctgatctctcacatcaagcgccaccgcggctcagttagtcgcgaagacgcatacgcggtcaaaaaaattttcttctgggcacgtaagaaagatcctttacataggctatcgattggggccccgtcctccccattcatatctaacaccctgatgtacgaattcgattgtaaagtgtttgacgagtgcgcacgcatcggggtgagatacactaggtacgcagatgatcttacattcaccacgaatacacaaggtgtgctgttcggcctgctagacattgtgaataaaatttgtgccgagctcgcttatcccacacttagaatcaacagtgataagaccgtcttcagttctaagggtaataaccgacatattacaggccttgtactgaccaatgacaacaaggtgtctttgggaagggagcggaaaaggtattttcggagccttatacataaatactcactcggcgagctgagtggggaagacatttatgccctgaagggccgactggctttcgccaagcacgtggagcctacgttttacagcgccgttattcagaaatacggggccgaactcatcgcttccatcatggtttttcagattctggagtga

SEQ ID NO: 11517 - RNA, 951 nt, synthetic construct
  source 1..951: mol_type = other RNA
atgacaatattggcgtatctcagcaacaagttattgatcagctcggccgaactaattggatttgtgaatacggcaccctaccggtacaaagtgtatcctatcccaaagcgttcaggaaggggggtgaggatcatcgcacagccaaccgacgttctcaaagtgatgcaacggatggtcctggaatctttcttggttggcctgcctgtgcaccactgtgctacagcatatcgggatggtgtgggcatcagagaaaatgctactgagcatctgaagtccaagtacctgctcaaaatggacttttccgattttttcccctctattggacctaaagatctgatcctccatattaagaaacacaggggcgagatttccaaagaggacgcctacgccgtcaaaaaactgttcttctggactaagaagaaagaccccgtacataagctgtccatcggagcaccaagtagccccttcatcagcaacacgctgatgtacgaattcgattgtcgtatattcgaggaatgcgcccgattagaaataagctatactagatatgcggacgacctaacttttaccacaaataagcaggggatcttgtttgaactgcctagtttagtcgtgagaatttgccgagagattgactacccaaccctgaatataaacgctgataaaacagtgttctcttcaaagggccgcaaccgccacgtcaccggtcttgtactcaccaacgacgataagatcagccttggccacgagaagaaacggtacgtacgctcactgatctatagatactcccttggggggatgtccagcgatgagatttactctctcaagggcatgcttgctttcgccaagcatgtcgagccgagtttttaccagtcagtggttaggaaatatggtgaggccgtggttgggagtattgtctcttttcaactgattaagcaggtggcccagtga

SEQ ID NO: 11518 - RNA, 939 nt, synthetic construct
  source 1..939: mol_type = other RNA
atgacaattttaacagaacttagtcagaagctcctgattagctctgaggaactgaaagagttcattaacaccgccccgtacaggtataaagtttaccccattcccaaacgcaacggccgtggagtaagagtcatcgcacagccaaccgaagtgctgaaagctatgcaaaggatggtcctggatgatttccttgctggcttgcctgtgcacgcctgcgccatggcatacagagacggtctgggcatcaaggacaatgcgagtctgcatgtaaagaatcagtacctcctaaagatggacttttccgacttctttcccagcatcggccctgacgatctaataagtcacattagacggcatcgagaggggataggacgcgaggatgcgtatgccgtgaaaaaattgttcttctgggcacggaagaaggatcccactcacagactttcaatcggggctccaagctcgcccttcatatctaacacgctcttgtatgatttcgattgtcgggtgaatgacgagtgcacccggctcggtattatctacacgaggtatgccgacgatctcacctttactactaataataagggggtgctgttcgggattcctgactttataacacacatctgtaagctggttgactacccaactctgaaggtgaaccacgagaaaaccgtgttttcaagcaaaaagaacaatcgtcatgtcaccggcttggtcctgacaaacgataacaagatttccctgggccatgacaagaagaggcacatccgatcactgatctacaaatattccctcggagggatcccatctgaagagatccttgctttaaagggtatgctggcatttgccaagcacattgagcctgtgttctatcaggccgttatgcgcaaatacggatttcatgtcttagactctatcatgtcctttcaacctaaagaatga

SEQ ID NO: 11519 - RNA, 942 nt, synthetic construct
  source 1..942: mol_type = other RNA
atgacaatcttagccgacttagccaaaaagtttcttatctcgagcgtcgagatcgcccatttcgtcaatacagccccgtaccggtataaggtctacacaatccccaaacgaagcgggagaggtgttagggtgattgctcagcctaccgatgtgctcaaggtgatgcagagaatggtactggagacttatttggtgggtctgcccgtgcacaattgcgctgtggcctacaaagaaggacagggcattaaagagaatgctattgcacacgttaacaatcaatttctgctgaagatggacttttctgatttttttccaagcattgggcctcaggatctgatctcccatattaagaaacacaaaggccagataagtcgtgaagacgcctacgcggtgaaaaagctcttcttctgggcgcgcaagaaagatcccacacaccggctctccattggagccccttcctcaccattcatcagcaatactttgctgtatgaattcgattgtctagtaagtcatgcatgctctaagctgggtgtggtatatacgaggtacgcagacgatctgacctttaccaccaatgagcaaggcgtccttttcgacgtgccagtgtttatttttaagatctgtgacgcagtcgagtatcccagactcaaggtgaacagtgacaaaacagtgttttctagcaaggcaaacaacaggcatgttaccggagttgtgctgactaacgacaacaagatatcactcggccacgctcgaaagcggcagatccgctctctagtatataaatacagttcaggagagatgaccactgaggaagtctactcactgaaaggcatgctttctttcgcccgccacatagaacctacgttcttccaggggttgataagaaagtattcctacgaggttgtggggtccatcgtcaggttcgaaagcatcaaggcttga

SEQ ID NO: 11520 - RNA, 966 nt, synthetic construct
  source 1..966: mol_type = other RNA
atgagcatccttgagctgttgtcacagaaactcatgatgtccagttctgagttgagactgttcatcaaaactgctccctatcgttacaaagtttacccaattctcaagcggtctggcaagggtattcgcctcatcgcccagcccacggacgtactgaagatgatgcaaagaatggtcgcagatgagtcgttaagcggtcttccagttcatgcttgcgccactgcctatcgcgaaggcttgtcgattaaagacaatgccgaggcccacgcaaagaaccagtaccttctcaagatggatttttccgatttcttcccttcaatggggccgtctgacctagtgaaacacatcgaaaagcacaaaggatccattacggccgaagatgcgtacatggtaaagaaactgttcttctgggcccgcaaaaaagatcctatccacaggctgagcataggcgccccaagttcccccttgattagtaacactctgatgtacgattttgactgcgcacttcaggagtattgtgacaaactgtccatcacatatacaaggtatgcggacgacataacattcaccactaataccaaggagattctatcagcaattccaaattacatcgaggggttatgtgagcggatctcataccccaagctcaagattaacaatcaaaagaccgtgttctcttccaagaaaaataataggcatgtcaccggactggtgatatctaacgaggacaaggtgtctctgggaagggaacgaaagcgatatatccggagcctgatccacaagagcattgcggaagcaatgaccagcgaagagatctataacctgagaggcctcctggctttttccaaacatgtggaacctacattttaccagagtgtcattaagaagtacgggcagcctgccatctactttatagaaacctttcagagcgctcaaaaggctgctaaagtgatcaacaaaacatga

SEQ ID NO: 11521 - RNA, 936 nt, synthetic construct
  source 1..936: mol_type = other RNA
atgtctattctggaactgctgagccagaagctgatgatgtccacctctgagttgcgcagctttattaagactgccccctacaggtacaaagtctaccccgtgcctaaacggtcaggcaagggggttagaatcatagcacaaccgactgacgtgctcaagatgatgcagagaatggtcgccgatgaatttctaagcgagctcccaattcatgcttgtgctacagcgtaccgcgaaggcttatctatcaaagacaacgctgaggcacacgttaaaaaccagtacctcctgaagatggatttcagcgatttctttccatccatgcgtccgtccgatttggttaaacacatcagcaagtacaagggttcaattacagccgaagacgcttatatggtgaaaaagcttttcttctgggcaagaaagaaggaccctatacatcgactatccatcggggcgccatcttctccccttatatccaacactttgatgtacgaatttgactgcattcttcaggagtactgcgacaagctctccgtaacctatacgagatatgccgatgacatcaccctcacgacaaacatcaaaggtgtcctgctgggcgtccctaatcacgtcaaggagctgtgtggacatattgcctatcccacactgaaggtgaacgacgccaagaccgtgttttcatcgaagaaaaacaataggcacgtgaccggcttagtgatcagcaatgaggataaagtgagtctgggacgagagaggaaacgctatatacggagtctgatccataaaagtgtggtaggagatatgacaaatgaagagatgtacaatctccggggcttgcttgccttcgctaggcacatcgagcctaccttctacgacgcaattgctaagaaatatgggctgtcagccatctatttcattgaaacttttcaaccagcatga

SEQ ID NO: 11522 - RNA, 978 nt, synthetic construct
  source 1..978: mol_type = other RNA
atgtcaatcttagagtcgctctcacagaagttcatgatctccgcaaacgagctgagaagcttcatcaaaactgctccatataggtataaagtctaccccattcctaaacgcagcggcaagggattcagactgattgctcagcccagcgacgtactgaagatgatgcaacgcatggtgctggaggaatttctcagcgaactgcctgttcattcatgcgccgccgcttacagggagggattgtccatcaaagacaacgcagaggcgcatgcaaagaatcagtatctcctgaaaatggactttagtgacttttttccatcaatggcgccagctgatctgataaaccatatcgtgaaacacaagggcgccattactagcgaagacgcctacatggtcaggaagctgttcttctgggcccgaaaacaagatcctacctaccgcctctccatcggcgcaccatctagtccgttcatctctaatacgttgatgtatagtttcgactgcgtgttacaggattactgtgagaagataggggtcacatacacaaggtatgcagatgacattacccttactaccaatgtgaagggtctattgctgaacatgccgaactacgtgcggtccatttgtaaagagattgcttatcctactctcaaggttaacgaacagaagacggttttttcctctaaaaaatctaaccgacacgtgaccggtctagtgatcaacaatgaaaatcagatcagcctggggcgtgaaagaaagcggtacattagatctttgatacacaagagttcgctgggaggcctgacagatgaggaaatgcacaatctcaaaggcctccttgccttcgccaagtacattgaacccaccttttacaaaagcgtactggataagtatgggctgcccgccctttatcttatcgagacatttcaatccaatcccaaggtcatagagtctttagagatcaagcggcagttcccttga

SEQ ID NO: 11523 - RNA, 936 nt, synthetic construct
  source 1..936: mol_type = other RNA
atgtccatcctggagagcctcgcaaacaagttattgatcaagccgggggaattgtttagctttataaagtcagcgccttaccgatataaagtgtattctatccctaagcggaatggaaggggcatgcgcatcatcgcccagcctagtgaagccttgaaagtgatgcagagacttgttctcgatgactatctgatggggctacccattcataattctgcaaccgcatacattgtcggaaagtccatcagagacaacgccttacgacatgctaacaacccatatctgctgaaaatggacttttctgaattctttccctccattagcccagccgacctgtcgctgcacgtgaagaaatacaaaggcgtagtctccccagaggatgagtttatgctgagaaagctcttcttctgggcacagaaacacgatacccgccaccggctgtcaattggtgctcctagcagcccctttatctccaatactcttatgtacgagtttgatagtaagctctctcgggcttgttccgagaaggaggttgtatatacacgctacgctgatgacctcactctgaccacgcgtaacaaagacgtcttgttctctatgcccgaattcattgccggcttatgccaacaaatcgagtacccgcgtctgcagattaattccgagaaaacagtcttctcttcaaaaaagcacaataggcatgtgaccggtatcgtgataaacaataaaaacgagctgtcacttggaagggagaagaagaggttcattaagtcatacatctacaggttcagtagtgatgaactgagcagtgtggaaataattcagctaagagggctccttgcctttgccaaacacgttgaagtgagcttctataatgcgctgatagctaagtacggcctcgagacagtgagccgcatcgaacggtatcagccagtctga

SEQ ID NO: 11524 - RNA, 939 nt, synthetic construct
  source 1..939: mol_type = other RNA
atggacatttacaatgctctgagcgagctgttactaatcgatgaagtcgagatcgtgagttatataaataaagctccacacaggtacaaagtttataagatccctaagaggaacggaagtggcagcagggtgatcgcccagcctgcaaaggagctcaaagtcttgcaaaaatcggcactgaacatgccccttctggatctaccagttcataaatccgcctttgcctatatggagggcattggcattaagcaaaatgcccagaagcactccaagaatcagtacctgttaaaaatggacttcagtgattttttcccttctattgtgtcttctgaccttctgagtcatgttgaaaagcacaaagggaaactcgaaatcaaagaaaaagtggccctgaagaaactgtttttctggtgcgtgaaaggatccaccgaacacagactttctatcggggccccctcatcccccttcctcagcaatacgattttgtttgatttcgacacgatcgtgaatgattactgtacccaggagaagataacatatactcggtatgctgatgacttgacctttacaactaatgtgagcggtgtactctttgagctgcctacttacattgaaggggttctgaagaaactggagtaccccacattgaagataaaccactccaagaccgtgttttcatctaagaagaacaaccgccatgtaactggcctcgtgcttaccaacgacaatgcgatttcactgggccgtgatcggaagagatacatccgaagcctggtctacggtttctgcaacaagaaactttctgacgacgagagcataaagctgcgcggattaatctccttcgctaagcatgtggagccgacattcttccggtcgctcgtcaaaaagtactcactcgcagtcatcagcgatattgaaagatattatccagacaactga

SEQ ID NO: 11525 - RNA, 936 nt, synthetic construct
  source 1..936: mol_type = other RNA
atggatatctacgagtctttatctgagatgctgctgatcgatgaatccgagattgtggaatacatcaacaaggctccgcataagtataaggtttacgaaatccctaaacgcaacggacatgggactcgcacgatagctcagcccgccagggaactaaaagtgttccaaaaactcagtctggagcacccactgctgaaccttcccgttcacgacgccgcctttgcataccgagacggaatagggataaaacagaatgccgaagtgcacgctaagaaccagtatctcctgaaaatggatttcgccgacttctttccgtcaatcctggacacagatttgattactcatatcgagaaacaccatggcaaaatcgatcaaagaaataagaccgctattagcaagttgtttttctggcggaaaaagcgggacatcatcaacaggcttagcatcggtgcccctagttccccttttatcagcaataccctgctttatgactttgatgaggagatatccaatatttgcactcccctgatgattacatacactagatacgcggacgacttaattttcaccacgaatgagccaggaatcctgagtaacataccaaacgtagtggttgaaacccttaagtccatcaaagtgcccacattgcgcatcaatccccagaagacagtgtatagtagcaagaagaacaacagacatgtcacagggctggtcctgtcaaatgacgacaaggtatcactcggtaggacccgtaagcggtatattcgaagcttggtgtttcagtatcactctgagaacctcgcaagcgacgatattgtcaaactcaaaggcctcctaggcttcgcgaaacacattgagccaaccttctattcttcgctcatcaataagtactcactggatctgattttatccattgaaaagtacgatcctgcatga

SEQ ID NO: 11526 - RNA, 927 nt, synthetic construct
  source 1..927: mol_type = other RNA
atgtccattattaagtatctcgccgatcagctactattgtccgaggaggacattagacttttcatcaagaaagccccctacaagtataaggtgtttgctatacagaagcgtaacaaccatggagaaaggattatcgctcaacccgctaaggaattgaaatccatccagcagatggtgcttattgagtttcttaaggaactgcccattcactcatgcgcaatggcataccgacacggtatttccattaaagataatgccaaggtccatagcagtaacacctacctgcttaaaatggactttgccgatttcttccatagcatcagacccgaagacctgatcgagcactacgagaagtacaaagcgaaactgtctgccgatgacagggtgagtctgaaaaagatattcttttgggcaagcaggaaaccacctgagatcaaattgagcatcggggcccctagctcaccgttcatttctaacaccattctgtttgatttcgactctatcgtgtccaaagtgtgtatagctcacgaaatcacatacacccgctatgcggacgacctcacatttaccacaaacattagggatactctgttcgacatccctaatctcatcgcaagagtcatcaaggatattgattatccacgcctgaagataaaccatactaagacggtcttttcttcaaagcggtctaaccgccacgtaactggactggtgctgacgaatgagaatcagattagcatagggcgaagtatgaagcggaaaatcaagacaatgatcttcctctactcaaagaagaatttaagccctgacgacatcaaatttttgcggggctatttaagtcacatccataatgttgagccaactttcctccactcgctgaccaaaaaatttggcacacggatagttacctccatcttccaccaatga

SEQ ID NO: 11527 - RNA, 945 nt, synthetic construct
  source 1..945: mol_type = other RNA
atgtccctgatagacttcctgaaggagaagacaggagttcataaatcgacattaaaaagcttcgtgaggtctgccccacaccggtataaaacattcccaattgacaagcggaactctgataaaaagcgtttaatcgctcaacctagtcgcctgctgaaaaaaatccagaacctcgtcgtgtctgagtacgaattcctgatcaatcttcccattcacccgtgcgtcatgtcctatgtgaaaggtaaaagtattcgggacaacgcactggtgcacaaggacagctcttacctactcaagatggattttaaggacttctttccctccatcaagcctagtgacctcatcgaacacatagagaagcataagagagtgtcactggatgatgatgaaaaagactatctttcccgcctctttttttattcccagagcagaaaagaagagattgtgctgagcattggggctccatcatctccctacatttcaaacactgtgctttatgacttcgacgtgaccatcgccgccgaatgtgattccactggcgttaagtacacacgatacgcagatgatttgacgttcagctcaaacgacaagcagagcctgataaatctccataacgccatggagtcaatcttatcttccctacagtaccctaaactggccttgaatactaataagaccacctttcttagtaagagggtcaatcgacacgtcaccggtctggtaataaataacgacgggggagttggcattgggaggaagaagaaaagagagatcaagagtctcgtgcaccgctacttgaatcatagcctcgaggatgaaaggcatccctatctgagaggatacttggcttacatctggggcgtagataaacagtttgtcgcgcagctggaggccaaatatgaaatcagcattcttgatgttgtgaagcaactggaggcagactga

SEQ ID NO: 11528 - RNA, 942 nt, synthetic construct
  source 1..942: mol_type = other RNA
atgagtatcgtcgattttctggtggaaaaactggtcgtgcccaaaagcatcgttgaaaccctcgtactgacagcgccgcacaggtacaaaacatatgaagtgaccaagagaaacggaaaaggtaaaagggagattgctcagccatcgaaagaactcaaatacattcagcggatcgttctcaaagagttcgatttgatgcagaacttaccgatccatgattcagccatggcataccgcaaaaatataggaatacaagacaacgccctgatgcacaaagacaaccagtacctgctgaagatggacttcagcaacttctttccaagtattgttcctacggatctgatcaagcacattgaaaagtacaagggcctcaagctcgatgaggaggatataaaatgtctttcccggttgttcttttatactaaagaaaagggttccggcttagtactgagcattggggctcctagcagcccctatatctccaatacactgatgtatgatttcgacatcttgctccagaagaagtgcgagcaaaaaaatattgtgtatagcaggtacgcagacgacctgaccctgtccacaaatgtgcccaagatattgttcgactttcctgccgtggtcaatggaattctgaaggaaatcttaaccccaaagctgctaataaacgactctaagaccgtttttcttagtaaaggaaccaaccgcaatgtgactggcttggtgatctctaatgaggggaaagtcactattggccgtgataagaaaagagaaatcaagagtatggtgtataagtactctctatcacatcagctagacccagagtccgagattccctacctgaaggggtacctcaattacatcaacggcgtcgagccttcatttctgaagtctcttgagaagaagtatgggatcgaccttatcaagcttattcgaaactcatga

SEQ ID NO: 11529 - RNA, 945 nt, synthetic construct
  source 1..945: mol_type = other RNA
atgagcatactcgagggattaagtaagaaaattcttctaaacgagcctgatttgtggaagttcattagtagtgccccacacagatataagaaatacaagatcgagaaacggaatggcaagggctttcgcgatattgcacaaccatcaaaagaactgaagtttgtgcagaatacagccgttttcgggatcgacctctttcagaatctgcccattcatcactcagctaaggcatacatcaagaagatcaacatcaaagacaatgccgaagcgcataaactgaactcatactttctgaaaatggatttcagcaacttctttcctagtatcaaacccgtcgacttcattaaccacatagagaagcacaaaaatctcacactttcggagaaagacaagctgatcatctccaagctgtttttctacaagaagtaccgtaagagcgaactggtcttatctgtggggagcccaacttctccctatatttctaacaccctcatgtatgacttcgacgatatcgtatacaagtactgcatagagaagaagatcacttataccaggtacgctgatgacctaaccttttccactatgaccaaggtcgatctgtttgagatacctgtgttcattaaatccaccttaaatgagcttctgtatccgaggattctgattaacaacgacaagacggtgttcttgagcaaacggacaaatagacatattacaggactcgttattacgaacgatggcaaggtgtcaatcggacgaaaaaagaaacgctacattcagtccttggtgtacaaatattgtaacagcaatatctctgaggaatccacttcctacctcaaagggtatttggccttttgcctgggtatcgatgtagacttcgttatcagcctggaaaagaaatatggtaaggaaaacatcgactctataaggggccttaataaaggctga

SEQ ID NO: 11530 - RNA, 942 nt, synthetic construct
  source 1..942: mol_type = other RNA
atggtgacaatcattcaggacctttcttccctcctctcaattgatgctgaacgactaaggaagtatatcgccacgtgcccccatcgctataaagtgtacggcataccgaaaaggaatggctctggcatccgtactatcgcccaacctgccaaagagctgaaaactctccagaagcttgtgtacgaaaagtatctcgaaagcttacctgtgcacgaagcttgcacagcgtaccgcaagaacattagcattaaagacaatgccctggcacatgttaagaacaactaccttctgaaaatggactttctgaattatttcccctcaatcacacctaaggatctaattaagcacatagaaaagcatctcaactggaatgagtgggaagaagataagttcgtcatcgaaaggctgttcttttacgtgcgaaacagaggggagggactgcggctgtctattggggctcccaccagcccatttctgtcgaataccatcctctacgagtttgacagcaagattaccgagttatgcaatctgcaaaacatcacatacaccaggtatgcagacgatattgccttcagtaccaacaaaaaggacatactgttcgactttgcaggggtcgttgctgatatcctgtctcagtgtgagtatcccagcatcagtatcaacccagacaagactgtatttttgtccagaaaaggtaacatgcacattactgggctggttttgtccaatgatcgcaaagtatctataggcagatccaagaagcggtatattaaatcacttgtgtatcggttcttgaataacaatttgaccgaggacgagaaactctacctgagtggttacctgtcattctgtgtgtccgtcgagccagatttcatcgagaaacttaagagtaagtacggagccaacacgatcaatgagttgatgggccggcagagcggatga

SEQ ID NO: 11531 - RNA, 975 nt, synthetic construct
  source 1..975: mol_type = other RNA
atgaatatcgtgtcgtatctgtcccagacgctgtacatcgccgagaatgaggtcgagaagtttatcaacactgccccacacagatacaagcagtaccagatacctaaacggaacaacaacggagtgagacttattgcccagcccgctgctgaactgaaaattatgcagctcctggccattgcgcagtttcagcaatttctaccggttcattcatccgcaacagcatactgcagggggaagggcattatggataatgccaaagctcacgcaaagaactcctacttactgaaaatggactttaaggacttctttcacagtatcaaaccatctgacctcatccgccactgctcccaacatatggggggtatcgacgacgctaccgctaagcagattaccaaactctttttctggacccctaagcggactagttcactgatcctctccatagggagccctgctagcccattcatctcgaacactgtcatgtatcaatttgattgcctaatgtctgagatctgttctgaaaagggcattgtgtatacaaggtatgcagatgatatcacattcaccactaatgtgaaaggcttgctcttccagatacccagcctggtgattgacatctgtaagaagattgattaccccagacttagcgttaacagcgaaaagacagttttctcatccaaaggaaataaccggcatgtcaccggagtaaccataacaaatgagggtaagctttctctgggccgacacaagaaaaggaaaatcaaaagtctggtgttcgactgtttgaataacaagttggattcagccgaacgtcgctctttatccggactccttgcgcacgccaaacatatagagccaagtttcttcctgtctctgacgaagaagtacggctatagcgagatcgcaaagattgccagcaataaacccactctggaagtagtggtcgccaaccctttgaccatttgcgactga

SEQ ID NO: 11532 - RNA, 951 nt, synthetic construct
  source 1..951: mol_type = other RNA
atgaagatcattagctttctgagcaaaacgttatacctccccgagcatgaagtgacagcgttcatcaacactgctccctatcgatataaggaatattccataccgaaacgcaatggaactggaactcggcagatcgcacagcctagttctgaagtcaaggtgttgcaaactctcgctattgagaagattaagaataacctgccaatacatagctctgcgatggcttatagagaaggactgtccatcaaagacaacgccagtatgcacgccaagaacaaattccttctaaagatggacttcgagaattttttccactccttacttccccacgatctgctgctgcatacagagaaatattacagtagcatatccgaggaggataaaaagaccttatccaagctctttttctgggccacgaagagggatagaaaacttaagttgagcatcggggccccttcatcaccctttatttctaatacgctgctatacgatttcgacgaagccgtctcaaacgtatgtcgccctctcgacatcacttacaccagatacgctgacgacctgacctttaccaccaataccaacaagattctgttcgaaattccagacctgattcagaagatctgcgaaaccctgacctaccctaaactgaagattaataaggggaagaccgtgttttcctctaaaaaacataacaggcacatcacaggcatcacaattacaaatgaggcaacacttagtttgggccggcaccggaaaaggcatatccgtagccttgttcaccaacacatgttgggtaagctctcatcgaaacagatcaccgagctgaaaggcctgttggcatttagcaagcacatagagctaaccttctacaaaactctcgtgaataagtatggtttcaaaactctgctcgatatccaggccacacagacaaagaactctgatactccatga

SEQ ID NO: 11533 - RNA, 936 nt, synthetic construct
  source 1..936: mol_type = other RNA
atgattcttcaatttttgagcaacttgctgaacctggaaaaacgcgaaattataaagttcatagccagcagtccataccggtataaggtgtactctatccccaagagaaagaagggcgaatttcggctcattagccagccttcctcacagttaaagttcatccagaaggcgacactggatcattttttctctgacctccctgtgcactcgagtgccatggcctacattaaaggcaaagggataaaagataacgcactaatgcatgcaggaaatgcctttatgcttaaaatggacttccaggattactttcccagcattaaacccgaggatttcgtgaatcacataaagtcttccagccaacttaggttctccgaagaagatgagttcgtagtttgccgactgtttttttggtcgcccgtgagaggtaagcctttggtcatgtccatcggcgcccctagttcaccattcatcagcaacacagttatgtatccgtttgacgagaaagtggacagttattgtaagaataatggggtcatctactcacgctacgctgacgacctagtcttttccacttgttccccgcagattctctctctcgtgccaaagttcattgaggagacaatccgcctcttgtcttatccaaagttaaagatcaaccgagagaagaccgtttttagctccaagaaacataaccggcacattactggactgacgatcaccaatgagtctaccgtgtctattggaagagctaggaaaaggtatgtgagtagcctggttcaccgttacactctgtcacagcttgataacgcacagatcgtctatctgaaaggctacctggctttctgctccgacgtggagatcacattcgtaaagaggctcgagaagaaatatggtgaatcagtcatcagcgaactgctgaaaaataccggcgggtga

SEQ ID NO: 11534 - RNA, 942 nt, synthetic construct
  source 1..942: mol_type = other RNA
atgaacatactaaataaggtttcagagatgtctggaataccgcaagacatgtgcgctaaattcattatctctgcccctatgcgttataagaggtacgagatacccaagcgaaatgggtccggaacgagacttatcgcccagccttctaaaatagttaagcccctgcagaaaatctgtattgaccagctgcgcaaaactctgccaattcacagcgctgctctcgcctatgaagttggcacctcaatcaagaaaaatgcgaataaacatcgctacaatcgctacctgcttaaaatggacttcactaactttttcccatccattaagccagatgtattgttgagaacctttgaagagcacggcctagtgattacggaggaggataaattcgtgttgagctccctgctcttttggaagccccgtaggagagcgcccaacttagaactgagtatcggtgccccttcaagcccgtttattagcaacgccgtcatgtatttctttgatgtggccgtgaccgaacattgttctaacaggggcatcgtgtacactagatacgcagacgatctcacctttagcaccaacattgcagacacactgtttgagatcccaaatttcttatacgaccttgtccaacagactaatatgtcgttcctgaggtttaatacagacaagacagtctttgcaagtaaaaaggtgaataggcacatcaccggcgtaacaattacaaacgacgggcggctgagtctgggtcgcaaacggaagcggaagattagcgctatgattcatagattctcactccagcagctccgatccaacgatgaaataaacgagcttaaaggcatcctggggttcgcaaaacacatcgagcctatcttcgtccggcggatgtgcgataagtatggaaaggacactatcgtgaagatccagaagttcaactccgattga

SEQ ID NO: 11535 - RNA, 942 nt, synthetic construct
  source 1..942: mol_type = other RNA
atgaatattctcgacaaaatttcggagctcagtggcataccccaggacatgtgcgccagattcgttgtgtccgcccctgtccggtataaacgctacgagattccaaaaagaaacggggggggaactcgtttaattgcccagcctagcaaatctgtaaagccactacagcgggtctgtatcagtgaactcagaggagtgctccccattcacggttccgctctagcctacgaggctgggaccggtatcaagcggaacgctaataagcacaggtataaccgatatttgttgaagatggacttcacaaactttttcccgtcaatcaagccagatgtgctgctgtccacctttgagcaacacaatgtcgcgttaacagaggtggataaattcgtgctttccagccttctgttttggaagccctccaggagcgagtctaccctcgaactgtctattggcgcaccgtctagtcctttcatcagcaacgcagtgatgtacttcttcgatgtggcagttacagaatactgtgaacgaaagggtataacatacacgagatacgcggacgacctggcctttagtaccaacactgcagacatcctgttcgaactccctaaattcctgaatgaactggtccagcagccctccatgtctttccttcgctttaacaccgataagactgtgtttgctagcaagaaggttaatcgccatatcaccggcgtaacgataactaatgacggcaggctgtcattgggccgtaaacgcaaaaggaaaatcagctcattaatccatcggttttcactgcagcaactgcggtgcgatgaagaagtgaatgagttgaaggggatgcttggatttgccaagcatatagagccaatctttgtcaggagaatgtgccagaaatatggagaggagattatcctgaagattcaaaagttcaacagcgattga

SEQ ID NO: 11536 - RNA, 942 nt, synthetic construct
  source 1..942: mol_type = other RNA
atgaatatcctggacaaaatttctgaggtgtccgggatgccgcgaaccatgtgtttgagatttatcgtgagtgcccctattcgctacaagagatacgaaatcccaaaacgcaatggccggggtgtgaggctgattgcacagccatcaaagtctgtgaagcccctgcagaaggcgtgcatcggggaactgagggacattttaccaatccatcctgctgccttagcatacgaggtgggaacaggtattaaaagaaacgccaacaaacatcgctataatcggtatctcttaaaaatggacttcactgatttctttccttctatcaaacccgacgtcctgctgagcacgttggaacagcacaatgttgagttgacagaagaggacaagtcagttctgtcaagcctcctgttttggaaaccgactagaggcgattcaaacctggagctgtccattggagctcccagcagcccctttatttctaatgccgtcatgtactttttcgatgtaaccgtggaggactattgcaaacaaagggggatcgtctacactcggtatgccgacgacctattctttagcactaacgcctccgatatactcttcgatgtgccacgattcctaagtggacttgttcagaagcccaacctcgcattcctgaggtttaacaatgataaaaccgtctttgcttccaagaaggtaaacaggcatatcaccggcattacgattacaaatgatggacgactcagtcttggccggaagcgcaaacggaaaataagtagcctcatccaccgtttctccctccagcaactgacaaaccctgaggaaataaatgagttgaaggggcttctgggcttcgctaagcacatagaacccatcttccttatccgtatgtataacaagtacggtagagacaccatcctgaagatacagaagtttaactcggattga

SEQ ID NO: 11537 - RNA, 939 nt, synthetic construct
  source 1..939: mol_type = other RNA
atgaacatcctgaatcagatcagcgagaaaaccggcatgcctaaacggctgtgtgcaagcttcattatcactgctccgaagcgctataaaaggtacgaaatacccaaacgcaacgggcgcggcgttagacttatagctcaaccagccaagtccgtgaagctgctgcagaggatttgcgtagaatcactgcgtaagagcctgccaatacaccaggcggcaactgcttatgaggtgggcaccggcatcaagatgaacgctaatcggcaccggtttaacaagtatctgctcaagatggattttgccgacttttttccctctattaccccagaagtgctgtttaatacatttgagtcacatggggtagagttatcggatgaaaaccagtacatcttaaagaacctactgttttggaagcctacgcgggatagttctttggagctgagtattggagcgccctcgagtccattcattagcaatgccgttatgcacgagttcgacagcaaggttaccgaattctgcgatagcctaggtgtgagatatacccgatacgccgacgaccttgtctttagcactaatacacctaacgtcttgttcgatctgccggaagtcctcggatctctcttatctgaaccctccctctcattcctccgtttcaactccgacaaaacagtgttcgcctccaaaagaaataatcgacatatcactggagtgacactcaccaatgacggaaggttgagtatcggtagaaaaaggaaacgccggctgtcttcccttattcacagatacaagcttgggcagttgaccgcatccaaggatatcgaggagctcaaaggtcatctgggctttgcaaaacacatcgaacctattttcatagccaggatgacgaagaagtacgggatcgagacaattcaatctctgcagaagttcaaatcagagtga

SEQ ID NO: 11538 - RNA, 948 nt, synthetic construct
  source 1..948: mol_type = other RNA
atggagctcatcaacaagatcagtaccattactggcgttccgaaagggacatgcattagtctcatcgtgaccgcaccccgaagatacaagcggtacgagatccctaagcgtaatggttcagggacccgactgatagcgcaaccagctaaatccatcaaaacactacagcgggtttgtatcgagatcctgagggattatcttcctgtgcacggcgtggcaatggcttacgaggttggcgtcgggatcaagcgcaacgccaacagacaccgctatcaccggtacgtcctcaagatggatttctctgacttctttccaagcataacgccagaagtcctgctcaacactatatcccgccatggggtagtattgagcgacattgacaagatggtcctgacaaatctgctcttctggaaacccacccgtcataatgacaacctgcaattgtcaattggagctccttcttctcccttcgtgagcaacgccgtcatgttcttttttgatagcatgctgaacgaaaagtgtagacagttaggcattacctacactaggtatgccgacgatctaatcttcagcacaaatctgaaggatgtgctgtttgaggtgccgtctctgttgtccagagatgttttggccaacacggaattcaatttcttatgcataaacgagggaaagacagtgttcgcatccaagaggaataatagacacatcactggtgtgacaatcaccaatgacgggaggttatcaatcggtcgcaagcggaaacgggtacttagttcgcttattcacaaatttaccactggagaactgaaagaccctattgaaattatgaagctcaagggcctgctgggctttgccaaacatattgagcccatatttatccagaggatggccgtgaagtacggatccgaagtgattgagcagcttaaaaaatatccaaccaaaatctga

SEQ ID NO: 11539 - RNA, 933 nt, synthetic construct
  source 1..933: mol_type = other RNA
atgtcgtaccttgaacagtttacggaaataacctcattatcctccgtggaaatcctgaatttcgtgaagagtgctccataccgctataaacaatactatatccccaaaaggtctgggcgtggagtgagattgatcgcgcaaccatctaaagaggttaagtacatgcagtatatcggcaagcagctaatcctcgacgaacttcccgtccacgcggctgcttatgcttatcagaagggagcaagtattaaagccaatgcctctcaacacgtatctaataagtaccttctcaaaatggacttctcggactttttccctagtattaaacctcccctgctgctcgacgtgatccagtctaaagtcggcacactgtccacccacgatacaactttgattaagaggttgttcttctggcaaagagagaggatttcccctctgcagctgtccataggcgcaccttcaagcccgctgattagcaacgtcgtgatgtatgatttcgatgagtttattcacgcctactgcagtgagagagggattaattacacccgctacgcagacgatctgagcttttcaaccaatgaacgcggattgctgttccatatacccgaactcgtttcatcttacctaacagaaaacgagcatttgggcctgtcaataaatagtggtaagaccaagtttagcagcaaaaaacataaccggcatgtaactggtcttgttctcaacaatgagaaccagctcagcctcgggagggaacgaaagcggaagatccggacactggtgtttctgttctcccagagcgcccttgatctggatgagacttatcacctgaagggcctcctagcctttgccttaaacatcgagccaaacttcatcctgcgattaagaagcaagtactcctccgagatgattgactctatctttcggtatcaggagtga

SEQ ID NO: 11540 - RNA, 933 nt, synthetic construct
  source 1..933: mol_type = other RNA
atgagctatctggaaaatttcaccgaaatcacaagtcttggtagtcaagagatcctggacttcgttaaatccgctccccataggtacaaacaatataccatccccaaacggaacgggcgaggcgttagacttattgcccagccatccaaggaggtgaagtacatgcagtatattggtaaacagctgatattggatgaactgcctgtccattcagctgcatacgcatatcagaagagaaccagtatcaaggctaacgcaagccagcatattgccaataagtatctcctcaagatggatttctctgacttctttccttctatcaagccacccttactattgggagtgattcaacggcaggtgggcgagctatcggcggacgatattaccctgataaaacggctgtttttttggcaacgggacaggatgtcaccgctccagctgtctattggggccccctcctcacctctcatatccaatgtaatcatgtacgccttcgacgagtatctctactcatactgcgcgcagcgtggcatctcttatacaagatacgccgacgatctcagttttagcacaaacgagcgcgggctgttgtttcacattccagaagttgtctctaattaccttagcactaatgagcacctgggattatccatcaacaccaccaagacaaaattcagcagcaaaaaacacaaccgccacgtgactggcctcgtaataaataacgacgaccagctgtcactgggaaggaaacgcaagcgtaagatcagaacgttggtgtacttattcactcagtccgctctggaaactgatgaggtgtttcacctgaagggcctgttggccttcgcaagcaacatcgaacctgagttcatccttcgacttaagtccaagtttagtaatgaagtcgtggattctatttggaggtaccaggagtga

SEQ ID NO: 11541 - RNA, 936 nt, synthetic construct
  source 1..936: mol_type = other RNA
atgcaaccatctaacctaatatgcaagaggtttatgatgagcaaagctgagctgtaccattacgcaaatacttgtccgcatagatataagacttactcgatcgataaacgttcaggtgggaagcggaaaatctcccagccttcaagggacttgaaggccgtgcaacggttcgtcctgtctgagtatttggagaagcgccttgtcattcattcttccgcaaaagcttatcgcgtcggggtgtctattgtggacaacgccaaggaacacgtcgcgcagaaatatctgttaaagatggatttctcgaactttttccccagcatcctatcctccgactttatgaagttgctccgcagggataagatcgttgattctgaagaggaggtgaaactgctctctaagatctttttcatgaacgacagtggctcactgagacttagcattggctcccccggaagcccatccataagcaatgccatcatgtacgatttcgatgaggtgatcagtaagaagtccatcgacaactctatcttctacacccgatactcagacgacataaccttttccacgaacgagaaagacatcctcttcagctggcctaatgttgtgagtgacgttcttcgaggaattgatttcccaaaactgaaaatcaacacagacaagaccaagtttagttcaaagaagttcaatcgccacgtgacaggcattacactggcaaatcaggggtatctcagtatcggaagagagaagaaacggctgattcgtgcccgggtacacaatgccatgaacctcgatgatgaagagattttaagcctcagcggtgacataagctttgcttgccaggtagaacccaatattcttgaaaaattgtggaggaagtaccctgatcagatgaatctgattctgagaaggaaagaaaaaaccaaccagctggaatga

SEQ ID NO: 11542 - RNA, 915 nt, synthetic construct
  source 1..915: mol_type = other RNA
atgacagtcagtgaccttataagacgccgatttagcttcagcccagccgagttacgggtttacgcccagacatgcccttatcggtataaaacctacccgatagacaaaagaaacagccagcagaagcggtggatcagtcagccttctaaggacctgaaggcagttcagaggctcgtcttgtccgaattcctgggcccaaagctgactgtgcacgactcagcaaaagcctataaatcggacaccaatattttggataacgcggggccacacctaaagaaccgctacttgttaaagatggacttcagggatttctttcccagtatcagagcccaggattttgttcgctatctcctgggtagcggaatcgtgcaagatgaggctgaagctaatctcttggccaggatcttctttaagtactgcgacggtgagctgtgtctgtccattgggagccccggatctcctgtgatttccaatgctctgctatttcccttcgatgagaacatctctgacatatgtcagaaaaatatcgtggcgtatactcgctactctgatgaccttacgttttcaaccaacaccagagatttactcttcagctggcctcagaaggtggaggaggctctgaccgcactgcaatccccaaaactggaactcaatagggaaaagacagtattctcatccaagaagttcaaccggcatgtaaccgggattacaattactaacgacgataaagcatctatcggcagggacaaaaagcgggcccttagaactcgcatttacaatgccccgaatctgaatgaagaagagctggcccgactccgaggatatatctcatttgtcaaccaagtggagtccgatatgatcagtaagctttggaagaaataccccaaacagatgggccgtattctgcgtcaatga

SEQ ID NO: 11543 - RNA, 945 nt, synthetic construct
  source 1..945: mol_type = other RNA
atgagcgatataattcaacggattaagcgccggttcgcattctctgatagtgagtttaatacctacctcaatactgctcctttccggtataagaactatactatcccaaaacgatcaggaggtgtgcggctgatcagtcagccgtcaaaggatctgaagagcatccagaggtttatactatccgaattcctgttacccaagcttgagatacacgagtgcgcaacagcctatcgtgaggaaagaaatatagcagataacgctagaccccatctgcagaatcagttcctcctgaaaatggacttcaaagacttttttcccagcattagagcaattgactttagccaatacgcgctgaggcgctcaatcgtcgagagtgaagaggaagccaccatgttgggcaaaatctttttcaagtccaccaacaatggattaagactgtcaattgggagtcctggctcaccccccatcagtaacgccgttatgatcaacttcgataagcagatctcttccatgtgtcgtgactcggggatcgcgtttacccgctactccgacgacctcacgttctcttccaactctaagggcatcctttttggtattcctaaccaggtccaggaggtactcgaagtgattcaacgcccaaaactgatgatcaacgccgaaaagaccaagttcagctccaaaaaatttaatcgacacgtgaccggcatcacaattacaaatgatggactaatgtccttgggaagacagacaaaaagaagggttaggtctgaggtgtacaacgcccctagcatgcaaccaaaggaacggcagcgactccgcgggtacttgagctatgccaaacagttcgagccgagctttgtgataaaactgtgggagaagtacccagcccagatggctcttattaagaattctgctttcactaagaggaacggcgaccctcagtga

SEQ ID NO: 11544 - RNA, 957 nt, synthetic construct
  source 1..957: mol_type = other RNA
atgggtgctggcgaaagggtggttacaatcatagatcacatccaacatgaattcggcttttctagaaacgagctggtcgcctatgctggcacgtgcccacaccggtacaagacctataacatccgcaagcggaatggggatccacgaaccattagtcagccaagcaaagatcttaaggcagtccagcgatttattgtgagtaggttcttcgaggaccagtttgtgattcatgaagctgccaccgcatacagaaaaggcgtgagcatcgtcgacaacgctaaaccccacttaaatagctcctatctgctcaagatggactttaaaaacttcttcccttccattaagagtgacgatttcgtaacatacctagttgagatgggaatctacgaggacgaagcgaggatattgagccgtatattctttaaaaaggagagggacgaactggtgttatccataggcgccccttccagccccattatcagtaacgctctgctacacgaattcgatgaacgcgtcgcacagtattcgaaggaacggtcacttaatttcacaagatactcagacgatatcactatctcaaccaatgtggagaatgtgttgtttgacgtcccgaactacataaatgagcttctgggggatattcgactgccccggctcagaatcaatgaggagaagactgtattttccagcaagaaattcaaccgtcatgtgacaggtattactatctctaacgaagggcaggcatctctgggacgcagcaagaaacggcgcttgaaagccgcggttcattcagccgataaactgaccgagatcgagaggtttaaactcagaggacgcctcgcctttgctaagcaggtggaccctaagtttattgagcttctgcacgccaagtatcccaagcagatctctctcattaattctgcccaatgggcatgggacctgtccgatttcctgtga

SEQ ID NO: 11545 - RNA, 942 nt, synthetic construct
  source 1..942: mol_type = other RNA
atgaagcctacgcagatactcaagaaagagctcttcttggcagatatcgagttaaagaggtatgtgagcagctgcccccggagatacaaacggtaccctattgacaagaggtctgggggcaagcgcatcatcgcgcaacccactcccgacctgaaggctgtccaacgtctgctcgtcagtcagttcttagagaaatgtcttcaggttcacgagtgtgccatggcttatcaggtgggcaaatctatcgtggacaatgcgaagattcactcaaaaaattcgtacctgctgaagatggattttaaggacttctttccatctattcgcagtaaggacctttgccacctgcttgtggcccaaggtcacctcgatcagggcgacgaaatcgaattgcgaactatttctagagtcttctttatgctggaaaacgacgagctggttctttcagtaggggcaccctcatctccgttcatcagtaacgcactgttgttcgaattcgatacaatagccgacgagtattgcaaggagcatgggattagcttctcacgatactccgatgatctcaccttcagcacaaatattaaggacgccttgtttgctgtgcctggatttataaaagaggccttaaaggccatggaatatccaagtctgctagtaaatgatggaaaaacagtcttctcctccagggctcataaccgccatgtgaccggcatcaccctgaccaacgacggaaaactgtccatagggcgtaaaaagaaaagatcaatccggacacaggtgttcctgttttccgcgtctagactgagcactcaggaagcccggtccctccagggttacatcagctttgccaggagcgttgatgctgccttttacagtagcctactgtccaaatatccagtggcaatggcacagctcgaggccgctaactttggcgaaattaattga

SEQ ID NO: 11546 - RNA, 951 nt, synthetic construct
  source 1..951: mol_type = other RNA
atgcggcccaaagacgttttgcgtcagaacctgtttatctcagggtcagaactcgaccgctacctgtcctcctgcccgaggaggtacaagcattataagatcgataaacgtgggggggaaaaagactccaaaagacccattagccagcctacaccagaactgaagggtttgcagaggaccctgctggatgagttcctgctggagcggttgcctgtgcatgaggccgctatggcgtacaagaaggatactagtatcgcagataatgcgaaggtgcacgcccggaatccgtatcttctcaaaatggactttgagaacttttttcccagcatcaaaagcttcgatctttgttctctgttaattgacaccggcaaactagacaaggacgaccagctggatctccgcattatatctcgcgtgtttttcatgcgagagggcccagaactcgtcctttctataggcgccccaagtagccccttcatatcaaatgcaatgctgtttaacttcgattccatcgtaactgagcactgctcaagcctgaacatttcctactctcggtatagtgacgacctgacattctcgacaaaggagaagggaattttattcgacatccctacattcattcgcgagactttaaagctcatcaaatatccaaagctgtctgtcaacgaaaagaagaccgtgttcagttccaaagcacataatagacacgtaaccggcgtgaccctctcaaatagcggcgaaatctccctgggtagatctaaaaaaaggtcgcttcgaacgcaggtctatttgttcagcaggggacaactcctacccaaggaggctgccgccttgcaaggatacattgcatttagcaactctgttgaacccaaatttgtggagtccctactggaaaagtaccctgaggccatgagagcccttgctgctgctagatttagtctcgatgattga

SEQ ID NO: 11547 - RNA, 921 nt, synthetic construct
  source 1..921: mol_type = other RNA
atgagtcttatcgagcagctatctaagcgcaccaacctccctctggatagcatccagaagtatgcgaagacatgccccgtgcgatacaaggtgtattccattccaaaacgcaatggtaaaggctttagagtaatcgcccagccttctgcaccagtgaaagccttacaacgggagttggtgtcaattctggaagattacattctcgttcatgaatgcgctatggcatatagagaaggcgtttccatttttgacaatgccagcaagcacaaggataacgactacttgttgaaaatggactttaaagacttcttcccttcaatcgacccagcgacggtgctgggcttaataatgtctcagtgtccagtggcagaaaaaagcgataccctttatctgctgagtattctctgtcgcaagcccagaggaagcgatcgttttattgtctctataggcgcaccgtcttcaccttttatcagcaatgcctacatgtacgtgtttgacgatatcctgtccaagctgctagtcgacaaggggatctcatacacacgttatgccgatgacttgactttctctactagaaagaaaggggctctgttcgaggttcccgctctcgtcaaaaaggtgctggtagattcgggataccggaccattcgggttaacgaggagaaaacagtgttctcctccaagaagcacaaccgacatgtcactggactggtattaaccaatgacggtagggtgagcctcgggcgcagcaagaaaagggaaatcaggacacttatattcaaatacctgcacggcgagctgtcgaagccggaggtcgagtccctcaaggggcttgctagtcacgcccggcatatcgagcccgaattctgggaaaggctgaaaagtaagtatggaatagatgactccttctttaaactctga

SEQ ID NO: 11548 - RNA, 963 nt, synthetic construct
  source 1..963: mol_type = other RNA
atgctaaatagtgctctgattacttactttagcgttaagaccggcctggataagagtgtgtgtctgcatgtggctctaagcgcacctaaacggtacaaagcctacagcattccaaaaagaaatggcgagatgaggaccatcgcccagcctacacccgttgtgaagcacctgcaacggctggccctgaggctttttgacggcaagctgcctattcacaaagctgccacggcctatcgcaaaggaagctccatcgtcagcaatgtaagccctcatctcggaaactctttcattcttaagacagacttcaactcatttttcaactcaatcaaaccgcaggacttggacctccttgatctggggggaactattggcctgaaatcggaggaagtgtatatcttaaagcacctgttcttttggttgccaaagggggcatccgatttttgtctctccatcggtgccccctcaagccccatgctgtcaaattatttgctctttcagatcgataccaagatctataactattgcatcgagcacaatattgagtacacccgctactctgacgacattaccttgtccacagacaaaaagttcatactgaaggacgcgtacgattgtattaatggtatatgcactcgcacatcttcgccctctttagtgatcaatcaacggaaaaccgtcttcacttccaaaaagcataagcgttttattacgggactggtgatcagtaatgatgaaaagatctccttaggcagggaaaaacgacgactgataaagtccattctattcaacttcgtaaacaacaaggaaacaactatacagagtctggagcagcttaacgggctcttggcattcgccgcacacatcgaaccagagtacgttatgagactctgcaaacagtacgaggcgcacctctctcatctctatgataagggggtctttcttatcagatatgcttctaagtga

SEQ ID NO: 11549 - RNA, 936 nt, synthetic construct
  source 1..936: mol_type = other RNA
atggtaatcgacgagatcctcaaaaaaattatctaccctcggccgatgttggagtatctgatcctcacagcgcctcgaaggtataaggtgtacgacatcccaaaaaggaatgggaaagggtctaggactatagctcaacccaccaaactgatcaaggctattcagcgcgagtgtatcgaatatttatccaagttattcccagtccatttcaccgctactgcctacgtcaaaggaaagtcgataagagataatgcactcaagcacaaaaacaatcggttcctgctgaagatggacttcaagaacttcttcaacaacatcactgagtatgactttaggaaatacatccagaagcatcgcacggactacaatatcagctggacggagaaggattgcgaagatctatgcaacatcttcttttggtgtcccaagaatacctataaaagaattctgtcagtgggcgcccctagtagtccctctctgtctaatattctgatgtacgattttgacgccatcatctacaaatactgtagtgaaaacgacgtggtgtatacaagatatgccgatgatttgaccttttcttgcaataaggcatttaagctaaaggacgttgagaagtatgtgactgatatcagcaaagccatagattcaccaacccttgtaattaacgaggacaagaccgttcatacatccaagaaaaagaatcggcacgttacaggcattacaattaccaatgatggccagctctcactcggttacaaacgcaagattgtcctgaagagccttatacacaagtacgctaacaacgagctggacgaaaatagcatattgtacctgaagggaatgctgaacttcgcaacttccattgaacccgactttattcagcgtatgaaaaacaaatacggtgaagatacagtgtccgccattcttcgatattga

SEQ ID NO: 11550 - RNA, 912 nt, synthetic construct
  source 1..912: mol_type = other RNA
atgctgctggagctaatcagtaaatccacgcttatcgaaaaagatcaggtgctggatattgccaataaggcgagcataagttatgccaggttcaccataccaaagaaagacggatcacagcgtttgatttatcaaccgagtatggccatccgggccctacagaaagtggtctacgatgaggtgctggataagctgccagttcacgatgcatgctatgcatacagaaaaaaacggtcactcaaagaccatgctaacgtgcacaagaataataactacttactgcgaattgacctgaaggacttttttgagtccattacccgatccgacattgagaaatactgccatgagtccattagtaaggttttcccccatttcaacgaagaggattttaaactcatgacaaacatcatctgcagaaaggatactatcacaatcggctcagtcacctccccttcactgagtaatagcatatgttatacgctggatgaaaggatttctcgcttggctaagtcgcacggtgtcaagtatacacgctacgctgacgacatgttcttcagcactagcaacaaaaacgttctttgtatcatccagaagggcgtgtccgggatcattaaaggattagaataccccacccttaccatcaacaaaaaaaagactaagcacagtagcaagaaaaatagaatgagcgtcacaggcgtagtgatcactctcgacaagaaactgagcataggtagaggaaataagcggtttattcgcgaacaagtatataagtggtcttctttgtcttccgaggacaagtcctatctctctgggtacctcagcttcgtgaagtctatcgagccttcatacatcaataggctgtgtaacaagtacagctctcagaagatacaggaaattcttaggttttcgtga

SEQ ID NO: 11551 - RNA, 912 nt, synthetic construct
  source 1..912: mol_type = other RNA
atgctcctcgaactgatttccaagaatactcttatcgaaaaagaccaagtgctggatatcgctaataaagccagcactttgtacgcacgattcacaattccaaaaaaagacggctctgaacggctcatttatcaaccgtcaatggcgatccgtgccctgcagaaggtggtgtatgatggagtcctggacaaacttcctgttcacgacgcctgttacgcctacagaaagggtagggggttaaaggagcatgcaaatatccaccgcaactctaaatacctgttgcggatcgatctaaaggatttttttgagtctatcacccggagtgacattgaaaagtattgcaatgagtatgtgagcaaagtgtttccaatcttcaacgaaggagatttcaacctaatgattgacatcatctgccggaaaaacacaattacaatcggctcagtaacttcaccttccctgagtaactcaatttgctacaacctcgacgagaaaattagtagactgtctgatagttacggggtgaaatatacgcgctacgctgatgatatgttcttttccaccaccaacaagaacattctcaagataattcagaaggaggtgagctccataatcaagaagctggactaccccaaattaacgataaataacaagaagacccgacatagcagtaagaagaataggatgagcgtcacaggggtcgtcataaccgtagacaagaagctgtctataggacgcgataaaaaaaggttcattaggggccaggtttataattggaagaatctgtcgatcgaggaaaagtcctatctgagcggttaccttagcttcgtcaaatctgtggagccctcctacatcaacagactttgtgacaaatattcatcccacgttatccaggagatcttgagatttagctga

SEQ ID NO: 11552 - RNA, 924 nt, synthetic construct
  source 1..924: mol_type = other RNA
atgatcctggaagagattcagaagaggacttttctcgatatagactacattcgatccatcataaaccggagcaactctctgtacagcaagttttacatcttcaagagagacgggtctaaaaggtggattcatcatcccaagaaggaacttaagcttatccaacgagtggtaaatgataacattctcgacaagctgaagatccacccatcatcaacagcttacagaaggggatgttcggtgaaaaagaatgcgctactgcacgttaacaatgacttcttactgagaatggactttaaaagctttttcgattccatttcctacgatgacatcgagaacttcctcgataaagaatttagcattagcgaaccgaattggacttattccgatacaaaattgctggctaaactgctctgctataagaactccctggtgatgggtgccgtgacctctccttgtatcagcaacgccatttgttataagctggataaaaagctgtccgggttgtgccagaaccacaatgttatatacagtcggtatgcagatgacctgtatttcagtacctctgagcgtaatacactttttttcatcgagaaagaggtcctaaagatagtcgccaatctggagttacctagtgggcttaccatcaacaagaataaaaccttccactctagccgcaaaaggaaaaaacaggtgaccggcttaattctgactcatgacaagaagttgtctatcggtcgcaataagaaacggacagtcaagagtaaagtgcataactgggcaacgcttaacgagaatgaaagatcatacctcagcggctatatttcctatattcactcaatcgaaccccagttcatcaaccgcctctgcctgaaatacggcgccgacctcgtaggagagatcatatcatacaatagtaagttgtga

SEQ ID NO: 11553 - RNA, 939 nt, synthetic construct
  source 1..939: mol_type = other RNA
atgaagcttattctcgacgttatacattccaagacgtttcttgaggtggactacattatcattctgctgggaaaggtgaacagtttatacagtagattcagcattgacaagaagaatggttccgggcggagaaccgtctatcacccttccaaagaacttaaagccgtgcaaagagttatcaatgatcacatcatcacgaaactcgatacacacgacgcatgtaaagcttataagctggggtgcactactaagaaaaacgccgagccacatctgaattctcgcttcttgctgcgtatggacttcaagtctttctttgagagtatcgaatacaaagatgtgcataagttctgtcaggagtttatcaagaagcactttattgagtggacagacgaggacagtgagatctttagcaaattcgtgtgctataagggccgactcgtgatgggcagtgtgacctcgcctgccctgaccaatgcaatgtgcgttgggttagacaatctgctgtacgaaaaatgcgaatctattggagtaaagtacagcaggtatgccgatgatctctacttttcaactgacgctccaaacatcttgaagaagctggagaaggatgtgtacaaaatcgtcagctctttgaaaatacccagctccctgaagataaactccgataaaacataccactcaagcaggaaacgacgcatgatagtcactgggctcgtgatcacaaattctggaaccatctcagttggccggggcaaaaaacgggaaatcaagtccctagtcttcaactgggaatctctagatgaggagtttaagaaatacacctccggttatctgagctatattaagtcagtcgaacccgaattccttaataacttgtgtctgaagtacggcgcggagaaaattagggtggtaatgacctataaccagtcactcaagatttga

SEQ ID NO: 11554 - RNA, 921 nt, synthetic construct
  source 1..921: mol_type = other RNA
atgttacttgagctcatcaaagccaaaactctgctcgacgaagattacatcaaagaaacgtgcctgaactcaaatgcattatactcaagcttctacctccctaagaaaaacgggaagcttcgaaaaatataccatccacacaaggagctgaaggccttccagcgaattctccatgataacgtgttggcttactccaaagtgcactcagcgagcatggcctatagttccggctcctcaatcaaacgtaatgccgagagacatagcgagaagaaatttctgctcaggatggactttagaagcttctttgagagtatctcctctaaggacgtgttccagttctgtgaaaaaactctttctaatcagttcagtggatgggatcgcttcgatagcgacatgtttaccaatttcgtttgctacaagaattccctggtaatgggtgctgtaacctcgccctccatagctaacctgatcctgtatgaatttgacgacagtttgagcacgttctgtagtagcattggggtcacctatacacggtacgcagacgatatgtacttttcgacaaacaccagaaatgtcctaaaggaggtcgaaaggcgggtgtataaaatcgtcgagaagctgcaattacccaacgacctgaaaatcaacacctcaaagacatatcactcctctaagtcccgcaggcggctagttactggattggtgctgacttgtgaaggctctgtttctctgggcagaaaaaaaaagcgcgaggtgcggtctttgatttttaagtgggatagccttacagatgaggagaagcagagcctgtctggatatctctcttacgcaaagtcaatagagcctgactttattaataggctgtgcatgaagtacggttccaatattgtgaagaacgtgctcgaatatagtccagaatga

SEQ ID NO: 11555 - RNA, 921 nt, synthetic construct
  source 1..921: mol_type = other RNA
atgttaattaagctcatctccgaaaaatcattgatcgacgaggattttattcttgatttcgctaacaagcaacaagtgaactatttcaagtttcagattgagaaacgcacaggtggaatgaggacaatttatcacccgagtaaggaactcaaatacatacagaagatactgctggacgacgttatatccagccttccaatccacaattgctgttacgcatatgttaaaaacaggaacatccatacgcatgctatacagcacaaaaacgctaaatatcttctaagactggattttcgcaatttctttgagtccatttcatacaaagacatctatgagttctgcgagacaaccatggggatatataataaagggtggacctcctcagatagtgaaatctttagtaagctcgtgtgttacaaagataggttaaccatcgggagcgtcacttcaccctctctgtcgaacgccatctgttacgatttggacattaagttaagccagctggccctttccaagtctgtcaaatatacccgttacgcagatgacatgttctttagtacaaagatcaaaggtgtgctgtatgcactgcagaatgacatcaacaatatcatctctaccaatacactgcctagcaaattgaagctgaatctggaaaagactcatcacactagcaagaaacggaagatggccattactggcctggtgattacgaatgacggaaatatatctctcggcagaagaaagaagcgagagattaagtctaagatttacaagtgggacaccctgagcactgatgaacggacatacctcagcggctacctggcgtacatcaagtccgtagaacccgagttcattaacaacctatgcgataaatacgacgccaacttgatcctcgagattatcaagttcaacaccaaatga

SEQ ID NO: 11556 - RNA, 942 nt, synthetic construct
  source 1..942: mol_type = other RNA
atgttactcgaattaatcagttcacttacgttgctggaggaggaatacatactaaatatagctcagacctcttcccagcgctacaagaagttctacatcaccaagaaaaatggcaatttgcgggcaatctaccatcccagcaaagagctaaaaggcatacaaagagtcattcataatgagctgctgcagaagttgccgacacacccagccagtgcagcctataaaaaaggctgctccatcaagaagcacgccgagcagcacaagaaaagcaaatatctcttgaggcttgacttcaagaattttttcgaaagcatctccgagattgatattcgctgtttcgcgaataacaatatcattggcgttattaaagggtggagcgaagaggacactaaactgctggtggaactggctacttttaaaggaggactcactattggatcaatcacttctcccctcctgtcggacgcactgtgttatcagctggatattgccctattttccctgagccatgagctgggggtcacatacacacgttatgctgatgacctctatttttcaaccaaccaccgaaatacacttaaaaagattccttccaacgtggatactataatcaaggaacttgaataccctaagaaactgaagattaactacagtaagaccaaccattcatctaaaaagaacaggatgatggtgaccgggctcacattgaccaacgatttcaaagtatccatcgggaggtccaagaagagagagattcggagtaagatatacaaatggtctgaactgaacaaagacgataagctgcacctgtcaggttaccttagctatatcaagtctgtggagcccagcttcatcaacaccttatgcggcaagtatggtgccacgattatccaaagtatcatcagatttaacagcaaaaaggacccaaatctcaagtcttga

SEQ ID NO: 11557 - RNA, 927 nt, synthetic construct
  source 1..927: mol_type = other RNA
atgttgttagagatgatttccaatttgaccttgcttgagaaggaatatatccagaacattgccaaaacagctagtaaaagatacaagcgtttcctcattcctaaaaagagtggaggaaatagggtgatttatcatccaagtaaggagctgaagggcatccagcgcgtgatacatgaggaactactccagaaactgcctattcatcttgcatcggcagcctacaataaaggatgctccatcaaaaagcacgcggagcagcaccggaaggccaagtacctgctgagactggattttaagaacttctttgagagcatcaccgaaattgacatcaattgcttcgttaacaacaagttcatcgatattttcgatgactggtctgaagaagacacgaagcttctcattgacctgactactttcaagggtgggctgactataggctcaattacaagcccactgttaagcaacgccatctgttaccagcttgacatagcactgttttctttaagccacgagctggaggtcacatatacccggtatgctgatgatctgtacttttcaaccttccaccgagatgtgctcaaaaagatcccgtctaaagtggacatcattataaaagaactcgaataccccaaaaacctaaaggttaacaataacaagaccaatcactcctcaaaaaagaacaggatgatggtgacaggtctgacgctgaccaatgactttaaagtatctatcgggagaagcaaaaagagggagatccgctctaaaatatacaaatgggtggacctcaaccaagatgacaagcttcaactcagtgggtatttgagctatatcaagtcagtcgagccctcctttattaatactctgtgtggcaaatacggcgctaaggtcatacagcagatcatcatcttcaactccaagaatatttga

SEQ ID NO: 11558 - RNA, 924 nt, synthetic construct
  source 1..924: mol_type = other RNA
atgctgctcgaactgctgtctcgactcacgatcctagaagaggagtacatattgaatatcgcacaaacgtctgctcagcggtacaagaaatttcacataaagaagcggaatgggacactgcgcgctattttccagcccagcaaagaggtaaaaggatttcagaggatcatacacgatgaagtccttaaacgccttccatcacatccagcctcggccgcctataaggaaggtagcagtatcaagaagcacgccgagctgcacaaacgttcgaagtacctgctccgcttagacttcaaggacttcttcgagtccatcagtgaacatgatatcagaaagtttgctagcgagaatctcactggcaaaattaaagggtggacagacgaggacaccaatttgttggtgaagctgtgtacctttaaaggcggacttacaattggcagcataactagccccctcctgagtgatgccatttgttacaatctagacgtggccttgtattctctgtcccatgagctgggcattacctatactagatacgcagatgatctttatttctccactaacaaatctggggtgctgaaaaaaatccctgaacgggtggaagagattatctcccgactggaatgcccgaacaagctcaaaataaacaagtccaaaacacaccactcatccagaaagaataagatgaaagttaccggactgaccattactaacgacttcaagatcagcatcggtagggagaaaaagagggaaattaggtctaaagtctttaattgggatggattaagtcccgaggagaaggctcatttatccggctacctgtcatatattaagagcgttgagcctgcgtttatcaacaacctctgcacaaagtacggggcatcaatcatcaaggaaattaccgtgttcaactctaagaagtga

SEQ ID NO: 11559 - RNA, 924 nt, synthetic construct
  source 1..924: mol_type = other RNA
atgctgcttgaactgattagtaacattaccatcctggaagaagattatatcctcaacgtggcacagacatcctctcagcgctataagaagttctacatccccaagcgtaacgggagcctcagagctatcttccagccctctaaggagctgaagggaattcagcgcgtaattcacgacgaagtcctgaagaaactccctagccatactgcttcctcggcttataaggaaggctcttcagttaagaaacacgctgagcaacacaggaaatccaactacctgctgcgattggatttcaaggacttctttgagtccatcagcgaccatgatatacggaaattcgccaatcaaaatcttgtggagaagatcactggctggacagaggatgacaccaacctattaatcaagctggccacttttaaggaaggtctgaccatcggaagcattacgagtccgctccttagtgatgcaatttgctacaatctggatgtagcgttattttccttttcacatgagctagggatcacctacacaaggtatgccgacgacctctatttttccaccaataacaggggcgttctgaaaactatcccatcaaaagtggaggacgttatatctaatcttgactacccaagtcagctcacgatcaatagatcaaaaacataccatagtagcaagaagaacaaaatgatggtgacaggattgactctgaccaatgactataaagtctcgattgggcggaccaaaaaacgggagatccgaagcaagatttacaactggtccgcattggatctggaacagaaacaccacttgagcggctatctcagctacataaaatctgtggagcctgcctttataaacaccttatgtacaaagtacggtgccaatgtgattagagagatatcagtcttcaattctaacaagtga

SEQ ID NO: 11560 - RNA, 930 nt, synthetic construct
  source 1..930: mol_type = other RNA
atgctgattaacctcattagcaaactggtcctgttagagaaggaatacatcgtcagcattgccgacacagccagcagacggtacaagcggttctttatcaacaaaaagaatgggaagctccgcgccatctatcatcccgcaaaagaactgaaagctatccagcgggttatccacgacgaagttctaaagaaactccctagccatgaggccagctgcgcttataagcagggttgctcagtgaagaaacatgccgaaatgcacaaaggggctcgctatatgctgaggatagacttcaaaaatttcttcgaatccatcagaaccgaggacatacgtcacttcgcagataagaagatgatgagttatatcgaaggctggactaaggctgacacagagcttctcgtgaaacttacatcttttcaggaagggctgactattggatctattacctctccgctactgagtgatgcgatctgttacgacctcgatgtatcagtatttagtcttgctcacgagttgggcgtgaaatataccaggtacgccgacgacttgtacttttctacgaacaaaaaaggagtgctgaagtccattccccctaagattgaggcaatactgttagatctgaagtgtccacataacctcaagattaacaccgcaaaaactcaccactcctccaagaaaagtaggatgatggtcactggcctgaccatcacgaatgataacaatatctccattggtcgcacccgaaaacgagagattagaagccaaatatacaattggacatcactgaatgatgaggataagaagtacttgtcgggctacttgtcttatgtgaagagcgttgaaccagagtttatcaacgccctttgttgcaagtatggcgcgtacaagataaaggagatcatcgtgttcaactcatccggaatcaattga

SEQ ID NO: 11561 - RNA, 918 nt, synthetic construct
  source 1..918: mol_type = other RNA
atgattttactgaagtacttagcaaaggaactgttgctcgacgagtcttacatcgaagagcttgctaactcagccagcaaccattacaaaagctttaccatcccgaagaaatcagggggcgataggctgatcaatcagccttctcgagagctgaaggcgctccagcgcaccctgcatgataacatactgagtaagcttcccatccatgattcagcattcgcttatagggacgggcaaagtattgataaacacgctaaggtgcacttatcagccagatacctgctgagactggacttcaaggacttctttgaaagcatcaaggcgcacgatatttaccgatttatcaacaaacacggtatcaacctactggacaattggagtgagctggacacaaagttgttggtggacattgtgtgttacaaacagaaactcacaatgggctccgtcacctcccctattcttagtaatgccatttgcttcgccttggacaagcagctcgaaaaaatctgctatatgcatgacgtgaagtacagcagatatgccgatgacctgttcttttctacatccaaaccaaatgtgctccggaagatcgaaaaagatgtattcaatgtcgttgcagctctaaacgagcccgaaaagctgaaaattaaccgcaagaagacgtatcactcttctaagaaaaataggatgtcggttactggaattatactgaccacagatgggaacattagcataggaagggataataaacgcaaagtccggactatggtgttctcctggaataagctcgatgttgtagagaagcggtatcttcagggttacctcagcttttgtgcctccatagagccagagtttatcaactccctttgcaataagtatggcgcagacaaaatcactgagatccaacgttataactga

SEQ ID NO: 11562 - RNA, 918 nt, synthetic construct
  source 1..918: mol_type = other RNA
atgattctcttggaatatcttgctagggagctgatcctggataaaggctatatcaaggacttggccataaattcctccctgaactatatttccttttcaatccccaaaaagtcagggggtgagcgtattatacaccagccatcacgagaactgaaagcgctacaaagagctctccacgataatctactcaaaaagctacccatccacgagagcgcatttgcctacagaaaagggaaggggatcgatcagcacgccaaggttcatttgagtgcccgatacctgcttcggctggacttcaagcagtttttcgagagcattaaagctaaagacatcacctcctttatcaataagaataaggacctgctgcttagcggctggactgatagtgatacaaaactgctcgtcgatattgtgtgctacaagcataagttgacaatgggatctgtcacctcgccaatcctgtcaaacgcaatttgctttctgttagacaaggaactggaaaagatatgctacttaaatgacgtcaagtattctcggtatgcagatgacctcttcttcagtacctctaagcctaatgtgctgaggaagattcaaaaagaggtttttaagatcgtgagcgagcttgacgaacctggccagctcaaaatcaacgtaaacaagacctatcattccagcaaacggaacaggatgtctgtgacaggattgattttaacaaacgacggaaaggtcagtgttggccgctgtaacaaaagaaaggtgcgcactatggtgttcaattgggatacgcttgatgaaaaggacaaattctacctgcagggttacctgtccttctgtagcagcatagagccggagttcattaactcgctctgtaataaatacggctctgaggtaatcgtgaaaatccagacttacaactga

SEQ ID NO: 11563 - RNA, 924 nt, synthetic construct
  source 1..924: mol_type = other RNA
atgaaattactggatcacctgtcaagttccctcctgcttgacaaaacctatatcatggaactggctgaaactgcgtcgcaaaggtacaagcagtttagcattcccaagaaaacaggaggcttcaggtcaatccttcaccccgccagggaactgaagacactacagcgcattattcatgaggatatcctcgtcaagctgcctattcacaatagtgcatttgcctacagaaagaagctcaacatcttcgaccatgcaaatgtgcacatcggtgcctcctacttactgagaatggacttcaaaaactttttcgagagcatttcctcaaaaaacatcgcgaagttcttggactctaaagccaattatctgctcaaagactggaaagctgaagatactgagctgttggtgaagctagtgtgttataaaagcagcttaacaataggcagtgtttcctctccgacgctcagcaatgcaatatgttatgaactcgacgaggccctgcacaagctatgctatgtaagagggatacaatacacccgttacgctgatgatctctatttttccactaacgagcctaacattcttaactcgatccagaataacgtctacgaaatcgtgaacagtctgagcattccagacaagttgcggataaactcctctaaaacccatcattcaagccggaaaaatcgaatgagcatcaccggtctgattcttacaaattccggggatgtttcaatagggcgagacatgaagcgcaaaattcggtcccttattttcaaatggtgctctctggatgtgaaggagaagaagtacttggccggctatctgtctttttgtgcttctatcgagccagagttcttgaatagtctgtgcaagaagtacggagccgacatcatctacgagatccagaactttatgaataagtga

SEQ ID NO: 11564 - RNA, 912 nt, synthetic construct
  source 1..912: mol_type = other RNA
atgttaattgagcacttatccgacacactcattctgacgaatgatttcatcaacgatctggcagatactgcttccaagaactacaacaaatttagtgtcccaaaaaagaacggcgggacaagggtggtataccagccaaataaagaattgaaactccttcagagggtgattcacgatgatttcctgaagatcctccccgtgcatcctgcctgttccgcctatctggacggcgctagcgtgaaggaaaatgctgagagacataagaataacaagtacctcctccgcatagactttgtagacttcttcaaaagcattacccataatgacatcttgtcatttctaatcgagaacaagatccaccctcaatggaacgataacgacacggaactcctgctgaaactggtttgctataatggtagattaacaatgggctcagttaccagtccaatgataagcaatcttgtctgcaataaactggacaaagcaatcgagtctatttgtaacatccaggacataatttactctcgctatgcggatgatatttacctctccactaacacaccgaatattctgggaatgatgcccaagaagatcaccaacatcttgcgtaaaatcgactatcccaaacaccttataatcaataccagcaaaacacaacactctagcaagaaaactcggatgaccattaccggactgaaaatcactaatatggggaccatctcaatcgggcgggagaagaagcgagaaattaggtccctggtgcataaatgggacactttgcccatagagaagaaaaagtatcttcagggttacctaagttattgtgtgtcggtcgaacctctgtttattaacgccctgtgcgagaagttttctgccaagataatcaagaagattcagagttacaagttctga

SEQ ID NO: 11565 - RNA, 912 nt, synthetic construct
  source 1..912: mol_type = other RNA
atgcttattgatcacctatcagatagtctcatccttacccataatttcatcaatgatttggccaacactgccagcaaaaattataacaaattctctgtgcccaagaagaacggcggaaccagggtggtgtatcaaccacataaagaattgaaactgctccagcgggtgattcacgatgacttcctgtactcccttcaggtgcatccagcatgtacagcatacattgacggctcatccgtgaaaaaaaatgctgagaaacacagacataacaaatacttactcaggctggatttcgtcgacttctttaaatcgattacccacaatgacatattgctgtacttaatggagaacaagattcacccccagtggacggacgaggatacagagatctttctgaaactcgtatgctataacgggcgccttactatgggagcagttacgtcccctatgattagcaatctaatttgcatcaagctggataaggctatcgaatcaatatgtagccccctgaacattacatatactcgctacgccgacgatatatatttgtcaaccaacacagcgaatatcctcgggctgatgcctaaaaagatcatccacatcctgaggaccatagaataccctaaaaacctgatcatcaatacaagcaagacacaacattcttccaagaagacccggatgatcattaccggcctgaagattactaatgacggtgagatttctataggtagagacaaaaagcgtgagatccgatctctggtctataagtgggacagcctcagcattgaacagaagaagtacttgcagggatatttatcctactgcgtaagtgttgaaccgctctttatcaacgctctgtgtgagaagtttagtgccaaggtcatcaagaagatacagacttacaaactgtga

SEQ ID NO: 11566 - RNA, 912 nt, synthetic construct
  source 1..912: mol_type = other RNA
atgctgattgagcacttaagtgattctctgatcctcacagaaaatttcatctgtgaactcgccgacactgcttcgaagaactataacaaatttagcgtaccaaagaagaacggagggaccagagtggtctaccagccacataaagagctgaagctgctgcagagagtcattcatgatgatttcttggtgaaaatgcctgtgcatcctgcctccacggcctatcttaaaggagcgtctgttaagaacaatgccgagaagcacaagaacaataaatacctactgaggctagacttcgttgattttttcaagtccataacccataatgacattctttcctttatgatggagaacaaaatccaccctgactggaacgagtatgacaaagaaatctttctcaagctggtgtgctacaacgggaggttaaccatgggcgcagtgacatcacccatgttatcaaacctgatctgtaataagctggatcggattattgacagcatctgctctcaacagaacataacctacacccgatacgcagatgacatctatctcagcaccaatacagctgggattttgggcagtatgccccagagaatcattaatgtactccgtctcttggagtacccgaagcaccttatcatcaattcctctaaaactaagcactcaagtaagaaaagcaggatgatggttacaggattgacgatcactaacactggcaatattagtataggtcgcgacaaaaaacgggaaatacgcagcctggtctataaatgggatcagctgacaatagagaagaagaaatacctgcagggttatctgagctactgtgtgtctgtggaacccctttttattaattcactctgcgagaagttctccgctaagatcatcaagaagattcaatccagcaaactgtga

SEQ ID NO: 11567 - RNA, 912 nt, synthetic construct
  source 1..912: mol_type = other RNA
atgcttattgaacacctgagcgagaacttgattctgacaaagcaattcatccttaacttagcagattcatcatccgactgctacaataaattctcagtgccaaagaagggtggcggaacacgggtgatttaccaacctaataaagagctgaaactgctgcagagggttcttcatgacgattttctaacgaaaatgccagtccataacgcgtgcacagcctatagagatgggtctactgtgaagctgaacgccgagctgcacaaggataaaaaatatctactgcggctggacttcgtcaatttttttaagagcatcacacacaacgatatctttctttacctgcaggaaaacaaactcagccccaattggatagatgatgacaccgagcttttcctcaagctcgtatgttataaggggcgactcactatgggagcagtgacctctcccatgctcagtaatcttgtgtgtgaaaagctggacagagctatagaggggatctgcaaccatgacgccctcacctactcccgttatgctgatgacatttacttaagcactaatacccctaacatcctgtctcaggtaccgaagaaagtgattgctgtcttgagaaatctcgagtaccctaagaatctgatcataaacacttccaagactctgcactcctcccagaaaaggcgaatgttggttaccggcttgacaatcaccaaccagggaaatattagtattggtcgcgacaagaaacgcgagatccggagtctgatccacaagtgggaggccttaccaacggacaaacgcaagtatctgcagggctatttgtcgtactgtgcatcagttgaacccctgtttataaacagcctctgcgaaaagtactctgccaaactaatcaggaagattcagagctataaattctga

SEQ ID NO: 11568 - RNA, 912 nt, synthetic construct
  source 1..912: mol_type = other RNA
atgctgatagagtaccttagcaaatccctggtgcttacccccgactttattaaagaaatcgcggatacggccaatgagagatacaacaagttctctatcccaaaaaagaatggcggcaccagggtcatctaccaacctcaaaaggagttaaaagtgttgcagcgctcactccacgatcactttctgaagaaagtccctactcaccaggctatttgtgcttaccaggaaggaagcagcataaagaagcacgccgagctccattcaaagaataattaccttcttcgcctcgactttattgacttcttcaagtcaatcacttctaacgatattctgcattatctgatggagcataaactacattcggaatggactgaaaacgatagtcagttgctgctaaaactggtgtgctttaagggacggctcactatagggtccgtgacaagtccactgctgtctaacttagtctgcaatcacttggaccggtgcatcagtgagatcgccatctcgagaggcatcacatacagccgatatgcagatgacatctacctctccacctccagcaaagacattctgttcgatatgccgaagaaaataatttccgttctgcggaacattaattatcccaagaacttgatcctgaactcaacaaagacaattcactccagtagaaaaaagaagatgaccgtaacaggtctaatcataacgaatgataagaccgttagcattgggaggaaaaagaaacgtgagattcgatctcttgtgcataaatgggacgtgctgaccttagagaaaaagaagtatctccagggttatttgtctttttgtgcagggatcgaacccctgttcatcaacagcctgtgtgaaaagttctctgcccgcaagattagggacatccagaaacagaagctctga

SEQ ID NO: 11569 - RNA, 918 nt, synthetic construct
  source 1..918: mol_type = other RNA
atgttattaaattacctctccaacaatctggtgctgactccggagttcatttcaaatatagccgatactgctaatgaacggtataataagttcagcatctctaaggataacgggaaaaaccgggtcatctatcaaccccagaaggaactgaagctgctgcaaagggttctacatgacgatttcttgcgacggattatccctcacccatgttgcactgcttacaaagatggagcttcaacatacaaaaacgccatccagcacattgaaaatcggtacctgctcaggctcgacttcgtggatttttttaagagcataacctccaacgatatcttcctgtttctgaaagagaacagctccaagttgcatccagagtggacagaggaagacaatgagctgttcctgaaaatagtctgctataaaggacgcctcaccatgggttccgtcaccgccccaggcgtgtctaacctggtttgcaaagccctcgattaccgaatctccgacctatgtgcagctagagggatcacttatacaagatattcagacgacatgtacttttctacgaacaaggaaaacatccttcttaacctcacccccgagattatcgccatcattagaaatattgactaccctaagcaccttataataaattcaagcaagaccaagcacagctcccgcaaaaggaaaatgagtgtgacgggccttgtgattacaaacgacaagaagatttctttgggtcgcgacaaaaagagggagatcagaagtctggtgcacaagtgggataatttggacagcaagcgtaaaaaacatttacaggggtatctctcgtattgtgcaagtgtagagcctctgtttatcaacagtctgtgcattaaatttggcgcggcaaccatctctaagatccagaagtacattccctga

SEQ ID NO: 11570 - RNA, 954 nt, synthetic construct
  source 1..954: mol_type = other RNA
atgctcatcaagtatctgtcagataacctagtcctcaccaccgattttattcaggagctcgctaacactgccgacgatcggtacaacaaattcagcgtgcctaaaaaaaatggtgggacacgtgtgatctaccaaccccagaaggagctaaaactcatccagagggttctgcacgacgacttcctgaaaaagataatcgcacaccctgcctgcagcgcatattgtgacggttcttctgtgaagaaaaacgctgaaagacataaaagcaacaagtacctgctgcggttggatttcgtcgactttttcaagtccatcacaagcaacgacgtcttacattttctcgccgacaataagcttcataacgattggacaacacacgatacggagctgttcctgaagctcgtgtgttttaaaggaaggttgaccatgggcggcgtaacttccccaatcctgagtaatttagtgtgcaacaatttggatgtggcaataaatgacatctctatttcccttggcattacgtactccagatacgccgacgacatttatctctctaccaataatccgaacatcttgttctgcatgccaggaaaggttatttcactgctacgatccatcgagtaccctaactatctgatcctcaacactaagaagactaatcactcaagcaagaagaacaaaatgatgattacagggctgattcttaccaatgatggagaagtttccctggggaggaagaaaaaacgcgagatcaaaaccttagtatacatctgggaaactctttctattgaaagacgcaaatatctgcaaggctatttgtcctattgtgctagcgtggaacccctgttcataaatagtctgtgcgagaagttttcggcgaaaaagataaaggatattcagagctacaagtttcagtcttcgaattcaagtgtccccagtaagatacttaccaaatga

SEQ ID NO: 11571 - RNA, 915 nt, synthetic construct
  source 1..915: mol_type = other RNA
atgctgatcaagtatctctctgataaccttgttctgacgactgctttcatacacgaactcgctgatactgccgacaacaggtataataagtttagcatcccaaagaagagtgggggaacacgggtgatctaccagccccataaagagcttaagctgatacagcgcattctgcacgacgattttttaaaaaagatccctgtccacccagcctgtaccgcgtactccgatggatcatccgtgaagaaaaatgcagagaaacataagcacagcaaatacctgctccgcttggacttcgttgacttctttaagagcatcaccagtaacgacatttactacttcctgtccgagaataaactgcattctaattgggtcaaagaggacaacgagttgttcttaaaattggtgtgttttaagggccggctgacaatgggcggcgtgacaagtcccattttgagtaacctgatatgctacgaactagacatagctattaatgaactctctcagtccctcggggtgatttactctcgatatgcagatgatatctatctttcaaccaacaatcctaacattcttttcaatctgcccgcaaggatcattaagatcctcagatctgtgaagtacccaaagaacctgatcttgaatactaaaaagacagttcacagcagcaaaaagagaaaaatgattgtcacggggctgaccatcaccaacgataatcaaatctccattggcaggaaaaagaaacgtgaaatcaaaactctggtgtacttatggaagggtcttacccctgagaagaagaaatatctacagggatatctgtcatactgcagcggtgtagaaccgtcgtttattaacgccctctgcgagaagttttcagccaaagtaatccaggacatccagcaatataagataaactga

SEQ ID NO: 11572 - RNA, 927 nt, synthetic construct
  source 1..927: mol_type = other RNA
atgctgcttaagtatctgtctgagtctctcatcttgaccgcggattttataactaacctcagtaacacggctgacgagaggtataacaagttcgggatcccaaagaaaaatggaggaacgcgagtagtgtatcagccccaaaaagaattgaaacttctgcaacgcgtgctacacgacgactttttgaagaagattaacgtgcatattgcctgcacagcctattgtgagggctcctcggtgctgaaaaatgccaatatacataaggagaacaagtacctgcttagactcgacttcgtcgattttttcaagtcaatcacttccaatgacatccggctttttctgaatgagaaaaagggcgaattctccgattcttgggatgacctcgatagtgacctgtttcttaaattggtgtgtttcaagggacgtctgaccatgggcggtgtcgcaagccctatgatcagtaatctgatatgctacaagcttgatctgctgattaacgaactctgtctcagcctcggcgtaacatatagcagatacgctgatgatatgtacttcagcacaaatacacccgatattttgtttacaatcccgaaaagagtgatctcaatactgaggcagctcgactatcctaaaaagctgattctaaacaccaataagaccaagcacctcagcaaaaagcgcaaaatgattatcaccgggctggttatcaccaacactgggactgtctcattaggccgggagaagaaaagggaaatccggtccctggtttacaaatggaacattctggacgacaaaaagaaaaagtacctgcagggttacttatcttactgcgcaagtgttgaaccattattcattaacgctctatgcgagaagttcagctcccaggccatctctgagattcagacctattgtcccccttcaacttga

SEQ ID NO: 11573 - RNA, 915 nt, synthetic construct
  source 1..915: mol_type = other RNA
atgctgacagagtatctcgcctccagtctcatattgacaaccgattttatcagggacgtggcagataccgctgacgaacgctataacaaattcgggatcccaaagaagaacggtgctacgcgggtggtgtaccagccgcagaaggaacttaaaatactgcaaagggtcctgcactctgagtttctggtaaagctgaaagttcattcgtcttcaactgcctatagtgacggaagctcagttataaagaatgcgaacctgcacaagaacaaaaaattcctgttacggctggactttgtggacttcttcaaaagtatccgatcatccgacattcgtctgtttttgaacgagcggggtagtgaactctctgatcagtggaccaacgacgattctgatgttttcttgaaactggtctgcttcaaggggagactgactatgggcggagtgacaagccccgccatatccaatctcatttgctataagctagactccgcattatctgagatctgtctttccctgggggtgacttactcgcgctatgccgatgatatgtatttttccactaacgtgccaaatgtcctgtttagcatgcctaatcggcttatcaaaatccttagatctatcgattaccctcgctccctctacattaacaccgagaaaactaagcattcctcaaaaaagcgaagcatgaaaattacaggcttaaccctaaccaataacggagaagtctcactcggcagggagaagaagaggagaatcagaagccttgtcttcaactggagtaatttgacagtggacgaaaaaaagtacctccaaggctacttgagctactgcgctagcgtagagcccctgttcattaattctctgtgtgagaagtttagcagcaagattatcacgaatattcagaagtacaagtga

SEQ ID NO: 11574 - RNA, 918 nt, synthetic construct
  source 1..918: mol_type = other RNA
atgctgctggattatttatcctcaagtcttgtcctgactaatgagttcgtgtcactgatcgctaatacttctgacgagcggtacaataagttctcaatcccaaagaagaacggcgggactagagttgtctatcaaccccagaaggagctcaagctgttacaacgggtgttgcatgacgatttcctgagtaagatccctcttcactctgcctgcaccgcctactgtaggggcagttccgtgattaaaaatgcaaacatgcaccgtggtaacaagtttctgcttagactcgactttgtcaactttttcaagagcattacgtctaacgacatattcaactacctgaatgagaatcgcgacaaactcgacggccactggacaaacgaagatctcgaactgtttttgaagatcgtttgctacaaaggtcggttgaccatgggatccgttacctccccggtaatctccaatctcgtgtgctctatgcttgatagtaagctgcaggccgtctgtgtgcccctaggagtcacatatagcaggtatgcagatgacatgtacttttcaaccaacgggaagaatattttgttcgatattccatcacgagtgattggaatcatccgaactctgggctaccctaaaggcttaatactgaacacatccaagactagccattcgagtaagaagagaaaaatgtccataacagggctggtaatcacaaatgacgggaaaatttctctcggaagggataaaaaacgcgaaatccgcaccctggtgtatatgtgggacagcctcacggtgaagaaaaagaaatatttgcagggttacctgagctactgtgcttcggttgagcccctatttattaacagcctttgcgtgaaattcagctctgcggtgatcagcaaaatacagtccttcaccccttga

SEQ ID NO: 11575 - RNA, 930 nt, synthetic construct
  source 1..930: mol_type = other RNA
atgctcatcgagtatcttgctaaggtcttactgctagaagccgatttcattctgaaggtagcaaatgacgccaactcccattacggcaaattctctgttccaaagaaaggaggaggcacccgtattgtctatcagccatctaaggagctcaaggttctgcagcgactgttgcacgacaatgttctgagcaaactgcccatccaccctaacgcagtggcctaccagcagggctcttcagtctttaaacatgccagtattcacaaggctaaaagattcatgctcaagatggacttcgaagggttttttgatagcatcaaaaagtcagacgtagagcgcttcattaatgacaacaagcacttctttagtgacgattggagcaaagatgatacggacttattggtgaagatagtgtgctttaatgggagactgacaatgggggccgtgtcctcccctgtagtttctaacgcgatatgttacgagcttgatcatatcctaaatgagttctgtttgtcaaagggcattacctacacaaggtacgctgacgacatgtactttagtaccaacgaggagaacgtgttaaagcaaatcccgccctttcttcggtcaaatctcaaaaacctgaaatatcccagtaagctgtggatcaaccggaaaaagactctccacatgtcgaagaaaaataaaatgatggtgacaggtgtgactctgactaccgatggcggagtgtcccttggtagggataagaaacggatggtcaagagccttatttttaagtgggaagctctcgacgagaagaaaagactgttcttgcagggatatctgagctattgcaaatctgtggagcccctcttcataaataggctgtgcgcaaagtacagctccgaactgatcgatgaaatccaacgctatcagcctgtcgtgtccgaatga

SEQ ID NO: 11576 - RNA, 978 nt, synthetic construct
  source 1..978: mol_type = other RNA
atgcttctggaattcatcgcccagcacctgatcctgacgcccgaatatattctgacagtcgcaaatacagctagcaagaggtataaagagtattacattgacaagagagacggaactaaacgcctgatccatcatccttcgaaggagctcaaaagtatccagaggtgcatcaaccaagggatcctccctcggctccccgtgcatcattgtgctgccgcttacaaaccgggggccaagttgattgatcacgttacccggcacaagaactccaaatatctactgaggcttgactttaaggatttttttcacagactgaccgacatggacatcatgctgtgcctcgatgagtacaagcattttcttccgtctgattggaatgtgctagactccgatttgctcatcaaattggtatgtcgatatcacaagttaacaataggagctgcaacctccccaagcttgtcaaatattctctgtttcaagctggacacccagattcagaccctctgcgatcacctcggcgtcgaatacactcgctacgccgacgatatgtatttctcaaccataaagcccaatattctttatgacgtgaggtctagtgtttataatatcgtgaacagcctgaaataccccagcaacctgctgttcaacaaccggaaaaccaagcacactagcaaaaaacaccgtcgagtgatcactggcctggtggtaactcctacggcgaagatctccattggtagagataagaaaagagacattcgcagcaagatttataattggaatggtctgagtgtcgccgaaaaatactctctgaagggctacctgagttactgtaattctgttgagccatccttcataaactctttatgcgataagtacacagcgggaacaattaaccttatattgaagtacgacgaatcagctgaggccccaaagcctaaactattatcaccaatcgaggcaatcgcagcctccgcctga

SEQ ID NO: 11577 - RNA, 936 nt, synthetic construct
  source 1..936: mol_type = other RNA
atgataagagagaggatggcctcagccatcggagtgacaatcgaatacatttcaggactggccaacggcgcaagccatgcgtataaaacttaccgcatacccaagagagacggaaggctaaggaccatacatcacccatccaagcaactgaaagcgctgcagcgctggctgctccagaatgtaatagagaaccttcccgtgcacagcgcagcttttgcctacaagaaaagcacctccatgtttgacaatgcaagagcccatagcaagaacaggttcctgctgcgtattgatctgaatgactttttcccttccattaccgataccgatgtacgccggtttatccaagaccgggccaccatgttcgaaggctggacaaacggcgacatcgacgctttttgtaagattatctgcagaaatggtcacctcaccatcggagctcctaccagtcccgccatcagtaatgttctttgcttcgacctggattcagccctatcctctttggcaagtaaattaggtgtcacatatacgcgctatgctgatgatcttttcttttctacaaaccaggcgggcgttttgcgacccttgcaggaaagcgtcgagcagacagtgcgggtcgctactctcccaggaaatctggccattaatcatggcaagactcgtcacagctcgaaaaagaggttacggcgcgtgactgggatcgtgattgggagtgacgggaaagctcacgtgggccggggagtgaagagaaagattcgtggtatgattcatagattcgactctctcaacgatcaggatcgagcatctctggctggcctcatcgcttatgtcatcgggttcgaccctgccttcctgaactctcttgtgactaaatacgggcacgcagcagtttcccgagcccggtttccaacgaggccgtcaggtgtcaatgtgaactga

SEQ ID NO: 11578 - RNA, 912 nt, synthetic construct
  source 1..912: mol_type = other RNA
atgatggtggacaagatggccctggacctaggcctgacccgaaaatttgtggctaatttttcacggggagcgtcacacgcctataagttctacaccatccctaagagaaacgggggcgagaggcctatccaccatccatcgaaacaactcaaatccatgcagcgctggctgctggcatacgtgatcgaacccctcccagtacaccctgctgcaaccgcttacaggaagcatcggtccatactcgacaatgcccgtgcccacgcggcatccaagttcctgctccggatggattgcgagaacttttttcccagcatcactgaggacgatgtgctcttgtacattcagcagcgaccaagcttattcccggggtggactgccttcgacatagaggtcttctgcaaacttatctgtcgcaatggtagactgaccattggcgcccctacatctccgggaatttccaacgctctatgttatgaaatggattctgccctggccgatctgggcctcaaaaggagcgtcaactacacaaggtatgcagacgacctgttttttagtgcatcaaagcctgatgttttgcgcccacttcagagcgacatcgagcaactgataacagatcttgaacttcccggggggctcaaaatcaatccagccaagactcggcactcaagtaagcgagggagaagaagggcaacgggaattgtgctgggttctgacggccagcctcatattggtcgcgccctgaaacgcaaggttagaagcctgattcacggagtagattctttggatcccgccgctcgtcagagtttagcgggcttagtcagctacgctattggattcgaccccgatttcatgaactccttggttatcaagtatggccatgctgtgatgcagaaagtgcggttccccacatga

SEQ ID NO: 11579 - RNA, 939 nt, synthetic construct
  source 1..939: mol_type = other RNA
atgatgctggaacaaatggctaacggaatcggtatccctgtggtgtttatcgagaatttggcgaacgcagcttcctacgagtacaagacttatactattaggaaacgatccggcggtctacgcacaatccatcaccctagcaggcggctcaaggccctgcaaagatggttactggccaacgtcattcagaattttcccgtgcatctcgccgccaccgcatatgctccagggaggtccatcttcaaaaacgcctctgttcacgctactagccgatacctgctgcgcatggatttcactgatttcttcccaagtattacgcagaatgacgtacgttcgtacgtgaatacaaacacccggtttttcgagggctggaatagtaccgacgtgaacgcgttttgtaatctcatttcaagaaacggtgtgctcacaataggcgctcctaccagccccgctatcagtaatgcactttgttatgacttggacgcaaggctcgagctgttttgctccaagtctggggtcacatacacaagatatgccgatgacttattcttcagcgccgatcggtctggaacccttcgccagattgaagaaggcgttcttcgaattgtgtcagaactggagatcccgagatgcctggtcatcaatagggccaagacgagacactcttcaaaacggggaacccggagggtgaccgggattgttctaggcagtgacgggaaacctcatatcggacgcacactgaagcgtaaaataagagccagcattcaccagtttgctgccctggatgacgccggtaaggattccttggcaggacttatagctttcgccgtagggtttgatcccgacttcctgaacagcttgatcaagaagtacggcctcgcggcagtccgcatagctatgaaaaagccatcagcaaagactggcgggaaacccctgtga

SEQ ID NO: 11580 - RNA, 1026 nt, synthetic construct
  source 1..1026: mol_type = other RNA
atgactactgaacttggcctcacgtgggagttcgtggctaatctggcagggtccgcctcctacgaatacaagaagttcatcgtcagaaaaaagtctggaggcctccgcgagatcttccaccccagccgtaaactgaaggcagtgcagatttggttgctgcgaaatttactgggccaactcccggtgcacgagagtgcaaccgcctatcggaccggaatatccatatacgataacgctacaaggcataccaaaagccgatacttgctgcgcattgaccttgagaattttttcccctctattcgcgattcagatttcagtgcgtatgtggacagtaatcaggaaaacttcaaggggtggactgaaatcgacaaagccattgtgacgtccctgatgttccggaacggtgagctaacaatcggggcacccacaagtcctgcgctgtccaacgctctgtgctttcaactcgacgtgcagctctcaaagttagcaaataacaggggtctggtctataccagatatgctgacgatttgttcttctcgtctatcaaaccaggggtactgagcagcgttcttgacgaggctcaatccatcatcgacgaactcccaattcccgccactcttaaaattaacagagcgaagacacggcatagctctaaaaagggaaggaggcaggtgaccggcatcgtgttgggatcagacggaaagcctcatatctcacgaacatttaagagaagcataagaagcatggttcacaaattcgatctgttacgcgaggatcagaaggtggccttgccaggtatgatatcatttgtagccggcgaggagcccggctttctgaacagcctgattaccaaatacggctttgaactgattgcccgtgtcactaccatccagtctcttgctgaacggcagcgcatccacctacctaaggttaaaccatcccctccgaagaaagtcagggccaagtctagtacccaggttctctttgatacactgcggaatgccgggtttgatgtcgacgactga

SEQ ID NO: 11581 - RNA, 912 nt, synthetic construct
  source 1..912: mol_type = other RNA
atgatcattgaaaaaatgtcagccgagctgtcccttccactcaaatacgtggacttccttgcactgacagcttcacaccagtacaagcagtacaccatccctaaaaggacaggcggagagcgcatcattctccaccctagtcgtaaattaaaggccctccaaagatggctgctgagtaacgtaattgccgtgtggcccgtgcatcctgctgccatggcatatcggcccggggtttctatttttgataatgccaacatccacgtccagtctcagtatctgctgcggatggatatgacgaatttctttccttcaatcgaggtccgggatctggttgcttttatggcaaagcgcccaaccttatttcaagactggactgatcgtgataagagctacttcgcaaggctggtgttccggcacgggaagctcactgttggagctccaacgtcccccgcgctcagcaacgcactgtgcttcgaactagatagcgccttagccggtattacatctgctcagggggtggcttacagccgctacgccgacgacctatttttttccgccaataagaagcaggtgctgatcagtatcgaagccgaggctaaagctgtgttgggtgagatcaagattccggctaatctctctctcaaccaggccaaaaccaagcactctagcaaaaggggggcaagacgcgtcactggcatagtactgggaagtgacggcaaggcctatgtgtcacgagataccaaaagaacaatccgaactttggtgcatcagttggacacccttaaggacgaagagagaataaggctggccggccttatatcctatgtctcgggcttcgaacccgcgttcctgaacaatttgattctgaagtatggagcagacaaagtcagctccgcgaagcaacatacctga

SEQ ID NO: 11582 - RNA, 921 nt, synthetic construct
  source 1..921: mol_type = other RNA
atgtctatagttgactcagcggcagccagcttaggcgtatcgcgggacaaaatcctcacattggccgatcaggctaatcatagttacgtgacctattccattccaaaaaagtcagggggagagcgtgagattcaccatcctagcaaacccctgaaagccgtgcagcgctggtttctcagacggtggataagcctcctgcctgtgtctcctcttgctactgcttatgagccaggaagctcagtgttgaagaatgccctcgtccatgagggcgccaaatacgcagttcgcattgatctgcaagacttttattggtccatttccagcgatgacttccgcagctatttggcgaccgtgccggcaggagcagagattgattttggggacgtggaaacagtagcagcactgctgttccggcacggccgtttaacagtcggatccccaacatctccctcgctgtcaaacagaatgtgccgaaagctggatactgaatgtgaggcactagccgttaagatcgacgccagatacagtcgctatgccgatgacatgtacttctccgctacccacccagggatcctgtccgctatcgagagttcactggaatccatcttatccggtctggacacgcctggttctctacgaattaacaagagcaagacgcagcacttcagtcagaagaccgggatcttcgtgactggacttgtcatcggctcagacggtaaggtgtacctcgggcggagacgcaaaagggaaatccgagcgctgatccacaatttggaatctctggaccttgatgctaggagacggcttgccggcaaaatatctttcgctaggagcattgagcccgcttttgtcaacgccctcataaagaagtacaccgtcggcaggtttaggtctgccagtaggcccgatagcgccggctga

SEQ ID NO: 11583 - RNA, 927 nt, synthetic construct
  source 1..927: mol_type = other RNA
atgctgatcgagttgctttcacagagactcctgttaccagagaaatatatctccaacttagcagcgggtgctagccaccactacaagacctactatgtgtctaaaaggagaggcggggccaggctcattgaacatcccagcaagcaactgaaggccgtacagaggtggcttgccgcaaacataatctgccactttcctgtacacgccgccgccaccgcgtacaaaagcggagtcaatatcgccgataatgccaggaggcatgctagttcctcatttctggtgcggatagacctgcaggactttttcccttcgctgcgggctgtcgatgtgaaaagactggcggagacttcccttgtgttcgtgcctgggggcggacagtggagctctgacaatattgacgtgttcgtttgtttgagttgcaaggacgggcggctcactatcggcgcaccaacaagcccacccttgtgcaacgccctttgttatcatctggatctgcagctgacagcatttgcacagcagcgcgaactcacttactcaaggtatgctgacgacctggtgttctctgcgcgggctccggaccaattacgcggagttcccgctcaggtagccgctaccctcgaaaacctggaggtcccacgtggcctgaaaatcaacacgtccaagacatggcacgccagtcgacgaggtcgcagaaaattgacgggcgtggtgattacatcagatggaaagctgagtgtgggccgccagctaaagcgtcgattacggactcttgtttaccgccattataccctggataaaacccaaaagaagaatctcgcaagatggttggcacacgttagaagcattgagcctgaattcatcaattccctaattctcaagtacggggctgatcgggtcgtcgatgccatgcaaccccattctggttga

SEQ ID NO: 11584 - RNA, 942 nt, synthetic construct
  source 1..942: mol_type = other RNA
atgctgattgagctcctgagcaagactagcaatgtgccagaatcaaaactgttgtcacttagcctcacagcgagccgccgttataaagtttataccatccctaagagaacgggcggggatcggttgatcgagcacccttcgcgcgaactgaaggctattcaacgctggatagtgcaagctctcttcgcacgcttcccagtccatgaggccgctacagcgtacaggaaaggcactgggatcagagagaatgccgaaagacaccgccagtccaagttcaccaatcgttacgactttagtaacttctttcctagtttttcccaggacagggttctccattatgtatctgagcagagtaaaaacttggggatagacctcacccagcgagatctggacttcgtgggaaacattgtgtgccgtcatggccgcctaaccataggtgccccctcaagccctgccattagtaacgcaatgatgtttgaatttgacagccgaatgcacgaagcctctcagtctcgaggactggtgtttactcggtacgccgatgatattttcttgtcctctttcgaacccgggaagctggagggcctggaagcactgatcctgaagtccaagagggatatcccccacttacggctcaggcttaatagacagaagacagcatatctgtcaaagaagtactccaggaaagtgaccggaattgtcattacaccgcagcacacgttatccattggcagagaaagaaaacgggaggtcaaggctctcatccatcagtggatcaaggggggcatcgaacccgagcggttctactatctgaaaggtcttttcgcattcgccatcgacatcgagccacaacttgaggctaggttaatggagaagtacggaaaagagaaaattcagctgctacggtctgccgattttgactttccaatcggtctgatatga

SEQ ID NO: 11585 - RNA, 942 nt, synthetic construct
  source 1..942: mol_type = other RNA
atgctgatcgagctactctctcgtacagctaagatccccgaagctaagttagtcagtctggcagagtcagccagccgacggtacaaggtgtatacgatacccaaaaggaccggaggggaacgagttatcgaacatccttctagggaattgaaagctattcagaggtggatagtgagagcgctgatcagccggtttccactgcacgagagcgcaactgcctaccgaaagggaaccggcatccgggagaatgctgaaagacaccggaagaccaagtttaccaaccgttacgacttcgccagtttcttccctagcttctcccaagctcgggtggtacagtatattggggagcaggccaaagccgtgggcatagatctctccgagagagatttggaatttatcggcaacatcgtgtgtcggaatgggaggcttactattggagcaccctcttcgccggccattactaatgccatgatgttcgaatttgacagaagaatgcacgaggactgccacgctaagggattagtctatacgcgatacgcagatgatctgttcgtttcctctttcgaacccggtcaacttgacggcattgagaaagtgatcgtcaaaaacaagcggggcataagtcatctcaggctgaggctgaatcatcagaaaactgcctatctctccaagaaataccgccgcgttattaccggggtagtcataacacctcagcacacactgagcatcggtcgcgagcgcaagcgcgaggtgaaagccctaatccataagtggattaagggcgatatcgacccaacaaacttttactacatgaggggtttgttttcatttgccatcgatattgagccagagttcgagaaaagactcgcggaaaagtatggggcggcacgcatccgtcagcttagatcagcagaccacgacttccctattggactgatttga

SEQ ID NO: 11586 - RNA, 942 nt, synthetic construct
  source 1..942: mol_type = other RNA
atgctgatcgagttgctgtctcgcacatcgggcatcccagatgagaggctgttgcgcatatccgccacagcctcccaacagtataagttgtacaccgtgcctaaaaggaccggaggcgaaaggcttattgagcatcctagtagggaactgaaagccatccagagatgggtgatacgagcgctcattaatcggtttccggtccacgatagtgctacagcctacagaataggctcaggtattagagaaaacgccgagcgacaccggacgtctaagtatactaaccgttacgactttatgaatttcttccccagctttaggaaggagcacattagcatattcatcaaggaacagagcgacattattgggattgatctgagtgaacgagacatagatttcatcgctaatatcgtatgccgcaacggaaggctcaccattggcgctccaagcagccccgcaatcaccaatgccatgatgtttgcattcgacaagaagatgcacgacgcatgtaaatccagagatctcatttttacccggtatgctgacgatattttcatttccgcatcagaagctagaaaactattcaacatcgagaatctgatcatcgacagcaagcgtgatatccattacctcaacctgaggatcaaccataaaaagactgccatgctttcaaaaaagtaccaccggtctataactggggtggttatcactcctcaacatacgctgtccatcggacgcgaccgcaaacgcgagattaagagtttaatccacagatggatcaatggtcagattgatgcggagaaaacagagtacctaaagggccttttttcttatgctatcgacattgaaccatccttcgaaacacggttaatcgacaagtatggggcagatatcataaaatcactgagatctcccgagaatgccattaacaccaaccggagctga

SEQ ID NO: 11587 - RNA, 978 nt, synthetic construct
  source 1..978: mol_type = other RNA
atgcttattgatcaaatcgcccggtcaagtcagctagaggttgatgagctggtgcgcctagcacaaaatgcatcccagcactataagctctataatattcccaagcgaaacggtgagccccggagaattgcgcacccgagccgtgaactcaaggccatccagcgctggattgtgaaagtgatcatccagaggtttcccatacatgacgctgccacagcttacaggacaggagggggcattcgtgaaaatgcggagcggcaccgcatctccctgtacactaataggtatgactttgcaaacttcttccctagctttaaacgggaacaggtccagagttttatacaatctgagtccgagaaagtcggacttttgctctcagacgacgatgccgactttgtgggaaaaattgtgtgtcggtatgacaggttaactatcggcgcccctagtagcccttctattaccaatgccatgatgttcccattcgatcagatcctcttcgattactgcgtcaagagggatttgatatatacaagatacgccgacgatatcttcatctcggctaacaaaagcgaccagttaaacaacctggaagtgcgtatcgccgatgcgaaaaggaaaatccctcacctgagcattcgacttaacagacaaaagaccgcatacctgtccaaaaagtaccatagatctatcacgggtgttgtaataacccccgatcataaattgtccgttgggagatcacgcaagcgcgaaatccgggctctggtccaccgctggataaatggcaagctggacccaatcgaggtgtcttatatgcgaggcctgattgccttcgctagggacattgagcctaagtttgaagtagcactgcgagctaagtacggcccgcagcggatcgaggaaattctcagaagaccagacctgaccacaactcccgggtggccaaaggaggggaataacgatgacgatgtgccattctga

SEQ ID NO: 11588 - RNA, 966 nt, synthetic construct
  source 1..966: mol_type = other RNA
atgttaatccagcagatcgccaggaccactaaactcgacgaacaagacctcagacacctcgcagcgtctgccgatcgtcgctataaagtctacctgatccccaagcggggacatggccacaggaaaattgaacatcccagcagagagattaaagctttgcagaggtggatcacaaaggtgatcatcgatcggtttcctgtccatcatgcagccacagcctaccgcaaggggaacggagtgcgggaaaacgcagagcggcaccgaaccagcaaatataccaatagatatgacttcgctaacttctttccaagcttcgggcaggctcaagttgagaacttcgtgaagcaggaagccgaaaagctggggatgctgttcgacaatgacgatttacgttttgtcggcaatatagtatgccgattcggaaggctgagtatcggcgctcctagttcaccagcgctgaccaatgccatgatgttcgactttgatcgcactcttttcgattggtgtcagtccaaagagctgatatacacccgctacgccgacgacctctttatttcggctaatgagccggaccgacttaacaagttagagccacttatagctaaggccaaacgcgacgtggctcatctcacgcttagactgaacaggaggaagactgcctacttgtcaaagaaatacacccgactgataacaggtgtgattattacaagcgatcacaagttgtccattggtcgcgaaagaaagagagagatcaaagcgctggttcaccggtggctcaacggcaaactggaggccggagagatctattatatgcgggggctactggcatttgccagggatatcgagcccgagtttgaaaagaatctccgttctaagtacggtgatgcagctattaatgaagtgctaagacacccctccctgggcaaggcaccagatcctgagttccagttgcctccgtggctgtga

SEQ ID NO: 11589 - RNA, 930 nt, synthetic construct
  source 1..930: mol_type = other RNA
atgctgattgagatgctggctcgcactacttcatttgacctcgatcggctctctcggattagtatgacagcctcccgccggtataagatttacaccattccaaaacgcacaggcggggttcgcacaattgagcacccctcgcgcgagctgaaggccatccaacggtggatcataaaagcgctttttgccaagttccccgtccatgaatccgctaccgcatatagaaaagggtttggaatcagagaaaatgccctgaggcacaagcagactagctacaccaatcgttacgatttcgctgacttctttccttcttttcaacagtcctccgtggagaaattcttagccttacaggccaagatcctacagatagatctgagccctctggatatcagattcgtaggtaacgtggtttgcagaaatcagcgacttaccataggagccccctcaagcccggcaattactaacgccatgatgttcaagtttgacgaaaatcttaacaacagttgtgaatctgacaaactcatctacaccaggtacgctgatgatatttttgttagcagcaatgaacctaacaaactctttgatgtcgaagtgcggattgagaacgcgcatagagggatagactatctgagcctcgagttgaagaatgagaagacagcgatcttgtctcgcaaatacgcaaggaaggtggctggagtcgtgattacgcctacccataacctgagtatcggtagagagaggaaacgagagatcaaagcactggtgcactcctggtcagtaggcgctcttgagaaggacaggttcgcctacctgcgaggcttgttggcattcgcccgtgacatcgaaccagatttcgaaaggagactgcgggctaagtatggcgaccccacgatcgacaggctactcttcgccccagacctgtatgcatga

SEQ ID NO: 11590 - RNA, 948 nt, synthetic construct
  source 1..948: mol_type = other RNA
atgctcgtggagctgttagttcgggcctcaaaaatatctgaggctaagctgacctcattagccgccaccgcctccaatagatataaagtgtacgagattcctaagcgttcgggcggaaaacgaaccatagaacacccatccaaggaattgaaggccatccaaaggtggatagctaaggccgtctttgctaggttccccattcatagcggtgccacagcataccgccagggattcggcatcagagaaaatgcggagcgccatagacagagtaaattcaccaatcggtatgatttctccaacttttttccatccttcactcaggcggaggtgcagaacttccttcgatccagatctgcagcagtgggattggttctaacagaaaaagacattgggttcgtggggaacattgtgtgtcgcaacggcagactgacgattggaagccccacttctcccatcatcacaaacacaatgatgtttgacttcgatgtaaccctggataatttttgcgctgagcggggcctcatctttactcggtacgcagacgatatgtttgtcagcagtaataaggaaggccagctgttctccgtggaggatgggattcacctggcgatgaattctatccctaacctcaacttggaagtgaatcacaagaaaaccgccctcctgagcaaaaagtacctgcgccgtgtcacgggggtagttatcactagcgatcataggctaagcattggtcggcataggaagcgagagataaaagcacttattcacaagtggcgcacagggacccttgaggtcgagaaactgcactatatgcggggtctggtggctttcgctagggacgtggaaccgaattttgagcagaggctcagactgaagtatggcgaccaagccatcgacgaaatcgtccactcaagtgacctttcaatcgtttttgacaagaacacttga

SEQ ID NO: 11591 - RNA, 936 nt, synthetic construct
  source 1..936: mol_type = other RNA
atgttgctggaacgtctcgagaagcatacaggcctgccaaggtccctcttagagcgatacgctgaaaccgcctccaaacggtatcgggtttatacagtggagaaaagaaatggagacaggagaacaatagagcatcctagtagagagattaaggcgatacagaggtggctgatcagagctctcatcgggaacatgcccgttcacgaggcctctaccgcctactccaagggcgcttcaatccggaaaaacgccgagcgccacgtgagatcacgttataccgtcaggttggatttcgaaggttttttcccgtctttcggcggagctgacgtaatcgcctatctgaaaaagacgcacgatgatcccattatggtcctgtcagctgaggacttgagctttattcgtcgcatcgtgtgccgacacgatgcccttaccataggcgcccctactagccccgggctgactaatgccatgatgttcgagtttgatagtgctctcgccgactggtgtgcagcacgagctctgatctatacgcgctacgccgacgacctgtttatctctgctagcgcccctggagcacttgctggcgtagaagccaaggccgccgagttggcagcggcatttccatacgccaagttagcgctgaacagggaaaaaactgcacatctgagccgcaaatataggcggtcaattacaggacttgtgatcaccccagaacagacactcagcattggtcgcgacaagaagattcgactcaaatcggatgtgtacgcatacagcaaggggaatctacagtccgaacaacggtcccgcaccgcgggtctaatcgcattcgtgagggacgtcgagcccgctttctacgagactctgttaagaaagtacgggagagaaactattgaagggctgcagaaaggcctgcggtctagtcttaagggatga

SEQ ID NO: 11592 - RNA, 909 nt, synthetic construct
  source 1..909: mol_type = other RNA
atgttgttggatgagctctctgcggaaaccgggttgcgacccgatcgcctggagtattatgccgattctgcatccagacggtactactccttcaccattaaaaagagaaacggcgacccccgttggatcagacaccctgcaaagcccctgaagtcgctccagaggtggctgaacagcaacgttatatctaggatgcgggtccatcagtgtgcgatggcctaccagccaggaagcaatatcaggagcaacgcattaagacacgccagttccaatttcacagtgaggattgactttgaagatttcttcccttcgtttaaacgatccggtattgtgaagtttctgaaggaccaggaaaaattcggcctgaagctcggaaggcgggatatcacctttttgtctaagattgtgacacgttttgatgagctgacgattggcgcaccttcaagcccgctcctaactaatgcaatgatgtatagcttcgataaagaagtctcagaattttgcgagcgtaaggggctgacctacactcgctacgccgacgacatctatatctcttccgttgctcccaatggcctggatggcgttcttcaacgggtggccgctgctgccaaaaagtttccttacgccaagctccgaataaactcctcaaagaccagttatacaagcaggagataccggcgcatgataactggattagtgatcactccagaccataaaatcagcctgggtcgcaagagaaaacgggagatccacagtctggtacatatggccagtgtggacaaactggaccttgagaaactctcttacctgcaagggatgctagctttcaccaaggacgtcgaaccatcattcttcgagacattagtagctaagtatggacgcaaaacggtggagcgcattcttctttga

SEQ ID NO: 11593 - RNA, 909 nt, synthetic construct
  source 1..909: mol_type = other RNA
atgctaatcgactggttgtgtgccgagacgggattgcagagagaaagactgattgcttttgcagcgtctgcctctaagcgctacttcgtttttcggattaagaagcgggatggttccgaacggcagatcgcccaccccgcaaagccactaaaaggcattcagagatggctgaactcgcgcgtgattaaatcctggaaagtgcatgatgctgctacagcctaccagcgtggagcctctatcaggcttaatgcactgcgccacgccgaaacaaactttacactccgagtagactttaaggatttcttcccctcattccaagccaaggggatagagaaatttatctcagaccagcccaacgggggtaagaaatttgacaaggtggacctgaagttcatcactgatataatcacccggaatggacgcctcactattggctcacctagcagtccgtttatcacaaacgccatgatgtattcctttgacgaggaagtgagcttattctgcgacgctagcggattggtgtataccagatacgcggatgacatttttgtttcaagtcacaatccaggcaatctggctcaagcgtatgacttcctgtgcagcgctgcaaataagttcccttacgccaatctttccatcaatcataacaaaaccaagttcctgagccgtaagtataggaggactatcaccgggatagtgatcacctctgataggaagatttctattggcaggcctcgaaaaaaggaaatcaagagtctcattaacagctacatctacggcaaacttgatgatgagaaagagatgtatctcaaaggcatggtcagtttcgcatgtgatgccgacaacgtcttctttctgtccctggagaagaagtacggtaaaaaagtcatggggagattaatagggtga

SEQ ID NO: 11594 - RNA, 912 nt, synthetic construct
  source 1..912: mol_type = other RNA
atgttgcttgagcgcctgaggaaacaatcaggcctgaccaccgctcaaatcgaaatgtatgccgccacggcaagtaagaggtacaagatctacacaatcaaaaagaagaacgggggagataggaccatcgaacacccatctcgcgctctgaaatcactgcagcggtgggtcaataaaagcatcattagcaaactgccgacgcacgtgtctgccaccgcatacgccaaaggttgttccatccgtaagaacgcccagcaccacctaggctctatttttacactccacgtcgacttcaagtcctttttccccagtttcaaaagcgatgggataagcgatttctttagaattaagtccaaggagttgggaatcgagttgtccgaagaggacgtgaactttattactaggatagtgtgccggaataattgtcttacaatcggtgctcctacctcacccagcatcactaatgccatcatgttcgagtttgacgacgtagttaacgagtggtgcaaccagcgccgactagtttatacccgctatgccgacgatctctatatctcagcgttcgagcctgggatgctgtctgatgtcatcccatttcttattagtgcactcgacaaacagagattcgtgagactgaagataaaccatgataagactgcatttttgagcaaaaagtaccggcgagctattacaggaataattattacaaccgagggcaagctctctattggcttaaagcgtaagaagctcattaaaagtatggtgctggatttcaagtacgggagattacccatggaggacaaatcgaggcttcatggactgataagctttgctctggacatcgaacctgcgttccatgaaacactgatccggaaatacggcgaaaatactatcaagtccatttccacttga

SEQ ID NO: 11595 - RNA, 930 nt, synthetic construct
  source 1..930: mol_type = other RNA
atgctcctggagaggctggagcgtcagagcaggctcagtagagggcagctggagcaattcgccataactgcaagcaagagatacaagatctacaatatcccaaagcggaatggcggggagcgccaaatagaacaaccttcccgggccatcaaggctattcagcgctggctgaacttgaacttgattagaaaattccctatccacatatcttccacggcatacaataaaggttccagtatcctgcgcaacgccgagtttcacaagaacacaaattttaccgtccgaattgacttcgaagattattttccatccttccgcgacaatggaatagaacgcttccttcaggaaaaccgatctgtgattggtgatcccctagacgacaatgacatctcattcatccggaacattgtctgtcggcatggcagactgaccatcggcgctcccagttctcccctactgacaaacgcgatcatgttccagttcgacgggatagtgtatcagttttgccagtctaggggtttggtgtacacccggtatgcggatgacattttcatctcagccactcgcgcaaacagcctcggcgatgtggcagattttgtcgctagcgtttcgacgggttacccgtacgctaatttaaccatcaattgccggaagacagtgtttctgtccaaaaaatataggcgagtggtcaccgggatggtgattacaccccaggggtcagtaagcgtgggaaggaacttaaaagatgaagtgagaagcggcgtttacaagtttaagaacggaatcatcgatggagacgagattgcccgtattagaggcctcgtagcctatatttacggcgttgagccatcatttcttggaatcctggaaaggaagtatggagacgagactattggcagactccttggcgggaggcctctggtcaaatga

SEQ ID NO: 11596 - RNA, 939 nt, synthetic construct
  source 1..939: mol_type = other RNA
atgctgttggagaagctgaaagatcatagcgggctgagcgagcgccaacttgatagatacgcagcgacagctagcaatcgatacaaggtttataccatacccaagaaaccctttggtgtgagaaccatcgaacacccctcacgggagattaaagccattcagcggtggttaaacagtaatatcatccgcaaactcccagtccattcatccgccaccgcctaccacagaggagcatctataaaagaaaatgcaatccggcacgccggctccaactttacattgcatgtagacttccagaacttttttccaagttttcatggacaccacatcgagaagtttctcaggtggtggtctgaggagaacaagattaatctgaacgataacgacatcagtttcttcaggaagattgtgtgtagaaataatgctctgacgattggagctccaagctcgcctattttgaccaatgccatgatgttcgactttgatggaacagtggccctctggtgcacatctaacggctttatttatacacgctatgcggacgacatcttcatctcatccgtcttacctgggaaactggggaatgctctggaattccttaaggagacttgcccgagttttccctatgctaacctgtcaatcaaccacaataagactgcattcctatctaggcgctacaaacgatctataactggcctgatcattactcctgagcggaaaatcagcattggcagggccaaaaaggaagagattaagagcgaagtgtacaagttctccaagggcgaactcaccagcgaggagatcggaaggctacgtggcaaaatagccttcactcgtgatgttgaaccttccttctacgacagactgctcaacaagtacgggtattccacgatccataccttggagttcctgggggaaggtgatcttcttggtaagtga

SEQ ID NO: 11597 - RNA, 933 nt, synthetic construct
  source 1..933: mol_type = other RNA
atgttacgcgaagtgctcgcagagaaaagtggaatttcccccaagagattacagtttatccaagaaaatgccagccggatgtataaggtctatccaatctccaaacgtgacggtaccgacagaattatatcccagcctacaccagagctgaaggccctgcagaggtggctaagtagggggatttttcagcggttgccggtgtctagttgcgccatggcgtacaagaagggtgcttccatcagagaaaatgccaaggcacacgtgaaaacatcattcaccctccatcttgattttgaggatttcttcccttcgttttctaccgatcatatcatccgatacctctccgaaaatactaaactgaactcagatgacatccaattctgtagcgacgtagtctgcagacacggacgcctgaccatcggggctccttcgtctccagctgtcacaaacgccttgatgcactccttcgacctgcaggtagattcttggtgcagcggccggggcttggtgtatacgcgttacgcagatgacattaacatctcatcagcgggtagcggcagtctcggggatgtcgaaggcttcatatccgcaacggccaaggactttaaatacgctagcttgactataaacggaaagaagaccgcatatctgagtaagaaataccgccggtctattactggtatcaatgttactcccgaaggatgtatatccattggccgcgctaggaagagggagattaaatcactggttcacagcttcaagcttggcagccttgagccagagctgctgtggaagctgggagggctaatcgcttttgcccatgacgtggagcccgacttcgtggtttctctgaaaaaaaaatacggaagcgccacagtggaggccattctccaccagaaaacccctaggggccttcgagggcccaaggagtga

SEQ ID NO: 11598 - RNA, 930 nt, synthetic construct
  source 1..930: mol_type = other RNA
atgctcagggaagtgcttgctgcaaaatccggtatgtctctctccaggattgaacggctgcagtgcaacgccagtaagatgtacaaaacatatccgatccctaaaagggatggctcagatcgcatgatttcacagcctacacctgagctgaaggcagtgcaacggtggctagcgcgcggcatatttcaacgtctgcccgttagtgcctgcgccacagcttataagaaaggcgcttcaatcaggaagaacgcagaagcccatgtagccagcagcttcactattcatcttgatttcaaagacttcttcccctcattctcccacggccacgtctctcgattcttaagtgaagctactcggctgagccaggaggacatcctattttgtagcgatattgtctcccgacatggatgcttgaccataggcgcccctagttctccaagcgttaccaatgcattgatgtattcttttgacgtgtcagtagagagatggtgcatgaagcggggtttgatctacacccgttacgctgacgacatcaatatatcgagcaaatgtccaggcgcacttagggaggttgaagactttgtgcgcgacgcctccggggcttttgagtatgcaaatctggtgattaacgagagaaagaccgcctacctgtccagaaagtacaggcgatccattaccggggttaatgtgacacccgaagggagactgagcattgggagagatagaaagcgcgagatcaagagtttagtgcaccagtgtgtcatgggaactctccaggtcgacatgctgtggcggctcggtggactcatcgccttttcttctgatgtggagccccacttcgtcgatgctctgaaaaacaagtacggagccgacgtgatcgagaagatcctgcaccagaaaacgccacgcggagcgtgggtggcggattga

SEQ ID NO: 11599 - RNA, 921 nt, synthetic construct
  source 1..921: mol_type = other RNA
atgctccgcgacgccctgtccaatctggctggaataccaatttctaggatttctcgtattcaggagaatgctagcaagctgtataaggtctacgaaattccaaagaacaacggaaaaaagagaactatttcccagccgacccccgaactgaaggccatccagcggtggctaatacgaaatgtattcgccaaacttccagtgtcaacttacgccaccgcatacaaaaaaggcgcgtcgatcagactgaatgccgagttccatcgaaattcactttttaccttgcacatggatttcgagaacttcttcccctcattcactgagaacaacgtgtttgattttctgaaggagaacacgaatctgaatcaagacgatatatccttctgtgtggacttatgctgcaggtttggtgcactgaccgttggaagtcctagctcccctgctctgacaaatgcgatgatgtacgcctttgaccaacagatcagcgattggtgtgcagaacgcaaattagtctacacccgctatgctgacgatattaacattagcagctcatctcctgatgcactcggcgacgccgaggggttcataaaagacgcttctaaggagttcaagtttggcaacctcaaagtaaacgaagtcaagactagttacctcagcaagaagtatagacgttccatcaccgggctaaacatcacgccacaaggtagtatcagtatcgggcgggatagaaaaagggagatcaagtccctcgtgtataagtacaaagaggagttgctgcccaaagaactgttttggcaggtgggagggttgatcgcctttgcaaatgacgtggagcctacattcgttcggtctttgattgaaaaatatggccagaagacaatcgaagaacttcttcaccagcggacacccaggggcctcaagtga

SEQ ID NO: 11600 - RNA, 915 nt, synthetic construct
  source 1..915: mol_type = other RNA
atgttaatcgagacactgtctaaacagagcggcgttactattgaaaatctgaagtggcttgccgaaacagcctccaagagatacaagacctacgagatccctaagcgcacgggtggggtgagaaccatccaccatccaagtcgaggcctgaaggggattcaaaggtgggtatcaaagttcctgctagctaggctccccgtgcataccgcggcccaagcttatgtgcgtggcgcatctatacggaaaaatgctgagctgcacgcgggctccaaattcaccctacggattgactttgcgaatttctttcccagctttagctcagagcacgtggaggtctttctggcaactgctgaaagggatagatctattggtctgaccgatcaagacatcagtttcgtgagtagaattgtgtctcgacacggccagctgacaatcggggcaccatcgagccccattctgaccaatgccatgatgcattttttcgatggacagatcgccgaatttgcagaacgacagaacttgacctatactaggtacgcagatgacttgttcttctcctcaagcaagcctgataaccttactgatgccctcgagatagtgcagcaggtatccgttgcttatccttatgccaacctccgggttaaccccgacaagacagctttcttaagtcgtcgctacagcagacgcgtcacaggtcttgtcattacgactgacgggaaagtctccatcggacgggagcgcaaacgcatggtcaaagcccaggtgcacaaattcctccagggacagctggacatatttgaagtgccgaagttgaggggctacctcgccttcgtgcaagacgttgagccagaattttgggagggcctgaaacggaagtacggggccgacgctatgatcaccgtaacaggaggatga

SEQ ID NO: 11601 - RNA, 936 nt, synthetic construct
  source 1..936: mol_type = other RNA
atgcttatcgaggccctcattaagcagagcggaatgaatgatgtatccttggagtggctcgcacttacagcgagcaagcgctataagacctacgatatacctaagagaaacggtgccacccgaacaatccaccacccttccaaatcaattaagagcatacagagatgggtcagtaagttccttttgcgtcggctacccgtgcacgttgctgctcaggcttatgtcagaggcgcctccatcaggaaaaacgcagagttacacgccggaagtaagtttacgttaagaatcgacttttcggatttctttccttccttctctcgcgaacatgtggaactgttcctggcggccgtggaacgagatcgaagtattggcctgaccaaccgcgacatctcttttctgagccgcattgtgtctcgtcatgggcagctgactataggcgcaccatcatccccaattcttaccaatgcaatgatgcacttttttgactcccagattgccgagttcgcagacaggaaaaacttgatctatactagatacgctgatgatctgttctttagtagcaataagcccgacaacctcactgatgttctcgccattgtgcagcaagtctctgctacttatccctacgctaatctgaggatcaaccccgataagaccgtgttcctgtctcggaggtacagcaggcgggtcacgggactggtgctgacaaccgacggcaaggtcagcatcggtagggcccggaaacgcgccgtgaaagcccaagttcataaactgatccagggagaattcgacaattttgagttgccaacactccgggggtacctcgctttcatacaagacgtggagccggaattttgggagtcactaaaatcaaagtacggcgcggacgcaatgttaacagtagttgggaaacagcatttctcgaatctgctgtga

SEQ ID NO: 11602 - RNA, 936 nt, synthetic construct
  source 1..936: mol_type = other RNA
atgttgaaagagacacttagtaagcaaagtggcgtcacaatagagaatctcgagtggcttgcggaaaccgccagcaaaagatacaagacatatgaaatcccaaagaggaacggtgggctgaggaccattcatcacccctctagaggtttgaaaggcattcaacgttgggtgtcaaaattcctcttacgtaggctgccagtgcatgttgcagcccaggcttatgttcggggcgcctcaatccggaagaacgccggactccacgcaaactctaagttcactctccgaattgatttcgcggacttctttcctagcttttcaaaagagcacgtggaggttttcttagcagccgtagagcgcgaacgacagatcggcctcgtacagcaggacatctcctttgtgagcagaatcgtgtctcgccatgggcggttgaccattggagccccgtctagccctatgttaacgaatgcgatgatgcacctgtttgatagtcaaatctctgaattcgccgagaggcaaaagctaatatacagcagatacgctgacgatctgttttttagttccaacggacccgataacctttccgacgtcgttgctaccgtgcgtcagattgcagattcgtacccttatgctaatctgcggctgaatccagacaagaccgtgtttctgtccagacggtatagccgccgcgtcactgggttggtcctgacgaccgacggcaaagtctccattgggcgagaaaggaaaagggctgtgaaggctcaggtgtataaattcatccagggggagctggacaacttcgaagtgcccacactgcgcggttacctggccttcatacaggacgtggaacccgagttctgggagtcactaaatcggaagtacggagccgatactatgctcactgtaagaggcaagcagcactttgcagccctgctttga

SEQ ID NO: 11603 - RNA, 939 nt, synthetic construct
  source 1..939: mol_type = other RNA
atgctggttgaggccctgcagaaacaaagcgggctacctacctctgtgatcatgaggatcgccgaaaccgcctcaaagagatacaaggcttataagatcccaaaaagatccggcggatggcgggatattagccatcctagcagggagctgaaggcaattcagcgatggatcaatcgtaccctctttatgaagctccccatccatgaaagtgccacggcttacgccaaggggtcaggtatcagaaggaacgctgaaatccacgcctggtcgtcctatacacttagattagacttcgagaatttcttcccctcttttgacattcacggaattagtgagttcatcgccgcccaaagcgatgagagggaatggggcctaactaaacaggacgtgctgttcgtggggatggtagttactcggtatggaagaatgactatcggcgcaccctcctcaccaattcttacaaacgcaatgatgtacatgctcgattccgagttggctgaaatcagtgaaaagcgtaagttgagctacacccgatacgcggacgacatttttctgtccgcctatgctccggatagccttgctgatatgattcccatagcaaaggagattgtgggccgccagaaatttgttaggctgaaatttgcagatgaaaagaccgcgcatctgtctaagcggtataaacgctctataacagggctggtcgtcaccccagatcagaaaatttcaatcggtcgggagcgcaaaaggactataaagagcttagtattccggttcatcaacggagagctcggtgacgtggaactgatgcgattgtccgggacgatagcattcgtgtacgatgtggagcgcgctttttatgacagtctcgtccgcaagtacggcgaggacgtcattggcaaaatccagaaacctcacctggcggacgccgagtctacatga

SEQ ID NO: 11604 - RNA, 975 nt, synthetic construct
  source 1..975: mol_type = other RNA
atgttacttgagaaactgcagattcagtccaaccagtctctagagcgtctggaaaggtttgccacctctgcaagcaagcgctacaaagtgttccaaattccaaaacgcagtggcggctttcgcattatcgagcagcccagcaaagaaatcaaggccatccaacggtggctgattgaggcgctgtttgatgagttccccatacaccattcggccacagcctatatccgagggaagaatatccggagtaatgctgaggtccatgctgaaagtaattttaccctgaagctggatttcgagaacttctttccgtcattcacggaaaggcacctgataaaattcttaagaaactaccctctcatcgagaagaaacagatcaacgacagggacatcaactttatttcacgcatatgcctcagaaacgggcggctcaccattggcgcgccatcatcacccaccataaccaatgctatgatgtatcagtttgatacacttatgtccgcccggtgtgcagaagataatttcagctatacaagatacgccgacgacgtgttcgtcagctcccgaagttacatcaacgttggagagattattctgttcgtagagaatttgctttctaaatacgagtacgcatccctccgactgaataaagataagacagccatcctgtctagaaaaggcaggagatctatcactggttgcgtgataactcctcagaggggcatctcgatcggacggaagctcaagaaaagcattaagcacaagatctatgaatccatcaacgggcgtttaagctctctggaagctactaagttgatgggttatctcggatttctgaaggatattgaacccaactatttcgagtccctgaagaaaaaatacggagctgacgcaattaagacgatcaccagcgggaattacgatgaaattaagttggtgccactaatattggacgaccttgacgacactcctttttga

SEQ ID NO: 11605 - RNA, 924 nt, synthetic construct
  source 1..924: mol_type = other RNA
atgattctcgagtggattgctaaagaaaccggtgtgggagcggctcagatcgctacaatcgtgcggtctgctaacaacaggtactgtacttatagcattcctaaacgcgacgggactccgcgccagatttcacagccctccaagaagttgaagtttgtccagagatggcttgcaaagagagtgttcgtgaatctgccagtgcacaagagtgcgacggcatacctgcctggcgtggggatcaggaaaaatgccctcgagcatgcctcgtctaaatatctgctaaagatggatatgtcagattttttcccttccatccgggaggaagacattgttaagctcatgctgttgaacagtgaaaagtgggccgggtttgaagatgccgacgctaacttcatcggaaaagcagttagctaccgaggtgcgctcactattggcgccccatcctcaccagtacttagcaatgccatcctgtttgagttcgacgaactggtccacgagtactgcataaacaatgagctggtatacagtcggtacgccgatgacatcagcatttcttctaagggacgcattgatcttcacgcagtcagcggggttgtggaagagtttgtccaaaaactggagacacccaaactgaatataaaccgtgagaagaccgtgattgtaagtaagaagcatcagagattcataacaggcctgaatttgacatctgacggaaatgtctccgttggccgattaaggaaacgcgaaatcaggaccctgatcttcaaattcaagtccgccgaccttgatttttcagagatagggtatctaaaaggttggatggcatacctcaacgccgtggaacccagctttgtggagagagctcgtttaaagtatggcgaccggaccgtgcaaaaaatcttcgagtatgatgtcgacggctga

SEQ ID NO: 11606 - RNA, 981 nt, synthetic construct
  source 1..981: mol_type = other RNA
atgaactacgcagagcttctacaggcttggtgccgcctgttgagagctacaccccaggacgtaacagtcttgttaatgaggggaccttaccagtataagcattatcagattgagaaaaggactggcggcaagcgggatatattccacccaacccccaacctgaaggccgtgcagcgatggctggtaaatgagcacttacaaaccctgcctgtgcacgacagtgtgtactcctaccgggtgggtagagggatcaggcagcacgcggatgcacatgtgcactcaaactttctactgaggctggatttcaaggacttctttccctctattacacaggactggcttctgcaatttctgttgcagagtgcccatgaaggaagcctcagccttgatgatagggccattgcagcatgtatgcgggtgctgtgcagattcaataaatttgatggctctctcgccctgtccattggagctccaagctcacctgccatcagcaacgcaatcctttttcctgctgacgtggacgcgcactccagatgtgccgagctgggctgtctctacacccgttatgcagatgacatctatgtgagctcacgcgaaaagaatgtgctcgtggaggccgaaagacaagtcaaggccgcgttttcgcaacatgccccgcgcttgcagttcaacgctgacaagcgaatcaatgtctctaagaaagccaaacgagtggtcacgggccttaccctgacacccgaccgcaagctctccatcggtagagagttgaaacggagtataaaaactctcgtttacctccacgtctccgggaaactggatccagttgaacgcccgcgtttatgcggactcgtctcatatgttagggacgttgaaccagctttctacaactctctggtgctgaagttcgggcatgtaactatggaagagctgttccggtgcggtcctggcgaggctctttatctgcccaatgaggggctatga

SEQ ID NO: 11607 - RNA, 951 nt, synthetic construct
  source 1..951: mol_type = other RNA
atgacgaggaatgatctcatatttgccctggcaaaattgctgagggcatcacatgaggacattcagaagctcattttgacagccccctaccagtacaagcactacaagattaagaagcggaccggagggtatcgcgacatctatcatcctactgcatctctgaaagcggtgcagcgatggctggtttcaaattgttttcttcacctcatgatccatccctcggtcttcagctacagagaaggcgtcggaattcgccagcacgcgagccagcacctgcactcaaattttctgttacggattgacttcaaagattttttcccctctattgatcaaagctgggtcctggatttcttctatcaggaggttaacgccggccgcctccctatccaactcgagacagtccctaccctggccaggcttgtatgtaggttcgcaaaagaagagaaaaccatggccctatctataggggccccgtccagcccccttttgagtaacgctatgcttttcgccttagaccaggacatggatgagtattgccgtgctcacgactgcgtatacacgcgatacgcagacgatatttacattagcaccaaacacccaaacatactatccggcatcagagatctgctgacctcaaagatcctcgaattcacacctaaactcgtgatcaacgacaaaaaaactatcaacgtctccaagaagatcaaacgggtggtgactggtttgattctcactccagatcgccaggtgagtcttgggcgtaatttaaagaggtctatcaagaccaagatctatttgtttacacatggtcaactaccagtggacgaagttgaacatctgagaggactggtggcttacgctagtgacgctgaggccgtgttttatgatgccctgatccacaagtttggctccgcttccatagacagactgctgaatcggaagaagaactga

SEQ ID NO: 11608 - RNA, 966 nt, synthetic construct
  source 1..966: mol_type = other RNA
atgaactatagtgacctgctgtcttctgccgccaagctgctaaggacatccagcatcgaggccgagcggattatcattacagctccttacaggtacaagcactacaaaatcgaaaagcgaaatgggggtcagcgggacattcatcatcctactcccgcattaaaagccatccagcggtggctcgtatccaccccgcttgcgaatttacccgtgcacgattgtgtctactcatatcgcaagggcagaaacatcgcaatgcacgccgcaatgcacgttgagtccaactacattacccgtttcgacttcagcgattttttccccagcatcaccgctaccaccataaggaggtttttattggaagagactatgaaagggacaatagatcttgacacagccgccatcaatgcaattgtgagactcgtttgccgagccgaggacaaaagcggaaagctggtactgtcaataggagcccccagttctcctcatctcagtaatgcagtgttgcatgattttgaccacgtgatggagtcctctgcgcgtattgccgggggcatgtatacccgctacgccgacgatatttatgtttctggccgtactaaagaaacggtcgcattgctggagaaggcttttatccgggaaacatcaaagctgctaccatatctcaagatcaacgagagaaaaacgcagagattgtctcggaagcgccgcatggctgtgactggcatcaacgtgacaccacaaagaaaactgtcggtcggccgggatcttaagaggagcctgaaaaccaaggtccacctggctctcctggggcagatagcgccagaggagctgtccgctctgcgaggtatgattgctcatgtcgcaagcgtggaacctgctttcatggactcgctcagtaagaaatttggagtggaacgccttgaatccttccttactagcagagaaatcgaggaggtgtcaaggtga

SEQ ID NO: 11609 - RNA, 945 nt, synthetic construct
  source 1..945: mol_type = other RNA
atgaagaatgcagacttggagcgggccctctctgcttacctccggatcaaacctccagacctgaggcagatcgttaggacggccccttatcgctacaaacactaccagattgacaagcgcaacggcggaaaaagggacatatttcacccgtctcccgagttgaaagccatccagagatggcttgtggaaaatgtgctgcttaatatcccggtgagccccagcgccatgggctatgagaaaggctgtagtattcgcgatcatgcacggcagcacctgcagtcaaactactttaccaagctggatttctccaacttcttccccagcatacaattggattggattactcgttttcttctggaaagcctgcccgactatgataacgaggctattcatagtatcgctcgcttggcttgccgctgggcagatgctggcatgcccttagcactgagcattggagccccttcctctccagccctgagtaatcggatcatgttcgctctcgataccgccctgtcggaagtggcctcagccaacgatgtcacttattccagatacgctgatgacatttacttttcctgcgctaaggccaatactctgcatgatctcgaaagagaggcgcggaaaatcatcatcgagatgacccctgcactgcgattgaacgagcaaaaaacattacacacaagcaggaagcggaaggtactaatctctggcgtcggtataacatccaccagaaaactgtccatcggtcgaaacttaaagaggagtattcgaacacaggttttcctctggtcaatgggatcactgccagcggaaaacttccctaagcttagagggctgctgaattttgcgaatgacattgagccagagtttctcgcctctctccacagaaagttcggggacgacctaataaagaggtttcttgcaggggacttcgaacgtaattga

SEQ ID NO: 11610 - RNA, 951 nt, synthetic construct
  source 1..951: mol_type = other RNA
atgaataggaatcagctcatagccgagctggccgctcagttacgagtgtcccccgctaacattgaacgcgtcatagcaagcgcccataggaggtataagcggtacactctcattaagaggacaggcggatcacgggaaatctttcacccaactcctgagctgaaagctatccagcggtggttgattaaaaacgtattcgaccaacttccgacccaccctagtgtgcatgcatatgagccaaattgtagcattgcgcgacacgcggctgctcatcgtcgctcaaatttcttcctgcgtatggacttttctgattttttcccaagcatctccgcccagtgggtgaaaaacttcctgttggagtctatccaggccggactcgtagatcttgacaaggattcggtggatagtatctgcagactggtctgcaggcgggggagactggaggtggaaagtaaactgacgatcggttccccttcttcgccgagcataagcaatcggatcctgtacacattcgatagtaagctattcgaagcctgtcacgagcgtggcgttatttacactaggtatgccgacgacatttacttttccacccgagaacccgacgtgttacatgagattgaacagatagttaccgacctcgtcagggccacagtgcccgaattgtctttgaaccgaaagaaaacccaaagagctagccgcaagcgccgggtcctgattactggtcttgtgatcacctctgatagaaaaatctcagttggaagagatctgaagagaagcgtgcgcacgcaaattcacctgtggaagcagggcaacctgccactggaggacatccctagactccgcgggcttgtctcttttatcgcaggcacagagcccgagtttctatcctccatctcaaggaagtatggggcagagtccatcgaacggttactcaaccccgcaattaattga

SEQ ID NO: 11611 - RNA, 981 nt, synthetic construct
  source 1..981: mol_type = other RNA
atgatgaataatgataacctgatcacggcctggagtggattattgcggtctagttccgaagacgtgatacggttcatatttacagctccgcaccgctataagcattacaagatcccaaagaagactggagggttcagagacatttaccatccaactcctgaactcaaagctgttcagcgttggcttaacgcgaatatcttctcctcactgaggattcacgatgctgtctattcctaccgcaacgggagatctattaaagaccacgcatctatacacctcagttcgaattactttctgcggttagacttcaaagacttcttcccctctatcgaactgtcctgggtcgaggagtttctccgctttaactctaacaacaacatcattccttgcgacctgacaacaattagcaccatcagccacgtggtttgtaggtatagcgagaaagagaaaactaatgcattgagcattggcgcccctacaagccccatcttaagtaatgccattctatacgacctggatcaggccgtgtccagattgtgctccgagaatgatgtgatctatagcagatatgccgatgatatctatctctcgaccaaacataaaaactccctggacaggatcggttcagatgtgctggagcttgttggcaagctggtacccatgctgcagataaaccaaaagaagaccatctacagctctaggaaacgcaaagtcaacataaccggcctgaacatttcaacggaacgaaatgtctctgtgggtagggaactgaagagatcagtcaagactgaattccatctttggtgtatcggcaagcttccaaatgaaaagctgacccgactacgtggcatgatctcctacgtgaagggggtggagcctagtttctttgacgctttgcggaataaatttggagcagagaagatggaatcatttctcagcctcaacattgccccaattgagtttgtagagatccccttctga

SEQ ID NO: 11612 - RNA, 969 nt, synthetic construct
  source 1..969: mol_type = other RNA
atgaacaagaatgaactccttattaagttggccacccatcttgacatattgccggaagaggtggagcacattctcaagtcagctccctatagatacaagcattatacactcaagaagagaggaggaggggcccgggacatttaccatcctacccctgaaatgaaagcgatacaaacttggctggtggcgaacatttttgcagctctccctgttcacgagtccgtttactcttaccgaagcggcctgtcaatcgccgatcacgccagggtccatgtcaaatccaaattcgtgactaaactggacctgcagtcattctttcccagcatcgccggcatacaggtgagagccatgcttcgtgcggctaatgcagcaaaaaaggtggccttgacagatgacgcaatcgctaccatcgtgaggttctgctgcaggggtgataggggtggcggcgatttacgtctgagcatcggatccccaagttcacccgcgattagcaatgcaattctctacggcttagatgagaatctcaagaaggcaagtcatcacgtgggcgttacgtatacccggtacgccgatgatctgtacttctccacaagcgacagggacgtgcttgctggtgtagagcgcgcagcccgaagcatcatagctcgctatggcttcctaaaagtcaatgaggacaagacccagcgcacatctaaaaaaaggcgggtagtcatcactgggctgaccgctacaagtgctgggggagtttctatcggacggggtagaaaacgcaagattaaaacggagctgtatctgcacttttcggagagactaccattggacaagatcgggactctgcggggcctggtgtcttttagtatgggcgtcgaacccaacttctatcactccttatgtctgaagttcggggaaaaccgcatgcgagcctttatcgccgaaggagggaacggagggcagtctgccccattttga

SEQ ID NO: 11613 - RNA, 966 nt, synthetic construct
  source 1..966: mol_type = other RNA
atgacactcctgtcccgcatggccgccgatatgggcctgtcatcagcttacatccataaaattgctgtttccgcatcccaccgatataaagtgtactctgtcaggaagagaactggaggcagaagggtgatcgagcaccctgcacgggaattaaagctgctgcagacctggctgctggataaactgttctcacatttcagggcctccgactctgtatacagttatcggatcgggaagtctatccgcggacatgcaaataaccaccgccgtaattccttcttgcttaagatcgacctgaaagactttttccctagcattacttctgaggacgtgtacaagtttctgaaagaccggcagaatgatctaagcagtcccctgacccccaccgactgccgattaattgccgctattgtgtgtcggcgaggccgcctaaccattggcgctccatcaagcccagcgattagcaactccatcctttatcgctttgatctggctatagccacattttgcagacaaagaggtgtcacttacacacggtatgcagacgatctttttttctcgactaacacccctaacttgcttaccgagataaacaaagaagttaggaggtgtctgagcgccctcccataccccaggctgaagattaaccctgagaaaacggtctttacaagtcgcaaaagattacggctcgtaacaggggtcgttttgacgtctgataagagactctctgtgggccgtgccaagaagaggatgctgaggaccctagtgtacctctttagcaccgaccgtctcgatgaaaaaaaaactgcctatctgagaggaaatctcgcatatgtggcttccatcgagcccacattcatcggatcgctcgagaagaagttcgggaagcgggtgctggaccgacttcacaagcagccattgataaatttgaagccgaaaagcagaagtgcggaaggtttcaagtga

SEQ ID NO: 11614 - RNA, 918 nt, synthetic construct
  source 1..918: mol_type = other RNA
atgttcctccagcagctcgtgaaaatcactggactttcagaagcatatatcataaaactcgccaggacggcctctcatcggtatagaacttatcagatccctaagaggaagagcggcgtccgaactattgaccatccctcgcgtcaccttaaattcctccagaggtggctggttcggaacattttttcatacgcccctgttcacccaagtgtctacagctataaggagggtgtcagtataagacagcacgcgtccttacatgtgaagagcaaatacacacttcgcattgattttcgcgatttctttcccagtatcaaatctgccgacgtacaaaagcttctcgataagaacgtagagcggttcccattccagctcaccgatcgcgacattcacattatcttatccctgtctagcaaggacggcaaattgaccatcggtgccccttgctcccctgctgtgtctaatgcaatcatgtacgacttcgacaagcactggtcacaaaggtcaaagcgcctgaatgtgatttattctaggtacgctgatgacatttacttcagtaccaatcgctccggggtgctaagcaagatcctgtccgagctgaaagaacatctggcaacgcgcgacagcccccggttgatcctgaacaacgccaagaccgtttttgcttctagaaagaggcgtagagtggtgacaggcatcgtcatcacaccgaccagaaagctgagcctgggccgggagaaaaagagacagctgagaaccttgactttcttatttggaaaagggcaactggatcgagatcgagctaaaagcctacaggggtttctgtcctacgcgtcaacaatagagccaatctttattagtaggttgcggaaaaagttcggagacgaactgatttccaaaatagtgcagatgccctga

SEQ ID NO: 11615 - RNA, 1014 nt, synthetic construct
  source 1..1014: mol_type = other RNA
atgatactcgagaggatcgctagagaaacaggtatcggcgtggatcacttaagagtgattgtcaagacagcctccaggaggtacaaaacgtacacaattcctaagcggacaggggggagaaggactatatctcacccaactcccgaggtaaaatttctgcagcggtggctggttcggaatatgttttctgccctccccgtgcatcatgctgtggcatcgtaccgcgagggcgttggaatcgcggataatgctcaggcccacgttcgcaagaactatctccttaagatcgacttcaaaaactttttccctagcatcagggccgcagacatcaggcatttactggagaaaaactcgagtcgattcagcgacatcttaaccgacgacgacgtacaggtgataacggatattgtgtgtaagaacggcgcactaagcatcggagctccgtcctctcctattctgagtaatgcgatcctcatcgatttcgacgagttcgtcttccaagcctcaaaggatagagaggtaatttacacacggtatgcagatgacctgttcctcagcaccgataaacccaactgccttagtgtcatgatggagctaatccgtattcggttgtcctcagggggccagccaagcctttccatcaatgaagagaagtcagtgtttaccagccgcaagcgaaaccggactgtgactggcctggttctgacctctgaccgcactctgagtgtcggtcgaaaaaaaaagcgccagattaggaccatgattcacctgtaccaggaagacaagctttccgccgaatccatttcttacctgcgcgggtatttggcctttgtgcacgctgccgaaccggatctcctggtgagattgcagcagaaatttggtcaagaaaccatggaccagctgatgtgctatcccctggtcccacgtaaaggacatggaagaggcgctcaaagacccgcaatacctttgggggcccacaagaccggatctccacaaaattcaagcgattcctga

SEQ ID NO: 11616 - RNA, 930 nt, synthetic construct
  source 1..930: mol_type = other RNA
atgagaattgcccagatcatcgctaagcaaacatccgcagttactgcggcacacttaatcgcccttgcaaactcagctaaccacagatacaagacctataagatcagtaaacgcaacggacagcatcgtactattgagcacccaagcaggcagctgaagtttgtccagaggtggcttggccgcaagctcttcagtaagtttcccatacatagcaaagcttttgcctatgtgaggggaaaaagcattgcccatcatgcagagattcacgtgtccaataattacctccttcgaatcgactttaaaaatttctttcccagcattaccgccgaaaacatcaagcacaagttgaatgatttcagatacaaagacggaagcaatttggagccagccgagattgattttattacgaagatagtcaccaagtctggacagctgacaatcggggctccttccagtcctatcatctcaaacatcctcatgtacgagttcgaccactactgggaccaatactcttccgagcgggggattacatattctcgctatgccgatgatatttacttcagcaccaacgtgcccaatctgctcaaccagtgcctgattgacgtgcgggagtatctgcgagaaaaccccaaccctagactgttcatcaatgacaacaaggttgtacacacaagcaaaaaaaggaatagaactgtaacgggcctaaccctgactagtgatcggaaagtgtctataggtcgcgataggaaacgtcaaatccggtcgttaatcttcaagcataagaatggcctgctgaatgagcaacagattggtcagctatctggcatattgtcctatgtgcggtcagttgaaccggaatttattacatccatcgaacagaaatacgggggggcgttcatcaactcaatatcgggcgtcaaccagacctga

SEQ ID NO: 11617 - RNA, 954 nt, synthetic construct
  source 1..954: mol_type = other RNA
atgatcttaaggagcatggcggcagatatgagggttccagtggcttatatcgagctcattgccactacagcatctcatcgctacaaaatttaccgaatacgtaagaggacgggcggcacaagagagatatcacatccttcaaaggagctgaagggactccagagatggcttgtactgcatgtttttagccagctgccgattcatgacagcgtgtactcttacagaaatgggctgtccattcgggatcacgccgaagtccacaaaaggaacaactatctggtccggattgatttcaaagacttctttccctctattactgccaaagacgtcgcgaggttgctgcttgccaatcgacaaaatctgcccctgacaattactgctgctgacttgaaagccatctgctggatcgcctgcagaaacggccggttaaccatcggcgctccatcaagtccagtgatttccaatgcagtcttgtaccctctagatgagtattggtttaatacatgtgaacagagagggatcagttatagtcgttatgccgatgatatctatctgtcaaccaacgccccaaacgtgcttgctaccatctacaaggaaatcaggaaggacctggaggagcgcgaatggcccaagctacagattaaccagcggaaggtggtttttacgagcagaaagcacaatcgcaacgtgaccgggcttatcctgactagcgacagacgggtgtccataggacacaaaaagaaacgctggttacgctctcaggtgttcaagttcatggagggtcaactccccgccgagcaagtgtcctatctccgcggatacttgagttttgcaaaaagcgtcgaaccttccttcctgacccggctgcgaaagaagtacggtgcatcggtaatccaccagatcgctaatatacagcctatgcagctcaaactcgttaaggtgaggaagaaatga

SEQ ID NO: 11618 - RNA, 954 nt, synthetic construct
  source 1..954: mol_type = other RNA
atgatcctcagaaagatggccgaagatatgcgcgttccattagcccatattgagctattggctaccacagctaaccaccgatataaaatttacaggatacctaaacggaccggcggtactcgcgaaatctcgcatccttcaaaagagctgaagtctctgcaaagatggttggcgctgcacctgttttcaagacttccaattcacgatagcgtgtatagttaccggataggcgtggggattagggatcacgctgaaatccataaacgaggaaactatctggtcaggatagacctcaaggacttctttccctccatcacatcaaaagacgtcgcccgtctcctgatcgaaaatcgccagaaactagggcagattatcactgcaacggatctgaaggccatttgctggattgtgtgtcggaatggaagactcaccattggcgcgcccagttcccccgtaatctccaatgcagtactttatgcagttgatgagtactggagcgtgacatgcgagcaaaggggtattacctactctaggtatgccgacgacatatacctgtccacgaatcggccaaatatccttgcaggaacttacgacgaaatgcggaaggaccttgagaatcgcgagtggccgaaactgcaaattaacaggcgaaaggtggtgtttacttctagaaagcacaaccgtaacgtgaccggattgatcctgacaagcgataggcgagtttctatcgggcatgagaaaaagagacagatccgcagccaggtcttcaagtttacacaggaccagctgagcgctgagcaggtgtcttacctccgtggctatttaagtttcgctaagtccgtcgaaccttcattcctcactcggttgcgcaagaagttcggcgtgagtgtcatacaccaaatcgccaacacccagagcatccagatcaaaaaggttaaggccagaaaacagtga

SEQ ID NO: 11619 - RNA, 921 nt, synthetic construct
  source 1..921: mol_type = other RNA
atgattctcgagagaataagcgcacagttggcgctcccaacgccattcctcggaaagctcgcgaggacagcctctcaccgatataaggagtatcccattaagaagaaatctggcggcacaagaacaattcatcatcctgcccgggaactaaaactcattcagacctggctgcttcacaacgtgttgatacgcctgcctgtgcacgctgcagcaactgcgtacagacagggttttagtatcaaacggaacgcagaaatgcacgtcagtcataattacttgcttaggattgacttccaaaacttttttccctcccttaccgggatagatgttgtggggattctgcaggctaaccgccaaaaactggccgatgtggaggtgactgaccaggacattattttcatcacccagatcgtatgccgctacaattcactgaccatcggtgctcccacttctccccagttgtccaacgccattatgttcaaatttgacgagacatggagcaggatggcccaggcattagaagtcacctattcacggtacgccgataacctgtacttctcaacaaatcgtcctgatacccttagagagatactcggcaggctgcgtgaatcgctgaatgaggtgggacacccagccttaaagatcaatgaggacaagactatctttagtagccgcaaaagacggcggttagctgccggcctggtactgacttctgatcgaaaaatcagcatcggcagagagaaaaagaggtggatcaagagtttggtcaatcgctttaagtataaacaacttaagccggaagaagttgctagcctccgagggtggatcagctacctgcggtccatcgagcctacgttcgtgctgtccctggaaaggaagtatggactggacctagccgctaactccacctgggaggtttga

SEQ ID NO: 11620 - RNA, 945 nt, synthetic construct
  source 1..945: mol_type = other RNA
atgaatatttttcaggaagagatctccagccacttctcaaaaagttaccgagatatatttcggtacgcgctctcagctagccggagatataaatcttataccattcccaagagaactggaggatcccgtgacatagtgcaaccaagcaaagaactaaaagagtatcagcgatacattgtcagcaccctgttcaacaaactcccagtacactacgccgtgtatagctaccagaaagagaaaaatatcaagcaaatggccacaaagcacataaacgcaaggtttcttcttcggattgactttaaggaattcttcccctcaatcaagggggaacatataaggtctttcctgaaatccaatgtggactacctggaaacctctattaacgattatgacctgactctgattaacctgttggtgtgcaagagtaataagttgactatcggcgccccgtcgtcgcccgtgatctcaaacacgatcttgtacgagttggacaactttcttttcgataagtgtaacgttgagggtattgtgtatacaagatatgctgacgacctgtatttcagcacaatccatcctaataagttaaagacaatcctgcccctgctgaaacagtacctcaagacattctttattcgcctcgtcatcaatgaagacaagaatatctacacgtccaaaaaacgcagacagcagattactggcctgacccttaccaccgataaaaaactctccgtagggcggaagaagaagaggtacatcaagagtctaatctacaaatattcccaacagaacatcgttccagaagagattaattacctcaagggttatatgtcttacttatacagtatcgagcctgattatatagagaaactgcgcaagaagtactctagcgagctggtcggcgagctcctgcctttaaggcataaggaggaaaacgatgaggaatga

SEQ ID NO: 11621 - RNA, 930 nt, synthetic construct
  source 1..930: mol_type = other RNA
atgaatatattccaggaagagattagtcgacattttgaaaagtcctatagggacatctttcagtatgcatccagggcgtcacggaggtacaaatcatataccattccaaagaagactggaggcagccggaagattatacaacccagcaaagagttaaaagagtatcaacgctatctgatcgagacaatctttaacaaactgcccgtgcacgatgctgtttacagttatcgcgagggtcgctctattaagcagatggccgaaaagcacattgacgcccggtatctgttaaggatcgactttaaagagttttttccatctatccgtggggagcacatcagagaattcctgacatcgaatattcatcacattgagctctccatcagtgactacgatttgactctgattaacctcctggtgtgtaaaagcaacaagttgactataggtgccccttcttcccctattatctcaaacaccatcctttacgagctcgacaaattcctattcgatacttgccacgctgagaacattatctacacacgttacgccgatgatctttatttcagcaccatgtgccccaataaattacagacactgcttccaatactgaagcagtacctgaaaaccttcttcataagactcgcaatcaatgaagacaaaaacatctatacgtctaagaagcggaagcagcaagtaaccgggttgaccctgacgaccgacaagaaaatcagcgtgggaagaaaaaagaagagatacatccgatccttgatccataagtactcacagcagaatatcactggcgaagaagctaactacctaaagggctatatgtcctacctgtactctatagagcctgattacattgaaaatctggtccgcaaatatagcaaggagacaattgcagaactcctcccgcttaagaacaataattga

SEQ ID NO: 11622 - RNA, 930 nt, synthetic construct
  source 1..930: mol_type = other RNA
atgaatacttttcagaagcagctgtccgaaaagtttgagaaaccctttcttgagatttatcaattcgcttattccgcctctagaaggtataagacctacaatattccaaaaagaaccgggggaaaccggattatctcacagcctagcaaagaactcaaggagtatcagcgctacctgataaccaaagtgttctccaagttccccatacatgaaagcgtctactcatatcaggatggaaagaacattaaaggcatggcgctgaaccacgttaataaacggttcctgttacgtgtggacttcaaaagtttttttcccagcattaagggcgaatatatcaggggttttctggtgaagaatatcgagctctatgagctgagcctcagcaagaatgacatcactctaatcaacatgttcgtatgcaaatccaaccaactatctatcggtgcacccagttcaccaattatctcaaacatacttctgtacgaactggattcctacttatctgagatctgcaccaatctgaatattatttacacgagatacgccgacgatatgtatttcagtacgaaccagacaaatcaactcgaaaagattttgcctctgcttaaagagtacctcaagtcgttttacatcaaactggttgtgaacgaagataaaaacatcttcaccagcaaaaagaggcgacagatagtgactgggttgatcctgacaactgacgggaacatttcggtcggaaagaataaaaagcgcgagattaagtccctgatttatcagtacatcaagcagacaatctctagcgctgacttaaactatcttaaaggctacttgccttatctctacagtatcgagccgtcttacatagacatattgaagcggaagtacacagagaaaatcatttgtaagcttctgccactcaagcaagatatctga

SEQ ID NO: 11623 - RNA, 927 nt, synthetic construct
  source 1..927: mol_type = other RNA
atgctaaaattcaatgagctgcttaagaaagaggacgacattgacttctttaagctctatctgtttagtctcgatgccagcagaaaatacaagacgtactccataaagaaacgcaaaggaggcttaagaaccatcaatcatccctctaaggagttgaagaagtaccaacggattctgagcaaactgatttttagcaagttgcctatccacgagtccgtcttctcatacaaaaagcgcatatctattaagaacctggccgaacagcacaagaataacaggtttcttcttcgaattgatttcaaggacttctttccctctttaacaagcaaaaacatcagggaactcttagaaaagaatctgagcctgtttgacttcgaactgtccaaagacgatatcacactgattaacaacatcgtgtgcaagagtaacaaactaacaataggcgcgcccacttcaccaatcatctcaaatgctctcttgtatgatttcgactgcgagatgaacaacttctcgaaaaagatcaagtattcccgttatgcagacgatttgtactttagcagtaatattccaaacctgctccagaatatcattccttacatcaagacctttctcctgaactataagattaaactacagatcaacgaggataaaaacatctacacctctaaaaagcggaaaaggtgtgtaactggactggtgcttaccacagataatgaaatcagtattggtagagagaagaagaaatatctgaagtctctgattttcaagtacatcaaaaagaccatcactagcgaggagcttatttatctcaaggggtacctctcctttgtgaaatcagtcgaagaatccttcttgaacaacctgataaaaaagtacaacccggtgataatcaaggaaattcaggagctgaaaaacatcgttatatga

SEQ ID NO: 11624 - RNA, 924 nt, synthetic construct
  source 1..924: mol_type = other RNA
atgatctttctggagtcaatctgtaaacggtttgagaagaacctgaatcaaattgttgacttttctacgaccgctaacaagcgttacaagacgtacaaaattaagaaaaggactagcgggaccagaacaatcgaacagcctagccaggagcttaaactgtatcagaagttcatcagcgaaaagatttttctcaatcttcccgtccacgaggcggtgtttagctacaagaagaacattagcattaagaatctggctgataagcataagaataaccgatatctcctaaggattgatttcaaggattttttcccatcaatcaaaggcgataacataaggttgttcctcaaaaactctaatctaaaactgtctgatctcgagattactcttattaatctgttcgtctgcaagaataacaagttaactataggcgccagctcgtcaccctccatcaccaatgcaattctgttctccttcgacgacgacgtatataaattttgcctcgagcagaacattatctattcaagatatgccgacgacctgtattttagtacaaatgaagagggaatcctgtcctccattttggaatacgtgaaaaactacatcttcagttacaagattgacctgcatatcaactacgataagaatatctacaccagtaagaaacaccgccgcataattacagggttaacaatcaccaccgatggcaatatcagtgtgggtcggaaacagaagcaatacataaagtctctcataaactcctacaagtataaatgtctggaagacgagcagatcaactacttaaagggttaccttaactttctggtttatatcgagccgacttacatcgacaatttgaagaataagtacggagaagtgataatcaacgaattgttcatcaacaagttcaacaacaagtgcaattga

SEQ ID NO: 11625 - RNA, 933 nt, synthetic construct
  source 1..933: mol_type = other RNA
atgatcgtgaaacgcatagctcaggagactggcctggactctgcctacctcgataaggtggtcagaacagcatctcaccggtataagacctataaaatcgccaaaaagaacggtggcctgaggatcatctcacatcctgccaaagaacttaagtttctgcagagatggcttgtgtcaaatctcttctgccatctgcccatccacagtgctgtatttagctatagggaaggtcggaatattaagcagctagcggaaactcacattgcaaataactttttgttgcggatagatttcgaagggttctttccctccatcctggtgagagacgtctcaaacctactgaaaaacagcatcgatgtgctgccgttccaattgtctcgcagcgacgtgaataaaatcgggatgattgtttgcaaggacggtcgcatcaccataggagcaccaagtagccctatgctttccaacgccatactctttaatatcgatactgagattgctgacgcctgtgttaaaaagggcgtggtatatacacgttacgccgatgacttgtacttctccacaaatgaaccaatggttttacaagaggtctttgagggggtgaaaggagtgctcaggaagaataagagtccaaagatcaggattaacgcagagaagaccattttcacgagccgcaaacataaaaagatggtaacaggcctttatatcacccctgataggcgggtgtctattggccgacagaagaaaagagctataaaagccctggtttactcatatatcaaccagtccattgcggaggaggacatgagttatctgcgagggtacctctcctacattaagagcgtcgagcccggattcttaagatcgctggaaaaaaagtacggacaggaagtcctgcagaagattatgatccacgagtacgtgaagcgtaagtga

SEQ ID NO: 11626 - RNA, 996 nt, synthetic construct
  source 1..996: mol_type = other RNA
atgaatttgataaaggtgatggcagacaagtttggcctatctcctgatttcgtgcagaagactatatcatttgcacctaggagctacaagcggtttgagatttccaagaagaacggacaaaagaggaccgtttaccaaccagcccgtaaagtgaaactccttcagtccttcgtatctgacgagattattaaacgatttccactgcaccctgccgtcttcagctacagagaaggactgtctatccgcgacaatgccgaacaacataggagaaacaactacctcctccgactcgacttccgcaactttttcgaatctattgagatcaaagacgtcatccagttctttatccggaacgtgaaaaatgctcccttcgtgctgagccacgacgatattttgctcctcagtcagctatgttgtttcagagctgatgatggtaaactgagagtcgtgatcggggcccctagctccccaagtatcgcaaatgcgatactgtatgactttgacgtcgaggtttttgatcattgcaaatctcaggggataatttataccagatatgccgacgatctttacttcagtacgaatcaccaaaatttactgagcaagatcccggagttcgtctctagggttctttcccagacctcaagcccccgcctgatgatcaatgagaaaaagacatatcacacatcgaaaaagcatcgtagaatcgtgacaggattaaccataacatccgaaaatcgcattagcatcggtcgagataggaaacgggaaatcaggactctggtgtttaagtgcatctccaacagtattgacattgacaaaaaggagtacttgcgcggccttttgtcttatgtttcatcggtggatccagactttttcttctccctgctgcggaagttcggcgaggatgctatctactccattcagaagaaccagccccagagtgatcggaacgtactgtcaactgaggaatcagatagcggggaatttcccttctga

SEQ ID NO: 11627 - RNA, 918 nt, synthetic construct
  source 1..918: mol_type = other RNA
atgattatccagcagattgctaagtccagtggcatcgaggctagctacctgcgcacaatcgtgagtaccgcctcccacagatacaagatctataaaatccccaagaaaactggtggggaacgcgagatccatcacccaagtagggaactgaagtatctgcagcgatggctcgtggataacgtgttcgcctatcttcctgtgcacgaagccgtcttctcatacagagacgggaagtcaatccgggatctggccaaaaagcacgcgaattctagatacatgctgaggctggattttgcttccttctttccatcgattgtggggagcgatgttgttaggttgttaaaaaacaacgtaggctccgtccctattagtttgactacccatgatctgatggacattcgcaatatcgtgtgcagatttggccgtctgaccatcggggcccctagctctcccgtcatttctaacgccatattattcgagttcgacaactatatctacagcaagtgtaagcagataggcattaggtataccagatacgcagatgacctgatattctcttctcaaaagactggagttctcagtcgggtggaggctgacgtcatcgcagccctcaagcaccttcccggtccaaaactggcgattaacgacaaaaagacagtcttttccagcggaaaaaatcgcaggaaagtagtgggcctggtgataacaagcgaaaagaaaatctccattggacgggataaaaagcggtatgtgaagagcttggtttacaagtatatcaatggcatcctctctgccgacgaacttgtttacctacgaggttacctagcatttgtcaattcagtggagcccgagtttctcgcaatgttgtcagctaaatacggatccgacaaaattcgtcttataacgcatccggtatga

SEQ ID NO: 11628 - RNA, 975 nt, synthetic construct
  source 1..975: mol_type = other RNA
atgacactcaatgagattgccaaaaatctcggcgtcagaatctccaccctgcagtcgatagcacgacaagccaactacctgtatatttcataccgggtgaaaaagtacgatggcagttatcgcaccattaatcatcctagccggaggcttaaggcaatccaacgcgaaattctgaagcaggtatttagtaaagcccccgtccacgtgaacgtgtatagctacaaaaaagggatctctattggagatctcgcaaggtaccacgccggggcgtcatacttaacaaggtttgactttaccaagttctttgaaagcatcctccagtccgatattgatctccttatcgagaagctgatagacagtggatctatcgatcttctcaaaagcgacatacagactatctctaagctggtgacactgaaaggggcgcttacgatcggggccccttcatcccccatgataagcaattgcattatgtacagcttcgacgttttctgtgctgactactgcagatccaaaggagtgaaatattcaaggtatgccgatgacatctatctgagttctagcagccctaacgttctgaaaccactgggtgctttcttgattaccaacttttctaagcatactagcctgaagttgtcattaaacagagacaaatccctattcaccagcaagaaacacggcatgaaagtcactggcttgacgttaacctctgatggtaaggtgtctctgggccgggaaaagaagcggaagatccgcagtatgctgcatcacttttcccacggacgcctggacgaaaggcaggcagagtcgttgcgtggataccttaatttcgctctaaacatggagcccactttcatcacatccatgaaggctaaatttggcaaggagattaagcagctctcaatcagtccgccaaagcccaagcgttggccattctactctcgacagtccatcggtattagagggtcctattga

SEQ ID NO: 11629 - RNA, 1002 nt, synthetic construct
  source 1..1002: mol_type = other RNA
atgtcaattgtcaaaaagattgctgaggagaatggagtgcctgagcatctgatcaaccgcattgtgaattcctccaaccatgcctataagacctacgaaattgctaagaagaatggcgacactagaacaatctgccaccctagcaaaaaagtgaaagccctgcaatactggttaaaccagaacgtattttgccacctcccagtacacagcagcgtgtattcttataggtccggcctcagtatactcgacgtggcaaaggaacacgtgggaaagaagtactttctgaagttggatttcaaggcattctttccgtccatcactgccgacgacctccgacgtcatctgcacaaacacaacaatttagttgagctggaccgagatgatatcgaggtcgcgcttaagatagtttcatatcaggaagctctcaccataggatctccatctagccccattctgtccaacagtatactctacgactttgatgacaagctgacactgttctgtatcgacaaaggtgttacctatacccggtacgccgatgatcttacgtttagcacaaacgatagtaatgtgctgacagaaatcaattccttcaccagagaactgttacaggggtttgatggtgtcaaactgaaaattaacgaggacaaaactcagttcttgtcaaaaaaaggaagggttcggatactgggccttatcctaacttcggacgggaagatctctgtgggcagggaaaaaaagagagagatcaggagtctagtgaaccggttcaaatacgatgctatcgaacccgatcatgactctaacgggaatgtcttgagcacgattgaggagaaaaagcgctctcttcaaggctacatcagcttcattgaatcaatcgaacccgacttcattagttccttgaagaataagtacgatgagaatgtcatcgaggcaattaagaagttttcatatgaggaggccatccagtcgagaacagtgattgaccgcacccctagctga

SEQ ID NO: 11630 - RNA, 948 nt, synthetic construct
  source 1..948: mol_type = other RNA
atgatgatctatccccggactctgacgggcactatcgacattgagaattttctcaggaaacgccctatgctgatcgataaatttagcaaggaaattggtctgccaagaccgagcgtccagaaaatcgcagcgtcggctaactatttgtataagcattacaccatcccaaagcgttctggaggtgagagagacatctatcatcccacgcctcgtctgaagctagtacagcggtggattacccggcacgtgattagggatctgcccgtgtcagacgccgctatggcttaccgcaagggcaagtctataaccgacaatgcaaggcttcatgccgggaagagattcctccttaagatggatttcactgacttctttcctagcataaaagctcgagatttgcaacccatcttgacttccaggggttacgacccagaagacgtgaacttcattctgaccatctgctttaaatccggcagtctgaccattggagccccttccagtccagccgtctcaaatatcgtcatgtttgcgcttgatcaggagttcaagggaatcgccgataggcggaaattaacctattctcgctacgccgatgatctcaccttcgctggcaacgtgagaggcaatttaattgaagcaaaaaaggacgtggaaagactgatcgggacatgggccagtcctaacctcacacttaaccaacgcaaaacagttctggtgtcatctgcccaccggcagaaagttacaggcataacactaaccactgacggggagatctccattgggcgcgagaaaaagagggagttgagagctatagtacaccgaagcacataccagaagctcgaaccggaggtcgaggcatatgttcagggatggctggcatacgccaatagcattgaacccaaattcgtggactccctccgaaagaagttcgacacttacctggatttttga

SEQ ID NO: 11631 - RNA, 942 nt, synthetic construct
  source 1..942: mol_type = other RNA
atgagtctacgcgataggctggagaaatcactgcccttctctcggaaagagatagacttactcgtgctttctgcccccctgcggtacaaaacctatcagattcctaagaagactctgggcaagttccgagaggtcagccaacctacaccggaagtaaagctactccagaggtggttgattagtaatgtgtttggcgattttgctgtgcacgatgccgctaaggcatatcgcaacggcatcgggctgctccagaacgtggcaccccataagaaccacagataccttctcaagcttgacttttcaaacttctttccttcaatctctagcggacacttcttcgaatttatggatggcaaagggtacgatcacgacgacctgattgttatgtcccgtgtctttttcaaaaactatcgtaagacagcgtccctcagactcgctattggcgcaccaagctcgccagcacttagtaatattctgctgtacgacttggacgtagcgatcagcaatttctgcaggaatttagatattacctacactcggtatgccgacgatctctcttttagcacaaacactgccgaagtcttgtccgaggttgagaagaatatcagtaagatcatcaaggagaattgtatcatcaatctgaccttgaatgaggagaagacagtgcatgccagcaaaaaaaacgggcggaaaataaccggactcacgatcacctcagacaataagatctccataggtctgcagcagaagaaactgttgagagccaagattgaccgataccaaaaaggactgttaactcaggacgccattgattccctaaaagggtatatcgctttcgtggattctgtggagccagaacatctggttcgcctgaccaaaagatacggtattgaaatcatgcgccagctgtatacgaggataaaccttgaaaacaacatatga

SEQ ID NO: 11632 - RNA, 939 nt, synthetic construct
  source 1..939: mol_type = other RNA
atgtctcttcgagatcagcttctgagggctttgccctttaacgcaaccgagctggacttactcatttggagtgcaccactgcggtataagacatactacatcaaaaaacggcagcctggtcttttccgcgaagtttcccagcctacccccgaggtaaaattgctccagcgctggctggtggccaacgtgctgagcaactttccagtccataccagcgctaaagcctacaagcgggggactggcctaatagaaaatgtgcaacctcatgtccaacacaggtttctcctgaaagttgacttcgagaatttcttccccagtatcaaggctgatcactttatccgctttgcgagcgacgccggaatcgacgacctggacagcaatttaatgaagcaggtgctgttcaagcgcacgaaggggaccgggagtcttgcccttgccatcggcgctccgtcctcaccacacctgagtaatctgatgttgcactcgctggattgtgcgttagccctcaccgcttcaagggagaacattgcatatactagatatgcagatgacctgtccttttctacatccacacccggagtgctaagtgagttcgaaaaaaagctgccactgataattcgagagaactgcgacataccacttaagctcaacgccgaaaaaactattcatgcatccaaaaaaagcggcaggcggattacgggcctcacaatcaccccgcagggcacaatttcagttgggctcgagcagaagaagctgctcagatctcaaattcatcgtttcagcaagaatgaactgaatgctgaatctatccagtctctgactggatatatcgcctacttggcctccatcgagcctgcgcacctggtcagactagctagatactatggtatagatgtgatgcgtgccctctacccccctatctcagatttgttggtatga

SEQ ID NO: 11633 - RNA, 918 nt, synthetic construct
  source 1..918: mol_type = other RNA
atgtcactgaaaaaaatcctagagaaatccctccccttctcatcaaaagagatcgacttttttgtcatgagtgcccccttgcgatacaaggtgtacaaaattaagaagaaggagcctggcaaatttcgtgaagtgtctcagcctagtgctgaagtcaagctgctacagcggtggttgatgctgaacgttcttgtcaaattcaaggtgcatgattccgccaaggcctataaagctggagtcgggttattggataacgtgagcccacatgtgaacaatagattcctgttgaagatggatttcgagaatttctttccgagtattactagcggggacttctttgacttcatggtcggcaaaggatacgattacgaggatatcgttgtaatggtgagcatacttttcaaaaaggatagagcagatgactcattacgcttagccatcggcgctccttcttccccactcctgagtaacattctgctgtacaacttcgacgtggccctggacgactactgtcaaaccctcggggtcgtgtatacacgatatgcagacgatctgtctttttccacaaagaactccggagttcttaatggtgtggagaaggcacttggagggataattgaaagttcatgctctatcagcctgaaggtgaaccgggataagaccatccactcttcgaaaaaaaatggcaggaaaatcactggactggtgattgggtctgacaataaggtgagcataggtttggaacgcaagaggctgctcaggagccaagtatatcggtttaagaagggtttcctcgaccccgaacaggttggctccctcaagggctatattgcgtttcttcagagcgtagaaccagagcacgttaaaagactgatcaatatttacggccgcgagacgatgtttctcctgctgtcctga

SEQ ID NO: 11634 - RNA, 921 nt, synthetic construct
  source 1..921: mol_type = other RNA
atgtcacttaaagatcgtctgctgcgcgccctcccttttagccgacaggagttagaattgctaataagcactgccccattccggtataaagaatacaaaatccccaagcgaaaggaaggagcattcaggcttatcgcacagcctaccccagaggtcaagcttgtccagaggtggttggtgaagaacgaactgtcgaccctgcctatacactccgctgcaaaagcctataaggctgacacaggcctcatcgagaatgtgattccccataagaatcatagattcctgctcaaattagacttcgaaaactttttccctagtatcactgcttctgactttcaccaattcatggaagataatgggttctcaaataccgacattccgacgctcattaatctgttgtttaagagagatcacgctactaaatcactgcggcttgccatcggagctccatccagccccacgatttccaacattctattgtaccctctggatagggccctggacaaccattgcagtgacttagcagtgagttacacacgctatgccgatgatttgagcttctctacaaatctcccgggtatcctgaaggacatcgagcagtccgtaccagcacttatcaaagcctcatgttctctgaacctgcggatcaacaagaacaagaccacccatacatctaaaaaaagagggaggagagtgacaggactggttataaccagcgagaacgagataagcgtgggtcgctttcggaagcgtctgctgagagcccaaatccaccactttggcgcgggcaagctcccacccgaagagactgaggcgctacgagggtacctttctttcctcaatagtgttgagcccgatcagattgacaggctccggattttttatggcaaggagctgatgtcccgcctgatgtcccgctga

SEQ ID NO: 11635 - RNA, 918 nt, synthetic construct
  source 1..918: mol_type = other RNA
atgagcctgagaacacgtcttctagcaaaccttccttttagcaaaaatgagctgaatctgctgattgcgagcgctccaattcgctataaggagtactctataccaaagcgacagccgaataagagaagggaagtctcccaacccaccccagaaatcaagctaatccagcgctgggtcgtggaaaacgaactcaacaaatttcctatacacgagtcggcacgggcctataagaaaaacgtgggcctgattgcaaacgtgttgcctcataagaacaatcggtacctcttgaaagtcgattttaaggacttctttccgtctataacaaaccacgactttaggaagttcatgatcgggacggagttcagtgatgatgatctgcacgacttgtcacagatcctgttcaaggctgaccataagactaaaactcttcggctggccataggtgccccatcatctcctctgctcagtaatattctgctttactcactcgacagtgttatccacgaccattgcaaagagattgaggtgacttacactaggtatgctgatgacctgagcttttccaccaaccgccccaatctgctcacaagtctttacgagaatcttcccatcctcattagctccggaaccgacatacatttaacggtaaacattgagaagaccgtgcacacttccaagggtaacgggagaaggatcaccggactgacaattaccgaaaagaatgagattagcatcggcagagaacggaaaagaatcttaaacgcccaggtgttccgcttcaagaataatctcctgtctatcgaggatatcgagaaactcaaaggctatatctccttcctgcgatctgttgagcccgaacacatcaaccgtttaatccagaaatacggggaatcaacaattttggccttgcaaaggtga

SEQ ID NO: 11636 - RNA, 918 nt, synthetic construct
  source 1..918: mol_type = other RNA
atgctgctcaaagagcttatgcttgaatccttacctttttctagtggcgaactcgaggtgctgatcggcaccgcgccatttaggtacaaggaatataagataccgaagagggattctgataagttccgccagatcagccagcccaccccagaggttaagctgctccagcgttgggttgtggttaacgtgttgagccaatttcccgtgcacccagcagcaacagcatacagaagcggccggggtctattagaaaatgtgcgcccccaccaaaaaaatcgcttcctgctaaaagtcgatttcaaggactttttcccctcaattacttcagagaacttcaaggtgtttctcaaagaatcatcatactcggacgcagagatccgaatcttgtgcaatatcctgttcaagcttgacaggcgaacggaacaactgaggctggccattggagccccatccagccctgccctgagcaacatcctgatgtatcggtttgatgaagtgattagtaagttttgtgaccggttgtatgtagtctacacacggtatgctgatgacctcactttttccaccaatgagcgcgacgtattgtgtaaggtcgagaaagcccttcctgaggtgatcgccgaattcggcctgattgctctgacggtcaaccaggaaaaaacccgccatgctagcaaaaagactgggagacagataacagggctcaacatatctagtgagggggaggtttccattggaagagacagaaaaaggctgctcagagtccagattttcaaattcagcaagggagagcttacagccgatgagatcgactctctgagaggttacattgctttcttacagtacgcggagcctgcccatgtgacccgattgcggtcctcttttggcgatgacctgatctcccgtctgtgcagttga

SEQ ID NO: 11637 - RNA, 918 nt, synthetic construct
  source 1..918: mol_type = other RNA
atgtcactgaaaaccgatctgctgcaggctctgccgttcaccgagcatgaacttacaatgctcattgccaccgctccccgccgttacaaggaatataccatcgagaaaaggaggcgccccgagcggaggaatatagcgcagccaactccagaaattaagactctccaaaggtggttgagcaaaaacgtgctgagcaagtttcctatacacgcctctgctactgcataccgaaaggacgttgggctatctgccaatgtgtcccctcatcttggcaacagattcttgctcaaaatcgacttcaagaattttttcccctccatcgaaagcgatgacctcgtggcatacttagagaagaaagcagagctgacaaatgacgactgctatattctcacgcagattctattcaaaaagaacgtcgagaaaggaaagctgactttggctgtgggtgccccttcaagcccacaggtcagtaacatcctgcttttccagttcgatgaagcggtgtctaattattgcttagcccacaatatagcctatacccggtacgcagatgacctcagcttttctacttccaccccggttattttgcgagattgtctaagtgtcgtgcgcaaaataatccaggatctgccttacccaaaactggtgatcaacgaagagaagaccgtagagacttccaagaagagggggcggagaatcacgggtcttaccattacaaacgatgacacaatctcgattggcagactgcagaagagaaaactgcgggttctgatccaccgttttaaaacaggcaatttggacgcctgtgaacaagagagtcttcgcgggtacttagcctttctgaactccgtggaacccaagcatgtcgagagactgaagatctcatttggagtagacacactcgctctgctcctgtga

SEQ ID NO: 11638 - RNA, 918 nt, synthetic construct
  source 1..918: mol_type = other RNA
atgagtcttaaagttgacctcctccaagcactgcccttcacggcccaggaacttgacgtgctgattgccaccgctcctcgccggtacaaagagtataccatcgagaaacgcaataagaccggccggagaaacatcgctcaacccactcccgagataaagacactgcagcgttggttgagcaagaacgtgctctccaattttcctatccacgccagcgctaccgcatatcgcactggagtcggcctcgcgcagaatataagcccacatctaaacaatcggttcttgctgaaaatcgacttccagaactttttccctagtattacttcagacgatttgctcgcttatctggaaaagcgaaaggaattcacggatgacgatagatacgtgctgacccaaatcttatttaagagggacgccgaacggcgaaagcttactcttgcagtgggggcaccatccagccctcagttgtccaatatcctgctgtttcagtttgacgaggatatttccgccttctgcatagaaaataagatcgcctacacaaggtatgctgacgacctctctttttcaaccagtacacccgaaatcctgaggggatgtctgaacacagtacggcagatactgcgagatctccaacacccaaggctactgattaacgatgggaaaactgtggagacgtccaaaaaacgcggtaggcgcattaccggactgacaattacaaatgagggcgcaatctctgtcgggaggctccagaagagagagttgagagttcttatccatcgttttctcaacggccatctggatgcctgcgaacaggagtctctgagaggttacctggcgttcctttactcagtcgagccgactcacattgagagactaaaggccagcttcggcgcttctaccttagcctcgctgttatga

SEQ ID NO: 11639 - RNA, 915 nt, synthetic construct
  source 1..915: mol_type = other RNA
atgagtttacggtcgaagattctgatggaccttccatttactgagagagagttgagtctgctgataatttcagctccccggagatacaaagagtactggattccaaagaggaacggcaggcagagactcattgcacagccaacccccgagattaaactgctgcaaagatggctcgtgcagaactatctaagcggcttccctgttcacgctgccgcaactgcttatcgacagggcatcggactgaaagaaaatgtcctcccccacctccgaaatcggtacatgctcaagttggatttcgagaatttttttccgtcattgaagtctagcgatctgctgaacttcctgaaagacgcacctctggaccaggttgatatcaatatgctcgcgcagttgcttttcaggaaagccgatctggggcttgaactagctgtgggtgcgccgtcctcacctcatctgtccaacgtgctcatgtataagttagacgacagaatcaacggattttgcacggccaacgggatcgcctacaccaggtacgctgatgatctcaccttcagcaccagtaaaccccatgtccttcgcgagtgtttacagttcgtgacgtccgccttggcagaaacagcctctcctaagctgcggcttaatgccgaaaagacagtagagacaagcaaaaaacgtggccgccgggttactggactgagcatctccacagagtctaaaatatcaatcgggagggacaagaagagggacctgcgcgtacttgtccatcgctttactaagggagacttaaatgccgaagaaatccaaaagctccgagggtactgcgccttcctgcgctctgtggagccagagcacctggatcgtttggcaaagtcctttggtgtggaagtgctgctagctctgaccgaaggctattga

SEQ ID NO: 11640 - RNA, 921 nt, synthetic construct
  source 1..921: mol_type = other RNA
atggcgctgaaggacctcatgttggaatctctgccttttacgtcaaccgagctcgataggttaatcgaaaccgcccccctgagatataaggagtatgagatccccaagaggaatagtgacgacaagaggcctattgcccagccgacccctgaggtgaaactgatgcagcgctggttaatggacgaggttttgaggaagtttaaaatccaccacgctgcaacagcttacagaaagggcgtccagctcgttgacaatgtaaggccacacgctaacaatcggttcatgctcaaacttgactttcgcaatttctttccatccattatagctaaggatttcgcatcgtatctcgtaaagtccggttggcgcaaccgagacgatatacatcttctgtgcaacgtcatttttaaattcaaccgtagacggaagctcttagaactgagtatcggcgcccccagctccccaatggtcagtaacttcctgatgttcgacattgatcaagagatctaccagtattgtaaggacaatgagatcacatacactagatatgccgacgatttgacgttctcaactaaccgtaccgagatcctacgcgactgcaaggattttgtggtcgatgtgttggacaatactgacagccctctgctgcgactgaacgtggataaaatcgtggagacatccgtgaaacgggggcgaagggtgactggacttggaatcacaagcgataacaaagttagcattgggagagaaaagaaaagagcacttcgcctagaaatttaccggtacattaatgggtacctgtcagccaccgattctgaagcgttgcgtggctacctcgccttcctgaagtctgtggaaccagagcatatacaacggctgcagaaatcttttgatgatgaccggctgggtggactgcttccctga

SEQ ID NO: 11641 - RNA, 948 nt, synthetic construct
  source 1..948: mol_type = other RNA
atgtctatatttgatagaatgctgcgggagctgcctttctcagcatccgaactgaaatacctaatcgcaacggcccagtatagatataaggtgtacaagatcccaaaacgccagtctaatcagtttaggacaattgcacagcctagccctgaaatcaaactgcttcagcgatggctcatgtcagacatcctgtctactttcccaataaacaaagccgccaccgcttacagagagggccggtctattgccgatcacgccagtctgcacgctaaaaaaaagtttctcctcaagatggacttcaagaattttttcccaagtatcagtgcggaagacgtccatcgctatttgattgagtaccgcaaggtttcccccgaggataccaggctgatcgggctgctggtgtgctggagaaacaaaacagacggaaagttgtgcttatcgattggagcaccgtcctcaccgcttctgtccaacgcgatgttatacacgttcgacaaagtcgtgactaagttgtgtagggatcaaaaagttacttactctcgttatgctgatgaccttgctttcagcacaaacaagaaggaggttctatctgtgatcaccaccaatatctacgatatttgtaacaatctggtctaccccagactcgtaattaacgagcagaagactgtaagcatctcccgcagttatcggcgggtcttggtgggactcgtgttgacccccacaggtaaggtgagcctggggcgagaaaagaaacgcagactaaggtccgagctttatcgattctcgcaaggccgtctgaatctggccgatgtcccaaagctgaggggcgagctcgcctttgcttggagcgtggaatcagactttatatttaccctgctccggcagttcagcgaaggtgtgtttaggcaactcgacttacctttcagccttcccaacgagattaattga

SEQ ID NO: 11642 - RNA, 948 nt, synthetic construct
  source 1..948: mol_type = other RNA
atgtccctgttacagaaaatgctgatcgacctgccgttcagcggggatgagctgaaagccctcatctcaaccgccccatatcgctataaggtgtaccagatccctaaacggcagcctaatcagtttcgtactatcgctcagccgtctgctgagatcaaagtcatacagcggtggctgattaagaacgtcctttctagtctgcctatccacaaagctgcaaccgcatacaggctgggcgaaagcatatctgaccacgccgtcattcacgccgataaacgctttttgctgaagatggattttgaagacttcttcccaagcatttcagccgctgatattcagatgcatctgatacaaagcggaaagctatcacaagatgacgctaggttagtgcgccagattgtgtgttggttcgacaagatcaaagggggattctgcctgtccatcggtgcgccaagcagtcctctcctgtctaacgctctcctttataccttcgataagaaaattacacagctacttaagggtaaaaaggtgtcctactcgaggtacgcagacgaccttgccttttcgacgaaccgcacagacgttttgtccactatccccgcccaggtgcagtccatatgcgatgagctggaatacccccaactaagaatcaatcatagcaagactgtgtcaacctccagggccttcagacggacacttgtgggcctcgtattaactccaaccggagaggtcagtctgggccgcgagaagaagagacgtatgagaagcgagctgtatagattttctaagggcctcttggcagtaaccgaaacaccccggttgcgaggagagctcgcgtttgcctggagtgttgagcgagcattcattaattctctcgttaggcaatttggcattgaggtgttccggatcctggatttgccctttggggaagaatacgacctcaactga

SEQ ID NO: 11643 - RNA, 939 nt, synthetic construct
  source 1..939: mol_type = other RNA
atgaacctgttggacaggatgatcgatgaactgccattcagtaaagaggagcttcttgagattatcgcgaccgcatcataccggtataaagtgtttcagataccgaagcggcagcctggtcaatggcgcaccattgcccagcccacacccgaagttaaactcttacaaagatggctggtggataatgtgctcagccagctgcctgtgcatagggcagctacagcctaccgggagggggtcagtatctacgcccacgccgaaaagcatgtcgacaagaagtatctgttgaagatggatttccaggatttctttccttcaatttccgcagacgctgttcagcagcaccttctgggcgtgggcaagataaaagaaaaagacgctaccctcatcagagcgctggtgacttggcgcaataaggtatctggaaagcgatgcctgtccataggggcaccatcgtctccaattctttctaacacaatgatgtatcggtttgacactgagattagtatcatcgcaaagcgatatggagctgtctactcacgctacgccgacgacatggccttttccacgaataggaagggtgttctcacagagctgtctagagaagtagagagcctatgtggcaagctgccttatccccgcctgactcttaacaaacagaaaaccgtgtacacttcacgagcctataaacgtgtgttagtggggctcgtgctgacccccgacaggaaggtcagcttaggccgggagaaaaaacgtgagctgaggagtaagctctacagattgctcaaaggcgcccccggagttgatagcgccagcttgcgcggtgaactggctttcgctaacagcgtagaaccagagtttatctcctccttggtcagacagtttggcacagatgcattcctacaactagggctgccgttcggatcctctaaggcgtga

SEQ ID NO: 11644 - RNA, 939 nt, synthetic construct
  source 1..939: mol_type = other RNA
atgtcaattttcaaccgcatgctcactgaactcccctatagcaaagacgagttgcttaatctgatcgctaccgcccagtttaggtataaagtctacaaaatccccaagaggaagccaaatcagtttcgcactatagcgcagccttccccagaaattaagctgattcaacggtggttggtgaaatccgtgctggctgacttgcccctgcataaggttgcaactgcatataggaagggcaaatcaatcgccgaccatgcaaatctgcacaaaaagtaccagttcctccttaaaatggactttaaggatttcttccctagcattaatgtgctcgacgtgcgtaactatctaattgaaaccgccaatatgagtgaggatgatgctcggctggtgagctctcttgtttgttggaaggacaaagagaagaatagactgtgtttatccataggtgccccatctagccctcacctatctaacataatcatgtacgagttcgatgaacaggttagtatcatgtgcaaagagttaaacgtgtcatattcacggtacgcggacgatctggccttttcgaccagccagaagaacgtccttgagaaaatcccgaacattatcaagaacatatgcctcgcactggagtaccccaagctgattattaacgattctaagacagtatccacaagcagagctaaagggcgagtggtagttggactggtcttgacatccgaaggaaatatcagtctgggcagagaaaagaagcgccagctcagatacgaactttacaaattctccaagggggtcttggaccatgagagcatctctaaactacggggtgatctcgcctttgtctggagtgtggaggagcgattcatccacacgctgctgaggcaatttggcaatgaggtgttcaccaacctggaattaccttttcaaaaggccgactga

SEQ ID NO: 11645 - RNA, 942 nt, synthetic construct
  source 1..942: mol_type = other RNA
atgaagttgcttcagctcctgcttcgggaagtgccgtttgaaaagcaggaactgctcactatcattgccacagcatctcggaggtacaaagtgtaccaaattcccaagaaagacggcaaatcagtcagaacaattgctcaaccagcccctgaagtgaagctcctgcagagaatactgcacgagaaactaatcggaaagtggcctatacacaaagccgcaactgcgtatattagtgaacagtccattgccgatcatgttagacgtcacgttaatagcaagtacctactgaagctggacttcaaaaacttctttcctagcattaccgccgcagatatcaggcagcatgctaggagacacagcaaactgggggaagacgatttggatatctttgtaaacatagtcgcctggcgcaacaatctggaccattccttctgcttgtcaatcggtgctccaagcagtcctgcaattagcaactcgatgatgtttgagtttgatgagtcaatcagtgctttctgtaagaagaaggaggtgacctattccaggtatgccgacgacctcgctttttctacaacccacagggatactctgaaagaggtcgaggcggaggtgcaccggttaaccctgtctatccagagccccaaacttaccatcaacgagaagaagacggtcaatgtttccaagaagtacaaccgatccttggtgggactgactatcacacccgaccagaaggtgtcattagggcgcgagcgcaaacgggatattagagccaagctttatctttatggacgcggctacctcaatggggaggacgtagcccatttacgaggcttgctggcgtacgcttggtctatcgaaccaacgttcatactgagtctggcagagaaacaaggtaatgagctcttcgccaagctggaactccccttccgtaatctaaaagactga

SEQ ID NO: 11646 - RNA, 927 nt, synthetic construct
  source 1..927: mol_type = other RNA
atggtggtaagtctcttggctaaactttccaaagacctgctcttgcccaaggaacggctggagtatctcatccggtccgctccctacagatacaaagtgtacgaggtgcctaagagatcaggaacagggatgagaacgattgcccaacccgcaaaggaggtgaaacgcctccagtactgggttattgaaaatctcttcccgcgactacccatccatcctagcgctaccgcttacatcaaagccaagaacatactgaacaattctgagctgcatgtggccaagccgtacctgttgaaactggacttcgtcgactttttcccatctatcaagggcgatgactttattcagtatatccgggaactgaacaacttagatcttgatgaacttgatctgcaactccttgttaggatcctgttctggtatcctaaaaggatccacaatctccaactgtccgtcggtgcgccatccagcccatatctcagcaacgccataatgcaccgctttgattcagaaattgagagctattgttgccagaggagtattacctacactaggtacgcagacgacatgacttttagcatgatggagaaggcagcccggtcggaagtcctgaaccgagtcttacaggtgatacagcagctgccattccccaagctacagatcaatcaaaagaagaccatctttggctcaaaggcccaccgccgaatggttacagggctggtactgtctaacgccggaagggtgtccctaggacgtgagaagaagagacgcattcgtgcacagatacaccacttaattaccgggcatttgacacctcaggagaaatcttcacttagaggtatgctggcgtttgctaggagcattgagcctaatttcgtggaacgcatggagcagaaatatggcaaacgggtcttgagtaatatctga

SEQ ID NO: 11647 - RNA, 936 nt, synthetic construct
  source 1..936: mol_type = other RNA
atgataagctctttgctcggatcaatgtccgctgatctattaatccctaaggataggttggactatctgctacggtccgcaccataccgttataaggtataccagatccccaagagaagtggttccggtaccagaactatcgcacagccagccaaagaagttaaatctctccaatattgggtgattaagaacatttacccgttcttccctatacatccctctgccactgcgtacacaatcggcaagtcaatcttgaaaaacagcgaggcccatgccacaaaaccttacctgctgaaactggatttcaaagattttttcccaagcattaccgggaatgactttctccaatacagcaagaacataaaacagctggccctttcggaccgggaccttcgtcttctcatgaggctgctgttctggctgagcgagcgaaattacgatttcagattaagtattggggccccgacatcccccttcctgtcaaatgctatcatgtatcagttcgatcaagtggtctttgactattgcaatgagcgcaatatctcttacacccgctatgcagacgacatggctttttcaatgcacaacattaagatgcggagtgaagttctggaaatggtgcagaataccctgacctccctgcccttcccaaaactacagttgaaccacaagaagacaatctttgggtctaaggcacacagaaggattgtaacgggactcgtcctctccaacaatgacactgtgagcctgggccgagaaaaaaagcgccggatcagggcccagattcaccaccttctgcttggaagactggacaacaaggagatttcgaaattaaagggcatgttggcttttgcgcatgatatcgagcctgcctttgtggagcgcatggtcgaaaaatatggcgagaaggtgataaagagtctcaggagcgcttga

SEQ ID NO: 11648 - RNA, 921 nt, synthetic construct
  source 1..921: mol_type = other RNA
atgacattgttgggacagatgtccaaggatctcctggttcctaaaggaggattagtatatctcatgagatcagccccccatcggtacaaagtttttcccattcccaaacattctgggaaaggccagcgcattatagcccaacccgcgcgcgaagtcaaaagacttcagtattgggtgatcaaaaacctatttcctaggctggagatccacccagctgctactgcctacatccacgggcgcaacatccggtataacaccgagattcactcccaacttccatacatcctcaagctggatctgaaggattatttcccgagtctgaagggtgatgacttcaagcgttacgcatcaaatcacagcggcctcagtttaagtgacgaagaggtggatcatctggtgcggctgctgttttggcaaagggacaaggactcacagcttcagctgtccataggcgcaccttctagcccagggctctccaatgccctgatgtacagcttcgactccgagatcttttctttctgcaacgctaacggcattaattataccagatatgccgatgacatggccttctcaatgagggagaaggagaaaagaggtgatgctctgaggaaagtgaccgaaatattggaggtgatggaaagccctaagctgcacattaatgacgggaaaactgtgttcggctccaaggcacaccgaagaatgttgacagggcttatcctgacgaatgacggtcgagtctcgctcggccgagaaaagaagcgccggattcggagccagatataccattttatcaaaggcgacctatctgatacaaagaggcagtacttacagggaatgctgagtttcagcaaggacgtcgaaccagagtttattcgccgtatggaaaaaaagtacggaatcgagactctcaactctatctga

SEQ ID NO: 11649 - RNA, 930 nt, synthetic construct
  source 1..930: mol_type = other RNA
atgaaggacgttcttttagagaaaatgtcctatgatctcctcctcaaaaaggagcagatcatacacttgattttgagcgcaccacataggtacaaagtgtatcaaatacccaagaagagtggcgctggaatgcggacaattgcgcagcccgctaaagaagtgaagatattacagtactgggtgatagagaactgtttccctctgatgcctatccacagagcagctactgcctatgttaaggacaagaatattcgtgacaattgcgaaccacatattaaaaatccctactttctgaagctcgatttcaaggattttttccctagcatcaaatccgatgacttcatccagtatatgaaaaacatcgggaacataacctttgatgacatcgacatccaacgactcgcgagaatcctgttttggtgtcccaaggaatacactgggctgcagctgtctattggagcaccttcatccccatacttgtctaacgccatcatgtatcgcttcgataacgaaattgacctgtactgcacacagcacaatatctcgtacaccaggtatgccgacgacatgactttctctatgctggacaaaacactgcgggaaaacgtccagcaaaaggtgattgaattacttcaaagcatcccctttccacagcttgagctcaataataagaagaccatctggggttccaaagcccatcgtcgcatgatcaccggtctgattatctcaaacgatgagaaaatcagtctagggagggagcgcaagcgccgaattcgggctcagctcaattacgccattaatggaaagctgacgccggagcagaaaaaatcattgagcggcatgctggcctttgtacggaacattgagccggatttcgtcctgagacttgaaaagaagtatggcagagagctaattagtaacctgaggtga

SEQ ID NO: 11650 - RNA, 918 nt, synthetic construct
  source 1..918: mol_type = other RNA
atgctggccgataggattgccgacgatctgttactccctatggagatgcttcagtatctagttcgctctgccccccaccgctaccgggtatacaggatccccaaacacagcggctccgggttccgtactatcgcacagccagccagagaggtgaggatgttgcagtactgggtgatgaaaaacatatttcccgagttgccggtgcatagcgcggcaaccgcttattgcgctggtaagaatataagagataattgcgcccctcacgcagctaacccttaccttctgaagcttgactttcggaatttctttcctagcatcaaagcgggggacttcatccaatatgctgcagaagcaagacatcttcccttcgatcccccagaactgcggatgctggcttgtattctctttcgtagacccaagggaaaaaaggagatggtcctgtcagtcggggctccatctagcccttacctgtctaacgccctgctgtacgggttcgatgacgaaatgtcccggtattgtgagtcacgaggaatcgtttacaccagatatgccgacgacatggcattctccatgcaggacaaggccaagagactggaggttctccacaaggtgagggacgtgttgcggcagatgccgtttccacgtctgactttgaacgatcgcaaaacagtattcgcatcaaaggcccatagaaggagtataacgggcctgacactcgccaacgatggacgcatttccttaggccgggagcgaaagcgacagattagtgcgcagttgcatcacttcgtcaatggtaagctcccacaagaagaacgcggcaagctgcgcggcctactctcgtatgtgaaagacatcgagcctgccttttttaccaggatggctgagaaatacggaagggaaaaaattgctggtatctga

SEQ ID NO: 11651 - RNA, 921 nt, synthetic construct
  source 1..921: mol_type = other RNA
atggctaatgaacttctcattagtcagatgtctaacgactttatgctgccagagaagaagctcaaaaagcttatcttgtctgccccatatcgctataaggtatactccatccctaaaaggtcaggcaagggttacagggtcattgcccaacccgcgaaggaggtcaaaatcctgcagtactggatcgtaagaaacgtgctgtgcaagttcgttgtccatgatgccgcaagagcttacgtgaagggttgtgggttattaagtaacgtttctcctcattgttactccaagtatctgatgaaattggacttcaaagacttcttttactccataaaggctggagacttcctgtcgtatttctctctctataaggactttggctactccgatatggacatccaggagatggtgaagattctgttttatgcccgtaacaagggcgattattgccttagcattggggcaccctcctctcccctgctctcaaatattatcatgagcgacttcgacaaaagggtcgtggagttttgtagcagccggagtatcgtgtacaccaggtactctgatgatatgacgttttccatgagcgactcgctcctgcgaagagaggttttcttcgagatcaaaagactgttggatatcatcccatatccgcggcttaagctgaatgaagacaaaacactctttctgagcaaagccaacaaacgcatggttaccggcctggtgctatcaaatgacgggcgaatatcaatcgggcacgataaaaaacggatgttgcggagcaaaatatataagtacactaaaggccacctagatgtggatgaagtgaatcagctcaagggaatgctggcatacgtgaacagtgtcgaacctgattttatttgcaagatgaagattcgctacggagacttaattatattctga

SEQ ID NO: 11652 - RNA, 930 nt, synthetic construct
  source 1..930: mol_type = other RNA
atgggaagtaagagcgtatccttttcattaatttccaagatctccagcgacctattgataccagtcgaaaatctgagatatattatccgcacatcgccttacagatacaagaagtactctatacctaaaaggcgggggcggggcgtacgatctatagcacagcctgctaaagaagttaaaaagttgcagtattgggtgataaagaacgtgctgtctaagtaccccgtgcacccagccgcaacagcctataagaaggagagctctatccttcaaaacgccgagatccatctggacagtaggtgtctgctaaagctcgatttcgaggatttctttccctcaattcttgccaccgacattgtgcacttcttcgaaaagggatcgctggagtttgatgaagaggaggtgaatgcgttggcatccattcttagttgggcgagaacccgcacggctgaacgtgttgtggcaattggcgccccctctagtcccatgctgactaatatcatgctctatgacttcgattccgttgtgcgcaggtggtgcgacgagacaaagatcaactataccagatacgcagacgatatctcactgtcaggggatagcaaagaaagcctcgccgaagccaagaggaagattgctgaactgcttgaagagatgaatagcccgaggctctccttgaacaacgacaaaaccgtctttgccatgaaaccttttagacggtttgtcactggcttatacctgtctaatgaggacaaaatctccctcggtcgggacaaaaaacgagccattcgagctaaagtccatcatttcgtcaacgggaaattcaatcaggatcagatccagcacctccgcggagtgatcgcttttgctcgtagcgttgagccagagttcgtggagcggctggagaacaaatttggtaagctgttccaatga

SEQ ID NO: 11653 - RNA, 924 nt, synthetic construct
  source 1..924: mol_type = other RNA
atgctgaaaaacctcggggctgccctgctgttgtctcaacaggaactatcccggcttattagctccgctccccataggtacaagacttacctgatagaaaagaggaatcgcggccaatatagaacgatagcccagccagccaaagaagttaaggcgctccagtactgggtgatccagaacgtgttgaacatgttccacgtccacccggctgcaattggatatcaacgggggaaaaacattgcagacaatgcccgctcccatgttaatagcagattcctgctcaagctggattttaaagacttctttccttccattcggtctgcggatttcgacctgtatattcgcaagcagcagattcagatcacagaccaggaggtcgccgctcttagtagaatactcttttggaacccaaaaggaacaaaagacatgtgcttagccatcggcgctcccagctcgcctggtttgtcaaacatcttaatgttcgagtttgacagtgcagtagaagctttttgctccgaggcaggcgtttcatacactaggtacgccgacgatctgagtttcagcgcgaatctgtcagatgagcttaggcgtgtggaggaatgggtgacacacctgtgtgataatctcgaaagccctcgactgtcactcaacagggagaagaccgtgcgtgtatcgaagaaacgagccagacgggtgactgggctggtgttgacaaatgacagcaaggtcagcatcggccgagatcagaagcgccggatcagagcctctgtccaccacttcgccaccggtcgtctgccagaggatcaaagtcgcaagctgagaggcctcttagcttatatcaactctgtggagccctcctttctaaatcgcttgcggcataaatacggagcagacaccatcaagaggcttcagtctgcaacctga

SEQ ID NO: 11654 - RNA, 951 nt, synthetic construct
  source 1..951: mol_type = other RNA
atggacctgatcgaccgcctgcagtcagcttttcccctttcccgccccgaagttgagttgatcattcgtaccgcaccactgcgatacaaactgcacttcatagaaaagcgcaatggccgcgggcaacggcagatagcacagcctactgccgagctcaagttggtacaaagatggctggtcagcgagtttgtgaataacctcccggtgcaccctgccgccgttgcttacaggccgcagctgggaattaaggatcacgccagaaaacatgcagcgaagaggtatctccttaaactggactttaaagacttcttcccaagcatccaggcgagagacttccacgcccatctagctcggtatacagaactttctttacccgacaaacacgctctcacacggctgctgttcagactggaccgtgaaaccaaggagatggtgctatcaattggcgccccaagttcacccgcagtgagcaatactgtcatgtaccggtttgattctatggttagtgattattgcaaggacttacgcgtggagtacactagatatgcagatgatttggccttctcaaccgatcagcctcacgtccttgacgagattcagaaccacgtcaggcagctgtgtagggccatggaatacccctccctcacgcttaacgaggggaagagtgtgtttacaagtaaaaagcatcagcgtcaattgaccggcctcattctgacaaatgagggtaaggtaagcctgggaagagaaaagaaacgagagatccgagccatggcgcatcggttctctaacggagatctatctgctgaagacgtgtctcgcttgcgggggctgctggcttttgccatgtcgatcgaaccacagtatgtcgagagcctcgtgaggatgatcggccagcagagctaccactccttaatgaggcctggtagaaggacccattcctccgatcaatga

SEQ ID NO: 11655 - RNA, 945 nt, synthetic construct
  source 1..945: mol_type = other RNA
atgaatctgatcgaacgtctgcaaatagctttcccattttccagacgggaagtggagctgctgatccacaccgcccctagaagatacaagattcattcgattgagaagcggaatggcaggggcttgaggatgattgcccaacctacagcagagttaaagctggtgcagcgttggctggtttctaattacctgcagtcattacccgtgcatagtgctgcgactgcctaccgtcccagcctcggaattaaagaccacgcacaacttcacgcatcaggaaagtatctactcaagttggattttgaggacttcttcccctccatacgcggcgaagacttcaggcagcacgtggccaggttttctgatgttactcttccggaccagaccgctatggtgcgccttctgtttagggccgacgtcgatgccaaacggctgatcctgagtatcggagccccctcaagcccagctgtgtccaacaccgttatgtattctttcgatctggctgttaaggagtactgcgagcaggcaggcgtacgctatagccgctacgcagacgatctcgcgtttagtacaaacgtccctcacatcctcgaggccgtgaagactcgagtcgtcgagatatgtcgaacactcgaatatcctcggctccgcttgaacgaagggaaaacggtgttcacctctaaaaagcatcagcggcagctgaccggccttatcttgagcaacgacggacgagcctccctaggtagagagaagaaaagaaaaattagagctacagctcatcacttcgcccagggggtattatccccagaagaggtgggtaagctcaggggcctgattgcatttgccatgagcatcgatgcagagttcgtcgcgtcaattaacaatatgcttggggagcagatctttaaagaactgatgcgggggaatggggaagtggctgaaggttga

SEQ ID NO: 11656 - RNA, 927 nt, synthetic construct
  source 1..927: mol_type = other RNA
atgaacttaatagaccggctgcaggcggcctttcccctatctcgcgctgaggctgcatccatgattgaaaccgcccccaggagatacaaaattcatctgatcgaaaagcggaatggcagaggccttcggcagatcgcgcaaccgacagcggaactgaagttggtccagaggtggattgtggctaactatataaatgcccttcctgtacaccaagcagctatggcttaccgtccagacctcggaataaaagatcatgccaaggagcacgcaaccaagaaatacctgttgaagcttgacttccgtgatttctttcccagtattaaggctaatgacttcaagcagcacttgacccgccatacagaaattagcgaggctgataaagtggcaatcaccaggttactgtttaggtatgatcgggagaatcaggacatgcggctgtcaatcggcgccccttcgtctccttctgtcagcaatactgtgatgttccattttgatactatcgccagtgattattgtaatgccgccggtgttcagtacacacgatacgctgacgacctcgcattctccaccaacaccccccacatcctggacgagctacagaacttcgttcgagagacatgccgccagctcgactatccaagactgactttaaacgaggagaaatccgtgtttacttcaaaaaagttccagaggcaactgacagggctgattctcacgaacgaaggttcagtcagtttggggagggaaaagaagagactcatgagagccatggcccacagatttaacctcggaactctttctctggatgatacgaagaaacttcgcggactgctggccttcgcaatcagcatcgaaccagagtatgtgaattccattatccgcatgataggcgagcctagctacaaaagcctcatgcgagggaactga

SEQ ID NO: 11657 - RNA, 933 nt, synthetic construct
  source 1..933: mol_type = other RNA
atggacctgattgaccgcctgcaagcagcctttcctctgtctagagctgaagtcgaactgctaataaaaacagcccctcggcgctataaaatccacaccatcgagaagagaaatggccgaggcctcagggagattgcacagcctactgcggaattgaagcttgtacagaggtggattgtgagcacatacattaacgagctgcctgtgcactcagccgcaatcgcataccggcccggtctgggaatcaaggatcacgctaaaaagcatgcggcccgtaagtatctcctgaagctggatttcaaggactttttcccatcgattcgcgcgggtgaccttcgagcccatctgacccaccacacagacctcagtactgccgacaaaagtgctttgatgaggctcctcttccgtttagatagtgagaacggagccatggttttgtccataggcgctccctcctccccagctatctcaaacacagtgatgtatccattcgacattgccatagccgactactgccgcgaaaacgacatcgcatacacccgctacgccgacgatctggctttctctacggatactccccacgtgctggatgctctccaagattttatcaggaagacctgtcgaggcctgatatacccctctctaacccttaatgagaaaaagacggtgtttactagcaaaaaattccagcggcagctgaccgggttaattctcacaaatgatgggaccgtcagcttgggcagagagaaaaagcgggatcttagggccatggcccatcacttcagcaggggagctttgtcaaatgaggaaatgagccggcttagaggattactggcctttgctatgtccatcgagccgcagtttgttcattccattatcagaatgatcgggaaggaagcatatgcgcagctgatgcatgcatctgggacttga

SEQ ID NO: 11658 - RNA, 918 nt, synthetic construct
  source 1..918: mol_type = other RNA
atgaacatcatcgaaaaccttcagaaagcttatcctctaagcaaggaggaggtggaattttttatacaatccgcaccacggaggtataaggtacatcatatcgaaaaaaggaacggtcgtggactgagagtaattgctcaacccacagcggagctcaaaattatccagaggtgggtgacgaagaagtttatcaataaactgcccgttcacgattccgcgatggcctataggctgggaaaagggatcaagaatcacgccaactcacatgcccagcagaaatacctcctcaaattagatttcaaggacttcttcccctctattaaaccaagagatctgaaattgcacttagcaaattacactgacctccacaaagacgatataagcgtcatccttaaacttctgttccgctacgataaaagcaagggcttgtccctcagtataggcgctccttcctcacctgccgtgagcaacacaattatgtatcccttcgacgaaatggtttccgactactgtaaaaagcgaaagattaagtacactcgttatgccgatgacctagccttcagcacaaatcatccccacattctcgacgtgctgcagaactttataagagagctttgcgagagtttgaaatatccgaaactcaagttgaatgaagaaaagtcagtcttcacctctaagaagtttcagcggcagctgaccgggctgattctgaccaatgacggtaagatctctctggggcgggataagaaacggctgatccgcgcaatggcacacaactacaagatcgataagctggacccaaaggaggtgagtcgcttacgaggctggctggcttttgccctttcggtggagcctgaatacgtcgagtctattaagagaatgctggataaagacatctacgagaagttgatgaagtga

SEQ ID NO: 11659 - RNA, 984 nt, synthetic construct
  source 1..984: mol_type = other RNA
atggatgctaccaattcagaactgctggagttgctctgcgacgaacatcccttgactcgcgcggaagcctgggagttgattctcaccgcccctcggaggtacaagatccattacattgaaaaacggaatggcagaggccgaaggctcattgctcagcctaccgctgagttaaaagcaattcagcgctggatcatttcaaagtatatcgctgcgatgccagtacatgaggccgcaacggcttacagacctcacaagaacatctcggatcacgcgcgcgtgcatgccaaaaataaatacctgcttaaggtagacttcaaagacttctttccatctatccgggatcgcgacttcgtgcagcatgccgtgaagcaccttgggatttcaactaggcttgcctcagaactgtctttcctgctgttccgtcgtgatgaaaacaaaggtttgtccctgagtataggcgccccctccagccccagcgttagtaactctctcatgtatgaattcgacctgaagctgagcgagtattgcgatgccaacgaaatagtttatactcggtacgcagatgaccttgccctctctacaaacaaaccgcacgagctagataaagcaaatgagtttattagggagctcctgggatgtatccgctaccctcgaatcgagatcaatccggagaagaccgtctttacaagcaaaaagtttcaaaggcagctgacaggcctgatcctgtccaacgagggcaaagtctctctcggacgggacaggaagagaagcatcagagcaatggccgaccactatagaaaaggaaagcttgctcccgaattacacaccaagctaaaggggtggctggctttctccttgagtgtggagccagatttcgtgcgaagtattagaacaatgatgggggagtttcactactttaagttagtgagcgtcaatgaaaagatggaagcagaggggataataccatccggtgacgagtggtga

SEQ ID NO: 11660 - RNA, 984 nt, synthetic construct
  source 1..984: mol_type = other RNA
atggatgccaccaattcacaacttctcgagctcttatgcgaagaacacccatttacaagggcggaggcttgggagctgatcaggagtgcgccaaaacgttataaggtgcacttcattgaaaagagaaatgggagagggagacgcttgatagctcaacccacagcagagctgaagactatacagcgctggatagtaaacaaattcatagcaccacttcctgtccatgacgtggccatggcctacagaccgggaaagaatattgccgaccacgcaagatcacatgctggcaacaaatatctgctgaaaatcgacttcaaggattttttcccttcaatcagggcgcgggacttcactcgccacattgtgaaacacctgggcgtgaacaccagactggcatctgagctcgctttgttactctttcgcaaggatgagaacaaaaggctgtctctgagcatcggagccccgtccagtcccagcatcagcaacactctcatgtatgaatttgactgcaaactatctgaatactgtaaggagaacgagattacttacacacgatacgcagatgatcttgccctgtccaccaataaaccccatcagttagataaggctaatgagtacattcgggagttgctgaactgtgttaagtaccccaggatcatgatcaatcctgaaaagacggttttcaccagcaagaagttccagaggcagctaaccgggctgattctttcgtccgaaggcaaagtgagtcttggtcgagagcgtaaacggctcatccgagtaatggccgatcattatcgcaaagagaaattggatccaaacctgcacacccagctgaagggttggctggcctttagcctatccgttgaacctgactttgtccggaatattcgggccttgatgggagaagagtattactccaagctgatctctatcgacgtcaaggtggccacggagcagctcattcccgctgacgacgaaacatga

SEQ ID NO: 11661 - RNA, 1017 nt, synthetic construct
  source 1..1017: mol_type = other RNA
atgaccaggagcgcagctaaaccaatgagaagaagtatggacgcgacgaatagccaattgctcaatctgctgtgtgatgaattgcctttcacaaggacagaggcatgggaactgattagatcagcccccagacggtataaggtacacttcattgaaaaacggaatggccggggtaagcgcctcattgcccaacccaccgccgagctgaaggctgtgcagcgatgggtggtgactcgctttatctcccagatgcccatccatgatgctgcgtccgcgtaccgcacaaaccgctcaatcggcgatcatgcgaggctgcatgcacggaacaaatatctcctcaagatagacttcaaagacttctttcctagcatcggcgcacgcgacttcaaaaggcacgcaatcaagtaccttgccattgacgcccgcctggcctccgaattagctttacttctgttcaggcgtgacgagcacaagagatttacgctctctatcggagccccctcgtctcctgttctgagcaatactctcatgtatgagttcgattccaagctgagtgagttttgcgaaccgaaggggataacatactctcgttacgctgatgaccttgctctctccaccaataaaccacacgaacttgacaccgccttcaagtttatcaacgagcttctgaacgatctcgcttacccaaggctgactatcaatcaggaaaaaaccgttttcgcctctaagaagcatcagcgaaagttgaccggactaactttaactaacgccggagatattagcctagggcgagagcggaagagggagattagagccatggctgaccactacagaaaaggaaaattggaggggaaccgacacggccagctgaaggggtggttggcctttgctctgtcagtcgaacctgagtttgtccggaccattcggaaactgctgggtgaagagatgtatgcagcactgctgagttttggcgacgtgtcagccccactagtgacacagcttgatgatcgtgagtga

SEQ ID NO: 11662 - RNA, 972 nt, synthetic construct
  source 1..972: mol_type = other RNA
atggtggacaataattcagaactggtcgatatgctgtgtgatgagctgcccttcaccagaacagaggccgctgtgtttatagacagcgcttgccggatgtacaagatccactttatcgaaaagagaaatggcaaagggaaaagactaatcgcccagccaaccgcggaggtgaaagagattcagaggtggatcattaagaagtatatcaagaaccttcctatccataatgcggcgacagcttacagggaaggccggaacatctttgaccacgcacgcccacacgtcaagaataagtacctgctcaaggtagattttaaagacttcttccccagcatacgtgcccacaatttctctaagcacatccgcaagcatttggggattagcaagcctttagcaattgaccttgcccgtgtcctttttcgacaagatgaaaagcgcagattgagtctcgctattggagcccccagtagccccagcgtgtccaacaccctcctatacgaattcgattcccagttatctatcttttgccaggcaaacaacatccaatatacaaggtatgccgatgacctcgctctgtccactgacactccgaaaatactggatgaggccttgaagtttattgaaaagctgatcaaggacatcccttacccaaaactgtcaattaacaacgagaagacggtgttcacgagcaagaaattcaaacgagagctgaccggattgattttatctaatgacggttcggtttcactgggacgggagaaaaagaggatgataaggacaatggcccacaaatactcaagtggtgaacttcatgattctctgattggccgcctcaaagggttcctcgcattcgcccattccatagagcctatctttgcagctaagatccgggagaaaattggcgaagagaaatataattccctgaccaactttcaggagactaaccatcagaaaaaagttcaggacttctga

SEQ ID NO: 11663 - RNA, 924 nt, synthetic construct
  source 1..924: mol_type = other RNA
atgaatctgattgagcacatccagaaggatttctctctgtcactccatgacgctcgggtgctcattttcacagccagtagacgctataaactccattacatagagaaaagacacgggcggggcaagaggctgatagcgcaacctactgcagagatcaagctgctacagcgctgggccattgaaagctacctgtcaaagctgccgatccatagagccgccaccgcatatcgacctggcaggggaattaaggatcacgccgaagtgcacgctgacaaccgctatttactgaagttagacttccaggatttctttccttccatactcggcaggcatttccttatgcacctgaagtcacacgccagtatagccgacgacgatgctaaatttcttatgcggttactgttccggtttgaccgggatagtcaggactacgtcctaagcatcggggcaccctcatctcccgcagtcagcaataccattatgtatgactttgataacgccctcactgattactgcaagacccacgatatcatctactctcgttatgccgatgacttggcgctttctacttccaagccaaaggtgttggatgacgcttttaatttcgtgaaacagctgtgtaaggacgttccttacccccgcttgcaactaaacgacacaaagacagtattcacgagcaaaaaacaccgtaggcaactcacaggtttgatcctgaccaacgaggggaaaccctcccttggaagggagaaaaagagactcatccgatccatggcgcatagattcagtctgagcgagctgccagatgaccagatcctgcatcttagaggcctgctggcttttgcttactccattgaaccactcttttttagctcgattaatcgaatgatcggcggagaagcattccagcgcttgatgaaaggttga

SEQ ID NO: 11664 - RNA, 924 nt, synthetic construct
  source 1..924: mol_type = other RNA
atgaatatcattgagcgaatacagagcgactttagcctttccttacacgatgctcgggtgcttatattcactgcagcatacagatataaactccactacattgagaagaggcacgggcgtgggaaacgcttaattgcccagccaaccgctgagattaagctgctccaaagatgggctgtagagaagtatgttggtcagctgcccatccacaaagcggcaacagcctaccggagtgggacgtcaataaaagatcacgccgcactgcacgccgaaaactgttatttgctcaaattagacttccaggatttttttccgagtatcctgggccgccattttctgatgcacttgaagagctacatgaagatctcagatgatgacgccaacctccttatgcggctgctcttccgtttcgacagggaatcccaagattatgtgctatctattggtgcgccaagttctcccgccgtgagtaacacagtgatgtacgatttcgacaataagctcactaattattgccggactcatgacatcgtctacagcagatatgccgacgatctggcgctctccaccagcaaacccaaggtgctgaacaacgcttttgacttcgtgaaaaagctgtgcggcgatatgccttaccctcgcctgcagttgaatgacgctaagacagtctttacctctaagaagcatcggaggcagttgaccggactggttcttgccaacgacgggaagccatccctcggacgcgaaaagaaaaggctaattagatcaatggcacatcatttttccctaggcgaactgcctcaggaccaggtccttcacctgcgaggattgctggctttttcgttcagcatcgagcccctgttcttctcatctattaataggatgatcggcgaggaagccttccaaagactgatcaaaggctga

SEQ ID NO: 11665 - RNA, 930 nt, synthetic construct
  source 1..930: mol_type = other RNA
atgggactgattgagcgcatccagcaggacttcacgctaaccaggcgcgaggtgcagctgctgcttttaacagccgcatcccggtataagctacattatatcgaaaagcggcatggccgtggtcggagacttatagcacaacctacagcagaaataaagatccttcagaagtgggctgtggccaactacgttaatctcctgccaattcataatgctgcgacggcttaccgcccaggcagaagcattaaagaccatgctgtggcccacgccggcaatagatacctgctgaaactggactttgagaatttctttccgtccatcactgggaacaacttctttgatcacctgaagagttatctcgaagtttctgatgaggatgccaacttattggtgaggctgttgttccggtacgaactggtcagtcgaaactacgtactctcaataggagcacctagctcccccgccgtgtcaaacaccatcatgttcaagtttgataccgcccttgccgaatattgcgacgcgaaccagatcgcttatactaggtacgcagatgacttggcactgtccacaaatacccctaaagtactcaatgatgcctacaatttcgttaggcagctctgtcgagagactcagtatcctcgggtcagcttgaacgagaagaagacagtgttcgtcagcaacaaatttcgcagggagttaaccggcctggtcctgagcaatgagggaagaccctctcttggtcgagagaaaaagcgtcaaattaggtctatggcgcaccacttctcactcggccagattccccccgaggacgtgccacacttgagagggctgatcgcttttgccatatcgattgaaccagaattcattgagtccatcaaacgcatgatctcaatcgaactgtttcagtctctcatgagtgggcaagcttga

SEQ ID NO: 11666 - RNA, 927 nt, synthetic construct
  source 1..927: mol_type = other RNA
atgaaacttattacggccatacagaacgacctcccattgagcatctctgaaattcagctgctcctgttgtctgctccacatcgatacaaagtacatgagatccagaagagacacaatcgcggcactcgggttatagcccagcccacctcagaaattaaagtacttcaaaggtgggccactactaatatcctggccaagttacccattcactcagccgctacagcatatgtcgccgaatccaacacaaagaagcatgcccaggcgcacgcaaagaatcgttacctgctgaagctcgactttaaagatttctttccctccatcaaggcggacgattacttgcagcacctgataaaatatgcaaaaatcgacattgacgacgcccgacttctctgtagacttttgttctggcgggaccgggtcagtaacagcttaaagttaagtatcggcgccccgagtagcccaatggtgtccaataccgtcatgtacgatttcgacacatttgtgtcggaattttgcctgaaaattgaggtggtctacacccggtatgctgacgacctggctttctctacagacaaccccaaggttctagagtccgtgcatgagtttatcatcaccctttgcaaaaatctcccttatcctaacctgcagctaaacgaggagaagacggtgttcgtgagcaaaaagcacaaaaggtatctgaccggactggttctcaccaacgatgggaagccttctgtgggtcgcgataaaaagcgtcaaatcagagcaatggtcaatacatatgctaacggaaacatgcctgatgatgagctcaataggctgagagggttgatagcatacgctcacggcattgatgaaaagttcatcgatagcctgattcgcatggtggggactgagaactacaataagctgatctcaggtaggtga

SEQ ID NO: 11667 - RNA, 972 nt, synthetic construct
  source 1..972: mol_type = other RNA
atgtgccaagggcaggagcggataactaagtttattcgttccaacgacatgaatgtgattcggaccatcgtaaacgcctaccctctgagtctacgagaggcagccgtcctgatccagacagctcccgcacgctacaaggtgcaccaaattgagaaaagacacgggcgaggaactcggaccattgcacagcccacagccgaaattaaactgctgcagaagctgctcgtgagggaggtgatagagaagcttccggtgaatgacgctgccaaggcttatcgctcaggccaatcaatcgccgatcatgctcgcccccacgcaagcaaccgtttcctgttaaaactcgacttcaaggacttctttccttccatccggggagccgattttctcaagcacttgcacaaacacagtgagatcggcacggaggattctaagcacctcgtaaagctctttttctggaggccaagagggactcgctctttggtcttgtctatcggcgcccctagcagcccagcaatctcaaatacaatcatgttcgactttgattctgccttaagcgatttctgtacccgggaacatgtggtttacaccagatatgcggacgatttggctttcagcacaaacggaccagaggtgctgcacagggtgcatgaacatgtcataaatctgtgccgcactcttaagtatccccgtcttacgctgaacgacgccaaaacagtctatacctccaaaaagcatcataggagtttaaccggactggttctgtccaatgatggtaaagcgtcactcgggagagagaagaagaggcagctgagggctatggttcacagacttaagtacgatcttctaaaccaggaagaacgggccaaattgaaaggttggattgcattcgcgctcagcattgacgaagagtttgtccgatcgctgaaaagaatcatgggcgaccagacttttgaatccctgatgcgcggctga

SEQ ID NO: 11668 - RNA, 924 nt, synthetic construct
  source 1..924: mol_type = other RNA
atgaacgtgatcgagataatcctgcatgaattcccgttggggcgccaggaggtcgaaagactgattcgcactgctccctcacgctacaaagtccacgagattgagaaacgcaatgggaggggcaagagaaccatcgcccagcccaccgccgagatcaaactgctgcaaagatatctggtagatagatatatctccaacctgcctgtgaatgacgcggctaaggcttacaggttaaaccacaacatactggatcacgccagcccacacgccaaaaatcagtaccttctcaagttggatttcaaggacttttttccaagcatacgggcggtggactttattaagcatctccgcaaatactctgccctctctcgggaagacatgaaaacactatctagggtcttcttttggcgtcccaagggccagagggacttgattttgtccataggcgccccatcgagccccgctatttcaaataccatccttttcgatttcgacagtgctgttatcgagcattgcatcaaaaacgagattacgtacacccgatacgcagacgacctcgccctctccactaaccagcctaatatcctgaatgatgcgtatatctttgtggaaatgctctgtcgttcattaaaaacacctaagttaaccctgaatgcagataagacggttttcacaagcaaaaagcaccaccggcaacttaccggactggtgcttagtaacgccggcactgcaagtattggacgggaaaagaagcggacaattagggcaatggcccaccattataaacagggtattctatcccaggaagagcatgggagactgcgaggttggctggcatttatgatgtctatcgatcgagagttcgtgacaactatcgaaaagatgataggagaggtagctttccaaaagctgatgcaggactga

SEQ ID NO: 11669 - RNA, 930 nt, synthetic construct
  source 1..930: mol_type = other RNA
atgaacgtccttgagctcttgcagaaaaaattgcccctatcaagatcagagctgctgctgctcattgccacagctcccaatagatacaaggtgcacacaattgacaaaaggcataaccggggtaaacgtgtcatcgcccagccaacagccgaagtgaaggcgctacaaaagcttctcctgggcatactcaggggcaagttaccagttcactcttgtgccaaagcataccagcccgggacgagcatcagagatcatgccctgccacacgctcccaatcggtatctgctcaaactagacttcaaagatttcttcctgtccattaaaggaggagatttttcctcccacataaagagacatctggatattcctgatgttgagatcgaaatattcacacacgcgttcttttggacccctaagaaaaccatggactttgtattggctatcggcgcaccgagctccccgtggatttcaaataccattctttttgagttcgacgagctgctgaccgactattgcgattctaagaacgtgaagtacacccgctatgccgacgacttggcatttagtaccaatactcctcatgtattgaaggacgtgcatgcctttgttcaggacatctgcaaggagatcgcttatccacgcctcaacatcaacgaatcaaagactgtgtttacttctaagaagaacagcaggagtctcactgggctcatcctttctaatgaagggagcgtgtccataggacgagcaaaaaagcgagaaattcgggctatggcccacaagtaccagatcggtgcactggacctggagtcgaccctgcacctgcagggcctgcttgccttcatgcaaagtattgatcctgatttcaatcaaagcatcgctcgcatggtcggcaacgataggtacctgacattaacgaaacagttacagtga

SEQ ID NO: 11670 - RNA, 924 nt, synthetic construct
  source 1..924: mol_type = other RNA
atgaaagtgcttgaccaactgtttaccgactttcctatgtccccccagcagcttcgaatattgatgctgactgcgccctatcgctacaagttctttcacattcctaaaaggagtggaggcagacgtctcatcagtcagccagctaaggaggtgaaatggttgcagcgctatgtaattgaaatcatccgcaagaagatccctgtgcatagatgtgccacagcctacgagccgggctcatctatcttcgcaaacgccgaggcccatgtacaaaaccggttcctgctgaagatggacttcaaaaacttttttccgagcattacggatatggatgtctcccatctcataaaatcggcttacccagacattgaggatggggaattagaattaatcgtccggctcctcgtgatgtccgacaagaagaacgagaaattcgtcttggccgctggcgccccatcttctccattcatcagcaatgcactgctaaatcaatttgataccgaactgcacctccactgccttagccagaatgtcgtatacacaaggtatgcagacgacatcgcactctctaccaacgcccccctgctgctttccgagcttcacaaatttattagggttctggtcaatgaaatgaaacatcctgtgctgaagattaacgaggagaagaccgtgtatacatcaaagaagcacaaccgaaaagtgactggtctgacattaaatagccagaagcaggtgagcctggggcgcgacatgaagagagagctgcgtgcggctgttgataagttcaggaaaaatgagttgtcccaggaagctgtgagtaccctgagaggaaaattggctttcgcactcgccgttgaacccgagtttgtgctacggctacggactcactacacggatgaagttataactaggctgttccagtcatga

SEQ ID NO: 11671 - RNA, 933 nt, synthetic construct
  source 1..933: mol_type = other RNA
atgaacatgaaatcactaatcagtcttcttgtcgatgaactgcctttctctgaaagggagatccgggagctcttaaactcggccccctcgcgctacaaggtgcactatatcgagaagagaaagggtcgcggactgagacagatcgctcagcctactgccgagatcaaactgctgcagaggtgggccattaatcagtacagagatcagctgcccgtccaccctacagccaaggcatacattagtgactccggcatacgccaacatgcagccgctcacgttaagaactcttatttgctgaagctggacttcaaagacttttttccgtccattaaaggcattgatgttaggcgacacctggctaaacacctcggtgccccctccgaggatttgtcactgctcatgaagctattctgctggaagggaaagccagtaggcgggttaaggttgtcaatcggcgctccaagctctccattcatctccaactctattatgtttgagatggacgaaaagatacagaaaaaatgtagcgactacgatgccacctacacccgatacgcggacgacctggctatttcaacaaatcaaaaggacgcactgagcgcaatctatgagcatatactggaactctgcgacagtagtaagtacccctccctgaaaattaatccagggaagacagtgtttacatctaagaagcacaatcgtcatctgaccggcttgacgcttagcagcgatgggaaagtgtccctgggaagagatcgcaaaaggctcatccgggctatgacccatgcctatactactggcaaactcaaccctgacgaactcggtaaacttcggggatggatcgcgtttgcatatagcatcgagcccgatttcgtggaaagcttagagcgtatgatagggcttcaggccttgaatcggattcggagaacctga

SEQ ID NO: 11672 - RNA, 903 nt, synthetic construct
  source 1..903: mol_type = other RNA
atgtctctgctccaggaattgagcgataaattccagctgcacgagcagctaatggagagtttcattaaatccgcaccataccggtacaagtttcataaaatcgacaaacggcacggagggaagcgcgagattgcccagcctgtcaagtccctgaaaatcgtccagcgctggttggtgaagcactatttatcaaagtacccaactcactctaaaagcgccatcgcgtatatcaagaacaagaacattaaggacttcgcagagccccatagaaacaacatattcctgctgaaactggatttcaaggatttcttcaacagtatcaagattagcgacttctacatcttctgtgagaagctttctattcccgaagaggacaagatctttctgggcttactcctcttctgcaagaataaacaagacgagccctatctgagtattggtgctccttcatctcccaccctgtccaatgtgctcatgtttaactttgacaacgaagtgtttaacctctgcaaaaaggatggaatcatctacacacgttacgctgatgacctggcttttagcactaatcagcctaatgttcttcggcaactgttgtcgaatataaaagaactttgtgccaagctaaactacccgaggaatctgcagatcaatacccaaaagacgatttttacctcgaagaagtataacagaacactgacagggcttgtaataagcaatgacggcaatgttgggatcggcagggagaagaaacgaaagctcagggccattgctcatcaggcaaaattaggaagattgtcacaggataaagtgggctccctgttgggcaagattgcctttcttaaaggtatagacccaagctttgccaaacaactggaagataagtatctcaaacacatctcctga

SEQ ID NO: 11673 - RNA, 903 nt, synthetic construct
  source 1..903: mol_type = other RNA
atgttgatcaacgatttgaaggaaaaattcagtctcaatgagaaagagattctgtcatttatcaacagctcgccaagtaggtacaagagctacaatattaagaaaaggcacggaggcacacgtgagatagctgaacccaccagatctctaaaaatcctgcagagctgggccttgaataaatacctcagcaagtataagatccatccctccgccatagcatacgtgaaaaacaagaacatcaaggacttcgtcttgcctcattctaataacaagtatctgctcaagatagacttcaagaacttctttaactccatcaagggaatcgactttctgcactttctggaagacaaaaaaagcgatctgtccaatgaagagagacacctccttacgaacattttcttctgcaagaacaaaaccagcgaatctaaggaactgtatctgtccattggggcacctagcagtccattcatctccaacattatcatgatcgatttcgatgaccagatttctcaactgtgtgctaatattggcgttacttatacacggtatgctgatgatctggccttctctacaaataatcctaatatcttggacgagctgcttgaggagatcgaaattatttgcaagaaccttaactaccccaagaagttagagattaattcagagaagactgtgtttacctcccgaaaacacaatcggaccctaacaggcctcgtaatctccaacgacggtaaaattagtataggtcgcgagaaaaaaaggaaactccgcgtgatcgcccataaggcgtcgcttagactgctggatcaggaatctctcgataagtttaaagggactctggcctttcttttatcaatagacccggacttttcaaattacttaaagcagaaggcaaacatctga

SEQ ID NO: 11674 - RNA, 909 nt, synthetic construct
  source 1..909: mol_type = other RNA
atgttgagtgtgctcgaaaatttcaagaaaacctttagcttctccacggtgtctgctattatctttatacagactgcacccaaccgctacaaatttcatacaatccagaaaaggcacgggggggagagagagattgcgcaaccgaccaagagtttaaagattgtgcaacggtgggtaattaatcagtacttccagaatagcccaatccataaggctgctaccgcatacatcaagggtaaagggattctcgaccacgccgaacaacacaaaagcaataagtatctactgaagctcgatttcaagaacttcttcaactccatcaacatacaggacttttacgaattcatcaatcgttctatgccccaattctcagaggaagacagagatatcctgggacttcttcttttttgtaagaacaaggacgacaactattatctatcgattggcgcgccttctagtcctcatgtcagcaatatcatactgtacaagttcgactgcctgattcaggagatctgctctaaaaaaggcgttgtttataccaggtacgcagacgacctggctttttcaactaacataccccacattttgaaagggatcctctgtgatatcgaacatattttgtccaacctggagtatccaaaaaatttgaaactgaaccaggagaagaccgtctttctctcacgaaagcacaatcgcacactcacaggacttgtgataagcaacactggtaagatcagcatcggcagggataagaaacggaagctgcgggccgccattcataacgccatccacggcaaactgaccgatgaggaaatccagacactgaaaggaagaattgcatttctgaagggcattgataaagagttcgccataaagctggagcaggaactgcagtccgccaatttatga

SEQ ID NO: 11675 - RNA, 921 nt, synthetic construct
  source 1..921: mol_type = other RNA
atgagcactatctttgacaagatttgcgagactttcagcttaaatcctcatgaggccgaaatttttattaagaccgcgccagagagatataaactccactcgatctccaaaaggcacggtggtgtccgctatattcaccagccaaccaaaaaccttaagtttatacagcgctggttggtcaactcttacttctcaagtatgcccatccactcatgtgcccatgcctatgtgaaaaatcggaacatcctgagtaacgctaaaccccattctcacaacaagtatctaatgaagctcgatttctctgacttcttcaccagcattacgattagggattttctgatctttgcccacgacaatttaagagaattcagctacgaggaacatcatattctcgcttccctgttgttttgccgtcataagattaatggagactttgtgctcagcatcggcgcaccttcatcacctataatcagcaatattatgctctaccacttcgaccaagttctgtacgacttttgtcggacaaagtatgtttattacacaagatacgcagatgatttgagtttctccactaaccagccacgaatcctgaaagaagaggtgtttcctttcgtggaaggactttgcaagacaatcagttacccaaactacctgaagctgaataaaaacaaagtagtgcacgtctccaagaagtttaaccgcaggatcaccgggctggtgctatctaacgagggcaatatttccatagggagggataaaaagcgacagctgcgggcaatggcccatcaaatgtctcttaataagctgcccccggagaagataaataagctcttgggctatatcaacttccttaaagggaaaatcgatcccgagttcgctgaacagctgatccagaaactgaataacaagcacaataagtga

SEQ ID NO: 11676 - RNA, 960 nt, synthetic construct
  source 1..960: mol_type = other RNA
atgaatattatcaatgcgcctttgtttgagcggctcttggctctaagtcctttctctgccagggagctgggcattctcatcgcaacagctccccaccgatacaaagaccactacatcgagaaacggaacggtaggggaaagcggctgatctcccaacccacagccgaacttaaattcctgcaacgcctcattgtgaaacatgaattttcatccttgcccatacatggagctgccactgcctatcggagcggctcctctataaaggcgcacgccctgccacatgcacattcccgctatctgttgaagctggatttctcggacttctttcccagcctgaaggcaaacgctctcaggtatagactaagccgcgacgcctcatatactgagcaggaactgtggatcttatgtcagctcctttgtagacagccgagacgtgatgccggcctgcagctgagtataggggcacctagttccccatgtgtaagcaactacctcatgtgggaattcgatagccggctggctgaattttgcgctgcctgcggtaccgcatacaccagatacgcagacgacattgccgtgtcaaccacatttgcggatgtgctggatgtggtcgaggccgaggttcgtaggcttcttggggagcttggatacctgggcctctctctgaatgaaggcaagaccgtaaatgtttccactaagtctcgcagaacgctcgtgggcctggtccttgcgaacgatggaacagtgtcgattggtcgggaagagaaacgacgcttaagagcaaccatgcacaggctgacgcagggaggactgtcaggcgacgaggtggctcgattccgtgggcagctcgccttcgctcactctatcgatgccagtttcgtcgacttattgtgcgctaggcacaattttcctaacgttgccagcatcggtagcccagatgggggggacctaactgactga

SEQ ID NO: 11677 - RNA, 960 nt, synthetic construct
  source 1..960: mol_type = other RNA
atgtccatcgcaaacgagcccttatttgagcgtttactcgccctgagcccattctcagctcgagagctgggcactcttgtggctaccgccccgtaccggtacaaggatcattatattgagaagcgcaacggaagaggcaagcgcctaatctcccagcccacagcagaattgaaatttttacagcggctcattgtgaggcatgaattttccagcttgccaattcacgaagccgctactgcgtacaggccccaccgttccatcaaagctcacgcccttccgcacgcaagtgcccgatatctcctaaagttggactttcgcgactacttcccttcacttaaagctagcgctctgcgttataggctgtctcgggacgccacctatactgagcaagagctctggatactgtgtcagctcctgtgcagaaagccaaagagagacgcagagctgcagctcagtataggcgcaccttcttctccccacgtatcgaactatttgatgggcgagttcgactctcggctgacggacttttgcggagcttgtggagccgaatacacccgatatgcggacgatatcgcagttagtaccagcttccctcatgtgctggatgccgtggaaggggaaattcggaggctgctaggtgagctgagctacctgggattgtcactgaatgagggcaaaacagtcaacgtgtctaaaaagaataggagagtacttgtcggcctggtgctggccaacaatggtgtggtcagtatcggcagagaggaaaaaagacgcctccgcgctacaatgcataggcttgtgcagggagccctgcctgcagacgaagtcgcccacttccgggggcaactcgccttcgtctactcaatcgatccagcttttgttacctccctgtgcgcgcgctacgatttccccaatgttgggtccattggggcccctagcgggggtgatagcacagattga

SEQ ID NO: 11678 - RNA, 960 nt, synthetic construct
  source 1..960: mol_type = other RNA
atgagtatcattaatgagcccttatttgagcgtctcctgacactgtccccattctccgccagagagctgggcatactaattgccacagcaccttatagatataagtcccactacattgagaaaagaaacggaaggggaaagcgcttaatcagtcaacctactgccgagctcaagttcctccagcggttggtggtcaaacacgagatgtcttcactgcaaattcataatgctgccactgcgtaccggcccaacaggtcaataaaggaacacgccctaccacatgcgcgcgccaggtacctgctgaagctcgatttccgtgacttctttccgtctctgaaagctacagctctccggcaccgacttctggcagatgcaaattactctgcccaggaactttggatgctgtgccagattctctgcaggaggccgcgaagggatgcagagctccagctttccatcggcgcccctagtagcccatatgtcagcaactatttaatgtacgagtttgatagcaagttggcacggagctgcgaggcttgtggcgctgaatacacccgctatgctgacgatatcgccatctcgacttcttttccccaaatcctagacattatcgaagtggaggtgcggcgcctgcttggggagcttgactatctgggattgagcttgaacgaaggcaaaacggtgaatgtttctaccaagaacaggcgcaccctggtaggtttggtgctcgctaacgatggtaatgtttccatagggagagaagaaaaaagacgactgcgcgccgctatgcataagctgacccaggggaaactgccagtagaggaaacagctagactgagagggcagctggcgttcgcatactcaatcgaccctgactttgtgaatgacctttgtgcccggtcaaacttcgccagcgtcgcagccattagtcagcccgataatggcaagcagaccgactga

SEQ ID NO: 11679 - RNA, 948 nt, synthetic construct
  source 1..948: mol_type = other RNA
atgagcatagtgaacgaaccccttttcgaccgtctactggctctctccccttttagtgccagggaactcggcgtacttatcgctactgccccacaccggtacaagaatcattacatcgagaaacgcaacggaagaggtaagcggctcatctctcagccgaccgctgaattgaaattcttgcagcggctgattgtgaaacatgaaatgagctcacttcccatccacgacgccgcaactgcctaccgatctcagcgcagcataaaggaacacgcattacctcacgccagagcacgatacctgcttaaactcgacttccgtgatttctttccaagcctcaaggcgacagccctgagacaccggctgctactggacgcaaattatacagaacccgagctgtggatgttgtgccaaatcctcttccggaaggctggccgccatacggatctgcagctgtccattggagcaccttcctcccctcacatctcaaattatctgatgtgggaatttgacaagaagctcgcccaattctgcgagctgctgggggctgagtatacacgctacgcggatgacatagccgtcagtacttcttttccacacctgttagacgctgtggaggccgagatccgaagacttttaggtgaattagactatctgggcttgagtctgaatgaggggaagaccgttaacgtttctaccaaaagcaggaggacactggtgggactagtcctcgcaaacgatggcaccgtctccattggaagggaggagaaacggcgtctgagggccactatgcataggctcgttcagggcctgcttgcaggagaggaggtagcgagattgagagggcagctggctttcgtgtactcaattgatcgcgcctttgtggattcgttgtgtgctcgccatggctttaccagcgtggggagtattggtcagcccacgtcagattga

SEQ ID NO: 11680 - RNA, 954 nt, synthetic construct
  source 1..954: mol_type = other RNA
atgaatatcatctcaactcccctcttctctcgggtcctagagaattcccccttttccgaaagagagcttctgatgctagtcctcactgcccctgagcgctataaggatcactatatagaaaaacgccacggtcggggaaagagattaatttcccagccaaccgccgagattaagtacctgcagcgcctgattgtagcaagagagttgagcgaacttcctatccatcctgcagccaccgcttaccgggtgggatgttctattaaagaccacgctctgctgcatgcctccaatcgttacctgctgaagctagatttcaccgacttctttcatagtatcaagcaggatgccgtgctcagctgtctttctagagacacaagctacagcgttaacgagcagtggatgttggtgcaactcttgtgccacaggccacgcggcgctggtgatcttcagttatcaatcggggctcctagcagtcccttcatgagcaactacgtcatgcacgaatttgacaataaggtggataggatgtgcagagcctctggcgcagtgtattctcgatatgctgacgatatggcgatctcatcatctttaccaagggtgctcgacgccgtggagcaccagattcgcgcgttgcttctggaaatgaagagcccgaaactgcgcttgaacgagagtaaaacggtgaacgtatcgaaaaaaaatcgtcgtacactggttgggctcaccctctccaacgaaggctcggtcagtatagggagagacgaaaaaaggcgactgagggccatgatgcatgcactgactgagggcaggctcgatgttacatccgtgtcactgctgcgaggaaagctggcatttgctcagagtattgactctgtgttcgttagccaactgtgccggcggcatgggttttcctccgtcaaggacatccggccacccatatcaagcatcggctga

SEQ ID NO: 11681 - RNA, 951 nt, synthetic construct
  source 1..951: mol_type = other RNA
atgtcctttgccagggaacccctgtttgttcggctgctggatttaacccccttcagtgaacgagacttggccatcctgattgctaccgctcctcgcaggtacaaggatcattatattgagaagaggaacggcagggggaagcgactgattagccagcccacagcggaactcaaattcgtgcaaagactgctaatcaagcacgagcttacacatctccagctacacgaggcctccgttgcctatcgctccggttcctcaataatggaccacgcatccccacacgcgtcagctcgatacctcttaaagctggatttcaaggacttctttccgtcacttaaggcatctactctacaatacagattcaccaaggacagcgattacagcgagaacgaaaagtggatcctgtgtcagcttttgtgccgcggctctctgatcacgggagatctccagctgtcaatcggggctccttcatctccttatatttcgaactatctcatgtgggaatttgatacgaaactgaccgagttctgcaaaaaatacagcgccgagtacacacggtatgccgacgatctcgccatttctacttcccagccacacgcacttgataaaattgaaagtgaggtcaggcggctgctcatggagttgagctacctgaagctgaccctcaatgaagacaaaaaagtgaatgtgagcaaaaagaatcgcaggacattggtgagtcttcgtctggccaacgacggcaatgtatctgtggggagacagcggaaacggcaactgcgtgcggctatgaacgccttgatacatggaagattatccactgctgagatcagtagattccgcggaatgatggcttttgtctattctattgacccaaatttcgtggaccagctgtgtagtaagaacggttttgcaactataagcgccatcgacgcagtcaaaatcaagaagtga

SEQ ID NO: 11682 - RNA, 948 nt, synthetic construct
  source 1..948: mol_type = other RNA
atgtccatagttacagagcccctatttcagcggctgctggcctggtccccatttagtgagcatgaattagtcgtgttgattgccaccgctccttctaggtacaaagcctactacattgagaaaaggggcgggagagggcagagagagatttcccaacctaccaaggagatcaaattccttcagaggttgctcgctagcaaagaactgcgcgagctgcccattcatgatgtggctgtcggataccgaagcgggcgctcgatcctcgatcacgcacagcctcacgcctctgcacgctatctactcaagctggacttcaccaattttttcccgagtctcaagtctaaggccctcgatcacaggttatccagggacactgcatacagcaccgctgaacgttggattctgcggaacctcctgtgtagacgaacaccaggcaccggcaactatcagttgagcatcggcgcccccagtagccctcacatttccaattacctgctgtgcgaattcgaccagcttatgagtgactactgcggtatacgggtggtgcgatatacccgctatgctgatgaccttgcattttcgacatcaatcccatcagtgttgaacgacatagagactgaggttagaagactaattcaggagctcgactatctgggtctttctctcaatgaagccaagactatcaacgtatccacaaaacacaggcggacactggtcggactgactctgtcaaatgatgggcgtgccagcatcggacggatcgccaagagagaactgcgccaagcaattcattctctgcggcatggtttacttagccaatctgaaatcgcgaacttgaggggccgcctggcgtttacgtacgctatcgacccagagttcatagaacacctgcttcatagatatggcttcgagtcaatctccacgatcgatggaccccagactgattga

SEQ ID NO: 11683 - RNA, 993 nt, synthetic construct
  source 1..993: mol_type = other RNA
atgatccccgagtatgagtctctgtttgcacggatcctcgcacaatcgccattcagcagtaaggaactggtgaccctactggggacagctcctgacaggtataaagatcactttatccagaagcggaacggccgaggtctgcgtcagattagccagcctactgcggagttaaaatttttgcagcggctcttggttaattttgagttttgcaacctgccagtgcacaatgctgccactgcctatagagctgaaaagtcaattaaaagccatgcagtagaacacgcgaagaactcctacctgctgaagcttgatttcaaggatttcttcccttccattggctcagacgcgattaaacaccgcttgaggcttgacatgaactattcagagacagaactgtggatgctgtgtcaaatcctctgccgccgagatcgcctaacaaataggctgcagctgagtattggcgccccctcttcaccttttctctctaactatatcatgtgggagttcgattgtcgtatacaatcttactgcgaccagctaggggtgtcctacactcgatacgccgatgacttagccttcagcaccagcgtcccccatattctggatgtcgtgcacgaatatgtcgagagattactgagagaattgagttacctgggaatatctcttaacaaggagaaaaccgtaaacgtttccaagaagaacaggagaagccttgtgggactcgtgctgagtaattccggaaacgtttcgatcgggcgcgccgaaaagaggaatctgcgggcagcaatgcatgccttgatcaataataagctcacacaagacgaggccggcaaactgcgggggaaaatggctttccttcttgccatcgaccccgatttcgtgaatggcctctgtgtgaaatacaatttcacgagagtcgctgacatacaggctaccaactacgacagctcccagccgcagaaaaacgatggtaccgacgacctcccattttga

SEQ ID NO: 11684 - RNA, 939 nt, synthetic construct
  source 1..939: mol_type = other RNA
atgaacttcagaagcgcgaatttatttactcggcttcttgagatgtccccccttagcgcccgcgagttgagtcgagtgatcgccaccgcccctcatcgctacaagtctcacttcatagagaaacggcacggcaggggcaaaaggctgatttcacagcccacagctgagttaaaatacttccagagatggcttgttgacaatgagctgaatcaactcccagtccatgatgccgccaccgcctatcgtaaggggaggagcatcctggatcatgcgacaccgcacgcaaagcagcgttaccttcttaagctggactttaaggacttctttccctcactcaacgaacacgcactccgacactgtctggaaagggactgcaactactctgaggaagaaatcgagatattatgcaacctgctactgaaaagtgcttcgattgaaggcggacctctccagctgtccatcggtgcaccttcttccccatttatttctaactatctgatgtgggagtttgacattgcgatgcagcaatactgtgaagtcatgggtgtaatgtactccagatatgctgatgacctagccttctcaacggataccccgcgcctactcgataaagtatttgacactgtccagaagatactggcctctatcagctatttgcccttgatcctgcatccagacaagacagtgaatgtgagtaaaaaacgcagacgactcctggtggggctgactctcgccaacgatggcaatgtttcaatcggaagggaagagaagcgcagattgcgggctgctctgcatgcatatacccaaggccggttgccatgtgacgaggttgctagactggcaggaatgctgagcttcgtgtggagcattgatcctaagttcgtggaaaatctctgccagcggcacgggttcagtaggatttccgatctgctccggtga

SEQ ID NO: 11685 - RNA, 951 nt, synthetic construct
  source 1..951: mol_type = other RNA
atgaggatctctgacgcgtcgctgttcgagcgcataatcgagaacacccctttctccgaggctgaattggtactcctgatactgacgggacccacacggtacaaagaccactggattaacaagaggcatggcagaggcaagagattaatcagccaacctactgcagagcttaagttggtccagcgctggctcgtgagcagcgaactttcctcccttccagtcgacgttcatgccacagcatatagaaaagggttatccattcgtgatcacgtgagtccccatactaggagccacttcctattgaagctggattttaaggacttcttcccttctttgactgattccgccctgagatacagacttgaacacgacgccaactatacggagctggaggtgctcatcctgaccaagctcctgtttcggaaaaaacagagcgaggagacatataggctatctatcggcgccccctctagtccatttatttccaactacctcttactagactttgatcgccgcctggcagattactgtgaatcaaattacctgcactatacacgatacgccgatgacatcgcaataagtgtgaacagggctgggaccctcgatttcgctaaagtttttgttgaacgtctcatctctgaactcccgtatctggggttacggctgaatgaagagaagaccgtgaatgtcagcaagaagtttcgccgacagctggtgggtctggtgatttctaatcagggcaaagtctcgttgggacgggaagagaagagacgcctcagggccgctgtacatagcctggctttgggtaaacttgacgtgcgacaaagtgtccagctgcggggccagcttgccttctgcctgtcaattgacagggactttgttattaccctgtgcaatcggcacggattccagagagtgtgtgatctgccatcagggtcagatgcgtcctga

SEQ ID NO: 11686 - RNA, 948 nt, synthetic construct
  source 1..948: mol_type = other RNA
atgaagctaagcagcacgcccctgtttctccggctgttggagcttactccttactcagaatatgagcttgccaccctcatcctcacggctcctacacgatacaaggaacactacatcgtgaagcgacatggcagggggaagcgtttgatttcccagccaacagccgaacttaagctgctgcagcacaccaccataaacaaggaactcaacaagcttgagatacataatagtgcaactgcatatagatgcggaagctccatactccatcacgcacaaccacacgctaactcgaactttctactgaaactggactttaaagatttctttccatcactgacagacaaggcactgaagcacaaattaagggcagatacaaactatagcgaactggagattgacattttgcgcaacatcttgctgaagaaagacaggaagtctggtaatttcaatttgtcaattggagccccgtccagtccctacgtatccaattacctgatgaacgagtttgatatgttagtgagcatctactgtaaaaccaagaaacttgcgtatagccgctacgctgatgatattgctatcagttctaccaagccctacctgttagacgaggcgaaatcatacatcgacgatgttctcctcaaactggactatttaggactgattctcaatcaggagaaaactgtcaacgtgagcaaaaagcaccatcgcgaactggtcggcctggtgctttctaatgacgggcaagtttctctcggcagagacggtaaacggaatttgcgggccggcgtgaacgccctaatcaatggcaagctggatgagattgccgcctccaaactcaaggggcagctggccttctatatggctatcgatagagacttcgtcctaaacatgtgcaagaagtatgggttcaatagtatcgtggagctgtctaagaaatccaaaccttga

SEQ ID NO: 11687 - RNA, 981 nt, synthetic construct
  source 1..981: mol_type = other RNA
atgagcttcctggaaaccaacatgtttgctcggatggtggaacgctctccattttcctataccgatttggccatcctcatactgactgcccctaagcgatacaaagaacaccatatcaagaaacgttcagggggtctgaggctgatcgctcagcctaccaaagaactcaaattcgtccagcggctgctgatctcaaacgagctctcccaccttaaagtctctgaggccgccgctgcatatgtgaaggaaaggagtatcaaggagcatgcagagaagcatgccggcaatcgttaccttctgaaactagatttcaaggattttttccctagcatcactaaagatgctattaatcgcctcttgatccagcaaaccgacttgtccgccgacgagcgctacatagcgtgccaactgctcctaagatctccgaagaaagaggagacactccggcttagcattggagcaccatccagcccattcatctcaaactgtgtaatgtacgaatttgacgagaaactccttggctattgccaagctaacggcattacatattctcggtatgcagatgacatagctctctccacgcagaatcccagaactctggatcctgcgaaggcgtttgtggaaggcctgctatcacagttggactacctcaagctgagcctgaatcccgccaagaccgttaacgtgtcaactaagaacagaagaacactgaccggactggtacttagtaatgaggggactgcaagcattgggagggacaagaagaggttaattcgagcccaggtccactctatgattaaaggtcagctgtcgaccgaggaagccgtgtctcttaagggccacctgtccttcttgtacagtgtggacaagagttttgttgttaatctggctagaaggtatggattggacgccaaatccttaatgacgtaccgcacaagttccacagattcgttacccccccagccagacaaaagcagctga

SEQ ID NO: 11688 - RNA, 1026 nt, synthetic construct
  source 1..1026: mol_type = other RNA
atggccgagttcgataacaataaccttttcttgacattgctgaaccagagcccattcagctcgggggaattgaagaccctgatcagtaccgccccacagaggtataagaatcactttatcgagaagcgtaacggccgcggccggagattaatatctcaacctactagggagctcaaaggactgcaacgcagtctgctgagtataattgatgaagttattgcgccaagcgccgtggcagtcgcttataggaagggaaagtcaatcaaggatcatgcagccccccatgctaaaaattcctacctgctcaaacttgatttcaaagacttctttccgtcaattgattggtttacaatcagccactgcttcaaagagacagggaagttctctgacgatgagatcaagatcatgaacttcatcctgtgtcgctacgactccgagcccatcagccttcggggatcttttaagctgtctattggtgccccctcctcccctcctatctcaaattttatcatgagggacttcgacgaaaccctcgaaaacttttgtaagaatgagtctgtgacgtacactagatacgccgacgacttagctctttcctgcagtattccccgtaaacttgacgaggtgaagaattttatcgcgtcgattctggacgagaaaaagtacctaaatctgttcctcaacgaggggaagactgtgaacgtctctaagaagaacaagcgatccctggtgggcatagttttgtctaacgaaggcgtcatttcaatcggacgcgataaaaaaagactaatacgggcaacactgcataaagcatcccagggattgttaaccgaaaagcagctcgagaaactgaaaggtcacctcagctattatatcaatattgatcgggactttgtgtatagcctcgtagggaaatacggcttcgggtcagtatcccaggtgagtttcgaaaccattaagtaccctgaagtttttagcgctagagacaatctgttctttggccgagatgatggtattccattttga

SEQ ID NO: 11689 - RNA, 936 nt, synthetic construct
  source 1..936: mol_type = other RNA
atgagccagttgctgcctctgttcgtggcagagagtggaatggatccccatgacattgtgcggatcattaggactgccccgcgccggtataaagttttcttcatccccaagcgttctggcgaacccagagagatcgcccagcccgcacgcgaattaaaagttttgcaacggattctcgtcgataaggttctatgcaagctcccagtacacgatgcagctacagcctacaggaagggactgagcatcctggacaattctgacccacactccggatccacccctatcttgaagctggatttcgagaacttttttccttcaattaccgagagcgattggttgcgatattgtcgagagaacagcatcctgagggaagacgacagggaaatcgcggcacgcatactgtttcgcagagccaaaggggagagaacactgaagttatcaattggcgctccatctagccccatgctctccaatattctcctttatcgtttcgactcacttgtggaagcggctgccctgaaacggggtctgaagtatacgagatacgccgacgacatgtccttttctggccagcgagcaggtatgcttaaggatatgattaaagaggtggccgaggctgctcgcatagctcggtaccctagacttaagttgaataagagcaagacaactttcgtgaccaccgctacgagacgctcggtcactggcgtcatcctttccaacgatgggacagtgggcattgggcacggtcggaaaaggctcataagttcaaaagtgcatcatgccatgttaaataaactcagtgtagacgaagtcagacagctagccggagaactggcctttgtgaacgtggtcgagccgatatttctggcatggctcaggaataaatacggggagcaaaccattgataacatcaagaggctgatcctgccaatctga

SEQ ID NO: 11690 - RNA, 930 nt, synthetic construct
  source 1..930: mol_type = other RNA
atgagtgacttggtcaacctctttgttgctgaaagcggaatggcccacgacgacgtgctgaggattattcggtcagctccacagagatataaagttttcagcattcctaaacgctccggcggaactagggagattgctcaacctgctcgggagctgaaagtgctccaacgggtcctggtggacagcattctgtgcaacctccccgtgcatagcgccgcaaccgcctacaggaaggggagaagtatcctggataatgcaatccctcacaaaggcggcctgcccatcctcaagctggatttcgagaacttctttcccagtatagtagccgatgactggatcaactattgtaacgaccacgatatcttcgataacaacgaccgtcttatgtctgcgaagattctatttcgcagagcaaagggcgaacggatcctgaagctttctattggggctccttcctctccgatagtctccaatatactgatgttcgagttcgataccttagtgacagagtcggccaataaaaggcgactaaattacacgcgctatgccgacgacatgaccttttccggtcagagagctgggatgctgaaagatatggtaaaagaagtggcgtctgcagcccgatcagttagctaccccaggctgaatttaaaccgatccaagactactttcgtaacagctgccacacgtcgctccgtgacaggcgtggttctctctaatgacggagaggtgggtatcggccaccagcggaagcgcatcatcagtgcgaaagtccattattcaacccaggggaagcttaatatcgatcagttgagaaccttggccggagagctcgcatttataaatgtggtcgaaccagcatttcttagctggttgtcagccaagtacggtgaaccagccattgagaagattaagcatctggaaatctga

SEQ ID NO: 11691 - RNA, 939 nt, synthetic construct
  source 1..939: mol_type = other RNA
atgctcagtaaatttctcaagcaattaagcgtccacacgggcctctctgaggctgatctcctgaagatctggactaacgctcctgaccgatacaaggtgtttaggattcgcaaaaggtcaggtgggtggagagagattgcccaaccggccagggagctgaagctagtgcagcgtgccttggtggagatacttctgtctcagctacctgttcacgacgcagccacggcttacgtccgcggaagaagcatcttggacaatgcaactcctcacagaggcgacacacccatcctgaagcttgactttagggacttctttccctctatcttggcagaagattgggaggcctactgtgcggctcatgatgtaattcagggttccgacgttcacctgaccagtcgtatgctttttcgacggccacggtcatccacaaagctgcggttgtccattggcgcgcccagcagtccaatgttaagcaacgtgctgatgtatgagttcgatgacgccatagataagattgctaaggataaggggatcgcttatacacggtacgctgacgacctgaccttcagcggccaaagaatcgggatgttgcaggatatggtcagggccgtcaaaaagactctgagaaaccagtcaagccccaaacttcggctgaaccagtcgaaaaccgtcttcgtaaccatggcatctaaacgcactgtgaccggtgttgtgctcgccaatgatggcacagcaggaatcggacgcggccgcaaacgagaactttccgccgcggtgcatcatgccaaaatgggaaagttagagaaatccgaactcaaagaactgtgcgggcacctcgcctttgcaaatgcaatcgatccagacttcctgaagttcctggccaagaagtatgggagtgaagtgattagggctattcagtcagcggtggagctgaaatga

SEQ ID NO: 11692 - RNA, 933 nt, synthetic construct
  source 1..933: mol_type = other RNA
atgtctgaccttataagactcctgtcagccgagacagggctgagcaattcagatcttattaggatcattcgcacagcccccaggaggtataaggtcttttacattcctaagcgcactggtggcatgagagagatcgctcagcccgcccgcgaattaaaggtgctgcagcgggtcctggtcggaaggttactgggggctctgccagtgcatgacgcagccagagcttacaggactggtatgagcatccgcgataatgcagccccacacgcaggctcagggcccattctgaagatggacttccgagacttctttcctagcatcaggagcacagactggcaacgttactgcagagatcacgacatcctctccgaggaagatcgcgaaataacgtccctgatcttcttccggcgaaacaagggagaaaagatttttcgcctgtctattggagccccatctagtccggtactgtctaacgtgcttatgtacgattttgacacccaggtcagcgctgaagcagagcgtcgaggcatcgcctataccagatacgcagatgacctgacattctccggccagagggccgggatgctcaaggatatggttggagaagttgaaaaagccgcgcggaaagttaagtacccccgattgcaggtgcacggggagaaaaccacctatataactgcaagtcggcggcgtaccgttacgggggtcactcttgccaatgacggtgccttgtccctcggaagagataaaaaaagattgctgtcggcgggcgtacatcatgctagcctgggtaagttgagtgcggagcagatggaggagctcgcaggccaactcgcttttgctaacgtggtggagcctgagttcctagataggctaagagccaaatatggcgaagctgtggacttagtgcgccggtcagtgcggtccagttga

SEQ ID NO: 11693 - RNA, 936 nt, synthetic construct
  source 1..936: mol_type = other RNA
atgtcaagagtggtatctctgattgccgtggaaaccggactccctaccgacgacatccaccggctcattcgttccgctccccgtcggtacaaagtctttcacattcctaaacggtccggcggcactagggagattgcccaaccggcaagggaagtgaagctcctccagcgagtgctggttacgcatgtcttatcttccctgccagttcacgacgcagctatggcatacaggaccgggcggagcatcttgacaaacgccacgtgtcacgctggccacggccctatactcaagatggattttaaggacttctttccatccatccgagccgaggactggatggtgttttgccgaaacgcacagctgttcgatgagtcagatgctgagctgtcagcccagatactgtttagaaaggccaaacacgagcatgtgcttaagctgagcataggcgccccaagtagccccgtactgtctaatgtcctgctcgttcctttcgacgtaatggtggctgcagaagcaagcaaacgcgggatcaagtacacaaggtatgctgatgatttaaccttctcagggcagcgcattggaatgctaaaggacatgattgacgtggtgcgcttaaccacaaaacaaatcagaagaccgaagctgactattaatagtgagaagacaaccttcgtgacagcgaaacattgcagggtcgtgactggtgtcactctagccaacgacggagccctgtctctgggtagagatcggaagcgtatgttgtctgcgcgcgttcatcacgccgtgttggggaaactgaatcccgacgaattgcttcgcctcagtggagatcttgcctttgctaacgtcgcggagccctccttcatcgatcggcttagcaataaatatggtagtgaagctatccagactatcaggcatgcaccaagaagctcgtga

SEQ ID NO: 11694 - RNA, 936 nt, synthetic construct
  source 1..936: mol_type = other RNA
atgtcaaagctggtggacctgattgtgtcggaaacaggacttccacccagcgatgtactgcgcttaatcaggtcagccccacgacggtataaagtctacaggatacccaaaagatcaggaggcgagagagaaattgctcagcccgcccgcgagataaaactgctgcagagggtgctggtcgacaaggtgttgtcttctctgcccgtgcatcgcgcagccacagcctacatgaagggctgcagtatcgctgcgaatgctagttatcacgccggctctggtcctatcctgaagatggatttccgagacttttttccgtccatccgggccgaggattgggtgctcttttgtcgtaacacacatgtgttcgacgagaatgacgcagaacttagcgcacagattttattccggagagctaagcatgaacacgtcctcaagctgtccatcggcgcgccatcttcccctattctgagcaatattctcttgatgcctttcgataccatggtgatggctgaggcttcaaaaaggcacatacgctatactcgctacgccgacgacttgaccttttccgggcagcgaatcgggatgctaaaggatatgatcgatgttgttagacttactgtgaggcaagtccaacgtccaaagctcaccgtgaacctcgacaagactacgttcgtaaccgctaaacaccggcgggttgtaaccggtgttacactcgcgaacgacgggcttttgagccttggtcacgacaagaaaaggcggttgtctgcagccgtccatagagctattcatgggggactggatagcaaagagctgttaagtctaagcggcgatctggccttcgccaaggtcattgagcctagttttctggatagactcgccaggaaatacggaccggaagcagtgcagatgatccgccacgcacccagacagtcctga

SEQ ID NO: 11695 - RNA, 936 nt, synthetic construct
  source 1..936: mol_type = other RNA
atggggaacctgatcaatacacttagtgtccagacgggcctaagccccagcgatgtaagattgatactccgaactgcacctcgccggtacaaggtttataccattcccaagaaaactggcggtgagagggttatcgcccagcctgctagagaagtgaagctgcttcaaagggctctgatgtctgcactcctagagaaacttccagtccacgagaatgccaaagcctacaaaatggggacatctctcctgggaaacgcgcagccccactcgggtcagagcccaattttgaagatggactttgctgactttttcccttcaatccatggtattgattggcttcggtactgcgcccagagcgcaattttagacagagaggactccatcttttccgctaatctgctcttccgactagccaaacatgaacgcactctgaagctgagcattggcagtccgagctcaccgttgatatccaacattctcatgtatggcttcgacgaaataatcctccgggaggccactaagcggaagatctcttacacccgctatgctgacgatctgacattttccggacagcgtgtggggatgcttaaggacatgccttccatcgtcgagaaggccattcgcgaagcgaaaggccccaggctgtcgatcaataagtcaaaaaccacatacgtgacgagtagattccaaaggcgggtcaccggactggtgctggctaacgatgggaccgtgggaatcgggcgagataaaaaacgtctgatcagatctaaggtgcacagggcaatcaatggcaaactggatgttaaacaggcctcagaattggccggttacctcgcatatgtgaacagcgtagacccagaattaattttgtctctggagtccacctatggcattaagatcttcggagagctcataccaaagttactgagtaagtga

SEQ ID NO: 11696 - RNA, 921 nt, synthetic construct
  source 1..921: mol_type = other RNA
atgaatagcctcacctccctcttggcatcccagagcggactgtcccatgctgatgtcctccgaattttgaacacagctccgaagcggtataagatttactcaatcccaaagagagggggcgggatgcgagagattgcacagccatcaagagaagtcaaactgctgcagcgcatatttgttgacgaggtgctcacaaagctccccgtgcattctgccgcgacagcctacagaaaaggctgtagcatcagacaaaacgcagaggcccatctcggagccacccctatactgaaaatggatttcaaggacttcttcccatcgttgcacggagtagattggcttcgatattgccggcacaatagaattctgaacgaatcagatgcagcactgtctgccaacttattgtttaggaaagcgaagaaggatcgtactctaaaacttagtatcggtgccccctcaagcccagcgctgtgcaacgtgctactttttgacttcgacagctatgtggccgaagctgcatcccgtcggaacattgtttacactaggtacgccgacgaccttaccttctctggtcagaggttcgggctgctcaaagatatgcctgagatagtccgcacggccatcagggaggctaaaggccccagactgagggtgaatgaagacaaaacagtctttgtttcttccaagtttcagcgccgcgtgaccggcttagtcttaactaatactgggaccgtgagtatcggccgcgaacaaaagcggaagatccgggctagcgttcaccgggccttgctgaataagctggagcctaatgaagtggctagtctgaaaggatacctggcttatattaagagtgtagagcctgagttcctgcaggtgatctccaggacgtactctgattttgacaccgagtggcttctgccctga

SEQ ID NO: 11697 - RNA, 948 nt, synthetic construct
  source 1..948: mol_type = other RNA
atgatcgacgatctgatcgggttgctttctcggatgacgggattacctccaagcgctgtgcgtcggatcatcctctccgccccacgcagatacaaggtatactatatagacaaacgctctggcggtaagcgcgagatagcccaccccgcacgagaactgaaactcttacaaagggctttcctcgacgccgttcttgaagatctgcccgtgcacgtgtcagccacagcctacatcaaaggtaaaagcctgaaggataatgctctgcctcatgtgggagcaggaccgattctcaagatggattttagggatttcttcccctccattagggctaaggactggattgcgtatgccagggaacatagagtgttcagcaacgatcatgatgctgagctcagtgctcttttgctttttaggaggcctaaaggagaatctgtacttcggctaagcgtgggcgcgcccacatctccagccctaagcaatatactcatgtacaactttgaccaggcagtttgggcatccgtcggagagagatttgtcacttacacccgatatgccgatgacatgactttctcggctgctagaaccggctttttgcaaggtgtgcagacacgagtgtccgccattattcgggagatgtcataccctaagctggaactgaatcaccagaagacaagattcgtcaccgagaagtatcacagggacgtcactgggttgactctgtcactcgacaaccgggttacgatcggccagttgagaaagcgcaacatccgcgcggggctgcatcaagcaaaactggggcagctgagtcgggaggaactgcagaccctgagtggccacattgcctttgccgcagatatcgagccagaatatattggcaagatgaaagagcgttacggggaggacttactggactggatcaccaaaggcagacagtccgacgatcgctga

SEQ ID NO: 11698 - RNA, 948 nt, synthetic construct
  source 1..948: mol_type = other RNA
atgagaagcaagttagttgatctcctgatccgcgagctacgcattggtgagcgagaactggcagccttgatagctactgctccagataggtacaagacatattttatccccaagcggagcggcggacgaagggaaatagcgcaccccgccttcgaacttaagattgcgcaacgggctatcatcagcggctttcttaatgagctgcctgtgcaccattgtgcaacggcttacaagaaagggagctctatacggcagaatgctgaacgccattgccacaacagggccatccttaagtatgactttaaagacttcttcccttcaatcaccgagcaggcctggctgagttactgtgatcggcgcaaggtgatggacaggtcagacgctgtcttggcaggaagattgctgttcagacgccccaaaggcggcaggatcctgagactctcaattggtgcacccagttccccaattctgagcaatgtactgctgtacgactttgactgccaggtgcacgagcgtgtcactgcccataaaattacctatacgagatacgcagatgacatgacattctcttccgaacgaacctggaacctgcgcgaagtcgataagatcctcaggtctgtgattaattccctgggcaccccaagtctcactatcaacgggtccaaaacaacactggtaactcctaagtaccatcgtcaggtgacaggcttggtcctcaccttagacggacgggtgtccctcgggagagacaggaagagattaattcgagccagagtgcaccacgcggtttcgggtaaactatcaaaagccgcccttgttaatctggctggaactttggcctttgccaaagatgtcgagccggagttctataaccggctcgagctgacctatgggcgtgagaaccttgaaaccataaagtattctgtgagggattaccatcgggagtga

SEQ ID NO: 11699 - RNA, 948 nt, synthetic construct
  source 1..948: mol_type = other RNA
atgacttcaaaattagttgagtttctcactagagagctgaggattggcgaacgggagctagctgccttaatttcttctgcgcctgatcggtacaagacctatttcattcccaagaggtcaggtggaaaacgggaaatagcacaccccgccttcgagctgaaaatcgcgcaacgggcgatgattaatggattccttaaggacttgcctgtccacccctgtgccaccgcctataggaaggggtcgtccatacgacagaacgctgagcggcattgccataaccgcgcaattctgaagtacgatttcaaagagttctttccatctatcaccgagagagcatggctcacctattgcgacagacactccgtgctggacagatctgacgccatcagcgcaggtcgcattttatttcgcagaccaaagggcggccgcattctgaggctgagcattggggccccatcaagcccgatcctctccaacatccttctgaatgactttgaccgcgaggtgcaccagcgagtgagtgctcataaaataacttatacccggtacgccgatgacatgacattctccgcagaacggacgtggaatctgcgtgaggtggatggcatcctgcgatcagtcattcgcctaatcggtactcccagccttacaatcaacagtgccaaaacaacattggttactcctaaattccatagacaggttaccggcctcgtactgaccctcgatggccgtgtaagtttgggaagagaaagaaagaagctcatccgcgcccgagtgcactacgctataaatgggaagctggataggcacgctatggctcatttggctggaacgctggcatttgccaaggatgtcgagcctgaattttacacacgtctggaacggatctatgggagggacaacatggaacttatcaaacacagcgtgagggggtactccaggagctga

SEQ ID NO: 11700 - RNA, 948 nt, synthetic construct
  source 1..948: mol_type = other RNA
atgacctctcccctcgtcgagctgcttattcgcgagttgcggatttccgagagagaggtcttgcatctgatcgctactgcgccagagagatacaaagtgtacaccattcccaaacgaaatgggggtcgaagagagattgcccacccggcgaaagaactgaaagtggctcagcgggccgtggttaattcctacctcaacaatctccctatccacgatgccgccatggcctataagattggacggagcattaaagataatgcagcttatcacgcaggttccggctcaatcctgaagtatgatttcgtggaattttttccttccatcaccgaatttgcctggattgcctattgcgaccgtcacgccgtgatggacagggctgatgctataagaagcggacgtatcctgttcaggaggcctaagggcggtagaatccttcgattgtctataggcgcaccaagctcgccaatcctgagtaacatcttaatgcacgacttcgacgaagaggtgactcagctcgtagcagaacataagatcaaatacacacgctatgcggacgatctgaccttttcagctgaaaggactggatatctgaccgccgtggataagatactgaggggagtaatcgcccggagtaaggcccccaaacttaagattaacgacagcaagacagttctcgcaacgcctaaggttcaccgccaagtcacagggcttatcctaacactggatggcaaggtttcaatcgggaaaaacaaaaagcgcgagataagggtgaaactggactacttccggaaggggctgttaggggaacgtgaggtcgcacccctagctggctatatgagttacatctgggacgtggagcgggacttctacattaagatgcagcgccattacggagaggaagtcctcgctagattgcagaagcagggccaacataaaatttctccatga

SEQ ID NO: 11701 - RNA, 981 nt, synthetic construct
  source 1..981: mol_type = other RNA
atgacttctccgctgatcacattcttgatgaacgagctgcacctgggtgaaagagaagtcgtgaggctgatcctgacagcaccagagcgctacaaggtataccagatttctaagcgcaatggtgggaagcgggagatcgctcagccagcccctgaagtaaaagctgcacagagggccatagtgagggcgtatctgctaagccttcccgtccatccttccgccactgcatacagtcccgggtcatccatcattaagaatgccagtgcgcactctgatgcaggccccatcctgaagtacgacttcaaggatttcttcccatccattactgagaaggcatggatatcatattgcctgagagtgggcctctttagtaaggaggacgccgtcaggtccggccggttgttatttcgtaggcctaaaggggggcggatactgcgactcagcattggtgctccctcatcacctatcgtgtcgaaccttttaatgtacgacttcgatgagcgactctctaaactgttggagggccataagattgtgtatacccgctacgctgacgacttaacattcagtgctccaaggaccggaaacctgctcgaagtccccaaggccatccgcgctgccatgaatagcatgagccaccccaaacttgcacttaatagccaaaaaaccgttctcgtgaccaagcgctaccaacggaatattaccggactgatcctgactctagatgggaacatctctgttggtcggagcagaaagcggctgatacgtgctggcattgatcattttatcagaggcaagctcgacgttgaccagacagtgaaattggcgggcattattgcctttacgaaaggagtggagccaaccttttttgccaaactcacgactagatatggaaacgacgtcatgggaaagatcatggcctccacaaaagattataaacgcccgaggcctgaaacagtgaaccgaaccaaaagaagatga

SEQ ID NO: 11702 - RNA, 957 nt, synthetic construct
  source 1..957: mol_type = other RNA
atgacttcaaagctgattgaattccttgtgagcgaggttggattgagcgcaaggaacattgagaggctgatccaaactgctcctgagcgatacaaagtctatcatatccgtaagagaagcggcggatggcgagagattgcccagcctgccactgaactgaaaattgttcagcgtgccatagtcgagaagtacctgaaacatttgcccattcacccagcggcaacggcttatgtcccgggaagtagcatcagacggaacgctgctatccactccgtgaatggcccaatcctgaagtatgacttcaaggagttcttcccatcaattaccgaacgggcctggttacgctactgcgaaattcatggcatatttgatcgagttgaagcaatacagttcggcagactgctctttcgcaggcctcacggtgggacgattctccggctctctatcggggctccctccagtcccatcctgtctaatgtgctgatgtacgagtttgacaaaatgttgcacgagagggtggcacagcatagcgttacatatacaaggtacgccgatgacctgaccttttctgcaagaaggaccggatatcttaactctgtgaatcggatcctacgcagtaccatatcccaggtgcaacttccaaaaatcaagattaacgaggagaaaactgtggtcgccacagaaaagtataggcggcaagtgacaggcctgatcctcaccaacgacaaacgcgtctcactaggtcgggaacgcaagagaaatctcagggcggccctccaccacttcagagaggggaaactggatatcgatcagtccgtgaagttggccggtctgatggcctttgctagagacgtagagcccgaattttacacccgtatggaactcacatacgggaaagatcttttatcgcagctgaagtatttagtaaagggctaccggcgccctgagtaccgatga

SEQ ID NO: 11703 - RNA, 951 nt, synthetic construct
  source 1..951: mol_type = other RNA
atgtctgcactgatttccgtgctgcagcagtccctcggcatagatgctatgagtgtgagacgtatcatcgcaactgcccctgaacgatataaggtatacagtattccgaaacgcgggggagcgggacgcaggataatcgcacagccagccaaagaagttaaagctctccagagaatcctgctgaaaaccttcctctcagacctgcctgtgcacccatctgctttcgcttacgtccctggtaaatccatcaggactaatgccgtcacccatgtggcgaatggccccattcttaagatggacttccagaactttttcccttccatccgatcttacgactggctatcgtattgccacgacaacggggtgtttgacagcgaagccgacgcgcgtatggcttctaaaatactgtttagaagggagaaaggcgagtcaatcttgagactcagcattggggcccccagcagtccccatgtttcaaacttgttaatgtacgaattcgaccgcgcaattagtgataaggtcgccgaagattacgtgacttacactcgttatgccgacgatctaaccttttcagcagaacggacgggctatctgacacgggtggagaaggatgtcaggaagacactcagagatttgcggtatccacggttattcatcaacgaccggaagacagtcctggccacaacgaaataccgccgagaggtgacaggcctgattcttaccaatgaccaccgcgtgtctctgggaagacataagaaacgcctccttagggcccaaattcacagatacagcaagggtgagttgaataacatcgcaaccgccaagcttgccggaaacatggctttcgcttccgacgtagagcccaccttttatacccgaatggagagggtgtttactaaggaggttatggataggctgaaggatagcgttaatcggcaagatcagagctga

SEQ ID NO: 11704 - RNA, 945 nt, synthetic construct
  source 1..945: mol_type = other RNA
atgagtaggctgctggctgtgcttacggaggccaccggcctgtctggttacgacctggcacgggtaatcgccacagccccgcacagatacaaacaatttacaatcccaaagaggcaagggggaacccgccttatagctcagcctgcgagggaagtcaaagctatgcagcgtgccatcgtgagagcctatctcagcgatctacccatccaccccgcagtaactgcttacgaaccgggcacttccattagggagaacgcctcgcgccatgccaccaatgggccaattctcaaactcgatattgccgactttttcccttctatcagagcagatgatttcctgtcatactgcgccgagcatagcttgtttgatgatgagtccgaaaggatcgcggccaccaaaatattattccatcgacctaaaggcgctagggtgctccgcctggcaataggtgctccctcctcaccccatattagcaacctgttgatgtatcatttcgacagagcagtcgctagtgaggtcggggaccagttcgttacatatactcggtatgctgacgacctgacattttcagcaaagcgcacgggttatctgaatccagttgagaagatcgtgagaaaagtgttacgggaaattggataccctcggcttaagctgaacgacagcaagaaggtggtggctactaagaaatatcaccgccaggttaccggccttgtcttgagtaatgacgggcgcgtgtctttaggccgtaaacgaaagagggaactacgagcagcgctccaccactttgccggcggaaagctggagcccaaggcacagaagcacttgcacgggatgatggcttttgccaaagacgccgagccagatttctacgccagaatgcaggcccggtacggaagaaacgtcttcgaagcactgtccgaagccctccgggaggcggatgagtga

SEQ ID NO: 11705 - RNA, 999 nt, synthetic construct
  source 1..999: mol_type = other RNA
atgagcgaactgctcccagtgctgattggggcaacgggtctgtccgatagcgatatccgaagaatcgttagcaatgcccccagtcggtacaagcattttactattaagaagaggaacgggaaggatagacatatctcacaaccgtctagggagctgaaagctctccagcgcgcactgatggaattcaagttgtcacaattgcccgtccatccagccgcaatggcctataagcacgatgtgtctatcctggagaatgctacagcacacgctggaaatggccctattcttaaatacgacttcgtggacttctttccttcgattaggtccaaggactggcagaggtactgcgattattactccattttcgaaaaaagtgaggacaaatggatctctgagcggatcctgttccagagagacaaaggatcgcgcattcttaaactaagcataggggccccgagttctcctatcctgagcaacatcataatgaatgagttcgacacagtgatttcccaaaaggtcgcctctgataacgtcgtgtacaccagatacgcggacgacattaccttttcagctcctcgggtagggtatctcaaccgaatcgaccgcatcatccgcaggaccattaaggaagtcccctggccccgattaaagataaacgaggaaaagactgttctcgcgactagtaaataccgtaggcaggtcaccggactcgtgctggcaaacgatggaagcgtgagcatcggtcgtgatagaaaacggtccgttcgcgccgcgcttcatagagcccagcacgatcggctgacagaccaggaaaccgcctatctgtgtggcatgttggcttttataaattccgtggagccagagtttttagcccggatggagaatcactatggcgtagaattgctacagcgccttagacgtcacgcctctattggtagaaggccaacagaacggtcaagggctaaaggcgaggacctccgaatcgatggctccgactga

SEQ ID NO: 11706 - RNA, 945 nt, synthetic construct
  source 1..945: mol_type = other RNA
atgagcaagctgatatccattctgatcgagtctaccggtctgactgagagagacgttatgaaaatcatctctaatgcacctcggaggtataaacacttcaggatcaagaagcgaaatggatctctcagggatatagcccagccagcaagagaactgaaagccttgcagaaggtcattgtggagaagtacctgctggaacttcctgtgcatcaggccgccatggcataccggaaggggagatctattagagagaacgctctcgcgcacgtggacaacggccctatcctcaaaatggatttcaaggagttctttcccagcattcgggtccgagactggcaagcttactgcgaggatagaagtctttttatggatggggatgaccttcatcacacctccaaaatcctgtttcaccaatcgaagggtgagagctatctgaagctggccatcggagcccccagtagcccacacttgtccaacctgttaatgtacaaatttgacgcacttgtttcacagctcgtccagaaagactacgtggcctacacgaggtatgctgacgatctgactttctcagctaagaggacaggatatctgaccggcgtggaaaaagctgtccgccgtgctataaaagaggtgccctggcctcggctctccattaatgaaaacaaaacagtagtggctactccacgatatcatcgccaggtgaccggactcgtattgacaaacgatcaggaggtgagcttagggcgcgaccgcaagaggaaaatttcagccgcagtgcaccatgcgaagcatggcgaattgaccgtagaagccgccgcgcgtttatccggcacactggcattcgttaatagtgtcgaacccgaatttctactcagactggagcggaagtacggccgcgaggttatcgacaatctaaaacaattcccgtggaagttggagaagtga

SEQ ID NO: 11707 - RNA, 975 nt, synthetic construct
  source 1..975: mol_type = other RNA
atgtctgagattcttaaggccctgtcaactgccacaggattgagtgaccgcgacctcagagcgataatcagcaattcccccgaccgctataaggtttatagcatcgctaaacgaaggggcggtcgccgggagattgcacaaccagctcgtgaacttaaggttctgcagcgggctctaaatgatatcgtcttgagcaaactgccagtccatcccgcagctatggcctaccgacccggcattggactcaaacagaacgcccaggcccattcccacaacggcccgatcttgaaatttgacttccaggacttctttccttccctgagggctgaagattggcaagaatactgccaccgacataaggtatttaatgacgaagaggatgtggagctcagtagtaagatcatgttcagacggaagaatcgccatagcaccgtgctgaggctcgctatcggtgctccttcctctccaccactgtcaaacatcctgatgtttgactttgacatcgcgatgcaggcatattgtgcctcacagaaggtaacttacaccaggtatgccgatgatattaccttttccgcccagagaaccggtttcctaacgggagtgcctaaagccttagagcgcattgtgaaggatttacgtagcccccggctgaaaatcaaccacgacaagacagttctggcaactaagaagtacaaaaggatggtgacagggcttatactcacaaatgatggctctgtgtccttgggccaacagagaaaacggaacatacgggcaggcgtccacagatggaccttaggggtcctttcgaatgcagacatctgcaggctcgccgggcacctgtctttcgctgaagatattgagcctgcattcattagtagactggccaacaagtacggggcgcaggccattgctgacatcaagcgtgcctacctgcaacagggatcagattctagccagaacccggtgaaaatatga

SEQ ID NO: 11708 - RNA, 951 nt, synthetic construct
  source 1..951: mol_type = other RNA
atgagcgagatccttagggcattgtctgaggccaccgggctgagtgactgggatttacgggctattatatcaaatgcccctgatcgctataaggtgtatcacatagataaacgcaggggcggtcggagagaaattgcacagccagcaagagagctgaaggtcctacagcgggcgctccacgatatcttcttagcgaagcttcccgttcaccctgccgccatggcatataggcctgggatcggcctgcgtcaaaacgccttggctcacagtcataacggacctatcctgaaattcgacttccaagatttctttccctccctgcgcgctgaggattgggaggcatactgccgcagacataacgtgtttataaacgaagaagacgtgaatctcagctccaagattatttttaggaggaaaagccgtcattcttcagtgttcagattggctatcggagccccatcctctcccgctgtgagcaatattctaatgttcgactttgacaaaacggtgcagtcctactgcgagtcacagtctgtcatatacaccagatacgctgatgatctgacatttagtgcccagaggactggctatctgactggagttccgaaagccctggagagaatcatcaaggaccagaagtcgccacggttgaagattaattctgaaaagacagtgctggccaccaagaaatacaaaaggatggttactggacttatcctcaccaacgacggcgacgtcagtctggggcagcttcggaaaagatccatccgcgctggcgtacatcgttggacactcggcggtctgtcaccagcggacacatgtcgcctcgcagggcacctgagctttgccgaagacatcgagccggccttcgtagcacgactcgctcgacgatatggggcccaagccattgctgatattaagaatgcataccggcagagcggtgcgccctga

SEQ ID NO: 11709 - RNA, 948 nt, synthetic construct
  source 1..948: mol_type = other RNA
atgtcggaattgatctccgtgctgagccaggctactgggctgtctgattttgacttgagagcaattatcagcaatgcccctgacagatacaaggtctactatattgcaaagcgcaagggcggacgcagagagatcgcacaacccgccagagaactgaaggttttgcagagggccctcaatgatagcattctgtccaaattgccggtccacccagctgctatggcttaccggcccggcgtgtcacttaggcgtaacgctcaggcccactctcataacggcccaatcctcaaattcgattttcaggacttcttccccagccttcgggcagaggactgggaagactattgcagacgacatggggttttcaaggatgacgaggacatcgagctatccagtaagatcatgtttcgaaggaagaatcgacgctcctctgtattgaggctggccattggtgcgcctagtagccctcttctgtccaatatactgctctttgatttcgacgagaatttagcaaagtattgcgattcacagaagatcacgtacacccgctatgccgatgatctcactttctcagccaagcggactggcttcttaaacggagttgagaagttccttgtgaaactgatcaaagacgcagatcacccacgcataaagctgaacctgaacaaaaccgtgctggcaacaaaaaaatacaagcgtatggtaaccggtctgatcctgaccaacgacggtaaagtgagtctcggccaactgcgcaagaggaatatgcgggccggggtccaccagtggattcttgggaacctctctgaggccgatacatgtcgtctagcgggacatctcgcttttgccgaagacatagaacccgactttgtggccagattaacagtgaaatacggagctcaggtgattgctgagattaaaatggcgtatcggcggagggtcctgtga

SEQ ID NO: 11710 - RNA, 945 nt, synthetic construct
  source 1..945: mol_type = other RNA
atgagcgagctcctgcgtatgctgagcgaggatacaggactaagcgaaatcgacttacgcaccattatcgccactgctcccaatcgttacaagacttacgagatagacaagcgcaggggcggaaaacgcgaaatttcgcagcctgccagagaactcaaagtcttgcagcgggccatggtacagaggattttaagcggtttagccatacacagtgccgccatggcataccggccaggaatatccatcagaaacaatgcagcatatcacgcgggggacgggcccatcttgaagtttgacttcaaagactttttcccgaacattcaagccgttgattgggaaaagtattgcgagaagcactcaatttttgaccatcaggaggacgtgaagctctctagtcgaatcctctttcggaagtcatctcgatattctcccgtactgagacttgctattggagcccctagttccccaatgctcagcaatatcttgatgttcgaatttgatgagtacatgcagtcatacgcggaaagtcaaaaagctaagtataccaggtacgccgatgatttgacattttccgcaccccgaacaggctatctgaacggtgtggagaaagtgctgaggcaagccatacataagattaaaaaccctaagctgcagcttaacgaagataaaacggtccttgcaactcggaagtacaagagaatggtcacaggcctgatcctggctaacgatggttccgtgtccctgggccaccagcgcaagagaaatatgaggagcgcggtgcatcactggctgctggggaagctgtcaagcgctgagcaggcaaatctcgctggccttctcgccttcgcagaggatgtggagccatccttcgttttcgctctggctcggaaatatgggacctctaccctgaaagacatcaaaaaactagccgacatcgaatcttga

SEQ ID NO: 11711 - RNA, 1026 nt, synthetic construct
  source 1..1026: mol_type = other RNA
atgccacagagctcgaagcagctgaaaggatgcaatgtctccgacgtggtccaagccctggtcgctgcaagcggactctctgagagggacgtgcggactattatcgcaactgctcccagccgatacaagacatactccatcccgaaacgcagaggtggagagaggattatctctcagcctgcgcgcgaggttaaatttttgcagcggattatcgtagaggagatcctctcccgcctccctgttcacgacgctgccatggcctatagagagggtcgctccatacgcgataatgccgcagttcacgccggtggcggggcaattctaaagttcgatttcgccgactttttcccaagtattaaggccgatgattgggctgcctactgtcggcggcactcagtgttcaaggatgtggacgatattcggctgagtgctaatctgttgttcagaagaacaaaatatgggagtgtactgcgtcttgcgatcggggcaccctcctcaccccatctgagcaacatcttaatgcgagagtttgaccagagggtaacagaagcggtggccaaggagaaggtgaaatacacgcgctacgccgacgacctaacctttagcgctaaaagggcgcacaacctcataggcatagaacgtgtcttaagaaggattatcagagaggtcgcttcacctcatctcagactgaatgaagataagaccgtgctggccaccaggaaatatcgccgagttgtgacaggactcgtgcttgccgacgacggcaaggtttctctgggccgagatcgaaagcgggatataagggctgctttgcaccattacgcactggggcaattaaacggccacgaaactgcaaggctttctggcttgctggcctttgtcaacgccattgaacccgagttcctggaacggctggtggacaaatatgggccagctgtgatcgagcgtattaaggcccggcttcctcccaccgcaaactgccagcagccacatgatccgatcatcgaattcaaatttagagaatga

SEQ ID NO: 11712 - RNA, 909 nt, synthetic construct
  source 1..909: mol_type = other RNA
atgtcggaatcagacgtcaggttgattgtcctgacagcaccttctagatacaagacctatacgattcccaagaggaacggaggggagaggattatctcccaaccggccagagaggtgaaattcttgcagagagtgctggtcaatgacgttctcagccagctacccgttcattctgctgccatggcctatcgcgagggacgcagcattaaagacaatgctgctgctcatgctggcggcggtgcaatcctcaaattcgatttctccgattttttcccttcaatagtggcctcagactggcgggcctattgcgagcgccatggggtgttcgataacgaagaggatattcggctcaccgccaaccttctgtttcaccgtacaaaacgatcaagtaagctgagactggcgataggggcgccctcttccccaacccttagcaatgtgctgatgtttgactttgatcagtgtatcgcgggcttagtggctaaggacaaagtccgatacactagatacgcagatgacatgacttttagttccaaaagggccgggaacctcagcaatgtggagcgggtgctgcggaaggtattgaaggatctcgttagcccaaggttgagaataaatgagaagaaaactgtgctcgccacaaagaaataccggcgcgtagtgacaggactggtgcttagcgacgatggtaaggtcagtctcggccgcgacaggaagaggatcatccgtgcaatgctgcaccactacaccctgggtcgattaaacggcgaggaaaccgctagattatccggactgctggcatttgtgaacgccgtcgaacctatgttcctgaagcggcttatcgataactatggcgttgaaatcgtagaccgcctgaaagccagtctacacccaaattctattttctga

SEQ ID NO: 11713 - RNA, 1014 nt, synthetic construct
  source 1..1014: mol_type = other RNA
atgagcaaactgctcccactactcgttgcaggtacaggcctgagtgaacctgatatcattcgtattgtgtctaacgctccccttcgatacaagagttacaggatcccgaaaagacgcgggggcaatcggacgatctcccaacctgcacgcgaactgaaggtgttacagcggatactgaccgaagagttcttgtccaagctgcctgttcatcagagtgccacagcgtatcgggccggcacctcaatcaagcataatgcattggctcatgccctcaatggacccatcctgaagtttgactttgccaacttcttcccatccattggcgcgcgagactggactgtctattgcgaacgtgagggattaatgctggaggcccgcgatatttggatctcctcgaacatattctttcacagatggagcagacaagggagactctcccttgctattggggctccttccagcccctgtttatctaatgtcttgatgaatgagttcgacgaaaaaatcgccaacgcagtcgcctcagaccaggtcacctacaccagatatgctgacgacctcgctttcagcgcaaaaagaacgggctacctgaaccaggtggaaaaaatactgcgcaggacaatcaaagagatcaagtttccaaatttgactctcaatgaaagcaagactatactagcgaccaagaaatacaagcgcttcgtgactggactgaccctaacaaacgatgggaaagtgtctttggggagggagaggaaaaggaagatccgggccgctcttaagcactatgccgatgaccggctcaacattcacgagcaggccaagctcgccggcctgattagcttcgctcacgacgtggagcgagattttgtacttcggatggagaggacatacgggtctgaactgcttcaggcactgaagctggttcgcctgccctctactcgtggtggcggtggaggtggagtggagtttgacagtgatgtatcagatgcatcagaccccgacgatgatttttga

SEQ ID NO: 11714 - RNA, 957 nt, synthetic construct
  source 1..957: mol_type = other RNA
atgagcaaactcctgccactcttcattagcgacactggcctttcagaacatgatgtgctaagaatcgtgcgagacgcacctatccggtacaaaacataccggatcccgaagagaaccgaaggtactcgtgttatttcccagcccgctagggaacttaaggctttgcagcgaatcttgactgcagagctgttgtccaaattaccagttcatcccgctgctactgcataccgccccggagtgagtatccgagcaaatgcggcagctcacgccccaaacgggcctatcctgaagtacgactttaaggatttctttccttccattacctcaaaggactggcgcaactattgcgaaaacaaccatgtctttgacaacgatgaggacctgtggatatcaaccaatatcctgttccagaaaagacgcggggaaagccgtctgacactggcgatcggcgcaccatccagtccgtcgattagcaatattctgatgcgggatttcgattctacagtcagcgccctcgtggccaaggattatgtcacctacaccaggtatgccgatgacctcactttttctgctcgcaggaccggatatttgacggttgtggacaaaatcctgaagaagactctcagggacatgaaatctccttcccttacactgaatcccagtaaaaccgcgattgccaccacaaaatataagcggtttgtgacgggattggtgttaaccaatgatggcgccgtgagtctcggtcacgacagaaagaggaaaattcgggccacggtccaccacgtaacacttgggaagctgtcagagaggcagttagccgagctggctgggatgctggcctttgtaaacgatgtcgagccccaattcctagccaagctggagcgcacatacggcgtggacctcatacaaaagataaagactggcagaggatctagcaaaaatttcgatcttgactga

SEQ ID NO: 11715 - RNA, 957 nt, synthetic construct
  source 1..957: mol_type = other RNA
atgtccaagatcatccagattctcatggaggagacagcgctcaatgagccagctcttcgcaggatcatttacactgcaccttccaggtataagaccttttatattcccaagcgcaatggtaaaaacagacggatcgagcaacccgcgcgtgaattgaaggcaatccagcgggtgctggtgcagaagcttcttagtacattgccagtccatccgagtgccactgcctatcgaccaggcctcagcgtccgtgataatgccgcccgacatgctcacaatggtcccgttcttaaattcgacttcgaagactttttccctagcatccgcgcaagagactggagggtatattgcgagaaaaaagggctgctcgaaactgaggaggatatttacctgacccagcagatttttttccggagggagaaaggatcaagcgtcctgcggttggctataggcgctcctagctcgcctgcattgtccaacatcctgatgtgggacatcgacgccgcaatcgctgagatgatagatggcgaacaggtttcttacacgagatacgccgatgatctgacgttttcagccagaagaactggttatctcaatgggatcgagaaggggctacgtgctattctgagatctgcagggggcccgaggctcaagataaacgaagaaaagaccgtcctggcgaccaagaaattcagacgacaggtgacaggcctgatactggccaacgacggacacgtgtctttgggacgggataagaagcgccttattcgggccgctgtgcaccgcgagacattaggcttactcgaaacctctgagcgagagcaactggccggaatgctggcgtacgtgaacgtagcagaacctttatttctagctcgcctgaagaaaaagtacggagttgaagccattgaggagctgaaaaaagccgtgaggcccgggaacgaaccagaaaggccctga

SEQ ID NO: 11716 - RNA, 915 nt, synthetic construct
  source 1..915: mol_type = other RNA
atgattgaacatacagggctcagcagaagtgatattctgtcgatcgcccgaaacgcaccgcagaggtacaaaacttacacgatcagcaagagaaatggaggcaaaaggaccatttcacaacctgctcgagaagtgaaggtgctgcagaagatcttgctggaacatgttctttataagctgcccgtccactcagccgcaactgcttacaggcaggggatcagcctgaaggaaaatgccaccaggcacgtgcacaatgagtctattaagaagtttgacttcaaggacttctttccctccatcaaaggccgggactggatcaaatactgcggagatcacggagttttcgccgataccgtagacgtcggactatctactcatatactgtttcaccagccagccaatagtaccatactcagattagcaataggcgccccatcctcacccgctctgagtaacgtgttaatgttcgagttcgataagatcatcacagacgaggtggcaaaggatgaggtgatttatacacgctatgccgacgatcttacattttccgcctctcgcatgtggaacatgatagacgtgcctaaggtgatcgcgagggcaatcaaaaataaccattatcctcgtctgaacatcaatccagacaagacgatttctgccaccaaaaaatataaacggcaggttaccgggcttattctgactaacgatggtaaagtaagcttgggccgcaagcgcaaaagagaaatcagagctgaggtccatcgagcgttgattggccagctcacaaatgaccaactgatgcacgtccaggggatactagctttcgttgaggacgtcgagcccgattacctccgtcggctggaatcctactacggtgctgagtttattaggaacctccggaagcgcgtgcgggagtga

SEQ ID NO: 11717 - RNA, 936 nt, synthetic construct
  source 1..936: mol_type = other RNA
atgagcaaaatcatcaggctcctgactgctgagactggccttccaacgcacgatgtgcgggcaataattaatcgagcccccatctcctataagcactacaccattaaaaagaggtctggggccgatagaccaatcgcacagcccgccagagaggtgaagcgtttacagaagatactgatggggttcctcagcgatctccctgtgcattcagccgccacagcatatgcacctggcgcttctatcaaagataacgcggaaagacacgcgaagaacggtcctatactgaagttcgacttcacgaatttcttcacatcaatcagggagagagactggaagaactactgcgctaaatacaatctctttgacgatcccgacgatgtgactttatcgaccaaactgtttttctgtcgtgtaccaggcagtaccctgttgcgcctagctattggcgccccgtcctctccatggctgagcaatgtcctgatgtacgaattcgacgatttgattagtcggcgggtcaggcaggaccaagtgacctacacaagatatgcagatgacctgactttctccgccaggcggaccggttatctcaccagggttgagaaaatcctgaacagaactctctccgagatggagaacccccgccttaccctaaaccaggagaaaaccgtgctggccactatgaagtaccggagggttgtgacaggattagtactggctaatgacgggcgcgtcacattgggaagagagcggaagcgacgcattcgagccgcgctgcatagcgcttttgctggaaagcttgacgcagaagccatgacacgcctggcgggaatgctcgcctttgtgaagagtgttgagcctgaattttttgaacaaattgctgcccgctatggcgaaaatgtcatcagcaaacttgcagggtcacagtctcagttgtga

SEQ ID NO: 11718 - RNA, 930 nt, synthetic construct
  source 1..930: mol_type = other RNA
atgggtcatttgatagaacagttagcctccggctcaggtttactcgaaaatgatgtacgcaaaattgtggccaccgcacatcggaggtataaacattacacaatcaagaagcgcaacggggaggatcggccaatctctcaacctgccaaagaggtcaagctcctccagcgtctgtttcagaagcagttcctgcaaaacctcccagtgcaccccagcgctacagcttatgagaaaggtctgtccatcaaagaaaacgccggacggcacatgcataatgggcccattctaaaactggactttaagaacttcttccctagcatcaaggcttcggactgggttgcttacactgaggcgcacggcctcctggacgaccttgaagaccgcgaactgtccgcgcggttgctattcaagagcacccgaacgagtgccggaatgcgcctggctattggggcacccactagccctcacatttcaaaccttctcatgtacgacttcgaccgcctaatggctgagcgagccgctagagagatggtgacctatacaagatacgccgatgatcttactttttctgcaaagagaactggctacctgcagcccatagagaaaatcgtgaggaccacattgagagaaataaatagaccgcgattgactctgaatgatgagaagaccgtctttgcaaccaccaagtatcgtagggttgtgacaggactcacgctgacaaatgatgggaccattagtatcggaagagagaggaaaaaacttattagggccatgatccaccactacgagaagggcttactggacgccgagaacctgaggaagctggtgggccttctggcatttgcgaatgacgccgaaccagccttcgtcctgcggatgaagctgaaatatggcgagaagttgatggcagaaatcctggatctctcttga

SEQ ID NO: 11719 - RNA, 951 nt, synthetic construct
  source 1..951: mol_type = other RNA
atgtccaaactgattcggctcttgagtatccagaccggcttgaccgagcaagatgtagaacggatcataaatcgcgcgcctgacacctataaatcttatacgatccccaagcgtaatgggaaagggaacagagtgatcagtcagcccgcccgggaagtcaaggttctgcagcgggttctcaccgaaagactccgttcacttcctattcatgatgccgcgatggcttacaggaaaggcatctccatccgtgctaacgccctaaagcacgcacagaacgggccgatacgaaagtacgactttgagagtttcttcccgtctataaagggacttgattgggaacagtattgtcttcaaaaccccgttttttcagaccccgaggatattctgaggtcaatcaacttgttttttcacagggcaaaacgacataacgtcttacgcctggcaatcggtgccccttcctcgccatggcttagcaatgtggtgatgttcgagtttgatgacgcggtaagcagagcagtggcaaaggatcgcgtcacttacaccaggtatgccgacgacctaactttttccgccccccggacaggtcacctgactgttgtggacgatattgtcagaaaggctatccgcaatattcagtgcccacgcctcaagctgaatgaagccaaaactacggtcgccacaaagaagtacagaagggtggtcacaggactgatcctggctgacgacggcgaagtgtctattgggcgggataagaaaagactggtgcgcgccgaggttcatcacgctctgacaataggcgtgggttgggagaaggccgacaaactgctcggctacattgcacatgtgagaagcgtggagcctagcttctactacaggttattggcccactatggagaggatttcgaggctcgagtaagggctaaaaatggaccaccagtgttcgacctctga

SEQ ID NO: 11720 - RNA, 942 nt, synthetic construct
  source 1..942: mol_type = other RNA
atgagtgatctgatcaaacatctgtcttccgagactggcttaagcgatgctgatgtggagcggattatagccagggcacccagatcttacaagttctataccatcgacaagcgcacaagggggaaacgactcataagtcagcccgcacgagaggttaaagcacttcagcgcgccctggtcaaataccttgatgccttgccaatccacgaaagcgccaccgcgtatagaaagggtaagagcatactcgataatgccgcacctcatagtcaatccggccccatcaaaaagtacgacttcaaggactttttccactctatcagggctcgcgactgggaaacatattgcgctgaaaagggagtgttcgaggaccaagaggatgttgcactaacggcccgattgatgtttcacgtgaccccaggatcctccatcttacgtctggcgatgggcgctccctcaagcccttggctgtcgaatgtattgctgcacgatttcgacaagcgcctcgccgacgagcttgcaaaggagaagattatctacacacggtatgccgatgacctgaccttctcagcacctcggactggccacctcaactcagtcgatggtattctgaaggacattatacgggacacggatgccccagagctgactattaacgctctgaagaccgtggtagccactaccaaatatagacggaccgtgacagggttggttcttgcgaatgacggcagagtcacaattgggagggatcgcaaaagatacatcaggtctgcgatttaccatgctctgaagggagccaatactgctgaagaaaatcagatgctgctcggttacatcgcctttattgggtccgtggagccggactttgtggaaaaactcaaagccaaatatggacctaactttgtcgaacgtctaagcgaggctcatatcgctaacaaccagtga

SEQ ID NO: 11721 - RNA, 1017 nt, synthetic construct
  source 1..1017: mol_type = other RNA
atgatgaaagagcacctggtcaccgagggagagcccgctgtgaggttccctgacgtgcttcagatcttatctgaggaaaccggcttgctcatttccgacattcgccacataatctcctcagccgaggtgagctacaaaacatacactataccaaagcgatccggagggatgagagtgatttctcagccgtcccggcaggttaagattttgcagcaggcgattatcaatcggattctgctcaacctgcctatccacgaaagcgcaacagcctaccgaaagggtaagtcaatactggacaatgctcatccccaccaaggggcagggcgcacaattctgaaaatcgatttcagccagttctttccatccattaaatcggccgattgggtacatttctgcaagaaaaacaagcttatgaacgacatcgatcaatattacacgagcaagattctctttaagaaagaacccaatatgaggggactcagacttgccatcggtgctcctagttcccccttgatcagcaatatcttaatgtacgatttcgacaacgccgtcaatgagttaattgttagcgaagaggtggtctatacacggtatgcggacgatctgaccttttctgcccctcgtacgggctatctcgttgatgtagagagtaagctccgcaagatcatcagaaagaacgtccacccaaggcttaaaattaatgaagagaagaccgtttacgcaacttcgaaatatcgcaggagcgtgactggcataatcctgactaacaacggtaatacctccattggccggcaaaagaagagaataatctctagttgtgtgcatcatgctaaatgcggactactgtcagcagaggacctgaagaagctgagtggctacctggcctatatctcttcagtggagccagactttctgcagtacctgcgtaagaagtatggcgatgaaatcatcgaattgctcaaaaaaatcgggaatccgaacaccaaagtcgaactaattcccaaaatatctgtgtga

SEQ ID NO: 11722 - RNA, 993 nt, synthetic construct
  source 1..993: mol_type = other RNA
atgtccgaagagaattttgtcactgcccaggagtacaggtttgacaatatcctgcaaattttgagcgaggagacaggcctgctgttgaacgacattaactacatcatttcatccgcacccaagagttataagacctataacataccgaaacgaagtggagggacccgcaccatatcccagccggctaggcaggtcaaaatcctacagaaagccctcattaagaacgtgctccttaatttaccagttcaccccgcagcgactgcttatcagaagggcaagtctattttaaacaatgctcagccccatcagggagagggacggagtatcttgaagattgacttcagcgagttctttccatcaatcaaacacttcgattggatagactattgcaagaaaaatcgaattctgaatgagcaggaccaacattacacgtcgaggatcctgttcaagaaagaagtggggatgcggggcctacggttagcaataggcgccccttcaagcccactcctcagcaacatcctgatgttcgactttgattccgccgtgaacgatctgatcgtaacggacaaaatagcttacacaagatatgcagacgatttgacctttagcgcaccaagggcgggatattttggggaaatcgaaaaaaagcttcgcaccatcatcagaggtatgtcccaccctaagctgaagatcaaagaagagaagactgtccgcgccacacccaaattcaaaaggagtgtgaccggcctgattctgacaaaccaaggcaagacttccatcggtcgtgataaaaaacgcattatctctgcctctgttcaccacgccaagaacaacaatctcagccaagaacagatgaagaaactgtctggttacctcgcttacattaagtcaattgagcctagcttccttgactatcttagaagaaagtacggagaagccatcatggattctctgcggaagatggggcatcctgattaccgtgtggagaattga

SEQ ID NO: 11723 - RNA, 1011 nt, synthetic construct
  source 1..1011: mol_type = other RNA
atgaaaaatcaggcaccccactctattactgatcgctttaataggagcgctatcgaaaactttgatctgatccagattctgtcagaggaaacggggtttctctcatctgacattaagcgtataattcactccgctccaaaatcctacaagacttacgaaatccctaagcggacaggggggaaaagaattatctctcaaccagcaagagaggtgaagattctgcaaagagtgatcatagagaaggtcctatctcatttgcctattcaccagttcgccacagcctacagaccgggcatatcaatcctcaataacgctcttcctcataagggggctggtaggagcattctaaaaatggacttcgagaactttttccccagcatcaaatctcatgattggataacctattgcgaagaacttgagattttatccaacgaggatcgcgctctcacagcatccctctttttcaagtcccagccacccaaacgaggactccgtttggccatcggtgcgccaagttcaccgatcctgtcaaatatcctcatgtatgaattcgacaagaaaatcgagaaagagatttacggcaaagagattatctataccaggtatgccgacgacctgacctttagtagtgagaggacaggctacctgctggatgtccgatcgatcgttcggaaggcactgatggagattaagtaccccaagctgaagatcaacaaggaaaaaaccaagtacttcactagtaagtatcgccggagtgtgactggcctggttctgaccaatcagggagaggtaagccttggacgggataagaagcgctctataagcgccggtattcacaacgccttgaacggaaaattaaatgacgaggaaatgaaaagcctttccggctatctggcctacgcgaacagcgtggagcctaatttcctgaagaagatgtccgaaaagtatggcgacgacatcatgaagacgttgaaaaaattcgggaaccccgaagtgaatatcaaaatatga

SEQ ID NO: 11724 - RNA, 948 nt, synthetic construct
  source 1..948: mol_type = other RNA
atgtcagaccttatcgcactgtttgtccacgagacagggttaggggagcatgatatacggaaaattgtagcgacagcccccgccaggtacaagacctatgcgatcaaaaagaggaatgggatagatcggaggattattagccaacctgcccgagaactcaaactgttgcagcgcaccctaatcgatgcagttcttaagaacctgcccgtccatcgctcagcaaccgcctacaggacagggatgtcaataatcgacaatgtgcgccctcacattaattccggtgctatcctgaaactcgacttctccgatttcttcccgagtctacgggagtctgactggagagaatattgcgttcgcaacgaaatcttcagatcagaagaagacattgaggtcagtggattagttcttttcaagaaagagaggcagagacgtgagttgaggttaagcattggcgctccatctagccccatcgtatccaacatcctgatgtttgatattgactcggagatcgagtccaagatagtcagtgaggaagtggtgtatacgcggtacgcagacgatatgaccttttccgctagacgaaccggatttctgaacaaggtggagaagaatgtgagagaaatattgaggggaagtcagagcttgcggctgcagcttaatgacgataaaactgtctacgccacaaaaaagtataagcggcaggtgactggactgatcattacgaacgatgccacagtgagcgtgggccgagagcgtaaacgcaacctcatggccgccatccacgctgctctgtccggtaagctcagcggtgaccaagtaagagaaaccctgggcatggtgtcttttgtgattagcgttgaaccagatttcaaaaagagaatcgagcgcaaaaatggcgaggacgctctggccctgctctctaagctcgcatctactaagggcacttga

SEQ ID NO: 11725 - RNA, 933 nt, synthetic construct
  source 1..933: mol_type = other RNA
atgggcagcttgtacgatctgctgaaacgcgagacagccctacctgaccgggacctgcagaagattattgcgactgctccggcccggtacaagacctacaaaatacccaaacgtaattccgaaaagatgagagtgatctctcagcctgctaaagaggtaaaactcatgcaaagagtgctgatgcgggaattcttgtcgaacttccctattcacaaagcagctaccgcttacaagtcaggcagcagcattcgagataatgccgctgcacatgtcgggcgtggacccatcctgaagtttgacttcaaagatttctttccatccattacagagaatgattggagaaaatacgccgagggtcgcggcattgccgaactcgacatcgaaatctcaactaagatcttcttcaaaaaggagttcaacaggagtctgttgaggctctctataggcgcgccatctagccctattcttagcaacatccttatgtttgggatcgacgaacggatctccgcagaaattgcatccgacgaggtgtcatacacgaggtatgccgatgacattacctttagtgcccccaggactggatactttaacggcctggaacggcatttacgcatgatacttcgagagatcgaatatccagctctgaagatcaactctgagaagaccgtgtatgcgacctccaagtttcgccgtcaagtgacagggctggtcctgacaaacgatggtcagatcagtgttggaagggatagaaagcgaaatctgttcgcagccgtacaccatgccttaaatggaagactcaatgacgagcagatcgaggaggttctagggttgatagcctttgttagctcaatagagcacgacttcaaggatcggctcgaaaagaaatatggtcccgaggtggtccgcaggctttatagatgcaagcagaactga

SEQ ID NO: 11726 - RNA, 978 nt, synthetic construct
  source 1..978: mol_type = other RNA
atgatgtcttggatcactaggatgctggccctgcacacgggcttacaagaaagtgccatccatcgcatcatggtgaccgctcctgtgcgatataaaaccttcttcattcccaagcgtaacggtgaattgagacagatttcccagccagcccgcgaggtaaagctggtacaaagggcatttagcgagattatcctgaagaagcttccagtgcacccttgcgcaaccgcttatattgatcggaaatccatcctgcataacgctcaaccacacgccgggcacggccagatcgtgaagatggactttaagaacttcttcccctctattcggagggtggattggatacactactgtcaggaaaacagtatatttgacagccagattgacgccgatttatcctcatcccttttgttccagaaaaacaagaatagcggactaatgaggcttgcgattggtgcaccttcgtcccccattctgagcaatatcctgatgtataatttcgactacctagtgagcaaggccgttcttaaagatcatgttacatacacccggtacgcagacgatatgactttttccgcccctcgtacaggacatctcgttaacgtggtgagaattgtcaaaagtgtctgccgctcactgaattacccccgggtcgagatcaacgagaataagacagtctatgcaactgcaaaatacaagcgagccgtcacaggcttgatactgaccaatgacgggcgggtgaccatcggcagagatcagaaacgcctcatccgcgctatggtgcatcacgctatcaacacaaatttgacgaaggaggccctcgaacgactcgctggaaatctggcgtacattaactctgttgagccggcttttatggaaactctgacaagaaagtatggggccgagaacatccagaggatcaggtgtatatggagaaaagactcacccaaaaatagcacttcaaagaaatctctcacctga

SEQ ID NO: 11727 - RNA, 954 nt, synthetic construct
  source 1..954: mol_type = other RNA
atgtctgaattagtccggaagcttgcccaggaaactggggtgccggaacccttagtccgcgagatcatgctcaccgccccagttcgttacaaggagttccatatcgttaaaaagagcgggggcctaaggaagatctcccagcctgccagagaagtgaaactgcttcaaagaatcgccactaaaatcctgctgaatcaattgccagtgcacccctgcgcaacggcttatcgaattaacagcggtctgctcaataacgttaagccacacgctaagaattcacagatcttgaaactggatcttaaagagtttttcccctcactgcggctcgtggactggtatcagtactgccgccgaaattttatgaacatcagctcggaagacatcacactcgccgggcgcctgttcttcaggaagacccccaaaaaggtaagcctgcggctggcgatcggagctccttcttcccctagtatgagtaatatcttgatgtacgagtttgataccttagtgcacaagtactgtcttacagagaacatagtgtatacacgttatgccgatgacatgacttttagcgcacctagaaccggatatctggtcggcgtgatcaaaaacgtgtctcggattattcgaaagctgaagtctcccaacctggagattaatagtggcaagactgtgtacgcaacacaaaagtataaaaggtccattactggactcatattggccaacaatgggtcaattaccataggtagagacgcaaagcggcttacccgcgccagggtacaccatgctattaaaggcaggctgaccgaagatgagataatcaagctaagtggatacctgagctttattatgtcagttgaaccatccttcgtctacacgttgcaggtcaaatacggcgcgcaccagattaaccagatcctccatgcttccctcacaccgaaagagagaattgagtga

SEQ ID NO: 11728 - RNA, 954 nt, synthetic construct
  source 1..954: mol_type = other RNA
atggatctcctgatcttggagacaggtttaggcgaaagggacgtaagagccatagcagccaccgcacccatccgttacaaaacatacgagattgaaaagaggaatggcgggaagcgtctcattagccaacccgcccgtgagcttaaggccctccagagggtaattgttaatgaagtgctcgataaactgcccgtccacccagctgctactgcgtatcggccaagtctctcaattaaggacaatgcaaagcctcatacggttagcggcgcaatcttgaagctggactttaaggatttctttccgtcactgagagaagtcgattgggagtcatattgcaaacagcacaacattttcgagactccagaagacatccacctaagttcccgcatcctgttccaccgcaaaaagacagcgtctactctgcgattagcaatcggagcgccgagcagtcctaccctctcaaacgttttgatgttcgagctggacacccatatcagcaaactggtcgcctccgacgggattacatacacacggtatgcagatgacatgactttctcggccccccgggcttggaatcttgttggcacccttaggaaagtgcgcaagttgcttcgagatacagcttcccctagactacagcttaacactgataaaacggtgttagtgaccaagaaataccggcgcgtggtgactgggctggtcatctctgacgaccagcgagtgtccctgggacatgaaagaaagagattgctgagagctgccgtgtacaggtttatccaaggcaagctgtctatacgggagcaggctaggctggctgggaacctagcctttgcctatagcattgaaccagagtttatacagcggctggaggataggtacggtacctctaccatcaccgacataaaaagagcccctcgcctcctgcaaagctccggagataatcagaaccgctga

SEQ ID NO: 11729 - RNA, 915 nt, synthetic construct
  source 1..915: mol_type = other RNA
atgaagttatccccctggaaacaaggttggatgtggcatctgtcacgagcactctgtgaagtgcacccactggacatagaaccaatcgcttttccgaacgtgtcgcaacctgccgttgaggtgaaggcactgcaacgggggctgatcgagatcctactgcgcgatttacctatgcatcatgccgccactgcttatagggtggggattagtatcaaagacaatgccatgcgacacgctggaaatgggccaatactgaagatggatttcaaggacttctttccttcaataaagccccgggactggtccgcatattgcaaacggacaggggtcttgagcgacagcgtggacattcatcttacctccctcctccttttccagaggccgaaaggctctagcgttcttcgccttgccatcggagcgcccagctcaccattcttgtccaacgccctcatgtttgattttgatcaggccatcgcagaagcagtggctaaagatcacgtgatctacacgagatacgccgacgacctcactttcagcgcacctagaacaggccacctggtaaacgttgagaaaatagtgagggccactttgagggctctccagtatcccagactaaccgtcaatgatgataagaccacacgtgtcaccagaaagtacggtcgtaaagtaacaggtctgacgctgaccaacgacggcaaaatttctattggccacaagcgcaagaggttgattcacgccgctgtccaccatgcttctctgggcaaactgagtcctgccagtctcggagagctgaagggattacttggcttcgcaaactctgctgagccacagtttatcaataccctgcgacagagatacggggccgcgctgattcagcggatccagacttttgatattcccaagcgcgcgcggtga

SEQ ID NO: 11730 - RNA, 948 nt, synthetic construct
  source 1..948: mol_type = other RNA
atggccgccatcatcgagaggctggctttagccactggaatggacgttggcctggtgggaagagtattacgctccgcgcccgtccggtacaagacataccttattccaaaaagaaccaacggttttagggaaatttcccagcccgcagttgaggtgaaggctctgcagcgaggcctcatcgaaatcctgttgcgggatctgcctgtacacgaagcagccaccgcctatcgcgtgggcatgagtataaaagacaacgcacaacgtcacgccggcaatggccccatcctgaaaatggacttcaaagacttcttcccctctatcaagccgcgagattggatttcatactgcacagaaaccggagtgctgattgaccaaaccgacatccacttgacgactctacttctgttccacaggcccaaggggacatctggcatgcgtctggctataggggccccaagctccccatttttatccaacgccctgatgttcaactttgataaagcgatcgctgaggctgtggccaaggatcatgtcaggtatactaggtacgctgatgacctcacatttagcgcgcctaggactggacatcttgtcaatgtcgagaaaatagtgcggtcggtccttcgcgggctggagtatccgagactgctagtgaatcaggataagaccaccagagtgacgcgaaagtatggacggaaggtgacagggctcaccctcactaatgatggccgcgttagtattggacatgggcggaagcgtcagatccgcgccgcagttcatcacgccagcttgggtaagctggacgaacggtctttggcagagctcaaagggctgctcggctttgctaactcagctgagcctcagttcgtgattaccctcattgagaaatacggtgcagacattatccaccagatacagaaaagcccaaatagacctagaaagatctga

SEQ ID NO: 11731 - RNA, 951 nt, synthetic construct
  source 1..951: mol_type = other RNA
atgatggggaagattgtcgaggccctcgcaatcgaaaccgggatggatgtgggtttggttgaaagaattatgaggagcgcacccgcccgctacaaaacatatcggattcctaagcgaacaaagggctttcgggagatcagtcagcccgcagtagaagtcaaggcactgcaacgcgggctgatagaagtcctgctgaggaaccttccaatgcacgaagccgccactgcctatagagtgggtatgtctattaaggataatgcgctaagacacgctggcgacggtcctatcctcaagatggacttcaaagactttttcccatcgattaagccccgggactggtccgcctattgcaaacagaccggcgtgctgatggaccctgtcgagatacagctgacatcactccttctgtttcagcgtccaaaggatagctcagtgctgaggctcgctataggagccccaagctcacctttcctgtctaacgccttgatgttcgagttcgataaggcaatcaccgaggctgtggctaaagatcatgttgtgtactctagatacgccgacgatctgacttttagtgcgccgcgaaccgggcacctcgtgaatgttgagaaaatcgtgcgcgctaccttacgagccctggaatatccgacgctgacagtgaacgatgacaaaacgacccgggtgactcggaagtacggcaggaaggtaacaggactcactcttactaacgacggcaaagtctccatcggacatgagcgcaaaagattcattcgcgcagcagttcatcacgcctccctgggaaaacttagcacagcttccttaggggaattgaagggtttgctaggctttgctaatagtgcggagccccaattcatcggcaccttaaaggagcgttacggagctgagctcatccagttcattcagacctttgacatccccaaaagggaacagtga

SEQ ID NO: 11732 - RNA, 957 nt, synthetic construct
  source 1..957: mol_type = other RNA
atgtcatccaacatagttaaagcactctctctgcagaccggcatggacgtgctccttgtcgagcgtattatccagactgcccctattagatacaaaacttacaggatccccaaacaggcgggcgggtttagagagataagccaacctgcgattgaggtaaaggcactgcagagagggttgatcgaaatattgttacggaacctgccactacacgaagcagctacagcatataggacaggaatgtctattagggataacgccctacgccatgctggggatggtcccatcctgaaaatggacttcaaggactttttccccagtatccgccctgccgattggtccgcctactgcgagaaaaccggagtcttaactgaagctgacgacgtcaaggcaaccagcctgattctgttccatcgcccaaagggtagtagcatccaccgccttgccataggagccccatcctccccgtttctgagcaatgccctgatgttcgactttgataagctggtgactgatgctgtaggacgcgaccatgtcagatatacaagatacgcagatgatctgacctttagtgctcctcgaaccggccacctggtgaatgtggatcgaatcgtgcgggccgccattaaatctatcgatagaccgcgcctcaaaattaacgacgacaagacgacccgggttacacggaagtatggcaggaaggttactggtcttacactcaccaatgacggctcggtgtctatcggaagagagaggaagaggttgattcacgctgcagtgtatcgtgcgagcaaaggggagctggacttgccatcacttgctgagctcaaggggctgctcggcttcgccaattcagctgagcccgccttcataatgacgttacgggaacgatacggcgatgaagtgattaagtatatccaaaggtaccgtatccctaaacggatcccccagcagtga

SEQ ID NO: 11733 - RNA, 960 nt, synthetic construct
  source 1..960: mol_type = other RNA
atggttgggatcatagagctgcttgctatcaataccgggatggacaccggtttagtcgaaaggataatggtgactgccccagtccggtacaaaacgtattttatcccgaagcggcatggcgggctaaggaagatttcccagccagctctggaggtgaaagtgctccagagagcactgatcgaggtgttactcaacgaactccccgtgcatgacgctgccaccgcatacagaaccggaatgtccataaaggataatgcgctgaggcatgcagggcacggtcctattatgaagatggatttcaaggagttctttccctccattttcgccagagattgggatcagtactgcgagactacagaagtgctgacagagccacgagagatctatctgactacccggcttatgttccagcgcccgcgtgattcatcactgttgaggctggctatcggcgcccctagttcgcctgtactgagcaacgctcttttgtttgagttcgacgaaatgctgacagccgaagtagccaaagaccacgtcgtgtacacccgctatgcggacgatctcacattctctgccccacggacgggacatctcgtgaacgtggaaaaggcagttagaacagtcattaaggcgattcgacgccccaaactcaccatcaacgaggacaaaacacaacggatcactaccaaatttggacgccacgttactggactgacgttaaccaatgatggagaagtcagcgtaggccacgaaaggaagaggcaactgcatgccgcagtgcacagagctctccacggcaaactggacgtcattgagctggggaagttgaaaggcattcttggctttgtgaatagtgccgagcctgagttcattgttactttgcgcaagaaatatggttctaaaatcatagacagcatccagaagacacccgtgcccctacgaccacgtccttttaagaagtga

SEQ ID NO: 11734 - RNA, 960 nt, synthetic construct
  source 1..960: mol_type = other RNA
atggttggaatagtcgaaattttggccatcgaatcagccatggacgtgggcctagtcgagagaatcatcagaacggccccagtcaggtacaagacttatcagatccccaaaagggctggaggcaatcggactattagccaacccgctaaggaggtgaaactgctccagagatctctgattgacgtcctgttgcgaaacctgcctgtgcatgacacggcaacagcctacagagaaggcctatccattaaggacaacgccctcaggcatgccggtgatggccctattctcaagatggacttcaagaatttctttccatcaataactccgttcgattgggcggagtactgcaaagagagcggtaccctcaccgacccgcaggacatccacatgacaagtttacttatgtttcaacggcctaaggggtcgagcgctctgcgtttaggcataggggcgccctcaagccccttcgtgtccaatgctttactgtacgaatttgataaaagggttaccgcggcagtcgcaaaagatcacgtgaaatatacacgctatgccgatgatctgacattttccgcaccacggactggacacctggtgaacgtagagaagatggtgagaagtacgctggagggacttaagtatcccaaacttgccatcaacgacgaaaaaacaacacgagtgacacgcaagtacgggcgcaaagtaactgggttgaccctgactaatgatggccaggtgtctatcgggcacaagcggaagcgtctcctgcatagtcaggtgcacaaggcttctcttaaccagctggacgtggatgaaatggttgctctcaaaggcatgctgggtttcgttaactccgccgagcctcagtttttgaaggtcctcacccgcaggtacggagagggagtactgaccaggattcgacggtttgaaaccgagccagcagggcgcggcaccttcaattga

SEQ ID NO: 11735 - RNA, 951 nt, synthetic construct
  source 1..951: mol_type = other RNA
atggccggcatcatcgagatgttagccattgaaaccgcaatggacacttctctagtggaaaggattatccggaccgcccccatccggtacaaaacatatcagataccgaagcggtctggaggataccggactatctctcaacccgcaaaagaggtgaaactcctgcagcgcgcactgattgacgttctgctgcgcaagttgcctgtacatgataccgcgaccgcttaccgggaaggcctttccattaaggacaacgcacttcgccacgtgggggacggaccaatacttaagatggatttcaaggacttctttccctcaatccgtccaggggactgggccgagtattgcaaagaaactggcgccttgactgacgcacaagatattaagctcacaagtttccttatgtttcagcgccctaaagggagctcgacgctccggttggctattggcgcgcctagcagcccattcgtctccaatgctctcctgtacgattttgacaatagaataaccgccgctgtggccaaagatcatgttagatacacacgatatgctgacgatttgaccttcagcgcgcctaggaccggacacctagtcaatgtggagaaactggtcaggagtactattcatggtcttaagtacccaaaattgatgatcaacgctgagaagacaactcgcattacaaggaagtatggccgaaaggtgacagggctgaccctgacgaacgacggtcaggtatccatcggacacgatcgtaagagactgctccatgcccaggtgcaccgagcctcattaaatcacttagatgccgatgagctgctcaacctgaaagggatgctgggttttgtcaactccgcagaaccccactttctggaggttctgaggagaagatatggcgacgctgtgctcacgaggatccagagatacgaggtcgaaccgccccagaagccttga

SEQ ID NO: 11736 - RNA, 948 nt, synthetic construct
  source 1..948: mol_type = other RNA
atgtcagacatcgtacgcattctcgcaatcgaaacgggcatggagatgtctctggttgagcgaatcatcaggaccgcccccgtgaggtataaaacataccagatccccaagagatcagggggccaccgaaccatttcgcaaccagccagagaggtaaagctactgcagagggcactgatcgaagtgctgctcagacggcttcctgtccatgaggcagctacagcctatagggagggcatgtctattcgggacaatgccctaagacatgtggggggaggaccaatactgaaaatggacttcaaggacttctttccttccatccggccccacgactgggtggaattttgcaaggagacaggagctattagcgatcttgttgacattcagttgactagtctcttgatgttccagcgcccgaagcgttccagcacccttcgcttagccataggtgcgccgtcctctccattcgttagcaacgcactcctgtttgaattcgataagcgaataagcgaggccgtggctaaagatcacgtcatctacaccaggtacgcggatgacctgactttctccgcaccaagaacaggtcacctcgtgaacgtcgaaaaaatggtcagatctaccctccggggcttagggtatcctaagctcacagtaaacaatgaaaaaaccacacgcgtcaccagaaagtacgggcggaaggtgactggactgaccttgactaatgatggcaaggttagtgtgggacacgccaggaaacgccttttgcatgccacggtgcatcgtgctagtcaggataaactgaattcaactgaactgggtgtcctgaagggcatgttaggttttgtgaacagcgtggagcctcaatttatagagaaactgcgcgagaggtacggctccgctctgatcgggcggattcaggcttatgacattcccaagcgtaaatggtga

SEQ ID NO: 11737 - RNA, 957 nt, synthetic construct
  source 1..957: mol_type = other RNA
atgagcattatcgacattctctctttcgaatcagggctcgaggccaccacagttgagagaatcatcaggaacgctcctcttcgctataaaacttaccagatcccgaaacggagcggggggtccagaaccatctcacagcctgcgagagaagttaaagtgttgcagcgagccctgtcggacgtgctactgcgcgttctgcccgtgcatgaggcggctaccgcctacaggcccgaaatgagtataaaagacaatgcattgaggcatgcaggagacggtcccatactcaagatggactttaaggattttttcccatccatcaagccaagggattggacactgtactgcaaagagactggcgccctcacggaccctgtagatgtccgccagaccgcccttctcctgttccaaagaccgaaagggagtgccgtgatgaggcttgccattggagcaccatcctctccattcgtctctaacgctctgctgtacgaatttgacaagcgcattgccgccgaagtcgctcgtgatcacgtgacttatacacggtatgccgatgatttgactttttcagctcctcggacgggttaccttgtcaacgtggaaaagatggtgcgtactactctggcaggcctggaatatcccaagttattgattaacggacaaaagaccacacgcatcacacggaagtacggacgtagggtgaccgggctcaccttaacgaatgatggccgagtttccataggccatgagcggaagagaatcctgcacgctcaggtccactctgcaacaaaggatcttctcgacaatgatcaaatagcggagctgaaaggcatgttaggcttcgtgaatagcgtagagccacagtttctggacgtgctgcggagacgctatggtcacagcattattacctttatccagcgattcgagagtaaccctcccacactggacctattggagtga

SEQ ID NO: 11738 - RNA, 1071 nt, synthetic construct
  source 1..1071: mol_type = other RNA
atggccggagacggcaataggttgctagagcgggagcgaccaggccaggtgcagcaacaccctagcgggtttgagggtcgcaatgccatgagtggcatcatcgagacactcgctgttgagacagggatcgagcctgggctcgtggatagaatcgtgagaaccgctccgtctcggtacaaaacctatcccatcgataagaggggaggcggcactcgcttgatttctcagcctgcgaaagaagtgaagattcttcagcgcgcactgaacgatgtattgcttaaacacttacccgtgcatgcctccgcaaccgcctatagggaatccctgtcaattagagagaacgccctgccacatgctggaatcggacccatactcaagctcgactttgcggagttcttcccctctataaaacttcacgattggaaaaagtactgcgaaaagacaggatgcctgacggacgtgcacgacgtagagatgagcggcagactgatctttcaccgacctaagggccggagtaccctgcaactggcgattggctcaccgtgtagccccttcgtctccaacgctctgatgcacgagtttgattttctggttgtcgaagccgtagcagctgataaggtggtttacacccgttacgctgacgacctgacattctccgcccctaggctgggacatttacgggacgtcgaaaagattgttagacgaatcctccgtggtctttcatttccacgcttgaggctcaatatcaacaaaactacctatgtcactagtaaattcggcaggcgggtcacagggctgactctgacgaatgctggtggtgtcagcattgggcacgcccgaaaacggaagttgcataccgccgtgtaccgtgccagccagaataacctcaacgcagacgaactagcagagcttaaggggatgttagggttcgcacattcggtggagcccgaatttatagaaattctgaggcggcgcttcggaaatgatatcgtgtccttcatccagtcttatccaatagagcgcaagagatcagccaaagtgattgctgtggaaccagacgaaactagatga

SEQ ID NO: 11739 - RNA, 984 nt, synthetic construct
  source 1..984: mol_type = other RNA
atgaccaacctgctaaggagcatggctatcgagacaggcctcagtgaagtcatcgtgcaaagaataatgcagtctgcccccaaccgctataagcactactcaattgagaaacggtctggtggcaaacgtctgatatcccagccggccatcgaggttaagctgctgcagcgcgcctttgtcagtctttacctgagcaaactccccgttcacgcggccgctatcgcatatcgccccaataaatccattctggacaatgccctccctcatgtgtccagtggctctattctaaagatggacttcaaggatttcttcccatccatccgcaaggctcactggatgaactattgcgccgagttcggaatctttgaaactcagagtgaacgggagttggcagctagcctgctcttccaccggccaaaaggaagcagcgtcatgcagctggcaattggcgcccctagctcacctaccttgtcaaacgtgctgatgtacaagttcgatgagataatctcttctgaggtggctactgataaagtcatatacacaaggtatgcagacgacctcaccttttccgccgatagaagttggaatttggtggacgtggaacgaatcgtaaaaaagactctccagaacatttcttacccaaaacttcagctccatccttccaagacgatccacgtaaccaagaagttctcaaggagcgtgaccgggctgatcctggcaaacgacggcagagttacaatcggtaagaaacggaagaggattatccacgctgcaacacatgccgcatccttaggaagactggatgaccgtcagcttcaaaaacttgccgggatgctggcttttgtgcattcggtggaaccctcatttattgcgttgctggagagaaagtacggttttgagacgattaaagggttacaaaagattggcgcgaatgatcggaggaatttacgagctgccgtcggggaagccgacttcggaacttga

SEQ ID NO: 11740 - RNA, 966 nt, synthetic construct
  source 1..966: mol_type = other RNA
atggtatcgctgctccgggccatggccatcgaaacaggactgagcgaggtggtggtgcagcgaatcatgcagagcgccccgcatcgatacaagcagtacaagattgacaaaagatccgggggcaaaaggctgatctctcaaccagccaccgaggtcaaactgcttcaaagggcatttgtggagctttacctctcaaagctcccggtccacccagcagctatggcatatcgtcctaacttatccattttcgacaacgctacagcccatgcgggttccggatccatcctgaaaatggatttcaaggatttctttcccagcatcagaaaggctaattggatgagttactgcgccgagttttcaatactagagaatcacagtgaacgcgaactcgcagcctcattgctcttccagcgacctagaagcagcaacgccatgcagcttgccattggggcaccatcttcccctgctctgtccaatgtcttgatgttccaatttgacgagataattagtgcgggcgtggccaaggacaaagttatatacaccagatatgctgatgatctgacattcagtgcggacagaagctggaacttggtggatgttgagaagactgtaaaaagggcgctgcgtgaaatcgcttatccccggttacagctacacccagataaaaccactcacgtgacgaagaaattttctcggtctgtgactggcctgatcttagcaaacgacgggcgtgtcacaattggtaagcgccgcaaaagggccatccatgcagctacccatgccgcatcacagggaaggctcgatgatcgccagcttcaaaagctggctggcatgctggcctttgtgcactctgtcgaacccggcttcatcgacgttttggaaaggcggtatggactcgagacgattatgcggctgcagaccattggggctaaggacagacggaatctgcgccctcccgacgcctga

SEQ ID NO: 11741 - RNA, 981 nt, synthetic construct
  source 1..981: mol_type = other RNA
atggcgagttttcttcggacaatggccgttgagactggactgagcgaggtggtggtgcagagaattatgcaatcagctccacatcgctataagcactacgaaatagataagcggtctggaggtaaacggcagatctctcaacctgccaccgaggttaaactgttacagcgcgtgttcgtggaactctacttgagcaaactgcccgtgcatcctgcagccatggcctacctgcccaacaaaagcatccttgacaatgccaatgcacacgccgaagccgggtcaatcctcaagatggactttaaggacttcttcccatccatcaggaaggcctcgtggatgtcctattgcgctgagttttctatcttagagaaccacgcagagcgcgatctggcggctagcctactctttcagaggagcaaaggaagcggcgccatgcaactggcgattggcgcacccagttcccctgctctgtccaacattctgatgttccagttcgacgaagtaatctcgagtgaagtgtccaaggataaggtcgtttataccagatatgcagacgaccttacattctctgccgatagatcatggaatctggtggatgttgaaaaaactgtgaagagggccctccgtgaaatagcttaccccagactacagttgcacccagataagactatccatgtcaccaaaaaattcagtcggaccgtaacgggcctggtactggctaacgacggccgtgtcactattgggaagagaaggaaacgagctattcacgcagctacccattctgcctctctgggtcggctcgatgatagacagatgcagaagttggctggcatgctggcatttgtccactcagtcgagcctgcctttatgggggtgttagagcgccgctacggatccgagacaataatgcgattgcagaccgtggggagccgagacaggaggaaccttcggccgattaatgagacactcgacaagaagtga

SEQ ID NO: 11742 - RNA, 987 nt, synthetic construct
  source 1..987: mol_type = other RNA
atggtgactctcctccgtgccatggccattgaaactgggttgtccgaggtcatcgttcacagaatcatgcaaaccgcgccccaccgttacaagcagtacactatatctaaaaggagcggcgggaaacggctcatatcccagcctgccacagaggtgaaactgctgcagagagcctttgtggacctctacctgagtaagctgccggtgcatccagccgctatggcgtatcggaccagtctctcgataagcgacaatgccaaggcacacgctggatcaggatccatactgaagatggattttcgcgacttctttcccagtatcaggaaggcttcctggatgacctactgtgccgaattttctatcttggacaactcctttgaaagagaactgagcgccagcttgttgttccagcgccctacgggctcacatggaatgcagttagctatcggggcccccagctccccagcattaagcaatttactccttttccagttcgatgagattattagtgccgaagcagctaaagataaggtgaaatataccaggtacgcagatgaccttacattctcagctgatagatcatggaatctagtggacatcgagcgcacagttaaaagggtcctgcgtgagattgcatatccccggctccgcctgaaccctgataagaccatccatgtcacaaaaaagttctgcaggaacgtgacgggcctaatcctggctaacgacggtcgagttaccattgggaaaaagagaaagcgcactattcacgctgcgacccacgccgcatctcaaggtcgcctggacgatcggcagctgcaaaagctgggcgggatgctggcctttgtaaagtctgtggagccagccttccttgacgtccttcgaagacgatatggattcgagactattatgaaactgcagacaatcggcgcaaaggaccggcggaatcttaggcctcagattgatgctgtagagatctctggcggttga

SEQ ID NO: 11743 - RNA, 987 nt, synthetic construct
  source 1..987: mol_type = other RNA
atggtttctctattgcggaccatggccgtggaaaccgggttaagtgaagccgttgtacagcggatcatgcagtcagctcagcaccgctacaagcagtattacattgacaaacggagtggggggaaaagattgatctctcagccagccactgaagtgaaactgctccagagagctttcgtcgatctctacctgagtaagctacccgtgcatcccgccgcaatggcgtaccgtcctggtaggtccattctggataatgccagcgcacacgcagattctggcagcatacttaagatggactttaaggacttctttccatccatccgcaaggcaagctggatggcctattgcgctaatcatagcctttttgactcgcagtctgagcgcgagctgagtgcctccctcctgttccagaggccgaagggcgcttcctctctgcaacttgccattggagccccttcatcaccagctttgtccaacgtcctgatgtttcagttcgatgagattgttacgggcgaggtgagcaaggacaacgtgacatacacccgctatgcggatgatctgacattttctgccgagagatcctggaacctggtggatgtcgaaaaaaccgttaaacgagctctgcgcgagatcgcgtatcctagactggtcctcaacaccgacaaaacaacccacttgacaaagaaattcgggagatcagtaacgggcctcgtgctggctaatgacggacgtgtgactataggaaaacggagaaagcgggaaattcaagcagcaactcatgccgccagcctggacaggctcgatgcacgacagatgcaacaactagcgggcatgttagcttttgtgaacagcgtagagcccgacttcttaggagtgctcgagaggcgatacggtatcgagactatcatgaggttgcagaaggtcggtgctaaggaccggcgtaatcttaggccccagacacttgaagaagatgccggccacctgtga

SEQ ID NO: 11744 - RNA, 948 nt, synthetic construct
  source 1..948: mol_type = other RNA
atgtccgcgttggttgcaaagctggtgctggctactggaattgatcagtcttccgtgaggagaattatgctgtctgctccacggcgatacaagagctattatatcgcaaagagaaatggtggtcttagaaagatctctcaacccgctcgagaagtgaaagttcttcagcgcgcccttatagacctcctgctgagcgatttaccagttcatcggacagctatggcctaccgggtgggaacatcaatcaaagacaatgctaatgcacacaaaacctccgggcccattatcaagatcgacttcacgaacttttttccaagtataaagagaagcgattgggctgattactgtcaaaagaccggttgcctcaacgatcctactgagatagggcttacaagttcgctgctcttccagtaccaaaaagaacacgcctcacagaggttggcaatcggcgcaccctctagtcctatgctctcaaatatactgatgtacgagtttgatagcgagatcgagtcccgtctacagggaactcgcattgtatataccaggtatgctgacgacctgacctttagcgccccaaggaccggctacctccatgatgtcatgaaaattgtgcgggaaactatgcgtgccatcccttatccccgcctcaagattaaccctgacaagacgacatacgtgaccactaaatatagacgcagtgtcacagggctcaccctgtctaatgacgggagggtcacaattggatggcgcaagaagcgggagctacatgcggccgtgcacaacgccaaactggacaaattgaatgccaagggcctgcaggccttagccggctacttggctttcgtccagtcagtcgaaccgagcttcttatccgtactgaggaacaaatatggcaccgagattatcatgaaaatcaaggcagccaacgtgaaaaaggcgctgcgatga

SEQ ID NO: 11745 - RNA, 978 nt, synthetic construct
  source 1..978: mol_type = other RNA
atgtcccagttgctggacaaactctcattcgagacaggaatgagagcgaatgagcttcgccgcatcatgtacaccgcccccaatagatataagatttactcgatccctaagcgtgtggggggctttaggagtatagcccagccagcacgagaggtgaaactcctgcaacgcaccctggcaaagacctttctgacgaccctgccgacacacgcggcagctacagcttataaacccgagacttctttgcggtcaaatgcactgcctcatgctggtagaggtcccgtactcaaactggatttccgggatttctttcctagcataagggatagagattggattgcctactgtcgccagactggctgccttaccgaagacgaagatatctatttaaccagccggttgctttttcaccgtaggaagggggaaagtcacctgcggcttgcgattggagcaccaaccagccccatcctgtccaacattttgatgtatgagtttgacgtccgtgtggtagagacagtcgtcgccgacggcgttacatacactcgatatgccgacgatatgacgttctctgctcagcgcactgggaacttaactcatgtcatccgggacgtagggcgagtgctgcgggacattcagtacccacgccttgccctcaaccccgaaaaaacaacgttagtcacagccaaatatggaagaagagttaccgggctcaccctggccaatgacggacgagtgaccgtgggcagagactccaagaggaagataagggccgcagtgtaccaagccgttaacggaaggctggatcctgagcaaatgcaggtgctgactggtatgctcgcttacgttaacgctgtggagcccgaatacctagatgtgctccggaggaagttcggcactcaggcaattctgaagatccagcgcgctccgagaggcgaaaagatcagaaggcgatctccagccctagctcagaatcggtga

SEQ ID NO: 11746 - RNA, 987 nt, synthetic construct
  source 1..987: mol_type = other RNA
atgactgagctgctgcgccaactgtccactgaaacaggattggcagagagcgctgtgaggcggattatcgcgaacgcgcccgaaagatacaaagtgtaccatatcctgaagaaaaacgggggaaagcgcaaaatagctcagccagctagggaattgaaactgcttcagagagcactggttgaactgctccttagcaaattacccgttcaccctgccgccaccgcctatgtaaaaggtcggtctattagggataatgcagagcgccattgtcacagtggcccagtgctcaagatggacttcaaggacttttttccttcaattactgatcgagattgggccgcgtactgctcacagactgggtgcctcacggacgcagaggatatccgcctcaccagtctgctgctgtttcaccgtccagtcggcggacgagtgctacgcttagccattggagctccttcttcccccatcgtctctaacttgatcatgtttcccttcgatgccatgatttccgaagtggttgccgtcgatcacgtgatctacagcaggtacgcagacgacttgactttcagtgggccccgcacaggccatcttaccggagtggcccggtccgtgaagagggcattaagggagataccatttccgaccctcaagataaatgccgaaaagaccacatatgtcaccatgaagtatcaccggcagatcacaggtcttacgctggctaacgatgggagagtcaccattggccgggacaacaaacgagccctgagagcgcaactggatcactattcgaagggtacaatgcctaaagctgacgtgccgcgtctcgctggcaggctagctttcgtaaagagcgccgagccatctttctttctgaatcttttggaaaaccatgggtgggagagaatccaggagattctcagacagtcaaatcagaaggccagacgggccaaacctctggctagcgacgagaatgacttcgcaggctga

SEQ ID NO: 11747 - RNA, 978 nt, synthetic construct
  source 1..978: mol_type = other RNA
atgacagagctgctgaaacagctttccattgaaaccgggctggtggagtcgactgtacgtcaaataattgcaaatgcccccgagaggtacaagacctatcacattagtaagaagaacggcgggacacgcaaaatagctcagcctgctagggaggtcaaactgttgcagagagcactcacagctctcctactgagtaaactaccagtgcacccagcagccaccgcctatgtgaagggaagaaatattcgcgataatgccgagcttcactgtcatagcggtccaatcctgaagatggacttcaaggatttctttccctcaattacggcacgggactgggctgcctattgcactcgcactaactgcctcgccgaccctgaagatataaggctgacgagcctgctcttgtttcacagacctgcaggagggcgggtcctgcgattggctattggcgccccctcctctccaatcgtgtccaacctgatcatgttcccttttgaccagatgatctcagaagcggtagccgtcgatcatgttatctacagccggtacgccgacgaccttactttttctggccctcgaaccggccacctgacagttgtggctaaagctgtgaagaatgcgttaaaggaaatccaatacccgagcctcaaactgaatcccgaaaaaaccacatatgcgactatgaagtaccatcgacaggtgaccggtcttaccctggcaaacgatggacgcgtcacaattggaagggatagaaagcgggccttgagggcccaattagaccactactataagggtatacttccactgaaagagatccctagactcgcaggcaacttggctttcgtgagatcagccgaaccgagttttttcttcaagttagttgagcgtcatgggtaccagaagatccatgacatcctgcgccagtctaaccggaagaataaaaaactcccctccggcaggaacgagtctcccatctga

SEQ ID NO: 11748 - RNA, 981 nt, synthetic construct
  source 1..981: mol_type = other RNA
atgcgagaaatgacggacctcctgaagcggttgtcggtggagacaggtcttcctgaaagcaccgtaaagagtattataagtaatgcacctgagaggtataaagagtacctgatccacaagaaaaacgggggataccgtaagatagcccaacctgcgagagagttgaagctaatccagagggcttttatcgatatcgtgctctccaaactgccgattcactcagccgcaagcgcttatcggcggggaaagaacattcgcgacaacgctatgccccactcacactcagggcctatactgaagatggactttaaggacttcttcccttccattaccgagagggactggagcgcttattgtcagcagacaggctgcctcaccgatcccggcgatatacgtttgtctagcctactgctgtttcacaagccctctggaggaagaattctcagattagccatcggtgcaccgagttcaccaatcctgagcaacgtcatcatgtttcagttcgatgaggccatctctaatgctattgcaaagcatcaggtcatttacacccgatacgccgacgacttgaccttcagtgcaccacgcactggccaccttaattccgttgctaaggccgtgaagaatgctttaaaagaaattccctacccccaacttaaaatcaatcacgagaagactacgcatgtcacaatgaaatatcatcgccaggttactggactcacactggccaatgacggccgcgtgaccatcgggagggatcacaagagatccctgcgggcccagttgcattatttcattaacgggaagctggatgaagcagaaactgcgcatctggccggcaaaatcgcgtttgtgaaaagcgtggaaccagagttttacttctctctgcttgagaaactgggcgccgaaaagatcaatttcctcttatccaaaagcaacaggaaaaagctgtcccttaaaaaatctccaaagctcaactga

SEQ ID NO: 11749 - RNA, 981 nt, synthetic construct
  source 1..981: mol_type = other RNA
atgacagacttattaaagcaattgtccattgaaaccggcttgccagagtataccgtgaagagcattatatccaacgcaccggataggtacaaagagtactatatcaagaagaagaacgggggatcacggctcatagcccagcctgcgcgggaactcaaactgattcagcgcgcatttgtagacatcctactttcgaaattacctgttcatagtgctgcgacagcctaccgtaaaggcaagtctattagagacaatgctctgccacactcccattccggaccaattctgaagctggacttcaaagactttttcccaagtatcacggaatccgattgggtagcttactgcaaacatacgaagtgtctgaccgacccaaatgacgtgagactgtcctcattgctgttgtttcaccgaccctcaggcggacgcctgctaaggctcgcaataggtgccccttctagccccgtcctttctaatatcatcatgtttcctttcgatgaagccatcagcgctgcggttgcacacgatcatgtgatctattctcgttatgctgatgatctgacattcagcgggccgaggactggtcaccttactggggtcagcaaagccgtgaagaaggccctcagagagatcccctaccccaccctcaaaattaaccacgagaaaactactcatgtgaccatgaagtatcacagaaaagtcacaggcctcactctgagtaatgacggccgggttacaattggtcgggataacaagaggacacttcgagcccagttgcaccattaccttagcggcaaactgaacgagagtgaggtggcacacctggccggacgcatcgctttcgtcaagagcgtggagccttcattttactttaccctgatagaacgccactctgacagagtgatccaaatgctcctgaccaaatctaatcagaagcatgccaaggagaagaggcagcccatttcgttcgaaggagggtga

SEQ ID NO: 11750 - RNA, 948 nt, synthetic construct
  source 1..948: mol_type = other RNA
atgagcgaaattattgaaaagctcgtggctgcatctggcctgaatcctttcgtcgttagacgaatcctggccactgcccctcggcgctacaaagagttctccgtgccgaagagaaacgggggcaagcgtaaaatagcccagcctgctaaagagttaaagattctgcagagagccttcgtggatgagttcctgtcagaattgccaatccaccccgcggctaccgcatacagagctgagacatctattaaagacaatgccgaaagacatgcaggctttggtcctatcctgaagatggatttcaaggacttttttccctgcataaccgatcgcgactgggagcattattgtcaacggaacaatctcttcgaggatcccctcgagagacgcctatcaaccttattgctgttccaccgcccgaaaggcggaagcaaacttcgcctggctataggggctccatcaagccccacactttcgaacgtgcttctctttgaattcgacaggtatatcagtgagctcgttgcccccgataaggttctctatacaaggtatgcggatgacctgacgttcagtgcccctcgtactggccacctgactggtgtcaaacgagcagtgagcagggccatcaaccatgtggattttccaacccttcggattaatagggagaagacgacttacattacaaccaagtttcacagaagtgtgacagggttgactttagcgaacgacggacgcgtcaccattggcagggacaaaaagcgggagatcagggcctccgtacataggtttacattgggtaagctagacgaagattctatcgaacggctgcacggatacatcagcttcataaattctgtcgagccagaatttatcgacgtgctgaccaagaaatacgggtccggaatgatgcagaacctgcgtgacgcctccgtagcaatccggcgagcttga

SEQ ID NO: 11751 - RNA, 918 nt, synthetic construct
  source 1..918: mol_type = other RNA
atgtcagagtattctatccgtaaaattcttgccactgcgcccgaaaggtataaagagtatcgcatacccaagaagagcgggggctatcgagatatcgcgcagcccgccaaggagctgaagattcttcaacggggcttcgcaaacaattttctgatgaagctaccaatccatcataccgctatggcctaccggcacaaacagggtatccgcgataatgctcagcgccatgcaggcttcggacagatactcaagatcgattttaagggcttcttcccaagtattagagttgaagattggaggtcctactgcgccgccactgggtttctcatagaggcagaggacattgacctgagctcgctgctgctgttccaccgtgctcgcggtacgaggggactacggttagccatcggggcccctagctctcctatcctgtctaatattctgatgtacgagtttgaccaacgggtcagcgagatagtcgcccaggataaggtgatctacacacgctatgcagacgacttgacatttagtgctccgagaacagggtacttgctggacgtgaagaagaatgtttccaaaatcctggacgaactgcagttccctcggctggaaatcaaccacaaaaaaaccactcacgtcactaccaagtatcaccgagtagttacgggcctcacactggctaacgacggaagagtgaccgtgggcagagagagaaaaaggctcattagagcaaccatacatgcatacattcaaggtcgacttgtggctgaggatgtggggaggttagcgggactcattgccttcgtaaaatccgccgaacccgaatactttggcctcttgaagcaccagtacaccccagaaaagatcatcgagattctaaaatggtcatccggaacattgaaccttttcgacgattga

SEQ ID NO: 11752 - RNA, 948 nt, synthetic construct
  source 1..948: mol_type = other RNA
atgaagttcctaattcaggagtcaggcttgtcagagcaaactataaagagaatcgccatagacgctccccagcgctacaaggcttacgagatcaaaaaaaagaacggaggcgtgaggcagatagcacatccagctagggaactgaaaatccttcagagagctatcgtgaaacacgtaattagcggattacctgttcacgacgccgcgatggcctatcgcaagggaaggaatatcagagacaatgccaagcgccacgccggcaccagtattattctgaagatggacttcaaggacttttttccgtctattaaggcgcaggattggcatcagtactgtgaagataacagaattctgacatcctcggaagacatctggctcactagccaaatcctgttttatcgggcccgggggacacgacttctgcgtttggccataggggcaccttccagtccagccctcagcaacgctctgctgtatgattttgataagagggtgacagagcttgtgtctcaagaggaagttgtctatactcgctatgctgatgacctcaccttctccgcggcacggacaggttacctcaccgggatccagaaattaatctccagggccctgcgcgagatggaaactcccaagattaaactcaaccacaaaaaaacaacccatgtgaccactaagtactctcgcaacgtaacgggtctggtgttgagcaacgacggacgggtcaccatcgggagagagagaaagcggaaaattagggctatgattgatcatttcatcaaaggccggctgaataataggcagaaagcccacctatcaggcatgattgcattcgcaaagagcgcagaacccgagtattacacctacatatccgagaagtacaacaatgtcctgcgagagatccttaatagtagagctaaaaagacgtgccgtatcgaagcctctcgatga

SEQ ID NO: 11753 - RNA, 978 nt, synthetic construct
  source 1..978: mol_type = other RNA
atgactcccttgattagggcactttccgccagcagcgggctgagtgctgccgatacactcaaactggtgaaggatgcccccgatagatacaaaatcttcgacatcgacaagcgccggggctctgaaaaaagaaaaatcgctcagcctgcagcagaggtgaagtacctgcaaagaatcgtcgtcgagattctactgtccagacttccggtgcactcagcggccactgcctatataaagggagggtccctgcgggataacgctgctccacatgcaggtgttggccggccaattctgaaaatggaccttaagcagttttttccaagtatccgctctagggactgggaaagttactgcagcgacaatgaggtattttctgatgcacaggacgcatacttgagttctaggctgctctttcacagaccacctggtggccgtgtcctgaggttggcaattggggccccctcttcacccatgatgtcgaatatcctgatgtacgaattcgacaagcggattagcgccgcggtagaggaggacgaggtcacctataccaggtatgccgatgacctcactttcagcgcccggagaacggggtatctcgtcgatgttcgcaaaagagtttaccgagtggtgcgagagttaaattaccctaagctcgatattaacaggagcaaaacagtgtatgcgacctcccggtaccaccgagaagttaccgggctgatcctatcaaatgacggccgcgtgaccattggccgcgataagaaacgtgtgatctattctatggtacataggtacttgaagggtggacttaacggagctgaaatacaacacctggctggcatattagctttcgtgaaatcggccgaacctgatttcctcctgaacattgaccgtaagtacgagataggaacagttagcgacatcgccaagacagctggacgaatccatgtgtcagatcgccagtcctattggcagtcctga

SEQ ID NO: 11754 - RNA, 978 nt, synthetic construct
  source 1..978: mol_type = other RNA
atgctgacccaatatcttgctcaggcaacaggcctaagcaccttagagatcgagaggatcgccagatcagccccacgccggtacaaagactatatgattcctaaagccaatgggggccacaggttgatctcgcacccggctcgcgaagtgaaagcccttcagcgagcactcgtggagtggctctcagataaattccccgttcatcattgcgcaacagcctacaagaagggtgggagcatcgcgctcaatgcagatcagcacgcacaaaacggtcctatcatgaagatggactttaggaacttctttccgagcatcaaaagccacgactggattaaattcatcacggagaacaatttcccactgaacgaattcgatcgtgagctgactcgcacgattctgtttcataagaggccttctatgcccgacctgagattagctattggcgctccaagtagtcccttcatcagcaatatcatgatgtatgatttcgactgttacgtacacgacaagacaaaagctgaaaagatcacctatactcgttacgccgacgacttgacattttcctccgcccgcgcctggaatctacgcgatgtggagcccattatcaagaaggccgtgagggaccatgctttttccaaactggagataaacaacgaaaaaacccgggtcgttactactaagttccgaaggatagtcaccggagtgaccctggcgaatcagggccacatatctgtgggtcggaacgctaagcgggagttgcgggctattatgtccagactttctctgagacaaaccccaaaacagaacccttcccagattgtcgggattttgggattcctgggatcaatagaacccaagtatctccagtctctgaaggagaagtacggcaaggatacatttgactttctttacagtctcgcgggggatctgcgaacagacaatagacagggacaggccgatgcagccactgaagattga

SEQ ID NO: 11755 - RNA, 969 nt, synthetic construct
  source 1..969: mol_type = other RNA
atgtccaagatcattcgcgaccttgttttggagactggaatctcagcaagcactctgcaggtaatcatcaattctgccccagaatcctacaaggttttttcaattcctaagaagacagggggaactcggatcatagctcaacctagcaagcagctcaagatcatccagagagccttaattgaagttctgctgcacgacttccccatccatgaggcagccaaggcttacgtgaaagggtcatcaatccgtgtgaacgcggatcagcatgccggcagtcaacccatccagaagtacgacttctctgatttcttcccatccataaccagctctgactggcgcaagtattgcgaccacaatcaggtgaaccttagcacagccgacctgcatctgtgtacgaaaattctctttcggcgggctcacggagaaaggaccctgagactgtccataggcgccccgacctccccaattctgagcaatattctgatgtttgacttcgacaagaagatctcggaaaaacttgcaggcgacgaggtgaagtatacccggtatgctgatgatctgacattttccgcacccaaaactgggtacctgaacgctgtcccgagggcgctacgcgaatgtatccaggagatacagttccctacactcaaattaaatgcgaaaaaaaccgccaagattacagccaagcacaggaggatagtgaccggtttgacactcgccaatgatgggcgagtcaccatcggtagagataaaaagaggctcattcgcagcaaagtacacaagtttaagctaggtcaactggatagactggccttagataaacttacgggcgagttggcatatattaacgctgtggagccagagtacatttctgtcttgaaacgtgtgtatggagacgagtgcattagtaaaatcacccgaaacaaacctctccggaagtacactccccccagtagaaacggcagttga

SEQ ID NO: 11756 - RNA, 912 nt, synthetic construct
  source 1..912: mol_type = other RNA
atgctcggggccaatgacctgctgtctcagatgtcaagtgattttgggatgctgccaaaccaccttcagagtattgtgaggaccgcccctatcaggtacaaggtcttctatatccccaaacgatcgggaggcttgagagaggtggcccaacccgctagagaagttaaagcaatccagagatggctgatggcgcattttggccctctcctgcccttgcatgaggcagctactgcttatcgaccaggagcctcaataaagaataatgcgctgcggcacgtggacagcgactaccttttgaagatggattttcgcaacttcttcccaagcattctgatgacagatataatccggcacttgaaaatccactgcggccagcagtacgatgcctctgcaatcaaacttattgcctacgtgtgcacttgggctcctgggaggcaagggcctttacgactatgtataggtgcaccgtcctccccgctgctgagcaattccgttatgtttgacttcgatacccaactgagctccgtggcggccgctgatggagtgaggtatacacggtatgctgatgacctggcattatccgtatgtcgttctggtgcactgaagaactacccctctctcgtatcaaaaatcgtcgccgacctgaaatatccacagctcaagcttaacgaagggaagaccgtcttcgccagtcgcgctggaagacgggtggtgacgggagtcaccctcacagccgaccaccagctctcaattggtagaactaggaaacgcgagatccgggccatgtaccatcgcatggttttgggcaagctcagcgctgaggaacagcgtgaactagcaggcttaattgccttcgctgacgacattgagcctggctttgccgcgtggcttagcagtcccaagaagctgtga

SEQ ID NO: 11757 - RNA, 918 nt, synthetic construct
  source 1..918: mol_type = other RNA
atgctctctgccaatgacctgctgtcccagatggccagtgacctcggcatgctgcttagccaccttcagtctatcgtgcgcactgctcctatccgatacaaggtcttccatattcccaaacgcagcggcggtttacgcgaggtagcacaacccgcgagggaggtgaaagcaattcagcggtggctgaccgctcatcttggtcagttactcccactacacgaagccgcaacagcctatcgtacgggggcgtccattaggagcaacgcactgcagcacgttgactcagactacctcctgaagatggattttaagaacttctttccctcaatactcatcactgacattatccagcatctggaggtttactgcggacggcaatacgactcaagcgccataaagcttatcgcctatgtatgcacttgggctcctaagcgccagaagccgctgagactgtgtattggagccccgtcaagccctctgttgagcaattcgataatgtattcctttgatatgaggctttcttctgccgctgcggccgacggcatatgttacaccagatatgctgatgatctgacactgtccacccaccacccaagagtgttggcaaactaccccgctctagtggctgacatcgccgcgagtctgaactatcctcggctgaaattgaacgagaaaaaaagtgtctttgcaagccgatctgggcgacgtatcgtgaccggggtcacgttgacaccagatagacacttgtccatcggacgcattaggaaaagagagattcgggctatgtaccataggatgacactgggccaattaaatcaggaggaacagcgggaacttgccggcctcatcgccttcgcaaatgatgtggaaccagggttcgctgcctggctctccggcagtaagaagctcgaaacctga

SEQ ID NO: 11758 - RNA, 912 nt, synthetic construct
  source 1..912: mol_type = other RNA
atgctgcgggccaacgacctattgcaccagatgtcttccgacttcggaatgctgaccagccacctgcatgggatcgtgagaaccgcccctattcgctacaaagttttctacatcccaaaacggagcggcggacttagggaactcgcccagcctgcccgtgaggtgaaggcaattcaaagatggctcatggagcgcttagaacccctgctccccttgcatgaagcggctaccgcatatcgcgccggagcatcaataaagtctaatgctctgcgacacgtggagtctgattacttgttaaagatggactttaccaacttcttccccagcatactgatgaccgacatcgtgcgccaccttgagacgcattgcggccagcagtacgatgcatccgctataaagctgatcgcctatgtctgtacctgggcccccaaaaggcaaggcccgctgaggttatgcattggggctccaagtagccctctgctgagtaattcggtaatgttcgattttgacaggagactaatggatttcgccgctcacgatcagattacatatacacggtatgctgatgatctctcactcagcgcccgaacttccggggcactcaatgcgtaccctaaacttgtggccgagttgaccgagagtcttgaatacccaaagctggcgctgaacacaaagaagacagtctttgcttccagggctggtaggagaattatcacaggcgttactctgacgtcagaccatcaaatctccattggtagagcacgtaaacgagaaatccgcgccatgcaccatcggatgacaatggaccagctcaacctggacgagcagaagcggttggccggcctgatctcatttgccgaggacattgaaccagggttttctgcatggcttactaaaactactgaggcttga

SEQ ID NO: 11759 - RNA, 912 nt, synthetic construct
  source 1..912: mol_type = other RNA
atgctctgcgcgaacgacctcctgttgaaaatgtcttctgacttcggaatgcttgccggccacctgcaatcaatcgtgcgcacagcaccaatccggtataaagtgttttatatccccaagcggaccgggggcctaagagaagtggcccagccagcccgggaggttaaagctattcagcggtggttgataaagaggttgaaaccacttctgcctctgcatgatgccgccacagcatatcgcagcggtgctagtatcaagaagaatgctcagcgacatgttgagtccgactacctgttaaagatggattttcgtaacttctttccttcaattctcatgactgatattgtaagacaccttgagatacattgcggccagcaatatgatccatctgccattaagctgatcgcttacgtgtgtacttgggcccccaaacgccaaggaccgttgcggttgtgtatcggagcgcccagcagccctttactgtcaaactcagtgatgttcgacttcgacaagcagctgtccagcgccgcagctagtgatagcgtaacctacactagatacgctgacgatctggcactgtccagtcgtaccagcgggacgcttaataactacccgggcctcgtcgcgaagttagctggctctctgaattatcctcagctcgagctgaatgaacgcaaaactgtctttgcatcgagggcagggcgaagggtcattaccggggtgacactaaccgccgaccgccagacaagtatcggcaggaagagaaaacgggaaataagagctatgtaccaccgaatgattctgggtaagctctcccccgatgagcagagggaactggcaggactcatcgccttcgccgacgacattgagcccggtttttccgcctggctttctaaatccatcgatacgtga

SEQ ID NO: 11760 - RNA, 912 nt, synthetic construct
  source 1..912: mol_type = other RNA
atgctgagtcaggccgacatcctgcagagaatggccgcagatctggccatgctccccagccacttggccaagatcattcagactgctccacttcgctacaagctattcgagatccaaaaaaaatctgggggtcgcagagaggtagcacaaccggctagggaggtgaaggctatccaacgttggttaattcgcgaactgggcccacgattaccagtgcacgagtgtgccacagcttatcgggaagggtctagcatccgcaagaacgctgaagcgcatgcctcaagcaggtacatgctcaaactggattttaccaacttctttcccagcattgttcgcagcgacctgcatgctcatctcgatcggcactgctccgattacctggatccgtcagctagaaagctcattgcacacgtctcttgttgggcacggcaccgagaaccacctctgaggctttgcatcggggcgcccagttctcctctactcagtaatagtctgatgtttgagttcgacaatcggctggcggccgttgcaaaggacgatggggtcgtgtatacccgctatgccgatgacattacactgtcctccagggatagaggtaaaattgacagatacaccgagatagtgcagacccttctggaaagcctgcagtaccccaagttgactttgaacgagggcaaaacggtcctcgcctcacgagcaggcaagagagtagtgactggactgatacttacccctgaaggatccgtgtccatcggacgtgacaggaagcggttaatcagagctatgtatcataggtcgctgacaaaacagcttgactcaaaggagacacaggttctcgccggcttgattgcattcgccgactctatagagcccggatttagccagcggttgaaaggctccgtgaggccttga

SEQ ID NO: 11761 - RNA, 909 nt, synthetic construct
  source 1..909: mol_type = other RNA
atgcagcgtgaacctgacataattcttcagatggcggccgacctgggcatgctgccttctcatattagcttattgatccggacagcgccactccgctacaaggttttttatattccaaagaagagcgggggtatgcgggaagtcgctcaacccgccagggaggtgaaaaccatccagagatggctgatacgatacctaaaagacaggctcccgatccatgaggccgctaccgcctatacaaccggaagttctatccgggccaatgcagccgcgcactgccattcccgctacctgctgaaactggacttttcaaactatttccccagcatcgtcaagcatgacattcagatgcacctcgagcgctattgcgccgatttcctgggagaatcagctagggagctgattgcacagacttgctgttggatgccccgcagagagcaccctttgcgactctgtatcggagccccaacaagtccaatgctgagtaattcggtgatgtacgatttcgatcggctcctggggaacatcgccaatgatgagcacgtgacatacaccagatacgctgatgacatcactctttccgctgaggagccggggaaactcgatcgatacgtggaagtagttatgcagttactgagggaccttgcttatcctaggatagaattgaacatggcaaaagtcgttagagcctctagagcatccaagagagtggtaacgggtctagtcctgactccctctggatcaatctccatcggccgcgacaggaagagattaattcgcgcaatgttccacaggaaaattcagggcaagcttaacgcagaggaagctcaagtgttggagggcttcgtggcctttgctgaaaatatagaacccggctttcggaagcgtctcgagcggagcatgctgtga

SEQ ID NO: 11762 - RNA, 912 nt, synthetic construct
  source 1..912: mol_type = other RNA
atgacaagtttactggacgatatggcaattgcatttgggatgcctaggaagcggcttttgaatatcatccgcaccgctccgctgaggtacaaggtcttcttcattaagaaaaaagccggaggtttacgagaagttgcccagccggcgaaagaggtgaaggctattcagcgttggcttatgtcatctctcgctgagcatctaccactgcactcagctgcaactgcttacacacctggcagctcaattaaacggaatgcggaagcgcatctgggtagccagttcatactcaagatggatttcgagaattttttcccaagtatctccgaagacaacattaaagctcacctcaggaacttttgttctgattattacacggaaaacgacattgccatcatcgccagggcctgcacatgggcacgcaaaagaagtcccccattgcgcttgtgcatcggagcacccagctcccccctactgtccaatagcgtgatgttttcgttcgatgacatgctgtttcaacacgccaatcaagacgaggtaatctatactcgttacgctgacgatctgactctctcaagctctcaccctgacgtcttgaaggaatatcctaagattgttgccggaatcctggagaaactcgcataccccgccctgagtattaaccagagaaaaaccgtgcacgcctctaaggcagggaacaggacagtcaccggcttagtgcttgcctccgatgataagatctccatagggcgggagagaaagagactgatacgcagcatgtaccatcggtataagaccggcaagctggacccagagcttatacctaaactcttcggcctgctgaattttgctgaggatatcgtgcccggcttccgagccaacctcgaaagagggtatgagaacgtggacatctga

SEQ ID NO: 11763 - RNA, 930 nt, synthetic construct
  source 1..930: mol_type = other RNA
atggcttacccggatctgctgaggaagatggctggcgacttgggtatgctcccccgccagctggccagtattatcaaaacagcccccttgagatataaggtctttgccatcccaaagcgtgatggatcacctagagtgatagcccagcctgcgagagaagtaaaggcaatccagcggtggctgatcaacgaactgaggccacagcttccagtccatgaggatgtgatggcatacgagccgggaacgtccataaagaagaatgcagaacgccatctcggctctcgctttatgctcaaaatggacttctccaactttttcccaagcatctccgccgaggccttgcacatgcatcttgaaagctattgcggtaacacatacactctggtggacagacaactcattgtgcgagcgtgtacttggctgccccagaggacgcgtgctactgcattgcagctgtgtatcggggcacctagttcacccctccttagcaattccgtgatgtatgagtttgactgcgccgttagcgagaaggcccaatccgagggggtggtgtacactcggtatgctgatgacattaccctgagtaccactgaacggggcatcctgtctgagtacgctgattttgtgtctgacaccctggctaccttggcttaccctcgagttacagtgaataggaggaaaacagtccacgccagccgggctggccttcgaatggtcaccgggattgttctgacaccagacggaggcctgtcggtaggacgcgacagaaaacgccttgcacggagcatgttccacaggcggaccttagggctactgaccgcggacgagagtgccgagctagatggcctgttagccttcattgattcagtcgaacctggtttctctgcaaccctcagaacatcattactcaacaaaaaaccccacccctga

SEQ ID NO: 11764 - RNA, 933 nt, synthetic construct
  source 1..933: mol_type = other RNA
atggcccacgccgatattttactgcgtatggcagccgactttggcatgctgcctacccagctcgccagcataatcaaaactgcgccactgcggtataaggtctttgaaatacccaagagggatggatccccccgcactatcgcccaaccagcaagagaggtgaaggccgtgcagcggtggctcattaacgaactgcgccctcatttaccgattcacgatgctgtgatggcgtacgagccagggacaagcattaagaagaatgccgaaacacatttgcggtcacagttccttctgaaaatggacttctcgaacttctttccctctatcagtgccgaggccctgcgattacatctggagctgcacggaggctcaaggtacacactcgctgacagacatgccatagtgcgagcatgtacctggctgcccgagcggacagagtggacctcatccctgcaactttgcattggagctccatccagccccctcttgtctaatagcgttatgtacgaattcgactgcgtcatcgctgagaaagctcagtttgacggcgtgacatacaccaggtatgctgacgatatcaccttctcttctaacgaacgcgggatcttgacactatattccgatttcgtcaacgacactctcggtaaactcgtttatcctagaatcacggtgaatggcagcaagactgtccacgctagcagggcaggcaggcgtgtggtaactggtctagtgctcacgcctgacgggcagatctccgtaggtagagatcgcaagcgcctggcacggagtatgtttcacagaaaaaccttggggctgttgagtgctgaggaagcagccgagctggacggacttcttgcgtttattgactcagttgaaccgggattctctgatagactgcgagatggcaccaggaatagtcagcagcacccttga

SEQ ID NO: 11765 - RNA, 924 nt, synthetic construct
  source 1..924: mol_type = other RNA
atggcacatgcagacattcttgctcgaatggctaatgatctgggaatgcttcctggtcagctggccaatattattaagaccgctcccctgcgttacaaagttttcacgatccctaaaagagacggaactcggaggactatcgcccagccagccagagaagtgaaggcaatccaaaggtggttgattaatgagctccgtccccagctgccaatacacgatgccgtcatggcctatgagcctggcacatctatcaagaagaacgccgagatgcacttgcgctcacaattcatcctgaagatggacttctccaacttttttccaagtattagcgccgaagccttacggttgcaccttgaactccattgtggcaatcgctactcgctcgccgataggcattccatcgttcgggcctgcacatgggcacctgagcgagcacctaccctgcagctgtgcatcggtgcaccctcttctcccttactcagtaacagcgtaatgtatgaattcgattgtgcaattgcccagaaagcgaaatccgagggggtcacatatacccgctatgctgatgatattactttctcagctactgagagaggcatactggccccatactttatttttgtcaaggagatgctgcagcagctggcctacccgaaaatcaccatcaacgaacgcaagacagtgcacgcttcaagggccgggagacgggtggtgacaggactgatacttaccccggatgggaagatctccgtgggcagagacaggaaacgtttggcgaggagcatgtttcaccgccgggctctcggcctattaagcgcagacgagagtatcgagctagacggactgctggctttcatagactccgtggaaccagggtttagcgaccggctcagagctgcggcacgaaactctcgcccccatccctga

SEQ ID NO: 11766 - RNA, 930 nt, synthetic construct
  source 1..930: mol_type = other RNA
atgcgcaacagccgaatctttcaggagatggcagaagctctgggcatgttgcccggccatctcgaaaagatagtgaggaccgctccgctgcggtacaagaaattcagtattccaaaaagggatgggacccctcgccttgtagcacaacctgcccgtgaggtgaagttgatccagagatggttaataagcaatttgcgggatcatctacccgtccacccgagcgccacagcatatgagaaggggtcatcaatcgtgatcaatgctagtgcccaccaggaaagcaactactttatcaagatggacttccagaatttctttccctccatcaaaggaaaggatattgacctacatctgcaatccctcagtcggattaatttgagccaggaggaccgagacgtggtggtaaggagttgtacttgggccccacaccggattcctccacttgaactgtgcatcggggcaccctcttctcctgtcttatctaactccattctgttcgaatttgattgcgccgtggagtcttacctcatcgaggagaaactgcccgtcagatatactcgatatgcggacgaccttaccttttctagcctatcaggaggctggctgcacgacgtgcgtaaccaggttaagatgatagtgcgcggcctcgagtatcccaaactccgcattaaagaagagaagacagtgttaggatccagggctggtagaagggttgttaccggtctggtcctgacaccagacaagaagctgtcggtaggaagagagcggaaaaggacggctagagcgatgtaccacagattctggaagggggagctggatgaatccgaagtcatgcagctggaaggtctgctcgcctttgtggagtccgttgagcctggcttcaaatcacgccttcaagattactaccggaaaaagaacccagccgcctga

SEQ ID NO: 11767 - RNA, 930 nt, synthetic construct
  source 1..930: mol_type = other RNA
atggataaacttgagtcctctcatctcatccgggtgctcagcctcgagagcggactgctgcctgaacaggttgcaaatatcgtgaggacggctccctttagatacaaatccttcaaagtgaagaagagaacaggcggtttacgccagcttgcccagccagctaaggaggtaaaatggatacagagtagggtggtcgattttttgcgacctttactgcctatgcacgacgcagtcaatgcctacgaggtcggctcgtcaattaagaagaatgcagggatccatgcctcttcccggttcttgcttaaaatggacttcagcaatttcttcccaagcatactggaatccgatatcgttgcccacattaattgctttgctccatctattagcgaagttgacgcttttgttatcaccaggtcttgcatgtgggctaacggcaggaagttcccactccagctgtgtattggggctccctcatctccctttctgagtaactcagtcatgtatagcttcgacgacctgatctcaaagaaagccgcggaacgggacatcacttatacacgttatgccgacgatctaactttttcctcccggagagaaggcatactggcggactttcagtccatggtggaggtggtaatcagtgaaattctctacccccgcctgaaactgaacaccgccaagacactccacgcaagtagagcgggtcgccgagtagtcaccggcatcgtgatcacccctgagggcgagctttcagtgggacgggatcgaaagagattggtgcgcgccatggcccatcgcgacagtatgtctcaactagatagcgatggagtggacaagctggagggtttgattaacttcattgatggaatagagccggggttcgcacaaaaggcccgtaggtggaggaacaaaaaagtggcaggggcttga

SEQ ID NO: 11768 - RNA, 909 nt, synthetic construct
  source 1..909: mol_type = other RNA
atgaagatctcagaatcccagttatttgggcgaatgtgccaggacctatctctgcagagcgagtccctgaagagaatcatctcgacggcccccctcagatacaagaaatttcggatacccaagcgatcgggtgggtggcgggaagtagctcaaccagcacgggaggtaaaaaagttacagtactggatcattcgcgaactgggtgatatcctgccggtttccgaccacgcgacagcctaccgtgactccattagcatcaaaaacaatgcccttgttcacgacggctctaattacctgcttaagatggatttcgctagcttcttcccctctattaaattttccgacctgtcacagcatctgagcaagtatgtgaaggagctgaccgctgacgatattggcgtgattgccttgaccacactgtggactccaaatagggaacctccactgagactgtgcataggcgctcccagttcccctctcttgagtaattccatcctttttgatttcgacgctttggtgagcaagagcctcccagactctgttaaatacactaggtacgcagatgacttgttctttagtacccaggagtcaaaccaattatcttatgtcgagaggcttgtgagggaaaccgtgcacgagctagcatatcctgcccttagcttcaacgataacaagactgttaatgtgagtaggaactcacgccgctcagtgacaggcgtcgtcctcaaacctgatggaggactgagtgtcggaagagagcggaaacgaattgccagagcaatgtgtcataagttgtcaatcgggcgcctgagcgccgatgaagaggcgaaactccgcggcctcctggcatttataagctctattgagccccgtttcgccgaacggctcaagtctaaatattccatctga

SEQ ID NO: 11769 - RNA, 927 nt, synthetic construct
  source 1..927: mol_type = other RNA
atggacggtctgatcagtaatgtagccgccctcgttggcgtgtccagcgcaagttgtaggaggattgcgaacggcgcccacaggaggtacaaggtgttcaccatcgccaagagaggcggtggtaggcgagttgtcgcccagcctgctcgcgaagtgaaagcagtgcaacgagccgtgtgtcagctcctttcagagaacctgcccgtgcacgatagcgctacagcatacaaggcaggcaccagcatagcggctaatgccgctgcgcatgccggagctcaatttctcaccaagttggacttctctgacttttttccatccattagtggggacttgattagcgatcttctgcgcagacgctgtgaacatttgacggaagctgaaatcgagtttgttgtcgatgtgtgcacatggcgtcctgacggccgtaaagtactttgcatcggcgccccctcttcccctctgctagctaatgcagtcatgttcgagttcgactgcgaggcgttcgaggccgcctctgagatgtgcgtctcatataccagatacagcgatgatattgccctgtcctctatggtgccagacacactccggcaggcagagactgcagtgagacgtatcatcgcttcaaggcccgccttgagagtcaacgagcggaaacgcgtggcagtggggagaggcacttccatggtgataaccggactaacgctgactaaccaggggggcgtttcggtaggtcgctcacggaaacgaggagttcgggccggggtgaatcgctatctccttggggaactcgacgaggctgatactctgaagttaaagggagaagtggcctttgtcctgagcattgagccggaattcaggggagtcctggtacggacctatggactgagagtttggacattactgccacggatggtggctggcgggtga

SEQ ID NO: 11770 - RNA, 924 nt, synthetic construct
  source 1..924: mol_type = other RNA
atgatcgggcttgtgagcaaagtgagctcactggtcggggtttctactagcagctgtcgcatcattgcacggggggcataccgtcggtataaaatcttcgccatcccaaagaataatggcggtagaagggtagttgcgcaacccgctcgggaagtcaaggccgttcagcgagccatttgccagatcctgtcagacaagttagaaatacatcagtctgcaactgcctacaagccaggctcctcgatattagccaacgccgcggtacacaagggagccaaatatctgacgaagctcgactttaccgacttctttggctccattgatggcgagtccatattccacctggtggagtccagatgccccgacttgtccgctgccgagctgaaattcatagtcgacgcgtgcacctggcgacctcaaggacgtgctgtgctatgtattggggctcctagttccccttttctcgctaacgccatcatgttcgaattcgatgccaaagccttcgacttggcaaacagagtggatgccaagtacacccgatattctgatgacatcgctatctcgagtctaaagccggatttgctgaaaggattagaggagaacatcaggaatctggtgcgcggctctcggctcccatatattaggctgaacgatcagaaaagagtggcagttggccgcagcactagcatgagtattacaggtcttacactgaccaatcagggcggcgtatcagtgggtagagaaaggaagagaggggtgcgggctggagtctctaggttttttaatggacagctgagtcccgcagagattgcaaagctcaagggggagattgcgtttgtgttgagcatcgaacctaacttccgcggagtccttatcaatacatacggtctgcgcgcttgggagctcctccccaaatcacagtga

SEQ ID NO: 11771 - RNA, 918 nt, synthetic construct
  source 1..918: mol_type = other RNA
atgaacggtcttgtagcacaggtcagtcagatggccgggatctcctctagctcctgtcgactgattgccaggggcgctcatagaagatataaaaaattcaccatccggaagaagaatggggggatcagggtggtcgcccaacctgctagagaagtgaaggctattcagcgagcgatatgcgtcatactgtctgaaaaactgtttgtccatgccagcgccaccgcctacaagatcggcagttccatcctgtcaaatgccgctgcccacgcagagagccgttatctcagcaaattcgacttctcagatttcttcccctctattggggcagactcgctgatcaatttgctggctatcagagtgcccaatctctccgaggccgaggttcgcttcgtggtcgatgcctgtacatggcaacccaacggccgcgccgagttgtgcattggagcaccgtcgtcccctctgctgagtaacgctgtgatgtacagcttcgatgaaaacattttctccgcgttggctgagatgggagtgagctatacacgctactctgatgacatatcaatctcaagtaagcgcgaaggaattcttgctgacgccgagctgttactcagggctgcagtggcacgatcccgctttccagttctcagaatgaatgaggagaaaagggtcgccgttggccggggagtgagcatgacagtgaccggccttactctgacgaaccagggtggtgtgtctgtgggaagagccaggaaaaggggggtacgggcgggtgttgaaaagtttgtgagatttggcgctaccgaggtagaatttgcacgcctcaagggcgagttagcatttgtcctgtctgttgaaccagagtttcggcaggtgttgatcaggactcacggggaacggattctacgtctacttcctcggtga

SEQ ID NO: 11772 - RNA, 951 nt, synthetic construct
  source 1..951: mol_type = other RNA
atgataggcctggtcagtaccgtgtcattcttagccggcattagtacggatagctgcagacgcattgccgcttccgctcaccgtagatacaaagtcttcactatcccgaagaagaatggcagggacgtgcgcgttgtcgctcaacccgcacgcgaggtgaaggccattcagcgggcgatatgcgctgcccttaacgaatacctgcatgtgcatccaaccgccaccgcctacgtcaagggcagctcgatcattgcgaatgctgggatgcacaaacactgtaagtacctgactaagttggatttcaagagcttctttccctccatagacggtgagagcatcgagcgagccctccgctctaaaatcgctgacctatccgaatctgagatacagtttgttctcaacgcatgcacatggcgacccgaagggcgccaggttctgtgtattggggctccttcttctcctcttatgtctaatgccgtgatgtatgattttgaccagctggcaaacattgaatgtcgtaacatgggtgtcatctatacaagatatagtgatgacatctcaatctcaagtgagcaaccagataagctgtctctggcagagaatcggattagagaaatcatccagatccagagccaacctaggctcttcttcaacgattcaaaacgagtagccgtgggtaggggaacagcgatgcgggtgactggactgacactgagcaatgaggggaaagtgaccgtaggcagaacgagaaaacggggagtgagggccggcattagccggtatatgcggggactcgtagacgaagaggcattgcagaagttaagaggagagatctcctttgtgctttcggtcgagcccgaatttaggaaagtgctaatccgcacttacggcatatccgtggttaggatcttgcctccaaggattgcatccaaaaccggggacattaagtga

SEQ ID NO: 11773 - RNA, 936 nt, synthetic construct
  source 1..936: mol_type = other RNA
atgtccgaattcatcgatcaggtggcagcatctcttggtctgagtagaggggtgtgcgaaaacatcgcaaggacagcacaccgtcggtacaaggtgttcttaattcctaagaagaatggaaggggatttcggacagtagcgcaacccgctcgcgaggtgaaggccattcagcgcaccctggttctcatgctcgatcagctgctacctgtgcatcctgccgccacagcttaccgaccagggtcaagcatcctcaggaacgccagagcccatgtgcgggccaagtacatcacaaagcttgacttcgaagctttttttccgtatatagataggactagcctgggtcgccacttaaggcagcacttgtcacacctggacggcgatgatattgccttcattctgtctgcctgttgctggacccccaaaggaactacgacccagcgactgtgtatcggtgccccaagcagcccaatgctcagtaactctataatgcacgacatagactccgacatccagacctattgcgaagaggtcggagctgtttatactcggtactctgacgacatctgtatctccgccacaatgcctgatgtcttggcaccattagagcaacgcattcgtcatcggattagagagagcactagacccactcttaccctgaacgaggccaagagagtagcagtcggtcgcgggtcggctatgaatgtcacggggcttgtgttgtccaatgaaggaacagttaccgtgggcagggagagaaaacgcggcgtgagagctggggtcatgcggtatctgaaaggcgccctggacctgaatgaaaccgcaaggctaaaaggggagctggcttacgttatcagtatagagcccggcttccgatttgtgctcgctaaaacctacggcatggagatccaggcgttgctcccgtcagcgggcatttga

SEQ ID NO: 11774 - RNA, 936 nt, synthetic construct
  source 1..936: mol_type = other RNA
atgatcggactcgtgtctcaagtggctgagaaagttggcatcagctcacaagcttgtcgaagaatcgccagctccgcatatctgcgctacaagaaatttgtgatccctaagagcaatggccgcgatttcaggttcgtcgcacagcccgcgaaagaggtaaaggcaattcagagggccttagtggaaattctaggagcgtatctccccgtccacgactctgctactgcttataggattggcctgtctatctgcgataacgctcggcgccacgccagtgctaagtttatcaccaagcttgactttagtgacttcttcccctcgatagacgcacctgcgctgagcgcacatttacgggcccacattgccaatatctcagacgcagaggtgatgtttattatgaacgcatgtctgtggcgacctgaagggagacaggtgctttgcataggggccccatcttcacctatgttgtccaactccgtgatgttcgagtttgatacactgatctccgggctagcttcacaggccgatgtcgtgtatactcgctacagcgacgatattaccgttagctcgagagaaccggacaagctcaggggcattgagatagctatcaggaaagcttgcgccacgatgtcccatccaaaactcgaaatcaacgagaagaagagagtagccgttggtagaggtaacgccatgcgggtgacagggctcaccttgacaaatgccgcggatgtaagtgttggtcggctgagaaaacgtggagtgcgtgcaggaattaaccgatacgtcaatggcgatctggacgacgatcaggtggagaggctgaaaggggagttggccttcgttttaagcgtcgaaccaaattttgctgaagcccttctgcgctcttacggcgccatgtccctgagtaagatacttccacggaaggtcctgccctga

SEQ ID NO: 11775 - RNA, 930 nt, synthetic construct
  source 1..930: mol_type = other RNA
atgaatggcgatctcctcagctttgtggtggctcagacaggcctgtctcgccaggccgtcatccggatatcagagacggcgcggcatcggtacaaggtcttctcaattgataaaaaacggggcggaaaacgcatagtcgcccaacccgcgagggaagttaaagccgtgcagagggccatcgtagccgctctgtctagcagactgcctgtgcacgagagcgcaaccgcatatgtcccagggtccaagttgattaacaatgctattccccacgcggggcagaagtacctgttgaagtttgacttcgaaaacttttttcctagtatcgacgatagcgccataaggaaggcactttccggcgagacacaaaacggcttctctcaggatgatatcttgctggtggtggggtcttgtctctggaggccccctggatccagcctccttggcttgtgcatcggggccccaagtagcccttttctcagtaatgctgttatgttcgaatttgacggcatcgtatcccgattagcccgtgagctgggtatttcgtatactcggttctcagacgatgtgaccttctctggccccgacgctagttctctgtccaaaatggaactggggttcagggagacatgtagagagttaaatgccccaaagctagtcgtcaatgagaagaaacgcaccttctgctcacggggagcagcaatgagagtgaccgggctaacactttcgaacggaggaggagttactgttgggagggctcgtaaacgaggagtgcgcgccggtgtcgacaactacctgagaggtaccctggacctgaagaaggtggaaagactgcgcggtgaggtagcttttgtgatttccatcgaaccactttttcgtgatgtgctcattgcaactttcggcgaccgagtgagagacgttcttccgagctga

SEQ ID NO: 11776 - RNA, 942 nt, synthetic construct
  source 1..942: mol_type = other RNA
atgacactgggactgataagtgctatcgcatcagaagccggcatcagcaaggggtcagctctgcgcgtggccgtaagtgcgtataagaggtacaaggtgttcaagattaagaaacggtctggcgacggaacacgtactgtggcccaaccagctcgggaggtgaaagccattcagagagctatcgtccagttcctttcttcccgtttgccagtccatgacgcagctacggcatacgttggcgggtcttctatatatgcgaacgctaactttcacgctggggcccgctatctcctgaaaatggactttagcaacttcttcccctccatacgacccctggatatcgaacgccacctgctgagacacctcgggagtgagatttcgccagcagaggtttcctttgtgatccaggcatgcatttggagggatccagagatgggtggctttggattgtgcatcggcgcccctagctcccccttcatcagcaatactattcttcacgagtttgatacatcagtcaggtccgtgtgtgacgagtatcttgctaagtacacccgctacagcgacgatatgaccttttccgcagatggccctgatgtgctcgccgaagttgaaagaagggtgcgcgccgtggtaaaggaaatgcgaagccctgtcctgttgctgaacgagaataagcgggttgccgtgagcaggtctgcagccttccgagtgaccggactcaccctacctaatcagggaggcgtgtcagtgggaaggaaacggaagagaggggttagagcgggtgtgcataaattcgtcttagggcagttggacgccaagggcgtagaaaaactaaaaggtgagttagcgttcgtcctcagtattgagcccgagtttcggtacgtcctggtagaaacttacggcggagccatccaccaacttctgccgggtaaatggcattga

SEQ ID NO: 11777 - RNA, 957 nt, synthetic construct
  source 1..957: mol_type = other RNA
atgaccactagactggtgaaccgcctgtctcagcaggtaggcctccctgcgggtgacatagagaggattatctcctcagctccccggaggtacaaagagtttaagatccggaaacgcagtgggagcggtttccgtgatatcgcgcagccttcccgcgaactcaagattttgcaaaaggctgtcgttgaggagctgaagcctcacctgccaatacatgactgcgtgcatggctacgttattggccgggggataaaaagtaatgctgcagctcaccggaagggccggttcatcctgaagatggactttgccgatttcttcccatccattaaacccgtagatttccgtgcccacctccgagaatcccttcctgacagatacgatgatatcgaagctaggcagctggagcttttactcttttggctcaagcggggcgagagaaccttgcgcatgtgtataggagccccgagtagcccaagcatctcgaattacctgatgtatgcaatcgactcacgaattacggagaactgcaggttaaacgcagtgacttatactagatatgccgacgatctcaccttcagctgtggagaagagggaatcttaggggaagtggaaggtgccgtgtctagaattgtcggagagacagtccatccaaggcttcgcattaatccggataagaccattcacataagccgcaagcagagacgcaccgttacaggagtgaatatcacacccacaggagaactgtccatcggccgagatcgtaaaaggctaatcagagcaatggtgcataggcacattcgggggctgctggacctgagaggtcaaaacgaactgatcggcctattggggtttgctcacgacgtcgagccctcttttgcccagaagatgtgggcatctttgaaaggcgcccccgcccttaaacgatcaaggcgggtggactatatgctggaggggtga

SEQ ID NO: 11778 - RNA, 939 nt, synthetic construct
  source 1..939: mol_type = other RNA
atgacaaccaacttggtgcatctcctgagcagagaagtagggcttcccatctccgacattgaaaagattattgcaagtgcaccgagacgatataaggagttcaagattctgaagaagaacggcaggggcgttagggacatcgcgcaaccgtctcgggaactgaaagcgctccagagagccgttgtgtccaaaatagcaccacgactgcccgtgcacgattgtgtccacggatacgtcctgggccggggcatcaagagcaacgctcaatctcatctgggaggaagcttcattctcaaaatggatctgtcagacttttttccaagtatcaaaccagtggatctgcggcaccatctgaacaaattcttacctgaggagtttgacgatgtggagcttcgccagttagaattgatcctgttctggataaagaaaggcacctctattttgaggatgtgcattggggctccctcgtcacccctcataagtaatacaattatgttcgacgtggacctggaaatcgacaatctttgccgccagtatgacgtcaagtacacccgttacgccgacgatttgacatttagctgtagtgagaagggtgtgctctcactaatccagaggggggtcagcctcatcgtgcggtcatccaagagccctatcattaaaatcaacgaggagaaaactcttcatctaagcaaacgggctaaaataaatgtcactggggttaatctgaccccagatggttccctgtctatcggaagggagcgcaagcgactgattcgtgtaatggcccaccaccactccctgggctctctggatgccgaaggccagaataagcttatcgggttgctcggttttgccttcgatatcgaacctaactttgccatgggagtgtggggggctttagccggtgcacctaagctactcagaacggagagacgctga

SEQ ID NO: 11779 - RNA, 927 nt, synthetic construct
  source 1..927: mol_type = other RNA
atgtccacacctctggtcaaactcctgagcatgagcgttgggcttaccccaacggacgtgatgaggatcattagtagtgctccaaggcggtacaaagagttcctgattcccaagaacaatggccgcggccataggaagattgcccaaccttcacgggaagtgaaactgctccagcgtgccttgtgcgagtctgtgctgaccggctttcctgtgcacaatgccgcacacgggtatgtacggggaagggggataagaaccaatgctgaagcccaccagtctgcgaacttcattctcaaaatggattttgagaacttcttcccaagcatgaaacccaacgacctgagactacatttgcagatgtacgccagtacgagatttgatgagaacgaagtccggcagcttgaattaattctgttttggcttgagaagggttctgattccttgcgaatgtgtatcggagcaccgtcctcccccatgctaagcaacacatttctttattctatcgacgcgcagttaacagcagtctgcgacaaatcgggcgttacctacactcggtacgccgatgatttaacattcagttccagcgaacccaatctgcttaaggaaatccagaatgagactgagctgatcataggtaaggccgattatcccaaactcaaaataaacaaggacaagaccatccatatcagcaagcgacaacgcaggactgtgacaggcataaatattactccttccggaaaattgagcatcggccgcggacgcaagagactgatgagatcaatggctcatcgtcactcacagggaatcctctctaccgaggaccaaaagatgctcgggggtttgattgccttcgctgcagacatcgaccccgggctcgctgtggatattaagctgtcactgctgaatcacccaccgctggcaaagtga

SEQ ID NO: 11780 - RNA, 945 nt, synthetic construct
  source 1..945: mol_type = other RNA
atgacaacaggtcttgtccagatgctcagccaaaggagtggcctacctcaggccgacatagagcggatagtggcctctgctcccagaagatacaaagaattcactattcccaagaaaagtggaagaggcctgcgggaaattgcccagccttccagggaacttaaactgctccagcgcatcattgtggacgcggttctctctaggatgcaagtgcacgagtgcgcacatggttacgttgcaggccgcgggatcagaaccaatgcagccgcgcacgccaggtccaagtatatcctgaagatggactttaaggacttcttccctagcctggtgccactggatctgcgcagctacttgcagaagcaccagccctccgggtttaccgaacaagaagttaggcagttggagcagatcttattttggaggaaaaaggggagtaacgtgctgcgaatgtgtgtaggagctccgagcagcccagcactgagcaacgcactgatgtacgagctggatcagtcaattagcgatgcctcatccacacgaggcgtgacgtacactcgttatgcggacgacctgacctttagctcaagacaaaaagatgtcctcggctcccttctgaccgaggtcatcgctatagtgagtgagtctaagtctccctatctaaggattaatccctcaaagactatctccatctctagaggtcagcggcgaaccgtcacaggcgtaaatattacccctgacgggcgcttatccatcggacgggagtcgaagcgtctcatcagatcaatggtcaactatcatgcctcgggcaaattggacgaggaagggcaggctcgcctcatcggacttattggattcgccactgatatagagccagatttctccgcccgcatgcggattgctttgctcaacagtccacctctgttagctacgccgtctcggtctgtgtga

SEQ ID NO: 11781 - RNA, 936 nt, synthetic construct
  source 1..936: mol_type = other RNA
atgactacaagactggcctcatccttatccaagtggtctggctttgcactcccagatgtggagcacatcatagcaacagccccgcgtaggtataaagtgttcactatccctaaaaagagaggcggcctaaggcagatcgcacagcccagcagagagttaaaaagtttgcaggtgctgctgattggccgcgtcctccatcatctgccagtgcacgacgccgcccacggatacgtgattgggaggggaatcaagaccaatgcgcaggcccactccaaatcaaactacctgctaaaaatggacctcagagatttctttccaagcattcggccccgagatctgcgcgcccatctgaaggtgcaagcagagggatatctgacagacgaggaggttggtcagctgtgtaatctcgtgttctggcgaccaaagggacaacggggcctgcgtctatgcattggtgcaccctcttctccttttctcagtaatacgattatgctcggggtagaccagaagctcgcggaggttgccaggtccttaggggtcctgtataccagatacgctgatgacttggctttcagcagtaacgaggctgacgttctccctgctctggaggcaagggtgatagatgtcgtggaaggcagtcgattccctaagatcttcgtcaaccgggaaaaaaccgtgcatatctcccgcgctcaaagacggatgctgaccggcctgatcttgaactcagtcggtgacgttagccttggacgggatcgcaaaaggttgatacgcgctatggtgcagagctctcgctacgggaggctggatgaaaaggaattggaaaagcttaatgggcttctttcgtttgcccacgatgtcgagccgggctttgccatgaagatgagagcccggatggctctgccccaggtagacgacggacttggggaagtatga

SEQ ID NO: 11782 - RNA, 963 nt, synthetic construct
  source 1..963: mol_type = other RNA
atggacctcatactccaactagccaacgatttggggctcgctaatagagatattttactgattgccaactcagccccgtatagatataaggaatacaagatccccaagaaaaagccaaatacctttagagacatcgcacagcctgcccgggaggtgaaaatattgcaacggtgggttattgagaatgtgctgaccaagctcccaatccacaacgccgctactgcgtatattaaggaccgaaacattaagtacaacgcaatgctgcatgcaggcaatccgttcgtgctgaagatggacttttctaacttctttcctagcattgtcccaaaggactttaagacccatttgcttaggcacttacccaacatgtacactgaggatgagattaatctgctgctccgcattcttttctggaggaacaaaaaagaagagcggtttcagttgtctatcggtgggcctagttcccccaatctctcaaactccataatgttcgaatttgactcactgatcagcgatgagtgcaacagcttgaatatagtgtacagcaggtacgctgacgatctggttttctcctccattgatttcgaccttctgaagcgtatccacaatcaggtggccatttatctgaaaaagatcccttaccccaagctcaccctgaacaatgacaagacaatgttcctatcgaaaagaggaaaccgcacggtaacaggagtcatcatcactaatgatgggagtctgagtcttggacgggatcgcaaacgtgagatcagctgtcagatcaattggcacaaaaagggcaacttaaaaaggtctgatactctaaagctgcatggcatgctgtgcttcgctaatgacattgaaccaggttttatcgatcgaatgcgcacaaaatatggcatcgataccattcacgaactgatacatcttgacacgtctaaagaccagaagacaatcaaaatctga

SEQ ID NO: 11783 - RNA, 924 nt, synthetic construct
  source 1..924: mol_type = other RNA
atgaagctgctccgggaggtggctattgagaacggcctcgcccccgaggaactgatctacataggcccctccttgcccagtcgatatcgagaattcgccattatgaaacgtgacggaacacctcgctggatcgcacaccctgctagagaacttaaaggcatacagcgctctattgtgagatcactaatatcccagtttccaattcacgactccgctactgcctacaggctggggtttaatattagaaagaacgtggagccccacgtgcgccaggagttcatcgtaaagatggactttgcgaatttctttccgagtatccgccctcatgacttgatttcctatctttcgaacacccagtttaagctctcagatacggagataaaattcctaactcacgccctgttctggaagccaaagaaggcttctgacctgaggctcagtattggcgctccaagcagccctccgctgtccaatgcccttctgtacgattttgatgtacatgtggacgccttatgcagagtcaatcaagtcaaatataccagatacgcagatgatatgacgttcagcgctactaatacacagagcctggaagtggttcacaagcagatcgtcaggtttgtcaaagagatgaagtctccaagcctgcgtttgaacacaactaaaaccatctggttgagcaaggcacatagacgcaatgtcacaggtctgatcgtgacccctaacggagagatctcaatcgggagggaccggaaaaggttaatctctgccaagctgcatcactactcattaggacggctcggcgttgcggaaaccaaacacctccatgggctgctcgcattcgccaacgccattgagccccagttcgtggatcgaatgcggcggaagtatggtgttgaagtgcttgcactgaggcaccaaaaatga

SEQ ID NO: 11784 - RNA, 954 nt, synthetic construct
  source 1..954: mol_type = other RNA
atgtctctgctttcagaactcatctgggccacaggtttaccacagccggagctgatgagaatcatcacgactgctcctagccgatacaaagtttaccagatacctaagcggactggaggatggcgggaaatcgcccacccagcaagggagttaaaagcccttcagcggctgatgcttaacaagtatctgattaacttccccgtgcatcaatcagcaatggcctatgtgaaaggccgaaatataggagataatgccgcgattcataccgactcaaactttttcctaaaactggacttcgagagattttttccaaatattaaggtcaaggactggattcggttcctgaaaaataacaacttccaacctttcctctcggacgagatccccattacttcccagattctgttttggggcagcggacaccgtaagccacagtgcttatcaatcggggcaccgacaagtcctatcctcagtaatatcttgctgtacgacctggatgttgaactcagtgcccacgcgcaggccatgggggtaaggtacagcaggtatgccgatgacattaccatatccggccagaccatcgaccagatcattgctttcgagtccttggttcggcaacgcatcagacacctggcatctcccaagctgaaattcaatgatagcaaaaggggcgtatacgggcgtagcgtcaagaggatggtgaccggtttggtggtgacacctgctggcgctgtctccataggaagagatcgcaagagggctatctcttcccttgtgcatcgcttttctctcggccaattggatcaggatcagctggggtacctaaaggggatgttgggctttgccaaggctaacgagcccgaatttctcgatcgcctccgagcgaaatatggtgacgctgtgattgacgccgcaacaaaactgcacctgccacccagaaaccgcaaggactga

SEQ ID NO: 11785 - RNA, 966 nt, synthetic construct
  source 1..966: mol_type = other RNA
atgaggctccttgaggagttggccatcaatctgggattagggactgccgaaatagaaaccatagtcgaaactgcaccggctcggtacaaagtctacgacatacctaaaagatcaggcggcacaaggactattgcccagccatctagggagctgaaggcccttcagagatatattctgtccacgaaactggtaaagttcccagtgcacaagtcggctatggcctacttacccggcaaaaatatcgctcgaaacgccgaggagcacttaaatggtaatatcctcctcaaactggatttcgaaaacttcttcccttctatcttggttaaggattgggagagctttgctaagaagcaccccgtgcaagtcattcccgtcgaggacatcaagctgtactctaaaatcctgttctggggtcagaggagcaggacacccagatgcctgagtattggtgcgcctacaagcccgatgctgtcaaacttgctgctgtttaccctggatgagcagctggatgaggctgcccggaagtgtagtgtgaattatacacgttatgccgacgacatcaccgtgtctggatccactgttgagcaggttaccgcatttgagaaacttgcaaggaaaattgtgaagagcctccgcagtcctcggctgatttttaatgaagaaaagcgcggcctttatactcgtggacaacggcgaatggtaaccggactcattattacccccaacggcaccctgagcatagggcgagaacgcaaacggacgatctccgcgatgctccataaggcacttctgggtgagctcgacctagagtccacagggcatctaaaggggcttctcggcttctcactcgctaacgaaccattgtttgtgaacagaatgagagagaaatacggagatgcaatcgtggaccgcgtgctgcgcttgaagttgccagaaagaatcctacaggaagggaagcagggctga

SEQ ID NO: 11786 - RNA, 969 nt, synthetic construct
  source 1..969: mol_type = other RNA
atgagtctgttaacagagctcgtgcaggaattcggccttgggcaatcggacctcctgcgtattatcgacaccgccccagctcgatattcagtctatcctatccgaaaaaggaacggaggcttccgcactatcgcacagccctcacgtgaggtgaaggcaatacaatactatatcctggagaagaagctgggtgtgtttccagttcatccctctgccatggcttacgtcaaaggtaggaacattcggcagaatgcggctagccacgccagttctggacctatcttgaagctagactttcaggaattcttcccaagtattggggtgagagattgggaacggttcgtgaagtcccatcctgtggacgctattgatctttccgacctcaaatactacagcaagattctcttctggggtcaacaccggaagtcaaacgtccctaaatgcctgtccattggcgcccccacctctcccattatctctaacatcctgctgtatgaccttgatgtgaagatgtctgccctggccgagctgctgggggtagtatacagccgctacgccgacgacatcactgtgtccggccagtgtgttgatgaggttctggagtttgagaggctagcacgccgggaagtcaaatcagctaagtccccgaaacttactttcaatgaggagaagaggggactctattttagagggcagcgtcggctggttaccggtctggtactgacaccaaccgaacgcgtcagcttggggcgaaaaagaaaacggacaatatccagtctcctacacaaaagcacgctcggccagttagatccgaagagaagagggtacctcaagggcttattgggatttagcgtggctaatgaacccgagtttttgggcaggcttagaaggaaatacggagatgaagccgtcaatgcggcactggtgtatttcgtgcctaagcgcatagatcaggaagcattgttttga

SEQ ID NO: 11787 - RNA, 984 nt, synthetic construct
  source 1..984: mol_type = other RNA
atgtctctgatccttgagttagctgaagcgactggactgtcatctggggacatcgaacgggtaattcgcacagctccagccaggtataagacctacccgatcgaaaagcggagcggcggcatccggatcattgctcagcctagtcgagagctgaaggtgatacagaactatatactgaaagagaaactcaaggactttcctgtccatagctgcgccatggcatatgagaagggaagaaatatcttcgataacgcagcctcacatgtcggcagcagagtcctcatgaagcttgacttcaaggatttctttccaagcattaaggtgaaggactgggaacgttttatcgcggcttcatccgtggaaaccatttcccccacagaggtctatctctactccaaggtgttgttctggggcgagaaacgccgctcatctgtacccaaatgtctgtccattggtgccccaacaagccctaaggtgtccaatatcctgctgtacgattttgatatgactatgagcggtaaggctagatcgttgggactgtcgtacacaaggtatgccgacgatattaccattagtggagatactgtggagcagatccttctgctggagcgggaggccaaacagattttaagaaagatggcacaccccaagttgaccttcaatgaagcgaaacgaggtatttactctaaagggcaacggcaaatggttacgggcctaatagtcacgcctcaggcagtggtgagcatcgggagagaaaggaaacgcgaaatatctagtctgctccacaggagtttactggggcagctcgacaatgaccgccggtccctcctgaaggggctacttggtttttgcgtggccaacgagcctgagttcatcggccgtttgaggaggaaatacggcaacggagctgttaacgccgccatgaaattccacgccccaaaacgagcaagagttcagccgcccccccctccaaccctcttttga

SEQ ID NO: 11788 - RNA, 951 nt, synthetic construct
  source 1..951: mol_type = other RNA
atggagctggttgaggcaatagggttgagcgtggccgacatcaatcatgtaattgacacagcccctgccagatatcgcgtgtaccctatcgaaaagagatctggcggcgaaagaatgatcgcccagccatcacgggagctgaaagccatccaaaggtttattcttagggagaagctttcctccttccctgttcatcactgcgcaatggcttatgaggagcacaggagcatttacgcgaatgctcagatgcacaagaatacccgggctatccttaaactcgattttcaggagttcttcccgtcactgaaggtagcagattgggagatgctcgtgtcaaagcttaagcccaacgcaattaatatctctgacattaagctgtactctaagatcctgttttggggccagcagaagggtagcaaattccccaggtgtctgtcgataggagcacccacttcacctaaaatgagtaacctactgatgttcgactttgatagcattgtggccgaaaaggccatcgagcacggactcaactattcccgatacgccgatgacatcaccatttctggcgattctactctcaagattaccactttggaacgcgatatccaaaaactggtcagaagtatgaagtccccacggctgacatttaatgaagagaagcgaggcctgtacacgaaagggcaacgccggatggtcacaggtttgatcatcacgccagctaaagatgtgagcatagggcgtgatcgcaaacgaaacattagttccatgctacatagagacaccctgcgcaaattagacgtcgacagcaggggtcagttgaaagggttcctcggattctgcgcggctgtggaaccacagtttatcgaccgtttaaggcacaagtacggagatgctgccattgaccgggcgatgaaatatcatacccccaagagaagtataaacgaaacatga

SEQ ID NO: 11789 - RNA, 957 nt, synthetic construct
  source 1..957: mol_type = other RNA
atgtctctgctgctcgaattagtccaacatacagggctctccgccgctgaattgcgaaggattatccagaccgcccccaagaggtaccgcgcatttcctattagtaaaagaaacggaactgagcggatcatcgctcagcctagcagggaggtcaaggaactgcagcgctacctactggaccagaaactcacagggttccccgtgcacgatagcgcgatggcctacgaggcaggtacttcaatcagaaaaaatgcctaccgtcataaaaacggcaactatattttgaagctagacttcaaggagttctttccctcaatcaaacccagggatctggagaatctgattaggcggtcaaaacgggaggagattgctgtttccgacatccctatctaccttaagatactcttctggggcggactggataagtctaccatcccacagtgtctttctataggctccccgtcaagtcctcgcatcagtaatatactgatgtttgacattgacgagcgcatctgctccgaggttcagaaattcgacgtgatgtatacacgctatgccgatgatattactcttagcggcaaaggattggaagtggtacgggccgcagaagacaaagtggtccaagtcgttcgaaagtccagattcccaaagctggaatttaaccgggataagagagggatctattcgagagctgtaaggcgaatggttaccggcctggtgattacaccagtgggcagcattagtataggacgtgaacggaagcgggagataagcgccctgctgcaccgctctagcttgaatcagctcgtgaccgaggagagaggtcacttaaagggtcttctcggattttgtgtcgcatgcgaaccagagtttgtggggcgaatgagggaaaaatatggccacaagacgatcgacgaagcgatgaaataccatgtgccgaagaagcgtgggagatga

SEQ ID NO: 11790 - RNA, 951 nt, synthetic construct
  source 1..951: mol_type = other RNA
atgcctattctggatgatttagtgagtgacctcggttttagtttcaaggacgtgagccggattatttccacggcccccgccagatacaaagtatatgggattccaaagagggatggcggatttagaattatagctcagcccagtcgggaattgaaactcatccagaggtatatcctggagaacaagctgaacaaatgtaaaatccacgaatgtgcaacagcttacgtgaagaataagagcatttatgagaacgccgaagtgcataagtctgcggacaagattatcaaacttgacttcatcaacttcttcaacagcatcaaacctcgagattggcgcgccatggcccctaagcttgatgggtgcctgtttgaagcctcggacttggagatctatatcaagattttcttctggggccatgtgaaaaatagctccgtcccgcgatgccttagcgttggcgctcccacctccccatctatctcaaacattctcatgtacgatttcgaccaagcagtttttgcagcggcaaaggaccttaatatcaactatactcggtacgccgatgatattaccctgtctggcgactctatttcccatctccacaaaatggaatcacacgttagaaagtccctgaagatcatctcatttcccaagatctcaatcaatgagaagaagcggggtctgttcaccagggcaggtcgaagatcggtcactgggctcatcataacccctgacggaagcatatccatcggccgcgataaaaaaaggctgattagcgccatggtacaccacttcgtgacaggagagatgacagaagaaggaaaagctaaactgaaaggctggttagctttttgcgtggacaatgagattgagtttgtcgagcgtctgcgcataaagtacgggaatgaggctatatctaaggccctaaagtactacataaaaccattgagttga

SEQ ID NO: 11791 - RNA, 981 nt, synthetic construct
  source 1..981: mol_type = other RNA
atgactatcgggctcctgaaagagctcgggattaaactcggaatggggaggtccgacctgctgaggattatttctaccgctcctaagcgttacaaggtgtatcaaataccaaagagaagaggaggcacacgaactatcgcccagccctcacgtgaactgaaggctattcagagagtgcttctaaaggccgtgctgtcaaagtttcctgttcacgccgctgcaacaggctacgtggagaatcggtctatacttgacaacgccgtcgctcacatgtcttctcgggttctgctgaagcttgatttccgcgatttctttcctagtatcgtcccggatgactggaggaggttggcgagagcaaagttcgttgatctggacgaggatgaggtgtggttaagcactatgatcttgttttggggccaaaaaagcaccaccccccggtgcttatccataggggcgccaacgtcacctatgctgtctaatattgtgatgtatagccttgacgtgaggctcgctgaagccgctgccgctactaataccacatacactaggtacgcagatgacatcaccgcaagcggacccacgatcgaggatgtgcgccagtttgaggcctacgcgcgggagatcgtgggcagatccgtaagcccacagctgacattcaacgaccagaagagaggtatctactcttcggggcagcgacgcatggtcacaggtttagtgctgaccccgagtaatagcgtcagtatcggcagagaacggaaacggttgattagttccatgctggaccattggattaaggattccctcgacaacgaacgcaaggccaggctaaaaggtctgctcgctttttgtatcgcagccgaacccgcattcgtttcacgcctccgtgccaaatatggcgacggccccgtcaacgatgtattgcgatatcatatagtacgcaaaggaccacctccacgacaggccggaaaatcgagctcctga

SEQ ID NO: 11792 - RNA, 963 nt, synthetic construct
  source 1..963: mol_type = other RNA
atgtcgctgttcgaggatctgctgtttttcaccggtctgagcgccccagacctcagaagaattattgccacttcacccgcgcggtacaagcagttcactatcgccaaaaagagtggtggcgagaggttaatcgcccaaccttctagggacctcaaggtgctccagcgttatatccaggggaatatcctgtctaagggtaccatccacgcctccgctacagcatataaaaatggagcgtctataaagcacaatgcgaacatacataagtacaacagggtgatcttgaaatgcgatttcaaggactttttccattccatcaagccacgagattggattctttatgcccaggagaatttccacagcttgtcacaagacgacgtggggctctgtgcccgcgtcttattttggggcaggggcaccagtaagcccgcttgtctttccataggcgccccaacttctcccgtcctctccaacctgatcatgtttgatctagacgagaaactgacacggtctgcagaaaagatcggggctacatacacacgctacgctgatgatatcaccctaagtgctgacaagattgaaaccgttctgctgcttgaaaaacgtcttaaatccgctgtagcaaaaagcaagtatccgaaactcacttttaacggggataaacgaggactgtatacgaccgcacatcgacgcaatatcacgggactgaacattacacctgatgaagaaatcagtataggacgggacagaaagcgcatgatttcatcaatgatacacaagtacagcatcgggcagttgagcgagaaggacgccggcaaattgaaaggctatctggccttcgcatacgactgcgagcctgactttattgagcggatgattagaaaatacggagaagagcagatcagcattattcggcagttacacctgcctcccaggcaaagagatattgaattcccagagtga

SEQ ID NO: 11793 - RNA, 954 nt, synthetic construct
  source 1..954: mol_type = other RNA
atgacgcttttcgacgagttatcaatcctgactggcttgggagcgtcagatctgaaccgactcatatacaatgctcccgctcgctataaggaattcccaattaagaaaaggagcggagaggaccgtatcatcgcccagccgagcagagaacttaaaattgtgcagcgatatatagcaggactcgtgctcaacagactgcctatccatagcgccgctaccgcatataaggagggggccaacatctttgccaatgttcagtcccactcggccaatagaatcatcctgaaactagacttcaccgatttctttcacagtatcaaacctactgactggaggaactacgcaaaggtgcatatccccagcctctccaaggaagatgtggaactctctgctaaggtccttttttggggtatgaagagtaatagacccatttgcctgagtatcggtgcaccaacatctccagtgatgtctaatctcattatgtatgacctggacgagcagtttttccaaattaccaatgatatcggcgtaacgtacactcggtatgctgatgacatcaccttgagtgggtctaataaagaaagcgttatcgaagcggaaaaagccatccgcgtcgcagtgcggaaatgtaagtccccaaagctgcttttcaacgagtcaaaacgcggcatttactccactgggcaacgcaggcatattacagggctgaacataacaccgtccggaaaaatctctttaggccgtgagagaaagcggatgatatctagcctgattcacaagtactcactgatgctcctggacgccaacgatgtcgggaagctgaaaggctacttggctttttccctagcctgcgagcctgagtttctgggtcggatgaggattaagtacggctcgacattgattgaggaaatacagaagacccacattcccgccaggaccttacctgagagctga

SEQ ID NO: 11794 - RNA, 966 nt, synthetic construct
  source 1..966: mol_type = other RNA
atgtccgagctagaccttctgcgcacagtggccctgaatgtaggcctgagtgaagagtctacgcttgagatcataagggacgcaccccagcgttacaaggtgtatccaatcccaaaaaagggcaaaggtcaccggatcatggcacagcccgcaagagaactgaagcccattcagcgcagcattgcagacattgtgctggagaagtttccagtgcacccgagcgctatggcctacagaagaggagttagcattgccgataacgcaaaggtgcacgccggcaagaatagtatccttaagctggactttgagtcattcttcaattccatttcagcggccgcctggcggaggttcatgaaagctcaggagatcatcgagctggaatctcatgaactcgccttgctgactaaggccttgttctggggcgccggccaaaggacaccatactgcttatccatcggagctcctagcagtcctctggttagcaacatcatcatgttcgaatttgaccgccagatgcacgactttgcggaaaaacatgggattcgatataccagatatgctgatgatatcaccgcatcggctcgcgaatttaaaaatttagctgccttcgaacgtcatcttcgaacttacatatctaggaacaaaacacccagcctgaagattaacgaggagaaacgcggtatttattcatcgtctgacagacgactcgtaaccgggctagtcctcacccctgatgggaaggtcagtctgggcagggagcggaagcgagagatcagctccttagtgcataaatctactctcggtcaattggatatagagcagttgggatatctccacggaatgctggcgttcgccatttcttccgaaagggattttgttaaccggctccggataaaatacggggaggacgctatctcatccgtcctgagatacagagtgcctaggcgcgatggaacagctcggtga

SEQ ID NO: 11795 - RNA, 921 nt, synthetic construct
  source 1..921: mol_type = other RNA
atgagtgacgcctcagtgctggagattatccagaacgcaccaaagagatacaaagtgtatcgcattccgaaaaaaggaagtggatttcggataatagcccaaccagcacgtgaactgaagacaatccaaaggtccattagcaagcttgtactagagaagttacccgtccacgcttcagccgctgcgtaccgacctaaaatcggcattttccataatgccgcggtgcacgcagggacttccccaattttgaagctggacttcgaacggtttttcaactccatcacggctgaggcctggcggcgatttgtggcttcacaggaggagctaaggctctccagaagtgagatggccctggttacccgtgcgctgttttggggtgagggcagtaaaaatccctcttgcctgagcatcggcgcacctacatctcccctgatctccaatgccatcatgtttcagttcgatgtcgaaatgagcaactttgctgaagaacgcggattgaggtatacacggtatgccgacgatatagtggcttcggcaaaggacttcaaggtgctgcaccacttcgagcggcacgttcggcagtacattaaaaagaacaagactccgagccttaccattaatgaaagcaagagagccatctattcacctggcgaccgccgattggtaaccggtcttattctcaccccagatgggaaaatcagcctcggtaggcatagaaagcgagagatatcatctctgatccatttcttccgcttaggacagctcgatcatgagaggctcgggtaccttcaggggctcttgtctttctctctgtccgtcgaacacgactttgtgagccgcatgagcagtaaatacggcaatgatgtcgtgtctgccatcctgaactacagggttcccagacgtgatggctcccctagatga

SEQ ID NO: 11796 - RNA, 960 nt, synthetic construct
  source 1..960: mol_type = other RNA
atgagcttgttagaggagcttcagacttacagtggacttgggtacggcgaactgggagctgtgctgcgaacagccccgcgtagatacaaggcctatctgattcctaaaaggagcggaggccacagaatgatcgctcaaccggcacgggaactgaagaatcttcagtattttctcatcgataggactttatcaaagctccctgtccattccgcagccgccgcctatagggagaacgtcggaattcgaagtaatgctgccgcgcatgcccgcaatgaggtaatcctcaaactcgatttttcagacttcttcccttccattaaaccaagggactggatgctgttctgcggctctctggatccagaagtggctgaggcatcaggcctagcaaccggggcagacgtcatgttagctaccaggctgctgttctgggggcgtgggacattcgagcccaagtgtttgtctattggtgctccctcatccccagtgctgagcaacgtgctcatgtttgcgtttgacacagcggtcgccgcccacgcaatccagaacgatgtggtttatacccgctacgctgatgatataactctctccagtgaccggtctaagcagattctgctagtggaggccgccatacggcgctacatcaagcggtaccgttcccccgctctcaccatcaacgaggaaaaaagaggtctgtataccagcggtcagaagaagatggttacgggccttgtggtcacacctgagaagcgggtaagcctcggcagagacaggaaacgaatgatctcttctctggttcacagatttacgcttactcaactggaattgccaaaaatagcctacctgcagggaatgctggcattcgcgcgcgacgtggaacctagtttctacgcatcgttggaacggaaatatgggcagcccaccatgagagctctgttggcctttcgcctacccaagagctga

SEQ ID NO: 11797 - RNA, 936 nt, synthetic construct
  source 1..936: mol_type = other RNA
atgtctgtcgaacccaaacattctctgattagaacttgtgccttggccacaggcctcacaatcaatgaagtggtgagaatagccggcattggccccaagcggtataaaatctaccaaatccctaaacggtccggtggccagagaacaatctgccacccatcacgcgagctgaaggccttgcagtatgttttcttgagagatatccttgcacagttaccagttcactcagccgccacggcctataaaagtgggagttctatcaagcagaatgcctcacgacatcttgcatctcggatcatcttgaagctggactttgagaacttcttccacagcattaaagtggccgactggatggcctatgctaaggcaaccttcccccactggactgcccacgacattgaatttagcctcttcgtgatgttttggggagccggtgggtacaagcctgtgtgcttgtcaataggagcgcccacttcccctctggtgtccaacgcccttatgtaccaatttgacggagtactgagcaattttgccgctgctaatggactcgtgtataccaggtacgctgacgatattacgatatccgcggagggccgtctagataaggacgcaataatggctgagattcatagcgctctcgacttaatcgaatacccgaggctgaaactgaacaccgctaagacaaaactggcttctaaggcaacctccaggcgcgtgaccgggctagttctggcgaacgatgggagcctgagtctggggagggagcggaagcgactgatttcggcaatggtacatcgcgcagtcaggggtcttgctgagcctgatgcgatcgcacatctccgcggcctcctggcttttgccaacgacgtcgaaccaagtttcgtcgcaatgctgcgtaaaaagtacggaagcttcgtcttagatattctccactga

SEQ ID NO: 11798 - RNA, 903 nt, synthetic construct
  source 1..903: mol_type = other RNA
atgtcaagtctcattgagaaaatttccgctgagactcgaatcagcattccagacgtgaagctcaccgtgcggacggcatcaaggaggtataaggtgtactctatccctaagagagacgggacagcccggataatcgcccaccctgcgcgagaattaaaagccatccagcgggccctgatcagtgagtctcccgcaagcctcagggtacattccgctgcgagtgcctatgaagacggatcatccattgcaaagaacgcaaatatccacgttaaaaattcttggcttgctaagttcgacctggagaatttctttaatagcatcactgtctccgcctggcagatgtatttgagcaaactggaggtcgatgacgagtacgtggaattgtcgtccaaagtattcttttggaaaccagagaggagaaagtctgacctttgtctaagcgtcggggctccatcaagcccgttcgcctccaacagatacatgttcagctttgaccagtacgtttccgactactgcaccaaaaacaacttggcctatagccggtatgctgatgatattgctatttcctctcaatctgaaattgaactgatccatctgcaggaggtgatagaggaaggcctgaaggagagtcggctcaagctaaattcacgcaagacattactgctgggacccggtcaacgccgcgttgtcacaggtgtgatcctgaaaaacgataagaagatttcacttgggcgtggcagaaagcgtataatcgaatccatggtgcacaattacgcaaaaggcaagccttcgtctagtctggaggtgataagaggccatcttgccctgttgaaaatgattgatcccgatggatacaacaggatccgaaagcgctatgaaaactgcaccagcctctttaaatga

SEQ ID NO: 11799 - RNA, 954 nt, synthetic construct
  source 1..954: mol_type = other RNA
atgtcacgagttctgaccgatatcgctgagcacctgggtgtcggaactgaggatgtgaggaagttcatctttgctgctcccgccagatacaaggtcttcagcatacccaaacgacgcggagggcagcggaccattgcacaaccgagtgccccgcttaaggagatccagcggttcgtggccgccaatcaactggccaccttccctgtccatgacgctgccgcagcgtacataacaggcaagtctattgcagacaacgctgcaagacacaggaaaggcaaatatctgctgaagctggatttcgaaaacttcttcaactctattactgtgaaggactggaggcgcctagtggctctgacacctaaccacgggattaccccacaggaccttcctcacctggaccgcatactgttctggggcggtggaacattttcccctatcatgttatcggttggggctccatcaagccccactatcagcaatatgattatgtttcggtttgataccgccgttagccagaaggccgcggaggtaggtgcagtatatactaggtacgcagatgacatctccatcagtgcccctactgccaaaacctgcttagaggtggagagatttgccgtgtccgcgctccgtgcactcaaatatccaggcttacgctttaaaacggacaaaagggggttgtacgggccaggtcagcgtcgactcgtgacaggcctggtggtaaccccagataatagagtctcacttggccgcgaaagaaagcggaatatttcttccttggtgcataaagccagtctcgggaagctcgatgcccccgagatgcttgaattgaagggactcctgggcttcgtccattctgctgagccccggtttttgcagacgctgaagacaaaatatggcgctgaactggttcagagaatcgcagcgtttgaagtgaagaagctaggagacggatga

SEQ ID NO: 11800 - RNA, 945 nt, synthetic construct
  source 1..945: mol_type = other RNA
atgagtcttagggatgaaatttgcattgctacaggcatcgggttaagtgagtttgctaggatcgagaattctgctcctgtccgctacaagtccttctctatcgctaagaagagtggtgattaccgcatcatcgcccaacccagcagagaactgaaaattattcagcggtggatttgcgaaaattatctggctagcttccccgtgcacaatgcagcctacgcctatcgcctgggcagaggaatcagtcataatgccagggtacatgcaggatcgaggtacatccttaagatcgacttcaaggactttttccattcaatcactcctaacgatctcttcgtgcgaatcaagttggccaataaggatctctctaaggcagacaaacggacattgtctcagtgcctgttttggggaaaaggtgttaacatgccactctgtctatccattggggcgccaagctctccaatgctgtcaaacattgtcatgttcgactttgatgaacgaatcgcccggatatgtaaggacaagggggtgaaatatacccgttacgccgacgacatcacagttagctccgagggcatagatgagctgttattcgtggaacgcggcatccgggagactgtcaagaactcgaaaaatcccaaaattgagataaacgaggacaaatccagacggtttggtcctggacagcggaagctcgtgacgggcctcaaccttacctctgagggcggcgtgtcaattgggcgaggtagaaaaaggaaaatccacagcatgatgaactccgcaaaatatgggatattgccggatcacgacatcggcatgctgaaaggactaattgcgttctccattagctgtgacgatgatctggtcacccttctgcgcaagaagtacggatcagacgttgtggataggatactgtcctttaaggtacccagcagacgtagatga

SEQ ID NO: 11801 - RNA, 1005 nt, synthetic construct
  source 1..1005: mol_type = other RNA
atgggcaccttttttgatccagagaactccaagctctgcctacgtttggcccgcgaaactcggatgccttacagcgcactttaccgactggtccttaccgccccgtaccgctacaagacttataagatacagaaggtgggacggccaggacaggttaggatcatccatcaccccgccagagagctgaaaaccattcaacggtggctcgtaaaaaatgtcctctatagcatgcccgttcacagcgcagcctgcgcttatgagaaaaatactgggattaagctcaacgcctccaaacacgtcaataacaactacatcctgaagatggattttaaggacttcttcccctcaatagtgccccgtgacatttttttaaggatgccggctgacacaccttggaacagcaacgatttttattttctgtctagggtgctgttctgtaagaaggataccggcacgaaactctctctcagtataggcgcacccagctcacccaaaatcagtaacatcgtaatgtacgaattcgaccagaaagtgagtgagtattgtaatcagaagaatatcacctacacacgatatgcggatgacatgacgttcagtacaaatcgcagggaaattcttcaggagtgcgaagatttcatcaacggtttggtgagggagatggattccccacatctggaaatcaatgcttcaaagactttgcacacatctaaaaaacaccatcgcagaattacaggactcgtgctgtcgtcccaggggttcgtttctttaggtcgagagagaaagcgcctgattagagccatgctgcataactataagtacaatcagaactcagacgctgacaaaacccaaaagcttaaagggctgttagcttttgcctgtgattgtgagccaatcttcatagacaatttgaaggcaaagtacgaggcggaaattgactgcctactgagcatgaaacctgaaaaaccttacatccggcggctgctgggctctagatccaagtcctga

SEQ ID NO: 11802 - RNA, 1014 nt, synthetic construct
  source 1..1014: mol_type = other RNA
atgaagtcgctctacgatatttcagaattcacagagaagtctgttgaggagataattgctaactatctaaccgcacccagaaagtataaggagttcaaaatcaagaagcggaatggcggactgaggaccatatctcagccgtccaaagacgtgaagttctatcagtatgccattattgagaagatcctcaaaaacttatcgatccacgattctgcaaccgcctacagggacagcaaatccatttaccataatgcacttcctcacaaaggttctagttggattctgaaactggacttcaaggatttttttcattcaatacgtcccgaacatctgaagagttttctcctggacgcctatgaagacattagcagcattgaggtggatattctcaatcactacctgttttggctggatcggacagatcgaaagctgaaactgagcataggagcgccatccagcccaatcatctccaacatcgtgatgtacaactttgacgagagtgtttgtgatatttgctccaagtattccgtcatttacacgcgctatgccgatgacatcaccctctccgccagttctcgcgagtgcttattggaagccgaggaggagcttaaagttttgatcgaagagacacagactcccctacttgtgctgaacgataaaaagagggtgttgatcgggcggaatagaagcaagcgcgtcactggggtcgtgatcacgcatgaaaacaagctgtcagtcgggagatacaagaggaaaaaagtgcgagctatgctgcacctttactccaatgacaaactgaatgaacaggatatccctatactgcacggtaccttaagctatatcaaatcaatcgaggacaacttctatagaagtctccgggacaaatacggcgatgctgtatttacaaagttggctaaggaatctttcaaaatctcaaagctcaagtactacggcaaggaagagtctgaggaagaaaagactcaaagcaaagacgacaatgacatcgtattctga

SEQ ID NO: 11803 - RNA, 987 nt, synthetic construct
  source 1..987: mol_type = other RNA
atgctttgggggttgatcttcgatatgaagagtctcctcgaaatcagcaaattcaccggaaaggacgtgacggaaatcatctctaattatttaaccgccccacgaaagtacaaggagttcaaaattaagaagagatccgggggcttcagaacaatcagtcaaccctccaaggacgtaaagatttaccagtatgcaattatcgagaacgtcctgaacaatctgagcattcacgatagcgccacggcttaccgtaaaggcaaatccatctatcataacgcctttccgcacaaggattctatgtggatcctcaaattggattttaaggacttcttccactcaatcaggcccgagcacctgaaatcctatctgctggacgagattaagggaatctccagtattgaagtggacatcctcaatcactatctcttttggatggacaaaactgatcggaagcttaaactctccataggtgctccctcaagcccaatcgtaagcaacatcattatgtacaagtttgacgaaaacgtgagcaacatatgctcgaagttcaatgtgatatatacccgatacgctgacgatctgactctgtctgccaattctagggagtgtcttctagaaaccgaaaaagaactgaaagccttagtggaagagacacagattcctctgctcgttctgaacgacaaaaagcgcgtgctgattggagagcataagtctaagcggataacaggcgtcgtgattacacatgagagtaagttgagtgtcggcaggtacaaacgcaagaaagttaaagctatgctgcacctttatgcaaatggtaagttaaacgaggaggatatccctattcttcatggcaccctggcatacataaaaagcatcgaggacaattactaccggtccctaagagataagtattcagatgcgttctttactaaactgtaccaggagtcattttcaatttctgagcgcaaatacttggggaaggaatga

SEQ ID NO: 11804 - RNA, 975 nt, synthetic construct
  source 1..975: mol_type = other RNA
atgaaaatcctatcagatatctctgagtgtctgggaaaaggcatcggagagattatctctaactatcttacagccccccgaaagtacaaagagtttaagataaagaagcgcaatggcggatttcgccagatctcccaacccagtaaggagattaagaactatcagtacgcaatcatatccaaagtgctgaatgaactccctatacacgacgccgccaccgcctatcggaataagaagtcaatctatcacaatgccttgccacataaggacagcgcatggattctgaagctggacttcaaaaatttctttcacagcattaggcccgagcatttaaagagttatctgactgaggcttacgaagagatcagttcaatcgaaattgacatacttaaccactacctcttttggatggataagaccgataggaaactgaaactgagtataggtgctccttcctcacctatcatttcgaacatcatcatgctcaaattcgacaatgcagttagcgacatttgctccaagcatgatgtgaattacacacggtacgcggacgatctcaccctgtccgcccaatctaaagaaagcctggagaaagctgaagaagagctaaacgcgcttgtcgaggagactcagacgccattccttattctcaacgacaaaaagcgtgttctcatcgggaacaaccagtccaaaagggtgacaggcgttgtgattacccacgagaataagttaagcgtaggcagacataaaagaaagaaggtaagagctatgcttcacttatacgtgaacgaaaagttggaaaagaaggatattcccgtcctgaacgggttgctctcttacatcaaaagtatcgagctggagtattatctgtcattgaaggacaagtacggtgatgtggtcttttctaaactgagcctggaaagcttctctatttccgggatgttgaagaaaccggaaaaaaaaatgaaggcatga

SEQ ID NO: 11805 - RNA, 981 nt, synthetic construct
  source 1..981: mol_type = other RNA
atgaaataccttctcgacattttggagcacagcaagaaaaccatcgacgatctgattttcaattacctgactgctccaaggaaatacaaggagttcgagattaaaaagcgctctggtgggtttcggaaaatctctcagccctcatttgatgtgaagctgtatcagtatctgataatggaaaacattctggcaaagctgcctatacatgatgcagcgaccgcctacaggtaccataaatcgatctatcataatgccttaccacataagaactctgactggatactgaagttggactttaaggatttcttccacagcatcaggcccaaacatctcaagtctattctcactgatgtctataaagatatcagttccattgagattgacatccttaatcactatttgttctggatggatagaggggaccaaaaactcaagctgagcattggagctcctagtagtccgatcgtctccaacattgtcatgtacaagtttgatgaaacagtgttcaatatgtgctcagaaaacaacgtgatatacacccgttatgcagacgacatcacgctgtctagtgatagcagaaacattctgttgaaggttgagtcagagctgaaaaagatcattgccgatacccaagagccccttctcatcttgaataataacaagagagtgctcttaggtaaacagaagtcaaaacgcataactggcgtggttatcacccacgaaaaaaaactgagcgtggggcggtacaaacgaaagaaaacgaaggccatgcttcacctctacgtaaataacaagctaaaaaaaggcgacatacctatcctacacggaacactgtcctacatcaatagcatcgaatccgagtattaccagctgttagaacttaagtatggcaaggctacatttcggaaactgacaaaggacgccttttatatctccaagatgaagtacaagaacattaacaagaacgacatggacaattga

SEQ ID NO: 11806 - RNA, 1005 nt, synthetic construct
  source 1..1005: mol_type = other RNA
atgaaaatcctgaaagacttaagtgagaaacttgatatcgatgttgacgatatcatctcaagttatctgactgccccacgaaagtacaaagaattcaagatccccaaaaagagaggggggtttagggatattgcgcagccttccaatgagataaagatctttcaatacggcctaattgacacctttcttaaaaacttccctatacacgactgcgctaccgcctatatggagaacaagtccatttacgataacgccctaccccacaaggacagtaagtacctgctgaagttagatttcaaggacttcttccattccattagacccgaacacctcaagttctatataaacaagtacaatgagggcatctcgaatatcgagatcgacataatcaataacttcctgttttggatggataaggaagataataagctgaaactttgcatcggagcaccatcctcaccgatgattagtaacattgtcatgtacgactttgacctggagttggaatctctgtgtaacactaacaatgtgatctatacccgatatgctgatgatcttacactgagcagcaactcaaactcatctctgatggaggtcgaaggattcctgaataaaatcgttgagcggacacagatccctctacttgaactgaacgattccaagcgtgtgtgtataggggacaaaaaaagcaaacgcgtgacaggcattgtaattacgcacaataatcagctcagcgtgggacggtataagaggaaaaggattcgggccatgctccatttatacaactgcaataagctcaatgagaacgacatcccaagactccatggtctgctctcttttgtgaaatctattgagcccgactattacgatttgctcaagttgaagtacaatgaaaatctgctgaagcagttggcaaaagaatcctacattatttctcgcaaatggtatgtaagctttaataacgacagcttgaacgtgggtgacgaggacgatatagtcttctga

SEQ ID NO: 11807 - RNA, 981 nt, synthetic construct
  source 1..981: mol_type = other RNA
atgaatatcttaaaaaccctcatagaggtgctgggcgtttcgtatagctctattttcaaggactccctgacagcctcaaggaagtataaagaattcaccatcccgaaaaaaaagggagggcggcgtaaaataagccagccctcagaagatgtgaaaatcgtgcagtctgccattagctcagttctactgaattccctgccagtgtctgattatgcttacgcatacattagaaacaggtcgatttacgataatgcattcatacacaaggaatcctctttcctgttgaagctcgattttaaggattttttccactgcattcggccagagcacctcaagtattacatcaagaagaacattagtgacatctccgatatggaagttgacatcgtcaacaatttcctgttttggttcgacaatgacgacaacaagcttaaattatgcattggcgcccctactagccccctaattagcaatatcgtaatgtacgagtttgacgagaaaatatccaagatctgtgaggattttgatgtaatctacagtaggtatgcggacgatattacactgtcttccaataacagagacgacatcgatacagtcgagatcaagataaacaacctgattaaggagactaacatccctcttctcaagctgaacaaaaaaaaacgagtgtttgtctcacagcatatgagcaaacgcattacgggaatcatcattacccacgacaataagctttctgtggggcggtacaagagaaagaaaatcaaagccctgctgcatctgtacaataaccgcaagttaaaagacaaggatatcccttatcttcacggtttcctcagttttatcaaaaacatcgagcccgagtatttcaataagttgaagtccaagtacaacgaaaagttgtttcatcaactcgctaaggaaagttacatactgagcaaaaaggagaaagagaaggaaatgattacccatgaaaaattgtga

SEQ ID NO: 11808 - RNA, 1008 nt, synthetic construct
  source 1..1008: mol_type = other RNA
atgaacaagttgaacatactcaatgagatttccaacgacattgacgtcaatatcggcgagttctttaattttagttccatggcaccaacagcctatagtacgttccaaatcagaaaaaagagcggcggtactcgcgagatctctcaacccgcccagtggctaaaaagcgttcagtatgcgattatccaaaaactgttagaacagctccctatccactataccgctactgcctatcagaagggaaaggggattaaacagaacgctgaagcacacatcaacaaaactttcatactcaagaccgactttgagaacttttttccaagcatcctgcagagcgatctggaactgatcttgaaacggaataacatcgagattaattcctttgagtactctgtcatttcacgattccttttcaagaagaagaatgactcgaataaactggagctctgtattggagcacccagcagccctatgatctccaatgtggtgatgttcgaaattgattctttattgtccgagaagtgcaatgagttggatatttcctatacacgatatgccgacgacatgacgttcagtagtgacaagtacgaaaacgtagagttcatactcgagtttctgaaacagacaatcctgaaggtggaatcaccgcagctgatcctaaacaacaaaaagaccaagatcatctcaaagggaaggtcccaacgggttacaggtgtgattctttctaacgacggccgcgtatcaatcgggaggaataaacgtcggagagctaggaccttgcttcatctgctggaacttgataaggtggacgataaatctctggtggaactgtacagtatagtgtctttcatgagaaacattgagcccgagttctacgagatattaaaggaaaaatacgggtacaatctgtttaagaagctctacaaaaagttcagcctcctggtcgaaaaacataccgatcagtcaactggcatgaagcttaagtttaaaggctttaacgttgattga

SEQ ID NO: 11809 - RNA, 1038 nt, synthetic construct
  source 1..1038: mol_type = other RNA
atgaatattgttaaagtgatctccgatctgatcaaccaggacattacttatatgttcctgttgagtgcaacggcacctgaggcttacagcaccttttacattaacaagaaatcgggagggataagggaaatttcacagcctagtaaggaagtcaaggaagtgcagtacgtcattattaaggaaattctttccaagctccccgtgcacgagtgtgcgaaagcctataagaagggtgtaggcattaagcagaatgccgttgaacacctgaacaaagagttcatcctcaaaaccgacttcagcaacttttttcccagcatcaaaccggctgacctggaatactatttcaagaagaacaacatcgagatcaacaatctcgagttcgacattataagcaagatcctcttcaagaagaaagaaaattccaataagctggaattgtgcatcggggccccttcctctcccattatttctaacatcgtcatgtacgagattgatgagcttctgtactctcattgcaaggaacgcaatatctcctacacccggtatgccgacgatatgacctttagcagtaattccatagaggacctaaaggagatcctgtcaactctcaaaaaggtgatcatcaagaacaaaaacccagagttaatcctgaatcaaaagaaaactcgactgatctcgtcaggaaggtctaggcgcgtaaccggggtgatacttagcaatgaaggcaaactgtctgttggtagaacaaagcggcgtagaactagaaccctgttgcacttacttagtaagtcatccattgacgacaaatctataatagaactgtacagcaacatctcatttattcggaacattgagccagagttctatcaaaaactattgtccacacatggccagagtacgttcaacaagctgaataaatcttttcagagcctcatcgagaaaaacacagacaataatggctttacatggcgatttggaataaatggcgatagcttagtgaaaaaagtgatctatgaggatgatgatatccagttctga

SEQ ID NO: 11810 - RNA, 966 nt, synthetic construct
  source 1..966: mol_type = other RNA
atgagctatatagacaacctctcccgggtactgaactgcagtgtcatgtcgctcatttctggctacattaaagcccccaagaaatataaggtgttctacatcaagaagaagaatggtaaaggacttcgcgagatagctcagccagcccccgatatcaaggaagtgcaacgagctatcgtttctactctgctggctaagttaccggtccatgagtgtgcaaaagcctatatcaaggaaacaagtatcctgaacaatgcggagcctcataaggaaaacaagtatattctcaaggtcgacttcgagaatttcttctatagcattaagccacaggatctgtacttctacctcctgcgcggagaaataaagttgacccagtttgagtacgagatcctgtcccactacctgtttagaaggaaaaagggggaaaaaaaactgagattatgtataggcgcgccatcatcccctattattagcaacatcgttatgtacgacttcgactgcatcttgtctgactattgccacctaaacaatattgcctacactagatacgcagatgatatcacactatcctcagagtcatacggcaaaatcaaagatgcttacagctttattgcccgcgtggtgagcgacctgaaaaaacctgaactgaagataaacagtgacaagaccaagatcataggaaaaggccggagtaggcgaatcacaggcgtgatcatctctaatacgggggaattaggagtgggtaggtttctcaggaaaaagattcgtgcactgacccacctgtattcaaaccacaaactttccgaaagagacattccctacctcctggggatgttggcacatattaaaaatatcgagccctcctattatgaggccttggtatctatccacggcgataatctttttaagaagcttgggaaagacagctatcggattctcgagaacaagcggggtaatgataactga

SEQ ID NO: 11811 - RNA, 954 nt, synthetic construct
  source 1..954: mol_type = other RNA
atgtcttacattgacgaattgtcaaaaacccttaattgcactcctaagaccataatctccgggtacatcaaagcccccaagaaatacaaggtattcttcatcaagaagaagaatgggaaggggttgcgggagatcgctcaacccagcccggatgtgaaaaaagtccagagggctatcgttaatagtctgctgtctcttctccctgtgcatgaatgtgccaccgcttatatcgaggagaaatccatctttgacaatgcagaaccacataagaagaacgagtatattctcaagatggactttgagaactttttctacagtataaagcctcaggatctgaattacttcatctccaagaacgacattaaactgaaccacttcgaatatgaagtgattagccattatctgttccgcagaaaaaagggcgagaaaaagctacgactgtgtatcggagcccccagctcaccaattattagcaacatcgtcatgtacgattttgatgagaagctctttaaccactgcaaagagaatgatgttatatacacgcgctatgcggatgaccttacattctcctctgacagtttcgataaacttaacgacgtaaagaactttgtgattgacttagtgtcactgcaaaaaaaaccagaactcatcatcaataccagcaagacaaaattcattggcaaaggtcggtctaggcgtatcactggagttgtgataagtaatacaggcgacctgggcgtgggcagatttctaaggaagaagattagagccctgttctacctctattccaacaataagatcaaccacaaagatattccttacctgttgggaatgctgagccacataaagaatattgagcccgactactattattcgctgattaagatcaacggtgaagacaagttaaaacagctcgggaaggattcatttgcagtcttgcagaagaaacagtga

SEQ ID NO: 11812 - RNA, 969 nt, synthetic construct
  source 1..969: mol_type = other RNA
atggggtacttgaatgatctggccggcagtttagacagcagcgttgctagcctcatttccggctaccttcaagccccaaggaagtacaaggtcttctatatcaaaaagaaggggtctgacaagttacgggaagtggctcagccttctccggatgtaaagaacgttcagcgcgccatcgcctcaacactgctgaaccagctcccaatccattcttgcgcaaaagcctacatcaaggacctaagtatatatgataacgctaaagagcacaaaaccaacacatatatccttaaaatggactttcgtgacttcttcccctcaatccgacctaatgatctgctcctgtgtctggagaagaatagtataaagctcaacgattttgagtacaccattctcaagcactacttgttctggagaaaaaggggggacaacggtcttagactatgcattggagcgcccagcagtcccattatcagcaacattgtcatgtatgacatcgactgtaaaattgatagcatatgccaagctttgaatatcccttatacacgatacgcagacgaccttactttttcaagcaactcaatcgataccctgaatatcgtgttcgacaaggtcaaaaatattatatcgtcccaggaatctccacgtctgatcatcaaccacaacaaaaccaagtttattggaaaaggcaggtccagaagaattactggtgtgatcattacgaatgatggacaggtaggagtgggcaggtacctgcggaaacgcgtgagggcactgctgcatctctactctaataaccgcatcaaggtgaatgatattccttatctgcaggggatgttatcccatgttaagaatatagagcccaagtatcacgaagagctgcttaagaaatacaacgagtccctcattaaacgcctgaatttggatgcctcccggattatcaaggaaaaccggagaaatggcgtgatatga

SEQ ID NO: 11813 - RNA, 960 nt, synthetic construct
  source 1..960: mol_type = other RNA
atgtcgtacctggagcacctcgcgctttcactgaattcttctgtggcaagtttgatttcaggttatctgaaggctccccaaaagtataaagtgttcaagatccgcaaaaaaaacaataagtccttccgggagattgcccagccatcccctgatattaagaacatccagagagctataaccagcacactcctgaagaatatacctatccacccctgtgctaaagcctatatcgaagggctgtccatctacaataatgcctacgagcatcgggagaataactacctgttgaagatggatttcaaaaatttcttccccagcattaccccaaatgacctgttactctgctttaagaggaacaacatcgagctgaacaattttgagtacaacattttgaagcactacctgttttggagaaaacgcggagaaagatctctgcgactttgtatcggagctcctagtagccctaccatctcaaacatagtgatgtacgaatttgactgcaagattcacgagtactgcataactcacaatatcccctatacacgttatgccgatgaccttacgtttagctccaatgaaatcgaaaagctccatgccatctatgattacgtaacctctgttattctggagaacaagtccccgaacattacaattaacgattcaaagacacggtatatcggcaagggtagaagtcgacgggtcactggcgttatcataaccaacgaaggcaaattaggggtcgggaggtatcttaggaaaaaagtgaaagccctcctctacatttacaacaataaggacttacgcaaggaggacattccgtatctgcagggaatgcttgcgcatatcaagaacatagaaccatcttattacgagaaactgctacagaaatacgagccaagtctactgagcaggttgggcaaggaggcagcaactattatcaaagaacgtagcctcaattga

SEQ ID NO: 11814 - RNA, 972 nt, synthetic construct
  source 1..972: mol_type = other RNA
atgtcctatctggatgagctggcaaactatttagagaagtctgtcccatatctaatcaggaattacattagtgctccaagaaagtacaaggtcttttacatcgacaagaaaaatggatccaagaaacgggaggtagcgcagccgagcaaggaaataaaagagatccagagagctatcgtgaaaacccttctggagaatattcctattcactcttgtgccaaagcatacatgaagaactcctcaatctacgataatgcactgcctcataaggacaacgtgttccttctcaagatggattttagagatttctttcctagtatcaagccctccgatcttctgtacttcctggagcgaaatggtcttaagttcgatgccttcgaaggcacaattgtgacaaattatctgttctggcgacgtaaaggggaaagaaaattgagcctgtgtattggagccccaagtagccccataatctcaaacatcataatgcacgacatcgacagcgaaattaacacttactgcgaaaaggaggacattatctatactcggtatgccgacgacctcacatttagcaccgataatattgttaaactccagaagatccatgactttatttctaacctcaccaatcgcactgagcatcccaagctgctcatcaacaaggaaaagaccaggtatataggcaaagggcggtccaagagggtgacaggtgtggtcattacgcacgaaggagaattgggggccggccgctacctcaggaaaaaaatacgcgcaatgatctacctgtatagccaaaagaaactgaagaaagaggatatcccctatttacacggcatgctatcacacatcaacaacatagagcatgactactacatcaagttgaaaaagcagtacggagccgcgatgttttctgctttgtatcaagaatcgttctgcatttcaaaaaaggagaaagaggctgacaaagttatttga

SEQ ID NO: 11815 - RNA, 975 nt, synthetic construct
  source 1..975: mol_type = other RNA
atggaacttatcagcaaagtcgccgagcaccttggactgcctatgcatgagctaatttccaatatgcgctccgcaccaagcatgtacaaggcattctctattaaaaaacggaatgggggggatcgtatcatacgccagccttcccccttcgtaaaaaatatccaacgcgctattgttgatattgtgttttctggtatcgaccggtcagaattcagcatggcatatgagaagggcaggtcaataaaggacaatgccctgatccataccggagccgactttctgctcaagatggacttcaaggattttttcccgtctataaaacctagcgacctattccggactttgggtgatctcggatacgattttaacgatcttgaccggatgtttctgagtagatatttgttcgtggaggtcggctccttgctggagctgagcattggcgccccctcatctccaatgctctccaatcttgtgatgaagcactttgatattgctatcggggacttctgtcataaaaactccatcagatactctagatacgcggatgacctcaccttttctggttgttgctataaggatctcaaaaaagtagaagctcacgtggtccatattatttcgttagacaacaagagtaacctcctggttaacgacaagaagactaggctgatagggaaaggaagaagccagcgcgtgacaggcgtgatcctgacacacgacgggaatatctcggttgggcgaaatttgaggaaaaagatcaggggactggtccacttgtactcaaataagaagctgaacaacagtgatatcccctatttacacggcatcattagtcatatgcgtaacatcgagccagaatattacgaaaagcttatagtgctgcacggcgacgtgctgttcaaaaggctggccaagcagagctacgctattggcaagcatctccgatgcgcccacctgaaaacgggtttagtcaagtga

SEQ ID NO: 11816 - RNA, 960 nt, synthetic construct
  source 1..960: mol_type = other RNA
atggaaatcatctctgatctggcggaggagttaaatgtgtcgatcattgagctgataaatcagatgcagcaggccccaaagaaatacaaggtgtacagcatcaagaagaggtccggcgggtctaggattatagcacaaccaacagccttcgttaaaatggtgcagaagggcctatgcacatcttttctgagtcagtttaagtattccaacagcgccatggcttatgtaaaagaacggtcacccatctcgaatgcaaacgtccatgtcggagccaaactgatcctgaagctcgatttcgaaaatttcttcccgtccattaaagctgctcatttcattgagttcttagagcgcaataaggtgaccctggaatcacttgagattgactttctgattcgatatctctttagaaaagtgaaaggcagctatgaattaagcatcggggcgccttcctcccccctgatcagtaatgtgatgatgtatgattttgacctcgaaattgaagaagccctcaaggattctctaatcaattatacccggtacgcagatgacctgactttctctgccaacagctttgaggagcttaacgaagctaaactcttcgtcgaggctgtaattctgtctaagagatacagtttcttgaagatcaacgaagataagtccaagatcatcggccgcgggcgatcacaaagggttacaggaataaccctcactcacgacagtaagattagtatcggaaaatcattgaggaaaagaatacggggcatgcttcacctttacaaccagaaaaagttgaagaagaacgacatcccctacctgcacggtattattagccatatgcgtagcgtggagcctgactactttaagaaactgatcgacgtttacggtgcagagttgttttcacgcctggccagacagagcttcatgatatccaaggagacgaaaatgaaactcatggagtga

SEQ ID NO: 11817 - RNA, 957 nt, synthetic construct
  source 1..957: mol_type = other RNA
atgtcaaacgagagcattaccgatataatttgtaagagcttgagtcttctcgcccacgagcttctgatcaaagcgatgaaggcccctctgtcatacagagtttatactatccccaaaaggagcgggggtaaacgtacgatcgctcagccaactgctgaaatcaagaagatccaacgctgcatcgtaaagacagtgctggaccccctccctactagcgacattagtacagcctacaagaaggacatatcgattaaagataacgctgaacgccatctgggcaagaagttcatcctgaagatggacttcaaagacttcttcccatcgataaggcctgaagatctcataaactctctggaaagaaataatgttcggctgtcttccgccgacagaaagattctcatcttattcctatttcgacggaacaactatggacgttttgaattgtcagtgggcgctcccagctccccgattgtgtccaacataattatgtacgagtttgatatcgcagttaaagagtactgcgagaagaataacatagtgtttacacggtatgcagatgatcttacgttctcctctaactccattgaggacatcaaaaaaacccccgccattatcaagagcaatctaatgctgatggattctccaaaattgtctatcaacgagaaaaagacccatattgtgtctaagggtagaagtcagcgcgtgaccggagtcacccttacacacgataacaaattatccatcggccgaaatctgaggaaaaagatcagggcaatgctgcacctctacaagaataacaaactggaacacaatgacattccatacttgcacgggattatctcccatatgcggaatatcgagcctgagtattttaataagctgctcgaatcatatgacgatgtcttatttaaggacctggccaaagtcagtttcaatgtaagcaaagtgtacaagtga

SEQ ID NO: 11818 - RNA, 966 nt, synthetic construct
  source 1..966: mol_type = other RNA
atggagaatctgcttaaggaaatctgttcctcaagcgacctgtccattcaggatgtcatcaaggggctttctacagcgcccttggcttataaagtctacacgatccctaaacgcaccaagggcgagcgggtaattgcacagccttctccttttgtgaaggaagtccagcggactctgatttctgttttcctcacgaagtacaaaccgagcgaagtgtctaccgcctatgtggagggcaagagtatcattgacaacgcagaggcccacaaggacaacgactggatcctgaaattggactttaagaatttcttcccctcgctcaaacccaatgaccttttcacattcctggaaagggagggggtggtgataggtgaatttgacaaaaagattctctcctcatacctctttagacgaaataaccgcaaattggaacttagcatcggtgccccatctagccccttggtaagcaatctcataatgaagtccattgacaataagatcgagggctattgcaacgataactcaatcgtgtataccaggtatgccgacgatctaaccttttccaccatggatctggataagatcgacgctctaaaacaatacatagccgccgtcttaagtgagacaaagagccctaaactgtctatcaacgatagtaagacaaaggtgattggccgcggaaggagcagaagagttactggaattgttctgactcatgagaataaactgtccgttggacgatatagtaggaaaaagatccgggctatggtgcatcactactcgaaccgtactatcaaaaagagtgatattccatacctgcatggcgtcattagccacatgagatcagtggaaccagactactaccagaaattagagataaagtatgggagcgattttttctccaagctggctatggattcctacaaaatctcaaaagcagtgaagctcaagaagctggtaaaatga

SEQ ID NO: 11819 - RNA, 966 nt, synthetic construct
  source 1..966: mol_type = other RNA
atgaccaatcttctcaaagagatttgtgaaaactctgagatccagttgaccgatattattaagaacctgaacacagcatctatttcctataaagtgtacgacataccaaaacggaccaaaggcgtgcgcactatcgcccagcccagttcatttgtgaaggacgtgcagaaagtcatcacaaaagttttcctctctgagtttaccccaagcgatgcttcattcgcctatatcgagggaaagtcgattgtggataacgccgctatccataaggacaataagtggatactgaaaattgacttcaaggatttcttcccgagcattaaacctgaggacctgtttaatttcctggaaaaggaagagatcaagctgtctgaatttgacaagaagattatctcctcttacctgttcaggctgaacaatagcaagttagaattgtcaatcggggctcctagtagccccgtaatcagcaatcttgtgatgaaagaattggatcaggaaatcatccacttttgcgaggaaaaatctattgcgtattcccggtacgcagacgatctaacatttagcacaaataacatagcctacttttcggacctcttaccctacatctatgagcttcttagctacactcaatcacctaagctcagtataaacgacaaaaagaccaagattatcgggaaaggtaggtcccaacgaattacgggagttgtcattactcacgaaggaaaactatctgtcggcaggtactttagaaagaaaataagagccatgttgtactcctataactcaaacaagatcaagaagagtgatattccatatctccatggcctggtaagccacatgcgtaatgttgagtattcctactacgagaagctggaggagaattatgggaaagagttcttccgcaaactggcaatggattcctacaagatcggtaaggctatcaagctgaacagtataaaatcctga

SEQ ID NO: 11820 - RNA, 912 nt, synthetic construct
  source 1..912: mol_type = other RNA
atgtcgactgctatcgaaaaggtgtgtaaggacctggggtttaccgaagagaaattcattgagttctgttccctagcccctcaccggtacaagaagttctttatcccaaagaaaaacggtgccggactgcgcttggtggctcaaccggctcggccactcaagaaggtgcagcgttggctggtcagcgaatacctgtccaaattaccaatccatgaggccgccgccgcctatgtgtcagagaagagcatcctagacaatgccaagaagcacgcaggcaacaaggtgctcgtgaaatacgacttcaaggatttctttccgagcatcaaaccctctgatttccttaaactgatatcaaagaacgatgtaggaatcagtgcatatgaggcagaaatatttagccgccttatattctggtcccctggtaaccggcctggccttgagctttgtattggggcacctagtagccccgttatcagtaatgcagttatgttcgattttgacaatgctgtctctgagttttgctcatctgaatccctgatttacaccaggtacgcggacgacatctgcatatctggctacgacaattcaatttttgagcatgtggataggttcattaagaaacaggtgtttgaaatcgaaagtcccaacttactgctgaaccccaataaaacgcaattcattaacgaaaacaccgtcaaaaaggtcacaggactcttcattacacagaatgaggagatcactgtcgggagaaaactcaaaagaaaggtgagggcgatggttcataattttcacaaaggcaatctctctgctaaggataaagagcgactgaagggctatctgtgctatttgtccgatgttgacccctcctatttgagaaaagtagccccagactttcagagctgggatctgtga

SEQ ID NO: 11821 - RNA, 1941 nt, synthetic construct
  source 1..1941: mol_type = other RNA
atggatactattatcgaatacttcagcaagatcgatttcactaaagtgagaaccaatcagcctcctgagttgatttttctgtgtggaggcaatagcgaccaaaaggcaaataactttcgcccgaaattgcaaaacgagctcattaaaaagcagagaaatgtggtactggccgagaatgcgatgaactggcagggcggccaagttttcgctaaagaccttttggagttagaaaagtactacgccgccctggtaagcattattccacttatttgcgagagttatggggccgccgcggaattcggagcatttgtgactgatgagttcataaggaagaagctcttcattattatcaaggagcagttttactcaggggagaactcaagcagttttattcggtacggccccattaaaaaatatgaggactcggagaatagagagacatactgcattaacaacgagaaccccgaagaagacttggaggacctctgtgaaacactgctggcctgtaaacccaaaacctcaaaatgcaatttcgatgaaggttacttccggatattgttactcatcgatatcatcaacgtgctaagtatctctacacataaagagatcaagtccattttcgaaaaagttttgtcaatcatcggattcgatcagctctctatcgacacgtattgcgtggacctgaatgagatgctgtttgtcctggaaaagctccgcctgattaaactgcgacagaaggggcagaggagcttctatctgtctgtgtctcaggagttttacctagagtaccgctttatcaaagattctaacgacaccaaactgtcaaccatacgaaaaaatgttctggactatatctacgctcaggaaactcgcatccaaaaaaccaaggtcagtatactcaaggaagaattgaagaaaggcgaaataaaatggctgcaaaccaacatttcccttgacgacattaatattgacgagcttctaaagacggctccattacaatataaggtgtacgagattccaaaaaagtctggagggaaacgaaccattgctcagccaactgccaagcttaaaatactgcagagagagaagatcctcgaattggaaaatacattccctgtgcataactgtgccaaggcatacaagaagaacaataatggtatcttcgagaatgctaaggcacaccaggacaactcgtatttttataagttcgacttcgaggatttctttgaatccatcaaagcacgggattttaaccagtatctgctgcagttcggttactctctgaatgagcggatcgatctcatcatgctctttttcaggtttaacaagcagtccgataagcgtaagacaaacaagatctataagctgctatacaacagcgacttcaacaagtctaacaacatgagccttcttaatgtcatggtgaatgagttttctaacgagtttcagctgtccgtcggagcaccttccagccccttcatatcaaatgctatcctttatgagttcgatgatatgacgcagaaatgggcttccgaaattgggatcacctacacacgctacgccgacgatattacccttagcagtaggtctaagtttgagatcgcggacctcgaaaaagagatactgaacatatcctccaagatgaattttcccaaactgaagctaaataagaggaaggagaaatactgcagctttaaaaatagagtctccataacaggcctgaacatcaccccggatcataaaatttcgatcggtaggaagaagaagagagaaatcagttcaatgattcaccactttaagttaggaaagctcagcaaggacaaaatgaaccggctgcgtggctggctgagttattgtaaagccgttgaaaattccttcctggataagatgaaaatcaaatatagcgaggacactatcttagaaatcctcaagaagaactga

SEQ ID NO: 11822 - RNA, 1941 nt, synthetic construct
  source 1..1941: mol_type = other RNA
atgcagataatcacagattatttcaagaaggttgacttctctaaagtgcgcactaatcacccgccggaactcattttcctctgcgggggcaataacgacgaagaagcaaacaatttccgccctaaactacaggacaaactcgtaaagaaacagcataacgtgatattggccgagtcagcgatgaactggagaggcggccagaaattcgccaaggatctgctcgagttagaaatttactttgctgccctcgtttccattattcccttgatatgtgagtcatatggatcggccgcagaattgggtgcttttgtggcggaccagtttatccgcaagaaactcttcatcataatcaaggaacagttctactccggagaaaattcatctagctttatccggaacggtcctatcaaaaaatacgaggacagtgagggccggaaaacttattgtatcaatgacaagcaccccgagcaggatctggacgatctttacgaggctcttctgtcatgtcgtccaaagactagcaagtgttattttgataaagggtactttcgaatcctcctgcttatcgacatcattaacgttctgtcaatatccaccttaaaggaaattaagatctcctttcaggaggtcctatctatcatcggcattgatcagcatgagatagagagttattgtgacgacatcgatgagatgttgtttgtgctggaacagttgaatctgatcaaatatcgcaacaagggacagcaaggattttatctggctgtgagtcaagagttctatttagagtacagatacgtcaaagacagtgacgataccaaactgagcaccattcgtaagaacatcctcgacacaatctattctcaggatagcaggattaacaagaccaaggtcagtattctgaaagaagaaagaaaaaagggggagatagcatggctccagacaaatatcagcctggatgacatcaacgtacacgagcttctcaagacagcacctctgcagtataaagtctacgaaatccctaaaaagtctggaggcaaaaggacaattgcccagccaacagcagagctgaaagcccttcagagaaagaagataagtgaattagaggacaaactccccattcataactgcgcaaaagcctacaggaagaataagaacggcatactagataacgcgaaagctcataaagacaactcgtacttttacaagttcgatttccaagatttcttcgaatccattaaggcttgcgattttaaccagtttttagagcagcacggatactctttttccgaacgagtggaccttatcaaattgttcttcaggttcaataagcagagcagcaagcaaaagaccaaacgggtttaccggtacctgactgacaactccttcaatcggaataataatcccgctctgcttaatctgatgattcaagatttcgccaatgagtttcagctgtctgtgggcgcaccctcctctccttttatctctaatgccatactgtttgagtttgacgacatgatgcaaaattgggccaacgagaacgacatcacctatactaggtacgctgatgacattacgctgtcatccaagagtaagattgatattagcagcatggagaaggagatcctaaacatatgctccaaaatttcctttccaaccctgaagctgaataagaagaaggaaaagttctgctcattcaagcaacgggtgtcaattaccgggttgaatattacgccagatcacaagattagcatcgggaggaatatgaagcgcgagattagcgccatgatccaccatttcaaatccgggaagctgactgtggataagcttaacaaactgcgaggttggctcagttattgcaaggtggtcgaaagcgagttcatcatcaaaatggaaaacaagtacagcaaaaacaccatctctgccattctgagaaaaaaatga

SEQ ID NO: 11823 - RNA, 1515 nt, synthetic construct
  source 1..1515: mol_type = other RNA
tacattattttctccgatattaatcctcacgatgaacttgacgaaatctgcacgatcattaacaattataagcctgagactatcaacagcaatttcagccacaactatttcaaaattctcctggttctggacttaattaacgttctcgcaatcagttccatagacgaaattaagatacatgcggaagcagtgctcaagaagtttgacaaaaactatgagatcaacagaaagaccgttaaggagatgctgtttgtactaaaaaagctcgatttggtcgtggagattaacaagatcaaccagtctttttacctgagtaaatacgacgatctgttcctggactataacccccatcagtataagctgttcaacattaagaaggacatcatcaatagcttctatcagtcagatgagagtaacactagcaactatcggaaatatcaaatattctccaagtactaccgttactataaagaccaggagaacaattcgaccaaaaaagatatcgagaaagaggtgaaatggatcaataagaccctggattacgaacatattgataccgatcaagtgattcagatcggaccaatgttgtacaagaagttcaagatcaagaagaaaaacaagggttatcggacaatctgtcagccaacagctgagctcaagcaaatacagaggaacgaacttaaaaagctttacaagcaattcctgatccatgatgccgccaaagcgtacaagaaaaacattaacgggatcttagaaaacgcctcggaacacctgggtaacaactttttctacaagtacgatttcaccgactttttttctagcataaaagccgacaatttcattggctttctcaaacgcaattcttttgaagacaataagatccttcgcctaatcaagctgttttttgtgttcgacaagaataacaagtctgagatcaagaaggcttatgagattctaaaaagcaaccgatccgacataaatgcctttccgcgatggtttaaagacaatctctctctgtccataggcgctccttcttccccctttattagcaatatcattatgctcgagttcgatagcatagtctttgattgggccaaaaagaatcagttggtgtatactagatacgcagatgaccttacattttcaagcaaacacagtttcgagtccaaactgattcagaagctgatcaacgacacaatcaaaaatatagactacttgaacctgagacttaatatttccaagatccggcacttcaacattaaagagcatgtgtccataaccggcctctcaatcactcccgataataaagtctcaatcggaaaaaagaggaaaaaggagatcaatgcattgatccaccagtataagaataacgacaattacagtctgtctaggcaacagatcctgcgcattaaaggcttactggctttttgcaaaaatgtcgaaacggatttcttcttgaatctccagaaaaagtacgggaataaggtaattaaagacatcctgtcagaaaagtga

SEQ ID NO: 11824 - RNA, 1041 nt, synthetic construct
  source 1..1041: mol_type = other RNA
atgtcttacctcataaaggtcccttcatatgttgagttcctaaaaaaggtgtactctctgatcagcaagatttccaacgatctgcttatttccgaggagaagattaagaacgtcattgatagatcatccctgctgtatcatgagttcacaatcgttaagaacaacaagtcccgagtaatccataacccagctaaggagttaaaggctatccagatctacttgactaatatgttcatcaaacaggcaccaatacacgactgtgcctttgcgtatcgggaaggcatctcgattaagaactgcgtggagaagcatattgatagtaactacttcttcctgacagactttaaggacttttttcactccattatgttcgatgacatcttgaggttcctgaaattaaccaacatctcgcaatatctgagccgagatgaagattgcagtgactttgccaaagtgatgtgtaggtacaaacggctgaccattgggtccccttctagtcccagccttagcaatgcactgtgttttcggcttgacgaagtgataaacaggttttgctgcaacaataacctcatctattcacgctatgccgacgacatttgcatctcatcagagaataagatcaattgtaacctcgtccgcaaaagcatcctctcttctatccaggaggccaatgtaattcgcagattacgggtcaaccccagtaaaacaagaactcttaatagggctaaacgtgttaagattctaggtctgaatatcaccagtgatcgaaaaatctctataggaaggagcaaaaaacgcgaaatcaaaagcatggtgaatatgtggaagtacaaccggatcaacaacattgagcgttcatatctgagcggctatatttcctattgtctggctgtggaggaagatttcgtgatgggactgtaccagaagtacgggtccacgttgattaatagaatacgcgaatacaatgcctcttacgcaagagaaaagaatctcctcttggaaaatagcctcatggacataaatcactccgactacaattga

SEQ ID NO: 11825 - RNA, 924 nt, synthetic construct
  source 1..924: mol_type = other RNA
atgatttcaccatttaacctcatcttgaaggattgtatgatcactaacgtcaagattatgaacattgctcaacgcgcgaaacatatgtataaaacatacgccatcccaaagaagaatgggggaaggcgcataattgaccaccccgcaaaacctctgaaggcgatccagaggtctattgtgagcgccgtgttaagggaccttcccgtacaccagagttgtaccgcctacgaacccggccggtctgcactcttgaacgctcagactcaccaagattccagatacttttaccagctggatttcaaggattttttccactccatcaaacatcgcaatgtcagtgccttcctggagagctcaaccagactcgatacagaggaaagcgagattatttctatgatatgctgcaaaggggaccacctggttattggagcaccgtcttcaccaatccttagtaatcggataatgtttcgattcgacagcgaagccacaattataagccagtccttgggctgtatctacactagatatagtgacgatatcacgatctctacgaaaaatgacaccaccgccatcaacgaatgcatacgagctctgattgattttatcgggtcacccgacaacaactggctgcgcatcaacgaggccaagacacgtcattcctccctcaaacgtagagtggctgttactggttacaatatcacaaatgaccacaggcctgtcgtgcctaggtcgtataagcggactgttcgggctctaatccataaggcaattatttgcaacaacgacgaaatcgagcttgataaggtgctgggcatggtagcctatattgagggaagcgaacctggcttcatcgagtccttaaaggggaaatatggtccagaggtgataaatcggctgagaaaacacaataccaccggccattga

SEQ ID NO: 11826 - RNA, 918 nt, synthetic construct
  source 1..918: mol_type = other RNA
atgacagaaattattaaagagatcatgaggcataccggattttggccttctgatatcgtacggatttctagggacgcccctcgttcatacaaggtgttcagtatccccaagcaaaatggctcttctcgaacaattgctcagcccaccaaggagctgaaagcaatccagagagccattgtagaatgtctccgtaaaatactaccagccgagcacaccacagcaacggcatacgttaagggtaaatccatcatagataatgccaaaccacacaggaatagcaggatcttcctgaaaaccgattttcagaacttctttcctagcatcatgccctcgcatttcgaccagcttttaattcagaacgagatccactgggagcctgaaatctgcaacctcattaagagacttctgtttttcgggaaccgcactagcaccccacaatgcctcgctatcggggcgccctcaagtccgtacataagtaatgccatcatgtaccaatttgaccttcggttctcccagtattgtgccagcaacgaactgatttatactaggtatgctgacgatgtgaccgttagcgggaatggaaaaatgaatcagtcagcagtgctcaacgagatcgaccgcaatttggcctccgtgggactgagtgcgttgaaaattaacccatccaagacacgggtcttctcccacaagcatggcgtcaagatcacaggcataagagtcacttccgatggtgagataaaggtggaccgcgagctacggagagagattcgagccagattacataagatccgcattcagtcagcttcgactgaaatgattgctgaaacgcacggcttgctgagctttgtgcacatgatcgacgaagagctggaagagaacctcctgagccagtacaagctggattcttatgactggtga

SEQ ID NO: 11827 - RNA, 954 nt, synthetic construct
  source 1..954: mol_type = other RNA
atgtccgaatacaacttccgcgagcacttgagcgacgaattcctaatttctgaacacgacgtaacacgacttttgctcagggcaccatacgcctacaagaggtatactatccccaagatgaatggaggcatacgccaaatcgcccaacccgccaaagaaaccaagatatttcagcatttcatgatgcgcgagtggttttcaaaaatgcctatccatgagtgtgccgcagcgtataagcatggcgcaagtatcaaagacaacgctgagcgtcacgccgggagtacatacctgtcgaaattcgacttcgtgaactttttcggaagtattacagagcggaacattaaagtcctgttgtccaccgtttttaagggagagctctccgaaaagagtatcgtcgacatggcccgtatgtcctgcattagagatcgcgcgactggtaggttagtgctcagcattggcgccccgtcaagccctgtcctgagcaatgctgtgatgtttaatttcgactcagttgtccacaaatggtgtgtagagcagggcatcatctattctagatacgccgatgatctcaccttctcttgcaatgagaagggcaaaacctttctggtggaagaattcctccaggtgactctgaaacagcttcccgaacctctgctgacgctaaacgctgataagaccatccacgcgagcaaaaagaaccagagaagagtcaccggtttggtgctgtcaaatgagggatccgtgacaatcgggcgggaccggaagagattaataagcgctatggtgcaccgatttgcaattggcgcactcgataacaagtctattgctcatctgcaggggcttattggtttcgctcaggatatagagccactttttgttgccaagctgagggagaagtatacttctaaagtgatcacggagctgatgcgggttagggggaagaaacggaattga

SEQ ID NO: 11828 - RNA, 954 nt, synthetic construct
  source 1..954: mol_type = other RNA
atgtccgagtacaattttcgtgagcatttatcagctgaattcatgattagtgagcatgaggttgtaaggctgcttgtcagggctccatacgcatataagaggtacacaatcccaaagaagaatggcggaatccgccctatcgcacaacccgccaaagagactaagatcattcagaacttcatgatgaacttttggttttgcaaactgccagtgcacgagtgtgcggccgcttacaagcagggcgcatccatcaaggataatgccgaacgccacgtgggaagtagctatatttccaaattcgactttgtgaacttctttggctcaatcaccgaatttaacattcagacactgctgagccgggctttccagggtcagctctcagagcgcagcatagccgatatggcccggatgtcttgtattcgggacaaggtcactggacgacttgcactttctattggggccccgagtagccctatgctgagtaatgccgtaatgttcaactttgactccgtggtgtctcagtggtgcttcgagcgtgatataacctattctagatacgcagatgatctcacattcagcagcaacgaaaaagggaagacgttcctggttgaagagttcctacgcggagcgctgaaagaactgcccgaacccggattgttgctaaatgctaataagaccttgcacgcgtcgaagaaaaaccaacgaagggtcaccggcctcgttttatccaatgacggcaatgtgactataggccgggacagaaagcgactcatctcagctatgattcaccactttatacaggggcagctggatagaaagagcattgcccatctgcaagggctcatcggttttgcccaggacatcgagcctcttttcgtggccaagctgagaggtaaatatacatccaaagtcatcaccgaattgatgagatctcggtgcgagaaaaggaactga

SEQ ID NO: 11829 - RNA, 954 nt, synthetic construct
  source 1..954: mol_type = other RNA
atgtcagaatacaatttcagagagcatcttagcgatgagtttctgattgcccaacacgacgtggtcagactcctgctgcgggcaccctacacttacaaaaggtatacgatccctaagaaaaacggaggcgttaggcacatcgctcagcccgctaaggaaacgaagattatacagcgcttcatgatgggcgagtggttcagcaaactgcctgtccacgaatgcgccgcagcctataaagatggagcttcaatcaaggacaatgccgagagacatagcgggagcatttacatttctaagttcgactttgtgaacttctttgggtccatcaccgagggtgacatcaagcgtatcttatctcggacattcgggggccagctgagtgaaatatctattgctgacatggctaggatgtcctgtatcagagatcgggccaccggccaactagtgttgtccatcggggcgccgagtagcccagtgctttccaacgcagttatgttcaactttgatagtgtcgttaatcagtggtgtagcgagcgtgatatcacctatagccgatatgcggatgacctcactttttcctccaacaaaaaggggaatactttctgcgtggaggaatttataaagggagcacttaaagagctctccgagccatcgctgtcattgaattctgacaagaccatccatgcctctaagaagaatcagcgcaggattacaggactggtgctgtcaaacgacggcaaagtcacaataggtcgggaccgcaagcggctaattagcgctatggtgcacaggtttgcacatggcgaactggatgataagtgcgtagcccacctgcagggactgcttggtttcgcccagggcgtagaacccttatttatcagtcgcttgcgatcaaagtacacctctaaagttattacagacctcatgcgattcagaagtaaaaaactcgattga

SEQ ID NO: 11830 - RNA, 954 nt, synthetic construct
  source 1..954: mol_type = other RNA
atgagcgaatataactttcgtgaacatctctccgatgagtttgtgatctcggaacacgacgtgtccagactcctgttaagagctccttacgcatacaaacggtacaccattcccaagaaaaacggcggagtaaggcatatcgctcagcccgccaaggaaactaaaatcatccaacacttcatgatgagtgagtggtttagcaaactgcccgtccacgaatgcgcagcggcctacaagagtggcgcttctattaaagataatgcgcaacgccatagcgactgtgcctacatttctaagttcgacttcgttaacttcttcgggtctattactgaggtggacatccggaatcttctggtggaagtctttggaagccagctgtccgagaagagcatcgctgatatggctcgcatgtcttgcatccgggatcgagtgaccgggagactggtcctgtcaataggagcaccgtcctccccagtcctgtcaaacgccgttatgttcaatttcgatagtgtggtgaatcagtggtgtagggagcacgacatagtttattctcgatatgccgacgacctgactttttcctcaaatcgcaagggtgtgacattccttgtagaggacttccttcagggaacattgaaggaattacctgagccaagtctctcactcaacaccgaaaagacagtgcatgccagcaaaaaaaaccagaggcgcgtgacgggcttggtcctgtcgaacgacggtaatgttacaataggcagagacaggaagcgtttgatttccgccatggttcaccgatatgcactaggcgagcttgataacaggtctatcgctaatctccagggtctactggggtttgccctcgatgtggagcctttgtttgtagcaaagctgcgggggaagtacaccagcaaagtgattaccgagctgatgagagtccgggccaagaaagatgattga

SEQ ID NO: 11831 - RNA, 948 nt, synthetic construct
  source 1..948: mol_type = other RNA
atgtcgcactacaatttccgaaagcagattagcgaagagtttatgatctctgaacatgacgtgtcacgtcttattttgagagcaccttatgcttacaagcgatacaccattcccaagaaagggggaggtgtgaggcacattgcccagccggctaaggagacgaaaattatccagcaccacatgatacatgagtggttctctaaattgcctatccatcattgtgccgctgcctataaaactggcgccagcattaaaaagaatgccgagttgcacagcaacagtacatatatttccaagttcgacttcgtgaacttttttggcagtattactgccctgaatatcaagaacctcctgcagaacgagttcaataacattatcagtgaggcatcaatcgaggatatgtccaggatgtcctgcatccgcgataaggccaccgggaggttagttctctctattggcgcaccctcttcgccaatcctttccaatgcggtcatgctaaacttcgataccgtcgtccaccaatggtgcagcgaaaggggaattatctacagtcggtacgctgatgatctgacattcagctccaatgagcgtggggcaactctcaagatacaggactttatccagggcacgctgaaagagctgcccaacttgaatctgatccttaacaccgataagacaatccacgcctccaagaaaaatcagcggcgggttactggcctcatactcagcaacgacaacaaagtgacaataggaagagacaagaagcgcctaattagcgctatgatccatagattctcacataacgaactgaattccaaagaaatcatgcaccttcaagggctggtgtcttttgcacaacacatcgaaccactgtttgtagcgaaattacgcggtaagtattctaccaagctgataaccgaactgctccggtcaagaggagacaaatga

SEQ ID NO: 11832 - RNA, 948 nt, synthetic construct
  source 1..948: mol_type = other RNA
atgtccctgtatgatttccggaagcatatgtccgagatgctgagccttagcgaacatgatgtggccagactaatcgtgcgcgctccctacgcctacaagcgctattttattcccaagaaaagtgggggaatgaggccaatcgcacagcccgctaaagaaacaaaggttatccagaacctcctcgtaaatagctggttctctcaactgccagttcatgaatgcgccgccgcctataggcaaggctcatctattaaggccaacgctgagcggcacaaacagaatagctatatcgcgaaattcgactttagcaattttttcgggtccattaccgaatcagatttagtcaaccacctctcatacgtcctgtgcgggaaactgagcgttcagtccataaaggacatcgcaagagtgagttgtattagagatagagcaaccgctagacttgctctgtcaatcggtgcaccttcttctccgatactttccaacagtattatgtactacttcgacctggctgtagaatcgtggagcttggagaggaatattgtgtatagtcgatacgcggacgacttaactttcagtacaaatgataaaggagccacttcggagattgagaaatttatcctagaaacgttggagtccataccttaccctcggctccacatcaactctgagaagaccgtctacgcatcaaaaaagaagcaacgccgaattaccggcctgataatttccaatgataacgaggtgagcctcggtcgagacaggaagcgtctcatctccgccatgatccacaggtatgcccatcacgaacttgatgagaagtctatcctgcacttacagggcctgatgggatttgcccaggacatcgagccactgtttgtggcgaaaatgcggggaaaatatacaggccgcctgatatctgacttgttgcggcagcgtggcaagaagtga

SEQ ID NO: 11833 - RNA, 954 nt, synthetic construct
  source 1..954: mol_type = other RNA
atgatcttgtacgacttccggaaacacatctccgaggtgctctcactcagcgagcacgacgtggctcgactcatcgtcagggcgccatatgcatacaaaaggtactttatccccaaaaaatctggtggaatgaggccaatcgcgcaacctgctaaggaaaccaaagtgatccagggcattttaattgagtctctgtttgctcagctccctgttcacgaatgcgctgcagcctacaagcaaggctcatcgattaaggacaacgcagagcgccaccgacagaactcttatatcgccaagtttgatttctcaaacttcttcggaagcatcacagaacttgatcttatcaaacatctgtcctatgtcctgtgtggaaagttgacggcccagtctattaaggacattgcccgggttagctgtgtgcgagaaagaagcacctctcggctggcactctccataggtgcccccagcagtcccattctgtccaatagcattatgtactactttgatttggctatggaaggttggtgccgcgaccgctccatagtctactctaggtatgctgacgacctgactttcagtaccaatgataagggcgttatgtttgatgtagaggccttcattttggaagtactggaaaacattccatatccgagactaaagattaacagcgagaagactgtctatgcatccaaaaagagacagcgccgtatcacaggcctgatcataacaaacgataataatgtgtccctgggcagggataagaagagactgatcagttcgatgatacatcactacgtgcagaataaactagatgaggagagtatccttcatctccagggattaatggggttcgcccaggacatcgagcctctgtttgtggccaaaatgagagggaagtataccgggaagattatctcagacctgcttcgtcaacgggggaaacggataaaatga

SEQ ID NO: 11834 - RNA, 954 nt, synthetic construct
  source 1..954: mol_type = other RNA
atgagtctgtatgagttccgtaagcagatcagcgtggcactcagcctttccgcccaggacgtggcaagactgattgtgcgagccccttacgcctacaaacgctatactattcctaagaaagggggcggtgtgaggcccatagctcaacccgccaaagaaaccaagataatccagtccattctgatctccgattggtattgtaggctaccggtgcatgagaatgcagcagcgtataagagcggcgcgtcaattaaagctaatgcggaacggcataaaaacaatacatttgtcgccaaattcgactttaagaacttcttcggatcaatcacttattctgatcttgtcaaccatttgtcatacgtatttgtgaacgaagttacgaagcagtctatcctcgacatggccagagtgagctgcgtgcgcgatcgttcaagtggagatttgaccctgagtattggcgctcccagcagtccagtgttaagcaattccatcatgtacaattttgacttagcagtggttgaatggtgcgctgagcgagatgtggaatactcacggtatgctgatgacctgaccttctctgcaaaagacagaggggtcctgttcagtgtcaaggactttctgctctctaccctggaggagataccataccctaagctgtccctgaacgaggaaaagacaatatacgctagcaagaaaaaccaacggagagtaacaggcttgatcatctctaatgagaacaaggtttccctcgggagggaacgcaaaaggctaatctctgccatggtacacaagtactcgcaccaggatttggacgagaaagccgtcactcagcttcagggcctcctggcttttgcccacgatattgagccacttttcattgccaagctgaggggtaagtattccagcaaagttatcatggacctcatgcgcaagcggggaaagaaaattaagtga

SEQ ID NO: 11835 - RNA, 951 nt, synthetic construct
  source 1..951: mol_type = other RNA
gatgtgtacgatttccggaaatacgtcagtgacacattagccattccgatccacgacgtgttaagactgttggtgagggcaccttacacctataaaagatacgagatccctaaaaagtcgggtggcagcagatccattgcccagccagcaaaggagacaaaaatcatacagcgcctgctgatggacgccatcttcagtcagcttcccgtccatgagtgcgctgttgcctataagcacggcgcgagcataaaaacgaacgcacaacagcatagatataaccagtacctcagcaagtttgatttctccaacttctttggatcaattacatccgaagacatcgctgctcacctgggccagtgtctgggagacgagttgtccgaacagtccgttgcagacatcgctaggatctcctgcataaggaataagatcaatagcggtttgtgcctgtcaattggtgccccatcttctccagtcctcagcaactctatactgtacaatttcgacgtaagcgtcagtgcctggtgtctcgaaaagggcattgtgtatacccgatatgctgacgatctttcatttagctccaaccagaaaggactctctgggagtattgagccctttctccgccaaactctaaaagatatctcttacccctcactggtgttaaatgagcgcaagactatacatgtatcaaaaaagcaccaaaggcgagtcaccggacttgtgattagcaatgacggctccgttagtctcgggagggaacggaaaagacttatctctgcaatgattcaccgttgtatcaacgataagctggaggaagcggatatttacatcttgcaggggctgctaggctttgcccaagatgccgagcccatcttcgtggcccggatgagggctaagtatgggtcgctggtgatccgcgaaattctgcggaagcgtgtgaagctgcctcggtga

SEQ ID NO: 11836 - RNA, 948 nt, synthetic construct
  source 1..948: mol_type = other RNA
atggacatctacgactttagaaagcatgtcagcgaaaccctggccataccttctcacgatgtggcacggttgatagctagggctccccacacctataagaagtatgagatcaagaagaaagacggaggtagccgatccatagctcagcccgcaaaggagacaaaagtcattcagagattgcttatggaggcactcttttgcgatctgccagtgcatgagtgcgccgttgcctacaaattaggatcctctattaagaagaacgcacagctgcaccgccagaatcaattcatatccaagttcgacttcagcaacttttttggctcaatcacagaaaaagatgtggccgcccacctgagacatgtcttcattggcaagatcagtgaacaaagtattctggatatcgccagaacctgttgcatccgtaatagtctgacggggattttgtgtctgagtatcggggctccttcctctccaatcctatctaactccatcctgtattatttcgacatcgcgattcaaacgtggtgtaatgagagggacattatctacacaaggtacgcagatgatatgactttttcttcaaatgaacgcggtgtaacttcgttagttgaaaagttcctgacccatactctgaaaaacatcaaatacccccatcttattcttaacgaaaagaagaccatccacctaagcaaaaaacaccagcgacgcattacaggactggtggtgtcaaatgacgggttagttagcctcggtcgggagaaaaaacgcttgattagcgtaatgattcaccactacctcctcaagaagctcgaccataaagacatacctatcctgcagggcctcctgggctttgcccaggatgccgagccacttttcgtggcgcggatgcgtggaaaatatgggtccccggctatttcagagataatgaggggccggatcaagaagtga

SEQ ID NO: 11837 - RNA, 978 nt, synthetic construct
  source 1..978: mol_type = other RNA
atgtccattttcgattttagaaaacacttgtctgagagcctcgccattccaacccacgacgtggtaagactgatcgtgcgagcccctcatacatacaagaaatacgagatccctaagaagagtggaggtgtgcggctgatcgcacagccagctaaagagacgaagctcatccagaggctgatgatacaggaaatctttactgaattgcccgtgcatgaatgtgccgcagcttacaaagagggggctagcataaaggcgaatgccgaacagcacaagaacaaccaattcatctctaagtttgatttcgtcgactttttcggctccataaaagaagccgacgtggcaagtcatctggcgtatgcgttgccaggaaaggtttccgagcagagtatcaaagacattgcacggattagctgcatcaagaataagacactcgggggtctgcagctttcgattggggcccctagctctccgatcctgtccaacagtatcatgtattacttcgatgtggctgtagccgcttggtgcgctgacaagggcgtcatctacacccgctacgcagatgatctgaccttttcatcaaatgtcaagggcttacccgcccagatcgagcccttcctgactgaaatactcaaggaaatcccgtatcccactctgtctctgaacaagaaaaaaacagtgcacgtgtcaaaaaaacaccaacgtcggataaccggactcattattaataatgatggggctatttcccttggacgcgagaggaaaaggctgattagcgctatgatccaccgatttattctgggcacacttgaggtggaagccatcctaaacctccaaggcttactgggcttcgcccaggacgccgagcctcttttcgttgtccgcatgagagacaaatatgggcatcaggtcattaccgagcttctaagacataggggtgttagcaaggacaagccaaaagcatatttgaagaactga

SEQ ID NO: 11838 - RNA, 957 nt, synthetic construct
  source 1..957: mol_type = other RNA
atgagcgtttacgactttcgggggaatattagcaatgctctcgtggtgagctccaacgatgtgagccgcctaattataagagccccccacacatacaagacctatgagattgataagaagaatggcggcaagcgatctattgcccagcccgccaaggaaaccaagtacattcaaaggcttctcatgacgcaattgttctctagactgccagtccactcatgtgcagtcgcctataaagatggtgctagtatcaagaaaaacgctgaactgcataaaaacaaccagtacatctccaaattcgactttacaaacttctttggatccatcaaagaacctgacatctccgcacacctagcgtctgtgtttggcgacgagctcagcgatgagacaataaaggatatcagccgcatctcatgcatcaagcataaagacttgccagggctctgcctgtcgattggagccccctcctcgccagtgttgagcaacacaatcatgtacctttttgaccagatagttcatgaatggtccgtagaacgcgggatcaccttcactaggtatgccgacgacctgaccttttcttcaaatacgaaaggactgttcagtgaaatagagcccttcctgagtcaggtcctcaaaaaattgccttatcctgtgttaagtctcaatagcaaaaagactatccacgtcagtaagaagaatcagcggcggatcactggcctggtgttagataacgatggtagagtttcattaggacgtgataggaagcgcctgatttccactatgattcaccattactcctgtggaaggctctcagacgaggaaaccatgagactgcagggcctgctggggtttgcagaggacgctgagccgcttttcgtgtctcgtatgcgggggaaatatggcatcctggtaatttctgagcttttccagaagcgaggtaaaaagctggagaagtga

SEQ ID NO: 11839 - RNA, 963 nt, synthetic construct
  source 1..963: mol_type = other RNA
atgtcttcatacgaatttagacaagacgtggtggaattcttctccgtctcggagcatgatgtattcagattgctgcagagggcaccccacacctataaacggtatgagatagacaagaagtctggcggtaaacgcctcgtcgctcagccagccaaagagacaaagattttgcagcgctacctcatgcgagtggtatttaacgacctgccaatccacgagtgcgcgactgcatacagctctggtagctctgtgcgaaagaatgctgagcttcacgtggtcaatccttatatctcaaagttcgacttcgttgatttctttgggtcaataaaggaatccgacctaattttgcatttttctaggttcctgggaggaaaagtgagtgaacaatcaatcaaggacattgcaagagtgtgctgcatccaacacaagggtagggccgaccattgtctttccatcggtgccccttcctcacccgttctgagcaattctataatgtacgatttcgacgaacaggtggaggcctggtgtaaggaaagaggcatcacatacagtcggtacgctgacgatctaacgttcagcactagcggaaagggcgtatcggctgagatcgagcccatgatccgtggcctgctgaacgacctcccttatccaagactcagtctcaacgataaaaagacccttcatttaagcaaaaaggtgcagcggagggtcaccggggttatattaaataacgaggggaagctcagtctggggcgagaacgcaaacgtaaaatttccagcatgattcacaggtttagcctgggccagttagatgaaaaagatgtgtttcagttgcagggcctgctgggatttgccgaggatgttgagccgctgtttgtgtcccggatgcgcgggaagtatggaattggcgtcattagtgcccttttccagaaacgctccgagggacggatcaacaaactgtga

SEQ ID NO: 11840 - RNA, 966 nt, synthetic construct
  source 1..966: mol_type = other RNA
atgtccaagttcgaattgaggttgaggctttgtagagaactgctgctcaccgacaaagaggtcgcccgcctcataagccgagccccttacacttacaaggtgtattccattccaaaaaagaatggaggacgaagggtcgttgcgcaaccggcacgggaaaccaagattcttcagaatttcctcatcgaaaacgttttcaaagaactgccagtgcacgagtgcgctaccgcttacaaggcggggtcatccatcgccattaatgccagcgcccacgtaggtaacagctacatatccaagtttgatttcagcaatttcttcccctctattacaatgctggacctagtgcggcatatcaagagcttttttgacggacggctcgatgatttggagattatcgacattgccagagtatgttgcatcaaagaccgcgtgacggataggttccatctgtccatcggcgctccaagttctcccatcctgtctaacagtatcatgtattttttcgatgtcgccgtgcacaaatggtcgtctgagcggggagtttcctacacaagatatgccgatgacatgactttttcaacaaacgagaagagtatgtctcgggagattgagctatttctggtccgccaagtggaggctatgaagtcacccagattaagtataaaccacgagaagactatccacctgtctaaacgtaatcagcgaaaggtgacaggcttagtgctgagctcagagggcaaagtgagcctggggcggaataggaaacgcgaaatctccagcctgatccatagattcgctcttgggcagctcgatcccaccgacgtttttcgcttacaggggcttttgggctttgctaacgacgcagaacctgacttcgtagtgagaatgaggaagaagtatggtgacctcgtgattgcagcactgtttgaaaaacgtaaagcaccttcagtcataagtgatggctga

SEQ ID NO: 11841 - RNA, 951 nt, synthetic construct
  source 1..951: mol_type = other RNA
atgaccatcaacctgcgcgagtctcttcaagaatcactggggttgtctgaggcgcagctaaatcggcttatcgtgcggtcaccacatacctataaggtctacacgattcccaaacgtacgggcggcaagagaactattgcccagcccgcaaaggaaacaaaattcatccagaactggctcattgaaaacatctttaacagtctgcctgttcattcttgtgccagcgcctatcagccaggctccagtataaaacgcaatgctgatgctcataaggctcagagatacctgactaagttcgacttcaagaatttcttcacctccattaaatcggacgatcttatagagcacatgagagtgcacctgggggaagtgctggatctagatgccatccacgacatagcgagagtcagctgtattcaattaaaggctggcgaaaagttgtgcctcagcattggtgcacctagctccccgcttttaagcaattccatcatgtttgagttcgatagtctggtaaatgaatggtgcagccgagagcgcgtggtctatacacggtacgcagacgacatgaccttttccactaatgagaggaacaagtctgccgtaattgagaagtttatccgaggcgtggtgcgtgacgttgggtatccaagcctgcggttcaacaacaaaaagacaatctctctgtcaactaaacactcccggagggtcacaggaatagtgatcaataaccagggacagctgtcgctgggacgagacaggaaaagagaggtcagtgctttggtgcacaaatttatgttgtccgagctcccccaagccgaggtttacaggctccagggtttactcgggttcgcctgcgatgtggaacctgattttctggcacgcatgaaaaggaaatactcagacgaactgatcaggaccatcctcgagattcgcaagaagtctgacgcctga

SEQ ID NO: 11842 - RNA, 951 nt, synthetic construct
  source 1..951: mol_type = other RNA
atgactatccacttgcgaggggccctcagggattcacttgggctgagcgacgcccagctcaatagacttattgtacgctcaccacacacgtacaaagtgtacacaattccgaaacgtaccggcggaaagcggaccatcgcccaaccagctaaggaaacgaaattcatacagcattggctaatccggaatgtcttttgccaccttcctgttcacgcctgtgcaagtgcttatcaggacggtgcttccatcaaaaagaatgcagatgcccatcgactgcaacggtacctggcaaagtttgatttcaagaacttcttcacatccattaagtccgacgacctgatcattcacatgcgccggcatttgggctcgatactggaagagagcgctatcgacgatgttgcgaggatatcatgcattaagctcaaggcaggagggaagttatgcctcagtataggtgccccttcttctcccttgttgtctaatagcatcatgttcgacttcgacagtctggtgaacggatggtgtaaaaaagagggtgtgatctatacaaggtacgcagacgacatgacttttagtaccaacgagcgcgataaatcaagagagattgaagagttcatccgaagcgcggctagagacgtagaataccccgccctgaggtttaacaccaagaagactgtgttcctatctacaaaacattcccgtagagtgaccggcattgtcattaataaccagggcgaactgagcttaggccgcgatcgcaagagagaagtctccgccttagtgcacaaattttcttttgaagagctccccgagaaggaggtttataggctgcaggggctgctgggattcgctaaagatgtcgagcctgattttcttgaaaggctgaaacgtaagtatagcgacgagctcatcagacagatcctggccattcggaaggagcgggatgtgtga

SEQ ID NO: 11843 - RNA, 942 nt, synthetic construct
  source 1..942: mol_type = other RNA
atgactatcgcactgaggaaagagctccaggagagcttaggcctgagtgaagcccagcttaacagactcattcttcgggcaccccatacatacaaggtgtacaccattccaaagcgtactggaggcgtacgtgtgatcgcgcagccagcccaggaaaccaaattcatccaaaactggctcatcaagcgggtgttcggagaactgccggtgcattcctgtgcaaccgcctatcaggcggggtcatcaattaagaaaaacgctgccgctcacaaggaccaccaatacctagcgaaatttgactttaaagacttcttcacgagcattaaggcagatgacctggtggctcatatgagtcgacacctggcaggcctgttgagcagatcagaaattctggatgccgccagaatttctagcattcagcaaaggcagtctgagtccttgtgcctgtctatcggagccccttcttctcccttgctgtcgaatagcgtgatgtttgaattcgactccctggtttccaactggtgtgtagataggggaatcatatatacacgctacgctgacgacatgacattttccacgaatcggaagggtcgctcaggggagattgaggaattcattcgaaatatcgctcgcgggctcgattatcctcgacttaggttcaattccaaaaagaccgtcttcctgagcaagaagcaccagcggcggataactggcatcatcttaaacaacgacggtgagctcagcctagggagagatcgcaaaagagagataaaagctttagttcacaagtttacctgcgatgagctgcccggcgaggaagtgtatcgcctccagggcctgctcggttttgccctggatgttgagcctacttttcttcaagcccttaatgtcaagtacagtgaccaggtcatagagacaatcttgagtatcaggaaagaatga

SEQ ID NO: 11844 - RNA, 945 nt, synthetic construct
  source 1..945: mol_type = other RNA
atgaaaatcgcattaagaaaggcactccacgattcgcttggtctgcctgaggatcagctaaatcgattaatactgcggagcccctactcatacaaagtgtatactattcccaaaaggtcaggcgggctgagagtgatcgcacaaccggctaaggagacgaaattcctgcaacattggttaatggcaaatgtgttcagaaatctgcccgtccatgagtgtgctaccgcttatcaggccgggtccagcatcaagaaaaatgccgaactccacaaaaataactcttacctggtaaagctggacttcaagaacttttttccttccattagcgcccgcgatctgatatcccatatgcgaagacatctggacggatcacttgacgaagaagcccagcgcgacatcgctaggatttcttgcattaggttgccagatgcccctggcctgtgcctctcaatcggagccccatccagccccatgctgagcaattccgtgatgttcgagttcgacacagccgtccacggatggtgtaacgagcggggcgttagatacagccggtatgccgatgatttgtccttcagtacaaacgagcgcggcgcaagtggtgacattaaggagtatgtactgagtgttgtggaacgcctcgaataccctcgcctcagtttgaatgacaagaaatctgtctttctgtcgaagaagcaccagagacgtataaccgggctcattattaacaacgaaaaccagatcagccttggccgggataggaagcgtgagatctccgctctcatccacaagtttagtgtgggagcgcttccggactctgaaatcttccggttgcagggtctactggggttcgcgagggacgttgagccaaggttttttgtgtcaatgtccaaaaagtacacctctgatactataagcaacatcctttctacacgaaaaaagccatga

SEQ ID NO: 11845 - RNA, 954 nt, synthetic construct
  source 1..954: mol_type = other RNA
atgaccgaccatttgcggcacggactgcaagagtcactgggtcttagcgactgtctgctcaaccgtctaattcagagagctccacactcctataagatatatacgatcgcgaagcgcacaggcggacagaggaccatcgcacaacccgccaaggaaaccaaattcatccagcggtggctgattcagaatatcttcaacaagctccccgttcacgagtgcgcaagcgcctacaaagatggagctagcattaagaaaaacgcgaatgcccacaagaaccattcatacgtaatcaagctagatttcaaagacttctttccctctataacgttttccgatttagtcaagcacatcgccaaacatctggggcacatcctcaggactcaagacatccaggatatagctcgaatttcttgtatcaggctccacgggaaatcggacctgtgcctttccgtgggcgcccctagcagtcctgtgctgtccaatacaattatgtacaacttcgacagtgaagtgtctgcttggtgtactcaacagtgtataacttacacaagatatgctgatgaccttaccttcagcaccaatttcaaggggggcagctctgagatcgaagcctttgttaggtccattactcagaagctgacttacccaagtttacggctgaataacaataagacaacacacctgtctaagaaacatcagagacgcatcaccggaattatcattaataacgagggtaacttgtcactcggccgcaatagaaagagagaaatctgcgcactgattcataaatttagcctcgatctgctgccagaatccgagatatttcgcttacagggcttgatcgggttcgccaaagacgtcgagccgttgtttgtggcacgtatgcggggcaagtatagttcaaaacttattgaggaggtgctgcagaagaggaaacctggtcgactctgctga

SEQ ID NO: 11846 - RNA, 939 nt, synthetic construct
  source 1..939: mol_type = other RNA
atgacggaccacttacgacacgacctggaagagagtctcggactttccgactacttaattaatcggctcatcgacagagcaccctacagctataaagtgtacacgatcccaaagagaagcggcgggcagaggacaattgcccagcctgccaaagaaatcaagttcattcaacgctggctaattcaaaacatttttgacaaactcccggtgcacgagtgcgcctctgcttataaggacggcgcttctataaagaaaaacgcaaattcccacaaaagtcactcatacatcatcaagttggactttaaggattttttcccaagcatcacctccagtgatctggtgatgcatatctctaagcatcttggacgaacatttggagcgcaggacatccaggatattgccagagtgtcctgcatacgcctccatggtaaaggcgacctgtgcctatcagttggtgccccctccagtcccgtgctgtcaaacaccatcatgttctccttcgatagcgaggtcagtgcttggtgtgcccagaatggcattacttataccaggtacgcggatgatttgactttttcgaccagcactaaagggatttgttcagagatcgaatcattcgtaaagggggtcacccaggagttggactaccctaatctgacactgaactttaataagactacacatctcagcaagaagcatcaacgtcgcatcaccggggtgatcataaacaattttggagccctgtctctgggccggaacaggaagcgggaaatcagcgcattgattcacaaattctctctggatatgctgccagagagcgagattcttaggctgcagggtctgctcggcttcgctaaggatatagaacctcttttcgttgcaagaatgcgcaggaaatattcttcccgtttaatagaagaggtcctgaaaaagcggaaatga

SEQ ID NO: 11847 - RNA, 966 nt, synthetic construct
  source 1..966: mol_type = other RNA
atgatgataggcttagacatatcggagcagataagtaaggatctctatgtcagtgctttccaggtagaccgtttgatcaacagggctccacatgcctacaagattttctttatcccaaagaaaaccgggggccaacggaaaatcgcccagcctgcaagagaagtgaaatacattcagaggtggttggtggataatatctttaatcaactcccggtccacgaggctgtgaagtcataccgcgaaggcctggggataaaggataacgccacatggcataagaaaaataagtacctggttaagcttgatttcaaagacttcttcacctccattaaggaggccggactgtttgacttccttttgagaaaactgtctgacagctattctgacgagtcgctgaggaagattgccagggcatcctgcatcaagtataaacacagagaagacctgtgcctcagcgttggcgccccaagctcacctgccatctccaatgcaattctgtatgccttcgatgaagcggttaacaattggtgttttgagaacagcatctcctatacaaggtacgcagatgatttaacgttttctaccagcgtgcccaacgtgtccagcctaatcgaacccaaagtccgccaaatttctagcgatttcccctatgtgaatctcagattcaataacgcgaaacgaactcacctttcaaaaaagtaccagcgacgtgtgacagggattgtgctgactaaccagggagagttatcagtcggacggcttcgcaaacgggaggtaaaagctctcatccacaagtttaagactggtctgctgcctatgaatgaagtccatcgcctgcagggcctgctcggttttgtgtctgacgtggagcccatgtttctagagcggatgagagtgaaatacagttctgctaccatcgacgatattctgaagtccgttaagcaggacaagttggtaaacagttga

SEQ ID NO: 11848 - RNA, 945 nt, synthetic construct
  source 1..945: mol_type = other RNA
atgaacaagtctctgctgcaggaaatctctgagagctttttcatgtccgagatccagatcgaacgcattttcgtcagggcaccatatgcttacaaactgtacacaatacccaagaggtccggaggtctacgaaacatcgcgcaacctgccaaagaaaccaagtacgtgcagtcctggttgattcacaatgtgttctcgagcctcccggttcatgactgtgccatggcatataaaagcgggagcagtattaaggagaacgctctggctcatgtggaaaaaccctacttggttaagttcgacttcaaggatttttttacgtcaatcaaggaggccaatctgatagcccactttcaactgtacctgggcggaagatttagctcagaggaaatcaagtacttagcgaggatctcatgtattaagtataaacacgccacagaaaagtgcttgtctgtaggggctccctcttcccctatcctctccaatagcatcttgtttgagtttgacaaatccgtgcatgagtggtgcgtcagcaagaacattgtttatacccggtatgccgatgaccttacattctctctgagggagaaaggcatggctagtaccatcgaagccgaggtccgaaacttcgcaaaaaccaagtgcgtggtgaatctgcggttcaaccagaagaagactacccacctctcaaagaagtgtcagcgcagaataactggtcttgtaattacgaatgaggacaaaatttctctagggcgtgatagaaagcgggaaataaaggcacttatccatcagcacctgttaggcatgctgaacgccgatcaagtgagtaatctgcagggccttctcggatttgcaaaaaacattgagccatcgttcctcttctccctctacaaaaaatatacctttgaggtcgtgaatggcattatcagaagtcgcaaaactaaatga

SEQ ID NO: 11849 - RNA, 945 nt, synthetic construct
  source 1..945: mol_type = other RNA
atgactaatagtccgctggtgaacatctgcgccgacacattgcacatctccacaagtcaggtcatgcggttgattctccgggcccctcatacctataaggtgtactcaattccaaagaaaagcgggggaaggagaatcatagctcagcccgctaaagaaaccaaatacttacaggacgttatcataaaacgctatctgaatctgctgcctatccatgaggcagcctctgcatataagatcggatcttcgataaagaacaatgccaacgcccacaagcataataagtatttcgtgaagcttgacttcaaacgattcttcgagagcataactctggacgatctagtgactcactttgagaaatacctcccaacacctcttagcaaagaggatacggtgtatctggctagaatttgctgtaggtcctcagatggacgagcagcgctgacaatcggcagcccggctagtcctgttttgtctaatactgttatgtacgactttgacaagattatcgagtcgtggtcaagccagaacggctttacctacacaagatacgccgatgatttaactctcagcaccagtacgccaggagcctccgcgcaagtaatccccgcagtccttaatgccctggaaaaaattgaataccccaaactactgctcaacaacgagaagaccgtgtttctgagccgtaaaaataatcggcggattaccggtatcgtaatcaacaacgatggccgcctttccctcggcagggagaagaagcgtctgatttctgcaatgatataccactatcagcaggggaggctctccgaggaaaaccaattcaagttacagggcctcattggttttgctttggacatcgaaccaattttcgtctccaggctgaactcaaagtatgggcgcgacgtgatttctaagatcctgcagagacgccagcccaaacaatga

SEQ ID NO: 11850 - RNA, 933 nt, synthetic construct
  source 1..933: mol_type = other RNA
atgatcgcacacaagacactcgaaaaaatgctggccgatctcagtctgtccagtgagcagctcgtcagagtcgtgtccagggccccttattcctacaagacttacagcattcccaaaaaaaatggaggcctgcggatcatctcacagcccgctcgtgaaactaagtacgtgcaacattggctgattcataatgtttttcatctcttgcccattcacgaagccgcatccgcgtatgtaaagggagcctcaattaagaagaacgccgaggctcacaggactaatgagtacatggtaaaactggacttcaaggactttttcccatctattaagatcgacgatctgattgcccactttcaaaagtctttgccgttcctcgacctactggagatccgctacatagctagactgtcctgcatcaacaggggtaacggaggcgctctgtctatagggagcccagcctcacccattctttccaacagcataatgtatgagttcgacagtgtcgtggccgattgggcgagccagaataaatttgtgtacaccaggtatgctgacgatttgacgttctctaccagcctgccttacgcaagtgaatcggtggtgcctgttatcaaggatttactgagcagcctgaaatacccacggctctctttaaatgtggacaagacaatccacttgagtaaacgagggtcacggagaataacaggcctggtgatcaccaacgatgataaagtttcccttggacgcgacagaaagcgagagatttcagcacttgtccataagtatggccttggcttgctagagcagaaagacgtgtttcgcctgcagggtctgctgggtttcgcagctgatgtcgaacctctgtttctctctcggttagggaaaaagtatgggatgaaaaccatcctaaacctccttcgcaagcgtcagtga

SEQ ID NO: 11851 - RNA, 951 nt, synthetic construct
  source 1..951: mol_type = other RNA
atgagcaataaccccctcattgatgccctgctatctgacttagccctctcgaaagaacagttcttaagaattgcgagtcgcgcccctcgtacatataagatctatcccatactcaagaagaacggcggcattcgggtaattgcgcaacctgctcgtgaaaccaagtacatacagtcatggctggcgaataatgtctttgggctgcttcctgtccacgatagcgctaccgcataccgcaaagggtcttctatcaaagtgaatgctcagatgcatgctgccaacccgtacatagtcaaactagactttaccaatttcttcccatccatcaagtccagtgacgtctttgctcacctcaagcagtttttgatcggagccacagattctgagttgaagatctttactctgttgagctgctttaataacaatggagaactctgcctgagtatcggtagccccctgtccccaggactgagcaacagcattatgtacgagttcgactcaattatctccgattgggccgccgggaacaacttcatctatacacggtatgcagatgaccttacgttctcaactcctattaagggcgccagcgaagccgtggtggacaaggtgagagaggttattggcaagatcgcatacccaagacttagcctgaatgaaaaaaaaaccatccatctcagtcgaaaaggatgtcggagggtgactggcctggtccttagtaactcagggtccgtgtctatagggagagacaaaaagagagagatctccgcaatggttcaccggttttcaatcggtaagatttctcatgatgatctgaggaggctccaaggtctgctgggcttcgttcaggacgttgagcccctgttcatagctcgcttacgagccaaatactcctccgcagtagtggtggacttgctgaggaggcgcgtgaagaaagagtcggataagtga

SEQ ID NO: 11852 - RNA, 957 nt, synthetic construct
  source 1..957: mol_type = other RNA
atgtcaaaccagagtactctcagcagactcctggatgaactggctttagaaccccaccagtttcgacgtattgccctgagagcgccgtatacctacaagacatacacaattccaaagaagaacggcggtgcccgcgtaatatcccaaccagcccgggaaaccaaatatattcagtcctggctgattgaaaacatcttcaagaaactgcctgtgcatagcgctgccgccgcatatgtgaaaggcgcgagcatcaagaaaaacgcaaatgctcataaggacaacccatttctggttaagatggacttcgagaatttctttccgtctatcaaatctctggaccttcacttgcactttcgcaagcatcttagtttcctttccgaagaggaaatcctgctcgttgcacgtctctgctccgtcagggggatggtgcatgacggtctatcaatagggagccctgccagccctattttgtccaattctgtcatgtacgagtttgatagtctggtcgcggagtggtcccagcggaatggctttgtatataccaggtatgctgatgatctgactttcagcacgtcgaccaaagaagcatcggctgccgtggagcccatgatcagggacgtgataggggcaattggatacccctctctgactatcaataataggaagactttgcacctcagcaaaaaaacaaatcggacaatcacaggagttatcatcaacaaccaaggacagctgtctttgggccgcaccaaaaagagagagatttcatctcttgtccaccggtacaccctggagcaactagatgtgagtagagtgcacaaacttcaggggctcttgggatacgcctatgatttagagcctaagttcataaacgccctctcaaagaagtactccttaggcgtgatcaatgagattctgcgccgaagaccacccaggcaggaggctaacacggactga

SEQ ID NO: 11853 - RNA, 972 nt, synthetic construct
  source 1..972: mol_type = other RNA
atgacaatcgcactgattgaagagatacaagcctctcttggactgagtagcgagcagatggttcgcctgattgtaaggagtccatacacatataagacctacacgatccctaaaaaatcaggggggtttcgagtcatcgcccagcctgcgaaggagactaaattaattcagaggtggctgatttctaacctgttcaataagctacccatccacgattgcgcaactgcctacaaggagggctcctctatcaaactgaatgccaacaaacatcgcgagaacgaatttctctcgaaattcgacttcatcgattttttccaatcgattaaggaagaggatataaaggcccatcttatggagtgcttaggtgggtttttgtccgaaaaggaggttgcgtgggtggctaggttgtcatgcatcaaaacccagaccagcaagaatttgtgtctgagcgtgggagctccatccagtcccctcctcagcaattctgcaatgttccagtttgacagtaagctgaacaactggtgtcaagagaatggcataatttacaccagatatgctgatgacttaaccttctcttcctccatcaagggagccagcgccgagatagaaggcgctatacagaacgtgctgacggagatggcaagaccgaaactgctcttgaacaacaagaagacaatccacgtgtctaaaaaacaccagcgaagaatcacagggattattatcaataacgaagacgagctcagcctgggtcgggaaagaaagaggatgatctccgcccttattcataagttcactcttaatcagctagcttcctttgaaattttccggctgcagggactcctgggcttttcaaaagacgtcgaacccgcatttctgattcgtatgcgggacaaatatgggagcggcgtgatcgagatgatcctcaagatccgcaaggataacaacggcaagaatggtgatttcaattcatga

SEQ ID NO: 11854 - RNA, 942 nt, synthetic construct
  source 1..942: mol_type = other RNA
atgaactcaaacgacctaatcggtcggttaattagccacctgggattgaatgaaaaagatgtgctcggcctcatccgacgagctcctttcacctacaaggtctatactataccaaagaaaacgggcgggaacagggttatcgcccagcctgcacgcgagactaaatacatacagaattggctcatcgaccatatcttcctggctctacctgtgcacgaaagatcaatggcttacaagaaaaagatcggattgatcaacaatgtcttaccccacaaaaacaacaaatatctcgcaaagtttgactttaaggatttctttcactccatcaagttcctggatctggttaatcattttaataagcacctccatcacctcctgtccgaggccgagattcaatatgtggcaagggtagcctgcattaaacagagagattcgggctctctgtgtttgtctgtgggggccccaagctcaccgcttctctctaattcattcatgttcgaattcgatagcgccatggacgagtggtgccaggagaatgagatcatctatactcggtacgctgacgatctgaccttttccacaaatattagtggcgcgacgaataagatccagcagacaattgtaggaattctgagcttaaagtatcccaacctgtttttgaatcacgacaaatccatccaactgagtaacaagaacagaaggcgggtgacaggacttatcattacaaaccagcaacgcattagtgtggggagagacaggaaacgtatggtcaccagcatgattcataagttttccataggtgagctgcgtgccgaagacgttttctacctgcaggggatgcttggcttcatcaagagtgtcgaacccacctttctggtgtctatgaaccgcaagtacggccatgatcttctgaccaaaattataagcatacggaaagagtga

SEQ ID NO: 11855 - RNA, 954 nt, synthetic construct
  source 1..954: mol_type = other RNA
atgatcgacaacttatctgggctcatccacctgtcattgggcatttccactacgcaactggatcgaataattcagaggtccccattcacttacaagatctacaccataaagaagcgtagtggagggtaccgcaccattgctcagcccgccaaggaaactaaattcattcagaattggctaatcgagaacattttctctaccttcccagtgcatgaatgtgcctcagcctataagaatggagcgtcaattctcaagaacgcagagctgcacaaaaaaggagaattcctgtccaaatacgacttcaaggacttttttagttccatcaaggttaaggatcttgtgctgttttttacacatcagctggcccatcgcttctccaaattagatatattgcggatggcgcagatttcttgcgtaagacacacagagctgtcagggctgtgcttgtctataggcgcacccagtagccctatcctgagcaatgctattatgtatgactttgacgccaagatatacgagtggtgtaacaaaaacaacatttcctactccagatatgcagacgacctcacattttctacgaatgaactgggcaggagcgatgagatcactagcctcgtgaatgccgctatcttagagaataaaatcgtcaagctccaaatcaataagaagaaaaccgttcacctgagcaagaaatatcaaaggagaattaccggtctaattatcaccaatagtaacatcgtctcaattggtaggagccgaaagcgcgaaataagcactcttattcacaagtttagcctgaacatgctttctgatgatgagaaatatagactccagggcctgttgggcttttcgaagaacatcgagcctctcttcatcgaacggatgaatgtgaaatacggaaaggatcttatcaaccagatcttcaaaatccggaaaagtacagacacagcttga

SEQ ID NO: 11856 - RNA, 948 nt, synthetic construct
  source 1..948: mol_type = other RNA
atgaaatattcactgccacagctgctacaggagaatattggccttcacccgagtcagtttgagagactgatccgtagggccccagacacttacaagcactacaccattaagaaaagaaccggcggtgatcgctggattgctcagcctgctaaagagactaagtatatccaacattggcttatagacaacatcttcctgaagttccccgtgcaccggtgcgctatggcctacaaggcaggaactagcatagccatcaacgccgcagctcattccaaaaatagctatctcgcaaagttcgactttagcaatttcttcaactccattaagtaccacaatgtcaatgacttccttagcttgctcctggaagacagcttctctcccgacgatatcgataacatggcaagggtttcctgtgtgagagagcctgatttcggtctatgcctgtccgtgggagcccctagctctcccttattgtctaacgcgattctctatgaatttgactcccgcatcgagtactggtgccaagaaagaagtataacatatacacgctatgctgatgacctgaccttttctacgaatgaaaaaggggcgtgttcagagattcataagttcttggtggattcactcatagactttgactgccctgtcctcaggttaaatgataaaaagaccatccattcctctaaacgtttccagaggcgggttacaggccttattatcaataacgatgggatggtatcactgggccgcgggcggaagcgagagattagtgcaatgatccacaaatttcggtgtaaagacctggccgaatcagagagctacagactccagggcttgctggggtttgccagggatgccgagccatcctttgtggaatctatgaacaagaagtacggaaacgagatcctgtcgagcatctacagtctgcgaaagcccaaagaaagttga

SEQ ID NO: 11857 - RNA, 957 nt, synthetic construct
  source 1..957: mol_type = other RNA
atgaactctaaattactgacccagatccgtgccgaactcggcttacctgtggcacagatagaacggttaatcgaaagagctccctacacatacaaagtttacaccatccccaaaaggtcaggaggggatagaacaatagcccagcccgccagggagacaaaactgattcagaagtggctcatcgagcatatcttctgtaccctgccgatccatgacgcagctgccgcttatagacctggcgcaagcatcaagaagaacgcagaacggcatgcgaattccaagtatatggtgaagctagattttaaggagttttttcccagcatcaagtaccaagatttggtgaatcacttttgtgtgcacttgtcagacgcctatgaagacgacgatattaagaggatggctcttatatcctgcctgcacattggtggcagggatttcgccctgtctattggttcccctgcctcgccttgcctgtccaatagtatcgtctacgagctcgataaaaaaattaagtcctggtgcaaggagaacaaggtggcctatactcggtacgcggatgacttgacgttctcaacgaatcgcccagatatctccagcgaggtggaaaagatggtcagtttgactctgaaggagattgagtacccacagctcaagctaaacaagaaaaaaagcatacacctctcaaaaaggcataaaagagttgtaactggggtcatcattaactctgaaaacaatctgagccttggccgggatcgcaagcgtgagatcagctctctgattcacaagtacagtattggactgctgtctaaaggcgacacatatcgaactcaaggactccttgggtttgctcgagacattgagccagacttcgtagcacgcctcaacaccaaatatgggaataagctgctggaagagatcttcaccctgcgcaaagctgaggaagaggacgacctttga

SEQ ID NO: 11858 - RNA, 948 nt, synthetic construct
  source 1..948: mol_type = other RNA
atgtcctccaagttgctgactcaaatcagggctggcacaggcctgccaattacgcaaatcgaacgacttatcgtgcgggcaccttacacctataagatctacacaatccccaaaaggagtggaggggagcgcattatcgcgcagccagctcgcgaaaccaaactgattcagaactggctggtcgagaatgcattcgggtctttacccatccacaaggcagccacagcctatagatctggggcctcaatcaaacataatgccgagatgcacgctaagtcacgctatatggtcaagctggacttcaagaacttcttccctagcatcacgtacaatgatctagtggctcactttagccgacacctcagcgaacagtatgaaatcgaggacattaaacggatggcaataatctcctgtttgaacattggaaggctagatcttgccctctcagtgggaagccctgcctctccctgcctctctaataccgtcatgtacgagctggataacattatacagaattggtgcgacgacaaacatataacttacacaagatatgccgacgatctgacattctccactaaccagaaggatatttcgaccgaggtggagataatgatagcttccagtattgctactgtgcagaacccacgtctttccatcaatagtgaaaaaactgtacacctgtcaaagaagtttaagagaatggtgaccggcgtggtaataaacagccagaataacatcagcctcggtcgcgaccggaaacgtgagatcagtgcccttattcataagttcagcattggcatcctgtctccggacgaagcatttagaacccagggtttactggggtttgcgaaggatattgagcccgactttgttgttaggatggataaaaaatacggcaatcaattgctggagcagatctttaagctccggaaagttaccgaaatttga

SEQ ID NO: 11859 - RNA, 966 nt, synthetic construct
  source 1..966: mol_type = other RNA
atgaagatagacctgtctcagcggctccaagaaagtctgggagtaagcagcgatcagctagcccgcttggtggccagggctccttatgcctacaaggtgtatgagatcaagaagcgtagtggtggcatgcggacaatcgcccaaccagcacgagaaacgaagtttattcagatttggctgatcgagaacatcttcaaagagctccccgtgcacgaaagcgctacagcatacggtaaaggctcctcaatcttgaaaaatgcagtggctcataaagacaatagatttatcgcgaagtttgatttcaggaatttcttcccgtcaattaaatacgaggaccttgtcgagcacttcactagacatttgtcgggtgtcgtgtcagacgcagacgtcaagatgatggctagaattgcctgcatgcgctcaaagaccaacggaaggatgcagctcagcatcggggcaccttcttctccaatcctgagtaactccattatgttcgaatttgacagccagatttccgcatggtgtgtcgagcaggggatagtatatacccggtatgccgatgatctggcttttagcaccgatgtgatcggggcgacagctaaaattgaacccattattcgccaagccctgagaggcatcaattaccctgctcttcagataaacaacaaaaaaaccgtgcagattagtaagaaattccagcggcgcgtgactggcctggttatcaataacgagggcgacatatccttagggagggaccgaaaaagggaaatctcctccctggttcacaagtttactctgggcggactggccgacgatgacattttccgtcttcaaggactactgggatttgccaaggatgtggagccacagttcatcgtcagattgtctgccaagtacacagcggagatcataaacgttatcttaaagctccggaagccccccaagctcaaatctgattttaattga

SEQ ID NO: 11860 - RNA, 951 nt, synthetic construct
  source 1..951: mol_type = other RNA
atgaacttaagtctaaaaatgcaggaggaattaggaattactggcgagcagtttaccaggctggtcgctagggccccctacgcatacaagatatacgagatcgacaaacgctcaggaggtactcggacaattgcacagccagccagggagacgaaattcgttcagagctggctgatcgagcatgtgttcggagcgctaccaatccacgagtgcgccaccgcctatggtaagggcgcttctattttgaagaacgtggatgcccataaagaaaatagcttcctggccaaatttgacttccgcaattttttcccatcgatcaagtatgatgacttgttgcttcactttagtattcacttatctaacatcgcctccgtggaggatgtgaagatgatggctagaatcgcttgtatgagatcaaaagctagcggccaactgcagctttccattggtgccccgtcttctcctatcatcagcaacagtgtcatgtttgaattcgactgtcgagttgcggcttggtgcgcagaacaaagaatagtgtataccagatacgctgatgatctcgcgttttccactaacgtaaaaggggcaacggtaaaaattgagcccataattcgtaaagtgctgcgtgaaatcccctaccccctcctccagctgaataacaagaagaccatacatgtttccaagaagtatcaacgccggatcacagggctggtcataaataatgcagacgaagtctcactggggagggagcggaagcgggaaattggggccctggttcacaagtccaccctcggcctgttgaatgacgatgacgtctttcgactccagggcctgcttggattcgctaaagacgtggagcctcagttcgtgatccgcctcagagccaagtacacatgcgaagtgatcgatgcaattcttcagctgaggaagcctagcaaagccaagtcatga

SEQ ID NO: 11861 - RNA, 981 nt, synthetic construct
  source 1..981: mol_type = other RNA
atgtccatcctggaaggactcgcaatggcttcttcaatattcagccggatgcaagaggcttacgctctctcagacgaacagctgaatctgcttgtgaagagaagtccccactcttacaaggtatacagtatcccaaagaagagtgggggcaataggcagatcgcccagcctgccaaggagactaagtacctacagtattggttgattgaaaacgtcttttccctgctccccgtacacgaatgtgcctccgcctaccataagggggcctcagtgaagagcaacgcagccgcgcactcaaaaaaccagtatctatccaagtttgacttccgcaacttttttccctcgatcgttttttctgacctcgtgcggcattttgagaaacatctgaatgatcatgtgcaagccgccgacattctgctcatcgcacggcttgcgtgcatcagaccaaaaggaacgagcaatttgtgtctgtctataggtgcaccgtccagtcctatactcagtaactccattatgtacgagttcgatgaaaggattagcgggtggtgcaaggatcacggcattgtgtatacaagatatgctgacgacttagccttttccaccaacataaaaagcatttcttacgcggtcgagaaggagctgagggaggtgctggcaggtctgcaatatccaaaattagttttgcatgctgagaagaccatccacgtttccaaaaaatatcagcgtaaaatcacaggcgtcgtgatcaataaccagaatgcattaagcattggccgagaaaagaaaaggatcgtctcgtcactcatccaccgattcgctcttaatggactgagcgatgccgatatttctcgggctcaaggccttctggggttcgcccacgatgtggaacctttgttcgtggtcagaatgcgccagaagtacggattccgtgtgattgaccagctgctgagcttccgcgttcagtctgaggagaaaaaatga

SEQ ID NO: 11862 - RNA, 942 nt, synthetic construct
  source 1..942: mol_type = other RNA
atgtctactaacctaagacgcgaaatcactggctccttagggatctcagacttgcagatcaatagaataatcacacgcagcccctatgcgtacaagacctatagtattaacaagaagtcaggcggaaaacggataatttcccagcccgctaaagaaactaaattcattcaacgatggctagtcgaaaacgtgttttcaaagcttccaatccatcagtccgtaacggcctatagagcaggttctagcattaaaaagaatgcctctattcacaagaacaacaagtatttcgccaagttcgatttcaaagatttctttacctccattcgatccgatgacttaatagcacatctgaataagtacctcagcgacaaatactcatacgaggagattatggatattgctaggatcagttgtaagaagaataaaaggagtggaaagctgtttcttaccatcggagccccttcttccccaatcatcagcaacacagtgttgttcgacttcgacacactgctctactcttggtgctgccagaataacattacgtatacacgttatgctgatgatttgaccttttccactaacgagaaggagagcaccaaaaacatagaaaagaatatacggtcgatcatccgggccattgagtacccgcggctgattatcaatagcaagaaaaccgttcacctctctaagaaatctcagatcagaatcaccggtctgatcatcgacaataacaaaaacgtctcaattgggaggaaacgtaaacgcgaaatttcgagcctgatacacagcttctcactcggcgcactgcccaatgacgaggtgtacaggctccagggcctgcttgggtttgctaacgattccgaacctcaatttctggagagaatgcgcagtaaatacagcagtgagaagattgacaatatcctgaagatcaggaagcagtga

SEQ ID NO: 11863 - RNA, 945 nt, synthetic construct
  source 1..945: mol_type = other RNA
atggatgaatcccgatttaggcagttactcaaagacgagttgtctatctctttctctgaatccgcacggcttattgctagggctccgcatgcctataaggtttaccgtataaagaaagtgggcggagggtatagggaaattagccagcctgcaaaggagactaaatttgttatgcactggcttgtgggaagattttttgagaaactgcctgtgcacgaatgcgccaccgcgtatagctccggctcaagtatcaagaagaatgctatcattcacgccgagaaaagttacatcgcaaaattcgatttcaaggattttttcccctcaataactaagttcgacgtcgagaaacatctcggctgctttaacagggaggaacttgacggcaaaagcctgtcggagatagccagactgtgcacagtggcgaaagggggatcagataatttgtgtttatctatcgggagccccgctagtccagttctctccaattctatcatgtacgccttcgacaggcgcatttatgagtggtgttgtgacaattccgtggtatatagcagatacgcagatgacctgaccttttccaccaacgtgaagggtctaagcttcgaactgccagagctggtccgcacagtattggacggtatcgagtacccatcaatcagcctcaacaacgagaagacggtcttcgcctcgaaaaagggccaccggcgggtgacaggtctagtgctgtcaaaccccggcaaagtgtctctgggccgaaagcgcaaacgcgagattagtgccctcatccataagtttagtgtgggagctctttccaaggaagacctgctgcggttacaaggattgctggggttcgtcaaagatgtggaacctctgttcgtcgaaaagatgatttccaagtacgggtacagagttattgtaaagatcctcagctttcgtaaggattga

SEQ ID NO: 11864 - RNA, 939 nt, synthetic construct
  source 1..939: mol_type = other RNA
atggatgaatccaaattcaggagactgcttaaagaggagctcagtatctcttacagcgagagtgccaggcttatcgccagagccccccatgcctacaagaaatacaggatcaagaaggcagatggaggcttcagggagattagccaacccgctaaggagacaaaatttgtaatgcactgggtgattgaccgcttcctgaaaccactacctgtgcatgagtcggccgctgcctatcggaagggtgcatccgttaaaaagaacgccgcgatgcacagtagcaatagctacctggccaagtttgacttcaagaactttttcccctcaattaagatttctgacatcgaacgtcatttagcattacatggcgacagaggtcttgacgagagatcagtaagcgagatcgcccgattgtgcacgatagctcacatggaggggaaatgtctgtccatcgggtccccggcgtccccattcctgtctaatagtatcatgtacgacttcgacgaaaaagtgagccgctggtgcgcggaaaatgctctgacctatacacgttatgcagatgatctcaccttctcaactaacgttaaaaacctctcctttgaggtgcagggcttcctgattgaggtcatacagagcctggagtatcctgcaattgaactgaatgaaaacaagaccgtctacgctagcaaaaaggggcaccgccgggtgactggagtcgttctctctaatgccggcaatgtgtctctaggcagggaacggaagcgggaaatttctagtctgttgcacaagtttcgcataggagagttgtcccgcgaagaagtctataggctccagggtctgcttgggtttgctaacgatgtcgaacctgtgtttgtggagcgaatgcgaaaaaagtacggacacgatttgctctggcggatcatgtcactgtcaagagagtga

SEQ ID NO: 11865 - RNA, 948 nt, synthetic construct
  source 1..948: mol_type = other RNA
atggatgaaaccgtctttcagtcacttctgcagaaggagctggccatatccacttcagaatcaggacggctaattgcccgggccccctatgcgtataaaacctacagtatcaagaaggctaatggcggtcgcagaaccatcagccagcctgcaaaggagacgaagtttgtgatgaggtggctggtggatcgaatcttttcaaagcttccaatacacgagtgtgcatccgcataccagaagggaagtagcatcaagagaaacgccatcacacactctaacaatggatacatcgccaaattcgacttcaaagattttttcccctccatcaaacgtgaagatatcgagacacatctctaccagtatttacctaaggacctggaactggatagaaaaagcattagccaaattgctagattgtgcaccatatcaactggtggaggtaggctggccctatctgtaggctctccggcaagtcccgctctttctaattccatcatgttcgactttgatactattatcgccaattggtgcttctcgaattccatattctacacgcgctatgcggacgacctcacatttagcacaaatcgaaagggcttgtccttcctgattctggaacagattcacaacaccttgagcgaagtcaactaccctcaactgagcataaacgacaggaaaactgtttactccagtaaaaaaggacatcgccgtgtgaccggggttgtgattaacaataacgggaagctgtcgttaggccgcgagagaaagaggaaaatcagcagtatggtgcacaagtcttgtctcggcgtcctctctgatgacgagacacggcatcttcaggggctcctgggctttgctaaagacgtggagccattgttcatcattcggctcaagaacaaatatgggaagagggctatccaggagatcttcaattcccaaattatttga

SEQ ID NO: 11866 - RNA, 960 nt, synthetic construct
  source 1..960: mol_type = other RNA
atgacgctccaagaatttctgcttaagatatcaagcgccctcgcaatttctaacagcgaacttctccatttaatagctaaagccccgtacagttacaagtcttacaaaatcaagaagaagtccgggggagatcgggtgatcagtcagcccgctaaagagatcaaatatctccagaacatcataatggaggccttcctgaataaattgcctatccatgagtgcgccacagcctacaaaaagggcggctccataaagaaaaatgcagcagctcacacatccaacacatacatcagtaaattcgaccttaaggatttcttcggatctataaaggccaacgacgttagtcaacacctggagaaacacctcaatggagatttacccccagcttcatatcagctgatcgcgcgaatttgttgcatcaaacataaaggtctagaagaactgtgcttatctatcggtgcaccctcatctccactgctctccaattccattatgtacgaaattgatcagaagattagccagtggtgtcgtgagaatcaggtaacctatacaagatatgccgacgacctgactttttcaagcaacatcaagggaatcagctttgaaatcgaaggtctgctgagcgacattctttctacttcgcaatcccctagattgaagattaacgagaagaaaaccatccacgtgagtaagaaaggcaccaggagagtgactggcatcataattaccaacgacaataagatgtcactcgggcgcgagagaaaacggctgatttccgccatgatccaccggaatctggtccagaggctggaggagaaagatattgagaggctgcaggggcttctggggttggcgaaggacattgaacctattttttgtgccaggatgcgcaagaagtatggcgctgcagctatcagcgagattctacagtaccgacgcgaggaattgaaggaggattga

SEQ ID NO: 11867 - RNA, 960 nt, synthetic construct
  source 1..960: mol_type = other RNA
atgacttttcaggagttcctgctgaacatttcttccgcactggcaattagcgactcagagcttttgcatttagtggctaaagctccctattcatacaagtcctataagatcaagaagaaaacgggaggtgaccgagtcatttcccagccggcaaaagagatcaagtacatccaacacgtattgattgagttcttcctaaacaagcttccaatacacgagagcgccactgcctataagaaaggcggctccataaaaagcaatgcggcagcgcaccgtgagaacacttacattagcaagttcgactttaaagacttcttcagctctatcaaggccgccgacatctcactgcacctcgaaaagcacctcggggatgatctgccacccgagtcctaccagcttataagtaggacatgttgtatccgacataagggcgccgaagaactgtgcctgtccattggagccccctcgagccctctgctgtcgaatactatcatgtatgaacttgaccagaaaatatctgaatggtgccaagaaaatcaagtcatttacacccggtacgccgatgacttaacgttttctagcaatatcaagggcaaatcttttgaaatagagaatgtgctgagaagcattctcagtgccacccctagtcccaaactgagtattaacaacaagaagacaatccatgtgtcaaaaaaagggacaaggcgggttaccgggctcatcatcacaaatgatgataagatttccctcggtagagagaaaaagcggctcatttcttccatgatccatagaaacctgacccagggattgaagtcaaaagatatcgagaagttacagggcttgctagggctcgctaaggacatagagcccattttttgctctaggatgcgcaaaaaatacggagctgctaccatcagtgaaatcctgcagtatcgccgcgaggagccagaagaagattga

SEQ ID NO: 11868 - RNA, 951 nt, synthetic construct
  source 1..951: mol_type = other RNA
atgtctcatcacgatttcttgcatgatattgcatcaacactgacgctgagcctccaagagttggtataccttatcgcaaaagctccccacagctacaaggtctaccggattgaaaagaagactggaggaaagaggatcatcgcccagcctgcaagacagatcaagtatctgcagcgggccctaatacacagcgtttttaaagagctcccaattcattcttgtgccacagcctatgctcacggctcaagcatcaaaaaaaatgcggagccccacaaaaacaacaagtttatctccaaattcgacattagtgatttcttcggcagtattaaggagcacgaccttataaaacacttcaaccgtcatttggccgaaaatattaacccggactactttagatacatcgccagatcctgttgcataaattataagggaacccaggagctggttctctctgtgggggctccttcctctccaattctgtcaaacagcatcatgcacgagtttgactgcatcattcacgattggtgcacctcaaaaaatatcacctacacacgatacgcagacgacttaacgtttagttcgaacactaagggcgtcagtttcgaaattgaaaaagccatcaccgaggcactgaatagtctggactatcccaccctgaaattaaatactaagaagaccttccatgcctccaaaaagagccaacgcaggattacaggcctcattatctccaatgagggtaaaatctctctcggccgcgacaggaagcgaactatttccgctatgatccataaattcagcaacggagcgctgcctgaagaagatataccaaagctacaggggatgcttgggttcgccgaggatgtggaacccgtgttttcctctaggatgcgggctaagtatggtgtgaaggctatctcagagatatttcagtatcgcaaacagaagaagtga

SEQ ID NO: 11869 - RNA, 945 nt, synthetic construct
  source 1..945: mol_type = other RNA
atgaagcaggagagccctattatagccgccctctgttcggagctcgggtttagttctaaccagctgatgcgcctgatcgctcgggcaccccatacctataagacttacaaaatccctaagaagacttccggatttaggacgatcgctcagccagctcgcgagacaaaaattctgcagaattggctgatccacaacgttttcaaggatctgcccgtctctgaaagcgcatccgcctacaagaagggagcgagtattaaaaaaaacgcgtctcaccataaagactccagctacctcctgaagatggactttaaaaacttcttcgaatcaatcgacatcgagatgatcaaaaatcacctcatctcatgcttagacgtgtcacgattagatgctagtgccatagcccgtatatgctccattgacacacaatccagcccaaaccatcacctgagtatcggcgccccatcttcacctattctatcgaacagcttccttttcaatttcgacttggaagcagagcaatggtgcaaggaaaacaactgtatatacactcggtatgcagacgatattttcgtttccacaaatgccaagagcaaaacaaaagaggcagaacagttgattgaaaagttggtcaatgagctgctgccgggccttaagttaaatcacaagaaaaccaagcatctgtcaaagaaattcaatagaaccatcaccggacttgtgatctctaacgataatgaagtgaccctgggtagagataggaaaagggaggtgcggaagagtgtgttcctctatactaaagggctgctcgaacatgagcaggtcgagaaacttcagggtaccttgagctttgccaagcacattgatcccgtatttctgtctagcctacaagagaagtttgggtccgacatcattggcgagatatttaacgctcgaagaaaaacgaagtga

SEQ ID NO: 11870 - RNA, 936 nt, synthetic construct
  source 1..936: mol_type = other RNA
atgaccactactcctagtttcctgtctaaactcgctaaggcctataagctgactgaaaccgacataaagaggctcgtggctcgggcacctcatacatacaaaacctacgaaatcccaaagaagagcgggggtaagcgcacaattgcccaacctgccaaggagacgaagataatccaaaattggttgattaagacggagtttaaaggcctgccagtatctaactccgcgtcggcctataagcccggcagtagcattaaaatcaatgcactgaaacaccggaagaacagatacttgctcaagatggatttcaagaacttcttcgagagtatcgacgaaacaatggtcaaagagcacttattcaagtacttacagattcccgagtcagacgcagctactatttccagggtttgttgcttccagaagaaacactcaaaaaagctgagcttgtctattggagccccctcttcccccatactgagtaactccattatgtacgagtttgacgccgaaatcgaaaattggtgccgcctgaatgcggccatctatacacggtatgctgatgatctgttcataagcaccaatcaatcaggcagaacagcagatgctgagcagtttatcctgactctgaccaaagagctcttgccgaaactcgacatcaataagaacaagacaaaacacctgagcaaaaagtgtaaccgaaccatcactggacttgtgatcaccaacgaaggcggagtgtccctagggcgtgacaaaaagcgaaatatcaggaaatcactgtttctccatcagaaaggacttttagacaaaaagcagctgagcacccttcagggggagcttggtttcgcaaaacatatcgatccagactttattaccacgctaaatgataagtttggcaaccagttcattcacgccatatttacacatagagaatga

SEQ ID NO: 11871 - RNA, 945 nt, synthetic construct
  source 1..945: mol_type = other RNA
atgaaatctaagctcagggagattatcaaaaagaagtttgccctctccgatgctgaagtcgccatcttgatctctcgagcaccagtctcttacaagtcctataagatcaagaagaagaacgggggacatagaaagattcatcaacccgcacgcgaaataaaggctctgcagagatggatcctggatgctgtattcagtaagttaaaggttcatcctagcagtacagcttacgaaccagggtccagcattaaagagaatgcaaagcggcacctcgacaactcttatttcatcaagcttgacttcaaggatttctttcacagcattaaatctgaggacatcattcagttcctcacggataagggtatcaagctgaataaccgtgacttgtccgacctggtgcgaatcctgtgtatcaaagacggcgagagcctatgcttatcaatcggcgccccctcaagtccgaaggtgagtaacgtgattctgtatgattttgacgaggccgtcactaattggtgcagcgaaaatgaagtaacttacacaaggtatgcggatgatcttacattttccaccaaacgcaaggggatcggacacctgatagagaagcaagtgttggagattatttccgagattcagtaccctaaaattgagctgaaccttagcaaaagagtgtctgtgtcgaagaaggattgggttagcataaccggcctaaccataactacccagaactccatctcagtggggaggaagcggaaacggtttgtcaaaagcctcatatacaaacacctgtcagacggccttcaggaaaaaaaactgggtgaactgaatggcctgatctcatttatcgaaaatattgagcccggtttcaaagacaaaatgctggagaaatacggagatgttcctggattgaacctcaaaaaggccaaagacgaggtgagtgacttatga

SEQ ID NO: 11872 - RNA, 945 nt, synthetic construct
  source 1..945: mol_type = other RNA
atggaaaataagctgcgcgagatcattaaaaaacaatttgcactgtcggacactgaagtcgccatccttatatccagggcaccagtgagttataaggggtacaggattaagaagaaaaatggaggacacagaaagatacatcagccagcccgggaaatcaaagccttacagcggtgggctttggatgcagtttttagcaagcttaaagtccatccttcaagtaccgcctatgaacctgggtccagcattaaagagaacgcgaacagacacgtgaacaacgactattttattaagctggacttcaaggactttttccactctatcaagtctgaagacatcgttcagtttctcagtgataagggcatcaaactcaacagcaaggatctgaccgatctcgtgcgaatcttatgtatcaagcatgaggacagcctttgcctttccattggcgctccttctagccccaaagtgtctaatgtgatactgtatgacttcgatgaaaaggtcacatcatggtgtaatgagaacaacgtaacgtacacccgttacgctgacgacttgacattttccaccaaacaaaaaaacatgggtcacctcatcgaggagcggatcctgaagattatctacgatatgaattaccccaagctggagctcaatatctccaaacgagtgagcgtttctaagaaagattgggtcagtattacaggggtgaccatcacttgccagaagactctgagcgtgggtcgcagaagaaagcgcttcgtaaagtcaatgatatataagcacatgtcggagggcctaaaacagcataacctgtcagaactaaatggcctgattgccttcatagaacacattgagcccggcttcaaaaggaaaatgattgagaagtacggaaatgtggctggattgaacctgaaaaaggagtccgacgaagatccggagatctga

SEQ ID NO: 11873 - RNA, 930 nt, synthetic construct
  source 1..930: mol_type = other RNA
atgagtgaaagtaaactgcgccaactgatctcttcatctttattcatccctgagaaagacctcagcctattcattgcaagggcgcccgtcgcatacaagagtttctttatagccaaaaaggatggagggttcagaaaaataaaccagccggcgaaggagacaaaaaaactgcagaggtgggttatagagaaggtcttctcacacctggacatccatgattgcgcaatggcctatagagctaaagtgagcataaaagacaacgctctcgtgcactccaataacaagtacttcctaaagctggacttcgaaaactttttcggaagcatcaaatccgaggacatacagaatttccttcacgacaagaaaatcaagctggatgatgatgatgtgagggacttggccagaattttatgtattaaggacgagggcaagctttgcctttccgtaggtgctccatcctcgcccgctgtctctaatgctatcctgtacgcctttgacgaggagatctccttttggtgccttgaacgcaagatcgcatatactcgatatgccgacgatttgaccttttctaccaaagaacaagaagcctgttacagcatcaaggagaaagtgaagtctatcttggaatctatggcctatcctcggctgaagctcaacgaaagcaagaccctcagtctctcaaagaagaataatattaaggtgacaggcattacggtaacttccgataacaagattagcattgggcgaaaacggaagaggtttatcagatcacaggtgtacaaatacaaaaaaggagagttgaagccctcaagtgttcctcgtctgcgcggcctgattgccttttttgaacatatcgagccaggggcaattagcaaactcgagatgaagttcggcaaagagctgatggttcgggtcgtgaagggttcctga

SEQ ID NO: 11874 - RNA, 981 nt, synthetic construct
  source 1..981: mol_type = other RNA
atgcatatcctggagaggatttcccatgacctcctagtgccccaaagcttgcttgaagatgccctcagaagggcccatgttcggttccggaagatcaagatacctaaaagaagtggcggtgagagagtgctgctgcagcccgctgccgagctgaaattaattctctcatgggccgactcctacgtgctgcgcaaggctcccgtgagcaatgtcgccacagcctttgagccagggacctctatcgtgcgcaacgcccagatccatagtaaaagcgattatagcgtcagagtggacttgtctaatttctttcctagtatcaggagccacgacttgcttagggctttgagcaaggcacgacagcactttcccgaatgggtgttcgaaagggatttcgaagacatgctgagaaaagcatgctttgatagagccgattccctcccggtagggtacatgacgtcaccaaggatcgctaacatcgtcatgctggacgtggacactaccctgcagactaccatatcatccaatcctgaacgcttcggacgcgcttacatcactaggtacgctgatgacttcgtcttttctactaatcggaagggagcatgtaacgagtttgtagaggagttacgtacactgctcgcaagccgaccgtcgccaaagctcgctataaatgaagcgaaaacccggtttatgtcacgcaagggcggcacaacgctgattaccggactacgggttaacaatgatggggacgttggggtccacgcaaactatagagatcacattcgactgcttctgaagctgttcgccacaggccggttagagcaggcggaaaacgagtccttgcgtggacacctcgctttcattgaacacgccgacccaagtcttttcacacgcctgtcctatcgttatcacgccgagattgccaagttacgaggccatgcgggtctgaccgcactccctgcaccccaaaaactttcttcttga

SEQ ID NO: 11875 - RNA, 957 nt, synthetic construct
  source 1..957: mol_type = other RNA
atgaacatagtggaaaggatgtccaatgaactcagtgttccccagtccttgctggagagcgcactgctgcttgcccacgtgcgatttcgcaagattaaggtaccaaaacggtctggaggtgaacgcgttatgatccaaccggccagtgagctgaagttggtcctgagttggctggacagtcgagtattgtccaacgcccctgtgagcccaatcgcaaccgcatttgagcccggcacatctatcgtgaagaatgccagaactcactcaaagtccctttattccgtgcgcatcgatctgtcaaacttcttcccaagcattcgcagccgtgatctcttattggccttatcaaggtcgagagaactcctgcctgagtgggcctcaggaggagattttgagacgttggtgagaaatgcctgtttcgatcgggctgacaggcttccagtcgggtacatgacttctcccagaatagctaatatcgtgatgctcgagctagacacagccctggcgacggctgtgagtagggacactgtccggtttgggcaggcggtgctcacacgttacgctgacgattttgttttctctactgacaaaaagggcgcttgcaacgaattccttagcgagatgcgttcccttctcgcgagcacacccagccctaagctgtctattaacgaagcaaagaccaggtttatgtctagaaaagggggcaccaccttaataaccggactgcgggtcaataatgacggtgacgtcggtatccatgcaaactaccgggatcacatcaggatgctgctaaagctgtttagcaccgggcggctcaaacctgcagagaacgagaaactgcgcggccatctggccttcattgagcacgctgaccccgatctgttcacacgcctctcattccgatatcacgctgaaattgccaaactaagaggccatccttccctgaatccggcctga

SEQ ID NO: 11876 - RNA, 921 nt, synthetic construct
  source 1..921: mol_type = other RNA
atgctcgatgacgcaatccaggcggcctacttcaggtttaagaagtttaccataaagaagcgatcaggcgaggatcggcacctgattcagccagccgcggaactgaaactcgtaattgcttggctggacgctgtcgtcctttccaagctgcctgtgtccgaccttgctactgcattccaaccaggtacttctatcgttatgaatgccgaggcacatcgaaagtcggcctattcagtccgcttggacgtcagtggctttttcccgtctatcaggtcaaaggacctgattcgcgccataaatgacgctaaaccccgttttgaggagtgggtgtttacccccgcattcgaacaactcgtgcgcaaggcttgttttgaccggagcgataggctgccggttggctatcccagctcccctcgaatcgcgaacgccgtgatgtatgaactggatatgcggttaaaccagctcattgcagccgctcctgaaagattcggacaggccgtgcttacacgttacgccgacgattttgtgttctccaccgataaacagggagcttgccggacattcgcagatgagcttcagacaattttagccagatgcgccagccctaaattgagtataaacgtcgcaaagacacgctacatgagtaggaaagggggctctactttaatcaccggtctacgcgtaaatatggacgggaaagtgggcgtgcatgctaactacagagatcacatccggctgctcttgaaattgttctctgtgggaaagctagactttgaagagcatgagaaactcagagggcacctggcctttattgaacacgccgatccaaggctgttcacgaagctgagcttcaaatattacaaggagatcgccagcctgagaatgaaaaaggctgttcccgaacaggagtccccacaatga

SEQ ID NO: 11877 - RNA, 954 nt, synthetic construct
  source 1..954: mol_type = other RNA
atgacagacttccctgccctcatcggcgagaagactaacgtccccacagagatcatcaaatccgccgtggatttggcgcacatacggttccggaagattaaagtgaaaaagcgatcagggggtgagaggatcattatccagcctgccgccgagctaaagctggtgctggcttggctcaataacgaagtcataagcaagcttcccatttctccgatagcaacggcctttcgaaaagatgcttccatcctgaagaatgcctcggaacacaaggccagcttgtacagtatcagggtcgatatcaaggagtttttcccatctattcgcagcagtgacctggtgctcgcaattaagagctctccaattgaacttcctcctttcaccgccgaggcaggctttttcgactttatccaacgttgctgtttcgaccgcgatggacggctgccaatcgggtatcccacatctccagccatcgctaacgcagtgatgcggaacatcgatgtagcactgctgaataaaattaacattgaccccaccaagtttgggcaggcgaggctgactcggtacgctgacgatttcgtcttctcctccgacaaacctggtgcttgccgatcatttcttgatactttgcaggagacgctcattagaactacctccccacgtctggcaataaatagtaaaaaaacccgcttcatgtcacgccgtggaggcagcacattagtgacaggactaagaattaatcaggacggattagtaagagtgcatcccaaatatagggaccatgttaggctcctgttaaagcattttgctaacggctcaataagcgccgacgatgttccgcgccttgttgggcacttggctttcgttcaacacgccgatcccaggctgttcaccagactcagttttagatactttgaggaaatcgcgagactgcggggcaagcaggaaaatacctga

SEQ ID NO: 11878 - RNA, 942 nt, synthetic construct
  source 1..942: mol_type = other RNA
atgacaaatttccctgtgctcattgccgatcagatgaaggtcccagttgtgttagtagaggacgcccttaagctggcattcatacggtatagaaaaatccgtgtccccaagaggtccggcggttaccgcacaatcatacagccggcagcggagctgaagctagtgcaggcctggctgaacgagaaaattttcaaacacctgccccttagcagtgttgcaaccgcgttcagacccggcgctagcatcacaaacaacgctgctatccacaggaactccttgtactccgtgcgcgtagatatcaaggacttctttccatctataaggagtgtggacctcattcgcatcgtgcggagcaaccgatcggctcttcctccatttgtgatggagacggggtttacgaatttggttcgccaggcctgtttcgatcgagaggggagactgcctatcggataccccacttccccttctattgccaacgccgtgatgcaccaaaccgacaagatgcttattaatgaaatcaccagcgatgtcagcatctttggcaacactcaattaacacgttacgccgacgactttgttttttcaaccgacaaaagtggggcttgccatgagtttgtgcgcaaattggagagactcctctcaacactcgaatctccgcggctgaaactcaatacttccaaaaccaagttcatgtcaaggcgggggggaagtactcttgtcaccggtctgaggataaatcaggaaggactggtcagagtccatgcaaattatagggatcacgtacgcttgctgctgaagcacttcgcagccggctctctccagtcagacgatgtgattcgactggtgggccatctagcctttgttgaacatgcggatccaaggctgttcactagactgagcttcagatattttgaagagattgctcggctgcggggaaagtga

SEQ ID NO: 11879 - RNA, 951 nt, synthetic construct
  source 1..951: mol_type = other RNA
atggatagcatcgtgtcaaaaattagcggagatctgaaaatacccattgccactctggagattgctattaggctcgcaaagactaggtgtaggaaattctctatcttgaagaagaatggcgacacccggcaaatcatccaaccttcagtgaaagtcaaacccatcctgtcctggctcagccttaatgtcctgaactccttaccagtacacgacgcggctacagcctttcgaagggggaagtctatactcgataatacttctaagcacaaagaggccgactactctgttcgattagacctgaaggattttttccctagcatcaagccagaggacttgtggagagtgatgctcgacagtcgccacttgatacccgaatggtcgattaaggaagacgcgttttggcttattagtaacgtatgctttgaccagaacaaccagcttcccatcgggtattctacgagtcctgctatagccaatgctgtgatgcatcggattgataccacgctggccaacgccgtgatggacgactcacgtttcggagcagccacagtgactcgctacgccgatgatttcgttttttccacaaataagcggggggcatgcaagaacttctcagatcttctgcatgatgtcatcaaaaccacaaacagcccaagcctccagattaatgaaaacaagacacgctatatgtcccgtgcgggaggcagtaccattatcaccggtctgagagtcaataatctgggcgccgtcgttgttcacggtaactaccgcgaccacgtgcggctgctcttaaagctgtttgactccggcagactggcattggatcaggtgccgcagctggcaggccatcttgcttatatcgaacacgtggatcctgctctattcaccaaactgagcttcaaacattacaagaggatcgaggagatcagatccctaagactcgtggagtga

SEQ ID NO: 11880 - RNA, 936 nt, synthetic construct
  source 1..936: mol_type = other RNA
atgctcgctaaaattagcgatgacctcaacataccaaggccgcttctggaaaatgctttggccttagccgcgacacggttccgtaagatcacattcaaacggagatctggcccacctagagtggcctaccagcctgcggttgaactgaagcccatccttgagtggttggacatcaccctgataagcaagctgcccgtcagccgcatcgcaacagctttctgcgcaggttcatctatagttcagaacgctcaagtacaccgagactccctgttttcaattagggtcgatatctcgaacttcttcccaagcattaccagttctgaccttgtgactgctatcgaagcaacttctcacctgccagaatggagcaatgcaccgactaccctcagggtgctgaaacaggcctgttttgatatcaacgaccgactccctattggatattccacgagtcccaggatcgcgaatgccgtgatgttctccctggataacctgttgatccaagctattagcgatgagcggcgatttggtaactccctacttactcgttacgctgacgactatttattttcaaccaatcagcgcggggcatgcgcagagttcctgaaggagatcagaaaaattctcaatagtgtccagttccctaaactgcagataaataacgagaagactagattcatgtcccgcgccggcggatccaccttaatcaccggactcagaataaagcagacgggcgagattggggtgcatgcccattatcgggatcacgtacgcttgctaatcaagctgtacgccgccaataggctgcgggccgaagagtttgatagccttcgcgggcacctcgcctttgtggaatacgctgaccccaaactgtttacacacctgtcattccatttttctgacgagattacaaggattagatcgaccgatagtttgtga

SEQ ID NO: 11881 - RNA, 939 nt, synthetic construct
  source 1..939: mol_type = other RNA
atgagcaacattatcgacttaattgcagatgatctacagctgccaaaaaccttagtcaaatctgcggtcgatttcgctcgatccaataaccgcaagataatcttccccaagaaaactgggggcaaacggactgccctgcagcctagcgtagagagtaagcctattatgcattggctacggctgaagctgattgaattgttgccgattcacatgatcgcaacgggattcagagctaatcactctatcctcacaaatgcggatcgacacagacaatctgcatacagtgttcggatcgacattgaaaacttcttcgagtcaatctcctttaacgactttaagaaaacacttgaatcgaataaggccaccctgccaagttgggccctggaggaagccactctgtcactggtcgagaagatctgtttcgatcgcgacggcaggcttccaatagggtaccccacttcccccggcattgccaacgccactatgtttgagatcgactctgccctcgaatcccttatcctggatacaaccacattcgggcaggctatagtgtcccgctatgcagatgacttcaccttttctaccgaccttagaggaagttgcagggcttttcttgaaaagttggagctcctgctggcttcacagaccagccctaccctgaggatcaacgccaaaaaaacacggtttatgtccaggggcggtggaagcacgttggtgactggtttacgtataaataattgcggggtggttgtggtgcatccagagtatcgcgaccacatcagattgctcctcaagctgtactcacgcaataccctcaagcaggaagatattcccaggctcctaggacatctggcacacattcaaaacgtggaccctggctttttcacaaaactgagctatcgttaccatgaggagataagccggatcagaaaaaagtga

SEQ ID NO: 11882 - RNA, 939 nt, synthetic construct
  source 1..939: mol_type = other RNA
atggacgatattttagaactaatggcagcagatcttagcctgagcaaaactacacttaagtccaccatcttctccacaaagcggaaatatcgcaaattctcaatcgaaaaagcttctgggggtcaacgagttattcaccagccgagcattgagcttaaacccatcttgtactggatccagatcaatatactcgataaactgcccgtccacaaaatctcaaccgcctttaaaaagggcagtagcatcttgaacaacgcctcattacatcaggaatcactctattccattagagtagacattgacaatttcttcaacagtatacaaccccaagacttgattagcgcgatccgggaaaatcaggcaaacctgccagagtggactaaagatgggtacgtggatgagctggtgacactgtcctgcttcatttcgagatcctacctgcctatcggatacctgacgtctcctcagatcgccaacagtgtcatgtttaagattgacagcctgctcgacgaggaattttctaatgaaggcaagtacggcgtggccaaaatttctaggtatgcagatgacttcatcttttccaccgacaagaagggggcctgtaaggacgcgctggaaaagttgaaaagtataatcgaagagtcgaaacacccaaatcttgctataaacaagaagaagaccacttacatgtctcgaccaggaggctctgctagggtgaccgggctccgtatcaataatcagggaaagattatagtgcatgcctgctatcgcgatcatgtgaggctcttactgaagctgtataaggagaatcggctgaacgaggagggtggaaaggagaaactagtcggtcacctggctcatattcagaacgttgatcctggcctctttacaaaactttgtctgaagtactccagcgagatccacgagctcagaaagtga

SEQ ID NO: 11883 - RNA, 939 nt, synthetic construct
  source 1..939: mol_type = other RNA
atgtcctctctagctacacttgctgctgccgagtgctgtgtgccagagtcttgggtgaacgatgtggtcagacagggaccgtcccgcgtaaagacgttgcggatcgaaaagagtacgcccggaaaatttcggatcatctctagacccagtgcagagctggaaatcttacagcggtggttggttttgcgctttttcgaaaaaatggaggttcacgacagcgctatggcattccgacgtggccgctcaatccttactaacgcccaggcccatgctaagtcaaggtttttcgtgagagtggacttctccaatttctttccatcaatcagatatgcggatttcagcttcgctctcggaaaatcaaagaaccttgggtattttttctcagagtatgcagatgcaggcaattttatccaaaggatatgcttcgattcgaacctgaggctgcccattggttatataagctctcctacaatttccaatgcagtgatgtttgaatttgatgtaagaatggaaggtatggtcgcggccaacggcggggatcttggcaatgccaaggttacacggtacgcggacgacatagtgttcagcaccgacaagaagggcggctgcgcaaaatttgtcgagctgctgcgtgagctggtgaagacctgggcctccccactcttgagtattaatgagaataagaccatcttcagttccagctctggtgggagtgccattgtcactgggctgcgggtctgtagcgatagccacattaccataacaagggaatacaaagacaaaatcaggctaatgctgtctctccacgccaagaaatgcctgcgccctgaggacctccctaaactgaagggacatctcaactacattcgatacgttgctcccgcctttttcagcactctgtgtgccaaatacacctccgtgatcgacaagttaatttga

SEQ ID NO: 11884 - RNA, 939 nt, synthetic construct
  source 1..939: mol_type = other RNA
atgccatccatcgttaccctggcggccgctgaatgctgtgttcaggaatcctgggttaacgacgtggtgaggcaaggtccatctagagtgaaaaccttgagaatcaagaaaagtacaccaggcaaattccgggtgatttcccgtccctctgccgagctggaaatcctccagaggtggcttgtgctgaggtttttcgagaaaatggagatccatgagagcgccatggcctttagaaggggacggagcatcttaaccaacgctgaagtgcacgcccagagtcgcttctttgtacgtgtcgatttttccaacttcttcccttcgatcaggtatgctgactttgcatttgcgttggggaaatcaactgagctggcatacctgtttaaggaatactcggatatagggaatttcattcagcgcatttgctttgattctaacctgaagttgcccattggttacatctcctctccggtgatcagcaatgctgtaatgtttgagttcgatgcccggttggaaaatatcgtagctgcaaacggagaagatctgggctcagctcgggtgacacgctacgccgacgatattgtcttctcaactgacaagaaaggcggctgtacgaaattcgtcgagattttacgatcacttgtgaagtcttgggcgagccccagtctcagcatcaacgaggacaagacaaatttcagctctagcagtggaggcagcgccatcgtcactgggcttagaatatgttctgacaatcacataaccgttaccagagagtataaggacgaaattcgactaatgctgtccctgctcgtgaaaaactccctacgccctgaggacctcagtaagcttaaggggcacctcaattatgtgcggcatgtcgcacctgcattcttttccacgctgtgcgccaagtatacatcagtcatagccgagctgatttga

SEQ ID NO: 11885 - RNA, 939 nt, synthetic construct
  source 1..939: mol_type = other RNA
atgagctccctggtcaaacttgccgctactgagtgctgcgtgcaggaacggtgggtgaatgacgtcatccgccagggccctagcagagtgaagacactaaaaattaagaagccaaagtcagccaaatttcggatcatctctcgtccttcagccgaactggagatactgcagagatggcttaccatcaggtttttcgaaaagatggagattcacgactcggctatggccttccgcaccggaagatctatcctcaccaatgctcagttccatgcgaagtccctgtatttcatacgcgttgatttcttaaacttctttccatccattcgatacgcagacctcaacttcgccatcgggaaatctaagattatccgcaatatcttcactgactacgcagatgctgggtcttttatagagagggtctgtttcgactccaacttgcgactacccattggttatataagtagccccattatttcgaatgcagttatgtttgagttcgacgtgcaactgcaaaagctggtaacggcaaacacaaacgaactgggcgacggccggatcacccggtatgctgatgacattgtgtttagcacagacaaaaaaggcggttgtgccaagtttttggaattaattcgcagtttcgtcaagacatgggcgagccccagcctgtccgtgaatgagaacaagactaccttttcatctagaaacggcgggagtgccattgttacgggactgagagtgtgtaatgatagccacgttactatcacccgtgagtacaaagataaagtgaggctcatgctctcacttcggggaaaacaggtgctccgaccggaggatgtgagggtactgaagggacatctggattatataaggcacatcgcccctgccttcttttccacattgtgcgcaaagtacactggggtcatcagtgaatttatctga

SEQ ID NO: 11886 - RNA, 939 nt, synthetic construct
  source 1..939: mol_type = other RNA
atgcctaattttgcaagccttgccgcaactgagtgccacgtccctgaagactgggtagctaatgtggttaggcaggggccacgtcgtgctaaaatcttgcgcatcaagaagaagaacagcgataagtttcggagtattgctagacccagcgctgaacttgagatgctacaaagatggctgctgttgaagttcttcaaccaactcgaactccatgatagcgccatggcctttcgcgatggccattctatactgacaaatgccgtccggcacaaggggtccgcctacttcattcgaatcgactttaaagacttcttcagcagtatcaagttgcaggatttcatcatggccatgtcccagaccaaattctttggctttcacctgaccgagtattctgactacatggagttcatcggaaaaatatgctttgactccagaggaaggttaccaataggttatgtgacttcacccatcatttcgaacgctgttatgtaccggtttgacgtcgccttatcaaacgcaatttccgcccgaaccaaggaatttggtgtttctgtgctgacaaggtacgccgacgatatcgtgttttcaacagacctgaaaggcggctgtgccgctttcttgaaattctttcaggagttcgtgtccgcatgggcatcgcccagtctggtaattaatacggagaagaccatattctcctctaaagcgggcggaagcgcgatggtgactggactcagaatttgcaacgacaaccacatcacggtgacacgggagtataaggataagatcaggctgatgctctccctttatcagaaatctaagctgaatgaagatgagctgccggcacttcgcgggcatctgtcatacgtgaaacacgtctctcctgcgtttttcagtgccatttgtagcaaatacctaaccgctatcgaaaagctcatttga

SEQ ID NO: 11887 - RNA, 939 nt, synthetic construct
  source 1..939: mol_type = other RNA
atgcctagtctcataacgctcgccgccactgagtgtttcgtccccgaaatttgggtgagggatgtcataaggcttggcccaagccgggtaaagagactgcgtatccgaaaaaagagtagcgctagctatagagtaattaagcgaccttcagctgagttggaaattctccagcggtggctgacactaaaattctttgagaatctggagatgcacgatgcagcgatggccttccgtaggggtaggtcgatactgactaacgctcagcatcacgtggactcaaagtactttctgcgcattgactttaccaatttcttcccgtctataaaatacgatgaccttaagaagtccgtggataaaagcagtaagaacaaaggaacctttgatgcctatcatgacgctgacctgtttatcaagcgggtttgcttcgatgagaatgagcgcctgcccattggttacatcagctctccagcaatttccaacgccgtgatgctggaatttgatgagaaagtccacaggcttatcgaaagcaacgaggaaaaacttggcgcgggaaagtttacaagatacgccgacgatgttgtcttttccactgacaaaaagggggggtgtaccgaattcctcaaaatcttctccagtctcgttgacggaacgacctctcccaagttgtcaatcaatgagaaaaagaccatcttctcttccaaattaggcggctcagccatcgtgacaggcctacgcgtctgccgggattcgcacattacagtgaaccgggagtataaagaccaaatccgcctgatgttgtccctctacgaaaaggggaagttagacaaagaagagcataagaatttgaaggggcacctgtcttacgtgagaagcgtggcacctgcattcttttctagactgtgcgctaagtattttaagtccatcgaggaattcatgtga

SEQ ID NO: 11888 - RNA, 972 nt, synthetic construct
  source 1..972: mol_type = other RNA
atgtccaatcttgtaaaactcgccgctaaagattgttatgtgagtgaggagtggattaaaagcgtcatcgacagcggtccaaacaatgttaagatcatccacatcaagaagaagggagatcctaacaaaaccagaataatccataggccctctgcagagctggagacgttacaaagatggctcacactgaccatcttcaaccagttagccaaccacgagatcgccatggcattccttcgcggcaaatccattctgtctaacgcagaacgacacaggaagagtaagtactttattagggtggatttcaaagacttctttaagtccattaaggccgatgacctattcaagacaatcaagttctacaacaagagtaacagcttaatttcgctgtctgaatccgaccagttttttatcaagcgcgtctgctttgacaagctggggcggctgccaatcggatatatatcctcacctgcgatcagtaatgcggtgatgtacgactttgacacccggttgctgtctttggtgaatgataataaagccaaactcggggctggtattataactcgatatgccgacgatattgtgttcagcacggataccaaaggcggctgcttggagttccttaatctcttcaaaatcatggtcaacaagaatctgtcaccccgcatctttatcaacgaaaagaagaccatattctcctcaagagctggcggaagcgcaatagtaactgggcttagggtttgccaggactcgcacattactattacacgggactacaaagataagattcgtctgatgttgagcctcttcgaaaaaggcaaactcatgcaggaagacacagctaccctaagagggcatctgtcttacattgagcatgtggctcccgcctttttttcaaagatttgtgccaagtacctgtatggaatatctaaaatcctggatccgactccaagccctcaacagaacaattga

SEQ ID NO: 11889 - RNA, 951 nt, synthetic construct
  source 1..951: mol_type = other RNA
atggagatatatagcattatcgatttcgaaaccctgatgcgaagcggctttacatctgaagtgatgcggtcccccgagccgcctaaaaaatgggacatccctaaaaaaaatggaggggttcggactatttaccatccagcatcaaaagtcaaactcattcaatactggcttataaacagcgtcttgataaatctgcctattcacgaagccgcttatgccttcatcaaaaaccggtctattaagaagaacgccctgcgtcacgcatcagcgcgcaacaaatactatgtgaagatagaccttaaggactttttccccagcattcactatgacgattttgagtacgccttcaagaagtacagggatcatatcgactaccccgaaaagcttgattctgaattattgccactcatcaaaggagtatgttttatctcagatctaaccctccctataggcttcccaacctccccatttattgctaattttgttgccagagagttcgacgagaaactaacgaagaatctgaattccatcgacaggctgaacgccacttatactcgctatgcagatgatattatcatatccacgaacaagaagggtgcttctaagcagatcatcaacagcgtcaagtccaccctgagaaatattaagccggactttaagatcaaccccaaaaagatcaagatctgcagtgcttcaggcgggagtatcattgtgactggattaaaagtgtgcgacgatttccatattaccctgcacaaaaagacaaaagataatgtgagactcttgctgtcgctcctgagtaaaggtaatctgaagaaggacgattacaacaagttgagcgggtatattctgtacacaaaaagtatcgacccccatttctacacaaagcttaataggcgattctttaaggagatcaaattcctcgagaattaccacaacaaaaagaactga

SEQ ID NO: 11890 - RNA, 951 nt, synthetic construct
  source 1..951: mol_type = other RNA
atggaaatatacaatattatcgacgtggaaacactgatgcgaaaggggttcacaggcgaggtaatgcgaagccccgaacctccaaaaaaatgggacatcccaaaaaaaaatggcggagttcgtacaatctatcatcccagcagtaaaatgaagctcatccaatattggctgattaatagagtgctcaccaatctgcctgtgcatgacgccgcttatgctttcattaaggacaggtcaattaaacacaatgcgctgcggcacgctaccaccaagaacaaatactatgttaagatcgatctcaaggacttcttcccttctatcaaatataacgacttcgaacatgccttcaaaacgtaccgcgacaggatcgacttccccaataatttggataccgaggtgttgtttcttataaaaggtgcctgtttcattcctgatttaagtcttccaatagggtttccgacttccccaatcattgccaactttgttgcccgcgagtttgatgaaaaactgacagtcaagctgaattccatcgataggctaaacgcaacttacactcggtacgccgatgatatcattataagcaccgggaagaaaggatgctctaagcagattattaatgcagtcaagtccactttgaaggacattaaacccaactttaagatcaaccttaagaaggtgaagatctgttcggcttcaggcggttccatcatcgtgaccggactgaaggtatgcaacgatttccacataactctgcacaagaagaccaaggacaaagtcagactgcttttgagcctcttagcgaaggataagctgaaaatagaggattataacaagctgtctggctacattgcatacacgaaaagtattgacccccatttttacacaaaactcaacagacggtattttaaggagatcaagatgctagagaaccaccacaacaaatcagagtga

SEQ ID NO: 11891 - RNA, 951 nt, synthetic construct
  source 1..951: mol_type = other RNA
atggaaatctacaagctgatagacagtgagacattaatgaggaaagggtttacctctgaggtgatgaggtcccctgagttaccaaaaaagtggcacattcccaagcggaacggaggcgtcagaaccatctatcatcccagttctaaagtgaaattgattcagtactggcttatctccaacatatttagcaatctgcccatccacaatagtgcttacgcgtttgttaatggtcgtagtattaagtccaatgcacttctccatgctaccgccaagaacaagtattatgtgaaagtggatttgaaggacttttttccgagcattaaatacagcaatttcgagtacgctttcaaactgtaccgggatcggattgaattttccgacgtttatgacgctgagctactgcagctcattaagtcaatttgcttcataagcgacgaatcactgccaataggattccctacctccccaattatcgccaatttcgtggccagagaattcgatgagaaactcacacttaagctcaacagcattgataggctgaatgccgtctacacgcgctatgccgacgacatcatcatttctactaacctgaagggggcaagcgtgaagatacttaacgcgattaaatcaactatcaagagaatcgagcctaacttcaagataaacaacgacaaaatccacatctgttctgcatccggcggttcaatcattgccacagggttgaaaatctgccacgattttcacgtcactctacatcgctctatgaaggacaagatccgactgtatatctctttgctgtcgaaaggaaggctcaaacaagaggattataataagctgagcggctacatcgcatatgccaagtcgattgatccccacttctacacaaagctgaatcgaaagtacttccaggaaattcgcggcatcgaaaactcccataacaaagtaatctga

SEQ ID NO: 11892 - RNA, 951 nt, synthetic construct
  source 1..951: mol_type = other RNA
atgagaatctattcactgattgactcgcagacgctgatgactaaagggttcgcctctgaagtgatgcggagtcccgagcccccaaaaaagtgggacatagcaaagaaaaagggagggatgcgcactatttaccacccttccagcaaagtgaagttgatacaatattggctgatgaacaatgtgttttctaaattgccaatgcacaatgcagcgtatgcgttcgtgaaaaaccgctccattaagagcaatgccctgctacatgccgaatccaagaataagtactacgttaagatcgacctcaaagatttctttccctcaatcaagttcaccgactttgagtatgcctttactcggtacagagatagaatagagtttacaaccgagtacgacaaagaactcctgcagctcatcaagactatttgctttattagcgattcaacacttcctatcggtttccctacctccccgcttattgctaacttcgtcgccagggaactcgacgagaaattaacccaaaagttgaacgctatcgataaactcaatgctacctacacacggtatgctgatgatattatcgtctccacgaatatgaaaggcgcctcaaagctgattctcgactgctttaagcgtacaatgaaagagattggaccagacttcaagattaacatcaagaagttcaagatctgtagcgcaagcggagggagcatcgttgtcactggccttaaggtatgtcatgattttcacataaccctgcatcgaagtatgaaagataagatcaggttacacctaagtctgctgtctaaaggcatattgaaagacgaggaccacaacaagctgtctggttatatcgcatatgccaaagatatcgacccccatttctacacaaagcttaacaggaagtacttccaggagattaaatggatccagaatctgcacaacaaggtggaatga

SEQ ID NO: 11893 - RNA, 951 nt, synthetic construct
  source 1..951: mol_type = other RNA
atgtcgctgtacacactgattgataaggaagtgatgatgagagacggatttacccaatccgtcatagatagcagtgaaccccctaaaaaatggagcatcccaaaaaagaatggcggttacaggtctattcatcatccaagcagtaagaataaactcctgcagtattggctgctgacgaaagtatttgacaaattgcctcagcacgatgctagctacgcttttgtgaagaaccgttctataaaggacaacgcgcttcgacacgccaaggagaaaaacaattactacgtcaagctagacatcaaggatttttttccatctattgagttctcggacttcgagaagtgctttttaaggtaccgcgaactcatatcaatccccacaacttgggatgaaagcctcttgtttctgatcaaggagacttgtttccttaaacctcagaaaaatcttcctgtgggattccccagctccccggcaattgcaaatttcgtcgctagagagcttgacgagctgattttaggtgagcttgccagttacgaaaagtataaccccatctatacccggtatgccgacgatctcgttatatccgttgcggagaaggggttatccaaggagatcatcaaagcagtgaagaaagccatcaagaactgtacctgtaatttcagtctgaacgaacagaagataaagatttgctcagcctccggagggtctattatcgcaaccggcctgaaaatctgcaacgaccaccatctaactctccacaaaaagatgaaggatagcattcggctcaaactgtccttgtattctaaagggaaactgaacatcgacgagttgaacaagctgtccggctatattgcttttgccaagtcaatcgatgaacatttctacacaaagctgaatcgcaaattcttcaaagagttgtcttcactcgagaatgtgcacctgaaggaatga

SEQ ID NO: 11894 - RNA, 948 nt, synthetic construct
  source 1..948: mol_type = other RNA
atgatcctgtacaagattatcgacacggacatcatgatgagagacggcttcacagaatccgtaatcaagagctctgaacctccgaaaaaatggacaatacccaaaaagagtggaggtgttaggagtattcatcaccccagcaccaagaataaacttctgcagtactggctcttgaccaaagtctttaataaccttccccaacacccagcaagctatgcatttatcaaagggagatctatcaaggataatgctctgcgacacgcagagtctaagaacaattactacgtgaaactggacatcgaagactttttcccatcgattacctacgacgacttcgaacgctgcttcgtcaagtatcgggatctcattaccacgccgactaagtgggataaagatctgctacctctgatacaggacgtttgtttcttaaagccacagaagatcctgccaattggattccctaccagtcctgccatagctaacttcgtagcccgagagttggacgacatcataaacgcggagatggcctcttttgagaagcataaccccgtctatactaggtacgctgatgatctcatattttccgtggctgataagggtctatccaagaaaattattacagccgtgcggaagtccctcagaaaatgcagcagcaacttcaagttaaatgccaacaagatcaaggtttgctcagcgagtggagggtcagtggtggtgacaggcctgaaaatctgtaacgatcatcacctgactctgcacaaaaagatgaaagactcaatcaggctgatgctttccttacactctcgcggcaagctcaaagaggaagatttcaataagctctccgggtatattgcctttgccaaaagcattgatgagcatttttatactaggttgtcacggaagcattttaaagagttgcgcacccttgagaatcgtcacctgctgtga

SEQ ID NO: 11895 - RNA, 978 nt, synthetic construct
  source 1..978: mol_type = other RNA
atgatgttatacgatcttatcgagaatgatctcaaaatgaagactggattcgtgagtgatatcctctcgagcccggaggaacctcggaggtggaccatacctaagcgcaacggcggcatcaggtttatttatcacccatctgccaaacgcaaggtgcttcaatattggctcttgcagcgggtcttctgtctgatacctttgaacgacgctgcgtttgctttcataaagaacagatccatcaaggataatgccctgagacactctaagtctaaaaacaagtacttcgttaaggcagatataaaggacttctttccctcaatcaacttcgacgattttctgtatagctttaaccgatatcgtgccgatattaactttcccaaagagtacgacaatgatctcctgcgaatgatcagggaagtatgcttcatcggacccaaaaaaacactacccatcggctttccaacctctccattcattgctaattttattgctcgtgaactcgacgagatcatccacttggagctgaagaacattaacgatgccaatccaatttacacaagatacgccgacgatctggttatcagttcatgcaagaaacggatgcattccgagctgattagtattatccgcaagagtattaacaagtgcaatgcgtcattctccctgaacgagaagaaactgaaaatttgttctagcagcggtgggagcgcaatcattaccgggctaagaatttgtcatgacgggcacctgactgtgcataaaaagatgaaggacaagattaggctttacctctcacatatcaacaaaaagggacttgaagagtccgaaatcaatatcttaagcggttatctggcctatgtgaaaaatgcagacgccaatttttacacaaaaatctcccggaaacacttcaaggagataaaggagatagaaaatcactatacgtacgcagacttgaaacctcatgacgaagtctcctga

SEQ ID NO: 11896 - RNA, 942 nt, synthetic construct
  source 1..942: mol_type = other RNA
atgagtataatcagcgaagtatcaagggagctggatatggtcgaagattccttcagagaacagattcgactggctagagggaagattaagcacatcaagatcaagaagaagaacggcaaagggttccggaggatcgtgattccaccctgggagtttaagattgtgcagtattggacgatcctgaactatttacgcaatgtgaagatacaccgcagcgctactgcctttcacgaaggagcctctatccgtactaatgctctctgccataggaaaggaaactacttcgtgaaaatggacctgtccgactttttcccttctgtcggcgtagacgacttcaagaatgcactctacaaatatcaccccgaatttatctggttggagaaagagttatccgatagcgagtttctggagagtatgttccacaagggcgtgtgcgcaatcggttttccggcctctccctacatagcgaacatatgtatgatcgaaattgatgagctgattgaatcaaagctgaaaaataacgtggagcggtttggtcggttcagttataccaggtatgccgatgacctgacaatctccattgaaagaaaggggttcaaacgagaggtcgagggcgttgtctatgaggctgtccgggaagcctctctgaagaacatcaaggttaacaaggagaaaacaaaatacggctcaaaaagcggcgggagcgcattcgttaccgggatgcgcatctgcaaagatggacatattaccctccatagaaaatacaaggaccatgtgcgtctgttgctcagtctctacagcaaaggaaaacttaaacctgaggacaagggcaagttgcttggtcacctaaattattgtaagtcctctgacccagagttttacaataaacttgtgctgaagtacttccaatcgattgaaaagctaaagaattcaaacggatga

SEQ ID NO: 11897 - RNA, 936 nt, synthetic construct
  source 1..936: mol_type = other RNA
atgggaatcattaaaagcatcgccaaagaactgggaatgcctgagccagtgttcagggagcagctgaatactgcagcaggcaagatcaagcacattcgaattcctaaaaaatcccagaagggttacagaaagctggtgatccccccctgggagttcaagatcgtgcagtactggctcatatacaatcacctgaaaggtttcccaatccatccaagcagtacagcctacaagcccggcgcgtcaatacgcaaaaacgccttaaagcatgcagagggaaagtatttcgtgaagatggacctttctgactttttcccgtcaatcggcgctgaggaattccgtaacatcattgaggagtactaccctaaacacaattggttgattaaagagctcgaagattccgactttgtctctagcatcttttatgataagaagtgcgccatcgggtaccctgcaagcccctatattagcaatatcatcatgttcggcgtcgatcaacacattgacagagctctgcaggacaagcagcagaccttcgggaactattcatacacccggtacgctgatgacattacgatatcgattgagaacaaagggcataagaaagaagtggttcggctagtccatgattccataaagaagtctgggattaagaacttgaaggtgaaccagaataagactaagtatggctccaaaaaaggaggttccgcgtttataacaggcatgagaatttgcccggacggacacatcaccctccacaggaaatataaagataacgtacgcttgctgctgagtttatacaatagggggaaacttgacgttgctgaacggtctaaactggccggccatctaaactattgtaaggatgccgacccacttttttataataagctcgccctcaagtacttttcaagtatcaagaaactgcaagaaagctga

SEQ ID NO: 11898 - RNA, 933 nt, synthetic construct
  source 1..933: mol_type = other RNA
atgtcagaagaatcagtcagaaaccagatacacgagggtagacgtcaaatcaaaatcaagaagattccgaagaaagatggcaacttccgcaagattaccattccacctcggatatttaaactcgtgcagtattggaccatcaagaatatcctccattctctgcctgtgcatgaggccgccaccgcatttaaaccaggtagctctattcgtgagaacgcttttcggcaccgggacggccagtacttcgtaaagatggacgtcacaaatttcttcccaagtatcaagtccgacgacttctttagcgttctctcgaggatgcagcacgctgaagcggaccccctgctggattccaaggacgatgaagattttctggatgctatgttccgcaaccgggcctgcgagatcgggtatcctgccagtccacacattgctaacatcgttatgtttgagaaagatacgcgaatcgacaatgcattgcgggatcgcaagcaagagttcggaaattccacttacacaagatacgcagacgacattaccgtgagcattgaccagaagggatataaggacgaaatcactaggctggtgagcggcgtggtcgaagatgattccgaacccacattgaaaatcaaccccaataaaaccaggttcggcacgagaagagggggaggggcctttgtaaccggactgcgagttctgcccgagggtcgactgactttacataagagttacaaagacgacgtgcgcttcctactaaaactttacgaacaagataggcttgagcgctggcagatcagcgccttgcagggccatttaaactattgttcatttgcggaccctgatttctacactagactcatgattaagcaccttgattctatagaggagataaaaggggaggggctgaggtctacagacggcactacagagaattga

SEQ ID NO: 11899 - RNA, 945 nt, synthetic construct
  source 1..945: mol_type = other RNA
atgaagctgatcagggacttctgccacgagatgggcctacccgaagaggagtttacggtctatgttgacgacgcacgcgagcgggttaagaaggctaagattaaaaagaaggacaaaacaactcgggaaattatcatccctagttgggagctgaagattatacagtattgggtgatcctcaactatttgaggaaactccctgctagcgaatctgccaccgcatactataaaggcgcttccatcattaaaaatgcccaggcccatagaaagggaagctactttgttaaagtagatatagagtccttcttcccatcgcttaccctcgacatctttatcacttcattgaagaaggatctggagtcaaacccagagaacgaagtgatacgatatctacttgaagcaactaatgacgccagcttcaaccagtcaattttttataacggtacatgcgtcatcggctaccctgcttctccctatatcgcgaattacatcctcaaggcctttgatgagaatgtggtggccgaattgaatgagataagcggcaagctcgggattttcaactttacacggtacgctgatgatattgtggtgagttgtgaaaacaaaggaaataagactgaagtgctgaaaattcttcacaattgcttagagcaaaagttcgatggagccctcaaactgaaggccaccaaaaccaaatctacaaccagaagcggaggtagtaccatcattactggggtcttgatatgttctgacgggcgcacaacactgcccaggaagtacaaagacaaagtccgtctgcttttctccctgtacgcaaaggagatcctggaaaaggaagagattccggcgctgacgggccatctgaattatatcagatcagtggatccagtattctacaacaagttatactccaagtactacacccagatcaaaaaactgtcctga

SEQ ID NO: 11900 - RNA, 954 nt, synthetic construct
  source 1..954: mol_type = other RNA
atggaaaaagagatgtcgattattgatgaaatcgccaaggagttacgaataaacaagaagatcattgagagccaactcttcgcaagtcgaaagcaggtcaagaagataagggtgcccaaaaaaaatggcgcccataggagcatctatgtggcaccgaaaagctacaaaatattccagtactacatcctgaacaactacataaagcacgttaagaaaagtcacgctgcttctgctttttggaagggaagttccatcctgaagaatgcgaaaaagcatagagaaagaacctacctggtccgtattgacattagtaatttcttcccttccatccacatcaacgattttatctccgtactggatgactccgagaataatatcattgacctgtttagcaaccccgaaaacgccgaagtgatcatggaaacgtgtctctctgacgaggggtacctccgcgtgggttatccaatctcacctttcatagcggatatcgccatgcgtgagattgaccaggaaattgccaaatatttggaggagaagtttcaggagggcacattctcttattctcggtacgcagacgacctcgtgattgggtttgacgaaaaatgcggcaaggagatcgagattgctatctccgagattatagagaaaagggaccaccctaaattgtctatcaaccacagcaagactcggtattttaaccggaacgttggcaatgcaattgtgactggggtccgcatttgccaagatggaagactaacacttccaaaacagttcaaggatgatttacgatttcgcttgtcactacttaataagggtaatctggccaacgaggagctgagctcactcgaaggatgtctgaatcattgcagagacatcgatccctcattctataccaagcttcagaccaggtacttcaagtccatcgccgaactgaaaaatcggaacaaaaactga

SEQ ID NO: 11901 - RNA, 942 nt, synthetic construct
  source 1..942: mol_type = other RNA
atgcacattaaaaaggctattgccaatgatctgtctatacctgatggactgatcgacgaggccatctccgtggctagggctcacgtcaaaatcttccacattcaaaagcgcagcggtgggtcgcgggagatatgccacccttcaaagaaactgaagaccctgcagtattggcttattcactctgtgttttcccagatgcaggtgcatgatgcctctatggcttatcgagatggcgtcagcatcctccacaatgcggagaagcatcgtagtaacaggttctttctgaaaatggacttagagaactttttccacagtatttctttcgaagatttcatccccatcctgcggagctggcatagaaaatccaacccaaagtggatcttagatgcagaatgcgaggacatgatacgcagaatttgcttttacaagaatgacagattggcaataggctacccatcatcgccgattatcagcaacattgtgatgaatgaattcgattccaaggtgagtacacttatttcagataggaaatatgggaaggtcatttacaccaggtacgcagacgatttggtgctctccactgacaaaaaaggtgcctgtagcgaaattataaaggagatcatcaatctgatccaaggcacatccagccccaacatctccgttaaccatagcaagactaagctagggtccagcaccggaggctctgcctctgtaacaggtctgaagatatgttcaggcggacacattaccatccatcggaaacagaaagaccatatccgattgcttctctctctgtacagaaaaggaaaacttgagcaggaagaggaaaatagcttgctggggcacctgagttattgtcattatgttgcccccgacttttacacgaagctcagtaagaagtactttaaagagatctatgacctccgctcaaaggacctatga

SEQ ID NO: 11902 - RNA, 942 nt, synthetic construct
  source 1..942: mol_type = other RNA
atgcatatcaagagaactatcgctaacgagctttccatcccagacaatttgatcgacgaggcaatacgcgttgcccgatcccacgtgaaaattttccacattgagaagaagagtggcggatctcgagaaatctttcaccctagcaaaaaactgaagaccatccaatattggctgatccatagcgtgtttagtcagatccccgtacacgatgcttctatggcttaccgtaatgatatatctatcctggataatgcccgcaagcataggagtaacaggtttttcttaaagatggatctcaaggatttctttccctcaattagctttaatgacttcataccgatcctacgggactggcatgctaaggcaaaacctaactgggtccttgatgaggaagcggaacatctgatcaaaaaggtgtgcttctacaaaaatgactgcctggccattggctatccatcaagccccaccatttcaaacatagtgatgcgcgattttgactcgaaagtgagcacactgatttccgcggaaaaatatggcaaagtcgtatacacaaggtacgcagacgacttggtgtttagcactgagaagaagggtgtctgctctgaaattaagaaggagctgcagaccctcattcaggccaccacatctcccaacatcaaggttaacaaccttaaaaccaaactggggtcatctacaggaggtacggcctccgtgaccgggctaaagatctgtagtgatggccacattactatacataggaaacagaaggatcacattagactcctgctcagcttataccggaaagggaagctgcggccagaggacgagaaatcgttgcttggacacctctcctactgtcactatgttgcccctgacttctatacgaaaatctccaagaagttcttcaaggagattcacgaactgagaactaatgacttgtga

SEQ ID NO: 11903 - RNA, 942 nt, synthetic construct
  source 1..942: mol_type = other RNA
atgcacataagagatgcgatcgccattgacctctccgtccctgtctctatcgtcgatgaggctctcaaagaaagtcggatctacgtgaagaagttcaccttacccaagaaatctggtgggagtagggaaatcttccaccccagcaagaagttaaagactgtccagtactggctcatcttcaatattctcagtaaactgccaattcactcatcggcggtagcctatcgcgacggaattagcattctgaataacgcaaagaagcattgccacaataggttcttcttgaagttggacctaaaagagtttttccattccatcgtcttttccgacttgctgcccctgatagaggattggtaccagaacatttccgtggattgggtttttgggccagaagagaaggatttgattaggaagagctgtttctacaaggaggaccgactggccatcggatatccttcaagtccagtgatctcaaacgtggtgatgtaccaatttgacctcaacgttgagtctttagtttccagcggccgctttggggatgtatgctatacccggtatgccgacgaccttatctttagcacagataagaaagggggttgcaaagtgctgcttcgagaaatcagcgacctgataggcaggcataaatcccccgacattactttgaattctgctaaaacaagactgggttcttcaaccggcggcacagcatccgttaccggactcaaagtgtgtaataacggctatataacggtgcatcgtaagcagaaggatcacattagactgcttctgtcactatacgccaaaggagaactgaaaccggatgagtacagaagtctgcttggccatctcgcttattgtcactatgtggcccctagcttctactctcgcctggcacagaagtactttaaagagatccacgaactgcgggctagcgtgttctga

SEQ ID NO: 11904 - RNA, 942 nt, synthetic construct
  source 1..942: mol_type = other RNA
atgaatatcaagtcaatcattagcaacgacctaggaattcccgaaaagttaatcgaagaggcgctgtccagctcgcgcacctacgtcaaagtgtttaagattaaaaagcgaaacggcggctttagagagatccaccatccttctaaaaaactgaagaccctgcagtactggctgatccataacattttcaagaacctctcaatacacaagtcttccgtggcatatcaagatggcgtcagtattcttgataacgccaagatgcatagttccaatcggtttttccttaaaatagatctggagaacttcttcccatctatcaagtacactgatttggaacccattgtcgacaagtggcacagcgagaataaaatcagttgggagctggaccaagaagctaaagaactcattaggaagtcatgcttttataaagaggatcttctgccaattggatatccttcctcccctatcatttctaacgctgtaatgcatgactttgacactgcaatcaaccagatcattctcgataaccggttcggcgaaacagtttacaccaggtatgccgatgacttggttttttcgactaataaacacggcgcctgtagcaaactaaaagacgttatccgtacgtttatcgggggatacaatacacccaacataaagatcaatacaagcaagacgaagatggggtcttccactggtggttccgcaagcgtaacaggactgaaggtgtgcgagaatgggcacataaccattcacaggaaacagaaagaccacatacgcttgctgttaagcctgtatgccaaggggaaactcccggaatctgagaagtccagtcttgccggtcatctcgcttatgtgcagcacgtggctccaagcttctactcaagtatctcaaataagtacttcaaggagatcttcgagctgagagccaccaatgtgtga

SEQ ID NO: 11905 - RNA, 942 nt, synthetic construct
  source 1..942: mol_type = other RNA
atgcgcatcgaggaagtcatctctcgagatctaaaagtgcccgagtccctcattaacgaagcaatatctggcgccagagtacgggttaaaaagtttcagatccctaaaagatccggcggcagccgcgagattttccacccaagtaagaagctgaaggtcattcagtactggctcatgcatagcgtgttttgtaatatgccactgtcagatgcggccatggcataccgggagggaatctcaattctgcacaatgccagggtgcacagtctgaatcggtattttctcaggatggatttcaaagacttctttccttccattcggttcgaggacgtggaaagccatattaaagcctggcatcgtaactttaagccggaatgggaccttaacgacaagtccctggagttcattaatcagagttgtttctataaggacgctagattggccgtcgggtaccctagctctcccgctatctccaatatcgttatgagagactttgacagcaaaattttgaacgaaatcggatctgaaaagtacggtgatgtggtttatactcgatatgctgatgatatggtgttttccacaaaccaaaagggggcctgcaaggaaatcatcaaagcagtcaaggagatcgtttctgtgtgtaagtcgccagtcctggagattaatgagtcgaagacgaggcttgggagttcaactggtggaagcgcgagcgtgaccggccttaagatatgctcagatgggcgcataacaataaaccgtaaacacaaagaccacatacgcctcatgttgtcactgttcagcaaaggaaaattagatcctaaggaagtgccctctctggcaggccatttagcctactgccactacgtagctcccgactttcactccggtctatccagtaagttcttcaaagagatccatcagatcaggaccatggacctgtga

SEQ ID NO: 11906 - RNA, 945 nt, synthetic construct
  source 1..945: mol_type = other RNA
atgaacatcaaacagctgatttcagagagtatcgatgtcccactgagtatggtggacaacgccataatactggcccgctcccacgttaagaaattcgaactgaagaagaagaatgacaagttccgtattattcaccagccaagcaagaaacttaaggtgatccaatactggctgatctacaacatctttaaagagatgcccattcacgcggccgctgttgcttacagaaatgagctcagtatcctggataatgcagagaggcacaagcgaaacaagtatttcctgaagattgacttcaaggactttttcccttctttaacatttaacgacttgctcccttttcttgagtcatggaaaagttcccggaccgatttgttcatcaataacgagctaaaggaaattatcaggaaatcatgcttctataccaatgacaaactggtgattggttatccctcatccccgattatctctaacatcataatgttcgacctagatgaaaacattcagtctatcatctctgacaataaatacggcaatgtcatatatacccggtatgctgatgatatcatcataagcacagataaagccggcgcatgtaaagagatatacaaggaaatttccaccctgattaagagcacgattactccttctctgagcattaacgtggaaaagacaaagttttcctcaagcagtggaggctctgcaacagtcactgggcttcgcgtatgtcacgaccaacatatcactatccataagaaacagaaggatcatatcaggctgcttttatccttgtacgccaaagggatactcaatgagaaagacgagaaatccctcatcggacatttggcgtattgccaccatgtggatcccgctttttacagcaagctcagcaaaaagtactttaaggaaattgccaccatcagatcgagccacatgaaaaactga

SEQ ID NO: 11907 - RNA, 969 nt, synthetic construct
  source 1..969: mol_type = other RNA
atgagggatctggtggaggtgtgttctgcggatttaggcatttctaggcaagagactttgcacttagccaagtccgcaccctaccgaatgaagaggttcgaactgtcaaaacgcgggggaggtagacggacaatatggcgggccgctattgagactaagggtcttcagtatagcctgatcaaaaactacctggagcacctcccagtgcacgcagcaagccaagcctttagcccgggatcatccatcaaaaaaaacgcctcaattcacgtgggaaaccattatttcctgagagtggacctcaaggatttcttcccctccctcacattcgaaaatctgcgaaaggcgaccctgagcagtaacgccaagtttgactttagcctggaggggtccgacagttttgccctcatccagggtgcttgctttgatcgcgatggtaagcttcccatcggatactccacctcaccttttatcgccaatgtcgtgatgtttgaattcgacgagtcgctcgaagttaccctccagtccgagttcggggccgggaacttcaactacactcggtatgctgatgacatggttttctccacatctacaagaggcgtatgccgcaaggcttatcgtaagataaagaatttcgtcgccgacttcgatggagcgagtctgagtgtcaatgacagaaaaactcactttggcagcacaggcaagggcacagcatttgttaccggcgtccatatgctacctaatgggaagttggccgctacgcgtcagttgagggaacgggtgaagttcctattatacctgctgacgaaaaaacgaattccagaaaaagagtactctcagctgatcggcctgcttgctcatcttcggtcagtggatcctgcttaccatactaaactcagcaccgacttttatagtgtatttccaagattggggaaagacaggactgcaaccacctcttctgagcgcacctga

SEQ ID NO: 11908 - RNA, 936 nt, synthetic construct
  source 1..936: mol_type = other RNA
atgctggatttgctggatatctgttctagcgcgttgggtaccacccgcgagaatgccctggttattgctaggactgcaccctatagattgaagaggatcgagatacccaagcaggatggctctaagaggataacttggcaggcggcaattgaaactaagggactgcactacccactcattcaatattatcttcgtcagttaccagcacaccctgcttcacaggcctttagcccaggaagcagcatcataaaaaacgccggaatacatctggggaataagtacttcctccggattgatttctccgatttcttcccctccattaagttcaactccttcaagaagattatcaaccagacaaagtccatcttcgaaaactttaacaccgccactcctgaaagtatgttgctgctagagaaagcttgctttgccaaggactcttccctccctatcggctatgcaacaagtccctatatcgctaactgtactatgttcgaatttgatcgggagatcatagacctgcttcgggcaaaattcgcttcagccaatgtcacgtatacaagatacgccgacgacctggtgttttcgaccaatatcaagaatgcctgccgagacatttacgatgtgattgtacagtttgtgaagaagtacagagctattgacctgaccatcaatcataaaaagacacactttgggagtgtgccgaaaggtaccgcctacgttacaggcgtgcatatgctagaatcaaatcgcacggctgctaccaaaaccttaaggtctgaggcgcgctttctcctgagcctccgaaaaaagaacaaacttgatgacgacgagcagaaacggctgtttgggcttctggcacatatcagacaaatcgaccctgcattctacactaaactcgcctcagacttccacgtcgcctttccacacacaaaatga

SEQ ID NO: 11909 - RNA, 942 nt, synthetic construct
  source 1..942: mol_type = other RNA
atggatctcaagtcccggatatgcaaagatctgcagataccagaaacactgtttgactcctccgtcagtaatgcacgacgcgccgtgtatcagttcaagatccctaagaagaatggagacgagcggactatctatcaggctgctgcaaagacgaagaccatccagtactggctgctgaagaacatatttgagaaagtgaagagccatccttcttccatggcatttagtcagggctgttcgatcttgaaaaacgccgaatgccatagaaacaaccggttctttctgaagatcgacttactgaattttttccctagcgtgacattcgaggacgttaagggggccttgatcaaaaactgggagcaaatcgacagtcttcccccggacaaagacctcttcgaattgattaggaccgtatgtttcttcaagggcgatattctgcccattggatacccaacatcaccaatcctcagtaacattgctatgctaaacttcgatgagatggtgatgtccacccttgagagctctttcggaggtgatgtaacctatactcggtatgctgatgatatggtcttctctactaatgttcccggtaggacccacgaagtctttaaactgattcgccaactaattacaacgaatacatcacccaaaatctctatcaaccctgacaagacaacgtcagggagctcaagcggcggcagtgcgatcgtgaccggcattaagatctgcccaaatcacctgaccattactaaaaaacagaaggatgagattaggttgttactctccctttacagcaaaggacgtctgaggtcttccgattacgagagaactatcgggctgataagctttgcccgaaatgttgacccgtctttttttactagagtgtcagagcgcttctttcgtgaaattagagccataaaaaaggaactcagcgacacctga

SEQ ID NO: 11910 - RNA, 942 nt, synthetic construct
  source 1..942: mol_type = other RNA
atgaaattttgggaacagatcgagacatccttcgggctaggaaaacctgagatcaacaggatcattaatgattctcgccggtgtgtcaaacacattaagatacccaagcacaatggaggtttcaggctggtagtgcagcctaccagaaaggtcaaactgatccaatactggctgatagataacgttttcagcaaaatggaggtgcactcatctgccatgagctatcgcccaaatatatccattcggagaaacgccgaagttcataagaacatgcgatactttctgaagcttgatttcatcgacttcttttggtctttgaactactcagactttgtcgtcgtcttcgacagttttctcggtcgtaaaaagatcctgtggagcgataataagttcgaccgaaatctgatgcggtgttgctgcttttataaggacgacgctctgccaataggatatccttcatccccgattatcagcaatatcattatgtacaacctggatgtggcaattaagaacaaactcgaggtgctggaggagaagatcggcggcaaaatcgtgtacacccggtatgcagatgacttagtgttttcaacgaatattcccggtgcttgcgaagagataaagaatagtatcatttcgcttgtgtccgggtgtaacagccccaaactaaagttcaactacaacaagctcaaaatgaccagcagttctggcggatccgccgtggttactggcttgagaatctgccatgatgggcatatcacacttagaagggaatacaaggaccaggtgaggtttttcttgaatctcatggccaaggatggcttaaaaaaggaggacatttttgtgctgcgcggccacctcgcgtatgtgcaggacgtagatccagttttctatactaaattgcaggagaagtacttcaaacaaattgaaggggtagaaaagtga

SEQ ID NO: 11911 - RNA, 921 nt, synthetic construct
  source 1..921: mol_type = other RNA
atgtccgaagagcttaatatacccgtggacagcctaagcgataccatcgagcagtctcgttctttcgtgaagcggatcaagattaataagaaaagcggaggcgagcgaatagtttaccagcctgccaggaagataaaggtgattcagtattggctcatgagaacgatattttccaagatcaccattcactccgcttcgatggcatacaggaaagaaggatcaatcaaggagaacgccctcaaacatagtaatggtgggtactttctaaagctcgatttcaaagacttctttccctcgataaaatttagcgaccttaacaaaagcatcattgcgtttaggaagaacaacaacgcaatttttaagtacaccaaagctgaccaggaactgatcaggcgagtttgcttctacaaaaatgataaactgccaatcggatacccttcctcaccgattattagcaacatcgtcatgtacaaattcgatattagagtgacagatgagatgcccaagtttagaaaatacgggaatgtggtttatacccgctatgctgacgacatgatttttagcaccgatcggaaaggcggttgtgaaaagatcttcagtttcctgtccgtgctgattaattcttggtctactccatccttgctgttaaacgaggccaaaactcggttcgtgtctagttcagggggcacagccatagtcacaggcttacgcatctgttacgatggccacatcactctccatagacattacaaggacatcgtccgccttctgttgtcactgtataagaaggggaatctgaaagaggaagacgtatatgtgttgaagggacacctgtcttatatccaaaacgtagatagtgtcttctatacgaagatctgcaagaagtatttcgacattattgacgagatcaaaacaaagtga

SEQ ID NO: 11912 - RNA, 954 nt, synthetic construct
  source 1..954: mol_type = other RNA
atgaacatcagggagcgaattgccgctgatctgcatgtgagccatgagctcatcgatcgagccgtgtgggagtcgcattcgaaagtgaagaagttccggattaaaaagcgtaacggtggcaccaggccaatattccatcctagcaagaaaaccaaattaatccagcagtggataatccacaacatactaaaccatctccctgtgcacgacgccgctatggcttacagaaagggattgagcaccgtcgataatgccagaaagcatcgccagaaccgttacttcctgaggatcgatctgaccaacttctttccatcaatcacctacaacgacctggagcctcttattagggaatggcactctcacgccgagacagactggacgctggacccgacaagcgaactattactgaagcacacctgcttttctcaagatgaaacgctgcgcatcggggatccttcttccccaagtatctccaatgcagtgatggcatccctggacgaaacaatctccaatactgtacgcgcactcagcaagaatccaattgcctacaccagatatgccgatgacttgatttttagcacaaacgagaggggattatgcaaacccatccacgaacacactgttgctgttatagaggagtccaccagtccccttctctctgtcaatcgaagaaaaactcggtttttgtctcgctccgggggatctgcaattgtcacaggtatcaagatcaatcccgacggctcattgactctccccaagtcatacagaaatgaaattcggttcaagctggacctgtacagaaaaggcaaactgggagacagtgatgtgcgcgagctgcggggccatcttgcttattgtaagcacgccgcggcgggctattatagtcggctctgtgggaaacactatagggaaattgaggaaattacaacttcacttcaggaccacagctgctga

SEQ ID NO: 11913 - RNA, 966 nt, synthetic construct
  source 1..966: mol_type = other RNA
atgatctaccgcgaaattagcaaattctataacatcccccaggaggaagtgcaggacttcattagctccaacaagaccaaatactttagattcgaaatccctaaacgaaacgggaagtttagaactatcacccatccgcgtcatgaattaaagatagtgcagtactggttggtagagaaggtgttctcccggatgaactacgtctcttgcagttcctacgcatacatcaaggaaagggacatacttaaaaatgcacgtaaacatcaacgcaattcgcacttcctgtcagttgactttagcaactttttcgagagcatcaccttcaagctactagagcccttcctggagaaattttaccactccacagaggttgagtattctttggaggaactgaaaaatgtggtgaaacggagctgttttgatagttatggccgcttgccagtggggtttgtcacctccagcatcatctcaaacatagtcatgttcgatttcgatctgagaattaacgtgctcctcatgtcaaggaagatgctcggtagggtggtatatactcggtatgctgacgatgtgactatttcaacaaacaaggagggagccattagggaaatttacgaactgttttgcaagggactcatcagtgaatttaactctgagattaccctgaatgcttccaaaacgaaggtgagacataagcggtgtggtaacgttcttgttacaggcctccgcataacaaaggacagtaggatcaccattcacaaaaattataaggaacgagtcaagaagctgatccacgataattacaagagtgaggatctttctgtcgtctctagaataattggccacctgaatttcatcaagtatgtagacgccaactactcacacaaactgaatatcaagtacttctctgagatcaatgagctgaaactgcggtatcaggcgttatttagcgccaaatcctatatttga

SEQ ID NO: 11914 - RNA, 972 nt, synthetic construct
  source 1..972: mol_type = other RNA
atggccaaatctttgatcgatatggtggcaacctacctcggccacacccgggaacaggttctgcatctttcctacagggcacctatgacctatcggcgatatactattcccaaaaaaaagggcggtcgcagacttatcaatcaccccgccaaacagaccaaaagcctccagtacgctcttatgaacatctttctgagtcaattacccatccacagctgcgccgccgcgtacaaaaagaaaaccgcgtctgaacatattccaagccccctgctgaaaaatgccatcctgcatgcaccttatagctattctgtacggattgactttacagacttcttccattccatttcaagtctcgatctgttcaatcgcatcagtaacaatgacatcaacttgtcaatatccgataaggagtttattgagaactgcctattcgttcgcgtgccagaaggacagaagggcctcgcaataggagccccgtcatctccaataatctccaacattgtgatgtattctctagacgagcagattaatgcaatcgccaacgggattagtgacagagtcgcgtatagccgctatgccgatgatattatatttagcaccaacttaagggggggctgtaattacttttacagggctatgtccgagctggtgactagaacaagtagcccgaagctggtcattaatcggtccaagacaatgttctccagcagggcttctcgacgcgtggtaacggggttgtttatcagacctgacggtggcacttcgctcggacgacaaaacaagcgttatatcaggaagctgttattcgacctcaaaagagacaatatcgagcctcgtaagttgacttacctttcaggttacctggctttcgccctggatgtcgagccagacttctacaaccggctggctcacaagtacggggcagaactgctcgctgttgccatcggaaagacacaccacgatgtgtcatga

SEQ ID NO: 11915 - RNA, 972 nt, synthetic construct
  source 1..972: mol_type = other RNA
atgagtcgaatcattaacctgaaaaatgacgtggccaagtatgtgggcatcactctggagagggtcgaatccctagcggctgtcgcccccaagagctatagaagggatgaggggagtaaaagaagcggacgcggcagcagagtgatattccacccttctaaaaagactaaggccctgcagtacgggctgatcaagattctgttagacgacttgcctgtacatgcgagcgcctacgcctatcggaaagggttgaaggcaccgctgctgaaaaattccatgctgcatcaaaaatacagtttttccattcggattgacttcaaggacttctttccatcaatagtcccagaggacttgtttaaggtaattgatgaatccggacttttccctgcagctcttgacagtgccgataaacgattcttggaaaatgtgcttttcatccgtcaccacggactcatgcatctggcaatcggcgctccctccagtcctagcatttcgaacgctataatgcattccctcgatgtgctcttttcagcatttgctcgggacaaggattctgtttactctcgctacgtcgacgatatcatcttcagcacgaaccgaaagggcatgtgcgatgagtttctgagattcctgtcaacaaccctctctggtaccccctcacccatccttcaggtgaacgccacaaagacactggtaatgtccaggggcactaggcgctgtgttaccgggatgtttattaccccagagggtggagtctcgatcggtcggacccggaaacgtaagctgcgcacattgctctacaggtattctaaacaccttaagggggaagacgtgctcagcaaagaggatctgaattatctaaagggcaacttagccttcgtgttagatgttgaaccagactattacaacagactcgtgcagaaatacactgccacgatggttaattctgcactgcacgcttcagtgagctga

SEQ ID NO: 11916 - RNA, 942 nt, synthetic construct
  source 1..942: mol_type = other RNA
atggacttgattgagaagattgccctgtacctgggcttctcaaaggaacagatcgttaaacattctaaaaggtgcagcaagacatatcggctttataagattcccaagaagggcaagcttacgggatttcggaccatataccaccccgccaaggaaactaaagctatacagtacgctctgatggagatcttactcggggattttaaagtcagcgaaagcgccatagcatacaaaaggggcctcagcagtcctttgcgcgagaacgccttgctccacgcgccctataaatactccgtgcggattgattttgaaaacttcttcctaagcctgcagcctagagacttggcacgaatggctaagagtaaattcgatctgaacgataaagagatagacttcctgatcaaaagcctgttcgttgacttggggagtggtcgctctggcttaggtgtcggagcaccatcttccccaatggtcagtaatatcattatgtatgagctggatgaggagatccagaaaatcgccctgaagattgacccgaaatctgtgtattctagatacgccgacgacatcatcttttcaaccgaccagaaaggagcgtgtaagcaattttatgaccagctggcatcagtgattaagtcctcaaaaagccctagattaaagatcaacgatctcaagaccatctttagctcgcgcggttccaggagaatgattacaggcctgatcgtgactccaaacggcgacgtgtcaattggacgtcgaaataaacggtacatcaagaaactgctctttgacttctcgaagtccaagatatccgataagaataagagttacctcaaggggtatctttcctacatcgaagatgtagagcccgatttccttaattccctgtctctaaagtacggggccgctctcctggaaaaaattaggatggatcaattctga

SEQ ID NO: 11917 - RNA, 918 nt, synthetic construct
  source 1..918: mol_type = other RNA
atgagcttaatcgagaacgtctctcgttatctgagctttaatgaatccgagcttttatcattcgctcagaaagcaccaacaacctacagaacctaccagatccctaaaaagaacggtaggctgcgcacaattcatcatccagccaaggaaacaaagtccctgcagtacgccttgatcaatctgatcttcaagaattaccctattcattcatcagcagtggcatatcggaaaggggttaaaagccccttgaagctgaatgctgagagtcactctaagtatctctacaccatcaaaatggactttaaagatttcttccactcgatagtgtttgaggacctgaaaaacattctagattctccttacacgcaacaagagcttgaattcctcaaaaatgtcctcttcttaaactaccagggaatctattgtctggctatcggagccccatctagcccaattctaagtaatatcgtgatgcacggctatgatgagtccatccttaaaatagtcacgaagattgaccccgatgctacatataccagatatgccgatgacattaccttctccagtaataagaaaagtcattgcctcaactttgccaaagaactgaacaagctgaccaaggacaaactgactccgtctctcaagctcaattccaagaagactattctgttgagcaaggcaaatcacaggatggtgactggccttgtgatcaccccccagggcaatgttagcgtagggcggcacaacaagaagtacataaaaaagttgctgaacgatctgaagtacgacaaaatctcacctattgcctttaagtaccttaaggggtactttgccttcgtacgagacgttgaacccaagtttgtgaactccctcactaacaaatatggtgcggcgctgataaacaaaataatcatttga

SEQ ID NO: 11918 - RNA, 915 nt, synthetic construct
  source 1..915: mol_type = other RNA
atgaagattattgagaagatcagcaacatttacgggctctccttcaatgagacaaaaaatttgatcaacaccgcccagaacaattatcggatttacaagattcccaagaaaactacaggcacacgaaccatctatcatccaagcaaacaggtcaaagcagtgcaatacatcctcatagacctgatactcaagaaactgcaggtgcataacgcagccgttggctacatcaaaggagtaaaggcaccaatcaaaagaaacgctgagcaacacgctaagtttccctattcaatcaggatagactttaagaacttctttagctccatcagcttttccgacctgaagaaagttttggaaaactctagcctggaactcagtctggatgactataaggtcctggagctagtactgttcaaaaacggtttgccaataggggctccttcatcccccctgatttctaatatcgtgatgttcgaactcgatgaattattagccagagaggccttgaaagtcgactccaatagtctttatacccggtacgcggacgatattgtgttctcaacaagcaagaagaatggatgcaaagattttctcaagaaactgaagagcgtcctgatcaattacaatcaccctaagttaacgatcaacagttcaaaaaccaagttcatgtctaggaagtctaaacgcatggtgactggcctcataattaccccgcagggcaaagtttccatcggacgtgaaaacaaggagttcattaagatgctgctttaccagtataacaagaagctgctgaatcccgagcaggtgtcttatctaactgggtacctgtcgtttattattgatgtggagcctgccttctttaatacgcttgtcatcaagtacggcgctgtggtgagtaaccttcttaaaaaaatctga

SEQ ID NO: 11919 - RNA, 942 nt, synthetic construct
  source 1..942: mol_type = other RNA
atgccagataaactgaacttagtgggcaaactgtcatttttcctgggcgcctcagaagaggatatcaagacttctgcgaattctatgagccggaaatataagcagtacaaaatccccaagaaaaatggaggtagccggactatcctgcacccttgcagacctctcaaagcactgcagtatgccatccacgaggtacttcttaataaattggaagtccatcctatagctcatgcttatgttcccaatcaaaagtctccgctgaagcagtccgctaaagcccacacgaactataagtacacaataaggattgacttcgagaatttctttcccagcatcaggccggaggacctggagctgcagatcaacaagaactttattctgtcaaagacagataagtacctgctgcgaaccgtgttattttaccagaagaacagaggaagcaggcccatcctaccaattggcgcaccaacctctcctactataagcaatattgtgatgttcaacctggacgagctcctattgaagacatcaaaagaacatgatcgggattccgccctcaccaggtacgccgacgatatctactttagtaccaacattaagggctgctgtaagcttttctatgacgagattttccaactcctaaaacgcattgacagtccccgcctgaagatcaatacaaacaaaacgttgttcctctccaaaggtactaagagagtggttaacgggcttttcgtgacccctaacggaaaggtcagtattgggcgtaagcgaaaaacacagatcaagagcctgatctacaaacactcccagaccgctcttatgggcaaggaattgctccagactcgcgggttgttagcattcattcaagactgtgagccagaattttataataccctcgccctgaaatacggggtccacttttattccataaaggaatcgtga

SEQ ID NO: 11920 - RNA, 930 nt, synthetic construct
  source 1..930: mol_type = other RNA
atgtcccggatcatcgatatcataagcaagtacactgggcttgacccgcacaaaatcctgaagattacctatgactcccccaccaactataagctttactacatcaagaagaagaacggagactcaagagcgatctttcacccatctaaagagacgaaaatgctgcagtatgcactcatggaaaaattccttaagaagattccagtccatgaatttgcaatggcctacaaaaaaggtattaaaagccccttgaaaaagaacgctttataccatctgaatactcagtataccctccacatcgattttactaacttcttcccctcaataattcctgaagatttttggagagctgtaagcgtggcctttcctggaaaagagttcgaaacaagtgacatcgaactcatcaataatatcctgttcatcaaggttaaggggaaatgcttcctgtcaattggcgctcctacttcaccaatcatcagcaacatagtcatgaaagagatggatgcccagtttttgaaactatgcaaaaccctggacgaatatagtgtgtatacacgttatgccgatgatattaacatctccacgaatattaagggtttctctcagaagatatactactcgataaagcaacacctcagcgagacagagtctccaaaactcaccattaatgagaagaaaacctacttcctgtctaagaaggggaatcggctgattacaggcctatgtatcacaaatatgaattccgtggttattccccgcaacaaaaagaggattatcaggagcttgattcatacagagctgacttccaacaaaaaggacaaaacccgactgagtaagatcaagggataccttgccttcattaaggacatcgagcctgacttttttaacaagctggtgataaagttcggcgacggcattaacgatttatga

SEQ ID NO: 11921 - RNA, 951 nt, synthetic construct
  source 1..951: mol_type = other RNA
atgtccatactgaagggcctcctcagcaagtacacctcattgtcgattgacaatatcagcaacatcatcaagaaggcccctgcgtcatacaagacttacagaatcgaaaaagccaatgggggctatagggaaattaaccatcccgctaaagagacaaagaccctgcagtacgccctcatggagatcattttcaaaaaaaacgacgtacacccaatcgctatggcctacaagagaggagttgagagtcctacattcgaaaatgcacggctgcataaggactacgaatattcactccggctggacttcaagaacttttttccttctatcaaacccgatgatataatctccatcgttaaggattcttccaaatacgagttcgatgacacagattattctgacctaaaaaggatctgtttccgcaagaatcacattaaagggtaccagtatggacttgcagtcggagccccaacaagtcccatcataagcaacatcgtgatgtatgactttgatgaggcaatggagaagatttctaaggaactggataaaagctcgaccgtgactcgttacgctgacgacattgtgtttagcactaacgaaaagggtatttgcgcgaaattttattccagcgtacgcgaccacctgaatgatcaggaccttagtttagagtttaatgaggaaaagacggcattcatgtccagagggaccaagaaagtcattaccggcctggtgatttctaataagggtaacgtgtctatcggatacgataaaaaagagaaggtgaagcgaaaagtttacaagtatagtaagggggatttagaagactcagacatacttagcttgaaaggctatctggcttatatccaagatgtcgatccggatttcttcgacaagctgaatattaaatacggcgccgacatattggacgatattatgtcctttgagaacgagtga

SEQ ID NO: 11922 - RNA, 942 nt, synthetic construct
  source 1..942: mol_type = other RNA
atgcacaagttgttcgacgccatgtatcatggaaaataccgctttgatgaatttttagctctctctcccgaggagaattactcccctgtacattggaaagctcgaaccatctacaaaccaagtaggactcttcgggattttcatacttttttgagtggctttgtgcttgagcagcttcccattaatactagcgtgtcatttgcatatcgcaaagggacgacactagctcaggcagttgcccctcatgcaaagtcgagagccttcttccaaacagacttggagcggtttttcgattccataacaacccccctcataagaaggatcttgatcgaaaaccagaccccggtcctcgatctgcaggctcacttggatcacatcctaaagctgctcaccatcgacgacaaactgccaataggatattctaccagccctctggtgagcaacgcctgcatgcacagcttcgaccagcggttagcacagatctcacatgataggggttggatttacactcgctacgctgacgatatcatgctgtctactcaggacagagccgatctgtctgatgcatccaccgtcataacaggctgtcttgcgacggaactcgggtacggcttcaacctcaaccctggcaagtcaaaactgaccaccattggacgcaaggtgaagctcctggggctggtgatcctgccaagtggggacattgcgattgacagagacgttagaaatcgaattgaaagctggatttacttctacctgagggacagggcccggctgtccaagattttcgaagagacatataaggacggcctcgaagagggcttggagcggctgtctggtctgatcagttatgctcacgccgccgatcccggatatctggagaagctgcgttcaaaattcggtactacagtcatcgatagcttacttcaccgttccgcccaatga

SEQ ID NO: 11923 - RNA, 957 nt, synthetic construct
  source 1..957: mol_type = other RNA
atgacaccacagcccttacacaagctcttcgatgctatgtaccatgggaagtatcgttttgacgaattcctggccctttcgccccgtgagaattactcccctgttagttggaagagcagaacaatctacaaaccgtctcgcatgcttcgcgattttcacactttcttgaacggatttgtgctggaacatcttccagtaaatacatcagtgagcttcgcttataggaagggtgcaactctgatccaagccgtggagccccatgcgaagtctcgagccttcttccaggctgacctggagcggttttttgatagtatcaccacccctctgattaggagggtgctcctggagtccgaaaccccggtagcagacttgcatgatcacctcgaccacatccttgggctcctgaccattgatgggaagcttccaataggatatagtaccagccctattgtcagcaacgcatgcctgttgtcattcgaccatagactggcccaggttagccaggaccgaggctggatatataccaggtacgccgacgacatcatgctctccactgaggatcgcgctaatctgagtaatgcaggggctgtgattgagacgtgtctggcgtccgaactgggtgatgaatttaagctaaaccctgccaagtcaaagctgactacagtcggacgaaaagtgaaactgctcggtctagttattctcccaaccggcgacattgctattgatcgggacgtgagaaacaggatcgaggcctggatccacttctacttacgggatcgggcacgcctgctcaaaatattcgaggaaacttactctcagggcatggaggaaggcttagagcgcctaagcggcatgatctcatatacgcacgccgccgaccccgcgtacttggaaaaattgcggagaaaatttggaacaacagtcatcgattccctgctgcacagatctgcccaatga

SEQ ID NO: 11924 - RNA, 957 nt, synthetic construct
  source 1..957: mol_type = other RNA
atgacgccacagcctctccacaaactgttcgatgcaatgtttcatggcaaatacagattcgaagagttccttgccctgacacctgaagagaactgcagccaggtgagatggaagtcacggactatttataagccttcaagtactctgaaggatttccacgtgttcctgagtcgcgtggcattggaccacctactcgtagacacctctgttagcttcgcctatcgtaagggggctactctcatacaggccgtcgctccgcatgcgaaatctcgggccttctttcagacagacctcgagcggttttttgattctatcacaacaccccttatccgacgcgtcctcgtcgagaatgaaactcctgttaccgatttgctggaccatttggatcatattctgcgtctccttacgatcgatggtaaactgcccattggctactccactagtcccatcgtgtcaaacgcctgtctgctgagcttcgatcagagattggccaagatttcagacgaccgagggtggatctataccagatacgcagatgacatcatgctgtctacccaggatagggcagacctttccgatgcgggagccgtggtagaagactgcctggccagtgaactaggagacggttttaacttaaaccaagccaagagcaagctgaccaccattgggaggaaggttaaactcctaggccttgtgatcctgccaagcggagacatagcaatcgatagggatgtcaggaataggatagagtcctggattcacttttatctgcgcgacagagctaaactccttaagattttcgaggagacaccaaatcaggggatggaggagggactggaacggctcagcggcttggtgtcgtacgctcacgctgctgaccccgcgtacttagacaaactgcgctccaagtttggcaccacagtgatcgactctctgttacaccggtccgcccaatga

SEQ ID NO: 11925 - RNA, 957 nt, synthetic construct
  source 1..957: mol_type = other RNA
atgactccacagcctctacataaactgttcgacgctatgttccacgggaaatacgggtttgaagacttcttggccatctccgccgaggagaaccactcacttgtgaggtggaagtcgcgaaccatttataaaccttcttccactctgaaagatttccatgtttttctgtctcgcgtcgttttagatcacctgcccgtggacgcatccgtatctttcgcttacagaaggggcgcaagcctgatacaggccgtggagccacatgcaaagagtcgcgcttttttccaggccgacctggagcgcttcttcgatagtatcacgacaccacttataaggaaggtgctcgtcgaatcacagacccccgtgaccgatctccatgaccacttagagcacattctgaagctcctgacagttgaaggtaaactgccaatcggttttagcaccagtcccattctctcaaatgcctgcctcctgtccttcgaccagcggctagcccaaatatcacatgataggggctggatctacactcgttatgctgatgatataatgctgagcacgctggaccgctctaagcttagcgatgcgggaacagtaatcgaagactgtctctccgcagagattggagacgagtttaagctgaacccggccaagagcaagctgaccactatcgggagaaaagtgaaacacttgggcctggtgattctgccttccggggacgtcgccattgatcgtgatgtccggaaccgaatcgaatcttggattcacttttatcttagggacagagctaagttgctccggatctttgaggagacacctaatcaaggcatggaagagggattggaaagactatcgggccttgtgtcttacgcgcacactgcagaccccacctatttagacaagttgcggagcaagtttggaaccacagtcatcgatagcctcctgcatagaagtgctaaatga

SEQ ID NO: 11926 - RNA, 957 nt, synthetic construct
  source 1..957: mol_type = other RNA
atgactccgcagccgctccagaaactcttcgacgcaatgtttcacgggaaatatcgttttgacgaatttcttacgctgagtcccgaggataattatgtgcctgtccgctggaagacccggacaatttacaaagccagccgaactctgaaagattttcacaccttcttatcctctttcgtgctcgagcatttaccttccgacaccagcgtgtcattcgcttatcgcaagggcgccgctttgatgcaggccgtagagccccatgcaaagtcaagagcattctttcaagccgacttggagcgattcttcgactcgataacagccccactcatccggaaagtgctgaccgaaaatcagacaccagcagctgaccttcaggaacacttggagcatgttctgaacctactgacaattgacggcaagctgcctattggatactctacttcaccactgctcagtaacgcgtgcctgctgccatttgaccggcgcctggcacaagtctccctggaaagaggttggatttacaccagatacgccgatgatattatgctctccacgcagcacaggactgatcttagcgaagctaaaaccgtgatcgaagagtgtttggccacagagttgggagcaggtttcaacctcaaccccgcgaagtcaaagcttacgaccattgggagaaaggttaagctgctgggcctggtaatactgcccaccggtcacatcacaatcgacagggctgtccgtagccggatcgagagcggcatccatttctacctatctgacagggctcgccttggcaggatatttgaacgagagaatgatgaggggatggaagaggggttagaaagactgagcggactgatctcctatgctaatgccgcggatcctgcctacctcgagaagcttcgccggaaatttggaactactgtgatcgattctttcctacacaggagtgcccagtga

SEQ ID NO: 11927 - RNA, 957 nt, synthetic construct
  source 1..957: mol_type = other RNA
atgacaccccagcctctgaggaagctgtttgacgctatgtatcatgggaaatataggttcgaggagttcctggctctttctcctgaagaaaactattctccagttcactggaaaaaccgcaccatatacaaacctagtagagcgctcaaagatttccacttatttctgaatggattcgtgctcgaacaccttccagtaaatacctctgtaagcttcgcttacagaaagggtaccacccttttacaggccgtcgagccccacgcaaagtccagagcctttttccagacggacctcgaacgattctttgactccatcacaacaccccttgtgcaaaaagcattggccgaaaatgagactccagtcgccgacctgtcagaccatttggatcatattctgaagctgcttactatcgatggccagctcccgattggctacagtacttcaccaattttgagcaatgcttgtctactgagcttcgaccaacggctagcccagattagcgcggagagaggttgggtctacactcgttatgccgatgatatcatgctgtcgacacaggaccgagccgagctcctcgatgctcggacggtgatcgaagactgcctgaccactgaactgggtgatggctttaacttgaaccctgcaaagtcaaagctgaccaccactgggcgcaaaattaagctgctcggactggtgatcctgcccaccggaaaaatagccatcgaccgggacgtgcggaacaggatcgaatcatggatctacttctacctgagggatcgctccagactctcccgcatatttgaggagacatacgacgagggaatggaagagggcttagagaggctaggcgggcttgtgagttatgcatacgcatccgatcacgcttatctcgagaagctgcgccgtaagtttgggacgacagttattgatagctttttgcgacggtctgcccagtga

SEQ ID NO: 11928 - RNA, 957 nt, synthetic construct
  source 1..957: mol_type = other RNA
atgacacctaggccacttcagcaactttttgacgccatgtaccacggtaagtatagattcgaggaatttctggccctgaagccgcaggagcactactcactgataaggtggaaaactcgcactatctacaagccaagcaaaaccctgaaagactttcacttctttttaaacggtttcgtcctagaacacctgcctgtggatacgagcgtaagtttcgcttatcggaaagggtctaccttgatgcaagcggtggaaccccattcccgaagccgggctttcttccagaccgacctagagagattcttcgactctatcacgactccattgatccagggagtgttgcagagaaatcagagccctgtggctgatctcgccgaccatttacatcatgtgctgggcctgctgacaatcgatgggaagctgcccattggttacagcacctcacctttactctccaacgcatgcctgcttggcttcgaccagaggctcgcggccatttctcagacacgcgagtggatttacacccgctacgccgacgatattatcgtctctgccaacgatcgtgctaccatagcagatgctagtgctgtaattgaagagtgtttggccagtgagctgggggacggatttaacctgaataagggcaaatccaagttgacaactattggacggaagatcaaactcctcggacttgttatcctccccaccggcgccatcgttatcgatagggatgtgagaaatcggattgagagctggatacacttttatatccgtgaccggagtcgactggcgaaaatattcgaggaggaacgcggagaaggcatggaagagggccttgggaggctctcgggcctcatttcatacgcctatgcagcagatcccggttattttgaaaagctgcgatcaaagtttgggacaactgtcatcgactccctactgcacagatccgcacaatga

SEQ ID NO: 11929 - RNA, 921 nt, synthetic construct
  source 1..921: mol_type = other RNA
atgtatcacgacaagtacagattcgaagagttccttacgctgtatgcaggagatcattatagccaagtgctgtggaagaatcgtacaatatacaaaccatctgccaaactgaaggactttcaccattttatcggcggattcctcctggaacacctccctgttgaccagagcgtctcttttgcctacagaaaaggcgcaacacttcttcaggccgtccaaccccattccaggagccgtgcgttttatcagacagatctggaaaggttcttcgactcaattaccaacaacttgatccggtccgttcttgagcaagccgccacgccagtgtctgacctttcagaccatttggaccacattttgtcactgttaactatcgatggccgcctgcctattgggtacagcactagtcccatactctcaaatgcctgcctgtatggctttgataagaggctggcggccatcagtcacgaaaggggatggatctacactagatacgcggacgatataatcgtatcggccgctgaccgactcgctattgaggatgctcctcaggtaattgaagactgtctagggaccgagctcggcgacggcttcaagttaaacagttccaaaagcaagctcaccaccattgggcgcaaaattaagttgctcggtctggtgatactcccgacaggggcaattgtgatcgatcgggaggtgagacacaggatcgaagcttggttgcacttttacgtgagcgatagaccacgcctagcaaagatctttcaggaggagcggaaagagggtctggaggaagggttacagcggctgtccggactgatcggatatgcccatgctgccgatcccctgtacctggagaaactacgagctaagttcggtaataccgtcatcgattctttcctgcggcgctccgcacagtga

SEQ ID NO: 11930 - RNA, 921 nt, synthetic construct
  source 1..921: mol_type = other RNA
atgtaccacgagaaatatcggtttgaacagtttctagagctcaaacccgaggagcactacagtagtgtgctctggaagaataggacaatctacaagccaagcagtattctgagagagttccactacttcttgaacggattcttgttggaacacctgcccgtcgatacagtagtatccttcgcgtatcgtaagggagctactctgttgcaggcggttgagccacatgccaactctagagcattttatcagacggatttggaacgcttttttgacagcattacctcagatctcatccgaagtgtgctttctaggtatgaaacacctgtttctgacctgtctgactatatcgaccatataatcggtctgctgaccatcaatggctcactgccaatcggctactcgactagccccatcctctccaacgcttgcttactgggcttcgataaacgacttgccgcaatttcggacgaacggaaatgggtgtacactaggtatgctgacgacattattatcagcgccgacgatcgtttatcaattaaagacgctgatcaagtcataaaggagtgtctcaaactcgaattcggcgatggttttagcctgaatgagtccaaatcaaagcttaccacaatcgggagaaagattaagatcctgggcttcaacatcctgccgaccggggccatttctatcgagcgcggagtcagaaatcggatagagagctttctctacttctatgtgaaggataggcctaagctagcccgcattttcgaggaggaacagggtgactccatggaagatgggcttctgcggctttccgggctgatcagctacgtgtacgcagccgaccctgcatacctgaaaaaattacgcgttaagtttggcaacaccgtgattgatggattcctgcatagatccataaagtga

SEQ ID NO: 11931 - RNA, 957 nt, synthetic construct
  source 1..957: mol_type = other RNA
atgactcctcagccactcgagcagctgttcgatagcatgtttcatggcaaatacaggttcatcgagtttatggaacttaaacccgagcaacaccgtgtgcgggtcagctggaagggcagaacaatctacaagcctacaggcgtgctcaaagccttccataggtttttgaaccactatgttctcgatcatctacaggtggatgaaactgtctcttttgcttaccgccggggcaccacattactccaagcggtagagccccacgcccattcccgagcattctttcaaacagatttagagcgtttctttgacagcattaccaccgaccacatccgaacggccctggaaactagcgatatccctgtggaagatctgggtcagcacctgggacatatcctcgagctgcttaccatagacggcaagttaccaatcggatacagcacttctcccattctgagtaatgcatgtctcctgggttttgacagtagactgaagtctcagtcacgcgatcgcggctgggtttacacacggtatgcagacgacataatcctgtcagctgccgacagagagtccttggccgacgccgtggctgttgtggaagattgcctgtccagtgagctaggtgatggattcgcactgaacccgaccaagtctaagcttacgaccattgggaggaaggtaaaattgcttggaagggtcattgtgccaaccggggtcattgttattgaccgagaggtgagaaatcgcatcgagtcatatctgcacttctacatcactgaccagtccaaattggctaggatatttcgcgaagatcgggaagaggaatgggaggatgggcttcagtcattgagtgggctgattagctatgtgcacgtagcggacgtggcttatctcgacaagctgcgggccaaattcggagccacagtcatagactccttcctgcacagatcggcaaagtga

SEQ ID NO: 11932 - RNA, 957 nt, synthetic construct
  source 1..957: mol_type = other RNA
atgacacctcgacccctgcatcagttgtttgatgctatgttccacggcaaatatcagtttgatgagtttttggccttaaagccagaggagcaccgaacacgcgtcagttggaagggacgtacaattcacaaacccagcggcatactcaagaattttcacaggttcttgcactcattcgttctggaacatttactggtcgatgagaaagtttcgtttgcctatagaaagggtaccaccctgttgcaagcagtcgagccacacgcgcagtccagggctttcttccaaactgaccttgaaagatttttcgactcaatcacctccgacctcgtgcgaaacgtgctcaaacaggcagaggtggctgttggcgacctggatgaccacctggaacacatactggcccttctaacgattgacggaaagctgccgatcggatattctaccagccctattctgtctaacgcgtgcctgtctgggttcgacgctaggcttagtagtataagcatcgacagagactggatatacacgcgctacgcagacgatatcatcatttccgccgacgatcggacagccctgatcgatgccgcagcagtgatcgaggaatgtctggctagcgaactaggggagggcttcactctcaaccttgcgaagagcaagctcacaactgtgggtcgcaaagtgaaggtcctcgggcgggttatcctgcctactgggaccatcgtgattgatagagaagtccgcaatcggatcgaatcctggctacatttttacaccagtgatcgcccacgtctcgccaaaatttttagagaggaacggaatgaggagtgggaagaaggcttggagcggttatccggacttgtatcatatgtacatgtggccgatccctcttacctggagaagctgagggctaaattcggtaccactgtgattgactcagtgctccataggagcgccaagtga

SEQ ID NO: 11933 - RNA, 957 nt, synthetic construct
  source 1..957: mol_type = other RNA
atgaatcctcagcctttgcatcagctctttgatgccatgtatcacgacaaatatcgttttgacgaattcctggcgctgaaaccagaggagcattatagccccattccatggaaaagtcgcacgatctacaagccctcgcccactctgaaagacttccacaagttcattacaggcttcctcctggactatctgccagtcaacgattctgtgagctttgcatacaggaaaggggcctcattgcttcaggccgtgactccgcatgcttacagtcgcgcctttttccagacagatctagagagatttttcgaatctatcaccagctccctcattcgaagagtgctggaccaagcgtccacccctgtcgctgacttggcagagcatgttgaacacattgttcgcctcctcaccatagaaggcgcgctgccaatcgggtacagcacgtcccctatcttaagcaacgcctgcctcctggggttcgatgcacggcttgctgccacctcatgcgcccgaaattggatctataccaggtatgcagatgacataatcatatccgctggctcacgcgctgccattaacgatgtgggacaagtcgtggaagaatgtcttcgggccgaactgggtgattctttcagattaaatcaggataagaccaagctgactaccatcggacgtaaagtaaagctgctgggattcgtggtgcttcccactggtggcattgtcgttgacaggaacgtcagagatagggtagagacattactctacttttacgtgacagacagaagtaggttggctaagatttttgctgaggaaaatgatgaggtgatggaggcaggcctggagcggctgtctgggttgatctcatacgtgcacagtgttgacgaggcctaccttgagaagatgcgaatcaagttcggaagcactgtaatagactcctttctacacaagacagcacggtga

SEQ ID NO: 11934 - RNA, 957 nt, synthetic construct
  source 1..957: mol_type = other RNA
atgacgccacgcccactgcgccagctctttgatgccatgtaccacggcaaatataggttcgaagagtttcttgagctgcgccctcaggaacactacaatatagtccggtggaatagtaggaccatttataagccttctaaaaagttgaaggcgttccactacttcctgaacggcttcctgctggagtatttaccagtgaaccagtcggtgagcttcgcttaccggaaaggcgccacgctgcaacaagctgttgccccccacgccaggtcaagagccttttatcagacagaccttcagcgattctttgattcaataaccagcgatctgattcgttccactctagaaggagcgtcaactcctgcttctgacttgccagagcatattgaccacatcctcgaccttcttaccatcaacggaaagctccccattggctatagcacttctcctatactgagtaatgcatgtctcctgaggttcgacgagcggctggcagccatttccaaggatcgtcagtggatttataccagatacgctgacgatatcatcatttcagccgatgataggaagaccattggtgacgccaaggaactgatagagagttgcctggctgcggaactcggaggtaacttcgcacttaacccctctaagagcaagttaacaacaattgggagaaaagtaaagcttctggggctggttatcttgccgaatggtgccgtcgctatcgaccgagatatcagaaatcggatcgagactctgctccatttttatatctccgatcggagcagattggcaaaaatctttgaggaggagcgatccgaaggcatggaagaggggctacagcgcctctccggactagtgagctacacatacgcagccgaccccttatacctggaaaaattgcgcgctaaatttggggccaccgtgatcgacagtctcctgcataggtctgcagagtga

SEQ ID NO: 11935 - RNA, 957 nt, synthetic construct
  source 1..957: mol_type = other RNA
atgacaccgcggccccttcatcaactgttcgacgcaatgtatcacgggaagtatcgctttgaagagttcagcgagctgaacccccgggagcactacacttctgttcagtggaataatcggaccatttacaaaccttcgaagaaactaaaggattttcactcattccttaacgggttcctgctggagttcctgcccgtcaaccagagtgttagttttgcctataggaagggagccacgctattacaggcagttatgcctcatagccggagcagagctttctacaggaccgatctggagcgattctttgacagcattaccagcggccttgtgaggtcagcgctggaaagggctgtcaccccaatcagcgatttggcggaacacattgaccacttactcgatctcctgactattaatggaaagctccctatcgggtattctacatcgccaatcctctccaatgcctgcctgctcggctttgacgaaagattggcatccatctcccgagaacgccagtggatctacactagatatgccgatgacattatcataagcgcagatgataggagtgccatagaggccgcctccgacgtgattaaatcatgtctatcaaccgagctgggcgatgaatttgctctgaacagttccaaaagtaagttcactacgatagggcgtaaggtaaaactgttaggtcttgtgatcctgccaaatggaaccatagctatcgatcgcgacgtgcgtaacagagtcgagagctggttgcatttttacgtgtctgaccggtctagactggctaagatttttgaagaggagcgatctgagggcatggaagaaggattgcaacgcctctcaggtcttatctcctacgtgtacgctacagaccccagatatctggagaagttgcgcgcaaaattcggcacaacagtaatcgactccttcctccataggtctgcccagtga

SEQ ID NO: 11936 - RNA, 957 nt, synthetic construct
  source 1..957: mol_type = other RNA
atgaatccaaggccgctgcaccaattatttgacgccatgtatcatggaaagtacaggtttgaagagtttctagccttgaatcctgaggaacactacacgccggttccctggaatcggagaacaatatataagcctagtccaacacttaaggaatttcaccggtttctcagcgacttcctgcttgattaccttccagtggaccagtctgtatcattcgcctatagaaagggagccactctcctgcaggccgtgacaccccacgcacatagtcgcgccttcttccagactgatctggagcgttttttcgattccattaccctgaacttaatccgacccgttctcaaccgggcggcacatcctgtgtcagatctgcctaaacatatcgaacacatcctgaggctcctgaccatcaacgggaaattacctataggttatagtacttccccaatactttcaaatgcctgcttgtttggcttcgataaaaggctcaccgtgatcagcaacgagagacattggatttacactaggtatgctgacgacatcatcatttccgcaggggatcggctcgctatcgaggatgctagctctgtcattgagaactgtctatcagcagaactcgggaagggctttgtcctgaaccagagcaaatccaaattgaccaccattggacggaaagtgaaattgctgggtctggtcattcttcccacaggagccatcactattgaccgtgacgtgcgaaataagatggaatcgtggttgtacttctacgtaacagaccgcagccgcctagcgaagatattccaggaagagcgcaacgagagcatggaggttggcctgcaaagactctctggcttcatctcttacgcttacaccgctgaccccgcatatctggagaagctgagaaccaagtttggcaatacgatcattgatagtttcctgcaccgatccgctcagtga

SEQ ID NO: 11937 - RNA, 957 nt, synthetic construct
  source 1..957: mol_type = other RNA
atgacaccccgtcctctccaccagcttttcgatgccatgtaccacgaaaagtacagatttgaagagtttctggccttaaagcctcaggagcattacagcccagtttcttggaacagacggaccatatataagccttcaccaaaacttaaggaatttcaccacttcttgtctggcttccttctcgagtttctacccgtggacaggagtgtctccttcgcttacagaaagggcgccaccttgctgcaagcggttgctccccacgctcaatcccgcgcattttttcagacggatcttgaacggttctttgactcaatcacttctgatctcattaggtccgttctggaccaggcagagactccggtatcagacttgggcgaccatgtggaacacatcctcgacctgctgacaatcgacggaacgctccccattggatacagcacatcacctgtgttgtccaatgcttgcctgtttggttttgataagaaactggcggccatctgtcatagtcgtcagtggatctacactcggtatgctgatgatatcattatatccgccgacgatcggctgagtatcgaggatgccgaccaagtcattgaaaattgcttggtcgccgaactcggcggaggtttcaaattaaaccagaagaaatcgaagctgactaccgtaggcaggaaggtgaaactcctagggctggtgattcttccaaccggggtgatcgtcatagatcgcgagattaggaatagaattgagacatggctgtacttctatatcaaagatcgatctcgcctcagtaaaatcttccaggaggatcgaggggagggtattgaagaggggctgcagagactgagcggcctgatttcttatgctagcgccgcagacccaatctatctggacaaactaagggcaaagttcggaaacaccgtgatagacagcttcttacatcgcagcgcacagtga

SEQ ID NO: 11938 - RNA, 957 nt, synthetic construct
  source 1..957: mol_type = other RNA
atgactccgcgcccactgcgacagctatttgatgcaatgtatcacgagaagtaccgcttcgaggaatttctggccctgaagcctgctgaacactatagcccagtccattggaatagacgaacaatctacaaacccagctcgaagttaaaagaattccatcgattcctaaacggcttcctcttggattatctacaggtcaacgaaagcgtgtcttttgcatacaggaaacggacgtccttgctgcaggcggtagcccctcacgctcattcacgtgccttctttcaaaccgaccttgagcgcttcttcgactctattaccagcaacctgattaggtctgtgctggagagagccgatacacccatagcagatcttgctgactacatagaccatatactggatttgctgaccatcgacggtaagctgcccattggatatagtacttcccccattctctctaatgcctgtctcctgggctttgacaaacaacttgccgccctgagcgccgaaaggcagtggatctatacaagatacgctgacgatgtgattatctccgctaacgacagggcgtctatcgaagacgcgagtcaggttatcgaaaattgcctcgcaatcgagttaggggacggttttaagctcaatcagaagaagagtcggcttacctccattggcaggaaagttaaactcttgggactcgtgatactgccaaccggcgcaatcgtcctcgatagagacgtgaaaaaccggatcgagacgtggctgcacttctacgtgacagatcgggctcggctggcaaagatctttcaggaggagaagaatgaggggattgatgaagggctgcaacgtttatccggcctgatttcatacgccttctcagctgatcctgcctatttggagaagcttagagccaagtgcggaagtactgtaatcgacagctttctgcaccgctcagctaaatga

SEQ ID NO: 11939 - RNA, 957 nt, synthetic construct
  source 1..957: mol_type = other RNA
atgaccccacgacccctgcatcagttcttcgacgccatgtaccacgggaaataccagttcgaagatttccttgaactagaacccaaggagcattatactcccgtgcctctttccggccgcaccatatacaagcctagcaaggtgctcaaagagtttcacacttttttgaacggatttgttctggtccatctgccggtgaatactacagtgagtttcgcctatagaaagggcgtgagcttgctagaggccgttaccccccatgctgactcacgggctttttatcaaacggatattcagcacttctttgaatccataaacgtgaagctgatcaaatccgctctcataaaagcagacaccccagtaacagatctcaacgatttttttgaccacattctggatctgatcacagtggacgggtctttacctataggatactctacctctcctatcctctcgaatgcctgccttcacgggtttgacgagcgtcttgcctacatctcctacaagaatgaatggatctatacgcgatatgcagatgacatcattatttcaggcgcggataggaaaagtgtccagaacgctcagagcgagatcaaaaactgtctgctcgaggagctgggtgagggtttcaagctcaacctgaataagagcaagttgaccacagttggcagaaaagtgaagatcctgggtctggtcattttgccaaatggagacatttccattgatagaagtgtccgggacaaaatcgaagcaaggttattcttctacatcaacgatcggaagaagcttgcgaaaatttttgtcgaggaaaaaaatgacggcatggaagacggcttgcaacgcctgtctgggctcatcgggtacgtacacacaatcgacccactgtatctggagaagttaaggatgaagttcggaactactgtgattgattcattcctgcatcgcagcgcccagtga

SEQ ID NO: 11940 - RNA, 1026 nt, synthetic construct
  source 1..1026: mol_type = other RNA
atgcctgacctgaaagcctcctgtcgggttggccattttgtgtgcgcgccaatctccaccatgactgatccctccgtatcagtcaaggcacggtctttagagtacctgtttgaaatgatgcaccacggtaggcacagtttcgacgatttcctgcgtctcccggtcgataaacatttccagagagtggattggcgcaccagaacaatatacaagccttctaaaactctcagggcttttcatagcttcctcaatgtgtttgttttggggtatctccccgtgaacgaacgcgtctgcttcgcctatcggaaaggcgctacactgaccgatgcagtcgctgttcacgctgaaagtcgggcatttttccagacggatttggccaagtttttcgacagtattacatcccaaatggtgcacgatgcacttgcccgtgcgtcaacccccgctgaagaccttccacagttcatagaccgaatcgtcgagttgactaccatcgatgagcgcttagccataggctttagcacgagccctctgcttagcaattcatgcctgattgccttcgacaatatgttggaggatgtgtgtcgggatagacaactcatttatagtcgctacgccgacgacattgtggtgtcaggacagtcccccgacaagctggacggaattgaaaggctaatcgcgcagctgctagacaaggctctggggccgactttccaaatcaacactgcaaaaagcaggatgctccgtgttggtagaaaggtaaagatactgggcttgaacatcctgccatctggccgcattaccgtggatcgggagattcgcgacaaggtagagacacagctacacttttatctgaccgacagggcccgacttatgcgaatcatcgacgccgaacctgatgaggcattacagaagctgtcggggtacattgggcacatccattctgccgatccactgtaccttgagaaactgaggagaaaattcggagccacagtgatcgacagctttctccatagatctgctcagtga

SEQ ID NO: 11941 - RNA, 987 nt, synthetic construct
  source 1..987: mol_type = other RNA
atgaccaagaagcccttgcagatcctctttgatgccatgtatcacaacaagcaaaatttcgaggacttcgccaatggagacatagcatcccatttctctcggaagcctgtcactgatgactctgggaaaacgcgcgtcgttagcgtgcccgataaagttctgcggaaatatcattcctttctgaatctcttcgtgtttaatcagctccccgtgaatgaagaggttgtattcagttaccggaaaggtacgaatgtggccgccgctgtacagaaacacgcagcgagcaagcatttctatcaggcggactttagtaactttttcgagagcatcacaagcgacatcgtgagacactctatcttacgcggcgaagataagatccccgtggccgacatccaccaatatctggaccgaatagtggacctggtcaccttcgaggggagactcccacagggcttctctacctcacctgtcatctcaaacacagctctgctgccatttgacaaggacctggctacatactgtcaaaacaaacatttggtgtataccagatactccgatgatattaccatatcctccaatgacaaggagccgctgtttgagcttgatcacgtcattgccgaaattcttagttcttgcggctacagtgaaatgaagctgaatgaaaacaagaccaagataagctcaaagggaaggaaaattaaaatcctgggcatggtaatcctaccaaacgggcaggtgtcgcttgatgctaagattaaaaacaggatcgagactttgctccatctgtacgtgaacaaccagcagggattgtcagatattacagaaagcgacctagaggacggcctcgcaaaattatccggactgctgaattatgccaacactgtggatcaaggttacttagacaagcttcgtaggaagtacggggttacagtggtcgatattctcattcaccagcctaagaagactgatgctaaaaaagcagactga

SEQ ID NO: 11942 - RNA, 987 nt, synthetic construct
  source 1..987: mol_type = other RNA
atgaccaagaagtcactgcaaacactatttaacgctatgtaccataacaagcagaatttcgaggatttcgcgactggcgaaataaagcagcacttcagtaaaatgcctgtaactgatgctagcgacaaggccagactggtgttcattcccgacaaggttctgcgaaagtaccacagctttctgaatctgtttgtctttaaccgtctgccggtatataatgacgccgtcttttcatatcggaaaggaacaaacgctgccgcggctgtccgaaaacatagtgcatccaagcatttctatcaggctgactttagcaacttcttcgggtccattacgtctgatatcgtgagacgctcaatactgcacggagcagagcaattaccagtcgccgatcttcatcagtaccttgaccgtataatcgacatggtgacggtggagggcagactcccccttgggttttcaacctcacctgtgatttccaatactgcacttttgcccttcgacgaagatctcgccatatactgcagaaggaggcagttagtctacacacgctacagcgacgacattacaatcagttccaatgaacgggagagcttgctcgagttagacgacgcaatttctgatatcctcagcagtcgggggtacagcgaaatcaagctgaacgagaagaaaaccaagatctcgtccaaaggtaggaaggttaagatcttgggtatggtgattttgcctaatgggcaggtttccctggatgccaaaatcaagaacaggatcgaaacactgttgcacctttatgtaaacaatcaaccaggactctctgacgttactaaatctgacctgggcgattccttcgagaaactatctggcctgctcaattatgccaacactgtggatcagacctacctggataaactgcgccggaaatatggcgtgaccgtggtggatattctcatccaccagaacaagaaaaccgattctaagaaagccagttga

SEQ ID NO: 11943 - RNA, 987 nt, synthetic construct
  source 1..987: mol_type = other RNA
atgacaaagaagcccctgagagtactctttgatgcaatgtaccacaataaacagaacttcgatgacttcgccaccggggagattgacaggcattttactaagaagaccattaaggatgatgctgggaaagagcgattagtttttattactgatcgcaccctgaggaaataccatagctttctcaatctgttcatattcaaccggctccccgtgaacgaaggcgtggtgttctcctaccggaagggaacgaatgctgccgccgctgtaagaatgcacgcgggtagcaaacacttttatcaggccgacttcagcaacttctttggtagcatcacaagcgatatcgtccgacaaatcatcataaacggcgaggacgtcctgcctatcgcagacactaaccagtatcttgatcgtattgttgacctggtcaccgtggacgggcggttgcctatgggctactccacttcaccggtcatctcaaatgctgcactgttactcttcgacaaagaattggcgcggtattgtcaatctaagcagcttgtctatacaaggtactctgacgacattattatttcctctgatgaaaaggagccactcatggatatgagtcaggtgatcgccgacacgctgtcagactgcgattattatgacctgaggctgaatgaggagaagaccaagatttccagtaaaggacgcaaagttaagatcctaggcatggtaatcttgccaaacggacaggtgtcgctagacgccaagatgaagaatcgcatagaaacactgctccatctgtacgtgaataatcaagacagactttccgacgccaccaaaatcgattttgaagactcagtggtgcagctttctgggctcttgaactacgcaaacacaatcgaccaggattatctggataagctgagacgtaaatacggcgtgactgttgtggatatattaattcaccagcccaaaaaaaccgatagtaaaaaggctgagtga

SEQ ID NO: 11944 - RNA, 987 nt, synthetic construct
  source 1..987: mol_type = other RNA
atgactaaaaaacccctgcacgtactctttgatgcgatgtaccataataagcagaactttgaagactttgccgccggccaaatcagtcatagactttcaagcaagacagttactaatgagtccggcaagactcgattgatatgtattccagacaaggtcctgcgtaaataccactcattcctgaacttattcgtgttcaatagactacccattaatgaagaggttgttttctcctatagaaagggaacgaatgtagccgcggccgtcaggaagcattcagctggaaaacacttctaccaggcagacatttctaattttttcgggagtatcacctctgacatcgtgaggcggagcatattgcgtggcgaggagcaacttcctgtcgctgatatgcaccggtacctggacaggatcgtcgacttggtgaccgtcgaagggcgcctgccacaaggattttccacctcccctgtgattagcaatacagctatgttccctttcgataaagagctcgtaacctactgcctgaaaaggcagcttgtgtatacccgatactccgatgacattacaatatcgagtcaggaaaaagagccactcttagacttagacagagtcatcgccgatatcctgtgtgattgcgcctatcccgaaatgaagctgaacgagaacaagacgaagataagctctaagggtcggaaagtgaaaatcttgggcatggtgattttgcccaacggacaggtgtctctggactctaagatcaagaatcggatcgaaacactcctgtacctgtacgtgaacaatcagccggggctgtcagacattactaaaagtgatctaggtgacagctttgagaagctcagcggtcttctgaactatgcaaacacagttgatggcaactatctggataagctccgccgcaaatatggcgtgaccgtggttgatgtgctcatccaccagcctaagaagactggggctaaaaaggcaaactga

SEQ ID NO: 11945 - RNA, 984 nt, synthetic construct
  source 1..984: mol_type = other RNA
atgaccaagaaacctttgcagatcttatttgacgccatgtaccacaacaaacaagattttgccgatttcgccacaggcgacatcataaggagagttagctcgaaaaccgtgacaaacgacagcaccaaggagcggctcgtgttcgtgccagacaaggtactcaagaaatatcactcattcctgaaccttttcgtcttcaactacctaccaattaatgaggatgtcgtgtttagttatcgcaagggtactaatgttaccgccgctgttcgaaaacatcgcaacagcaaacatttctaccagaccgatatttccaattttttcgattctatcaccgtggatatcgtgcgcaggtgtattttgcggggagaggaacagacccccgtatctgacatgggagaatttattgaccggatagtagaactggtcacaatggagggcaagctccctctggggtttgcaacctcccccgctattagcaatactgcactacttccttttgatgattctctggccgcttattgcagccataagaacctggtttacacgaggtatagtgacgatataactatcagttcctccgagaaggaacccttgttcgcactggacgacgcgctgagggacatcctctctgcccacgggtttccgaatatgcagtttaatgagcataagacaaagatttcctcgacaggtcgtaagatcaaaattctgggcatggtgatccttcccaacgggcaggtgactctggactcaaaaataaagaatcgaatcgagacactcttgcacctttacgtcaacaaccaaagcgcgctcttcgatctcaccaaatccgatttagacggctcatacgaaactctgagtgggttcttaaactacgctaatactgtggaccagagctatctggacaaactgagaagaaaatatggagtcacggtgattgatacactgatccaccagccaaagaagtctgagtcaagaaagggctga

SEQ ID NO: 11946 - RNA, 987 nt, synthetic construct
  source 1..987: mol_type = other RNA
atgaccaagaaacccttacagtttttgttcgacgctatgtatcacaataagcaatcttttgcagatttcgccacaggcgatattggccgccacctgagcgccaggcaaattaccgacgatgctggaaagaagagagatgtttttgttcctgacaaagtgctgcggaagtaccacagttttctcaatctcttcgtgttcaactatttgtccgtcaacactgcggtggtattctcatatcggaaaggaaccaatgctgctgatgcggtcagatctcacgcctccagccgacatttctaccaagccgatatctcatccttctttccatcaataacagcagacattgtgcggagaagcatccttagggacgaagctcagacacctgtggaggatctgggggactacctcgaccggatcatagacctggttacaattgatggtaccctgcccatcggtttcagcaccagtccggtaatatctaacaccgcactgctgccatttgacgatgcctttgcagcccattgtcttaggaacggcctgatttacacccgctacagcgatgatatcacagtgtcgtctcaggagaaggcccccctactggcccttgacgcagtgattcaggacctcttatgccgctgcaacttgccagaaatgaggctgaacgagcgtaagacgaaaatctcctccactggaagaaagatcaagatcctgggcatggtggtgcttcccaatggggtcgtcacactcgacgctaaagtaaagaatcgcattgagactctcttgcatttatacgtgagaaaccagctagccctccaggaggttatgaaagcagaccttgtggaaagtgctgaaactctgtcagggttgctgaattacgccaataccgtcgatcagggatatctggacaagctacgaaggaaatatggcgtcactgtcgttgacacgctggtgcaccagcctaagcgtactgatagcaaaaaagacaagtga

SEQ ID NO: 11947 - RNA, 987 nt, synthetic construct
  source 1..987: mol_type = other RNA
atgaataaaaagccgctggagacgctgtttaacgccatgtaccacggcaaacaatcatttcaggacttcgctacctgcgacgtcgcgcaacgcgttaccagaaagacgatcagcgacaatagcgctaaagaacggattgtctacgcggcagacaaagtcctcgcaaaataccactccttcctgaatctatttatattcaaccacttgcccattcgcgaggatatcgtgttctcatataggaaggggacaaacgccgccgacgccgtcaaaaagcacgttaattcgagacatttctatcaggcagacatcgccaacttcttcccctctataagcgcagatagcatcaagaaagccattttgcggggaattcaccaggtgccagtttcagatgtggctgagtacctggaccgcatcatagacctggtcactgtggagtccgcattgcctttagggtttgctacttctccctcaatctctaacgccgctctgctgctgtttgacgatgccctttctaacgtgtgcctggaaaagggcctcgtgtatacccgttactccgatgacattacaattagtgcccaagaaaaggagtccctgctcggcatggatgcgaccattactaggctgttagccgaatgtgattaccctcagatgcatctcaacgacaggaagacaaagctcaccagtattggccgaaagataaagatcctcggaatggtgatccttccaaatgggcagttgacagtcgatagcaagatcagaaatcgtgtggagacaatgttacatttttatgtgaggaacaacgacgctctggttgacctgactaatactgatcttgatgaatccgtagatgtactcggtggactagtgaactatatcaataccattgatcagcggtacttggacaaacttcgacgccggtatggtgtgacagtaatcgacaccctgatccatagacagaaaaacaccgatagtaaaaggaataagtga

SEQ ID NO: 11948 - RNA, 942 nt, synthetic construct
  source 1..942: mol_type = other RNA
atggagcagctccggaatctgtttgatgaaatgtttggcggggaactgtccttcgacgatttcctgcacggtgatatctctaaccgggtgattaaaaagatagatggaactagagtcgtatactcggccgaccagacgcttaggagctatcaccgcttcttgcaacgtcacgtaatctcctacctgtatttgaactctgacgtggtgtactcctatcgcaaaagctttaatgttgctgacgcagttaggcagcatgcacaaagcaaatacttctttcagacagatctctctaactttttcaactccatcactagtaagctgatccatagtaccctgtttaagagtagtgagcgaatgaagttcctcaattctaccgaatattttgaccggattgtgatactgctgactgccaatgatagactacctcctggcttcatcactagccccagcatttctaacgcatgtttatctgagttggacgacgtcttccagaagttctgcattcataagaacctcattttcacgcgatattgtgacgacgtcatcgtttcagggcaaagccaggatgatcttcggattgctgctcaggagctgtcgaatctggttgagatctgctacaagggtgaattttcctttaacgtgaggaagtccaaattcaccaagatcgggaggaaaatcaagttactcggaatggtgattctcccaaatggcctagtgacaattgactcaagcttgaaaaagaaaatcgaagtgctgctgcactactacataaccgattcctttacatttcttagaatggtggacaatgatctgggcaagggaacacgctcattatgtggctatataagcttcgtcaatgcggtcgacccaacctatttccttaaactgtgctcaaaatacagttcagccgccatcgagaaccttctcagaatgcccaagtga

SEQ ID NO: 11949 - RNA, 969 nt, synthetic construct
  source 1..969: mol_type = other RNA
atgaccaaaaaaccacttgccgaactcttccgcgccatgtaccacggaaaatatgattatagggacttcataggcgaagctctttccagtaggtacaagccgctgaacgtcgggggtgctcaggtttcaaaagagcgattagtgtacgcccccgataagactttgaagatttaccattccttcttgaaccttttcctctttgaatacttagacgtgaatgaggaagtggtgttcagctatagaaagggagtgaacgtggtgggagccgtcagaaagcacgcacataataaacactttttccaggccgatctgcaggatttttttctgaacatcaatagtacgatggtaagagcggtgatcgaaaatgtggctgcaaggactccaatctctgatgttttagatcacgttgaccggatcatcgagctcgtcaccattgacggcacacttcccattggtttcccagcctcacctttgatttcgaacgctgtactgcgctcttttgatgaccgtttcgaggattactgcgcactcagaggcatggtctatacacggtactcagacgacctgatcgtctctagccagaatagggacgagctaactaacctggcggctgtgattgaagagatgctgcaaagcgttgggctggcccaatttaagctgaatcctgaaaagacaaagatcacatccgtggggcgaaaaataaagttgcttggcctcgtgatcctccctaacggagtcgtgtccgttgacattaagctcaagcagcagatcgagacaatgctgcacttttatataaccgacaatgcaaaattccgggactttagtgagaaagacctgactaaggccaccgagcaactaagcgggtacgtgaactacgtaaatacggttgatcccgcatatctggataaactgcgcaagaagtatggcgtcaccgtaattgataccctgatgcatcagggttctaaatga

SEQ ID NO: 11950 - RNA, 969 nt, synthetic construct
  source 1..969: mol_type = other RNA
atgacaaagaagccattagccgagctgttccgggcgatgtatcacggcaagtacgaatatcgagattttatctgcgaggccttagacgctaggtacaaacccatcaacgtaggcaggactcagacatcaaaggaacgcctggtctacgcacctgacaagactatgaagatttaccattcatttctgaagcttttcctcttcgagtacctggatgttaatgagagagtggtcttctcttaccgcaagggcgtcaatgtggttgaggccgtcaagaagcatgcacacaataaacactttttccaagcggacattcaggatttctttccctctatcgactctatgatggttagactcgttattgagtcggccgctactaggacccctattgcagatcttatggaccatgtggatagaataattgaattggtgacaatcgacggggcactgccaataggcttcccttcctcccccctaatttccaatgctgtgctccaccgctttgacgatagtttcgaagaatattgtgtaaatcgtggtatggtgtacactcgatactcagacgacattattgtatccagtcaaaatcgggacggattgaacaacttggccacagccatcgagaacaccctgaaaagcgtggacctggggcatcttacactgaacccggaaaaaaccaaaatcaccagcataggcaggaaaatcaaactcctggggcttgttatcctcccaaatggaaccgtgagcgtggatatcaagctgaaacagcagatagagacaatgctgcacttttacattaccgatcgggctaaactcagagattttctggagacggatctaagcaaggccaccgaacagctcagtgggtatgtcaactatgtgaacaccgtggatcccggttatctggacaagttgaagaaaaaatatggagtgacggtcatcgacactttaatccaccagggatctcggtga

SEQ ID NO: 11951 - RNA, 954 nt, synthetic construct
  source 1..954: mol_type = other RNA
atggtgaatagagacttcaagtcagctttcgaagctatgtatcatgggaagtatgacttcgaagatttcaagtctggagatataagcgagaagtttaggaagcttgacttgaacaagaaaaacgtgtacgaagctgaccagaccctaaagatctaccacaagtttctcaatctgtttgtgttccagtggttagaattcaacgagaattgtgtgtatagctaccgcaaagggatgaatgttgccgatgccgtcaagaagcacgcccacagcaaacatttttatcagacggacctcaacaacttcttcggctctattcgaagtgactttgtgaaaggctcaatcatagcatctatcgaccggatgccaattacagatgtcttgttatacgttgataggatcatcgagatttgtaccgttagcaataagctgcctgtggggtttagcacaagtccgttgatctctaacgcctgcctgctccattttgataatgaggtcgagagatactgcgaagaaagtggactgatctatacccgctactctgacgatattatcatctcaggcggagataagaaactatacggcactggcgagattattgctgaggtcctgtacaggcagttcgagggtcacctgagcattaattccagcaaaaccaagtattcctcagccggcaacaaactgaaaatcctggggatgatgattctccccaatggaacaatcactattgactccaagctcaaggcggatatagaagttttgcttcacttcttcaccaaagacaagcaaaagtttcttgacaagatagaggccgactccgcaactgcactggcaaaagtgtccggttatcttaactacatcaacacgacagataaagtgtacctgaacaaactgcgtaagaaatatggagcgagtgtagtagatatgtttgtccggggttccgtgaaatcgctctga

SEQ ID NO: 11952 - RNA, 954 nt, synthetic construct
  source 1..954: mol_type = other RNA
atggctaaccgcgatttcaagagtgcatttgaagccatgtaccacgggaagtatgactttgaggattttaaagtcggagatatcgccgacaagtatcggaaactgaacttaaataagaagaacgtctacgaggccgaccaggtgctcaagacataccacaaattccttaaccttttcgtgtttcagtggctatccttcaatgaggattgtgtcttttcctatcgaaaagggattaatgtagcagacgccgtgaaaaaacatagtcagagcaagcacttctaccaagcagacctgaacaattttttcgggagcataagatctgacatcgtgagatcctgcattggcgccagcatcgataaggtcccgatctctgacatttctctgtatgtcgatcgtattgttgaaatgtgtactgttgctgacaggctggcggtaggcttctcaacaagccccctcatctccaatgcttgcctatttaggttcgataatgagattgagcatcactgccacgccaacggcttgatatacacgaggtattctgacgatataatcatcagtggtgttgaaaacaaactgtacggcatgggcgatgtggtggaatcaatactttttcagcatttcaacggagtactgtccattaatctccctaagactaagtactctagcgctggaaataaagttaagatgcttgggatgatgatcttgccaaacggtacagtgaccattgattcaaaactgaaagcggacatcgaggtgctgctctactttttcatcaaggacaagcaaaagttcctggacaaaatcgacaccgactccgccactgcactcacaaagttgagcggctacttaaactacatcaataccaccgacaagatttatctggataagttgcggaaaaagtatggatcgtcagtgattgatatgtttgtgcgcggtagtgtgaaaagcctgtga

SEQ ID NO: 11953 - RNA, 921 nt, synthetic construct
  source 1..921: mol_type = other RNA
atgtaccatggcaagcatgatttcgaggacttcaagtcgggagaaatcctgtccaagtatcgcgcacttgtgttcaagaagaagaaggtttacgaggccggtgccgacctgaaggtttaccacaaatttctaagcctattcgtctttcagtggttggagtttaatgagagatgtgtttactcctataggaagggcatgaacgttgtcgatgccgtgaagaaacacgcaaattctaaacacttcttccagaccgatctgaatgatttttttgggagcatacagggtgatttggtcaaactctgcatccggggaagccttgaccgaattcctatttcagatgcttcttcttacatcgacagggtagtagacctggtgaccgtggagaataaattaccagtagggttctcaacatcccctctcatcagcaacgcctgtctgctgccatttgacaacgcgctggaagcctactgcaatcattcagggctcgtgtatacccgttattccgatgacgtgatcatcagtggaggggactctaagttgtatggcatagaaaaagtcgtggagtatacactcgctcagtgctacggcggggactttactattaacagcgccaaaactaagttctcttccgctggtaacaaggtgaaaatcctgggcatgatgatactgcccaacggaacgattacaatcgacactaagttgaaatcagatattgaagtgatgctccactttttcatcaaagacaagcaaagattcatggacaaggtcgatgccgaaggaacagcagcggcccttgcaaaggtcagtggctaccttaattacattaataccaccgatcccgcttatctgaacaaactgcggaaaaagtacggtgctagtgtggtggatatgtttattcgcggcagtgtgaaaagcttatga

SEQ ID NO: 11954 - RNA, 957 nt, synthetic construct
  source 1..957: mol_type = other RNA
atggcatcccgcgacttcaagtcagcttttgaggccatgtatcacgggaaacacgactttgaagacttcaaatctggagatgtcagtagtaaatatcggacctttgtcttcaacaaaaaggatgtatatgaggccggagctgaattgaaagtgtaccataaattccttagcctgttcatcttccaatggttagagtttaatgagaggtgcgtgtacagctaccggaaaggaatgaatgtagtcgacgcggtcaaaaagcatgcaggatctaagcatttctttcagaccgacctcaataatttcttcggctccatctcagggaagctggtgagggaatgcatactgaggtcgcttgaccgagtacccatttctgatgcaggcctgtacatcgatcggattgtggagttggttacagtggaagacaagttgccaatgggcttctcaacaagcccctctatctccaacgcttgtctccttcctttcgataatgccgttgagaaatattgtgaggagcagggtctggtgtatactagatattctgacgacgtgataattagcggcggagataacaaactgtatggcacagaaaagatcatcgagagcattctcgaggaactatttcagcgtgaaatcacactaaatgcctccaagaccaaattctccagcgtgggtaacaagctgaaggtgctgggcatgatgatcctgccgaatggctccattaccatagataccaagctcaaaagcgacattgaagtgatgctgtacttttttatcaaggacaagcacagatttatcgacaaggttgatgcggagggtactgcagccgccttagccaaagttagtgggtacctcaactacataaacacgactgatcaggtgtacctgaacaagttgcgcaagaagtacggggcttcggtcgtcgatatgtttattagagggagtgtgaagtcactttga

SEQ ID NO: 11955 - RNA, 912 nt, synthetic construct
  source 1..912: mol_type = other RNA
atgtaccacggaaaatttgactttaagcacttcatttcctggccggctgccgagctgttcaaacctattcagatcaaagacagagtagtgtacgacgctgataagaacttgaaggcataccacaagttcctgaaccttttcgttttcgagttcctcgaaataaacactgatgtcgtgttctcttaccgcaaaggagttaatgttatcgacgcagtgaagaaacatgccacaagtcggcatttttttcagaccgaccttaagaacttcttcggaagtatatcgagcggcatgatcaggcgatgcttggaggagaacattgccaatttccccgtcagcgatattggcgaacacctggatcggattctggatctcgtgtcagtagagaacattctaccacctggcttttctacttcacccctcatctctaatgcctgcctttaccatttcgacaataagctggagctcctgtgtgattcaagaggtctgatttacacaaggtattccgacgatatcttgatcagcgggtccgaaaagaaactctatgggttagacgtggagatctccgcgatgctagaaacctcatttggggggcgcttccaaatcaacagggggaagagtagatataattctgtcggcggaaaagtcaagatgcttggtgttgtgatcctcccaaatggtgaaattacaatagacaccaagctgaagagtaaaatcgaggtgctgctccacttttttaccagcgaccgagccaagtttaatagcatgttagaggcagaagacgtgaacggcttattgaaagtgagcggatatctgaactacatcaatacaactgatcccctgtatctgaacaagctgcgttctaaatatggcgctacggtcatagatatgtttatgcggggctccgtgaaatga

SEQ ID NO: 11956 - RNA, 948 nt, synthetic construct
  source 1..948: mol_type = other RNA
atggccaaacaaaaacttgaatcagtattcgaagcaatgtatcatggcaaattcgattttaaggacttcatcagcggcccgacatccgagctctacaaaacaattaagttcaagaaccgtactgtgtataatgctgacaagaaactgaaagcctatcacaaattcctgaatttgtttctcttcgaattcctcgagctgaacacgcgcgtggtctacagttaccgaaagggtgtgaatgtcatcgatgctgttaagaagcatgccactagcagacacttttttcagacggacttaaagaacttcttcggttccatcgatctggacatgattagagccgctatacaggaaaatactgaaaacttcccagtgtctgatgtgaatgagaacatcgaacggatcttagagctggtgtcagtgtcaggggttctcccccctggatttgcaacctcccctctgattagtaacgcctgcctttaccattttgacaatctagtggagaacttttgtctgaactcgggactgatatacacccgctatagcgacgatattataatctccggctctacaaacaagctgtacgggcttgacacccacatcgagagcatgctgaagaaaacattcggagagaaagtgttgattaatgggagtaagtctaagtatatgagcattggcgggaaaatcaagatcctgggagttgtcatcttgcccggcggcgggatcaccattgatactaagctgaaatcaaagatagaggtgctcttacactactttacttccgataggcagaagtttaacgtcatgctggatgacaaagacgttaacggactccttaaggtatctggctacctcaattatattaataccaccgacccagcgtacttgaataaactacggaccaagtatggtgcaacagtggtcgatatgtttatgagggggagcgtaaaatga

SEQ ID NO: 11957 - RNA, 948 nt, synthetic construct
  source 1..948: mol_type = other RNA
atggcaaagcagaccctggaatcattgtttgaggcgatgtaccatggtaagtatgactttaatgacttcatcgaagcccctctctccatgttgtgcaagaaaatcccgcttaagaacaggatcttttataaagcagacgaaaagctgcgggcctaccacaagtttattaatctcttcatcagcgatttcctaaagataaacacgaacgtggtgtactcctacaggaaaggaatcaatgtggtcgacgctgtgcgccagcatgctcactcccgccacttttgccaggtggatctgaagaacttcttcggctcaatagacgctgccttgattgagagttgtattcttcagaacattgtcaatctgcccgcctccgatatcgctactcacataggcaggatcgttagtctcgtgagtttggacgggactttaccccctggatttagcacatctcctccactgagtaatgcatgtctgtttgagttcgataaccaagtggagaactactgccacaaaaaaaatctgatctacacacggtactctgacgatatcattatttctggttctagcgagagactgtatggtctggacagcattatcgaggaatttatcaaggagtacttcaatgagaaactcgaaattaacccagccaagaccaaatatactaccgtcgggggcaaaattaagcttctcggcctggtaatactgcccaacggcgaaataaccatcgatacaaagctgaaaagcaaagtcgaggttatgctccattattatttaaccgacagaccccaattcaacaagatcctggaaaaggattcaactaaggggatcagcacgctctcagggtacctgaattatattaataccacagacccatcctacttagataagcttcgtctaaaatatggagccacaatcgttgatatgttcattcgaggatcggtaaaatga

SEQ ID NO: 11958 - RNA, 972 nt, synthetic construct
  source 1..972: mol_type = other RNA
atggctaaaaaggagctcagttctatctttgacgcaatgtaccacggaaaacacgactttcaggacttccttgctggcgacatcaccactaggtataaagtcacaacacttaaggggatggaactgtataagaccgacgaaaaactcaaggcctaccataagttcctgaatctgtttgttttcgagttcctgaaggtgaacgaaaacgtggtttacagctacaggaaaggcgtgaacgtagcttctgccgtgcagaagcatgccgggtcaagacattttttccagactgacttgaagtcctttttcaatagcattgattccgctctggtgcgcgagacagttaagaacaatttcgactccattccagtgtcagacatcgacagatatctcgatcgaatcatcgagatgagcacggtgaatgatatgctgccgattggctttagtaccagccctattatctccaatgcatgcctgcaaaagtttgactctattctggaggattactgcatagcccagaacctgatctatacacgttacagtgatgatatcattctcagctcctccggggataccaggttatatggaatcgataccacggtgggggaaatgctgaaagagtgtttcggtgagaaactcaacctcaacttcagcaagactaaattctcctcagtaggcaacaagataaagatattgggtatggtcattctacccaacggcgcggtgacaatcgactcgaagcttaagaatactattgaagtactgctgcacttttacgcatctgataagacgaaatttaacgaccggttggaatctgagagctcgaaactaaaaggagataattctgtgggacttttacaaatctcaggctacttgaattacgtcaataccacagatccccactatttaaacaaactgcggaagaagtatgggactagtgtcgtcgacgccttcatacgcggtaccgttaaatga

SEQ ID NO: 11959 - RNA, 972 nt, synthetic construct
  source 1..972: mol_type = other RNA
atggttaagaaagaactggggtcaatctttgaggctatgtatcacggaaagcacaatttccaggacttcctcaccggaaacatcgaacctcactacaagattactaccctcaaaggaatgaaaatctatagaccggatgagaagttgaaggcttatcacaagttccttaacctctttgttttcgactttctgaagattaacaaggatgtggtgtactcttaccggaaaggggtcaatgtcgtcagcgccgttaagaaacacgcgaataataagcatttctttcaaacagacctcaagaacttcttcaattccatagacaaagaacttgtgaggaacactatccatagcaacttggaacatatccccatttctaacctggataaacaccttgatcggatcctggaactgagcacagttgaggataagctgcccattggtttcagcacgtcaccaataataagcaacgcatgcctgcagaaattcgacagtgtgttagaggattattgcgcatccgaagacttgatctacacaagatatagtgatgacattatcctatcaagcggcgggaacactcgcttgtatgggattgaagccaaggtgtcagagattctgcgtgagtgttttggaggaaaactcaaccttaatccctctaaaaccaagttctcgtccgtcgggaacaaaattaaaatcctcggcatggtgatactgcctaatggcaccgtaacgatagacagcaagctgaagaataccatcgaggtgctgctgcatttttacgcgagtgataaagagaagtttaaggaccgattagccagtgagtcttccaagttaaaaggcgagaactccatcggccttctgcagatttctggttacctaaactacgtaaatacaactgacccaaattacctgaataagctccgcaaaaagtatggctccgtggtggtggatgcctttatcaggggtaccgtcaaatga

SEQ ID NO: 11960 - RNA, 969 nt, synthetic construct
  source 1..969: mol_type = other RNA
atggccaagaaatctctttccttgttattcgacgccatgtaccacggcaaacatgattttctggatttcatagagggagatgtagcagacaagtataaggtggccattgtaaagggtatggaagtgtgtaaacccgatgacaagcttaaggtttaccacaaatttctgatcctgtttgtctttgaattcctgcgagtgaatcaggacgtggttttttcttatagaaagggtgtcaacgttgccagcgcagtccagaaacatgccggcagccgccatttctttcaaacagatctcaggagttttttccgttcaatcagcaggagcttggtgaaacaaactcttctgaataacctcgatagcatcccagtggctgatctgcaggagaatctggagagaattcttgatctcgtgaccgtcaatgggggcgtgcctataggcttctccacatctccaatcatctcaaatgcttgcttgtacgactttgacaatcagctggagctctattgtaaggctcacgacctggtgtacacgcggtactctgatgatataatcattagtggtgtggagaacaagctgtacggggtggacggtgtagtcggggaagtgctggggaaatgcttcggggagatgctctccgtgaatgtgagtaaaaccaagttctcgagcgttggcaacaagatcaaaatcctcggaatggttattttacccaacggagtgataaccattgactccaaactgaagaacacaattgaggtcctgcttcacttctattcaagcgacaaggtgaaattcaatgaccggttggaaactgaatcagccaaactaaagggagacaactctttggggctcctgcagatctccggctatctgaactacgtcaacaccactgaccctgcttatctaaacaaattacgcaagaagtacggcgcagcggttgtcgattcctttattaggggaagtgtaaagtga

SEQ ID NO: 11961 - RNA, 951 nt, synthetic construct
  source 1..951: mol_type = other RNA
atgaacaagcagccactgagagatctgtttgatgctatgtaccatggcaaacaccagtttgcagattttatgagctgcgacgtcaccgcacgggcaacagctttccaactgaatgagcggactatgtattcacctgacaagaggctgagggcgtaccactcattccttacgctgttcctgttcgattacttcccggtcgagagcgaagtggctttcggatatagaaaggggagctcagcctatgacgccgttagtccccacgcccgctctcgacatttttttcaggctgatatcacatctttcttcggaagcctagactcgggtgtggtggctaacgtgatagatgaacataaggaacgcagtcctatagaggacgttgagaaatatacggcacgagtgcggtctttagtgcttctcaacgggtccttgcccatgggattctccacctcccccgtccttagtaacgcctgtttgtataaatttgacagagcactgagggagcgttgccagacagcggggctgcatttcaccaggtacgctgacgatctcatcatctcctcaggagacttagagctgactcggagcgccaaggcgattgtggaggaggtcctgctgcatgaatttgacggcaagttgcagttgaatgccgaaaagactaaacttacctctatcgggaggaaggttaagatcctgggcatggtcattctcccaaacggccgaatcaccgtggaccagagaaccaaagatcgcattgaggttctgattcacttctacagagtcgatcaagagcggtttctggccctcgtaaaaaatgatcgtgccggcgggttagaacaccttgccggcctcgtgtcctacgtgaatacagtggaccaggaatacctgggtaaactacgccgcaaatttggtgtaacaatcgtagacagcctcttgcacaagactattctctga

SEQ ID NO: 11962 - RNA, 957 nt, synthetic construct
  source 1..957: mol_type = other RNA
atgaatcggcgccctctcgaacagctgttttttgctaccttccgaggcaaacaagagctaaacgaactactggagctggacgtgcgggctgcctattccgaaaaggactttgatggtcgtgtggtctacagcccagacaagaagctgaagctatatctggggttcttgtctcgcgtgctgtttgacaggcttcccgttgaggctgacgtggttttctcctaccgaaagggcgtgaatgtggtgaacgcggtagagaaacatagcgagggcaagtacttttttcagagtgatatcaagaacttcttcggctcaattgacagagagatgataaggaggtcggtcctggccgcactcgaattatgtcctattagcgatatagaacactggcttgacagggtgctggaccttgtgactgtggatggagtccttccacccgggtttcctacatccccggtgatctcaaatgcatgtttgtacgagttcgacaagaaatttctgtcctggtgcaaacagaatagcctgacctatacacgctacgctgatgatctgatcgtaagcggtggagttgaagagaaaatgcacctcctgatcccctgcattactcaattgctcgacaccgaatttggaggcagaattaaactcaacacacagaaaacgaagtttattcgtccaggtgagaaggttagaatgcttggcgtagcaattctgcccaacgggaaagtctctgttgatgggcggctgaagaaacattccgaaaccgccatgcattgcttattgaaggataagcagatcttcacatctttcttaaaagagaaagacttcgagaaggccctcaaaaagttctctgggcagctgaattatatcaacactgtcgatcctagtttcttggataagctcagacggaagtacggagccaccgccgtcgacaaaatcgtccacatatcagtgggaagttga

SEQ ID NO: 11963 - RNA, 957 nt, synthetic construct
  source 1..957: mol_type = other RNA
atgaacaaacggcctctagagcagctgttttttgccatgttccgagataagcaaaggttcgccgacttcctggagattgacgttaatagcgcctatactaaaaaagactacgatggtcgtgtggtgtactctccggacaaacttttgaagcagtacctgggatttttatcccgcgtcctcttcgacaggctgcctgtcgaatccgatgtggtgttttcttatcgcaaaggtgtaaacgtcgtcaatgctgtggaaaagcacagtgcaaatcgatacttcctgcagagcgacatcgaaaatttcttcggcagtatctcaagatcgacaattcgcaaaagcatcttaagtgccttagatacctgcccaatatccgacattgagcagtggttggagcggatcctggatatggttacagtgaatgatgtgctgccacctgggtatcccacctccccaagcatctcaaatgcatgtctgtactcttttgataagagattccttgactggtgcaagaagaacaactttatctactctaggtatgctgatgacctgattatcagtggcggaggcgaggatgaaatgcaccttatcgcacctaaaatcattgaactcctgaactgtgagttcgagggccaaattaaactcaacacggggaagacaaaatttttgaggcccggtgaaaagatccggattctcggagtggccatactgcccaatggaaaggtttctgtagatgggagactcaaaaaacatagcgagactgctatgtattgcctcctaaacgacaaggataagttcatatcattccttaaggagtccgattttgacaaggcgctgaagaagttttcagggcagctgaactatataaataccgtggaccccagctttctcgacaagttgagacgtaaatacggcgccaccgctgtggaccgggtcattcatgtttccgtaggcagctga

SEQ ID NO: 11964 - RNA, 957 nt, synthetic construct
  source 1..957: mol_type = other RNA
atgaacagacgtcccctggagcaactcttctttgccacctttcggggaaaacaagacttcgcagactttagcaatctcgtggtcaacgaggcctacagtaaaaaggagttcgatggccgcacagtgtattccccgggaaaggcactgaaactgtatcttggcttcctctctcgagtgttattcgacagactgccaatagaaaaggatgtggtgttttcttacaggaaaggggtgaatgtggtcgacgcggtagagaaacactccggcaacaagtatttctttcagtccgacattgctaacttcttcggttccattacgaacaagatgatcgcccggtcagtgctggcagctgtagaccagtgtcccatcagcgatatagaggcctggttggaccgggtcttagagctcgtcactgttgatggggttctgccacctggatacccaacttcacctgccatcagtaatgcctgcctttacaagtttgacagggtattcctcgcatggtgtcatgataacagcttgacctacactagatatgcagatgatcttatcgtgtcaggcgagtccgaagacctgatgcaccaggcttgcaagaaggtcatcgaatttctgtatgctgagtttgggggtgacctaaaactgaatcccaaaaagacccgcttcattaagcctggggacaaggttaggatcctgggagtttctattctccccaatgggaaggtcagtgtggatggtaaattgaagaaggatagtgaaacagcgatgcacttcctaattaaggacaaaaagatgttcacaagctttctgaaagaaccagatttagaacgagcccttaaaaaattttcgggccagttgaactacatcaataccgtggatccttcttttctggataagatgcgcaagaaatacggcgctgctgccgttgacaaaatgatacatgtgagcgtcgccagctga

SEQ ID NO: 11965 - RNA, 957 nt, synthetic construct
  source 1..957: mol_type = other RNA
atgaacaaacgccctttagaccagttatttttcgccacatttcgcggctctctggatttctcagagtttgcttctctgaacgtctcccaggcatactcacgaatagagtttgaaggtcgtgctgtgttcagtccaggaaagaccctgaagaattatctgtctttcttgagcagggtgctttttgatagactgcctgtggaaaaggatgtggtttatagctacagaaaaggggtcaacgtcgtcaacgccgtcgaaaagcacgcgaataataagttctttttccagtccgacatcgagaacttcttcggcaatattactaaggagatcatcaagaagacaatcttgtccgccatagaccagtgccccattaccgatattgaaacatggatagaaaggattctcgatctggttacagtagagggggctctgccgccaggatatcccacttctcctgcgataagcaatgcctgtctcctctcatttgacaaacggttactggcctggtgcaatgaacattccctgacctataccagatacgcagatgatattatagtgtcgggcactaatgacatctggatgaatagcctgagttacaaagtaacggagctgcttaacgaagagtttaacaatttcatcaagctaaacccacaaaagaccaaaatcattcggcccggggagaaaattaaaattctcgggatcgctatcctccctaacggcaaagtgagtgtggacggaaaacttaaaaagcggacagagacagcaatgcacctcctgcttaaagacaaaaagatgttccaatccttcttcaaggaggctgatttggataaggcattgaaaaagtttagcggccagctgaactacatcaacactgtggacccctcctttctcgacaagctaaggaagaaatacggtacggccaccgttgacaagattatccatatcagcgtggcctcatga

SEQ ID NO: 11966 - RNA, 957 nt, synthetic construct
  source 1..957: mol_type = other RNA
atgaaccgcaggcctttggagcagctgttctatgctacgttccggggaaagcaggagttcgctgacttctctaaagtgaatgtcaacaccgcctactcaaagaaagattttgatggacgaagcatttacatcccggataagactctaaagctttatctcgggtttctttcacgcgtcttatttgatcgtctgccagttgcgaaggaagttgtgttttcctatagaaagggcgttaacgtggtggacgccgtagagaagcacagtgagaacaaatacttcttccagagtgacatcgaaaattttttcgggtcgattaacagggagttaatttccaacacaattctggcagctgtagaactctgtccaatcgcagatatcgaagattggctggacagaattatggaattggtgactgttgacggtgtgctcccccccggttaccctacatctcctgcaattagcaatgcctgcctgtacgcctttgataagaaattcatagggtggtgcgatagcaactctcttacttacacccggtacgccgatgacataattgtaagcggcaaatcagaagagcaaatgcacctcctgatccccaagatcaccgagttactggatgcagaatttggaaaaggcatgaaactgaactccaataaaaccaagttcatcaggcctggcgagaaggtgcgaattcttggagtggctatactacccaatggcaaggtcagtgtggacgggcggctcaaaaaacattccgagacagcgatgcacctgctgttgaaggacaagaagatgtttgccagctttctgaaagaggaggacgtggaaaagtctctcaaaaaattcagcggtcagctgaattatatcaatacagtcgacccaagtttcttggacaagctgagaaagaaatatggcgccgcagctgttgacaagatcatccatatatccgtcgcctcatga

SEQ ID NO: 11967 - RNA, 957 nt, synthetic construct
  source 1..957: mol_type = other RNA
atgatcaaacgtcctctggagcagctctttttcgccacttttcgggggaaacaggatttccaggatttcatcaagttagatctggccgctagttctataaagaaaaactttgaaggccggagcgtgtacgcccctgaaccaaagctgaagttgtacctgggctttctgagccgcgtccttttcgatagacttccactcgcagaacaagttgtatattcataccgaaaaggcgtgaatgtcgttaatgccgttgagaaacattcatctagcaagtacttctttcagaccgatatagaaagcttcttcggttctatcaaccgcgagatgattcgaaggtcaattttgtggtcattggacttttgccccatcagcgacattgacatttggatagataggatcctagatatcgttactgtggacgggctgctgccacccggatttcccacgtctccggccatcagtaattgctgtctcgtgaagttcgacgaggagtttttatcttggtgtgatagtcagggattcatctacaccagatatgcggacgacttgatagtgtcctcgaaggtggaccctggtgtcgacctcctcatctccaaaatcacagagattctgaacaagatgttcgatggcgactttaaacttaacctgaataagaccagggtcgtcagacctggctccaaggtgaaactactcggtgtagtcattttgcccaatggaaaggtgagcattgacgggaatctgaagaaaaacgccgaaaccgcaatgtatcacctccttaaaaacaaggagaagttcgttagtttcctgaaagagcaggaacttgaccgcgcactgcaaaagttttccggacagctgaactatatcaatacagtggacccagattttctggataagttacggaggaaatacggggctacagctgtagataagattattcacgtgtccgtggctgtgtga

SEQ ID NO: 11968 - RNA, 954 nt, synthetic construct
  source 1..954: mol_type = other RNA
atgattaagcgccccctcgaacagctgttctttgctactttcaggggaaagcaggactttgcccacttttcttctttggatcttagtgagatgtatgaggcaaagaaattcgatggccggactgtttattcacccaacagaactctgaaatcctacctgacatttttaagtcgaatcctgttcgggcggctcccagtagcggaagatatcgtgtattcttaccggaagggcgtaaatgtggtgaatgccgtggagaaacacgctcataacaaatactttgtccagactgacataaagaacttcttccagtcaattaaccgtcaacagatcaaacagactattgaggatagcgagcatacatgtccaatatcagaccttaatgaaagcctggaaaggatactggacatcgtcaccattgatggcgtccttccccctggctatcctacgagccccgccatcagcaatgcgtgcttgtataaatttgaccaggaactagccagcgtttgcaaagaggaaaaaattatctactccaggtacgcagacgacttgattttttccgccaacgctatatcggtgacagagtccatcatcccaaaggccacaaagattttagatgaggtgttcatgggacacttgaagattaatgagtcaaagaccaaagtgaccctgcctggccaaaaaatcagaattctcggtgtcagtatactacctaatggtaaagtcaccatcgacgggaagctcaagaagaacatcgaaacctgtatctactatttcctccgcgataagtctgtgttcattaagctcatgaaagaagcagacaacgagaaaagcacaaaaaagatctccggacagctgaactatatcaatacggttgatccgagttttctggataagcttagaaagaagtacgggattgctaccatcgaccaactgctgcattactctgcagagtga

SEQ ID NO: 11969 - RNA, 975 nt, synthetic construct
  source 1..975: mol_type = other RNA
atgatcaaaagacccctggatgttctgttttctgctatgtaccggggtaaactgagcttcgataacatgaaggccgcatccgccgaccagatgtttgaatcttttacagtctccgggcgcgaggttgtccgaccaaacccagagctgaaaagttatctgggtttccttggccgtgtgttatttaacaagctgcctgtggacgtggagagcgtgttttcctacaggaagggagtaaatctcttaaatgcagttgagaagcacgcagcctcaaaattcttcctgcaagtggacatcgcggactttttcggtagtatcgatagttctcttatagagcagacagtgttgagaagcatggatgcttgccccatttcagacgtggaagaacatctcgagatgattgtgaaattggtcacggtgaattctagcctgcctgccggatatcctacctcacccgccatctcaaatgcgtgtctctacgaatttgacaggaaattcaaggatatctgcgggaatcggaacctcatatacactcggtacagtgacgacctgattgtctctggcacaaccagcgaatccattaacggggtgtacggactgcttcagaacaagctggcagatgagtttgggggaaaactgcaagtcaaccagtccaagactaaattcaccagaccaggccagaaggtcaagctgctaggcattaatattctgccgcatggggccgtctctgtggataagaaattcaagaaagatgctgaggtgaagcttttctattacctcaaggaccgcagcattttcatcaagatgagtggcagcacaaacttggataaagctgtaaaaaacttgtcaggcaccatcaattatatcaacaccgttgattccgtattccttgacaagctcaggaaaaagtatggatcgactttagttgacatgtttctacaccgatccgccaagctcgtggacgaaaataagatatga

SEQ ID NO: 11970 - RNA, 957 nt, synthetic construct
  source 1..957: mol_type = other RNA
atgaaaaaaagacccctggaggacctgtttttcgccatgtaccggggcaagcagtcctttgagcactttgcgaactgctccgttgagggtttatacgaaccggttatggttaacggacggttggtgtataaaactgataaggatctacgcgcataccatcgctttctgaataagttcctatttgaacgcttgcctgtggtagacgatgtcgtgttcagctatcgaaagggtgtaaacgctgtcgacgctgtagagaaacatgccggtagcaaattctactttcaaactgacctccgtgactttttcagttccctgactaaatcggatgtgcggaggaccctggagtgggctaaggacgtttgcgtgatttcagatcttgacgtctgggtggaaagaatcctgaaactggtgaccatcggggatagtctcccaatgggattctctaccagccctgcaatctctaatgcatgtttgtattctctggatgggatcctcaagacgcactgtcttagcaatggcgtcatttacacaagatatgccgatgaccttatttttagcagttcaaataagcaggccctggatccactgttcggagtggtctgcaggacactccagtccgagttctccggccggatgggcattaattcacagaagacaaagtatctcaggaagggagggaagatcaaactcctgggattgaacgtgcttcccaacggcagagttacagtagacatgcgacacaaaaaagagatagaggtgcgtcttttttactatgtgaaggacagggctagattcctcaagatcatgggcgaagtcgacgacgaaaaagccatcaagaagttctcagggttaattaactacgtgaataccgtcgatcccgcctacttagataaactgcgcaagaagtatgggctgaccatagtggacatgttcatacataaatctcctaagctgtga

SEQ ID NO: 11971 - RNA, 954 nt, synthetic construct
  source 1..954: mol_type = other RNA
atgaacgctaagccgctcaaaatcctctttgaggccatgtatcacgggaagtatgattttcaggatttcttacaaggggatatttgttccgacttcgacatgtttaccgtaggagaacggaccatttaccgtcccaataagaagcttaaaacgtaccacagtttcatcaacctgttcgtcctcgaaaagtttccagtgaatgcagaagtcgttttctcatacaggaagggcgtgaatgtgtatgacgcggtgtctaagcatgctttctcaaaacatttctttcagaccgacatttctaagttctttccctctataggggtggatctggttagagacactttcctccaaaataagaattgcactcctgtctctgactttgacacctgcatagaaaggatcgtagagctagtgatggtggatggattcctgccagttgggtttagcacaagtcctcttatcagcaatgtctgcctgttcggcttcgacaatctggtgcagaagtattgtagtgagaacggtatcatttatacacgctattcggatgacttaattttttcaagcctggagaagagcaaattaatcggtatattcgagttcctacagcgaacaatgctggatctctttggcggcctcatcagcttgaacatttccaaaaccaaatttactcacgccggctccaaaattaagctgctgggaatggtgatactgcctaatggtaaggtgagcgtagataagaaatttaaggacaacatcgaggttcttttgcatttctacgtgaagaaccggacaaagtttttcaacttggtcgaatcagatctgaaaggaggaatggagaaaatctccggctacctttcctacgtgaacaccgtcgataaggactatctgaacaaattgagaaagaaatacgggatgactgttgtggacatgtttctgcactacacgcccaaaaaatga

SEQ ID NO: 11972 - RNA, 954 nt, synthetic construct
  source 1..954: mol_type = other RNA
atgaacaaaagacccttgaaggagttgttagcagctatgcaccaggggaaatttgagttccctgagcttgacacaggcgatgtgagtgatctgtacgaaaagaagatttacaatgatcgcgagatatatatccctaacaaaaggctgaagaccttccattcgtttctcagcctgtttttactggagtatctgcacacaaataacgaggtcgttttctcctataggaagggcgtgaacgctgtggacgccgtctccaaacacacctcttcaaagtacttctttcagactgatataaccaacttcttcaattctatcgacgcagatttagtcactagtacgattctgaattctatcgaaacatgcccaatttccgacattcagtctcatattacgaacatcgtgaagattcttactatcaataactccgtacccgttggttttagcacaagtccattgctatcgaatgcctgtctgttcaattttgacaacgaacttcaaaagtactgcatagaaaacaaactgatcctatcacgttacagtgatgacataataatctccagcctggaaaaagctcccatcttggaggccgaaatctatgtagaacggctgctgtccaagcacaccaacaacaagctctctatcaataccaaaaaaagcaaacacacccaaacaggtaataagattaaactcctggggatggtgatcctgccaaatgggaaggttagcgtcgacattaaatttaagaaggacaccgaggtgaagctccatttctacctgactaataaggagaaattcaacgagatttcaggaccggaccttgattcagccatcgaaaaaatgagcggacagctcaactactacaatactattgatcctagctatcttgataagttgcgaaaaaagtatggcgcgacaatcgtggacatgtttctccataagtctgacaaactctga

SEQ ID NO: 11973 - RNA, 954 nt, synthetic construct
  source 1..954: mol_type = other RNA
atgaagaagaggtcactgaaagacctactggatgcaatgtaccagggcaagtttgagttccctgaactcgacactggcgacatttcaacactgtacgaaaccaaaaactataacgatcgagagctgcacattcctaacaaaaaactcaaaactttccacagctttcttaacttattcctcctggagtacttacagacaaataaggagattgtgttcagttaccgtaaaggtgtgaacgctgtagatgccgtgtcaaagcatgctcattccaaatacttctttcaaacggacatcacgaatttctttaactcaattgatgcggaccttgtcactagtactatcataaattccgccgatcgctgccccatctctgacattgataatcacatcaccaacatcgtaaagaccttgacagtgaatggcagcgtgccagttgggttttccacttctccaccgctgtccaacgcctgtctgtttaatttcgacaacaagctgcagaaatattgcctagacaattcgcttacattctccagatacagtgacgatatcatcattagctctctggataagacccctctcttggaggctgaaaagtacgttgcacagtgtctctctaagcatacagataacaagctgagtattaacaccacaaaaagcaaacacacccagacagggaacaagattaaattactggggatggtgatactgcccaatggaaaggtcagcatcgatatcaaatttaagaaggacactgaagtcaagttgcattattatctcaccaataaggagaagttcactgccataaccggacccgactttgataatgccatagaaaaaatcagcggacaactgaactattttaatacggtggaccaggactatctggacaagttgcggaaaaagtacggtgcaaccatcgttgatatgttccttcacaagtctgacaaactctga

SEQ ID NO: 11974 - RNA, 954 nt, synthetic construct
  source 1..954: mol_type = other RNA
atgaaaaagaggcccctgaaggaacttctgtccgccatgtaccaagggaaattcgatttcccagagcttgataccggggacatcagtgcactatacgagacaaagaattataatggacgcaagattcacattcccaacaaaaagcttaagattttccatagcttcctgaacctttttttgttagagtacctgcagacgaataacgatattgtgttttcatatcggaagggtgtgaacgccgtggatgctgtttccaaacatgcacattccaaatacttcttccagactgacatcaacaacttcttcaattctatcgacatcgagatggtaacctctactatctttaacaatatcggcttattccctataagtgatatcgagagatatatcccgaatattgtcaagattctgacagtgaacgattcggttcccgtcggcttttccactagtcctctcatttcaaatgcgtgcctgttgagctttgataacaagctccagaagtattgtttggccaactctctgatatacagtaggtattctgacgacattatcatatcctctagcgaaaaggcttcgctgctcgaagctgaacagcgagtcaccacatacctggccgaaaataccaacaacaaattaagcatcaacctgacaaagagcaagcacacacaaactggaaataaaatcaagctgttgggtatggttattctccctaatggcaaggtgagcgtcgatatccgttttaaaaaagaggctgaagtgaagtttcactactacctaaccaacaaggataaatttactgaggtgacgggcagcgacttcgactcagccatagagaagttctccgggcagctcaattacattaataccgtagacccatcatatctggacaaactgagaaagaaatatggagcaaccatcgtggacatgtttctccacaaatctgacaaactctga

SEQ ID NO: 11975 - RNA, 954 nt, synthetic construct
  source 1..954: mol_type = other RNA
atgaacaaaagacccctgattgatttgctgactgccatgcaccaagggaagtttaatttcccggaactgggcacaggaaacattaacgacttatacgaaaccaagatttacaacaatcgcgagatccacatcccaaataagaagctcaaaacattccatagcttcctcaagcttttcctcctggagcatctgtctacaaacgaagaagtggtgtttagctataggaaaggcgtcaatgcggtggacgccgtctcaaaacacagtaatagcaagtactttttccagacggacatcaacgactttttcaattctatagatgaggagctagttaaaaccactattatcagagacattgagaaatgccctattagcgatataaatctgcacattgacaacatcatcaaaaccctaacgattaaaaactccgtgcctgttggtttttctactagtcccttactgtccaactcgtgtctcttcatatttgacaacagcttgaaggagtattgcgacaaaaattcccttaccctctcacggtactctgatgatattatcgtgtcaggaaagaagaaggaacccatcttggaagctgagaggtatatagctcagctcttgagtgacactaccaagaataaactgagtctgaacatcaaaaagtccaagcatacccagacagggaacaaaattaaactccttggcatggtgatactgccaaatgggaaagtgaccatcgatattaagttcaagaaggatacagaggttaagctgcattactacctgacgaataaggagaagtttatcgagatcgtagattctgacatcgaaacagccatcgaaaagttaagcggacacctgaattattacaacactgtagatccttcctatcttgacaagctgcgaaagaaatatggtgcaaccactgtcgacatgttccttcacaaatcagatcgtttgtga

SEQ ID NO: 11976 - RNA, 954 nt, synthetic construct
  source 1..954: mol_type = other RNA
atgaacaagaggcctctgaaggaattgctggttgctatgcatcaaggtaaatttgagtttcccgaactcgatacaggggacataacgtcgctgtatgagacaaagaaatacaatgaccgtgaagtgcacgtcccaaataaaaaactacggacctttcatagcttcatcaagctcattttactggatcacctagacactaacgaggacgtggtgttttcttaccgaaaaggagtgaatgccgttgatgctgtgtctaagcactccagatcaaaatacttcttccagacggatataaagaacttcttcaacagcatcgatgaggacatggtcaaagagacaatccttaagaacatagaacagtgccccattagtgacatccaggaccacatcgagaagatcgtgaaaaccctgaccgtaaataattcagtccccgtcggattttcaacaagtcctaccctgtctaatgcctgtttattcaccttcgacaatacactccaggaatattgcaaaagcaatagcttggtattctcccgctattcagacgatatcatcatctccagcatggagaagaactccatttttgaggccgaaaaatacattagccagaaactctccgaaatcactaagaataagctgtctattaacgacgcaaagagcaaacatacccagacaggcaacaaaattaagctgctgggaatggttattcttccaaatggcaaggtgagtatagacatcaaatttaagcaagacactgagataaagctgcactactacttgaccaacaaggaaactttcaaaaagatcgtggggtctgatttcgatggtgcgattgagaaaatttcgggccatctcaactactataacaccgtcgatccgtcctatcttgataagctgcggaaaaagtatgggactaccactgtggatatgtttttgcacaagagtgacaagctttga

SEQ ID NO: 11977 - RNA, 954 nt, synthetic construct
  source 1..954: mol_type = other RNA
atgaataaacggcctctgaaggacctgctgaacgctatgtaccagggaaagttcgaattcccagagttagagacaggggaaatcagctcactctacgaaacaaaaaagatcaatgaccgagaaattcacatccccaataagcgcctgaaaacttttcattcctttctccggttcttcctgctggaacacctcaagacaaataatgatgtcgtattcagttaccgtaaaggcgtcaatacagtagacgcagtttcaaaacatgcgcactcaaagtattttttccagactgatatcaggaacttcttcaacagcattgatactgaactggtgatctctacaatcgagaacaatctaacgaacactccgattgaggatatccaactgtacatcgagaaaatcaccaagaccctgaccgtgaacaacttcgtgcctgtgggattttctacttcaccccctctttccaacgcctgtttatttgacttcgacaataagcttcagaagtactgcctggagcagaaactgatctatagcaggtacagcgacgatattataatcagttccagagagaaacaagccatactcgacattgacgaatacataagtcaaaccttgcagaccaccaccaagggtaagctcaccatcaatacgtccaaaaacaagcacactcagactgggaataagattaagttgctgggaatggtgattctaccaaacggcaaggtgagcattgatagaaaatttaagaaggacacagaggttaaactccactattacctgtccgacaaaaagaagttttatgagttgaccggcccagatacgaacaatgccattaccaaaatctctggtcagcttaactattataacaccattgatccctcgtacttagataagttgcgcaaaaaatatggggctacaatagtcgacatgtttcttcataaatctgataagctctga

SEQ ID NO: 11978 - RNA, 957 nt, synthetic construct
  source 1..957: mol_type = other RNA
atgaaaacgaagccttgcgctctgctgttcgaagctatgtatcacggtaagtatgactttcaggatttcatccaatccgacatttctaactactttgacgtgatctacgtcaaggaccggaagatccagaaaccaaacaggaaactgaaggcataccattcgttcctcaatctgttccttttcgagtacttgcgcaccaatgagcgcgtggtcttctcctacaggaaaggcgtcaatgcctacgatgccgtctcagctcacgctaacaacaaacatttctatcagaccgacatctcagattttttcagcagtatcgattcacagctcattaaagaaacaatcatcgcatctgccgaactgtctccaatagaggatttgaatgaacatcttgagcgggttctcagcctggtgacagttgatggccgtctacccatgggattttctactagcccccttatatccaacgcctgtctgtacaagttcgacgcagcgctcgaggagtatagtataagcagacacctcacttatacacgctacgccgacgatctgattataagtagcaaaaaccgagaagatctggaagggatccaagagaaaattagcgagttgctgcttaaaacctttaacgggagactgtccttgaatcacagtaagtccaaactgacgcacactggtcgaaaggtgaagattttgggaatggtgattcttccgaccgggaaggtgtctgtagacattaagtttaagaataaggtcgaagtgctgttacatttctacatgaaggacagagagaagtttttagacaaggttgatggcgatatgagggggggaatggagaaaatctccggctatctcaactatattaataccgtggacaagtcatacctggataaactacggaaaaagtttggaggcactatcgtagacatgtttctccacttacctacaaaaaagccctga

SEQ ID NO: 11979 - RNA, 954 nt, synthetic construct
  source 1..954: mol_type = other RNA
atgataaagaaaccactgaagactctttttgacgccatgtaccacggcaaatacgaattcgtggatttcgctcagtgtgacgtctctctgtgctacgaaagggtgaagtttaaaaaacgagaggtcatcagaccgaacaagcgtttgaaggtctaccattcattcctgatactgttcctactggagtacctcaaagtcgacgatgaggtggtgtatagctaccggaagggagtgaacacctatgacgcagtttctaagcacgcagcgagtagctatttctttcagaccgatctctccaacttctttaagagcatcgacgtagagatggtgcgcgctgttattaatgaaggtatctcaagagctcccattctggacggggaggactatatcgatcggatcattgagttagttactgttgatggctctctcccagtaggtttcccctccagtcctgtgattagcaattcctgcttgtatgccttcgatgagaaacttaaatcttattgcagacagaggggattgatctacactcggtattcagatgacataattgtatcgggtaaagacaaggacgaactactcggcgtgaaggaaagcatcacggcctttctcaatgactgtttccaaggcaagcttagtattaatcacgggaagtccaagtttacacatacaggaaataagatcaagctgttgggaatggtaatcctgcctaaccagaaggttacggtcgacatcaagtttaagaaagatctggaggtgatgctgcacttctacataaacgacagggagaaatttcttgataaggtggggggcgggtatcgagaaggagtggaaaaaattaccggctacatgaactacgtgaacacagtcgataaagactatctgaataagctccgcaaaaaatacggggccaccgtggtcgataccttaattcatcaccccacaaaaaagtga

SEQ ID NO: 11980 - RNA, 954 nt, synthetic construct
  source 1..954: mol_type = other RNA
atgaccaaaaagccactgaaagatcttttcgatgcaatgtatcatggcaaactggacttcaccgacttcgccgagtgtgatgtgtctctttgctatgagcgtaccagaataaaaaacagagaggtggtacgacccaataagaagttgaagacttatcacagctttctcaatctgttcctcttcgagtacctgaagatcgacgaggaagtggtttttagctatagaaagggggtcaacgcgtacgatgcagtggctaaacattccggttcgtcctgtttctttcagaccgacctcaccgatttttttaagtctattgatgccaggctggttaaggatgtgatcggagactcattacacttagctcctatcctggacgccgacaattacatcgataggattgtggaactggtcgtggtagacggcgctttgcccgtcggtttcccatcttcacccctcatatctaattcatgcctatatgggttcgacaagaagctcaagagttactgcgacaagcgcaatcttatatacacacgatacagtgacgatatcatcattagcggaggctcccgggatgccttgcttgggataaaagaatcagtcgcaggcctcctggatgaatgttttcaaggcaaactatccgtgaattgcgataagagtaagttcacacacagcgggaacaagattaagctgctcggtatggtgattttaccgaaccagaaagtgactgtcgacatcaaatttaagaaggaactggaggtcatgctgcacttttatatcaacgaccgggagaggttcgtggacaaagtcggaggagactttcgcgttggggttgagaaaattacgggctacatgaactacgtgaatactatcgacaaggattatctgaacaaattgcggaaaaaatacggaagcacagttgtagatacactgattcatcacccttccaagaaatga

SEQ ID NO: 11981 - RNA, 990 nt, synthetic construct
  source 1..990: mol_type = other RNA
atgagtacaacccaaactcacagtcttcctcgacgccagccagtcgaagtcctgtttaatgcaatgtaccacggcaagtggagatttgctgacttcgcaggtgccagcgtggaggccaacatcagtagcaaaacctttacccaagctgggaaaacacggaaccttcttgtgccctcagaaaagcttaagagtttccatgacttcctcaggttgttcctgttagactttctccccttgaataacaatgtggttttctcgtaccggaaggggctgagcgcatatgacgctgtggcccagcacgctgcatctaagagcttcttcgtttgcgatatagcagacttcttcccttccattcgtaggccacgtgtgaagtccactctgctgactgccaaagatctttgtccaatccaggacttggatacatggttagataggattgtcgacctcgtgtgcgtcggcaattcactacccgtgggatttagtacctcccccgctatctccaatgccgtactgatggcgtttgacaacgccctccaaacttactgtacgtctaaagagctcgtcctcacccgatattctgatgacattattgtgtccgcccaggattccgccagcctgaaaggcatccaggagcaggtagctgcctccctgcaggacgccatgaaaggggagttttcgctccatcctggaaaatcacgcttcctgcactctggaagcaagataaagttactgggaatggtgctgctgccgaacggcgcagtatctgttgatgcgagcgtgaagagcgagatcgaggttctgattcacttctatctcagagacagagataagtttgctgacagggtcgaaggtgaccagcggaaggcggaagctagactgtcaggcctactgaattacgtgaacacgatcgataaggcctacttggataagctacggaaaaaatttggggtgacagtcgttgattattttttgcatcgctcattctcttga

SEQ ID NO: 11982 - RNA, 993 nt, synthetic construct
  source 1..993: mol_type = other RNA
atgagtactcagcctactccccaattttccatcaaaaaacagcgaattgatgtcctctttgaggcaatgttccatggaaagtggagcttcggcgattttgtgagcgcctcagtgcagacaaataccatttcaaaatcattcacgcatggcggaagaacccgtaatctcctggtgccctcagaaaagctgaagtcttttcacgaatttctgaggctatttctactcgatttcttgccattcaacgaggatgttgtcttctcctataggaaaggaatgtccgcttacgacgccgtaatcaaacacgctgcttcaaaatccttcttcgtgtgcgacattgccaatttcttccctagcatcaaacgcgatagaattcggaccgcgttactgcgagctaaggagtgttgcccgattgaagacctcgagtccgtgattgaacgcatcctggaccttgtgtgtaccgacagcggactcccacaggggttttctacctctcctgtgatctctaatagtgtgctcctggattttgacaacgcatttcatgcatatgcccttggcgaaggtctggagtttacacggtacagcgacgacataataataagttccagaaacagcgaggctatccaaggcattgaggccatcgtaagtcactgcctgcacgatacgatgggaggggatttcagcctgcactacggcaagagtcggctgctgcatagcggggtcaagataaagctgttagggatggtactcttgcccaacggtaaagtttctgtggacgccaatgtgaaggacgaaatcgaggtcttaatccatttctacctgcacgaccgttccaagtttgcagataaggtcgatggggatactcgcaaggcggaggccagattgtccggtcttattaactacgtgaacacaatcgaccagtcgtatcttgacaaattgaggcggaagttcggcgttacagttgtggattatttcctgcacaggtctttttcgtga

SEQ ID NO: 11983 - RNA, 993 nt, synthetic construct
  source 1..993: mol_type = other RNA
atgagtaccccgatatcccccttacctgccagtcccaagcagccaatcgaagccctttttaatgcaatgtaccacggcaagaagtccttttccgattttgcaaacctgtccatagacgaaaatttcaccaggaaatccattaaccgaagcggcaaaactagggagctgctgaagccaagcgacaaactcaaaggatgccatgagttcctcaggcttttcctgcttgatttcctgcctctgaatgacgaaattgtcttttcatacaggaagggctctaacgcgtacgacgcagtggctagacatgcaaagtcgaagtctttttttgtgtgcgacattgaacacttcttcccgagcctcaaaagaacacgtgtgaagagtacaatcgctactgcccgcgactcttgtcccatagaggacatagatacttggctggagcgcatcgtagacctggtgtgtgtggacgatgccctgccaatgggcttcagcaccagtcctaacatcagcaatgccgcactgctacccttcgacaacgccttgcagtcctattgcgagtcaagaaacctgatcctcacacggtatagcgacgatttgatcatctctggagagaactttgccagcctcgatggcattgaggcgcaagtcgctacccatttacaggaaacaatgaacggggaactgaatctccacccaaagaaatccaagttcctgcatggaggggttaagattaaacttttgggtatggtcctcttgcctaatggtaccatctcagttgatgctggggtgaaagaggaaattgagatcctaattcacttttacctgcgggacaaatctaagttcgccgatcgagtcgagggtggccttcagaaagccgaagctagattatcgggactgctcaattatgtaaatacggtggatcaagcttatttggataagctacgcaagaaattcgggacgactgttgtggatttttttctgcaccggtctttctcatga

SEQ ID NO: 11984 - RNA, 987 nt, synthetic construct
  source 1..987: mol_type = other RNA
atgtctattgcggcctcaccaacaactgccaaaagacctatggccgacctctttcgagctgtatatcatgataagagggatttccgcgacttaattgaaatggatgtgctgctcaattgcaaacgtgaacagtataccaaggccgggcaagttcgagccatccttgtccccaatgacgtgcttgccgggtgtctggagtttgtgcggctgtttgtcgtggactatctgcctattaacgaggacgtcgtttactcttacaggcgtggtatgagcgcttttgacgctgttgcgaggcacagagatgggaaacacttcctggtgtgtgacatctcacattttttcccctcgttgaaccggggccgcgtaaggctaaccatcgatcagggaaatgacagaacccccatcgccgattttggccattggctcgaccgcttcgttgatctcgtctgccctgagtccagcctccctgtgggattttccaccagtccgggcatctccaatgcagcactgaagccctttgatgacgccatgtcaatagtgtgcgagtctaggggcttgactctgacaagatactccgatgatataatcgtcagcggccagagcaaggacgctctggacgggatagagcaaattgtggcgggaacactgcagcaggtcctgccaggggaattcacgctgaatcgggctaaaacaaagagaatgcacagaggtaccaaagtgaagcttctgggaatggttcttttaccagacggcggggtatcagtggacgcagctgtgaaggatgaaattgaggtgctcctccatttccacagtcggaaccggtctaggttcctagaacgcgtgggtaacgatttggccaagggagagcgccgtctgagcggcttaattaactacgtaaacactatcgacaaggcctatttggacaaacttcgacgcaaattcggtgcagcaagtgtcgattacttcctgcaccggtccttcagctga

SEQ ID NO: 11985 - RNA, 984 nt, synthetic construct
  source 1..984: mol_type = other RNA
atgagtacccccttgaagacggtcgctaaacgccccctggaagacctcttcaacgctgtctaccatgacaaatataggtttcaagatctggcccaactggatgttctgttaaactgtaagagggagcagtataccaaggccggacatactagagctattctggctcctaatgaaatcttagcagcctgcttggatttcacacggttatttgtcgtggacttcctgcctatcaatgaagacgtggtatacagttataggaaaggtatgtctgcccttgacgcagtggtgtgccataaggattccaaatattttttcgtgtgtgacatcagccactttttcccctctattacttgggagcgcgtcggacttacacttgcccaggcgaaggatagaacccctatctcagatttcgacctgtggctcgatcgtttcgttcacctcgtatgtcccgagactggcttgccagttggcttttctaccagcccgggaatttcaaatagtgccctcaaaccatttgatgacgcaatgaaacggaactgcgatgaccgatccctgagaataacgagatactcagatgacatcattgtcagcgcaaaaacaaaggagcctctgcatgagatcgagaaactgatagagggcaccctacaggagacttttagtaatgacttcacactaaaccagagcaaaagcaagcacctccaccgaggcacaaaggtcaagctactgggcatggtgcttctgccagatgggtctgtttccgtggacgcctcgataaaggacgaaatcgaggtattgctgcacttccacgcgacaaataggtcacggtttgttgaatatgtggggcatagcctcaccaaaggggaacgccggctgtctggactcattaactacgtgaacaccattgacaaggcttaccttgataagttgcgtaggaagtttggtgtggccactgtggactacttcctgcaccgctccttctcctga

SEQ ID NO: 11986 - RNA, 990 nt, synthetic construct
  source 1..990: mol_type = other RNA
atgggggcgaagaccgccttattgcctagcggaccaagatcactggaagaactgttcaccgccatgtatagaggcaagagaaaggtcagcgagttcgctagtctcaacgttgccgccagttgtactaggaagtctttcacacacaagggccgaacccgtggaattgtgattcccagtgataagctccgcgggtgccacgagtttatacggctgtttctgctggattttttaccagtcgagatcgatcttgtgtttagctaccgaaaaggagtaggcgcattcgacgctgtaaaacagcacgcttctagcagacacttcttcgttaccgatatcgcggacttcttccctagtataaaacgggacagagtgctgagcattatccaaactggccggggaatttccccaatttcagaccttgacgcatggatggaaaggattgtggagctggtttgtctcgacggagaactgcccgttggatttagcacatcacctgccatctctaatgcagcattgaggccgttcgaccaggccatgcggaaagaatgcggtgctttgggcttagtgtacacgaggtactccgatgatctagtgatctccgggggtgatgctggcgtggtggaaagggcgcaagccttctgtgaatgccatctgcgggaggctatgcacggcgagtttcagcttcgacccgagaaatccaagttcctgcatgtgggccgcaagatcaagttgcttggcatggtgctcctgcccaatgggcggatctcgattgacggtgccacaaaatccgagatcgaggtcttgctccacttttacctgcgcgacagggcaaagtttgccgcaatgggggagggagacgagagaaaggtcgaagcacgccttgctgggctcctgaactatgccaacactgtcgatcagtcatatctggacaaactccgtcataaatttggtgccgctcctatagatctattcatccatcgctcttttgggtga

SEQ ID NO: 11987 - RNA, 927 nt, synthetic construct
  source 1..927: mol_type = other RNA
atgtaccattctaaaagaagtttcgatgacttcgcacgtggccccgttgcccagaagtatgtgaggcaccgcttttgcaagcagggtaagacacgagaggtcttgtcacccgacgacaagctgcgggcgtaccatgaattcctgagactgtttttactagactttctcccgcagaatgaggaagtcgtattcagctataggaaaggggtgtcagcctacgatgccgttagcaggcacgcacagagcaagtttttcttcgtgtgtgacattgccgatttttttccttcactgaagcgacacagaattaggcagactattctgtctggcaaggattcctcgccagtcgctgacttggatcagtggctcgaacgcatcttagacttggtcagtgtagatgattgtctcccaatggggttctctactagcccaacaatttccaacgcagccctcctgccctttgacaacgctgtgcagtggtattgcgccagtcgggggctgatctacaccagatacagcgatgacatggtggtttccgctaaagagttcgcaagcctggacggaatagaggaaacgcttggggccttcttcgtggagtacatggacggcgaccttgctttgcatcctggtaaatctaagctcttgcgtacaggctctaaaatccgcctgctgggcatggtgctgcttcctaacggaaccatctccgtggatgcatcaatcaagtccgagatagaagttctcattcacttctacatcaaagatcgcgctaaattcgctgacagggcagacggagacgcgcaaaaggtagaggcccggttagccggtctgctaaattatgctaataccgtcgatcaaagttatcttcaaaaactccggaaaaagtttggcgcggccgtggtggatctgtttctgcacagatcctttggatga

SEQ ID NO: 11988 - RNA, 969 nt, synthetic construct
  source 1..969: mol_type = other RNA
atgcccatcgtgaaaaaaccattgaagaccctgttcgaagctatgtttcacgggaagcgctcctttgccgattttatgcgcgaagcaagcgaggatgacctgggcaggacacatattcggcagggggccaagagacgggaactagtgtcaccgagcgagcgtctgagagcttaccactcctttctcagattgtttctggtggacttccttccagtgcatgaaaagtccgtcttcagctacaggaaaggagtctcagcccgagctgccgtcgagcagcatgctcctagccggcattttttcgtgactgatatcgagtcattctttccttccctgaccaggggaatcgtacgtgagactatcactaacgcaatggcagaaatacccattgccgacctaagcgaccacttagaacacgtgctcgacctgctttgcgtcgacgacgccgtgcctatagggttctctacatctccaggcctgagcaacgccgctttgtaccccttcgatgccgctttccacgcacgctgtcaacagctgggggtgatttatacccgatacgcagatgacatcgtactctcctctggcgagaggagtgcagttcaggagggcgaagtcgctctgaacgagctcctcgatagaatgttccgtggtgaactgcgcttgcaccggggaaagagtaaatacctgcacgtcggcggtaaaattaagcttttaggaatggttctcctgcccaatcgaaccatcagtgttgacacctcggttaaggatgagattgagacaatgttacatctgtatctgcgggaccgggaacgcttcaataaaatgctggaggtggggagtgcgaaaacagaggcgaggcttgccggactcctcaattatgttaacacggtggatcaatcttatctagagaagcttagaaggaagtacggcgccgcggtggtagatatgtttttgcacagatcatttggttga

SEQ ID NO: 11989 - RNA, 942 nt, synthetic construct
  source 1..942: mol_type = other RNA
atgcttttcgaggccatgttccatggcaaaagggacttcacagactttatgcgaaaagtctcggaagacgacttcggtcgagcccatcttaggcaagggactaaacagagggtgttgatcaacccgtcagaacggctccgtgcataccacaactttctgcggctgtttctggtggacttcttgccagtgcacgaggaagcagtcttctcctacagaaagggcgtgagcgccagagctgctgtggagcagcatgcgctaagtcgctacttctttgtaacagatatcgagagcttctttcccagcattacaagggacattgtcagaaagaccataaccagcgccatggccgagattcctatcgccgacctatctgatcatctcgagcacgttttagatctcctttgtgtggacgacgccctgcccatcggattttccacatctccttctttgtctaatgcagtgctctatccatttgacatcgtcttccacgcacgctgccaggaactcggagcgatctacacccgatatgctgatgatattattctgtcctcaggcgagcgggccactgttgagagtggagaaggcagtcttaacgatcacctcgatcgtatgttcgaaggcgggctacgcctgcacaggggaaaatccaaataccttcaccggggtgagaagattaagttgctgggaatggcactgttacccaatgggaccataagcgtggatacgtcaatcaaggacaagatagagactatgctccacctgtacctgcgcgatagagagaagtttaataccatgctggatgcgggtacggctaagactgaagctcggttagccgggctgctgaattatgttaacaccgtcgaccagctctatttggaaaaactgcgcagaaagtatggggccgctgtggtagatatgttcctgcataggtcctttggctga

SEQ ID NO: 11990 - RNA, 936 nt, synthetic construct
  source 1..936: mol_type = other RNA
atgtttcacggtaaacagaagttcgccgattttatcggagccgacgtcacaagcctgtacaccaccactacaccaaggatcggtagtaaaaggcgtaccctgcacatgccgagcgataagctgagagcataccacgaatttctgaacctgtttgtgttcgagttcctgcccgtgaatactggggtcgcctttgcatatcgcaagggggtgagtgcggctgacgccgttagaatacacaagcatggccggcatttcctggtgagcgacctcgcggatttttttcctagcattgacgtgagcttggttagagcaacactggttggcggagccatggcatcccctgtcgaaggcttggagtccaatttagatcggattctgcagctggtgtgcatcgacgacgccctcccacttggcttctccacatcgcctgtgctcagtaacgctgtgttgttcgctttcgacaccgctctgcagaaggagtgtgagtcaaggtctttagtgtattcacggtactctgatgacttaatcatcagcggtagtgatcgcgatgaggtacacggcgctggacaaattgttgagggactccttcgcgaacatttcggcgaaaaactaaggttgaaccccttcaagtccaagtccctgcatgtaggatcaaaagttcgcctgctgggggtagtgcttctaccaaacggtaaagtcacggtggacgctaaacttcgtgcaaacattgaggtgttgctgcacttttatctcaaagatcgagcgaagtttgccgatttcgccaaaaaggtcactggcgaacccgacaaggcagaagcccggctctcagggtggataaattatatcaatgctgtcgatcaggagtaccttgacaagctcaggatgaaatacgggtctgccctagtcgacagatttgtgcatcgatctttcgggtga

SEQ ID NO: 11991 - RNA, 1047 nt, synthetic construct
  source 1..1047: mol_type = other RNA
atgcaatatagcccagtactttacgagagacagcacattctaactatgacaaagcaacctctgcagaagctctttgatgcaatgtaccacgggaaatacagtttcgaagattttctccagtctcccgtggagaagaattatgaagtgattgctcccacagagccaggcggtagaagactcttcaaacctaaggagaatttgaagacataccatcggtttcttaacctgttccttttcgagtttctccctgtgaacgatagggttgtgttttcttatcgtaaaggattttccgcgcttcatgccgttcagaaacacgctaaaagcaaattcttctaccaaaccgatatccaggcctttttcgattccatcgaccgagcattaactgaaaaggccatcttatctgggcaggccaattgtccgatatcggatctggacatccatctagacagaattgtcgatttagtgtgtatcgacaatagcctgccagtgggattgcctgcgtccgctccactctcaaacgcagttcttctggacttcgacaacgaactggaacgttcctgcttggaacgcgagttgtgctatagccgctatgctgacgatataatcatcagcggtcatcggcaggtggacgtccaggagattggccagagtgtccaagagaagctgcatcagttctcatcaaagaatttctccatacacgagggcaaaacgaggtactttcacgtcggaggcaagatcaaaattctgggaatgaccatcctgcccaatgggaagataagcattgactcaaaaaagaagaaggacctggaagtactgctgtttttctatttgaatgacaaagaacgcttccggaaaatcgtcaaccaggccaagaaccggaccgagacaagtagggagctctctgatgatgactacgtggcctacctgagcggtaccattaaccacgtggactccatcgatcccgactatacggataagctgcgaaggaaatttgggactgccaccattgacgcactcaagcactctggctttagtaaggagaaatga

SEQ ID NO: 11992 - RNA, 1002 nt, synthetic construct
  source 1..1002: mol_type = other RNA
atgactaaacagcctttgcagaaacttttcgatgctatgtatcacggcaagcattccttcgaggattttctacagtctcccgtggagaagaactacgaagtaatcggtaccagcgatttcggcggccgaaaactgttcaagccgaaggagaatctgaaattgtaccataggttcctgaatctgtttctgtttgagttattgcccattaatgagcgggtcgtgttctcgtatcgaaagggattctccgctgtgaatgccgttcagaggcacacacaatccaagtactttttccagactgacatccaaagctttttcgatagcatagaccaggccctgaccaaaagaactattctggccggggagccatactgccccatcgcagaccttacagcacatctcgacaggattgtagacctcgtctgtatagacgactccatacctgtcggactgccagcttctgccccactctcaaacgccgtgctcctcaattttgacaacgaaatggagcgcttgtgccaagaacgtgacctgtcttacagtaggtatgcagacgatattattatctcagggcaaaatcagggcgccgttcaggaagccggtaacgcggttcaagaaaaactgcaccagttttcttccgaaaaattctttattcaccagggaaaaacgcggttctttcaggtggggggtaagatcaagatcttaggcatgcttatcctccccaacggcagaattagtatcgacacaaagaagaagaacgaacttgaagtcctgctgttcttttatctgaacgaccgcgagaaattcaaaaacatcgtgaatcaggccaagcagcggacagatgcaaaaagagatctagtggaggatgattacattgcgtatctcagtggaaacataaattacgtggattcaatcgaccctgattacaccgacaaactgcgcagaaagtttggggctgcaaccatcgatgctttaaagtatagcgggtttagcaaggagaagtga

SEQ ID NO: 11993 - RNA, 1002 nt, synthetic construct
  source 1..1002: mol_type = other RNA
atgactaagcagcccctgcagaagctgttcgacgccatgtaccacggcaaattttccttccacgacttcttgcattctccagtggagcagaattatgaaattgtcggcgggtccacatctggtagccgcaccttgtttaaacctaaggaaaacctgaagacgtaccatagatttctgaacctgttcctgtttgagctcctcccaatcaacgagcgtgtcgtctttagttataggaaagggtttagtgctgtgaatgccgtgcagaaacacacccagagcaagtatttcttccaaactgacatcaaagcgttttttggctcgattgatcggttgctcacccagaaaaccatcctggctggacacgaatattgtcccatcgaagatttacacgagcatatcgaccggatagtggacttggtatgcgtgggagattcaatacctgtgggactgccggcaagcgctccactcagtaacgccgtgctggttaatttcgacaatgagattgaacggatttgcaaacaacagggactcatctactcacgctatgcagatgacattattatatctggccaaaaacacgagtctcttctcgggcttaagatgctggtccaggaaaaacttcatcaattcagctccgagaagttctttatccaccacggtaaaacaagattctttcaggtaggcgggaaggttaagatattaggcatcatgatcctacccacgggcatcattagcgtggacacaaagaagaagaatgacctagaggttctgatccatttctacctgaacgatcgagggaggttcaaggatatggtgaataaaacaaagaagcgatccggtgctgatgaagaattatccgaggatgactacattgcctatctcagtggtaacattaactacgtcgattcaattgaccctgcatacaccgacaagcttaggagaaaattcggaagcactactatcgatatcctgaagtactcagggtttgccaaggagaaatga

SEQ ID NO: 11994 - RNA, 1008 nt, synthetic construct
  source 1..1008: mol_type = other RNA
atgaacaaggagccgctgcagaagttgttcgacgctatgtaccacggaaaaatccgattcgaggacttcttgtatagcccaatggagcagaattacgaacagggactgccaaaccataatgggaggagacggattttaaaaccccgtgagaatctgaaaacattccacaagtttctgaatctgttcctgttcgaactgcttcccatcaacgaaagagttgtgtacagttatcgcaaagggtttagtgccgtcaacgccgtggaaaagcatcgcgacggaaagttcttttttcaaactgacataagtgcattcttcgaatcaatagatgtcagtctggcaaagcgggtgatcctgtccggggccgagtttactcctatttctgacgtggattcatatattgatcgtatcatagacctcgtgtttgtaaatgactctctccctgtaggctttcccgtgagcgcgcctctgtctaacgccgtgctcttcgacttcgataatgtgatggagagctattgtctaaacaaaggtttagtgtacacacggtatagcgacgacattgttatttccggcaacgagagagaatggtataacggcgtcgatgactttgtccaaaggtcactgcacgaatcagcatcggacagattctacattaaccggaaaaagacccgcttttttcaggtgggcaataggctttccatcctgggcgtcatgatacttccaaacgggaaagtatctcctgacacccgaaaaagaagggaaatcgaggtgcttttgcacttttacctcaccgataaggataaatttaagaagatgatcgctgagaagcgcgttaaatctggaaagatcagcaaaatcgacgacggtgtctccgatgatgagtgcttagatgtgttgtccggtaacctcaattacattgatagcattgatcccgattacacaaataagctccgaaggaagttcggggttgctacgatcgacatgctaaagcatcggggcttctccaaatga

SEQ ID NO: 11995 - RNA, 999 nt, synthetic construct
  source 1..999: mol_type = other RNA
atgatggaaaagcaacctctgagggcactttttaatgcaatgtaccacgagaagtttaactttgatgattttctgacgtactcagtgtctgatagctacgaaatatcatctaaggagaagctgttcgaacgcaaattcaagaagccaaaggatatggttaagaactatcatcggttcttgaacctgttcgtcttcgactatttagagactaacccccgagtagtgtttagctacaaaaaaggtttgtccgccctgaacgctgtagagaggcacagcctgagcaaattcttttttcagactgacatctcgtcattcttcgaatccatcgacaaaaagctgattcgcgaaacaattgttgccggctgtagtgcatgtccagtgtccgacatcgacctgtacatcgaccgaattgtcgacatagtgtgcattgataatgccctccctgttggattgccgtgcagcgctcctatcagtaatgcggtgctgctactcttcgataacgagatcgaaaagatctgcgctcagcgcaatcttatatataccaggtactccgacgacattataatcagcgggatggagcggagtagtttagacggcattgataaacaggtccgtggatccctcgaagtcatctataacaacaagttctcgatcaatatcgccaagacaaaattctttaaggtgggcaacaagatttccatccttggggtgaatatcttgcccaatgggaaagtgactccagacaagagcaaaaaggaagagctcgagattctgttacacttttatctgaccgacagggacaaatttatttctagagcctcagagatgaagagaggtaacaagaataccctatctgaggaggattgtctgaacctcctcgggggcaatctgaattacgttgattctatcgataaggactataccgataaacttagaagaaaattcggagtcgtgacaattgataaactcatacatcggggctttcccgtgaaaaaatga

SEQ ID NO: 11996 - RNA, 972 nt, synthetic construct
  source 1..972: mol_type = other RNA
atgaaaaaacacacactcgaaaggctgtttgacatgatcacccatggcaaatatgacttttccgactttctacactgcaatcttgatgacgaggtgaagatttttgagatcagcagcaagaagcttagcagccagtcgaggatcgtctattcagccagcgcaaagctcaaagattttcattccttcttgaatatggtggttttcgaacagctgtcctcgaacgaggatgttgtttattcctatagaaaaggtgtgaatgccctggacgccgtgattgatcacaggaatagcaagtacttcttccagacagacatcagaaaattcttcccgtctattgaccgagaattaatcgcaaagactatcaatcgcaataaagaacggatacccgtcagtgattttgacaattatttcgatcgagtccttgatatggtctgctatggaggatctctcacaactggcttctcaacgtcccctctaatttccaactctgtgctcatagaattcgacgactacttttacaagtattgtaagagtaaccacctcgtatacaccagatactctgacgaccttatcgtctcttccagtaaaccatttgagatcgatatagagtcaaccatcatcgagaagttagataagctctatcgtggcaattttgggattaacaagaacaaatctcgctacagtcatattgggcaaaaagtaaaactgttgggtatggtgattctgcccaacggagatattacaattgacaggaaacagaagaaagagattgaggtgctgctgcactactacaaagaagacaaaaagcgcttcgatgaactgatagacggcgattatttgaagggaatggctcggatcagcggcatcctgaactacattaagatgatcgacgaggagtacttgaacaagctgatgaagaagtacggggtgactctgatagataccctgatccggaaggctgcgtcaaagtga

SEQ ID NO: 11997 - RNA, 972 nt, synthetic construct
  source 1..972: mol_type = other RNA
atgaaaaaacacaccctggaaaggctctttgatatcattatgcacgggaagtataatttctctgacttcctcttctgtaaacttgacgacgaggtgcaggtgtttgaaataggttcaaagaaattgtcctcacaatcccgtattgtctacagcagctccacaaagctgaaggattttcacaactttttgaacatggtcgtttttgagcagctgccaagcaataataatgtggtctacagctatagaaagggtgtcaatatcctggacgccgtgatcgatcaccgaaacagtaaatatttcttccagaccgatatcagaaaattcttcccttcgatcgataagaagttagtaagcgagactataaagaagaataaggaaaagatcccggtttctgatttcgataaatattctgatagggtgctcgacatggtgtgccacggcgaccatctgaccactgggtttgcgacatcacccttgatttccaattcggtgctgatcgagtttgacgactacttttataactactgcaagaacaaccatcttgtctacacacgctacagcgacgacttgatcataagttccaacaatcctttcaaggaggacattgaattactgattacaaaatctctcgacgaaatctaccagggcagtttcagcataaataaatcaaagagtcggtattcccatattggccagaaagtgaagcttctaggcatggtaatcctgcccaacggagatattaccatcgatcgcaaacagaagaaagagatagaggtgctgcttcattattacaaagaagacaagaaccggttcaacgaactcattaatgacgactatcaaaaaggaatggctagaatttctgggatcctgaactacatcaagatgattgatgaggagtacctaaacaaactcatgaagaagtacggagttactctgatcgatacgctgattaggaaagcagcctctaagtga

SEQ ID NO: 11998 - RNA, 948 nt, synthetic construct
  source 1..948: mol_type = other RNA
atgaaaaagtcatccctggaacaattgttcactcttatcctgcacggtaagtacagcttttcggagtttctggaatgtgatctggagagcgaactaaccgagatgactgtaaggtcccggactctgtacagccctagtaataagctcaagagcttccactatttcattaacatggtgattggcgaacagctgaacatcaatggcaaagtcgtgttctcatatagaaaagggaagaacgcattagccgcggtccaggtgcacaggaaatccaagtacttttttcagacagacatcagagcttttttcagcagtatcaacaagcaattgattaaagaagcacttctcaggagccgtgacaatatacccgtcctagacctggatatctacctggaccggatcgtcgacatggtgagtgtggggaattccttggccactgggttttccacctctccactcatttctaacagcgtgctcgtggaattcgacgacgcccttgttaactactgcacgacaaataatctcatttacacacgctattctgatgatctgataatctcaagtcagaatacgatcgatcatagtattgagaacgtgatagagagcttcttatcacagtattactctgatacattctctctgaacgatcgcaaatcccgatattcacacatcggtcagcgcgttaaaatccttggcatggtaatcctgccgaatggcgacattaccattgacagaaaacagaagaaagagatagaggtcttgctccatttctacagagaggataaaaacaagtttcgggagctgcttaacgacgatatggataagggctttgcccggatctccggaatcttgaattatattaaggttgtggacgaaggatatctccataagctgatgcgaaagtacggagtgaccgttattgacaccctgatgaggaaggcttctttatga

SEQ ID NO: 11999 - RNA, 948 nt, synthetic construct
  source 1..948: mol_type = other RNA
atgaagaaatttcccctcgagtctctgtttgacattatcttacatggcaagtacaagttttctgaattcgagaactgccagctaaacgaagaggtcacacgcatccaggtgcgaagcaggactgtatattccccgtcctccaagctgaagagttttcattacttcttgaacatggttctatgtgaacagttagcgctcaacgagttcgctgttttctcttatcgtaaggggatttccacgttggacgccctgaaattccacgtgagcaataagtacttttttcagaccgacatcacctcattctatagttcaatcaccaggagcattatcgatagagtgattgaggtaaataagcccaatctgcctatttccgatatcgacaagtttcacaaacggatccttgactttatttcttacgatggtatactccctacaggcttttcaacatcaccactgatctccaattcagtgcttatcgatttcgacaatttgttcgcacagtattgcatgaataagggtctggtctatacccgatacagcgacgatataattgtctctagcaaaaacgaattcgatatcgatgtcgagaaggtcattagcggattccttaaagagctctatggagatactttcaatctcaatagcagtaaaagtcggtattctcacattggccaaagaatcaaagtgctcggcatggtggtgctgccaaacggggacattaccattgataagaagcaaaagaaagagatcgaagtgctgctgcacttttacagggaggactactcccgcttcagagacataataggagacgatttggataaagggatggcccggatttcgggcatacttaactatatcaagaacatcgacgaaagttactaccataaactgatgagcaaatacggggtgaccactgttgacatcctgacaaagaaagctggaaactga

SEQ ID NO: 12000 - RNA, 984 nt, synthetic construct
  source 1..984: mol_type = other RNA
atgactaatgccgtcacctcgggtcccaagatgcctctcgaatcattgtttagggccatgtatcacgacaagttcgatttccaggactttgtgaatggcgaaataagccgaaactatgagcgcactcagtatctcgaccgtgagaagacgcgcgagatccttaagcctaaccaaaagctgaaaaccttccacacttttctgaatctgttcctcttcgagcatttgccagtgaatagagatgtcgtgttcagctaccgcaagggggtatctacatatgacgctgtcatccctcacgctaagagtagacattttttccaggcagacattagttccttcttcaccaacattaacagggaaatggtaaataaaaccatctcctttggatacgactcagtccctatttccgatatcgacttctacaaggaacggattctcgatttagtctgcgttggcgatacactgccaacaggttttcccactagtccaactatcaccaatgcagtgcttagaccctttgatgaccagctacaggcgtactgcaacagcaactctgccatttacacccggtactcagacgatatcattatctccgcactcgatagggaattgccgtcagacataaaggattacgtgacccagactctaagcgtgattacggccggccgtctgcagcttaatgagagaaaatgtcgacatttccacattggagggaaggttaagatcctgggaatgctgatactgcccaacgggcaaatttctgtggatagcaaaatcaggagggagacggagacactgctctacttttatgtgcgggacaaagataaattcctgaacaagacaggcttggatttcgacaaaggaatgaaacgggtttctgggtttctgaattacataaacacaatcgaccaacgctatttagagaagcttagacgaaaatatggcgctaccgtgatcgacatgtttctgcaccggtcctttgactga

SEQ ID NO: 12001 - RNA, 951 nt, synthetic construct
  source 1..951: mol_type = other RNA
atgaagaaacagagctttgagcatatgtataatgctatgtttcacggaaagtatagtttttccgactttcttaactgcgatatagattccgaatacacaactatcaatctgagggaccgtgttatctacagctcctcaaagaaactcaaggatttccacaagttcttgaatctgttcatcttcgattttcttcatatcagcattgactctgttttttcttaccggaagggttataatgtggtggatgccgtgcagatgcacaaaaatggcaaatatttcttccagtctgacattgtagatttcttccctagtatacatgagaatctcgtgaaaagtaccctgaaacattcattggaatctactcccattctagatctcgataaatacctggacctgataattaagctgaccatgattaacaacaacttacctataggctttagcaccagcccactcatctctaacgccgttctactggactttgatgaagagattttatcgtactgtcgaaagaagaacattcagtatagtagatactccgacgacattatctttagcgccgagaacatcgaggagattattgaagtaccaatcgtggtcgagaaatgcttgatctcacactataacaatacgttcaagatcaacaagagcaaatcaaaaatcaagcacattggggggaaagtgaagatcctgggcatggtcattatgcccaacggttccctgacaattgactccaaactcaagaatatcatagagacactccttcacctgtataggaccgacaagcaaaaacttaaagaaatctccgagaatgacctcgaaaatggaatcaagaagatcactaattacctgaactacatcaacgcggtcgatgcaaactatctgctgaagttgaaaaagaagtacggaccggctatcatagactacttcattcataaaaagcgcaattga

SEQ ID NO: 12002 - RNA, 951 nt, synthetic construct
  source 1..951: mol_type = other RNA
atgaagaagccggatctggaatccgctttcaacagtatgtttcacgggaagtacaaattcagtgagtttatcaacctcaacaccattgatgagtacacaattattcagcacaataacaggatcgtgtactctacaactaagaagttaaaggactttcacaagtttctgaacctctttgtgtttgaatatctgcgcatcaatgaggaggtagtgttttcctatagaaaaggacataatgttgtggacgccgttaaaattcatgccaagggtaagtacttctaccaatctgatattatcgacttcttctcatgcattaatgaacagcatatcgatcatagcctgaagatatctctctcaagtattccagtaagcgatatcgaaaagtacgcaatgcaggtcaaaaatctcatcctaatcgacggcaaattacctatcggcttcagcacatcaccccctatttctaactcagtgctgttcgattttgacaagattatcaagcagcactgcacactgaacgatattaaatattcccgttatagtgacgacatcatattctccgcgaatagcttgaatctgttggacgacatcgagaaaataactgaagaaaccctgttgaaaaccagcggaaacgctttccacattaacaccaagaaatccaagataaagagcataggtgaacaagtgaaaatcctgggaatggttatcatgcccaacggcgaactcaccgtcgactcgaaaattaagaataagacggagatcttgctgcatcactaccggactgataaagagaaattcaaaaagatctccgagaatgagcttgagaagtctatccttaacctagggagccttcttaactatatcaatgcagtcgacaaaccatatctctacaaactgaagaaaaagtatggcgccacgactatagatttctttattcacaagacccgagggtga

SEQ ID NO: 12003 - RNA, 1002 nt, synthetic construct
  source 1..1002: mol_type = other RNA
atgttcgatgagaatcagaaaagatccctgcgggagatattcatctctactttccatgaaaagatgtcctttcaagactttatacagctggacgtgggttccgagttccagaaatttaacttgaaacgtaggaccctatatgcaccctcatcaaagcttaaaaggatccaccgctttctgaacaacactatattcgaatttgccgattacaacaccgacgtggtattttcttatagaaagggtgtcaacatccgagacgccgttgaaaagcacgcaggaaacaattttttctttcagaccgatctttccaacttttactccaatattcatgagtccgacgtccgacgcgctttaagtaatcagctcactaatactccagtgcttgacattgagaagtacattgataagatcatcgagctggtagtttttgataatcacattccagccggattttcgacatctcctatcctgagcaacatttgtttgtttgagttcgataaccagctcaacaaatactgcaatgaacaccacttaacctacaccagatactcagatgacctcataatttcaagcaagactgaccatttcagcgaggatatagagtctgttgtgagcaatctgctcagcgagtatatcaatgctgggatcaccatcaataagttgaagacaaagctgcacaagaaaggccataactttaagatgttgggattcaatgtgctgcctaacggggtggtgacaattcccagcgtcgacaagaaggaaatcgaaacactactctatttctaccttaccgacagcaacaagttcgaaaattatttccaatctacgttctgcaacaccgaggctgaactgggcgaaaaatctctgcgcgagctcgccatcggcacattaagtggcaagctgattgcgttcaacagtatggacaaacagtacgtctcgaaactgaggcggaaatatgggaatacgatgattgatatgttcatccggaaaagtgtgaaatga

SEQ ID NO: 12004 - RNA, 936 nt, synthetic construct
  source 1..936: mol_type = other RNA
atgtttaaagacttcatgcagatcgatgttaacggtgagttccagaagatcaatcttaagaagcgcacagtatacgccccaacacccaagttaaagctgctgcacaggtttatcaataacaccgtattggaattcgccgattataacgctgacgtggtgtttagctatcgcaagggagtgagcataaggaatgctgtcgaaaaacattcccacaacaatttcttctttcagactgatctttccaatttttacggaaatatccaccaatctgaggtccagaccgcattaatgaaccaattgaaaaatacccccgtgctcgatgtggagaaatacatccagcggatcgtcgaacttgtgattgttgacgaccatataccagcagggttcagcacttcgcctctgctctcaaatatttgtctctttagcttcgacaacgagctgctgaaatattgccaggcccacgatttaacttacacacgatactctgacgatttgattatatcaggtcagactaacgagtttgcaggagacatagagcctgtgatcaacaatctcctggcggaatacgtcaataccggcatctccatcaataaatccaaaacgaaactccacaaaaagggccacaagttcaagctgctaggctttagtatcctgccgaatggggtcgttacaattccctccgccgacaaaaaggaaattgagagtctgctgtacttctatctcacggataacaacaagtttgagaaccatttcaagaacacccaaaatcctaaagacatcgaaagttacgacaagtcattgcgggagcatgctcttggcacactgtcagggaagctgattgcctttaactctatggataaacagtatgtgtctaagctacgtagaaagtatggcaacaccgttattgatatgttcattagaaagagcgtgaaatga

SEQ ID NO: 12005 - RNA, 1002 nt, synthetic construct
  source 1..1002: mol_type = other RNA
atgaatgagaataatatcaataggaacctgaaggacatctttaatagcacctttcacgggaagatgtcctttgaagacttcctctctctggacgttcagtccgaatacggtacaatagcactcaagaagagattggtttatgtgcccagccctaaactgaggctcgttcatagattcatcaataagaccattctggaatttgcagactgcaataaaaacgtggtttacagttaccggaaaggagtatcaactagggatgctgtcgagaagcatagcggccacacttacatattccagaccgatttgacggatttcttcaataacattcgtaagagtaacgtggtgaactcgcttaaaaagcaactgtcaagcgtgccaatcaaggatatcaacacatttattgacgtgatagccgacctggtcgtcatcgatgatcacatccccgctggatttagcacatcaccacttctgagcaacatttgtctattcgactttgacaatgagctcgagaagtattgcctctctaataacctgaagtatactcgctattccgatgatttaattatctccggctcttccattgattttacaacaacaattgaggccatcattgagactttcctgaagaagaacgtaaataatgccctttctatcaacgaggctaaaaccaagatacacaagattgggcataacttcaaaatactcggcttcaatatcttaccgaacggcatagtcaccattcctagtgctgacaaaaaacaggtcgaaagtcttttgtactttttcctgactgacgaaaaaaagttcgaggacttcttcctggggtttaccaacaaaatcaagcagggtagcgacgataaaaccgtgcgggagaaggccatctcaatgctatctggaaaattgatcgcgtttaacgcaatggataagaaatatatcgccaagctgcgcagaaaatacggcaacaccgtgattgaaatgtttattcgaaaatccgtgacgtga

SEQ ID NO: 12006 - RNA, 1002 nt, synthetic construct
  source 1..1002: mol_type = other RNA
atgaataacgaaagcaccaagcgaagtctcaaggatattttctcttccacttttcacgataagatgagcttcgacgattttctgaggctggacgtcaatcgggagttcaagacaattaatcttagaaagagactggtctatgctccctccgccaaattaaaacaggtgcaccgcttcattaacaagaccattttagagtttgcagactgcaacaccaatgttgtgttttcttatcggaagggagtcagcacccgggatgcagtagagaggcattcgcatagcaactacatatttcagacagacctcagcaaattcttcaacaatatccaccgcgatgatgtgatgacggcattgaagagccagctatcaaacgcccctgtatctgacatcgacttgttcatcgaaaaaattgtcgatcttgtggttatcgacgaccatatccctgccgggttttccacttccccactgctcagtaacatttgcctctttagattcgataatgctctggaagcttattgtgaggccaatgaactgaagtacactcgttactcggacgacctgatagtttcagggagtttgaacgactttacagagagtatcgagacggtgatcgataacttgctgattgaacacgtgaataacagcctttgtatcaataaggcaaaaaccaaaactcacaaagtgggccattccttcaagatcctgggttttaatattctgccaaacggcgtggtgaccatcccgtcacccgacaaaaaggaagtggaatcacttctatacttctttctgacagacgaccagaaatttgaggattttttcaagaagtgcgcggattctaaaacccccgagacagatgataaaaccattagggagcgagccataggtatgctctccggaaaactgatcgctttcaatgccatggacaagcaatatgttgcgaagctccgcaggaaatacggcaacacagtaatagacatgttcatccggaagtctgtcacttga

SEQ ID NO: 12007 - RNA, 1002 nt, synthetic construct
  source 1..1002: mol_type = other RNA
atggacaataacgataaaaatagatcactggaagagattttcgtgagcaccttccacgacaagatgtccttcaaagaatttcttagcctggatatcaataacgagtaccatacgatcgacctcagaaaaagggtgatttatgcccctacccccaaactgaagcagatccaccggttcatcaataaaacaatactggagtttgctgactactcaaaagacgtcgtgtactcttatcgtaagggggtgagtgtcagagatgcagttgagaagcacagtaacaacaccatattttttcagaccgacttttctgacttctatagtagcattcacgccgaaaacgtcaaaacatccctgtataagcaactgtccaacacctacatctctgatattgagaagtatatcgataggatactggaattaacggtaatcgataatcatatccctgctgggttttctacttcaccactcctaagcaatatctgcctctttgacttcgatcaggagttgttgaagtgctgtaatgacataggattgacttacacaaggtactccgatgacatcataatttccggttccgataaaacttttactgacgacattctgtcaattatcaaggaccttctcgggaaacacgtgaactcagaaattagtatcaacgattccaagaccaagataaataagaagggacatgacttcaaactcctgggtttctcgatcctgccaaatggcattgtaacaatccccagtgagtacaagaaagaggtggaactgctgttatacttctaccttacagacaatgagaagtttgaggattatttcaagaagctgaatgagaacaagaagctagaacttgaggacaaaactttgcgcgaacatgcgattaactctttaagcggcaagatgatcgcctttaacagcatggataagaagtacatttctaaactccggcgaaaatatggcaacaccgttattgatatgttcatccgcaaaagcgttaaatga

SEQ ID NO: 12008 - RNA, 939 nt, synthetic construct
  source 1..939: mol_type = other RNA
atgtccttcgaagaatttctacggctggacgttaagaacgagtttcaccgcattgacctgaagaagagaatcatttacgccccgtcattgaagttaaagcagatccacaggtttatcaataagaccgttctggagtttgctgattataatagtgatgtggtgttcagttaccgaaagggagtctctatacgagatgccgtggagaaacatagctcgaataacattttcttccaaaccgatttttccaacttttacaggtcaatccacttgtcaaatgtagagtctagcctcaacaatcagttgagcgacactctcatttctgacatcgggttctatatcaaccgcatcattgagctcaccgtcgtagataatcatatccctgcggggtttgctacttcaccacttctgagcaatatctgcctgtttgacttcgacaaagaactcctgaaatattgcaacgacaacaacctcacttacacgcgttatagcgatgacattataatttccggcgtgaatgacgtgttcgtggaatccattaaagacttgattaagaatctgctggcaaaatatgtcaacaaggatatccatctgaatgatagcaaaacacggatcaataagaagggtcactccttcaagttactgggcttttctatccttcccaatggcatggtgacaattcccagtagagataaaaaggaggtggagctccttctgtatttctacctaaccgacaactcaaagttcgagaattatttctctaccatagccgataacaaaaaactcgggagcggagataagagtctgagagaatacgccatcaacagtctttccggaaaactgattgcattcaactccatggacaaatgttacatcagcaagttacggaggaaatacggtaacacagttatagacatgtttatacgcaagtctgtcaaatga

SEQ ID NO: 12009 - RNA, 1002 nt, synthetic construct
  source 1..1002: mol_type = other RNA
atggaagctaaccagaaaagacccttgatcgatatatttatcagcactttccacgacaagatgtcattcaatgagtttttgacacttaacgtgtcgaatgagtttaaacggatccaactgaacaagcgggaagtttatgcaccttcgccaaaactcaaaaccatccaccgcttcattaataagacaatcctcgagtatgccgattataacaccgaggtcgtattctcatatcgaaagggaatttctacaagggaagccatcgagaagcattcagcgagcaattactttttccagactgacatcagtaatttctacaataacgtcagactggaaaatatctatacgagcctgagaaaacagcttaacaatacacccgttctggacatcgagaattacatcgacaacattgtcaacctggtggtggtggatgagcagctacctaccggcttcagtacttcaccgcttttgtccaatatttgtcttctggatttcgataacgcactgttaaaatactgcaaagacaatttcctcatctacacaaggtacagcgatgatataattatctctgggtccgacgatgggtttgctgtggaaatagagtccattgtgagtaattacctgaataacttcgtcaacgagaagattaagatcaactctgccaagaccaagtttcacaaaaggggacatgacttcaaactcctgggtttttccatattacccaacggcatcgttaccattccaagctccgacaaaaaggaggtggagagcttgatctatttttacctgacggacaacgaaaagtttgaggacctatttaagaagatctccgtaaacaaaaagctcgaaaatactgaaggtaagcctattcgggatctggccatttctagtctgtctggcaagctgatatcctttaactctatggataaggactatattagcaaactccgtaaaaagtacgggaataccattatagacatgttcattcgcaaagctgtgaagtga

SEQ ID NO: 12010 - RNA, 987 nt, synthetic construct
  source 1..987: mol_type = other RNA
atggagaaaagatcactggataaagtttttctgagcatattccacgataaattctccttcaatgactttatcgtctttgacctgtccagcaattacaaaaagctcatggtgaataatcgggaggtgttctccgccagcaaagaactgaagtacattcataagttcatcaactcaagtatcctggcatacgccaagtataacaaggatgttgtgtactcttatactaagggagtgagcatccgtgacgcaatcgaaaaacactccggaagcaaattttttctgcagacagatattagcaacttttatggcagtctcaatagagacaacatcgaaatttcgctccgctatcagatagataatttcccaatctcagatatcgaggactacatcgacttaattgtgtacttaactgtggtagaagataagctgccagctggtttcagcacgagtcctctcctatcaaatttgtgtctgcttgactttgataccgccctcctgaagtacgcgaacgaaaataaactagtctatacccgatattccgacgacctgattatatcttctgttaatgaccggctcgataacgatatcgttctgaagatagagtctttgttgtgcgagcatgtcaatgatagtatctcactgaaccaatcgaagaccaaatttaaccacattgggaactctttcaaactgcttggccttaatatcttgcccaatgggaccgtgactatcccttcctccgagaagaagaagttagagacactcatatacctgtatttcacagataaggacaagtttattgacttcaccaacaacaacattaagtacaacaaagagagcaaagagaggacggtggtagaggtaggcactaggtacattacaaacaaattggtcgctttcaattctatggaccccgaatatgtgaacaagcttaggagaaagtacggtaacaccgtgattgaaatgtttcttcgccagagtgtcaattga

SEQ ID NO: 12011 - RNA, 1038 nt, synthetic construct
  source 1..1038: mol_type = other RNA
atgaaacactatgaagagaagcctcaggagtttgtgctgactagcattcaaaagaaacgttcactacaggaagtctttttatctaccttccacagccagctcacttttgatgatttcctcaatctcaatgtggctcacgaatataagaaggttgaaatacagaagcgggttatctacattccgtcctacaagttaaagcgcatccataaatttttgaacaacaccgtgttcaaccatgctaggttcaacacagatgtggtgttctcttaccgaaagggtatcagcgtcagagatgccgtaaccccacatgccaagaacaaatttttcttccagaccgacatagtctcattttaccagtccattaaaactaacgatgtcgagagggcccttaagaatcaactgagcgatgttccaatcagtgacattgataggtacatcgatcacattgtgaatctcgtggttgttgacgatcacattcctgctgggttcgcgacctctcccgtgctgtccaatatatgcctggtcaattttgacgatgcactgctggagtactgtaagacgcagcacctgacttacaccagatacagcgacgacatcattatctccggcgagtacgaactggaacataaggtcatcgagattttcgtaacagagctactgaaagccaatctgggcagggcagccgaacttaacatacaaaaaacgaaacggtacaagagaggacacgatttcaagttgttaggtcttaacattctccccaacggagtagtgacaattccccgggagagtaagaatgagatcgaggtgatgctctatctttatttgacagacgctaaaggatttgacgactatgtgaaacatacattcttttcatctgagacagacatcgacagttccaccctgagagagcgcgggatcgccaaactgtctggcaaaataattagtgcaaagagcatggacaacaattatatctcaaagttgcgacgcaaatatgggaacactatcatggaaatgtttatccggaagtcggtgaaatga

SEQ ID NO: 12012 - RNA, 993 nt, synthetic construct
  source 1..993: mol_type = other RNA
atgccagaaaaaaggcagttcatcgaagtgttcaggagtaccttccacgagaagatctcacaggaagagcttatcacattggagacggagaacgaatacaaaatcttccaacacaagtctagaaaaacctatgcccctacaccgaagcttaaaaacatccaccgcttcttgaataacacagtttttgagtatgcagattacaacaaggaagtcgtgttttcttatcggaaaggcaagtctgtgagagaggccgtcgagttacacgccggatctaagatttttttccagactgacatctccaatttttatggaagcatcactcgagaaaacgtagaacatagtctccgggaacagctgaacaatgtgccaatatctgacattaaagagtatatccctctcatcctgaaactggtcgtggtcgataaccacattcccgctggcttctcgactagccccgtgctgtcaaatatctgcctgtacgaattcgacaatgctctgcaagttcattgtgagaataacgggctgatatactcccgatattccgatgatattatcatttccggggagtcttcagagtttgtggatcgtgttaccaagacaaccgaagacctgttacataagtacatcaacactaacgttagcttgaatcccgataagactaaggtacataaaaagggccggtactttcgccttctgggttttaccattctaccagacggtaagattactattccttcgcaggacaagaaagaaatagagacgagcctgtacttttatctcaccgacagctcaaaatttgtggacctattcaccaagacaaatcaggtagcgctgaatgaggtggatagcgtgagtatccgcgagagagccattgcaagtctcagcggcaaactcataggggtgaactccatggacaaaaactacatttccaaacttaggggcaagtacggaaatacagtcatagatatgttcatcaggaaggcagctaagtga

SEQ ID NO: 12013 - RNA, 1002 nt, synthetic construct
  source 1..1002: mol_type = other RNA
atggaactgtcaaaggagaggcgatcactcgaagaggtttttataagcacatttcatgagaaggtgaatttcgacgatttcgtaaacttttcgatcaacaaagagtacaagacatttgaggtgaatagacggaaaatttatgcgccgtcaaagaagttaaaacaattccagcgcttcatcaatagctctattcttgaatatgccgattataatcgggacgttgtgtactcctatcgtaaaggggtcagcataagagacgccgttgagaagcacgcaagctcaaatttcttttaccagacggatatttccgacttctttggaagtattactggtgatgacattatgaaggtgattaacacctccctacttaatgtccctgtaagcgatgtgctcgagtataagcaactgctgtttgaactgatggtggtggataacaatctgccagccggctttgcaacttctcctttgttgagcaatattacgctggtcgactttgataatgctctcaagaaatattgcgataggtccaacatcatctatactcgctacagcgacgacttgatcatctcttctgtcaatgaaggattcgtagacaatatcaacgaggtgattaaaagcttcctccatgaacacatgggtgaaaggttcaaccttaattacaacaaaaccaaggttcgacgcaagggccagaaggtgaagatattaggctttaccatcctgcccaacggcattatcacaatatccaaatcatacaaggaggaggtggagtctctgttgtatttctacctgaacgatacagataagttttccgactacgtgaagaacaaaatcaatcccagagataaccagatcggggacagaactttcgaagaattcgggatcagtagtctcagtggaaaactgatcgctattagttctatggactcgctttacatctccaaactaaggaagaaatacggcaacaccataattgagatgttcctgcggaaaaccgtcaactga

SEQ ID NO: 12014 - RNA, 981 nt, synthetic construct
  source 1..981: mol_type = other RNA
atgaagcggtcctttgaggagatattcattagcacattccacaacaaggtgtcttttgatgaatttttgaccctggatattgaatcagagttcaaaaaaatccccctacagaagagaaccgtttatgcaccatcctccaaactcaaacaaattcacaggtttctgaatcatgcggtcttcgagtacgctgagtttaataaggacgtggttttctcataccgcaaaggagaaagtactagaacggctgtggagaagcacgccaacaatagggtgttttatcaggctgacattaaagacttcttcgggtctttgaagaaagagaacatcctccatacaatcgaagctcagttagagaataccccagtgctggatatcgtggattacagggaccgcctgttagatcttacagtcgtcgatgaccatattcctgcagggtttgccacctcgcccattttgtctaacctctgcctgtttgagtttgacaatgccctagacaacatatgtaagaaagaggaactgacttacacgcgatatgcagacgatatcatcatttcatcccagactgatgccttcctgcccgagatagaggagaaaattcagaagcttctcagcaaaaaggtgaacccagaaatcttcttaaatctggccaagcggaaagtccagctgcaaggtcagcgtatcaagatcctgggcttcaatattcttccgaatggcattgtgactatccctaataaggataagaagtctgtagaaaccatgcttcacttctttatcaacgacgaagaaaagtttaaggactacgtcagcaagaacataaagagtaatagtgacggggaaccttctctgcgggatatcggcatctcaagtttgtccggaaaactcataagcctgaacagcatggataaaaactatatctccaagctcaagaagaaatacggtaacacagtaattgacatgttcatcagaaaaagcgttaaatga

SEQ ID NO: 12015 - RNA, 1071 nt, synthetic construct
  source 1..1071: mol_type = other RNA
atgagttctaccggatacgcgttcaaaattgtgatccactttaacctgtctattaatatcgggttagcccttctgataaagatacagaagcaaagaactctgaaggaagtgtttaaatccacctttcacgataagattagctttaaggagttcattaacctgaacctggacgaggagtacactatcagcacattcaagaaaaagaagatctactctccatcggacaagctcaaaaaaattcacagattcatcaactccagtatactcgagcatgccgatttcaatcgtgaggttgtatactcttatctcaaaggcagtagtgtgcgagatgctgtggaactccactcccaaagccagtatttctttaagacagacattcacaacttctttggaatcattaccaccaggaatattaagaaatccttggaggaacagttcagcaatgtcccgatttccgatatcgacatgtacaaggagttcctttttaaactgatggtcattgacgacgtacttcctgttggcttttcaacgtcaccccttttgtccaatatttgcctgtttgagttcgacaatcatctgcaggcttattgtagctctaacaacttcaagtatactcggtattctgacgatatagtcatctcctcaaacaagtcctttgatatcgaggagatgtccgaaaacatccaggcattgctgagtaaacatgttaatgagggcgccaaattaaacaaaagcaagaccaaggtgcattcaaaaggtgaacggatcaacatcctgggttataatatcctccccaatgacgaaattactatatcgagcaaagacaaaaaggaaaccgaaatcctactgcacttttatttgaacgatctggataagttcgatgattacgtgacgaaaaatataatcaaccggttccgcaatagcgacaagaaatcaattagggacatcggacttagtagcctgtctgggagaatcattggcatcaatacaatggacaagaaatacctgataaagctccgcaagaaatacgggaacacactaatcgatatgttactcaggaagaccgtgtga

SEQ ID NO: 12016 - RNA, 999 nt, synthetic construct
  source 1..999: mol_type = other RNA
atgtcttacatcaaaaatcagagaactcttgaggaagtgtttaaatccacatttcacgacaagataaccttcgaagacttcatcaatattgacctgaattcagagtacaagatcacaatctttaagaacaaggagatctatagtccttcagataaactgaagaagatgcaacgcttcataaatggtagcattctggaatacgcggactttaataaggatgttgtctactcttatctcaaaggcaatagtgttagggacgccgtggaactccattcaaaaagccaatactactttcagaccgacattcataacttttttggaacgatcacagggtacaacgtaaaaaaatccttagaagagcagtttagcaacgtgcctattagcgatctggataactacaaagatttcctattcaacctgatggtcgtcgacgggaagctccccgtggggttctcaactagcccgttactttccaacatttgcttgtataacttcgacaatgccttgtacaagtactgtgagtctaatggcttcttatataccagatattccgacgatattgtggtttcttccgactcccatatatcaattgatgagatcagcgagaaaatccagagtcttttgctaatccacgtcaatgaaagtgctaagctcaacaagcggaagactaaggcacactccaagggcgagaagatcaatatcctgggttataacattttgcccaacgacgagatcacaatttcgtctaaagacaagaaagagacggaaattcttctgcacttctacctgaacgatctggatcgctttgataactatgtacgcaataacattagcccaagattcaggaatgtggatgataaaagtagccgggaaatcggcatctcttccctgtcgggccgaatcattggaataaatgctatggacaggaaatatctgactaagctccggaaaaagtatggaaacaccctcatagacatgttcctgcgtaagaccgtgtga

SEQ ID NO: 12017 - RNA, 1008 nt, synthetic construct
  source 1..1008: mol_type = other RNA
atgctactgctctcctacataaagcataggagaactttggaggaggtctttaaatccacctttcactcgaaacttgctttcgaagatttcatcgggatcaacatttgcgacgaatatagtgtgtctacgtataaaaaacgggaaatcttcagcccttcagacaagctgaagaagatccacaggttcattaacggaagcgtgctggagtacgcggacttcaatcgggatgtcgtctacagttatctgaagggacggtcagttcgtgatgccgtggaagtgcattcaaaatcacaattctactaccaaaccgacatctataacttctttggctcgatcagtccgagtaatgtaaagaagagcattgagaatcagttttctaacgttcccatcagcgacattaaggattaccagggctttctgttttcactcttcgttgtggacgggaaattaccaatcggtttttctacaagcccactgctgtctaacatctgcctccgcgactttgacaacgctttgaaccagtattgtattgagaactcctacagatacaccagatattctgacgatattatcatatccagcgataatcagttctgtatcgataagctgagcaagcacatacagaatttcctcttgcagtacgtcaacgaaaataccaaaatcaataagtccaagacgaaagtacatacaaaaggggacaagttcaacattcttggctataacattctccccaatgacgaggtgactataagttccaaggataaaaaggaagcagagattttactacacttttacctgaatgacctcgacaagtttgatgattatgtgcgaaagtctatctaccctcgcttcaaaacatcctcagacaagagcatgcgcgagattggaacttccagcctgtctggccgactgattggtatcaatgccatggataaaaagtatcttaccaaactgaggaagaaatacggcaacacacttatagatatgtttttgcggaaaactgtgtga

SEQ ID NO: 12018 - RNA, 1005 nt, synthetic construct
  source 1..1005: mol_type = other RNA
atggaaaacaatagaaactttagaaccttcgaggaagtattcaactcaacatttcataatcgggtcagctttgatgacttcgtcaatggctctataaacacggagtacagcatcgtcaagtttaagaataagagtatctactccccatcacttaatttaaagaagatccagcggtttctcaacaaaagtatcttggagtatgccctaactaatgaacgagttgtgttctcatacagaaaaggggcttcggtgagggatgcggtggaggtgcactccaaatccaaatacttcttccagacagacattaagaattttttcggccaaatcaagaaggacgtggtggaaaatattatcggcacccagttaggatgtgtgcccataattgacatagaggagtatcacgatgtgctcctccgctatctgatcgttgacgggcacgttccgatcgggttttctacgagccctattattagcaacctgtctctcttctattttgacaacgatttggaggagtactgccttaagaatgatttcaaatacactcgttacgcagatgacattattatttcctccacagactacgaaattgatctgcataagaccaaatctctgatcaagagctttctcctgcgcaacaatttcgtgggggaactgatcaatgacaaaaagactagaatccaggtgaggaacggggtcattaagctgctgggtttcaacatacttcttgatggaaccgtcactattccctccaaagataaaaaagaggtagagatcatgttgaacttctatctgaacgacaagtcaaagtttgacgattatgtgagtaaactcaaaacacgaagtggccgcttgaatgaaggaaagtctctgcgggaaaacggcattagctcgctgagcggtaggatcataggaataaatgctatggacaagaagtatatcggtaagctaaagtctaaatacggcaacgccgtaatcgagatgtttctgaggaaaaccgttaaatga

SEQ ID NO: 12019 - RNA, 1008 nt, synthetic construct
  source 1..1008: mol_type = other RNA
atggagaacatagagcagaaacgttccttagaggaagtatttaactccacctttcacagcaagctgcctttctccgctctgacagaactcactatcgacagtgagttcaagcataagatctttaacaacagagacatctacctcccgactgataagttgaagaagatacatagattcgtgaatggatctatcttagaatatgcggagattaataggaacgtggtctttagctaccgcaaaggtgtttctattcgcgacgcagtagagaagcacacctgcaacaaattcttcttccaaacagacatcaagaacttttatggcagcatttccaaaaagaacatctcagacattttcgaccaccggtttgacatggttccaatatctgatttggataactatcggaagaagcttctggacctgatggtgataaatgatcagctgcctgcagggttcagtacctcacccatgctttccaatatttgtctctttgacttcgacaatgaactggaacagtattgtaacgagagtcacttgacttacaccaggtatagcgatgatataattatctcttcgtcggagaaggagaatctgacagatctcagtgagtttatccagagtcttctgtacaaacatgtgaacaaggaaacactaatcaatgacaataagacgaagattgtcaaacacggatcaaatgtgaaaatcctagggtttagcattttgcccaatggtgaactcactatttcctctaaggataaaaaagagatcgagatccttctccacttttttctcaatgatgccgaaaagttcaacaactatatcgaaagcaagctgtcattcaaacatgacgattcttccgaccgaaacgcctacgattccgctttatcaagcctgtgcggccgaattgtcgccctgaatagcatggacaaaaaatacctggataaactgcggaggaaatacggcaatacgctgatcgagatgttccttagaaaaaccgtgttgaagaactga

SEQ ID NO: 12020 - RNA, 1002 nt, synthetic construct
  source 1..1002: mol_type = other RNA
atgaatatcgccaattacaatagaaccttagaagaggtcttcaagagtattttccatgacaagttgaagttcgaagagttcttaaagctggatgtgaagaacgagtaccaggtgtttgatatcaaagggcgcaaggtgtactctccttccaaaaagctcaaaaagatccatcggtttattaacgggagtattttcgagtatgcggactataacaaaaatgtggtgtattcgtatctcaaaggcgtctcagtaagggacgctatagagaagcacgcaaagaataactatttttacaggacggacattaaggattttttcggtagcattacaggcgaaaatgtcatacgatctttggaaaatcaactcggcaacgtgcctatctccgacattagcaattatgtcaaccacatcttcaatctggtggttgtaaatggtcggctacccgccggctttagcaccagtccaatcctcagcaatatctgtctcttctcttttgacaaagaactggaagtcacttgccagagagacgacatggtttacacacgttacagcgacgacatgatcatatcatccattaacgagattgatgaggaaaaaatcaccggacttattcaatctctgcttttccggtttgtgggagataacgttttcctgaacgataagaagaccaagatacataagaaagggactcagggcaccctcttaggttttaacattctgccaaacggggaggtgacaatcccgtctcgagataaaaaggagatcgagatccttttgcacttttacctgtccaacagtgactccttcgtaaattatgttagcaaaaacatccagcccaggtacgccaactcagataacaagacacttaatgaaatcggcgtgtcctatctatcaggaaaactgatagggattaacgctatggataaaaagtacctgactaaactgcgctgcaagtacggaaatactctgatcgagatgtttctgagaaaaaccgtgttgtga

SEQ ID NO: 12021 - RNA, 1002 nt, synthetic construct
  source 1..1002: mol_type = other RNA
atggacaggacaaataacaacagaaccttagaggaagtgtttacaagcatattccacgacaagctaaagttcaaggagtttctggagctcaacattacgaaagagtatgaagtattcgaggttaagggacgtcgcctgtattcccccaccaaaaagctcaaacaaatacaccgctttataaatgggagcatctttgagtacgcagagtacaacaaaaatgttgtattcagctatctcaagggggtcagtattagagatgccatcgaaaagcacgctttaaatcagtatttttaccagacggacattagggatttctttggctccataaacggcgaaaacattaatcattccttgagttctcagttggacaatactccaatttccgacatctcggattacatcaacctgatctacaacattgtggtgattgatcagaaacttccggttggtttcagcactagcccaatcttgagcaatatctgtctgttcaacttcgataatgagcttgagaagatctgcatctcaaataatatgacctacactcggtattccgacgatatcatcatctcatcagggaatgagattaacgagctggaaacaacctctatcatccaatcgctgctgtttaacttcgtgaacaacgagtttattgtgaatgataagaagaccaagacatacaagaaaggctctggcaatagtcttctgggtttcaatatactccctaatggctacgtcacaatcccttccaaagataaaaaagaagtcgagattctgctgcatttctatttgaccagtcccaagagcttcgaagactacatcattaagaacatcgtgaataggtacaaaaaccaggaaggcaagtcaatcgacgaaattggaaagtcttttctctctggaaaactgattggtattaacgccatggacaagaaatatctaactaagctgcggggaaaatatgggaacaccctgatagaaatgtttcttcgaaaaactgtgctctga

SEQ ID NO: 12022 - RNA, 987 nt, synthetic construct
  source 1..987: mol_type = other RNA
atgtctgagaaaaggtcccttgaggacatttttctgtctacgttccacaacaagtacagctttaaagagtttatcgaactcgatatcagcaaagagtacgagatctttaacataaacgaccgtacaatttactcaccctctgcaaaacttaaggcgtttcatcgatttatcatcagttgcattcttgaatatgccgaattcaataaagacgtggtgttctcgtatcgcaaaggaacaactattcgggatgccgtcgagcggcactcaaacaattcattcttctttcagaccgacatcaagagtttttttacttccatctcaaccaatgatgtgaagtctacactacttcatcagctggttgatatcccagttagcgacgtgaaccacttcatcgatctgctcatcaagtactgcgtcgtagataatatattaccgacaggtttcagtactagccccattctcagcaatctctgtctattcaagtttgacaatcagctggaaaagctggccaaggaaaagcacctgcactattctagatactccgacgatttgattctgtcctccaagtctcttgacacactgaacgagattgaactcaccatacagcggtatttgactcaatacataaactcaaccatcaaactcaatcaaagcaagactaagatcacgaaaaaagggcagaggattaaattgctcggcctggtgattctgcctaacggaatcgtcactatcgataaaaagacaaagaggcagatggaaaccttattccatctgtatctgaccgacgacgagaaattcgagaattacatttccacccatttcaagaacaaaaaggatcaacagacatccctgaaggaatacgggattagcatcttgagtggcaagctgatggctattaatagcatggacaagggctatttaaacaagctgagaaccaagtatggtaacacggtgatagagatgttcttgcgcaaaaccgtaaaatga

SEQ ID NO: 12023 - RNA, 1005 nt, synthetic construct
  source 1..1005: mol_type = other RNA
atgaaaaccaacactaacgagtcctatcgcactttccaagaagtttttgtgagcaacttccataacagcttgctattcgatgattttctgaatctgagcgtcgataacaatattgctgtgacccaggttaaagagagagaaatcgtacagccttcaaaacggctcaaacgcatcctgcatttcctcgctaagaatgtctttgattatggaaacatagcaaacgaagtcgtcttctcctaccgaaagggcgtgaacgtgagagatgcagtgctaccccactctaaaaaccggttcttttttcagaccgacattgccaacttcttcggatcaatcacaaagcctctggtgagcaaaagtataaggaatggtctgggatccgtgccaattgccgacatacacgagtacgccgacgtgatcctcaacatcgtttcatacaagaattgtttgccgcttggcttccccacttcgcccgccatttccaatatgtgcctactgaattttgacaaggagctgctcatccaggccaacgagttagatgtgtcttatacacgatacgccgacgacatcatacttagtgcaaacaatgatgaggtattgcgcatgctggcagccagggttgggggcttgctgcaagagttcctcggtgctgaaatcaaaattaatgaagcgaaaaccaggtatctgcagcaaggacagaagattaagctgttagggctggtggtcctgcctaacggtcaggtatctatcgacagggcagacaagattgaaattgagacactgttacatcactatctcaccaacgacgataagtttctcgggtacggcgttgtcctcaagaataaaaaggcgaaaaatgacaaggtgttgacgcgggaaaatgtgatctctatgctgagtggccgtctgattggggctaatgctatggccccagagtaccttctgaaacttagacagaagtacggcaatacaatcatcgagatgtttcttcacaagtccgctaagtga

SEQ ID NO: 12024 - RNA, 969 nt, synthetic construct
  source 1..969: mol_type = other RNA
atgccgtttggcatcgttcagatgaaaaagacatctattagcctgagagaagcatttgactcaacctttcaccaaaaattcaacttcgatgactttctgtcgctcaacatttctcaggaatacaagcagttaagtaatgagaaagtgaatcctagtctcaaactgaaaaagtatctgcgtttcttgaactcctttgtgttcgactacgccaaaataaacgagaatgtggttcactcctataggcacgaaaaatccacctacactgcggtagtcccccattgccactccaagttcttcttccaaaccgacatcaaggacttttttcataagatcagtaagcaggacgtggaaaaaatcgtggacactgctctcgacaaggccccaatttatgacatcaatcggtataagagcgagctgctgaatatcaccacgatcgatgatgtcttgcccgtgggatttccaacaagtcccaacattagcaactctttcctatcctcttttgatgatactctggaggggtactgtatcaagaacaacataatctatacccgatactctgatgatgtcatccttagttccgaatataagaacagcctcattaatatccaggatgtgattagcaactacctgaaagagatttacgatgggcgcattgagatcaacacatataagacaaagcatacgcacaagggttccaagataaaaatacttggcatggtggtactcccttcaggtaagattagcgttgacatcaagttcaaacagcacttggagattttattccacttctacattaacgacaagaataaattcgctgactatctgaagaatcattaccagggcgatttttcaaaaattagcggacagctgaatcatatcaatactatcgacaagtcataccttgataaactaaggaagaaatacgggaatttcatagtcgattcttttcatcaccaatcaatagactga

SEQ ID NO: 12025 - RNA, 948 nt, synthetic construct
  source 1..948: mol_type = other RNA
atgaagaagacctctctcagtctgcaggaagcgtttgactctacatttcaccacaagcttaatttcgatgacttcctgaacttgaacctacctcaggagtaccagaaaattagcaatgctaaggtaaacccatctcctaagctgaaaaagtatctccgatttctcaatagcttcgtgttcgactatgttaagataaacactaacgtggtgcattcgtatcgccatgagaaatctacttacactgcagtcgtgccacattgtcacagtaaattctttttccagaccgatatcaaggactttttccataaaatcaccaaacaggatgtagagaaaatcttagataccgccctcgacaatgtgccgatctatgatattcaccagtacaagagtgagctacttaacattaccaccattgacgacattctgcccgtgggcttccctacatcacccaatatcagcaacagttttttgtcagacttcgacgatgccttggaaggctactgcatcaagaatgagatcatatacacgagatattccgatgatatctttctgagctccaatgccaaagattccctgatgagcatccaaaacacaatatccgattatttgaacgaactgtatgaccggagggtcaaaattaacgcttacaagactaagcatacgcataaggggtccaagatcaaaatgctgggaatggttatccttccctcaggtaaaattagcgtcgacattaagcttaagcagcaaatcgaagtcctgtttcacttctacataaatgacaaagacaagttcgcagattacttaaagaaccactatcagggggacttttcgaaagtgtctggacagctgaaccacataaatacaattgacaaatcctacctcgacaaactgcgtaagaagtacggcaattttatcgttgattcattctaccaccaaagcattgattga

SEQ ID NO: 12026 - RNA, 951 nt, synthetic construct
  source 1..951: mol_type = other RNA
atgaagaagctgctgcttaaagaagctttcaatagcactttccacaaaaagctgaatttcgatgacctcctaaacctcgagattatcaatgagtatacaagcttcaacatccggaataaacagattctgaacccgtctgaaaaactcaagaagtaccacagatttcttaattcattcatcttcgactacgccaaaattaacacaagtgtcgtacattcctataggaaagagaagacagcctacacggctgttagcgtgcacgcaaattccaagtacttctttcagtctgatataaacgacttcttcaattctatcactgccaccgatatcaaaaatgttctgaatagcaatctggatgattcccctatttccgacatcgttaactacaaggatcaattgatcaacatagtaacggtcaacaacattttaccaatcggattttctacatctcccaacatcagtaacacttgcctgtataatttcgacaattccctggagacatactgtaatgagcgcgatataaattttaccagatatgcggacgatatcatcctatccagtaatactaaagagtcgatggtgggtattgaagagattgtgagtaagatcctgaacgaattttttaacgaccgatttgtccttaatcagcacaagaccaagcggctgaggaaagggaacaaagtgaaacttctcggaatggtcattttgccctcaggcaaagtgaccgtggacatgaagttaaagaagcagctggaaatattgctgcatttctacattaacgacaaggacaagtttagcgattatctcggtaaagtgtatagcggcaaattgagcaccatatcaggccaactcaactacatcaacactgtggataaaaactacttaaacaagctgcgcaagaagtatgggaattacattgtggacctcttttttcattcaaccgtcaagtga

SEQ ID NO: 12027 - RNA, 939 nt, synthetic construct
  source 1..939: mol_type = other RNA
atgccgctgcaagacgtgtttacaagcacattccaccagaaacttgacttcaatgacttcctgaacctcgacgtgaaatctgaatatgagccactcaagaatacgcagaaactcattctgaaacccagccccaaattgaaaaagtatctccgtttcctcaatagtttcatctttgagtacgctaagattaataccaacgtagtgttcagttacagaaaggataactctgcctacaccgccgtccgaaagcatgctaattccaagtatttctttcagacagacctttctagctttttctattcaatcactgcggaggatgttaagaacgttttagaaaactacatggggaacagtcctataaatgatctgagggagtatcaggagatcatcataaacatggtcacagtagacggggtgctgcccgttggcttcagcacttctcctaaaatttccaattcctgcctgtacgaatttgacaacgaactggaacagtattgtttagacgatgggattatctatactcggtactcagacgatattatactttcttcgaaggataacgacttgaagacagtggagaaagtgattagcggaatgcttaacaaatttttcggagcacgcttccagctaaatcctaataaaactaaacacacccacaccggtaaaaagattaagctgttgggcatggtgatcctgccaagcggcaaagtctcagtggatatcaagctaaagaagcagatcgagatcctgttttacttctacatcaatgacaagaccaagtttacggattacctggtcaataaataccagggcgacttaggcaagataagtggacaactgaactatattaacaccatcgataagtcctacttgaataagctcaggaaaaagtatggtaactttatcgtcgattcctttattcatcaaactgtgtcatga

SEQ ID NO: 12028 - RNA, 990 nt, synthetic construct
  source 1..990: mol_type = other RNA
atgaatgaaattacccataccaatttcaagaagaacacactccaaaccatttttgagtccaatttccatgacaagttttcttttcatgacttccttcactttaaccaagaaaaggaatatacgaaggttaacataggtcgtgagaaaataggcagtaaagagattctgaaggcttcggacaaattgcaaagctacttgaggttcctcaacaactacatttttcagtatgcggacattaacaaaaacgtagtgtactcctaccgcaaaggagcaaatacatatcaggccgtcaagaaacacagcgataacaatttcttctttcagacagacatcaagggcttttttaagaatgtgaaatccgccgatatcaagttcatattggaaaataacctgcacaatacccccatctcagacctgaaaaagtacgaggaacgaattctctctattgttacagtgaatgacaccctgcctgtggggtttgcctcaagcccgatcctaacgaactcattactgaaagatttcgacaatgagctagagaactattgcactcagaatgacatcgtctatacacggtattccgatgatctgatccttagctctaaggtgaaagacagtctgatagacatcgagaaaatgatttccaatatcctgaacaagttctttaacgacagctttcagctgaacaaagagaaaactaagctcactcataaaggaaacaagattaagatccttgggatggtgatcttaccaaccggcaaagtcactgtggacattaagattaagaagcagattgagtctctcttgcacttttacataaacgacaaggatatcttcatcgatctggtggggggaaattacgatgatggcctggctatggtcagtggcaaaatcaattatatcaataccatcgatcccgaatacctcataaaacttagaaagaagtacggtaactacgtagttgatctgttcttccaccagagtttcaagtga

SEQ ID NO: 12029 - RNA, 981 nt, synthetic construct
  source 1..981: mol_type = other RNA
atgaacgatattacgcatagtgaaaaaaagagccttcagagcatttttaagagccactaccatgagaagtactcatttgaggatttcctgaatttcgaccaggaaaaggagttttctaccatcgagatagacacaaaaaaaggggccaagaaagaaatctttaaacctagcgacaaactgcaagattacctgagatttcttaacaactacatcttccagtatgctgacactaatactaacgtcgtgtactcatataggaaaggtacaaatccctatcaggctgtggtaaagcattccgcaaataattttttcttccaggccgacataaaaggctttttttctagtgtaaagcgacaggatattgagtacgtgcttaataacaaactggcacaaagccctattagtgacctgaatatatatatcaaccgtatcctgaacctgatcatggtgaatgatagcctcccaattgggttcgcttcttccccgattctcactaactcgttgttaaacgattttgacaatgagctcgagaagtattgcctcgatcaggatgtcatttacaccaggtattccgacgacttgatactatcagccaaaaccaagaccccattaatcaatctggaagattacatctccgaaatgctggttaaattcttcaatgaacgcttgaagctaaacgaggagaagacaaagctcacccaaaagggcaataaaattaaaatcctcggcatggttatccttcccactggaaaagttacggtggacattaaggtcaagaagaacatcgagatcctgttccactacttcatcaacgataagaataagtttgtggacatttctggcggtaattatgaagccgcgttagacaagttgtcaggaaagatcaactacataaacacaattgaccccgattacctgatcaaactgcggaagaaatatgggaactatattgtggatatgttcttccacaagtcctactga

SEQ ID NO: 12030 - RNA, 951 nt, synthetic construct
  source 1..951: mol_type = other RNA
atggcgctcaccctgaaaaatgcttttgaagccaccttcaggagtaactacagattcgaagacttcctggcactaaagctggagcagactgccactcggaaaaagttgggcgggcgggagattgtgcagcctaatgcagagctaaaagcctatcttcgctttctcaataggttcattttctcttacgcggacgtagtcgatgaagctgtgttcagttacaagaaggatgcaagtcccaagcaatccctgataaaacattgtcaaagcaggtgcttctataagaccgacatcgccagatttttcgagtcaattacatttgatgacgtgcttcaggtttttacaaataagttgtcccaggccccaataaccgattggcctgattaccaagcccatctgcaatctctcgtcctcgtcgacggtcgtctccctattggctttccctctagcccagtaatttctaactcagtgctgtatgagtttgaccaggcagctcttgcgtgggctcaaagacacgatatcatctatactagatactctgacgatctgatcttcagcgcccagcacgatgaggtgctgaagtccctgccacagcgaattgaaaagtggctgaacgacttttatgatggacgcttcaagcccaacccgtataaaagtttctttacacatacgggcgagaaagtgaaattactgggattggtgatccagcccaacggtcatattagcgtgtcgaggtcattgaagaacaaaatcgagtcccttttgcactatttcatagaagaccaggcagtctttgaccgcctgctcgcccagcactttagcgggaatgctgtcgggctgatgagcatgctgtcctgggttcagtcaatcgatcagccttacatcgaaaagttacggaaaaagtacggaaattacacagttgacctcttcttacacggcgccgctcgactttga

SEQ ID NO: 12031 - RNA, 990 nt, synthetic construct
  source 1..990: mol_type = other RNA
atgaaacctctgagcctggagaaggcttttaacatagcctttttcgaaaaggattcatttcagaacttcttatccttcgagcccttccaacagaccaagtttataactttcgatgaacggcttattgcagaaccaacatctaagctaaaggagtaccataaattcatcaacgagttcgtcctctcatacctgaaagtcaataaggatgtcgtgttctcctaccgtaaaggatctagcacttatgacgcagtgaaactgcatgcctgcagcaagatcttttttaacaccgacatcaaatcgttctttccatccataacacgcgagtatgccaggtctgtattggtcgacaatctcagcaatgtgcccatttctgatcttaatatccacctcgataaaattctggactacataatcatcgacaactcactgcccgtcggctttccgacatcaccagcctttagcaacgcttgcttatacgatttcgatgtggagatgcagcagtattgtatcaaccacgaatatatcttcacgagatactccgacgatatcattatttcgagtgaaaatgatgagggatttgagaatatacacagtgtggtgtccgacctgcttggtgaattcggcaaagggcatttcaagttgaactcagcgaaaaccaagctgatcaaaaaaggaagtaagattaagcttctgggcatggttattctccctagccaaatcgtatctgtggatattaagatcaagaggaagctggagcacctcatacatttttatgttacagacaaggacaagttcatcgattccattatcaaggaccctaaagttaaaacttccggcctcaatgactctgagattttggaaaagggcgttaacaccgtgagtgggctgttaaatcacatcaacaccattgataagagctacttggacaagctgaagcgaaaatatgggaataccattgtggacatgctattttacaaaaatgtgaactga

SEQ ID NO: 12032 - RNA, 990 nt, synthetic construct
  source 1..990: mol_type = other RNA
atgaagccactgtctctcgaaaaagcattccacatcgccttcttcgataaggatagcttccataactttttgagttttcagcctttccagcagacgaaattttccacttttgaggaacgcctgatagccgaaccgtcctctaagttgaaggaataccacaagttcattaacgagtttgtgctgtcctacctcaaggtgaataaggacgtcgttttctcctataggaaaggaagtagtacatatgatgccgtgaaacttcacgcaaaaagcaaagtctttttcaacacggacattaagtccttttttccaagcataaccagagagtatgcccgtgctgtgctgttcaataacctaagcaacatccccatttctgacttaaacgtccatctggacaagatacttgattacatcatcattgatgactcactccccgtaggcttccccacctccccagcattcagcaatgcttgtctatacgactttgatgttgctttacaacagtattgcgcggaacatgactacatctacacacggtattcagacgatatcatcatctcttccgaaaatgatgagggcttcgacaatattaacagcgtggtaattgagttgctgggtgagttcgggaaaggtcactttagccttaatcctaccaaaacaaagctgattcgaaaaggctcaaagatcaaactcttgggaatggtcattcttccttctgaaatcgtgagtgtggacataaaaatcaaaaggaaactggagcacctgattcacttctatattaccgacaaggacaagtttctcgattcaatttcaaaagatcccaagatcaagactaccggactgaatgattctgagatcctcgagaaaggggttaactcggtcagtgggctgctgaaccatatcaacacaatcgacaagaagtacctcgataagttaaagaagaaatacggcaacactatagtggacatgctgtttttcaagaatgtgaattga

SEQ ID NO: 12033 - RNA, 987 nt, synthetic construct
  source 1..987: mol_type = other RNA
atgaaggctctcactctggaaaaagccttttccattgctttctttgagaaggatacattcgagaatttcctcacgttcgagccgctctcccaaattaagtttagtagcaaaaatgagcggctgattaccgagcccggatcgaaacttaaggagtatcacaaattcatcaacgagttcatattcagctaccttaaagtcaacaaagatgtggtcttttcgtacaggaagggagcatccacgtatgaagcagttaaattacatgccaaatcccgtgtgttcttcaatacagatatcaagtcctttttcccttctgtgtcccgcgaatacgccagatacgtgcttgacgataattcatctagtgttcccatcaccgatttctcctcttacatcgaaaagatcttggacttcataattatcgatgacgccctgccagtcgggttttcaacttctccaagttttagcaacgcttgtttgtaccactttgatttgggcatgcagtcttattgctttgaaaaagggtatctgtacaccagatattcagatgacatcatcatttcatccgagcatgagctggacgacgacatttatgcagtagtgagcggttttctgaacaaacttagcagcgcgaactttgaactcaatccttctaagaccaaactaatcaggaagggaagtaaaatcaagctgttgggcatggtgattctgcccaccggcgtggtgactgtagacataaaggttaaacgaaaactcgagcacttaatctacttctacctgaacgacaaggagaagttcgtggattctgtgaagaaggaatcagggaataagcagaaatacctgaatgaaggcgaggtgctggacaaaggcataagtatggtcagcgggctgctcaaccatgtaaatacagtcgacaagagctatctagacaagctcaagaagaagtatggtaacacaattgttgatctgttctttcacaagaacttaaactga

SEQ ID NO: 12034 - RNA, 1062 nt, synthetic construct
  source 1..1062: mol_type = other RNA
atgtctgatcagttcgttaatgtggatgataatatcctacctaccaattcatctagcccaataaaaccgaagaaatcacttcctttagagaaggtgtttaacatcgcatttttcgaaaaggatacgttcgagaacttcctgaattttgacgttgccagtggctacgaatgtgctgactttaaaggacggacgctgctcaaacccagtccaaagcttaaggactatcacaagttcatcaacgacttcatttttccgtacctcagtgtaaacgagactgtcgtgttcagttacaggaagggctctagaacatacgatgctgttagcaggcactccgagtcaaaagtcttctttaataccgacatccagaatttctttccctcgatcaccagagacttcgcgaagttggtcctccttgacaatctgaagaatattcccatctccgatatcaacaacttcataccaaaaatactggatttcgtggtagttgacaacgtgttgcctgtgggcttttctacttctccctccttctccaacgcctccttatatacctttgattgccggatgttcgactactgccaggaaatcaatgcagtttatacccggtattcagacgacattatcatttcgactaacaatgatagcgacctgaatgatatttataggattgtcgcccattttctgagccaagtaaatgatggtaagtttctcctgaacaaaagaaagacaaaaatcgtgcgccgtgggaataaaattaaattgcttgggatggtgatcctgccttctggtaagattagcgtcgacatcaaaacaaaaaacaaaatcgagcacctcatacatttctacctgacaaataaggagtccttcaaaaatgccgtcctaaagtacgataaggacggcaagataaagaacctcccagaaaatgagatcattataaagggagtgggaatggtgagcgggattttgaaccatattaacactattgaccaggaatacctgaacaagctgcgccgaaaatatggcaacgtggtgatcgatatgttttttcaccaaaacgctagctga

SEQ ID NO: 12035 - RNA, 987 nt, synthetic construct
  source 1..987: mol_type = other RNA
atgaatactcccgataatcctatcatccctaaaagcaagaagattctcaagttagaaaccattttcagcatcgcttttcacgaaaaaactaaacttgacgacttcttgtcatttaacatcaagtctgagtacaagaaactggaatataacgggaggatcatttatcatccatcaaccaaactcaagagttaccataagttcattaacgacttcattctgttctacctaaatatcaacaaggaggttgtgtattcctatagaaaaggcagctccacgtatgaagccgtgaaaaaacactcagataaaaagtggttcttcaacacagacataaataacttcttctcttccatcacgaaaaactttgcccgagaggtgttagaagataatacaagcgcaatccccattattgatatccaagaatactacgacaagattctggactttattatcgtggacgatatcctgccgataggatttagtacttctcccgctttttccaatgcgtgcttgtacaagttcgataataacatccagtattactcgtctgagaataacctcatatatacacggtatagcgacgatatcattatatcctcggacaacaaagagattattcatagcatctacactaccgtgagtaattttctgagtaaagagaacaacggaaatttttctctgaacaagtacaagaccaagatagttaataagggcaacaaggttaaactgcttgggatggtcgtcctgccatccggtaaggtaaccgtagatataaagatcaagaagaagatcgagtacctcatctacttttatatcacagacaaggacaagtttaaggatgccatcggcaaagacattgataaaggtattgagatgatctcagggaacttgaatcacatcaataccattgataagagctatctgaacaaacttcgcaagaaatacggaaatgtgattatagacatgttcttccacaaaaatgtcttttga

SEQ ID NO: 12036 - RNA, 984 nt, synthetic construct
  source 1..984: mol_type = other RNA
atgaacaagaagaagttagaagtcctgtttgaagctatgtaccacggcaaatacagtttcaaggactttattgagagcgatattagcgcggagtatgcttctttcaaggctaaggaaagaacaatttaccggacaacgaagaaactcaagaccttccactcttttatatcgctattcatcctcgagtacttgaatatcaaccccagggtggtgtattcatataggaaagggttcaactcattagatgcagtgtcaaaacacgcccagtctaaatatttcttccagaccgacatagaacacttttttgagaatctgacaacccctttaatacgcaagaccatcctaaataattctgataactccccggttcttgacattgagaatcatattgacagaattgttgagctgaccaccctcaataacagcctcccactggggttttccagcagccccgtaatgagcaatgcatgtttgtacgacttcgataacgaacttgagaagctgtgcatccaaaatgaacttatctacactaggtattcagacgacatcatcatatcctcccagaatcaggaaaagatcgaacctatagagagtacaatcgagttcatcttgaacaagcatcacaatggccagctcaacctgaataaacagaaaagtaagcacacaagaaagggtaataaggtgaaattgctcggtcttgccattctgccaaacggcaaggttactattgacatcaagatccgtaatgagatcgaagtcctgctgttccactatgtgaacgatcgggataagtttctggaccatgagaagattaaacaagacatgaccaagggggtggatctgctctttggatatctgaactacgtatccactattgacaaaaactacctggagaaacttcgaaagaaatttggagccactgtcatcgatatgttcctgcatcggaccaaaaaaaaagaggatcgccatgccaacaacttttga

SEQ ID NO: 12037 - RNA, 972 nt, synthetic construct
  source 1..972: mol_type = other RNA
atgaaggataacagtttagagagcgtctttaacgcgtatttcaacaacaagaaaaacttttccgacttctataccttgcgcacagaagaagaggcttctcttatcccgctctcgaagagcaaggtggaattataccggtgttcagagaaactcaaggtgatccatacctttctaagcctcttcatcttcaacgaaatgcccctccggaaagatattgtcttctcatatagaaaggacgtgaatatcacagatgccgttaggccccactgcaatagtgagttcattttcaagaccgatatctccaaattctttaattccatctctgccgaatgtgtttaccacagccttagtaagtattgcgagaacatcaggacagtgaatagtggcgagattcgggagaatatcgagaggattgtctacctgtgcaccattaacaatcatctgcctgttgggttttcgtgttcaccaagcatttccaacttctgtttctatgactatgacaacataatcgatgcctactgcaatgagaacggatacatttactcccgctacgcagatgacctgattatatcaagccaggacgaaatgaataaggacaagattaccgatgatttaacggccatcctgtcttctgacgcttttctgagactttccatcaatcacaagaagaccaagctcatcactaaaaagtttgagcgacagattctgggcatctcaatactgaatgatggaaaaatgacggtgtctaaagcaactaaaacagacattgaggtaaaactgcaccttctgaagactaatagagaaaagctcgtggattacactgggatggaagaaaaaagctccatactgagcatagctggtgtattgagtcaaattaacaatatcgacagcgactatttgtttcatctgcgtaaaaagtacggcaacgcaatcatatctaaactgctaaagggtaaagagttgctgaaatga

SEQ ID NO: 12038 - RNA, 972 nt, synthetic construct
  source 1..972: mol_type = other RNA
atgaaagataattcacttgagaacgtgttcaactcctacttcaataataagaaagacttcgctgatttccatacccttaggacggaagacgaggcctcgcttattcccctgagcaaatctaaggtcgagttatatcagtgctctgccaggttgaaagttattcacacatttctgtcccgctttgtattttcagagatgccagtacggaaggatatagttttcagctatcagaaagatgtcaacatagccgacgctgtgcgtcctcattgcaacagcgaatttatctttcggactgacattagtaagttcttttcatccatttcggccgaagctgtgtcacacatgctttccaagtattgtgaaaatatcagaacagtcgatgccaaagaggtgcgggaaaacatcgaccgcatcgtgtacctgtgcaccatcgataattgtctgccggtcggctttagctgctcccccagcatttctaacttctgtttctatgattacgacaacatcatcgaggcatactgtaatgagaagggctacatatacagtagatattctgatgacctcatcatatccagtcaggatgaaatggacaaggacactatcacaggggacttaactaccattctctctagtgacgtctttctgaaactgagcatcaaccataagaaaaccaaggtgattaccaagaaatacgagcgaaaaattctcggaattagcatattgaacgacgggaagatgaccgtttctaaggtgacgaagacagacattgaggtgaagctgcacctgctgaaaactgatcgaaagaaactaatggactatacaaagatggatgaaatggcaagtattctgtccatcgcaggagtgttgagccaaatcaacaatatcgataaagactacctcttccacctcagaaagaagtatggtaatgcgatcatctcaaaactaattaggggcaaagagctgttgaagtga

SEQ ID NO: 12039 - RNA, 972 nt, synthetic construct
  source 1..972: mol_type = other RNA
atgaaaaacaagtccttggagaacgtctttaacgcttacttcaataacaagaaggatttcagcgactttcacaaaattaggaccgaagaggaagcgcatctgatccccctgaaacgcaattccgcagaattgtatcagtgcagcgataaactaaaggctatccataactttctcgcacgattcgtgttctcagaaatgcctgttaggaaggatatcgtgttttcataccggaaagaagtgaacattaccgacgctgtacgaccccactgtgaatctgactacatttacaagacagacatttccaagttctttccatctattagcgctgatgcggtgagcgagaagttaaaaaaatattgcgcccacatctcaacggtcgacgccgaagatgttagagagaatatcggccgtattgtgtacctttgtacgctcaataatcagttacctgtcggatttgccagttccccaagtataagcaacttctgcttctatgattatgacaacctgatcgagagttactgtagagagaagaactatatatactccagatatgcagatgacctcattatatcgagccaatccgagatccataaagagtctatcacagccgacttgtcagtgatcctgacatcagatgcactattacgcctgagcctgaaccacaagaagactaaagtgatcaccaaaaagtatgagcggaaaattctgggcgtgtctatcctcaataatgggaagatgacagtaagcaaaaccactaagaaggatattgaggttaagcttcacctgctccggactgacagagtgaagcttgtcgactacaccggtatggacgagatgagttctatcctgagtatcgccggcgtcctgtcccagataaacaatatcgataaggactacctgtatcatctgaggaggaaatacgggaatgccataatttctaagcttctccgcggaaaagaactgttgaaatga

SEQ ID NO: 12040 - RNA, 972 nt, synthetic construct
  source 1..972: mol_type = other RNA
atgaaggataatagcctagagagcgtgtttaatagctacttcaacaacaagaagaacttcgctgacttccatactcttcgtactgaggatgaagtgagactgatacctctcagtagggctaaaacagagctctatcagtgttctgcccgcttgaaactgatccacacattcctttcacggtttgtttttagtgaaatgccagtgaggaaagacattgtcttctcttataggaaggaagtcaatatcaccgatgcagttcggccacactgcaattctgagtttatcttcaagacagacatttcgaactttttcccctcgatttccggagacgtggttagcgataaactgtctaagtactgcgcaacgatccgaacggtagacgctgaagaggtgcgcgacaatatcaaaagaatcgtgtttctgtgtaccattggtaacaggctgccgataggatttagttctagccccagtatctctaatttttgcttctacgactatgacaacttaatcgattcctattgtcacaacaacaactacatctatagcagatacgcggatgatctgatcattagttcccagcacgagattagcaaagatactattaccacagacctgaagtccattctctcatcagaccctctgctcaagctgagcattaatcacaagaaaactaaggtcattaccaagaagtacgagcgaaaaatactgggcatatcaatcttgaacgatggcaagatgaccgtgtcaaaggccaccaaaactgacatcgaggtcaagttgcatctgttaaaaacagaccggaataagctggtaaactacaccggtgccgatgaaatgtcttccatcttatccatcgccggcgtgttgtcccagatcaacaatattgaccaagattatctcttccatctacgcaaaaaatacgggaatagcataatttccaagcttcttaaagggaaagatctcctgaagtga

SEQ ID NO: 12041 - RNA, 972 nt, synthetic construct
  source 1..972: mol_type = other RNA
atgaagaataactctctcgagagcgtattcaatagttacttcaaccacaagaagaactttgacgattttcataacatccgcacagaggaagaagtgcgcctgatccctttatctcggaccaaagcagacctctacaagtgctcagacaggctgaaattgattcacaccttcttgtctcgcttcattttcagcgaaatgccggtccgggaggatatcgttttcagttaccgaaaagaggtgaatatatctgaggctgtgaaacctcattgtaattcagagttcatctttaagaccgatattagcaactttttcccatccatctcttccgaggctgtgtctaacaaactttccaaatactatgactacctgagcacaatcgatattgaagatgtgaagaagaacattgaacggatagtttacttatgtacgttcgataataggcttccaatcggctttagctcatccccctccatttcaaacttttgctttttcgactatgacaacattatcgagtcctactgcaaggacaaaaagtatatatacacgaggtatgccgacgacctcataatcagttcccaacacgaaatactcaaaaaggagatcaccaatgatctgataggtatcctgagttccgaccccctgctgaagctgtctatcaaccataagaagacaaaagtcatcaccaaaaagtatgagcgtaaggtgctgggaatcagtattctaaatgatggcaagatgactgttagcaaggccactaaaaccgatattgaagtcaaactacacttgctgagaactgacagagggaaactgatgaattatacagggatggacgagatgtcgtcaattctgagcattgccggtgtattgagccagatcaacaatatcgatcaggattacctctttcacctcaggaaacgatatggcaatgcgattatttcgaagctccttagaggaaaggaactgcttaaatga

SEQ ID NO: 12042 - RNA, 1008 nt, synthetic construct
  source 1..1008: mol_type = other RNA
atggacgcagatattgttcttccaattggaggttgtaatgacagaaaaaaaacactggaggccctgttcaacagctactttaactttaaaaaggagttctccgaattcaatagtattcagacaatcaatgaggtggagaagatcgccttgctcaagaacaacaagatcatctacaagtgttcagaccggttaaagtccattcaaagctttctgaacaagttcatattcaacgaaatgccaattcgaaaggacatagtcttttcttatcggaaagacgtgaatattgccgatgctgtgcgccctcatagtcactctaacttcatctataagacagacatatcgaactttttcccttccataaaaccccagattatcaagaataggctgctcaaacacagggataaaatcgaatttatagagcgggaagaaatcgaaaagtattgcgatcgaattatcgatatctgcaccattgatgaccacttacccatcggctttccctcttctccgtcaatcagcaatttttgtttctacgagtacgacagtatcatttccgacttctgcattaaaaactcactgatctacactcgctacgcggacgatctgatcataagcagtactgatgaactggacaaagacaatttgtcccaaaccctggaacagattctccattcggatgatcagcttaggctgaaaattaactacaagaagacgaagctcattacaaaaaagtatgagcgtcaccttttgggcatctctattctggagaacggaaaactgaccataagcaagaaaatgaaaagggatatcgagatcagactacatttgctgaaaaccaaccgcgacaagctggtagactataccaattctaatgagatggactccatactctcaatcgcagggactcttagccagatcaataacattgacaaggatttcctttaccagctcagaaagaagtatggcaatgctatcatcagcaagttactaaaagggaaggatctgctctga

SEQ ID NO: 12043 - RNA, 954 nt, synthetic construct
  source 1..954: mol_type = other RNA
atgaaaataaaggatgcctttgacttctattacaatggcaagtttaacttcgatctgttttccgatttggtcttctctgatcatgtcaaagaagtgatcctgaataagaagctgtttttcagtgcttctgacgatctcaaagtgatacataacttcctttcgaagttcattttcgacagcttaggagtaagggacgatatcgtgttttcctatagaaagggagtgaacgtctttaactgcatagaaccacacaagttctccaacttcatatataagacggacatcgagtcattttttcctacaattaccaaacccgctattgaagaggcaatcaaaaagtccgtgtgcaacattagctacatcgatcacgaggacatcattaataatctagaccgtatcctggaacttacaaccgtgagtgagcgattgcccgttggttttagctcctccccctcaattagcaacttcattatgtacgatttcgactgtgacatatataagtacactaccgatcacggacttgtttacacacggtactctgacgacattctgatcagctctgataaagaaattgacaagaatgagatgaccagaattatctcggacatcctgtctaagaagaaaggcctcaatttcaagatcaataacaagaagacgaagattatcactaagaaatacgaacgcatcatctttgggatttcaatctctcctgttggcactctgtccgtgtccagtaaactgaagaaagagatcgaggtcaaaatctactatctcctgaacaacagggagaaacttagcatgttttcaaacatggacgaaaaaaatgcgatcctaagcttaagtggcagtctgagctatgtattggggatagatccaggctacgtgaccaagctccgggggaaatatggtaatgccattattaccaagctcttgtcaaataaagaggatctgtga

SEQ ID NO: 12044 - RNA, 954 nt, synthetic construct
  source 1..954: mol_type = other RNA
atgaagctggaagaagtttttaatttctacttcaacggcaaagagagttttgaacaattctatacactgagcctcaatgaccatatcaaggagttcaatttcaacaacaagaaatgctactccatcagcgacgagttgaaaactatccagcttttcctcagtaagtttatcttcgagaatatcgagtttagaaaggacttagtgtacagttataggaaaggtgtgaatgttgtcgattgtatcagccctcacaggttcaacaattatatatacaagacggacatcgagaattttttccccagtatcggctacgatctgattaagaacaaaatcatcgagaaagtcaaggatatctcatttctggatacaaatgacgtgatggttcacttgtctcgtatcttagaactcgtaactattgacaagaaactgccaattggtttttcatcatcccccgcgataagcaatttcgtaatgtacgatatcgactgtaaaatcgattgcttcgctaagaataacgacctaatttatacccgatatgcagatgacattattctttccggaaaaaacaatctggataagaacagcatcaaccaggaaatcaataacattcttaactacaaccaggacaacatctttcatctcaacgacaagaaaaccaagataattaccaagaagttcgaacggaacattctgggcatctcgatatctcctgtggggacactgtccatatctcggcagcttaagaaagagattgaggtgaagatctttttcctgattaacaacaaggataagttcgtcaagttttcagaaatggatgagatgagcgccattttttctctggccggaaaactgtcttatgctttgggcgtggatccagtgtacataaataagttgcgcagaaaatatgggaactccattattaacaagctcataaagaacaagggggacctatga

SEQ ID NO: 12045 - RNA, 948 nt, synthetic construct
  source 1..948: mol_type = other RNA
atgaacaaaaatcgattcgaggatgtgtttaaggcatatttcaacgggaaattgaactttagcgatatgcttaacctgaatatcgatgagaatatagagatcctctccctggggaatagagaggttatcaagtgttccgaagacctgaaaaagatacactcgttcttcaacttgtttattttcgactacctagagattcaggcagactcagtgtttagctatagaaaaggagtaaatgttgtcgatgccatccgcccccacgcgaagaacaagttcatctttaaaacggatatcaagaggttctttccaagtatttcacatagtctcatccataactgtattttcagccaaattgagaacattccattcctggatttccccacctacctggatcgtgtgtgcgatctggtcacctataacggtaaactccccgtgggttttagtacttcccctaacatatctaatgccatatttaatccgctggacattaaaatcaaggaatactgctcctataacaagcttacatataccaggtatgctgacgatctcatgattagctcaaacaattacctggacaaagaggactacatcaagatcatctctaacataatcaagctggacgacggccatcacttcaccatcaacattgagaagactaagctgatcaaaaagagcaagaatatggacgtgatgggagtcaaaatacaccctgatggcactttgacaattggaaagaagcttaagaatgaaatcgaaaccaagctatatctcttttcgaaaaatcaggatgactttgtgaaattctctaagcaggaaaaagagtcttccaaggctaaattaacagggcagttaaactacatcaataccattgaccctgactacattgttaagttgaagacgaaatacggcaatagcctggtagaactttttttccggaaagccatttga

SEQ ID NO: 12046 - RNA, 948 nt, synthetic construct
  source 1..948: mol_type = other RNA
atgaataaatcaaagctggacgagatatttaacgcttactttaatggcaaactcgacttttctgaaatgctgactctcaacatcaccaacaacattaataccatatcggtcggttctcggcaggttgttaagtgttcttctaatctgaaaaggatccattcatttctcaacctgttcattttcgatttgttagagatccagactgattgcgtattctcctataggaaaaacgtcaatgtcgttgacgccattcgacctcactccaacaataaatttatcctgaagaccgacataaagaatttcttccctagtatcacccgcatgagcatatacgagtgtatcaacagacagatcgaagcactaccgttcagtgatctgtgcgattatctggacaaaatatgtgacttggtgacctataatggacacctccccatgggcttctccaccagcccacagatctccaacgccgtgtttaatctaatcgacatcgagattaagtccttttgcatcaagaacaatttgacctatacgagatacgctgatgacattctgatatcaagcaacaattaccttgataaggaagaatacatcgataagctgacaaagattcttagtttcgacgatcatcagtgctttacgatcaacacagaaaaaactaagctcattaagaaggggaaaaataccgacatcatgggtgtaaaaattcaaccagacggaacactgacaattagcaagaaactgaagaatgaggtggagactaagttgtatctgttcagcaaaaatcaggatgactttgtgaaattctctaagcaagataagaaccaaagcaaggcgaaactcactggccagcttaactacattaacacaatcgatcccgactatattgtgaagcttaaatcaaagtacgggaacagtttagtggagctgttctttcgtaaagccatttga

SEQ ID NO: 12047 - RNA, 948 nt, synthetic construct
  source 1..948: mol_type = other RNA
atggataaatactacctggaacacacttttaatgcttactgcgacggcaaaatcgattttaatgacttcctgaacatcgaactcaaaacaaatattgaggagattaaggtggaaaagcgcgaagtggtcaagtgttctgagaaactcaagcgtatacacagtttcttcaaccagtttatctttgacaacttggagattcaggaggattgtgtattctcctaccggaaaaatgttaatgtactggactgcatcgcgcctcattccaagaacaagttcatcttcaagactgatatacactcattcttccattcgattagcaagaaaaccatccataactgcatttttacccagatagataatcaaccactcagtgacattgaaagctatcttgatcggatttgcaatttagtcacctataaagataggctgcctcaggggttttccaccagtcccgtgctaagcaatgctgtctttaacaactttgacatcaagatcaagaagcattgcaatagaaacaacatgatctacagcaggtatgccgatgatctgctgatctctagcaataattatctcgataaggaggagtgtattcacgacatcgacaacattttaaatagttgtttcgagcagaagttcaaaatcaacacactgaagactaaactgatcaagaaaggaaaaaacatggaagtgatgggcgtgcaaatacacccagacggctccttgtcaataggaaagcgactaaagaatgaaattgagacgaagctgtacctgttcctgaaaaatcagaacgactttgtgtcatactcttctttggataaaaaccacgccatagccagacttagcggtcagttgaactatattaacacaatcgaccccaagtatatcgacaagctcaagtataaatacgggaattcccttgttgacctttttttccgcaaagcaatttga

SEQ ID NO: 12048 - RNA, 951 nt, synthetic construct
  source 1..951: mol_type = other RNA
atgatttcagagaacaagttcgaaagcatttttaacctctatttcgatggcaagctgaatttcagcgatatgctttcattgaacaaagaaaaagagctgaagcatttaacaatcgagaatcgtgaggttataaagtgttccgaaaaactgaagaagattcaccattttctgaacctatttatcttcgataacctgagcattcagtccgacgtggtgttttcttatcgaaagaatgttaacgtggtcgacgcgataataccacacgctcaaaacaagttcatttttaaaacggacctcaacaacttctttaagtcaatcaaacgctctgaaatctacaataacctaataagtcagactgaccagattcctatcattgacatcgtggattacatcgacttaatatgcgacctcgtcacctatcacgacgaactgccccttggattcagtacatcgccgaacattagtaatgcaattttcaaccagtacgacatcaaaatcaaagaatattgcctgtcgaagaagatcgcctacaccaggtacgctgatgatattctgctgtccagcgataactacatcgacaaaaacgagtatatagagctcctcaataatatcctgaccatcgatggcaaacggatcttttctttgaatagcaagaagacaaagttgatcaaaaagtctaagaacatggagataatgggggtaaaaattctgcccgatggaaagattacggtgtccaaaaagatcaagaatcaagtggagactaaactctatctgttcattaagaaccagtcagactttatcaaatacaccaagagcaacaagattagttctattaacaagcttagcggtcagctgaattatatcaatactatcgatcctgagtacatcgagaaacttaaatccaaatacgggaattccttggtcgaactcttctttagaaaagccatttga

SEQ ID NO: 12049 - RNA, 969 nt, synthetic construct
  source 1..969: mol_type = other RNA
atggcaggtaacaagagcttcgaaaaaattttcgatgcttacttccaccaaaagatatcgtttgaggagttcaacgaaattgagatagaaaaggagattaagcgaatcaacatcggctctaaaattgtgtatggctgctcgtccaagctgaaaaagattcacagtttcctctctgtctttgtattcgacagggtgtcaatacgggaagacgtcgtttttagctacaggaaaaacaataacgtgcttaacgccatctatccacatgctaaaaggcgcgccatttacaagaccgacattgaatccttcttcccgagcatcagaatggagaacgtcaaagagcagctgaaggagcattgtaaggaatccatcttctttgatctcgaagagcatctggactctatcatcaacgtcattagcgtgaatgatcgtatacccatagggtttcctacatccccaattatatctaacttcgctttcatccggtttgataacgagatttcctcttactgcaaaaaacggcgatatatttacacgagatatgccgacgatatcctgatctcaagcgacgattttttagacaaggaagagctcaccaaggatatcaatgagattttcaagaagcttcacagcgactataagctgaatatccctaagaccaaaatcctaacaaaaggaagacccagaatcatttttggggtgagcatttttcccgatggtaaactctctgtgagtcgcaagctgaaaaatgagatcgaggtaaagttatacttgtacctgaaagacaagaaggaattcctgtcctacagtaaagccaatactatggaaggcgcgatcgttaatttgagtgggatcctaaattatgtgaacactgttgacaagacctacttgaataaacttaagtcaaagtacggagcatcagtggtcggactgttttttcgcaaaacaatcgagaacgaatataggaattga

SEQ ID NO: 12050 - RNA, 951 nt, synthetic construct
  source 1..951: mol_type = other RNA
atgtctgttcaaatcaaggacatcttcgatatctatttcaataactccatggagttcaatgaattgatacacctcaacaaagacgactatctcgagcttaaaacatacaagggtaaggaaatcatagcgtataaaaagggattcaacaagctgaaacttctccaccgatttctgaatgaggctgtctttaataggatagagataatgaacgacgtggtgtttagttataggaaaggggtaaatgtcttgaattgtgtaatgccacataggaattcgaatttcatattcaagacggacattaacaacttctttcctagttttagctccaaattcattgaggtgaaactgatcaacaagttcaacaacttcattatcagtgacattaaccagtacttacccgaaatcgttgacatcgtgacttataacaatactctgccaattggcctgagcacatccccttcattaagcaatatccttttcagcgacattgatttcaagatcaaacttttcagcaacgaaaacgagtattattacacaagatacgccgacgatatcattatttcgtcgaatcgcgacattaataaaaacaccatcttcgatgacttgcagcagattctgacctccgagaatgataacttcattctcaacaagtcaaagaccaagctgctccgtaaggggaatctacggaagattatgggcgtgtgcatcatgcccgatggccatatcaccgtcgataagaagctgaagaataacattgagacgaaactgtactacatgagcaaactaaacaacattcactccaaagattctgaaacaaccgagataaagagatacctgtcaggaatcatcaattacgtttccactatcgataacagctacatcaataaactgaaacgcaaatacggttctaccatagtggaaatgtttatccggaagtctttgattaagtga

SEQ ID NO: 12051 - RNA, 951 nt, synthetic construct
  source 1..951: mol_type = other RNA
atgtccatcaagattaaggagatcttcgacatctacttcaacaactcaatggactttaacgatttcttcaacctcaataagatggagtatctcgagaagaagatttttagaggccgcgaaattgtggcatataagaaggggtttaataaacttcggcttctgcaccgatttctgaatgaagctatttttaacagggtggatattatggatgatgtggtgttttcttatcggaaaaaagtgaacgtctttgattgtgtctaccctcatagggccaatccgttcattttcaagaccgacattaagaacttctttccaagcttcaatcgtgattttatcgagtctaaactggagtctgttttcaaagagttcataataagcgacatcaatgagtacttgttcaaaatcgtagaactggtgagttacaatgatttcctgcccgtcggctttagtacatctccctccttatctaatatcctgtttagcgacgccgacaaaaagctaaaatcattctcgatctccaatgggtacatctacactaggtacagcgacgacattatcatttcgtccgaaagtgaaattcacaagaaggacattttcacaacagtgcaaggaatcataaattccgaatgcgattcatttgttctgaacttcgacaaaactaagttgttgaaaaagggaggagttcgcaaaataatgggtgtaagcattatgccagacggctatatcagcgtggataaaaccatcaaaaataacatcgagacgaagctacactatatttctaagctcaacaacgtcaatagccaggaacctgagttaatcgagataaaacggtatctttccggcatgatcaactacattagtaccatagatgacggttacatcaacaagctgaagagaaagtatgggtccaccatcgtggaaatgtttctgagaaagtcactcgtcaaatga

SEQ ID NO: 12052 - RNA, 957 nt, synthetic construct
  source 1..957: mol_type = other RNA
atgaaagatcgtaaacctaacttgaagttcttctttgagtcatacttcaataagaaggtaagctttgacgcctttgaaaacatctctattgagaagaactaccatattcagtgcattaacaagagggaaatatatgtgccatccaatgaactgaaactgatcttatccttcttcagtgactttattttcaagctcctgccaatcgaaggggatgtggcctttgcgtatcgaaaaggaatcaacgttaaagactgtctcctgcctcacgtgaattcgaaattcttctataagaccgacatcatcaattttttcccttctatctcaagctacctcattagggagaacatttacgaggacattctgaaactgtcctacttgaagaaggatgatgtcgacttttatctggacaagattcttagcctcgtcaccatcgatgacaaactacccataggctttccaacaagtccctttatctcaaattatgtgatgcgcaagtacgatcttatgttgaagtacttctgcaatatgaacggatttgtgtataccagatacagtgatgacatcatcatttctagcaatatgaacatctccaaagatttcataaccagaaacatcgatggcatatttaggaaggagaaaagccccttctacttgaataaaagcaagactaagatcttcacgaagaagcacaaagttaaaatactcgggcttactatcaataatggcgagatctctatagaccgggaaattaagaacaacattgagattgggatctatttcttcattaacaatcgggagaagttcatcaattatttcggactgaatgaactttcagccaagaagaaactagctggtaacctctcctatgctatcaacacagaaccggactacctgctgaaattagtgaagaaatacggtagttccacaataaaagagattctgcgcgcatctgtctga

SEQ ID NO: 12053 - RNA, 957 nt, synthetic construct
  source 1..957: mol_type = other RNA
atgaaggatagaaaacacaatctgaaattcctgtttgagagctacttcaataagaagatctcctttgacatattcgagaacatttccatagaagagtcatatgacaaactgtgcaagaacaaaagagagatttacattcccaactacgagttgaagctggttctttctttcctcagccacttcatttttaagtctcttcccattgaagatgacgtcgccttcgcatataggcggggtattaatgttaaagactgtcttctcccgcacgcgaattccaaatttttttacaagaccgacatcctcaatttttttccttcaatcagtagctctctgattaaggaaaacatctatcaggacattcataagttgtcttacctggaccaagaggatttagctttgtatctcgacaaaatccttagcttagtgaccgtggatgacaaactgcctgtgggctttccaaccagtccatttatctcaaactacatcatgcgtaagtatgatgtgtcgattaagtctttctgcagcaacaacaaatttatctatacaaggtactccgacgacatcataatcagtagcaatactgatatagacaaggactacatcactaataacattgagaaggtcttccaacagggcgaaaatctgttccatctgaacaactcaaaaacgaaggtcttcaccaaaaagaataagatcaaaatgctcggactaatcatcaataataaccagattagcgtggatcggaaggtgaaagatgaaattgaggtagggatccattttttcataaaggatcgcctgaagttcattaactttttcaacgattccgaactcagtgctaaacgaaaattggccggaaatatttcctatgccatcaatatagaacccgattacctgcagaaactggcaaagaaatacgggctgctcacaatcaaggagatcctaaaggtaaacttatga

SEQ ID NO: 12054 - RNA, 957 nt, synthetic construct
  source 1..957: mol_type = other RNA
atgaaagaccggaaaccgaatctgaaatttctgtttgagagctactttaacaagaaagtgtccttcgatatcttcgaaaatatcagcattgagaagtcgtactataaaatatgcaaggaccagaaggacatttatattcctaatgacgaactcaagttgatcttgtcttttctgagtcactttatctttaagagcctgcccatagagaatgatgtggcctttgcttatagaaaaggcatcaatgtaaaggactgtctactcccccatgttaatagcaactttttctacaagacggatattatcaacttctttcctagcatctctacctcattaatcaaagagaatttgcaccaggacattagtaaactgagttacctggatcaagaaaacctcatgttctatcttgataagattctctcactagtgaccatcgacgacaaactgcctattggttttccaactagcccattcatctccaattatatcatgaggaagtacgacataaacattaagtccttttgcaacaacaacaacttcatatataccagatactccgatgatatcataatttcctctaatgacgacattgataaggactatataacctccaacatcaaaagtatcctgcagcaggaatatagccccttctacttgaacaattcgaagactaagattttcacgaagaagaacaagatcaagattctcggactgacaattaacaatcaagaaatctctgtggatcgtaaaattaaagacgaaattgaggtcggcatctacttcttcacaaaggataggttaaagttcatcgattacttctctgacaacgagctttcagccaaacgaaaacttgctggaaatatatcttacgcaattaacatcgagccagattacctgcagaagctggcgcgcaaatatgggctgtcaacaatcaaggagatccttaaagtcaatctctga

SEQ ID NO: 12055 - RNA, 996 nt, synthetic construct
  source 1..996: mol_type = other RNA
atggccaacctgaacccccccatctatcgaaataatactcacagttcttctcgaaagttcagtgagctttttgattcctatttctacggaaagtactccttcgacgacttccttagcattgatatatcgaaagagacgaaaaagatccaacttaaggacaacaagataatctatagctgctccggaaagctgaagaatattcacaggttcattaacatcttcatcatcaacaagttgtgtatcaaagaggatattgtgttttcatacagagccgggaaaaacgttgtagacaccattctccctcattctgaaaacaagttttttctgcagaccgatatttacaactttttccctagcattagcatcaatctcatcaaagagactatcctgcggggtatctccaatttagaaatcacagacattgacgattacgtggattacattctgaagctgataaccatagataattcattgcccattggtttctcttcatccccgccaatgagtaattcttgtctgtacgatatcgacaacaagatatcaatttactgcgaacagaagcgtatgaaatatacccggtatgcggacgacctcatcatttcatctatgaacttgttcgacgttaaccatgtcaaaaattcgatcgctaaaatactgaatgagcagaaaaatgcatcctttatcttgaacgaacgcaaaacaaagttttttagcaaaagccagaagatcaaaatgctgggggtcgtaatcctgccaaccggcagagtgacagtcgatattaagatgaaaaagaaggtggaaagcatgatttatttctatctcaacgacaaagacaagctcctggatctaagtggcttaaattacgaggatactctcaagaacattagcggactactgaatcacatcaatacgatagataagaagtacctggacaaacttaggatgaagtatggcaacacagtggtggacatgtttttccataaatccgttaaatga

SEQ ID NO: 12056 - RNA, 936 nt, synthetic construct
  source 1..936: mol_type = other RNA
atgaagaaaaaggagctgaagttaatattcaacctcatgtaccacggaaaatacgacttcaatgacttgataaactgtaacatcgagaaagagtacatcaagattaagatcaagaagagggtcatctataaagcctcgaataagctaaaaaactaccactctttcctgaacttgataattttcaactaccttgatgtggacaaagacgtcgttttttcctatcgcagaggcgtgaatacagttgacgctgtgcgtccccatgttaattcctgctttttctaccagacggatatcaaaaatttctttcccagcctgaaaaaggatctcattaagaagacaatcatcaactgtaaggattcaatccctgtcatcgacattgaaaaatacatcgatcgaattgttgaccttgtgaccattgacggtgtgttatctaccggctattccacctccccaataattagcaatgcatgcctattcaactttgacaacgaaataaagaggaagctggcgaacaataacgtgatctattctagatatagcgacgatatcatcattagcagtaacgagaacattatcgtggacgatatgaataaaatcatccttctcgccctgaagaataatgtctctcctgacatcgagattaacaagaataagacaaaactgtccaagaaagggtgcaagatcaaaattctgggcatggtaataacttccgatagcgtcattactgtggacaataaatataaacgggaagtggaatacttgctctacctctacatccgcgataaaaaccggtttaagagcatcggaaaaagtataagtcaggtgtcaggtgtactgaattatattcaaaccattgatccagagtacattaagaagctgaaaaagaagtatgggtcaactattgtggatgtatttctgcatcagtcaatgaagtga

SEQ ID NO: 12057 - RNA, 984 nt, synthetic construct
  source 1..984: mol_type = other RNA
atgcacaaaaaagagctcgaaaacattttcaactcctatttccacaaccaatataacttccaggactttctgaacataatcccgaaacagaacattcactacaagttcaataagtacaagaactacaagttcatctcctacattaaagagaataacagcttcagtaaggacagcatgaaaatgagagaataccacactttcattaagaacatcttctgcaactacatgaaagttcacgctgccgtattttcctatcgaaagcatatcaacatctacgacctcgcgaaaatacacaatgaacaccagaacttctttactacagacattaagtccttcttctactctatttcaacccaaatgattcacgaggtcttgattcagaataaggtcaattttccctttgagctggatgtgaagtactacaaaaacatcgtaaacatcacgaccgtgaataattctttgcccgttggctacgtgaccagtccatcgatttcaaacgccatcttatataagtttgacgagctgatggataattatagccaggagcatagtattagctattcacgctattctgatgacctgatattcagcagtgatgactataatgctattaagtccttgcctgcagtgatcgagtcaacactgaattctctgtactcctctgcctttaaacttaatatcagcaagacacggttttttgataaaaccgaaaaggtcagctttctaggaatcagcatcctccctaatggacatataacggtggagaaatggacaaaggaaaacatatcgcaactgatctatttctacctgaacgataagaacaagtttaccgtgttacttcagaagcggtttaagaataatctttcccgtgcatatgggactctcaattatatcaacgacattgacaagcagtttatcctaaaactgaggaagaaatacggtaacttcatagtggataaattcctccatggcgttaaacattga

SEQ ID NO: 12058 - RNA, 954 nt, synthetic construct
  source 1..954: mol_type = other RNA
atgttccaggagaaacatagcttggaaatgctgttcaacgcaatgtaccacgggaagtatagctatcaggactttatctcctccaatattgagaactacatccaacacattaacaataagatcgtcaagaccaacaaaacttttcaggtctatcatagtttcctgaacctgttccttttcgactatcttccaattaatgagaacgttgtgttttcttacagaaaaggcgtgaacatttatgatttactcattgttcaccggaactcaaagttcttctttcagacagacttgaagtacttttttccgagcatcacatccgaggatatcaagaagctcattgaaaagaacatcgatatgtttcccgtcgtgaagaaggatatagagactcatatagacagaatcatcagtctgactacaatcaacaattatctggccgtgggatactcgacctctcccaatctgtcaaattccattctattcgacttcgacaattctctgagcgatttttgccagaagctgaatattaagtacactcgatattcagacgacctgatcttttcttccctcgacaaggaaaatctgcaaaaggtagaaatagagattcgcaggcttctcaaaatattatttggcgggcggatccagctcaacaccaaaaaatccaaatacaaccaccagggcaacaaagtgaagatactaggagccattatccttcctaatgggcagatcagtgtggataagaaaatcaagaccaagattgaaaccgctatctacttatatctcaatgatcgcaacaaattcgatgacttcttggagaagaattataggaaaggtgtaaaccagatttcaggaaccctgaattacattaaaacgatcgattacgactacctgaaaaagctgaagaaaaaatacggcagcacagttatcaacatgttcttgaatcaaagcataggttga

SEQ ID NO: 12059 - RNA, 975 nt, synthetic construct
  source 1..975: mol_type = other RNA
atgatccagcgaactttcaagcaggcattcaatgccgtgtttcacgaaaaggagaattttgaggaatttctggcgcttgatattgagaatgaggtggagaagatttccgtcgaaaacaagattaaaaagcagcaccgcttgttttttcgccaaagcgagaaattgaaaaaatacctgcgattcgttgaccgtgtgatcctgaggaatctggccaaagacaacgacgtcgttcatagtttcaccaaggataagtcaacccttaccgccgtgagcgctcactctaacaatgattacttcttccagaccgacatttcctccttctattcttccataactaaagacgacgtccttcggatattaaagagggacataaatctcatccctatcatcgacttgtcagattatatcgattttctcgtgagcataatgacttacgatggagttctgcccgtaggattttcaacgtctccccagatctcaaacgcttttctgtttgagttcgatggtgaactgaacgaaatttgccgcagacggaacatcatttatacaaggtacgcagacgacatcatcttgagtggcatggatttagaacatctcaaggacatgtcgagtgtgattgacagcttgatcctcaaactcttcagcgggcagataacacttaacaagggtaagactaagctgacctggaaggggaacaaagtaaaaattctaggccttacgatcctaccaaatggcgtcgtgactattgacaaaaagtacaaaaacaccatcgagacactgttacacctgtatacaaccgatatcgaccggtttgaaaaacacctctctgtgacagacggattcaacaagagatctctgttcggcctgctccattatgccaatagtattgatccgcaatacatttccaagctgcaaagaaagtatgggagcctggctgtctacaaactgatggaggattcccagaatgatgattga

SEQ ID NO: 12060 - RNA, 975 nt, synthetic construct
  source 1..975: mol_type = other RNA
atgaccaaacgaacatttaggcaggcttttaatgcagtcttccatgacaaggaggctttcgaggatttcctgagcatcgatatagggaacgagatagaaagagtggtgatacttaacaaactgaagaagcaacaacgcgtaatcttcaaacagagtgatagacttcgcaagtacttaagattcgtggatcgggtgattctgcggtccttggcccgcaatgatgatgttgttcactcttttacgaaagacaaaagtaccctgaccgccgtgattgcccacgcaaaaaatgacttcttctttcagacggatatttcctccttctattcatccatcactcgaaatgatgtcctcatgcttttgaaaagggatgttgatctggtcccaatctctgatctgtcagactatttggagtttctcgcgtccgtgatgacatacgataacaccctgccgattggtttttcaacatcgcctcagatcagcaacgcctttttatttgagttcgacaggcagctcaacgacatctgccgtgagagagaaattatctatactcggtacgctgacgacattattctgagtagcatgactctcaacgtgttggaagacatgtctcatgtcatcgattctctactgagcgaactatttctgggcaacatcagtctgaacagagacaagacaaaattgattcgcaagggaaataagatcaaaatactcggtctgaccattctgcccaatggggtggtgaccatcgaccgtaagcacaagaacactatagaaaccctgctctacctttacacaactgacatcgagaggtttcatgagcacctgtctattatggacggcttcaatcagaggtcacttttcggcctactccactatgcaaatagcgtagacccccactacatctccaagttacaacggaagtatggagccctggctgtccataagctcatggaagacagccagaacgacgattga

SEQ ID NO: 12061 - RNA, 957 nt, synthetic construct
  source 1..957: mol_type = other RNA
atgaaaaaacgcacacttgagcaggctttcaatgcagttttccacgagaaagagcagtttcaggatttcctgaaaatcgacctagaactggaagtcgagttgatcaatgtcaaggaccgggtggtcgttagacagagcgataaacttaaaaagtatctgcgatttgtggacagaactattttacgatcattagccaaggatgacgaagtcgtacactctttcattaaagagaagagtactctcactgccgtacaggcccatgtggaatcgaagtactactttctggctgacattaaggaattctatcagtctatcaagagaaaggacgtggtgaacattctagagcggaatcaggccgagatacctatagaggatatcgtcgaatacatcgactacctgtcatacgtgaccacctacaaagatacactgccaatcggtctgtccaccagcccgcaactgagtaacgcgtttctgttcgactttgaccgtgaggtgaaagcgtactgcattgaaaactcactgatatatacgcggtatgcagatgacatcattataagcggcgataacatggatgtgattgcaatgttgtccgataggatccaaggtatgttacaactttatggctctagctgtttcaccctgaaggaaagcaaaacacgcatcacatggaaaggaaacaaggttaagatcctggggcttgttatcctccccaatgggcgcatcaccatcgataagaagtacaagaagattattgaggctctcctctacttctattcttccgataagtctgagtaccagtcactgcttagtaaagtgatgcatggggatgaaaagtccctgtttggactcttgcactatgccaattccgtggaccccttgtatattaacaaattgcagaggaagtacggcgccctcagtctccatgctctgatggagagcgacagggacgacaattga

SEQ ID NO: 12062 - RNA, 987 nt, synthetic construct
  source 1..987: mol_type = other RNA
atgacccacgaagccgattctaaccaaaccaaaaaaaaaaccctggaacaggctttcaacaccatcttccatgataaggaggatttttccgaattctgtagcttagacgttataagtgaagtagaaccattcaccatttctgacagggaagtgttcaaaacatcagatcggctgaagaggtacctgagatttattgaccgcattatattgcggcacttgtccattgatactgacgtcgttcattctttctcccaagagaaaaacacatacacagcagtcaaagagcatgtcggcaatgactattttttcttgacggacattgagtcttttttcagcaaaatcaagacagaggacgtgaagaagatcctctaccgaaatatcaacaatattcccatctctgacattgagaactacatcgattttctgtcatcagtggtaagctttaataatcagctccctgttggcttctcaacgtccccacggcttagcaactccttcctgtatgattttgacatcgccctaaaaacttattgcagtcgcgaatccctcacttacacccgctatgcggatgatgtgattatcagcggagcttcattcgagaagctagagcggctgaaaacaaccatccaggacttcctgaagattcacgcaagcaatgagctccgattaaacaagagtaagactagaatcactcatcttgggaataaagtgaagatcttaggcctgatgatccttcccaaccgtacaattaccatagatgccaagtacaaaagcaggctcgagcttttgctgcacttttacagtaacaacaaagagaagtatcagtcgtatctggaagagaattttaatggttctgagaagtccgtgtttggaatgctgcactacgtgcagagcatagaccctgattacctggacaagctccagagaaagtatgggatctacgccgtcaggtttttcatggaaaagaagagtaacgacaatagatga

SEQ ID NO: 12063 - RNA, 960 nt, synthetic construct
  source 1..960: mol_type = other RNA
atgacaaaaagaacatttgaacaggcctttaatgcgatctttcacgactccaaggccttcgtggacttctgcggactggacgtcgccagcgaagtagaaacattcaccgtctctggccgcgagattttcaagacatcggacaaattcaagaagtacctccgctttattgatcgggtgatactgagacatctggcaaaagataagaacgtcgtgcattcctttaccaaagataaaaacacgttcactgcagtcagggctcatacggatagcaattatttctttctcacggacattcggaatttctactctaacatcaagatcaccgacgtgctccgaatcctggagagggataaagaacgaatccccatatccgatatcgactcctacatcaatctgctcgctagcctcatgactttcaacggctcagtgccggtcggatttagcacttcacctcagctgtctaatggttttttgttcgagttcgattgcgccgtgcgggagttctgtgagagcaatgttctgacatatacacggtacgcagacgacatcataatttcaggcaagtcttttgaggaacttagtgatttaaaggagatcatccagaccttcctgaacaagtatgctagtagtactctgctgcttaacgaggaaaaaacccgcattacccacctaggaaataaggttaaaatactgggtttgtccattctgccaaacaggaaggttaccattgatactaagtataagaagaagctcgaactcctgttgcacttctatgtaactgacgagagtaaatacaagagctttctagaagaggagttcaaagggagcgagaaatcactttttgggatgttacactacgtgcagtccattgatcccgactatttagagaagttgcaaaggaaatacggggtgtttgcccttcgtaccctgatggaagaaagatggaacgagtctagatga

SEQ ID NO: 12064 - RNA, 981 nt, synthetic construct
  source 1..981: mol_type = other RNA
atgaccggcaagagacgttggcaagtagggaagaggaattttgaacaggccttcaatgctgtgtttcatgacaaacaggccttcaacgatttttgcagtctggatgttcgctcggaaatcgaaacctttgttattaactctcgcaccatctacagaacgtcgaaaaagtttaagaaatacctccggttcattgataaggtcattttgagacacctagacaagaatgaacaagtggttcatagctatctcaaagaaaaatcagtcctgaccgccgtgaaagcgcactccagctcaaaatgcttctttctgacggacattaaagatttcttcacaagcgtgaagactcagaacgtgttgcaccttttaacacgcgataagcttcgaattcccatcacagacttcgagcggtatatcgagactattgtgaatctgaccactttcgctggtagtattcctgtcggattcccgaccagcccaagcctgagtaactcatttctgctcgagtttgatgcagtgctcgagaagtattgttgtgaacacggattcatatacacaaggtatagcgacgacatcataatctccggcaaatcttttgagggttttgacaacctggaaaacgatgttcagagcatgctgtataagtctgcatccgaggacttctttctcaatactaagaagacaaggttaacacagatcggaaataaagtcaagatccttggcctagtgataaccctggggggctccgtgactatagactccaagtataagaaaactcttgagtccctgctgcacttctacatcaacgacaaggagaaatataaagatttgctcgagcgaaccctccacggaaaagaacattcactgttcgggttagtccattacgtaaagtctatcgatcaggcttacctggagaagcttcagcggaagtacggcgcatacgccttgagtgccctgatggaggacaggtggtctgataaatga

SEQ ID NO: 12065 - RNA, 972 nt, synthetic construct
  source 1..972: mol_type = other RNA
atgcgctggcaggtatcaaaacggacatttgagcaggccttcaatgccgtgtttcatgataaagtcgcctttgaagatttctgtacaataaacgtgcaggaggaagtggaagagtttttctatgacgatcgaaaaatcttcaggacatctaagaagctcaagaagtatctcaggtttattgaccgggtgatcttgaggcacctcgctaacgacgacgaggttgtgcattccttcattaagggcaagtcaactttgacagcagtcaaggctcacacaagctcgaagtacttttttatcactgacatcaaggacttcttctccaatgtaaaaaccattgatgttctcagaatccttgagagggataagtacctggtccccatagatgatttcgagaactacattgacactattgttagcatgactactctggggggttccatcccaataggcttcccgacaagcccacaactgtctaacgcttttctgtttgagtttgatcgcaagaccaagtttttctgcgcggacaatagcctgatttatacccgttatgcagatgacattattatcagcggccaagaattcaatgatgtagccggtctaaagagtcagattcagttactgctgagtgaacacgtgagtcctaacctgtccctcaatcaggacaagacccatataacccagatcggaaacaaagtcaaactgctcggactggtgatcatgcctaatggccgagtgacgatcgacgttaaatacaaaaatcggttggagacgttactgcacttctacgtgaacgataaggacaagttcaacgacctgcttaaaaagaccatgaaggggaacgtcaaatctctcttcggacttttgcactatgcaaaatctatcgatcccgaatacctagagaaattacaacgcaaatacggggtgtataccatcagactgctgatggaagacaaactttcagacaatagatga

SEQ ID NO: 12066 - RNA, 954 nt, synthetic construct
  source 1..954: mol_type = other RNA
atgtcgaagaggacactcgagcaagcgttcaatgctgtgttccatgagaaagaaagttttaacgacttctgtgcaatgaatcatagccaggaagtactgagctttagcgccaacagtagagatttatttcatccttctcccaaactcaagaagtacctgcgtttcatcgataaggtgatcctgagatacctggaaagggacgatgtcgttgtacactcatacattaaagggaagtccgctctgaccgcagttgaagcacacgccgggtcatctcacttctttatgactgacatcaaggccttcttctccaacataactgacgtcgatgtgagggagatcctgacacgcaacgaaggaaatgtgcctattagtgacattaaagagcacatctccctactcgtcgagatgatgacctggcagggatccctaccggtgggctttccaacatccccccagctgtcaaatgcttttttactgcgttttgatcagaagctccaccgatactgcgagggccggggttatacctatacgcgctactcagacgatattgtcatttctgccaaatcgtttgacggatttgagcacctcagcgaaaccatacaactgctgctcaataccgctgtgtcccccttgcttagactttctgacgataaaacacggtatacccataccggcaacaaggtgaagatcctggggttagttgttactcaggggggcaaggtgacgatagacagcaagtacaagagacagcttgagacattgcttcatttctatgtgactgaccgggaacgattcggtcgcgtggtcgatgagactttggccggtaaagagcactctctgttcggcttgctgcactatgcgaggagcatcgacccaagttacctcgaaaagcttcagcggaaatatggagcctacgcactgcgcagcttgatggaggataaatggcatggctga

SEQ ID NO: 12067 - RNA, 1017 nt, synthetic construct
  source 1..1017: mol_type = other RNA
atgtggttcgtgatcttaacaagacaggactacttctatttctccggaaacctcaaagtcgataatcggacattgcagcaggccttcaatgccgtttttcacaataaggaatctttcagtgagttttgctcactggaacagaggaaacatatcgtcgagtttctatataggggaagaaaggtatacaaaacttccgcccagtataagcactaccttaggtttctcgaaaaggtggtgctgaggcacctcgccaccaatgccaatgtcgttcacagctacatcaaaggcaagagtgctttaacagccgtgaccacccactctgaaaacagcgcattcttcctgacggacatcaagtccttcttccccaatattacagagcttaacgtaaagcacgtcttgaatcgagataaaaatctggtgcccatttcggactttgaacacttcataccttatttggccaaaatcatgacctgggatgacagcattccagcgggctttcccacaagcccgcaactatctaacggctttctttttgactttgacaatgctctttacgatttctgcaaaactaatgaactgacctacactcgctattccgatgacataatcatatcaggaaagtacaaggacaagctgctgtgtctgaaggatactgttcaagatctgctgcataactacgctagcaagaacttcttcattaacaacgagaaaacacgaatcacccatgcagggaacaaggtgaagattctggggctgatcattactcctaagggtcgggtgacgattgatagtaagtacaaacggaccatcgagtccctgctccatttctacaccaatgatcggtcacgctataacgacctgctccagaacgagtttgatgggaaagagcattcactctttggtttgttgcactatgcaaaggcgactgacccagcatatctcgagaaacttcagcgtaaatacggcttactcgctctgcgccaactaatggaggacagatggaacggctctagatga

SEQ ID NO: 12068 - RNA, 1008 nt, synthetic construct
  source 1..1008: mol_type = other RNA
atgtccattaattccttgaagtcagaaggcgacgaggttagtgttaccgaccggtcgctggagcaggccttcaatgctgtctttcatgatcgcgagagctttaatgatttctgcactttgccgctcgctccagaggtttcagaaattcctctgcatttaaggaaagtgtataggccatccgacaagctgaagacttacctgcggtttatcgacaaggtggtgcttagacatttgaagtataacgcttccgtggtccactcatacataaaaggcagcagtgccttgacagcagttcaggcacacgcgaagaatcaggccttcttcctgtctgacattaaatcctttttccccaatatcggcgatcaggacgtaaggaaagtgttaatgcgtgattctcacagaattcccatccttgatttcgatcagcacatagaacgcgtaacaaagctgatgaccctggacggggtcctgcctgtcggatttcccactagtcctaaacttagcaatgggttcctgcatgagttcgacaacgccctagcagcctactgcgacagcaccggtctgacgtacacgaggtatagcgacgatatcatcatctctggaatggatcgagcgaagctgaccgtgctgcgagagaaagtgcagatgatgctcgaagaacacgcctccaagagtctgaggctcaacgatgaaaagactcgtgtgacccacagagggaacaaagtgaagattttggggttagtcataaccccagatggccaagtcaccatcgacgtgtctcgcaaacacgctctggagggcctcctacatttctacgccacagacactgagaaatacaagaacctcctagagaagacatttaaaggagaagacaaggaaagatctctttttggaatgctgcactatgcaaactcatgtgatagcgagtatctggtgaaactccaaaaaaagtacggtgtactcattctccggacacttatggaggatcggtggagcggtaaccgctga

SEQ ID NO: 12069 - RNA, 963 nt, synthetic construct
  source 1..963: mol_type = other RNA
atgcacctgaaatccttggagaaggcctttaacaccatgttccataacccgcagcttttcgaagagttcctgtgctccgatttgtccaacgaggttgaagagttttacatagggaaggaaaaaccacgcaaggttatccgagtgagtgacaagtttaagacgttcctgaggttcatagataaagtcatcctgcagcatctcaagatcaatgagggagtcgtgcactcatacatcaaagagaaatctgctatgtccgccgtgcagagccatgtaaacggcaaatattttcttgtgagtgacatcgtgtctttcttcagtaacgtgagctctgaagacgtgaaaaagatattagtggccaacgtgtctaatatacccatcgaggatatcgaagactatattccacgcatcgtcacactggtttgttggaatgattgccttcccgtaggcttcgtgacctcacccaaattgtcaaacgcggccctctttcagtttgattccgcaatggccgattattgtaagaaacagagtctgacctatacccggtattcggacgatctgattgtctctagccaggcaagagaacctctaattgaattacagacccagctccagtcactaatttcccagaatacgaatggtcaactggaagtcaatctggacaagacaaagatctacacaatcgggcagccttttacaatcctggggttggtgattactcagtaccaaactcttactattagcagaaagcataagaaccacctcgaggtagctctccactatttcgtcactgacaaactgaggttcaaggattatctggaggagcactttgctggcaaggagcaaagcttatttggattgctccactacgcaaaaagcgttgaacctcgttacattaataaactccaacggaagtacggtgcctacgctattaccgacctgctggagaataagtggaacgactga

SEQ ID NO: 12070 - RNA, 966 nt, synthetic construct
  source 1..966: mol_type = other RNA
atgactcagaccagcctgcagaatgcgtttgtgtcctattttcacacaaggtatcagtttgatgactttctgtctatactgactaacgaacattacacagagatcttttactcaaagaacaccttctctccctccaagaaactcaaggatttccagaagttccttaacttgtttctattcgagcttctgccgctgaatcaagatgtcgtttttagctaccgcaaaggcgtgaatgctcaggacgctatctcccctcacaagaactcaaaatacgtactaaatacggacattaagtcgtttttcgcaaacattaacacgagcaaacttaagaagttaatcttggacaacaagaacaatttcctcattttgccctccgatatcgagaaacacatcgacactataatgaacatcgttacctataactcgattctccctgtgggcgctcctacatctccagccatctctaatggttatctctttgacctcgattccgccctgcagtcctactgcttacggaatgagatcatctacacacggtatagtgacgacttcatttttagttctgaaactaaggagagcttgaccaaggtcctgcccattatcaacgatatgttcatacacttaggattcgagacttttaccctgaatgaatcaaaaacccgaattcagcaaagaggttctaagatcgccctcctgggcctgattataacaccacaaggatatgttaccgtagacaaaaatctgaagaaagaagtggagattcttcttcatttctacttgaccgacaaagaaaaattccgtgattacttcctgaagaaattcagcagtaatattgacaaggtgagtgggctcctgagccatatcaatgccgtggatagctactatatcgcaaagctgaaaaagaggtacgggtcatttatagtcaactccttcactcatagagatatccacaacgtgacattctga

SEQ ID NO: 12071 - RNA, 960 nt, synthetic construct
  source 1..960: mol_type = other RNA
atgaataaaacaagtctcgaaactgcctttaattcctatttccacaataagcattccttccaggattttctgaacataaacatcaacaacgagtacacacagatattctattccaaaaacaccttctccccaagtaagaagctgaagcagttccagcagtttcttaacctgtttatctttgatcatctgaacatcaacaaggatgtggtgttttcttataggaaaggggtgtctacgatcgatgcaataaagccccacaagaataagaaattcatctacactacggacattcaatcgttcttcacacacattgagactgaaaaaatcaagcacattatcctcgagaataagaacaactatatcattatcgaggaggacatagagaagtacatcgacaatattctcagcttagttacctacaagaatgtgttgcctattggagctcctacttctccaaaaatctctaatgcctatttgcttcggcttgacaatctggtccaggagtactgcgaaaaaaacgagatcattttcactaggtacagtgatgatttcatttttagctccgatagcaaagaaaagctgatcaatctggacgataccctcgaagactttctgaagcagagtgaatatctcaatctaaccatcaatcgcaagaaaaccaaactgcaacgtcagggctcaaacattacactgttaggactaacaataaccccccaagggcatatcaccgttaacaagaagattaaaaacgatctggagattcttctccacttttacctgacagacaagtcaaagtttaatgacgtattcgagtctaactatagcagcaaaatagaaaaggtgtcgggcatcattagccatatcaactcaattgacaaaacctacatctccaaattgcgaaaaaagtacggttcatacatcgtcaatagcttcatacacagagacatttcttatgaatga

SEQ ID NO: 12072 - RNA, 960 nt, synthetic construct
  source 1..960: mol_type = other RNA
atgatcaacaagaaaccctttcaggagatttttaatctgtactttcacggaaagtacagtttcgaagatttcattaacaccgatatcaaacgttgtgtgactccacatcagttcaatcaaaagacaatgttatccgtcaacaaaaaactggcagagtttcacaagtttatcaacgtgttcatcatcaacaaactggcttacaattcattcgtctgcttttcctatattgagaacacaactatcagaaattgcctcgaaccccacaaaaacaacaagtatttcctatccactgatatttctaacttcttcggtagtatccagagcgtggatgtgatgaacactatacaaagcaacattaacgaaggctcactgaatataagcgatatcgagaaatacaaggacagcattatcaaactgataacattcaacgactctctgcctattggattttcaaccagtgggcgcctttcgaattctatcttgtttaagttcgatcaggtggtgcttgactcctgtaatgcacaaaatattacttacagccggtacgccgacgacctgattttctcgagcaacgataagaacataaaacagacacagcttatggttgaaaatgcgttggccgcattattcaacaagaggctgaagatcaatatcgacaaaacgaagatttacagcaaacgggctaagattaagattctgggtatgacgatcaccccgaatgggtctatcaccatcgacaaaaagatcaaaagtgacatagaactcgccatgcatttctatgccaagaatacagagaagttctgctcaatcattgagaataagtttgacggcaatatacagaaagcctttggcaccgttgcttacatcaactccgtcgataaggcctatttgaataagctccgaaagaaatatgggaattataccgtagagtcttttctcaggaaatccgctaagcagtga

SEQ ID NO: 12073 - RNA, 954 nt, synthetic construct
  source 1..954: mol_type = other RNA
atgcagaaaaagagcttccaggaaaccttcaatttatactttcacgggaaatatagcttcgaagattttatcaacacgcccattaaagacaatatcacccagcatcagttcgatcagcgtacagtgctgtctgccaataaaaaattgaccgagttccataagttcatcaacgtcttcattgtgaacaagctcacatacgacgattctatttgcttttcctacgcaaaaaacactaccatcaggcattgcattgagccccacaaaaacaataagcactttctgtcaaccgacatttcaaacttctttgcatctatccagtccgttgatgttatcaatacgatacagcacaatattgatgaggggaatattggcatcgccgacatcgatcagtacaaggacagcatcataaagttgattacattcgagggagctctgccaattggtttctcaactagtggaagactttctaacgcaattctgttcgagtttgataaggtgatcctaacagagtgtcaaagtaagaacattacctactcccggtatgccgacgatctgatcttcagtagcaacaacaaaaatatcgtgcaggtcaaaccgattgtagaaactgctctctcaaacatatttgatgaacgactcaagatcaatgacaagaaaaccaaaacgtattcgaagaaaagcaagatcaagatcttaggcctgatcataactcctaatggtgacatcactatcgacaagaagattaagagtgacatacaaatagccatgcacttttatgcgaatgataccaacaaatttgactcctttcttcgcaagagatttgacggcaacatccaaaaaatcttcggaattgtgggctacattaatagcgtcaacaaggactttctgaataagctccggaagaagtacgggaactatatagtggattccttcctgaggaaatctgctaaatga

SEQ ID NO: 12074 - RNA, 963 nt, synthetic construct
  source 1..963: mol_type = other RNA
atgacgaaaactaagatacggcctttccaagagatctttaacctgtactttcacggtaagtactgttttgaggatttcatcgcaaccgacgtgaaaaagcacaccaagaagcatgacatcaacaacaaaatcatcctgtccgctgacaagaaactgaaagaattccaccagttcattaacgttttcatcgttaaccagctggaattcaacgacagtgtgtgcttttcctatgccaagaataccaccacacatacgtgtctggaaccccataaaaataacacttacttccttagcatggacatagtgaattttttcggatctatctgcaataccgatataacacgtgtaattgagcacaacatcaaacagaagaagatcaatatctcggacattgagaaatatacagctagcatcgtcaaattgataacatttgaaggcgtgttaccaataggttttacaacttccggcagaattagtaatgcgattctctttgagttcgataagaagattttggattactgcagtcccaagaatattacctactcacgatacgccgacgatctgatcttttcaggaaacgatacaaatattggccaggtaaaatcaaccgtgaaaaacattctcaccgatctttttgatacaaggctgaacatcaacaatgacaaaacgaaaacctacttcaagaacactagaataaagatcctgggcatggtgatcactccgaatgggaaaatcactattgacaagaagatcaagtccgacattgaaattgccatgtatttctatgtctctgatagcgtcaaatttgaggcaatcctagagaagaaattcaatgggaacatgcacaagatattcgggatcattgcttacattaatagcgtggacaaagattatcttaacaagctcaggaagaagtatggaaattatactgtggagagctttctccgcaagtctgccaaatga

SEQ ID NO: 12075 - RNA, 1659 nt, synthetic construct
  source 1..1659: mol_type = other RNA
atgaaaaagaagctttataacgtcgtcgggcacctgcccaaaatctggtttgtgtgcggcgcgaaattcgaaggcaaaaactctattcgcaagctcttcataaaatacattcagaagaaccaccaggagatttgtacagctaggaatagaaactctaacagtcttagctttagcccaaaaaagatcattttggccgaggatgtcctggagcagtcaaagaccaaagacaccaagattctggattacgaggagcacatttcagagttttcaaccaatgtgatcttctttctagaatctccttcagtttttatggaaattggacgatttaccaagactataacagaccctctgaaattcctcttctgtgtggatcagaagcacaaaaaaaagaagaatctgatcaacaagctgctatctgaccccaagtacacagttctgcattacaccaccaataatgacatcatcattaactccgatgatttctttaagaaggtgctgaattgcttgaataaaactacgcccactattagctactatgaagacaacattcattccttctatagcttcctaatctcctttttgcaaaaggaagcttctctagagcagatcattaggaaagttgaactcgagcggaagaagacaggattcttctccaatttcctcaataagatcaaattccacttgaagctgctcatcaaaagcggtcttatccttaagcaggactgtttctactttagtgtgatcagaggagatattttgaagggtgtaaaatttcaagccctgaccgagaggcagaaagaactgctgtttgacgttgagatgaactatagctacgaacacatcaaagatttagtgtatgagcccaatagtacccttaaaaactatcaagccttcattaagactcgcgtctttgaccctctggaggaagaacataaagtgatccataagaggtgctttagctacaagaaaaaacatagcatctccaatcttgtggagttacatattggtaacaattacctgctcaatatggacctgaaaaacttcttcaattccataaagagagaggactttatcaaatgcatggtaacactggggctgttcgaggagcgttttcggacaaaaattactgacatatgcttcaagacgaagagtaatgaaataaacggcttacctataggcgcacggacctccccattcatatctaatcttgtgatgcgggaatttgataatctcgtatacaacctctgcgagaagaaagaagtcgtgtatacgcgctactccgatgacttgtcattttcgtgtaagaaaaaaggcgtcctgcaagatatcgagaaggagatctataaagtgataaagaagctgccatacccgcagaacctgaaaattaacgaaaagaagaccaagcacatgtcaaaaaaaggccgtcgaaaaatttgtggattgtatatcacaccagagagccacatctctattgggagaaaaaataagaacaaggtcaagaacatcctcaagaactttaacaagactgaaaagatctaccacaataaggagatgattaaaatcatccaggaaagtttcctcgattcggaggaaaaggggtatctctattacgttaactccgtggagaaggagttcttaaagagtcagatatacctgtga

SEQ ID NO: 12076 - RNA, 921 nt, synthetic construct
  source 1..921: mol_type = other RNA
atgaaggaaaaggactttaaggtcttttacattccaaagaagaacggttatcgaaagattattacgtataacgacgagaatcgtaaactcagagaatttcatcagcgcgttggagacatcctctacaagaggattcttccctccaaattcgctaaagcatacatcaaaaaacgcagcatcataaagaacgccaaaactcacatgtataatgactcctttctcctgttcgatattaaggacttctttcagtcaatcaatcacaattggttgatagagaagctgtactacgagattaacctcaaccacaagaagaagattagtaaaatcacctgtgctaagattgtcgacagctgcagtgtaagtaaccggggcttagcagtggggctgatcccttctccctttctggccaatatctacttaaaggatttcgacaacatcctgtacgggaacttaaaaaaattgggaatcaagaggatcatctacaccagatacgctgatgacctcgtcatctcctataatgggatagaaccgaaaaatatcgatgatatcaagaagatcgtgtgtgagaatctaaaaaagttcggactgaagctaaatgataaaaagacccgaattatcgacttcaaacagtcaaaccatgttaagatcaccggcataaatattacgaaaactgaggacgatgggcgcaagttgtctgtgggccggaaaagaaaagatgatctttacgtgctggccgtggagctggccaaacggaaacctgatgagaggaagaataacgaaattctcacacttaaaggactgcaaagcttcatactgtcggtggaaggtgtaaagtatgaagagtgctattccaagaacatgattagcgttattaacggcctgggctataacgcgcttaaagacctgatagactctttgtga

SEQ ID NO: 12077 - RNA, 933 nt, synthetic construct
  source 1..933: mol_type = other RNA
atgcggaaaattaaaggcaagattttctttatccccaaaaagcacggctaccgaaaaatcattacatataaccaatccgacagtgacattgaattgaggaagtttcatgtgaagattgcttccctcctgtacaaaagagttttaccgagtaagtttgccaaagcctacatcaagaataggtccattataaagaacgcgaaaacccatatgtataacgacattttcatcatgttcgacattaaggactttttccagtccattaatcacaatcgccttataaagaaactgtactacgagataaacctgaacaatagaaagaagttgtctatggtgtcctgcagcgatataatcaagagttgctcaataagcaatcgaggacttgcagtcgggctgataccatcaccttttttggccaatatttatctcaaggacttcgacaatatcttgtacggaaatctgaagaagctcaatctgaaaaacatcatgtatactcgctacgctgatgatctcaccatatcatacaaatcggatacgcccctcaagatcgaaaagatcgaaaagattgtttgtgagaacctgaagaagttcggtctgaaactgaactgccggaaaacaaggagcatcaatctgaataaatccaatcatgtgaaggtaactggtatcaacatcatcaaaatgttcgacaactatcggcagctgagcgtcgggcgtaaaagaaaagatgacctctacaacctggccattaagatctcaaagaagaacttcaaagagcacaaagaaaatgagatcaacaaaatcaaggtcaaaggccttcaaagctttatcctatctgtggagggagaaaaatacgagcagtgttattctgagaacatgatgtctgtgatccacgatcttgggtataagagcttaaagcagctaattgataacatttga

SEQ ID NO: 12078 - RNA, 924 nt, synthetic construct
  source 1..924: mol_type = other RNA
atgattaaagaagcagacctgaaagagttttacatccccaaaaagaacgggtacagaaagatagtcacctataaggacggtgataataaaagaagggaattccatcaacgagtggcccggttgctctataaacgcattctgccgtctaagttcgccaaggcatacatcaagaagcggtcaatcattattaacgccaaatgccacatgtacaatgacatctttctcacttttgatgtgaaagactttttccagtccatcaatcataattggatgattgagaaactgttctacgagatcaatttaaaccacaagaagaaggtcaacaaagtcatttgctcacagatagtgaagagctgttcggtgagtcgtaagggactagctatcggcttgataccatctcctgtgctggctaacatctatctgaagaacttcgataacatactctacggaaatcttagggcgatgggtatgaatcatgtgatttatacccggtacgcagatgatttagtgatctcctacagaggcacagacatcaaaaacatcgacaagataaagaagatcgtttgtgagaacctgaagaagtttggcctcaagatcaatgacaataaatgccgagttattgacctgaataagagcaaccacgttaagattacaggcatcaacattaccaaagagatcgataacaatcgcaaactttctgtggggcgcaaaagaaaagatgacctttataggctggctattgaactagcccagaagtcacccgaggagcggagtgaatatgaaatagggaaaattaggggactgcagagcttcgtactgtccgtagaagggaaagagtacgagaagtgttactccaagaacatgatgacgattgtcaataagctcggctatagtactctgaaagatttgatcgacagcatgtga

SEQ ID NO: 12079 - RNA, 918 nt, synthetic construct
  source 1..918: mol_type = other RNA
atggacaataatttcaaggttttctacatccccaagaaaaaaggatttagaaagattgtgacgtacggcaaaagtaatattaagctgagggaaacccataagaatatcaatattctgctgtacaggagggtccttgtgagtaaatttgccaaggcttatactaaaaaccgcagcattatcaagaatgccaaaacccacatgtataacgatattttcatcatgttcgacatcaaggattttttccaatctatcaaccataactggctcatcgacaaactctattacgagatcaatcttaaccacaagaaaaaagtgtctaagaagaactgcgaaaagatcgtaaagtcctgttccatatcgaataaagggttagctgttggatttataccttcaccatttctggcgaacatctatatgaaggacttcgacaatattctgtacggcaatctcaagcagctggaattgaaaaatattctctacacacgctatgccgatgatatcgttattagctataagtccaacaagactgaaaagttcctagaaataaagtccctgatagacaaaaacctgtctaagtttgggctcaaaatcaataacgagaagacaaccatcattaacttgaacaaaagcaatcacgtcagaatcacaggcatcaacgtgataaaagacacctttaacaaccgatcaattagcgtaggtcggaaacgtaaggatgatttctacaatttagcactgaagattgcaaaggagaagaaagaggaagtgaatatatatgagcggaagaaaatcattggactataccacttcattgtctcagtggagggcaaaggtttcgagaaatgctacagtgagaagatgaatcatgccattaacaaccttgggtacaaaaactttgaagagttgatcaagaacatctga

SEQ ID NO: 12080 - RNA, 933 nt, synthetic construct
  source 1..933: mol_type = other RNA
atgaataacgacttgagcacattctatattccaaaggcaaaagggtatcgaaagattacaacctataaggaccgtaatggagatctgataaagtaccacgacaaagtaaacatctctctccagaaacggctcaagcaatccattttcgccaaagcgtatataaagaaacgcagcatcgtgacgaacgccaagacacacatgtacaatgacatctttattagcatggacataaaggatttcttccagtctattactcatgataggctcatcaataccctgtattacgagatcaacaagaatagtgtgggacattttacgcttgagcagtgtcgcgatttagtcaagtcttgcagcacaggacagcgaggtatcgccattgggctcaagccttcacccatcctggcaaacatataccttaaagattttgatggcgtgttgtacggctggctgaagaaactagaccttgacaatgtcatatacactaggtacgccgatgacatgatggtatcctacagatccaattcaaaggataccgtgccgatcaacaaagagattattagtaaagtctccgaactgttgaagctctcgtatctgagactgaatgctagtaagaccagaattatcaacctaaacatctcaaaccacgttcgcattaccggcatcaacattatcaagaatgacgacaactttcggatgctgactgtgggtcggaaacagaaagatgacttatattacaggtctatagggcttttcattaaagaaaccaaggatgacaagtggtatctggaggctaagaaaattcaaggcatgcagtcattcatcttatccgtggagggcgaaaggtacctcaatacttacagcaaaaagatgaacatcgttatcaatgacttggggtttaagaacctgaaagacctgatcgataatctgatctga

SEQ ID NO: 12081 - RNA, 921 nt, synthetic construct
  source 1..921: mol_type = other RNA
atgtataaagagaagttcaacatcaagtacatcccgaaaaataagggttatcgcaagatagtgacttacaagaattccgactgtgatttgaaaaagttccatatcaagatcagccgaaccatttataataacaccctcccaagcaaatttgccaaagcatacatcagaaaacgtagcattatcactaatgctaaggcccacaagtacaatgacatatacatcttcttcgacattaaggacttcttccaaaacataaatcacaacaagctgattgagaagctgtactttgagatcaacattaagcggaaaaaaaagatctccaaactggattgctatcgcattgttaaatcatgtagtctgtcaaacaagggactcggggtgggacttataccctctcctatcctaagcaatatttacttgaaagagcttgacaacatcctgtacggccgactgaagaagtttggcctacccaatgtgatatacacccggtatgctgacgatatggtcatttccttcaagaaatgcgacaagtataatcttgacgagattgaactcttggttaaaaatctccttacaaggtacggcctgaagatgaacaacaacaagacgaaagtgattaatctggaaaagtctaaccacgtgcggattacaggtatcaatatctctaaagatagccagaacaaaagatatctcaccgtcgggaggaaaagaaagaaccagttatatcatgatgtcatcaagttactgaacatcaagaaagaggatagggacaaaaaagagattaaccgcgtaaaagggatgcagagttttattctctctgtggaaggcatctcatatgaagattcctactcgttgggcatgattaagatcatcgaggaatttggatttacaaatctgaaggaagcgataaatagtctgtga

SEQ ID NO: 12082 - RNA, 921 nt, synthetic construct
  source 1..921: mol_type = other RNA
atgaagaacaacaactttaagatcatgtacatcccaaaaagcaaaggatacagaaagatcataacctacaaagacaatgatgtggaaatccggaggtatcacatcgatatctccaagttcatttacaataacactctgccttctaagttctcgaaagcatacataaagaaacgatccatcataaccaatgccaaagcccatatgtacaatgacgtctttttatacttcgacataaaggacttcttccaaaatatcaatcacaacaagctgattgacttgctgtaccatgagattaataagggcagcaaaatcaaaacttccaagatagactgcaacaatatcgtgaaatcttgtgctgttagtggcaagggacttggtgttgggctgattcccagccctttgctgtctaatatgtaccttaaagagttcgacaacattctatacggaaaacttaagaagatggacctgccaaatgtaatttatacgaggtatgccgatgatatggtgatatcattcaagtatatcgagtcctacgatatgtcagaggtgaagaacttaatcggtattctgctgcgtagatatggcctcaaactgaacgacaaaaaggtgaagatcattaatctgaacaagagtaaccacgtcaggataacaggcattaacctatgcaaagacgaaaacaacaatcggcgcctgaccgtgggcagaaagcgcaaaaatgagctctactataaagcgattgagacaatttccaagcccgctaaagatcgggaagatattcagattaagaagatcaaaggacttcagtcatttgtcttgtctatcgagggggaaatgtatgaaaatacctatagccagaacatgatcagcattatcaacaactatgggtttaagaatctcaagagtctcatcgataatctctga

SEQ ID NO: 12083 - RNA, 921 nt, synthetic construct
  source 1..921: mol_type = other RNA
atgaaagatgagctcctgatcaaatacatccccaaaaaaaaaggttaccggaagatagtgtcttataacgtcgcaaaccaaaagttgcggcaggaacataagcacatcaataagtttatctgtgacgagactatcccgagtaagttcgctaaggcctatatcaagaacaggtccatcatattaaacgccaagatgcatatgtacaatgacattttcatctacatggacattaagaagttctttgcctccattaaccacactatgatggtgaacctgctttttaaggaaatcaataagaggaagcccaagatcattattaccaaagatacctgctacaagatagtgaaatcttgcgcaattagctccaaaggccttgcggaaggcgtaatcccaagccctactctatctaacatttacctaaaggagttcgacaatatcctgtatgggtatctgaacaaaatgcacttggagaatatcagatatacccggtacgccgatgacatgatcattagcttcaaggatacagagaattacaacgtggtcgatattgttaacgctgtgacgacacttttaaaacgatacaaactggagctgaacaaagagaaaaccaagattattagcctcaaccgctctaatcatgtgagactgacagggatcattatatcaaaggattccgacaataacaggagcttgacagtgggacgtaaacgaaagaacgaactgtataataaagccatttcactggctaagaagaataaggatatccgcctccagggagagattaataaagtcaagggtatgcagtcatttatcctgtcggtagagggcataaaatatgaggaaatctacagtgacaagatgataagtatagttagagaactcggctatgaaaaacttaaacagctcatcgacaatctgtga

SEQ ID NO: 12084 - RNA, 915 nt, synthetic construct
  source 1..915: mol_type = other RNA
atgattaaggaggacctcgtcgtcaaatatataccaaagcataacgggtacaggaaaatagtcacttacaaggaaaattcggagttgaagaagtttcatacaaaagccaagaatgtcctcgacaaaaaaatcattccgagcaaattcgccaaagcttacatcaagaagaggagcattatttccaacgcgaacgttcacagatataatgacatattcatcgcgctggatatcaaggattttttcgctaacatcaaacacaagaagctaatcgatttgctacagtttgagctggcacggaacggacggagggtttacaagaaggactgcattaagattgtgaagtcctgctctaatactgatcgcggcctcctggtgggccttaagctgtcacccattctggccaacatctatctgaaagagttcgataatatcctgtacgggaaactcaaaaaaatgaacttacccgatgtgaagtatacccgctacgccgacgatcttgttatcagctttaagaactgtgaggcaaatcttcatgacatcatcagtctgattcagaaactgctgaaaagatatggtctgagaatcaatgaaaagaagacccgcatcataaacttcaatgtaagtaaccacgtacggattaccggcataaatatcgtgaaggacgaaaagaacttccgaacattgtctgtgggtcgacagaggaagaacgagctctactatttagctaaggaaatactggatgggcaattaaacgaccctgtgaaaatcagaaaagtgaaaggactgcagtcatttattctttccgtcgaaggcgtgaattatcaaaaaacgtactcttacgccatgatcaatgagtttacacgtcggggatatattgacctcaaggacttcattgataagttggactacaaatga

SEQ ID NO: 12085 - RNA, 981 nt, synthetic construct
  source 1..981: mol_type = other RNA
atgtatcgcaaggaacaaataaaacggatcttgttttctcgcaaggtcaacgcaatggatgagaagctgtttcagatcaagtacattcccaaaaaaaacgcattcaggaaaattgtgacgtatcgagaagacaataatatcagagtgatgcacgagaagatcacaagctttatcgttaagaatactctaccttctaagttctcaaaagcttacatcaagaataggagtatagtgaccaacgctaaagcgcatatgtacaacgatatcttcctcatgatggatatccagagattcttctccaacatcaatcacaacaaactgatcaatgtgctctattacgagttgaacaaaaaggaaaacatcatatccaaggtcgattgcactaaaattgtagactactgtagtgtcggaaataagggactgccgattggctttgtgacctccccagtgctttcaaatctgtatctcaaggagttcgataatattctgtacgggaaactcaaaaagtacaacctggaaaacgttatttacacaaggtatgccgacgacttgaccatatcattcaaaaaaaactccagctatgccaatgacattattgtaaatatccagaacacgatagccaaccttctgaagcgttacagtttgaagattaatgagcggaagactaagatcattgaccttaataaaagcaaccatgtccgaatcacaggtatcaatattatcaaggacgacaacaactttaggagactttctgttggtaaaaagcggaagaacgagctatattggtccgccatcaattactttttaaccgacaaagacaaccgcaatgatgctgaactggataaaattaaagggatgcagtcgttcatattaagcgtggagaagaccggctacgaaaatagcttttcaaaggcaatgaagtctaagatcaacgagctgggctataacagcctgaaggaactcattgataaactggagtga

SEQ ID NO: 12086 - RNA, 939 nt, synthetic construct
  source 1..939: mol_type = other RNA
atgaacgaacaactgaccgtaaaatacatcaaaaccaagaacaaggtccgtaaaattgtgacatataccgaaaatggggagttgaggaagtaccacgaaaatgtggtgaaatacttagagaagtacgcgacaaacagcatttttgccaaggcctatgtccccaaatcaagcattttcaaaaacgccgaggcccacatgtacaacgacatctttatcaaaatggatgtcaagaacttcttcccaaacatcaatcataaatacatggcagagtgtctgttcttcgagctcaataagaatacccagattagtcgaaaagaatgctattctatcgtgaagaagtgttcagtcggcgagaaaggactcccgcttgggctcgttagcagccctgcactagcaaacctttatatgaaagaattcgatggactgttgtatggatctcttaaaactatggacctgaataatcccatctacacaagatatgctgacgatcttgtgatatcgtttaagtctggcactaacgacattgataagattgatgccatcaagcaagaggtaaggcgcctcttgaaaaaagtgcacctgaatttaaacgagaagaagactaagtcctatatactgaataagaccaatcacgttcggatcacgggcgtgtctatcacaaaggatgaaaaaaactacagacacatctccgttgggcgcaaactgaaaaaccagatattctggaatgctattaacatgcatgaccaggaaatcaaggattacgtgcagatcgagcatctaaagggcatatttagttttgctctgtccattgagaagaaggactttgaagcctgctattccaaaaatatgaagcagctgatcaaggagaggggttacgactcactccgggatctgattaaggacctgggtaacgacaataagagtatgattacgaactga

SEQ ID NO: 12087 - RNA, 954 nt, synthetic construct
  source 1..954: mol_type = other RNA
atgaaagaacagctggtcgtgaaatacattaaaacgaagaacaaagtgcgcaaaatagttacatatactgagaatggggagctgcgtaggtaccatgaggaggtagtgaaatacctggaaaagtacacaaccaattctatctttgcaaaagcttatgtgcccagaagcagtatttacaagaacgcgaaagcccatatgtacaacgatatcttcgtgaaaatggatatcaagaactttttccccaacatcaatcacaaatatctcgccgaatgcctgttctttgagctcaacaagaacacacagatctcacgaaaggaatgttatgacatcgtccgcaagtgctccgtgggagaaaaaggcctcccacttgggttggtgtctagtcctgccctggcaaatctctatatgaaagagtttgatggcttactgtacggtaagctaaaaaagatggagctgaataatccgatttatacgcggtatgccgatgatattgttatcagtttcaagaccggtaaggacgatttcgaaaagatcgacaacatcaaagcagaggtccaatccttgcttaaaaaagtgcatctcactcttaacgagaagaagacaaagtcatacaccttaaacaagtccaaccacgtaagaataactggaatctcgatcaccaaggacgaaaataattaccggcacatctcagtgggcaagaagctaaagaaccagatcttctgggatgctattaacatgtacgaccagaaggttaaagactatactaaaattgagcacctgaaggggattttttcttttgctctgtccattgagaagaaggatattgagaacttctacagcgaaaatatgaagcacctgataaaaattaggggatatgacagccttaaggaattgataaaagacctgggcagcgacgtcgataaaaatgacaataaggccgtcataaccaattga

SEQ ID NO: 12088 - RNA, 957 nt, synthetic construct
  source 1..957: mol_type = other RNA
atggatgaggagctggttgtgaagtacatcaaaactaagaacaaggtccgaaaaatcgtgacctacaaggaacgcggagaactgcgtaagtaccatgaaaaggttgtagaatacctcgacaagcatgtcattgtctcaaaattcgcgaaggcctatgcacccaagacctccatttataaaaatgcctacgctcacatgtataacgacattttccttaagatggacattaaggatttctttccaagcattaaccataactatctggcagagtgtctctatcacgagataaataagaatacgtccattagcagacgcgaatgctacgatattgtgaagaaatgctccgtagggaaaaagggcctgcctcttggctttgtgacatctccggctctggccaatctatatttgaaagaattcgacggcttactgtatggcaaactcaaaaagatggacatcaagaggcccatctacactcggtacgctgatgatatggtgatcagctttcagtcacaggaggactacttggagaaaatcgagcttataaggagcgagatagacaacctgttaaagagggttcatttgagcatcaaccacaaaaagactaagatcatcaatctggagaagaccaatcacgtcagaattacaggagtgtctattaccaaggataaaaacaactaccggcacctgagtgtcgggagaaaacttaagaaccacattttttggtcagccataaatcagtatgacaaagaggagaaagattataacgaaatcgcacacatcaaggggctgtattctttcgtgctcagtatcgaaaagaatggagtggaaaatggttactccgacaaaatgaagagtctgctcgtggagcggggctacgagacattaaaacaactcctgtcgtctctgggtaatgatgaactaaacaaaaacgagatcgacgatttgggatcccattga

SEQ ID NO: 12089 - RNA, 912 nt, synthetic construct
  source 1..912: mol_type = other RNA
atggatgagcaactggtcgtgaaatacatcaggacaaaaaaaaaagtgcgtaagatcgtaacctacagagagcataatgacttaaggaaataccatgaagcggtggctaagtatctccagaaaaatacgtttaacagtatctttgccaaggcctatgtgcccaaaagctcaattttttccaatgccaaggcacacatgtacaacgacatcttcatcaagatggacatccgcgactttttccctaacatcaaccatgagtatatggctaagtccctctatcacgagataaataagattgcacagatttccaacaaggaatgccacgatatagtccgaaaatgctctattggggaaaagggcctcccattagggctcgtctctagccccgggctggccaatctgtacctgaaggaatttgatggcctgttctatggccagttgaagaagatgtgccttaaaaacgtgatttacacccgctatgctgatgatctggttgtttcattcaaatactgtgatgactatgagaagtacgcagaaaagatcgtcgctcaggccgagcacctgcttcagagattttgtttgaaactcaatatggagaagctgcagatcgtgaatctaaagaagagcaatcatgttcggattactggtgtgagtataaccagaaactctcaaaattaccggcacattagcgtaggcaagaagctgaaaaacgagatcttttggaaagccattgagctgtacgacaacccggagggacacaacatgatagagagggaacagttgaaaggactgttctcattcgtgctgtcgatcgagaagcgaggagtcgaagaatccttcagtgagggcatgataaatcttctaaagattcggggtttcaactctctcaaagaacttatcaacacattgtga

SEQ ID NO: 12090 - RNA, 924 nt, synthetic construct
  source 1..924: mol_type = other RNA
atgaataaagagctctttctggaagaaaagtacatcaagaccaagaagaaatatcgcaagatcgtaacgtatgtggacggagaaaacttgctgagagaaaagcacgaacggatcgtctcactcctgaaacaagaatgtagcgattcgatttttgccaaggcatacattgagcactcttctatcgtcaagaatgcgaaagcccatatgtataacgatatattcctgttcttcgacgtgaaagacttctttccgagcataaatcacaactacttaatccagcgtctgtataaggagctaaataacaatggcaatgctagcatcaatagttgttccaaacttgtggagctgtgctccgtgaacgacaaaggtctgccattagggctagtgacatcccctatccttagcaacatttacatgaaggaattcgacaacatcatctatgggaagctgaaaaagctctctctggataacataatttacacacgatatgccgatgatatcgtgatcagctttaaggccgagaaaattgaccccgacataaatgtcaacattaaggagtgcgttataaggtgcttgaagcaggtccaccttaaatccaatgagaataaggaaagagtgtacgatatccgcaaaggtggacatgtgagaattactggcattaacgttattgtcgagaatgacaattaccggaagctcaccgttggaaggaaaaggaaagataggttgtacaacgatgtaatgagttactatatgcgacgcatcaaggaccgggaaaaggctctgtcaattaagggcaacgaatcttttattctctcagtggagggcaaagagtatgagaaatgttacagtgagaacatgaaaaaggttatcaaagagtacgggtatgactccctgcatgatatgatcaaggcaattaagtactga

SEQ ID NO: 12091 - RNA, 930 nt, synthetic construct
  source 1..930: mol_type = other RNA
atgaacgtgcagcatcccgacatcaaaattcgatacatacggaccaaaaataagacaaggaagctagtgacctatagtagcgatgactgtgaacttcgtgtgcgacataagagaatcaacgacttcattgaggcaaggtttatcccgtccatcttcagcaagggctacgtcaagaatcggagtatttatcacaatgctctggcgcatctctacaatgactacttcatcatgctcgatatcaaggatttcttccctcacatttgccacaaacagcttgccgacaaactcttctacgagatgaatttgctgagtagagagcaaatatccatgaaggagtgtaaaaacgtgatagagctgtgctcagttagctcaaggggcctcccccttggttttattacatctccactgctgtccaatgtgtacatgaaggagtttgacggaatcttcttcggtcaactgaaaaagttgggcctggaaaatcccatctatactcggtatgtcgatgacataaccgtaagctttaagtattctaacagaatcccacctattgaagtggagaatcaggttgttgacttggcccagtctctcctgtctaagtatggactgcaactgaacaaccgtaagaagcgcagttacaacttaaacatttcaaaccacgtcagaatcactgggattaacatcacaaaacagcccgataataaacgcctgcttaccgtaggacgcgccacgaaaaacgaactctactggggcgccatagactgcctaaaaagcagggatcctgaaaagatcgcacacattaagggcatgcagtcctttatcttgtcaattgagaagaatgggtacgagaagtgttatagcaaagctatgattcagcagatccggaacttagggtttttttccctgaaagaattaatcgattcgctggattga

SEQ ID NO: 12092 - RNA, 933 nt, synthetic construct
  source 1..933: mol_type = other RNA
atgaacgttcagaaccccgatattaagatcaggtacatcaagactaagaacaaaactagacggatcaccacttatgtgtccgacgactgcaatcttagattgagccacacacgaatcaacgtgttcctcaaggaaaactttattccttccgtctttacaaaagcgtacgtttcaggttgttcaatatatcacaatgcacttagtcacctgtacaacgattgttttgtgatgatggatataaaggacttcttcccaagcattagccaccggcagctcgaaaagaagctgtacttcgagattaatgctaaggccccaaatcagatctctatgctagagtgcagggaactgatcaatctgtgctctgtagggaatgtaggactccctctgggctttatcacctccccggtcctgagcaacatttatctgaaagaattcgatggcatcttttacgggaaactgaaaagcctctccttgaagaacattatctacacgcgctatgcagacgatatcgtggtgtctttcaaacccgaggacgtcaaaaatattgatgacgctaagagttccatcattaacatcgccaagcaaatcttgagccgctataatctccatttgaatgagagaaagaccaggttctattcccttgaaatttcaaatcatgtgcgtatcacaggcgtcaacattaccaaaaacgacgacggaaagcgactggtgacagtgggtcggtctttaaaaaataaactgtactgggacaccataaactatatggagtcagataacaaggatgccgagacggttaatcacattaaagggctacagagttttgtcctctcgatagagaaaaatggatacgagaagtgttacagtaagcaaatgatcgaaaacgtgcgcaaacatggcttcaggactctgaaggaccttatagattctttatga

SEQ ID NO: 12093 - RNA, 927 nt, synthetic construct
  source 1..927: mol_type = other RNA
atgaatatcaacaatcccgacatcgtagtgcggcacattaagacaaagaataaaactcgcaagatcatcacctatcgtagcgaagattgtgagcttaagactaaacacaggaggataaacacatttctgcaggagagatttatcccttcgatttttaccaaaggatacgtaaaaggtcgaagcatttatgataatgctctcccacacatgtacaacgactattttatccttctagacattaaggacttctttcctcacatctgccacaagcagctggctgcgaaaatcttccatgaaatcaatctggtgaaggagaatcagatcaacaagaaagaatgcaattacatcgtcgactgttgctcaattggctctagaggacttcccctagggttcataactagtccaatattgtctaacatgtacctcaaggagtttgactgcatactgtatggctacctcaagaaaatggaattgaacaacgtgatttacacgaggtatgccgacgacattattatctcctttaagaccgattcattcgtcgagttcaaggagattgaaaacgatatagtggatacctctaagttgctgctcagcaaatatggcctgcaaatcaataatcggaaaacacgcgcctacaatctggatgtttctaatcatgtccggatcaccggtatcaacattactaaatccgaagacggctatcgacatcttacggttggaagaaaactgaagaacgagctgttttggaacgcaatagaatgtttcgaaaccaagaaccaggagaatatccagacaattaaggggttacaatcattcgtgctgtccattgagaagcagggatacgagagttgtttcagcgagggcatgttaaaaaaggtgaacgatttggggttcgaaagtctgaaagagctcattgattccctctga

SEQ ID NO: 12094 - RNA, 927 nt, synthetic construct
  source 1..927: mol_type = other RNA
atgaacagcaccaatcccgacgttcgcattagctacatcaaaaccaagaataagttgaggaaaatcgtgtcatatcgctctaatgactgcgaattgaggacgtatcatcaacaaatcaatgacttcctggaacagcgattcatccctagcattttctctaaggggtatgtgaaaggcaggagcatttacgataacgcccaggcacatatgtacaacgattactttatcatgctggacattaaggacttctttcacaacatttgccacaagcagctgagttctactctattctacgaaatcaatcttgcgcaggccaatcagatatctcagaaagagtgtaatgacatcgtgtctgcttgttccgtctccaaacgtggcatcccgctgggctttattacctctccactcctgtccaacatttacctcaaagaatttgacgggatattctatggaaagctcaagcagatggcattatcaaacataatctacacaaggtacgcagatgacttaacaatctcgtttaagactgattgcacagccaaactgcccgatgtcgagagtctgatcgcctcaacagccgattccatactgaagagatacggactacacctcaacggccataagacccgatcgtattccctgtatgtgagtaatcacgtgagaattactggtattaacgtgatcaaggaccaatcaggttaccggagccttaccatcgggcgctcagtaaaaaaacagctctactgggatgctctccggtgccttgagtccaaggatggagagctgataagacacgtcaagggcattcagagctttatcttaagtgttgagaagcaaggatatgaggactgttattccagcgctatgaaacggagacttagtgatctggggtataaaagcctgaaggacttgattgatgctttgtga

SEQ ID NO: 12095 - RNA, 930 nt, synthetic construct
  source 1..930: mol_type = other RNA
atgaacgaacagcatcctgatattacgacatattacatacggacaaagaacaagacgaggaagatagtctcttacatatccgacgattgtgagctgcgcaatacccacttgaaaatcaacaatttcctcgagaggagatttatcccgtcaattttcagtaaaggatacatcaagaaccgttccatatatcataacgctcagagtcacatgtataacgactactttatcctgatggatattaaggacttcttccactcaatctgtcacaaacaactggcacagaagatcttttacgagatcaatctcactaaaagcaaccagatcaatctgttggaatgctacaagctcatctccctgtgcagcattgattcacgggggcttccattaggattcataaccagccccatcctgtcgaatatctacctaaaagacttcgataacatcttctatggcaagcttaaggagttaaacctcgacaacatcatttacaccagatatgctgacgacttaaccgtgagctataaaacaaagagcaccgtcaaagatgtgaatatggaggccaaaattgcggaaacagcctctaatattctcaaacgatatggcctgaagctgaataatcgcaagactcgctctattaacctgaatgtctccaatcatgttcggattactggtgtgaatatcaccaagaacaactacaactttaggcacctaacagtggggagaagcataaaaaatcaactgtactgggatgcccttaaatgcatcgactccgacaacgacctgttgaagaataaagtgaaaggcatgcttagctttgtactgtctattgaaaaggccggattcgagacttgttactccgatctgatgatggctaaggtttatagtttgggtttttcaagtctcgcagaactcattatgtctattaagtga

SEQ ID NO: 12096 - RNA, 927 nt, synthetic construct
  source 1..927: mol_type = other RNA
atgaccgagctgcaccccgatatcatcattcgctatatccgaacgaagaataagacacggaaattggccacctaccggtccgtggattgcgaccttagaaaaaagcacgaacaaatcgaacagtttcttaccgcctggttcgtgcccagcatttttgctaaggggtacgtcaagaatcgaagcattttccataacgcccagtcgcacatgtataacgaccacttcgtaatgctggacattaaggacttctttcctcacatttgtcacaagcaattgagtgagaagctgtattacgagctgaaccgttccgggaaaaatgtcgtcgcaaagtctgaatgcaacgatattgtagacatttgcagtataggatccaggggcctgccactgggatttgtgacatccccaaccctgtcaaacctttaccttaaagagttcgacggtatcttttatggaaagctcaagaagctcggcctcaataatgtgatctatactaggtacgccgatgacctgactatctccttcaagactgtgaccgcacctgaactcagtaaaatcgaggaaagcatagttcagatagctcagcaattgttaaaacgctacggactacagttaaacatgcataagactagatcttacgacctgagagtgtcaaatcatgtgcgcattacgggcgttaacgttatcgtctctgaaggtaaccgcaggagactgtctgctgggaggtcactcaaaaataaactgttttgggatgcgatagaatgtgctgagacacgggatccggtcaagaccgcccatgtgaaaggcatgcagagcttcattttatcagtggagaaagaagggtatgagacatgttttagcaaagcaatgatccagaaggttgagtctctaggcttcagtagcctgaaagagctcatcgattccttgtga

SEQ ID NO: 12097 - RNA, 975 nt, synthetic construct
  source 1..975: mol_type = other RNA
atgaagaaatccgaagacgtcataatcaagcacattaagaccaagaataagatccgcaagatagcgacatacgtttcagaaggctgcaaactgcgaaaagagcatgaaaatatactgaagtacctgaacaagaacttcattaatagcaaattcgccaaagcttatgtaaaaaaccgtagcatttacagcaatgccaaagtgcatttatataacgactgctttatcatgttggacgttaaggactttttcaattccatcaaccataagaacctgattgagaaattgtactacgagatcaacaaaccaaacaaaaagatctactaccagatcgatgaatcaaacagaaagctgatatcaaagattgagtgcgctaatatcattagtaagtgctcgctgtataataaaggtatccctttgggctttatcactagtcccatcctttccaacatttatatgaaggatttcgacggcatcctctatggtcagctgaagaagttcaaggactacaatatcatatactcccggtatgccgacgatatgacgatttctttcaaggataaccaggataaaaaggagattgagaacgagattatcaatattactgaggatctcctgaaaaggtatgggctcaaactgaacaataagaagacccggagttatgatcttaccatttctaaccacgtcaaaattacaggcataaatattgtgaaggaggaagacaattacagacgcatgaccgtgggaaaaaaggtgaaaaacaagctattttgggatgcactaaagtgttatagggatgggaatcacgactacaaatgtatcgaaggattaaaaggaatgcaatcctttatcctctctatcgagaagaaaggctatgaagaatgttacagcgaaaacatgaagaacatcataaatgagcttgggtttagcagtctgaaagagctcatcgactctctgttctacattgagaaaaattga

SEQ ID NO: 12098 - RNA, 951 nt, synthetic construct
  source 1..951: mol_type = other RNA
atgtccgaacagaacgtgttctaccaggtgaagtatatcaagaccaaaaataagctgagaaagatcgtcacttacaaagacgaactgccggatataaagttaaagcatgaggaaattgcggccttcataaacaagaacttcattccctctatcttctctaaggcatatgtgaagaatcgcagtatatatcacaatgccattactcacatgtacaacgatgtctttattgctctcgacatcaaaaactacttcaatagtatcgaccacaagctgctcttgagcgctttgtattacgagcttaataaacggaacaagtctacaattagcaagcttgaatgtggcaaaataatctccatctgcagcatctttaagaagggcttacccctgggcttggtgactagtccaattcttaccaatgtgtacatgaaagagttcgataacatactctacgggaaactcaagaaaatgaaactgaaagacgtcatgtacacgagatatgccgacgatctggtcatctcatttaagcgtgacgtgtatctcgattccaatcagattcggaagaatacagacgttatagtacatcaagtgtcctccctgctctccaggtttaaactgaaactgaaccctgccaagaccaaaattacatcattcgagaaaagcaaccatgttaaaatcaccggtgttaacatcatccgagatagttctaaccacagaaaactaagcattggaaggaagattaagaacaatctgttccatgacgcaatcaagtgctttgaggagaagaacaaaaataagtcggatgtgatgaagatcaaagggcttgagtcatttgtattgtctatcgagaaacgcggttatgaggaaatttactcacggaatatgaagaagaagattaaagacctaggatttgacagcctgcacgatctgatcaatagcctgtattacgaatga

SEQ ID NO: 12099 - RNA, 936 nt, synthetic construct
  source 1..936: mol_type = other RNA
atggatgtgcagaccaattactaccagattaaatacatcaagaccaagaagaagaccagaaagatcgtcacttatacagagaattatccggaaatccgagttcaacatgaaaaaattgctgacttcatcaacaagcagttcatccccagcctgtttagcaaagcctacataaaaaagacaagcatctaccacaatgtgcttccacacatgtacaatgacatattcatcttactcgacatcaaggacttctttaacagtatcaaccacaaaattctgatcgatttgatgtactacgaactcaacaaaaagaagaagaacaccattaacaagctggagtgtgccaaaattatttcacgctgctcaattacaaagaaggggttacccttgggattcattacaagtcctacgctctcgaacatctacatgaaacagtttgataacatcctgtatgggaagttgaagaaactcgagctgactaacgtgatctatactaggtatgcggatgaccttgtgatctcctttaaaagggatgtactatcttcttcaaacatatgcgtggagaaaattatcaatcaagtcaagtcactcctgttgagatacaaactgcagctaaataccagcaagactaaggttattaacttcgaggaaactaatcatgtgaaaatcaccggcgtaaatattattcgggactcctctacaaatcgcaaattatccattggccgtaaaattaagaacgacctgtttcacaaggctatcaagtgttatgagaacgagaatacgaataaatacgatatactgcgggtgaaaggcctggagtcctttatactctctatcgagaagaagggttatgaagaaacctatagcaaaaatatgcgagcaaaggtcaaaagtcttggattcaattccctgcatgaacttataaacaacctgctgtga

SEQ ID NO: 12100 - RNA, 948 nt, synthetic construct
  source 1..948: mol_type = other RNA
atgaatgaacagaacacttcgtttaggatcaagtatataaagaccaagaagaagctgcgaaagatcgttacttacaagagcgacaatccagaactgagaataagacatgagaaaattgcagcttttctgaactcaaatttcaccccctctaaatttacaaaggcctacgtcaagaataagtccatctatcataatgccaggacacacatgtataatgacattttcatcagtctcgacatcaaggacttttttgggaatattaaccacaagctcttaattaacctgctttactacgaactcaacaagaaagataaagatacgatcaacaagctggagtgtggaaaagttgtctctcattgcagcgtgagtgaaaagggaattcccttggggtttatcaccagcccgattctgagcaacatttacctcaaagagttcgataatatcctgtatgggaaactgaaaaagctaaacctcaaaaatgtgatgtacactaggtatgcggatgacctggttatctcctttaagaactcattcaatggcgacagcaaactcaaatctgacaacgatgaaaacatcatctccatcgtacagaaattgttgtcccggttcaacctgaaattaaacccttcaaagacacgcagagtctctttcgagaaatccaatcatgtgaaaattaccggcgtgaacattattcgggatgtatataatcaacgccgtcttagtgtgggccgaaaactgaagaatgatctgtttcacatggctattaagtgccacgaacaggaaataaaggacatgtatgaggtgatgaagatcaaaggacttgagagcttcataatttcaatcgaaaagaaaggctacgaggagatcttcagtataaatatgaaggacaagatcggtgagttgggtttcgagtctcttcacgatctaataaaaaacatgcggtactga

SEQ ID NO: 12101 - RNA, 942 nt, synthetic construct
  source 1..942: mol_type = other RNA
atggactaccaggagactaaaaagggctatatcgtgaagtacataaagacgaaaaacaaaatccggaagatcgttacctacggcgataatgctcaagagattaagaaaatccacaccgaaatagcagagttcattaacgagaatttcatgccctctaagttttctaaagcctatattaggcacaaaagcatttaccagaacgctctcgcccatatgtacaacgatatctttatctccctggatataaaggactttttccggaatatcaaccatcagaaactgattaatgcactcttcttggaactgaacaaacattcgaataacaccatcaataagcttgagtgtagtaaaatcgtctctaattgcactgtgtccaaaaaggggttgcctttggggctgattacgtcaccaacattatcaaacgtctatcttaaggagttcgacaatattctgtatggcaagctgaagcgcatgaaagtcgaaaacattatttatacccgttacgccgatgatctggtgatctcctttaaggacatagaaagcaaaacaaagatcatcgatgacatcatcatgctagttaaaaagctgctgagcaaatacaacctccgactaaattcctcaaagaccagaataatttcccttgacaaatctaaccacgtgaagataaccggaatcaacatcatcaaaagcccgagcaattacaggaaactcactgtggggagagaactgaaaaatgacttatttcacacagcggtgaagtattatgaggacggcaatactaacaagtacgagttactgaagatcaaaggattggaaagtttcattctgtcgattgaaaagaacggttatgaggaggtatacagtaagaacatgaagctcaagattaaggatctgggttttaagagcctcaatgaactcattaagggacttacatccaaatga

SEQ ID NO: 12102 - RNA, 951 nt, synthetic construct
  source 1..951: mol_type = other RNA
atggagaaagacgattggtatgtggagaagtttatcaagcgaaaaaacaagctgcggaaaatcgttacatacaataactccgacattcgcaatcgccataccataattaataacttcctcaacgggaatttgctgttttccaagttcagcaaagcatacattaaaggtaagtcaatctacgacaatgcctacgctcacctgtacaatgactatttcataagcctagatatcgagaagtactttaacaacatcgaccacaatattctgatcgaaacgttgtattatgagttgaacaagacttctgagaagaagatggttatgaataagattgagtgcacaaaactcgtgaatctgtgttccaccagcaaaaaagggctgccactagggttaataacttcccctacactctcaaacatctatttgaaagagttcgacaacatattgtacggcaaactcaagcggctgggcctggaatcgataatctatacaagatacgccgatgatatcaccatcagttttaaatacagcgaggaggaccttaacatcgtccagaataacatctatgacatcgtcagtagccttcttaagcgttacaagctcaagctgaattacagcaagtctaggttcattgatctgggaaaaagtaaccatgtgaggatcactggcatttccattgtgaaagacgagaacaactatagaaaactgtcagtaggccgcaaatcaaaaaaggagcttttttatagagcgatcgattgctatcggacctttttagaagatccctccaatgtggattacctggaagtcctgaagattaagggaatggagtctttcttcctttctattgaaaagaggggttacgaaaacttttattctaagggcatgcaaaaggaactgaaggaactcggattcgataatttaaatgacctgattcgaagtctcccgcacgaatga

SEQ ID NO: 12103 - RNA, 951 nt, synthetic construct
  source 1..951: mol_type = other RNA
atgaaaatgcaaaacgaatggtacaaggagaagtacattaagaggaaaaataaggtccgaaagatcattacctataacgatgaatctgtacgagaaaagcattcccagatcaacagaatcctcaatgagaagctgatgttctccaagtttagcaaggcatatataaagggcactagcattttctacaacgcgaaaagccacatgtacaatgatattttcatctgcattgacatcaagaagttcttcaacaacatagaccacaaaattctgttgcaaaccttgtactatgagttgaataagacggaagagaatgtcatcaaatatggcagggtggagttaaagaaacttatagaggtttgcagcataagttctaaaggtttgccgttagggctcattacatctcctgcccttgctaacatctacctcaaagaattcgataacatcctgtatggaaagctaaagaagttacagctgaataacgtgatctacacccgctatgctgacgatctcacaatctcatttaagtatatcgaggattacctgtcgatcaaagacgtgattataaacgaagtgtccaaacttctgaaaagatatagactggagatgaatgataagaaggagcgcattataaacctgaataagtcaaaccacgttcgcattactggagtgagtatcgtgaaaaatgtcgacaattatcgtcagattagtgttgggcggaaagtaaaaaaagagcttttttacaaggccatcaacgcctacctaaccttccaggagaatccctcccggatggactttctcgaaatgaaacggatcaaaggcatggagtcttttattctgagcatcgaaaaaaacggttacgaatcctgttactcagtgggcatgatgaggcagctggaagagctcaattttaacaatctgcacgacctgattaatagcctgccaatcaagtga

SEQ ID NO: 12104 - RNA, 957 nt, synthetic construct
  source 1..957: mol_type = other RNA
atgaatacagattataaagtccgctacataaacacaaacggtaagaagcgaaaaatcgttacctatgctaatgaggctaaaaggaaagagcacatcgagattaagaaatttctcgagaagaagctgatcttttcaaagtttaccaaggcctacataagcaaatcctccatttacaagaatgcaagggcccacatgtacaatgatatctttgtgaagtatgacatcgagaaattcttcaacaacattaaccacaagatcctggtagaaatactgcacgagcaactcaacttaaacagcgaaaagaatgagaattcaatgttggaggtggcagagctcgtctcaagctgcatcgtagacaaaaaaggacttcccttaggaattattactagtccaatattggcgaacatctatcttaagaagttcgacaacatcctatacggcaagctcaaaaagctgggcctggataacattatttatacccggtacgccgatgacctgacgatttctttcaaaaaccctgatgaatgggagattgagagattcaatgatgagctgacttatatagaagaggtgattaccaaacagctcaaaaagttccggctgaagcttaatctgaagaagaagagtatcatcaatctgaaggtgagcaaccatgttcgcgtgactgggatctctattacaaaaatcacagacgacaagcgtagactaagcgtggggaagaaaaagatcaataaactgtacgacgacgccttagaactgtatatcaagacccagaataaagagtacgtcctgactgacgaagatttctaccatatttccaggataaaaggcatggaatcttttattttgtccgttcataagaccggttacaaccacttctttagtggaatgatgcagaaaaagctcgaagaactggggttttcgtctctcggcgaattgatcaaaaatcttaactga

SEQ ID NO: 12105 - RNA, 957 nt, synthetic construct
  source 1..957: mol_type = other RNA
atgaatattgactataaggtccggtatattgatacgaatggaaaaaagcgtaagatcgtgacctatgccaatgaggaaaaacgcaaagaacacattgagattaaagagttcctcgagagagagctgatcttttctaagtttaccaaagcctacatatctaaaagcagcatctacaagaatgctagagctcacatgtacaatgacattttcatcaagtatgacatcgagaagttcttcaacaacataaaccacaagattctcgtggagatattgcatgagcaattgaatctgaagaatgaacaggatgaaaactctatcctggaagtggcagaattggtttcatcctgcattgtcggcaagaagggtctgcccttaggcctgatcaccagccctatcctagcaaacatctaccttaagaagttcgacaacatactttacgggaaactgaagaagttgggcttagagaatattatatacactaggtatgccgatgatctgaccatctcatttaaaaacccgaacgagtggggagttgcgtcctttaatgaggaactgacttacattgaggaggtgattacgaaacaactcaaaaaatatcggctcaaactgaacctgaagaagaagagtatcatcaatctgaaggtgagtaaccatgttagagtaactggaatctcgatcacaaaagtgaccgacgataagcgacggctctccgtggggaaaaaaaggattaacaagctctacgatgacgccctgcagttatatattaagcagcagaacaaggattacgtacttacagatgaagacttttaccacataaatcgcatcaagggtatggagagtttcattctatcagtccacaaaacaggctataaccattttttctccgggatgatgcagaggaaactggaagaattcggatttgacagcctcggcgagcttatcaaagacctgaattga

SEQ ID NO: 12106 - RNA, 969 nt, synthetic construct
  source 1..969: mol_type = other RNA
atggaaaaaaagataaacatggccgactatatggttagatacattgtaaccaaaggcaagaggcggagaatagtcacctatggaaatgaagaaaagaggcaggagcacaacgaaattaaactctttcttgaggagaagctgattttcagtaaattcactaaagcctacatcgcctattcatctatatacaagaatgctaaggcacacatgtacaatgacatcttcatcaaatacgatatcgagaagtacttcgatagcataaatcacaaaatccttgtgcgaatcctgcacgaacagctgaatctggggcaggaaaaggaaatatacacaatctttgagacgtcagaactggtgggcaattgcatttttggaaagaaaggcctgcccttgggcctgatcacttcacctgtcctcagcaacatttatctgaaaaccttcgacaacattctctacggcaaactaaagaagatgaagttggagaatgtcatttatacacgttatgcggatgacctcaccatctcctttaagaactcgtccaggaagagcctggaggacttggatcatgtattcagtgaaatcgagtctctcattaatctccagctaaagaactacaagctaaaactgaacgctaacaagaaatccattatcagccttgatgtgagcaaccatgtcagaattacagggatctctattactaagctggtgacagggaagcggcgcttatccgttggaaaaaagaaggtgattaaactgtttgacgatgccctgcaactgtactataaaaagatcgtggacgcagatgagttgagtaatgaggacttgtataatatccagcgcgttaaggggatggagagtttcgtgctgtctatacataaaaccggttacaaccatatgtttagcgagaaaatgcaagacaaattacttaacctcggtttcaagtcccttcacgagctcatcgaatcattatga

SEQ ID NO: 12107 - RNA, 957 nt, synthetic construct
  source 1..957: mol_type = other RNA
atgaataaagattacaagatcaagtacgtggagatcaatggcaaactaaggaaggtagtgacgtataataatgaagctaaacggttagagcatatcgaaattaagagattcttggagcgcaatcttatcttttccaagttcacaaaagcgtacataccacggagttcaatctacaataatgcaagagctcatatgtacaacgatatcttcatcaagtatgacatcgagaagttcttcaatcacataaatcacaagatcctggtggaaattctgtacgagcaactgaacctaaagagtgagaaggagatatatagcatgttagaggtcagtgagcttattggtcgctgcattctgggcaataaagggctgcccttcggtttgataaccagccctatccttgccaacatttacctgaaggagtttgataacatcttttacgggaaactgaagaagatggaactcaataacataatctacacacgttatgccgacgacctcactatctctttcaaaaatccgaacaactatggccttgttgaatttaacgagaaactgacagtcatcgaaaacgtcatcacgaagttgttgaaaaagtatcgactgcggctcaactccaacaagaagtctattattaacctgaaagtgagcaatcatgtgcgcattactgggatctcaataaccaagatttccaatgacaagagaaggctctctgttggaaagaaaaagatcaacaggttgtttgacgacgccctgcagctgtatctgaaaaagcagcgaaccgattacactcttaccgacgaggatttttacaacattcggagggtaaaaggaatggaaagcttcattctctcagtgcacaaaacaggctattcccactttttttcggaaatgatgctcgaaaaactgaagaaaattggattcaactctctccacgatttaattaaaaccctggactga

SEQ ID NO: 12108 - RNA, 975 nt, synthetic construct
  source 1..975: mol_type = other RNA
atgaacaaagtcgatgctacgtggtacaagattaagtttattaggagaaagggaaagatcagaaaaataatcacctataccgatcagtcagtgatagagaaacatacacggattaaagagtttctggaggagcgtttaatattcagcaagttcactaaggcctacgtgaagaactcaagtatctttaataacgcaaaggcgcacatgtataatgacattttcatcaaactggacatcaaggacttctttatatcgattaaccacaaaatcctgctcgatctgcttttttcacagcttaatgttaacccagatcaaaccaaagtgtccaagatggagatctctcggcttattagcatttgctctatcgagaagaaaggcctgccgttgggcctaattacaagccctattctgtccaacatctatcttaaggagtttgacaatatcctctatgggaaactgaagaaaatgaacttcaagaacatcatctacactagatatgccgatgacataacaatcagttttaagtctgaggacacaaatgaattcatccaaggcttaaaggtggaaattctgaacctcgtggaagtcttactcaaaaggtacaagcttaaactcaatagggacaaaatctccctcatcaacttgaacatttccaatcatgtccgcatcaccggggttagcgtaactaaggatagtaataactaccgccgcatcagcataggtagaaagaggatcaataaactgtaccatgatgctttgaacctattcattaagatcaaggtgcgaaatatgagcctcgataatcacgactttctgaaaattcgacagattaagggaatggaatccttcatcttttctattgagaaaaacggatacgacaccatttatagtgaaaagatgaagctgcggataaatgaactgggtttcgaatcattgtcccagctgataaaaaacctgcccgagaaaaatttctga

SEQ ID NO: 12109 - RNA, 963 nt, synthetic construct
  source 1..963: mol_type = other RNA
atgaatgagaagaaaatgtggtacgaggtgaaatacatccggaaaaaggggaaaatcaggaagattatcacctataaggatgagagcatccgaagactccatgttcagattaaggagtatcttgaagaacgcctcatcttttctaagtttaccaaagcctatgtttctaattcctccattttctacaacgcaaaggctcatatgtacaacgatatcttcctgaagatcgacatcaaagacttcttcaactctattaaccacaaaatcctgctggaggtactttatagccagctgaacctggatagcaagcagaaggagacaacaaaaattgaaatcagcaagcttatcgacgtctgcagtctagacaaaagaggaattcccttgggcttggtaacctctccgattctgagtaacatctatctcaaggagttcgataatattctttacgggaaactgaagagactcgggctggagaatctgatatacaccagatacgctgacgatctgactatatctttcaaatccattagcaacatcccagacactctgctcaaagtgattctggaattagtctcaggtttgctaaaacgttacaagctgaagatcaaccctaataaggtgtcgctggtggacttaaatatcagcaatcacgtgcggattactggcgttagcgtgacgaaagatgccaacaattaccggaaaatttcaatcggaaggaaaaggataaacaatttgtatcacgacgccatcaatatgtatattaagtgtcgcacaggcagtctgtcagatgcagactatcttaggatcaagcaaataaagggaatggagtcctttgtctacagtgtggaaaagcacggctatgatcgcgtctactccctcaagatgcatgaacagataaagaatatgggtttcgactcattgtccgagttaattaaaaacctccccgaaaacatacgagcgtga

SEQ ID NO: 12110 - RNA, 960 nt, synthetic construct
  source 1..960: mol_type = other RNA
atgaactctgactacaaaaagatagtaatcgtgaagaatggaaagaaaaggtttttggtgacctacaataatccagaggttagactgaaacacgaggctatcaaacgtttcttagaggacaatatctactactctatctttaccaaagcatatcgcaaaaagagcagcatttacataaacgcgaaagctcatatgtacaacgatattttcctgaagtacgacatcaagaacttctttgactccatcgatcataaaattctcgtgcaattgttacacatggagctaaacaagttgaacaaaaatagcttcagcctcctggacgtggccacactggttgaggaatgcattattgataagaaagggctgccccttgggctgattacttctcctaccttatccaatatctacctgaaggaattcgataatatcctctatggtaagctgaagaagatggatcttagcaatgtcatctatacccgatatgcagacgatctgactattagtttcaagggtaatctcactagtgaggaattgtcggaattcaatcagcagcttataattgaactccagaaactgctcaagaaatacaagcttacactcaacaagaataagatttccatcatcaacttgaacatctcaaaccatgtcaaagtgacaggcatcaacatcataaaaaagaacgacaactaccgggaactaagtgtaggaaagaaaagagtcgccattctttttgacctggccctgaatatttattccaggatcatgaatgatgactacacactgaacaaggatgattattatgagatatccaaggtgaagggactgaactcctttatcctgtcaattcacaaaaaaggctatgagaatatgctgtctcaggaaatgcggaacaagatttttgagaaaggctattcaagcctaacggacctcataagtaatctgccgaactctaacaattga

SEQ ID NO: 12111 - RNA, 969 nt, synthetic construct
  source 1..969: mol_type = other RNA
atgaataaaagctggtacaagattaagtacatccgcaaaaagaggaagatccggcgtattgtgacatacagcgacaactccaccgaaataaaaaataagcacattgggatcaaggagtttctggaaaagaatatctacatgagcaaattcaccaaggcatataagaaggacagctcaattttcaagaatgccaaagctcacatgtacaacgatgtgtttattaaactggacatcaaggacttctttcagaacattgatcataaaatcctgctcgagatcctttattttgagctcaacaagagtaagtctttaagcactatcaagtactctaagaaacaactcttatcactcatcgagctgtgctctgtaagcaaaagaggtttaccccttggcctggtgacttcgcctatccttgccaacatctatctgaaagagtttgataacctactctacggaaatctgaaaaagttcggcctgaacaacattatatatacacgatacgccgatgacttgacaatctcattcaaaaaaaccagtcagatcaacatagttaacgagaagaagaacattgaattgctggtcagttcacttctgaaaaaaaacagactgaaactcaacttctccaaatctaagatgatagatttcgaaatctccaatcacgtccgcattacaggtttgaacatagttaaggacacgaacaattttagacggattactgtgggccgaaagaggattaatgacctgtttcatcagagtatgaatcttcatctcaaactgaaggaatattccctaaccgactctgataaactggagattctgcggattaaaggaatggagtctttcatatattccatcgagaagaagggatacgaatatgtgttctccaataacatgaaggagagcatctacaatgaggggttttcgaatctaaccgaactcatcgatgcgttgggggctaggttggaatga

SEQ ID NO: 12112 - RNA, 927 nt, synthetic construct
  source 1..927: mol_type = other RNA
atggtgaacaattccggctttgccatcttcaaactcaagaagaacaagaagatccgaaaaatcgtggcgtacactagcaacagcgagctgaaaaacatacacaagctgatcaacgaccacctcaaggagagggtcatatactccaaattcacaaaaggttacagagaaggggtgtccatatttgataatgctaaagcacatctgtacaacgacatctttatacaattcgacatcaagaacttcttccctagtattaatcaccacaaactgattaacctgttgtacaaggaggtaaaacataatgggtataacatcagcaagagtcagtcctacgaaatcgtcaaaaaagccagccagggtctaaaaggcctgccacttgggttcatcacctcacccctgctgtcgaacatttatctcaagaaatttgacaccatcttgtaccacaggttgaaaaagcagggcttagacaatgtgatctatacacggtatgccgatgatattaccatatcctttaggtgtattcccgataagactgattacagtgacatccggagcaccatcgagaagatcatttcaaatttgctcaagcggtattctctgaagctgaataataagaagacccgcgtcacaaaccttctcaaatcaggaaatgtgaaggttacgggcgtctatattgttaataagagggacgactatcgacatctgactgtgggacgtaaattcaagaaagagctactttgggatgctattcagacattagataatatcgagagagacgaatctttagtgaagcaaataaagggacgctactctttcgttctctctattgaaaaagagggcattgaaaacatgctgtcaccgtgcatgcgcagaattctcaacgaaaagaacatcagttctattaatgagctgtttagcgtactttga

SEQ ID NO: 12113 - RNA, 927 nt, synthetic construct
  source 1..927: mol_type = other RNA
atgaggccaaataaagaattcaaggtgtttaagctcaccaagaacaaaaaagttcgcaagatagtcgcatacactactgattcaaatctcagaagggaacacgtgcttatcaataattacctgagagaacgggtgcgctattctaaattcaccaaaggctacagaaagggaatctcaatctttgataacgtgaaagcccatatgtacaacgacattttcatccagtttgacatacaaaggttttttcctagcattaaccaccgaaaactgactaaacttctgtaccaagaggtcaagtataataactataacctgagcaagtcccagagctatgagatagtgaagaaatcatcccagggcctcgagggattacccctgggatttgtgacctctcctctcctgtccaacatttacttgaaacggttcgacaacatactatacgggcatctgaagaaggaggaattagataacgtcatctatacaaggtacgccgatgacattacaatcagctttcgcggcattcccgataagttagattacagtgacatcaagagcagaattgagaagattatcttcgatttgctgaaagagtacggcctgaagctgaataataagaagacgcgtctgaccaatcttctggagtccggaaacgtaaaggtgacaggggtttatatagtgaacaaacagaattcggtccggcggttgacagttggccgccgattcaaaaaaaagttgctatgggacgctatccagagcctcgacaatattgaaagtgacgacttcctcattaaacagatcaagggtaagtatagtttcgtactctccatcgaaaaagaaggtatcgagaacatgctttctccatgcatgaggcgtatccttaaggggaagaatatttcatctattgatgagctgttcagtatcctgtga

SEQ ID NO: 12114 - RNA, 2028 nt, synthetic construct
  source 1..2028: mol_type = other RNA
atgaaggaagtatatatgctgttcttcaagaataaccaggagaaattcaagccatcatttttcattgccttcctatgtggggttaagtacaaaagcaattctcctgaggataaacgaaatgtgctttatgattacctcaaacagaacagaaagattaaaccagtcattctcgagaaatcatttgacatcgactcctttgacaacattaacaccttaaactacaaggacattggtttgaataacctgcgtgatatcgagatcctgactagcttgtattctcatctgatttttgtcatccacgagtccatgtcaaccgcgagcgagattggcatgtttagctatgatgatcatactgccaaaaaaatatgcgtgatatatcctgacgaattctctatcaacaagaatgtcatcggtgattttttcacttacgcatttttctcagatcgaaacccgattatcaacaacaagtttcctttttatcccagaacgaagactgtgcatcacgcatcaaataacgtggaggcgtacacgtacttcatcaataaccaaataacaaaggacctcgaaaacaagattaatacctacatcgagaacaatagcaaaaggacttacgacctgaaacttcataaaaaattccaacgtttccagagttactacctactgaagaacaagaacaaggacaagatagatatgaacctgacagctgagttctttttttaccacatgcttgcccttctaaacactaatgaggtcaaagagatcttcgaggaaaataatcatgatttccacaagtgtgtgaccaaaattggtaatctctttctagagacattgaaaatgacaatcctctacaatcgcaagaacatcacagcaaacaaaataacgtgccacgtgaataactacccattcaaacaagccttgttttatctgttctatgtgttccacgatattggggtagtagaaatcaaagagaacaagatcgtgaagattgagaataagcagtatgacggctatatttctaaactgcacaagctgctcatctcgtacaaagaggaacgcaccttcgaaaaaatcaatgtgggaaaaaatgcctacaagcagttctacattaaaaagaagacaggcctttatcggaagatcaccacctataatgacaacgaggaaggatataaacttaaagaataccacgacaggataaatgattttctgaacgaaaacatcaccttttcccagttcacgaaggcttatctcaaagacacaagcatagttaagaacgctaggtgtcacctgtacaataacaccttcatccagatagatatcaaagacttcttcccaagtattaatcaccataagctgctcaataggctctactttgaaatcaaccgcggcaataacatgcggtacattatatccaagaaggactgtttagatgtcctgaagacttgctatttttccaagaagggcattcccattggactggtgctgtcccccacactcgccaatatctacatgaaatcctttgacaacgagttatatggcaagctaaagaagctgaatctcaacaatatcatctatacccggtatgcagatgatatggtgattagttgtaaggataagcttgaccaggagaaaattctgaagatcaaggaactggtttctgaacaactgtcgtatttgggtttgaagatcaatgagaagaaattccggaatgtaagcctttatacctctaatcatgttaagatcacagggattaacatttgcaaggtgaaaatgaaggggaacaacaattacagatatctgactgtgggacggtccaaaagggaattgctgtacaaactggcctttgagttattagaactcaacaaggacagttttatctaccagtacaaactcaaaaagcttaaagggtactatgcttacgtgtattctgtcgagaagggaaaggttgacagactgtgccctcccaagtacgtcgataaactgagaaaatacggctacagcagctttagtgacctgatacgcgaattgtga

SEQ ID NO: 12115 - RNA, 1989 nt, synthetic construct
  source 1..1989: mol_type = other RNA
atggagtataccttactcgagaatattaagatcactaggcctatcctgtttctttgcggtccatactacaacaaaaataacaaatccgatcgccgcctgattctgcaggaaaagatctacgaaatccacaagaataagtttctcccgctggttattgacgactttctgacagagaagaacataaaggacaacactatcgatattcagttgatggaggagatttgtgctgcggtgtctgcgcaaacgtatatttttctcgataccatgagttcagccgcagaactaggcatatttgcaaattctgccttcttcaacaaaatcaaggtgtacattcccaaaaaatctgacatctacaacaaaagcaacgtcgggtattttgtgcgggatgtggtcctgatgaaacacagcgacaaaatagagtgtctggaataccgacctgctgtggaacgcaatgctattgccacagattacatcttagaatactacaagttcgtgaacaaccagctccccaaaaatatagaagacgacatacgaaatgacgaaatattcaacgaaagcgatgagcatttcattgaatacctagatagcaacatgatgcctgacaacccataccagatctgttatcagattcgcaataataagatcgatgtgaatatcagcatcaagatcttgttttacatcaccatctccgtgatcagcatcgaatacaagaatgacattaaggagaagaacttctctgtcttcgatatcaacaaaatcatagagcaagtgaagagtatcattatcaattccctatctgaaaagaccaacaaagatctcaatacgatagatgagatcaatatcaacacagtgagcaagcataaaatcgagaaaattatccagcacatcgtaaaattcgcccatatttattacctgtactcacagtttcactcagtgtatttgatggagaagcccattggtaagattatcagaaagattgaggtcggcaaccatccatacactcttcttcagctgtccgactctcagcttgatcttctccaggacatcaacaacgacaaagataagtactacgaaaagatcgtaatcgagaaaaacaagaagaaaagggagatcatcaagtacattaacaataacgatggggataatgccaaaaagattcatgagtatatcctgaagaagatctattcatactaccggtttaatgacaacagttacgcatatcagaaaggcaaatctataaaggagtgtgtgaataaacacattgaaggcaaatcgttcattaagtacgacatcaagaagtttttcgagtcaattaaagaggagaacctctataagtgcttggtcgacattttcggaattgataaacggtttataggggctctgaaacgtatctttaactcatgcttctatgagaataccttacccctgggattaactctgtcccctgttctgtcggacatgtatctaaagaagtttgatgacaccatttccaggcaacttgaggaaaagggcattacttattcaagatatgcagacgacataatgatttcttccaaagagattatcgacgagaagctgtatcacgaaataaacaagatggttacagatgaactggttaaggtgaacctgatcctcaatgtgaaaaaatccgtcttcgttacattcaatagcaagtgcaacttcatcaggtatgtgggggtcaatattgtccagggtataaatggaaattacctcagtgtcgggaagaaatacatttattccatagccaaggagtatctcaaatacatggacaaggtgaatgtacttaattccgaattgagcagtgagagtgatgaagaactggaagagttgaaaaagaacgtattctatcggagaatggccatcattggaaaggtgagctttttgaagcaaatagagggagacaagggctgcaaaagactgaaaaagcgtctggagaaatatgttgatatcgacctggagaaaatttga

SEQ ID NO: 12116 - RNA, 1989 nt, synthetic construct
  source 1..1989: mol_type = other RNA
atggagtatactctgctggacaagatcactataacccggcccatactcttcctgtgcggcccctattacgaaaaaagcaacaaatccgaccgtcgagtgatcttacagaatatgctgtacgatacgtataagaataagtatctgcctctcgtaattgatgacttccttaccgaaaaaaacataagggacgacaatatatccattcagattatggaagagatctgtgcggcggtttcgtacaaaacgtacatctttcttgacacaatgtcaagcgccaccgaacttgggatctttgcaaatagcgcttacgtgaatgagatttctgtcttcgtgcccaaagtctctgacatttataatcgcaaaaacgtggggtactttgtgcatgatgtcgttctgaaaaagcacgaggatagagtcaagtgcctggagtacagaccgggacttgaacggaaagcccttgcaactgattacgtcgtggaacactataaattcgtgaatgattcccttccaagcaacctcgctcggcacatcaaagaagaccccatctttggacaagaagacagtcatccaattaacctgcgcgaggacgacgtcgtcattccgcagactccatatcagatctgctgtcagcggaagggcaataacttaaccgtgagtatctccctgagattgctcttttacgttaccgtttccatcattagccatgagtacaaaactttcttacagtcgggagacgaggatttcagtaagttcgacatcgatgatatagttgacaaggtgaaccagtgtatcaagaattttatcagcggcaagacagggaaagatctgtccgcctgtgttatcgccaaactgaacacagtattgcaagaagaagagaggacactggtgtaccatatcgccaaatttgttcacgtttactacctgtattcacagttccatcgattctacttggtagagaaaccactcggtaatgtcgtggacaagattgccgtcgggaaccacccttacaccctctgcggactgaaggaaaaggacattactctccttgaaaagatacaagctgaccaggagaagtactttgagcagataatcgtacgaaaaaacaagaagaagcgggaaattatcaagtatcgcgaggataagaacggagatcaggcccgcgaattacataatcgaatgctacagggtatcctcgagtattatacggctaaccaggcaagttatgcatacagacgaggccgtggcattaaacagtgcgtccaacaacacttggatggggtggatttcatgaagtatgacattaggaagttcttcaattcaatcggcttggaaaaactgacaaagtgttttggggctgctctaaagattgacgagcgcttcttcaaagaattgtatagaatgctcggatcttgcttttatcacggcacactacctctgggcctggtgctgtcccctatcctttctgatatctatatgaacgagtttgacagaagggcagagggttttttttcaagtttgggatttacctacacaaggtacgccgatgatatcctcgtgagcgctaaggaggtgatggaggaagaagcaaaggagaaggccgaggagttcgtcgagagggagctgaaacggctgtcactgtctataaaccgtgagaaggtgagaaaagcgcggctggaaaaacagggggaccaaatccggtacgtaggtctgtatatagtgcgcggcgagaaggagaattttattaccgtgggtaagagctacgcatatgaaaccgcccgcgagtgtttggattacttccacaaagtgagaaggctcttagtggaggaactccccgccgcggagaaagaaaagctagagaaggatactttctttgaaaggcgcatcctactgggcaagctcggtttcatggagcagatggaggggcagaggggaattgaccgggtggaggctagacttaaagcccacggcctgtctattctggaaatttga

SEQ ID NO: 12117 - RNA, 2001 nt, synthetic construct
  source 1..2001: mol_type = other RNA
atggattatatcctggctgataaactgaagattactcgacctttcgtgtttctctgtggccctaactacgagaggaacaagatcgcagaccggaggaatatcctaagagagaacatccaccgaatttataagatgcagggccaagaagtccttccattgattgtggacccttttcttgccgggaaatacatcgacttcaataagtacagtgtacaactgctggaggaaatctgtgccgctgtcagctgccagacccacattctactggatactatgtccgttgccactgagctcggaattttcgctaacagtacgtatagtaatgagttatgcgtgtatattcccaaaaattctgacgtgttcaatcagggaaatgtggggaccttcgtgcgcgaagtcgtactgaagaatccagccgctaacataagatattttgagtaccgcccgcgaatcatcaggagagcgtattcttccgtgtttaccgcagaacactatgcgttcaacaacgaccgcattcccaaaaatatcaaggaggttttgaaagaagacgccaagggcaacaaactgatttgcgatctgccgattatctatgatgattccaccagtataccctccgaggtaaatcatattgcttacacctacaagaactcaaagctggatatcaacattagcattaagctgctgttctacattgtgacctcaatctttcagcaggagtaccctgaaatcacaaagggcaagatcgacgacttaacacaggcacaattacacaatatatgcacgtatacggaaaatgcaataatcaacagcgtctcttttttcttgggaatcgataggaaaagcctgacagaaacccatataagcaccatcttgaagatcgataacaaggacgccattcagcatatagcaaagttcatcctgatttactacacaaagagccagttcaagtttatggaacttatcacatcctctgagtatacggctataaaaatgaagattggggaacatcccgacgtgatctttaacttaagcaaagaccagatgcaggtggtcaactttgtagttaagaacccagagctctgttacgaatgtgtgaatctgaagttaggcaaaaaggttagggagataattaaatacgccaaatccgaagagggcgataatgccaagaaactgcaccagagcatgaatgagatgttccgtgaggagtataagcacagtatctactcatatgcctatcaccaagggtcctcaattcgtaaatgtgtggattgccatataaattcaaggtcctttgttaagatggacatcaagaactttttcaactgtatctcgaaggacatcctcctgaagaagatcgagaacgaccaaaacattgataagcgctacgagcatttgctaaacgacattatcagctcgatttactataacgaaaagctgcccctgggactcgtcatgtctcctatcatcagtgattactacttgtttgagtttgacggccaagtgggaaaatattgcgagagcaaggctctaatatacactcggtatgcagacgacataatgatttcctcatctagcaccattgaggagcagctctacatggagattatggattttgtgtccaatcttcttaacagacttaacctgaagctgaataaggataagtgcgagtccgtccacttcgataaaaaccagtcattcatccgctacattggtatcaatatcgtgaaaggcgaaaatggagccctcaattacctctctgtcgggaaaaaatacatttacgccttggcaaaagactacctcaaatacgacaatttctgttctgcgcttgaaaatatcacgagcgaagaaaaagagaaaatgcagactaacgttttctatatgagaactgaactgatcggtaaaataagtttcatccggcagatcgagggtgagagagggattgaacggctcaaagtgcggctgtgcaagtattatccagacatagatctgaaagctctctga

SEQ ID NO: 12118 - RNA, 1974 nt, synthetic construct
  source 1..1974: mol_type = other RNA
atgaaagagtacatgctcctagaccagatatctattgagcgccccatcgtcttcctgtgcggaccttattacaataagaaagacgacggagacaggagaaaaatccttaaacaaaccatctccaatcagtatagcaacagaatccttccgctgattattgatgattttcttacggaggaaaacattgacgacaagactatttctatccaactgatggaggaaatatgtgctgcggtcagtgtgaagacttatatctttctggataccctgagcagcagtgcagaactgggcatctttgccaattctactttcatgaacaagatacaggtctatattcccaagaaaaacgatatctacaacaaatccaacgtaggttacttcgtccgtgagatttcactgaagtctaggcccgatacaatcaaagtgctcgagtaccgtccaggagtgaaacgaaatgctatagcatcggactatattgttgagttttacagctttgtgggaaataaactaccattgaacatccatcaaagcataatcaatgacgaagatctcaaggagagcaagggcaaaaccaacattgaaataatagaaagcgctgatatgccacagtcacattatcagatctgctattccataactaatcaggaattgcaggtcaatacaagcattaagcttatgttttacgtgaccctcgctattgtttcatgcgagtataaagagctgtttgacaacaaagagtcagacttcagtaaaatatctctcgaggaagtggaacagcaggttaaggacgccctgtataatctgatcgaatcgaagaccctcatcaacaaaaacgacttgaaaaagatctcagtgaaaacagtactgaagcaagagcaaaatgacaatctcatccggcacatagtaaagttcttgcacgtgttcaataacaacagcgattacggagtgctgagactctttaagaacccaattaacaagatcatcaagcaggttatcaaagggaaaacagtgtttgacgtaattaaactcacccaggagcagattgagctgctgatgaagattaattccaaccccgatctgtactatgaaacgatcgagattagaaccggcaataaagtgagggaaattgtcaaataccgcaatgataaaaacggggacagtgcccggaagatccacgaagcaattaaccagtctcttaagaacgagtatatgtattcgagtaactcttacgcctacaaaaagggtgagaacatcaaaaaatgcgttatcaaccatcttgatggtatggggtttctaaaatacgatatccgcaagttcttcaattctatctccatcgagttactggccaagaagatgataatcgaattcgatatcgatccgaactacgtctaccagttgaagtccgtgttgatggcgtgctcatataacaatcaaattcctctgggcttcgtgacgagccctattttcagcgatattttcatgaaggacgttgacaacaaaatctgttcagtagccgagaaaaatgactgtatttatactaggtacgctgatgatatcctgatcagttccaagcagatgattggcgacgacatgtataagaatattgatctgaccgtcaaagccacaatgctcgaaaatgggctggtgaccaatgagaagaagaatcagtttatcaacttcgacagctcccactccttcctgaggtacatcggcgtgaatataatccaccaacagacaggaaatatcattacagtggggaagacttatatcaacgatgttgccaaggactatatcgagtacgatcaaaagaagaataactgtcagcagcagttgaatgaagaattattctactcccgcttacggattataggcaagattgcatttattaagcagatagagggcgacgtgggggtggagcgattaaagagacggctttacaagtacgaccctaacattgactttgatgcagtctga

SEQ ID NO: 12119 - RNA, 1992 nt, synthetic construct
  source 1..1992: mol_type = other RNA
atggggtacattttgcgcgacgaaattattatcaggcgccctatcgtctttctgtgtgggccctattgtcagaaaactaacaaaagtgaccggcgcaacattctgcgcaagtgcttcaaagataattttaaggatggagtgctcccccttattatagatgactttctgaccgaagagaatataaaggatcctcagatcaacattcagctaatggaggagattttcgcaagcatcagccaaaaaacatacatcttcctcgatacgctgtccgccgcttccgagcttggcctttttatgaaccatgcctttctgaataaagtggttgcatatattccgaaggaaagtgacatcctgaacaaaaagaacgttggctacttcgtcaaagatgtcattctcaagatgaacagccgacaggctaagtacatagagtatagacctgcaatcacacgaagcgtaatcgcgaccgactatgccgtcgaacactatggcttcatcgatgacattgtgccagaaaatataaggcgtgacttgctcgacgatatcgctctgaagaccaagaaggtgcacctgatttgcctcgacgaaaaggagactaccccgatggacgattacagaatttgttaccggagaaaagaaaataggatcttccttaacgtatctatctcactggtcttctacattgtcgccagtctgatgtatgagaagtactctgccaaactagtgacgaatcccaacgcctctataaaggactttgatgtcgatgacattcttagaatgaccacagatacgttcgataactacctgctgcgcaaaggactacctactaacgaggacattgaaatcaacaccatcctgaagtgtagctttcgcgacttaatctaccatatcgtgacattttgttacatctaccactgcttttccacatacatgggtctgaggttggttgatagacacatggatactatcctcgagccctacgccgacaagaagatggggaatccactggagatatttgacatatccgtgcaggattatgacttccttattcaatgccagaagaatccagaggagttctactctaaattctacctgttgaagaatggcaagcgcagggaattcattaaatatagcgagacagaaactggaaagaagttacggaaaattcacgaacggatcaacgatgccctcaggaaaaactatgtgagctccgagaaatcatacgcatataaaaagggtagctcaataaagaagtgcgtggagttgcatcagaacaataacgggtttatcaagtatgacatctctagtttcttcaattccatagacatggatatcctgcttgacgcggtgatgaatatcttctccattaactttgcctataagaaagttatgcggaacattatctcgtctttctattacgagggcatgttaccactgggtttagtgatctcacccgtactcagtgacatctatatgctgaagttcgatcagcagataattgaatattgcgagaagaagaactacaaatacacccgttatgcagacgacatcctcatttcaaaagaaaccgagttcgaaacagtggagtacgacgaaattgatgatctggtgattaagtggttgcgacagctcaagctcaagctcaatagcaaaaagaaaaaacggttgttcctgcagaaagacgggcaacacataaaatacataggggtcaatatcgtacattttgccaaggggaataagctttcggtgggaaggcagtacatctatgatgttgtgaaggagtactacaattatagagagcaagctcgtaagctgagagaatatggcatcggagatgagactcatctattttatgaggaacgaaggatctctggaaaaatcgcttttatcaaagccattgaaggcgctgacggttgggagaaagttcggaaaagaattggcgacaaggagggcttatatatcgacgagaaactgaagttttaccacatatcctga

SEQ ID NO: 12120 - RNA, 2007 nt, synthetic construct
  source 1..2007: mol_type = other RNA
atggggtatgtgctgagagatgaggtgttgatcaagaggccaattatctttttgtgtggcccttactttaaaaagggcaataaaagcgatcgcagatatctgttacgtaaatgcttcagaaagcactacggggacggggtgctcccgcttatcattgacgatttcctgactgaggataatattaaggaccccaacattaacatacagctcctagaggaaatatttgccgctatctcctgcaaaacctacattttcttagacacattgtctgctgctagcgaacttggcctctttatgaatcacgcctttaccaactcggtggtggcgtatgtgcctaaaaaatccgacattctcaataagtccaacataggatatttcgtcaaggatgtgattctcaaaatgaattctgaacaggctaagtatatcgagtacagacccgcaattactcgaaatgtgattagtagcgactatgccgtcgagcactacggatttatcgctgatatcgttccagagaatatcgaaaaggagatcgcctcagatatcatcttcaaagacaagaaggagaagttactgtatacggaggagaacgaacagtatcccgacgacgactttcatatattctacaaaaagcgtgatggcaagatgattttgcatatcagcatcgggatgctatttaacgtggttatgtcccttatgtacgagttaaatcagtcaaagttggtcacgaataaagaagcaaccattgccgattttaacgtggacgtcatacaacggatcaccaaagaagttttcctgaactatctcatcaagaaaggcattccatgtgggaaggagatagaactttacaccaaattgagctattccttcgacagcatcgtttaccacatggtcactttctgttatatataccattgctacagcacatatagggggctccgcttagtagatagacatatggatacagttctggatgcatgtgaggaaatcagcgggaataaccccctgcaagtattcggaataagtgaggaggattacagtcttgtggaatgctgtgccagggaacagcaaaagttctacacttctttcaccattactaaaggcggcaaaaaaagggagctggtcaagtatgtggataccgaaatgggagacgctatgcgcaagatacacgagaaaatggcgtcatccctgcagggaaagtatacatcctctgaactgtctttcgcatataaaaagggtgggagtatcaagaaatgcgtcgagctccacaaaaataacgacgcctacatcaagtacgatatcagtaagtttttcaactctatcgagttcgagaagctgtttgagaagattaagaaggtgttcaacatagattccgcgtacgatgtcataaccaagaagattatcgcctcattttacttccaaaagaaactgcctttgggtctggtgatctcacctctgatgtctgacatttatatgcttgactttgacgagatcattgcagaattctgttccatgcgcaattgcatttatacacggtacgctgatgacatcctgatcagcaaaaaaaccatgtttattgagtcagagtaccaggaaattaatcaaaaggtcgagctgtttctgaacgatctgaagctgaagatcaactctaagaaaactaagagggtgtttctagaaaaagacggtcagcacatcaagtacatcggaatcaacatagtgcattttgacacaggaaacaaactgagtgttggtcggaaatacatttacgacgtggttaatgaatactatcagtacctggaagatcttgagatgctgaaagtaaacgactacgaagacgaacgggaaagactgttctatcaggagcggattatcgccggcaagctagcattcattcagtcgattgagggttccgatggatggcagcgaatccgagcccgcttcggcaagaatgcctatctctgcgagaataaccggctcagcctcaacaatctcagggacaaagtaggctga

SEQ ID NO: 12121 - RNA, 2718 nt, synthetic construct
  source 1..2718: mol_type = other RNA
atgtccaagaccaaaatcgctgacatttatgccggcttacctgatgcaaaggaagcaatccaatacgaaggcatccgagacttcatggatgccttcgtgattcccccggaatttcccctcgacgaggggctggccagaggtaacaagatgtttattacgggtaataaaggcatgggaaagaccgccgcactgcgatacctgaacgactacttaagtcggatgaacaagtctaccaaaagttcatttatgctctttgaacaggactacaacgacagacgcaaggccgagatgttaaatcaggcgcgctccagtctgtgtctcctgggaatagagcctgatgaaaagatcaatcaggacgacttcagttatatttggcgatggcatatcttcatgaccatcctcaggcagaacggcgagaatatgagggaagccattttcctacaggatgacacatggaaacgcttcaacaagttgctgtttagcgtcatcaagccagactttacaccaaccctgtccggcagtctgagcgttgggctgccctttttcggccccatccagcctgagattacactgaatctacccgagatccgcctcggtaagggcaagggaacttttgaagagataatggaggaggccactgattgtttcaaggagctgatccgctttaactcaccatattatctattcatcgacgaactggacgtctacaggggccaacgggaggagtatttgagagatctcagaatggtgcgggacttaattcgtgaggtcaagtttttgaatcgcctgatgcaaactgctgggtggaacaacactaaactcttctgtaccataaggcctgaagtgattcacgctatagatagagagcttagcggaaatattggtcggcagataacaggctttgactgcccgcttacctggtttcgcaatacccgcgagacatacacgcagccaatcatgcacttactgatgcgaaggattgagctggccgaagagaagaacggggagcggatcggaagcgaggaagaaagatataaaaggtggttccctcaaggtgagacgggcgaggagcctagcgacatttttcggcggataacatggtcaagacctagggacatcgttagatttctgatctgcgcagggaaccggtgcggtggacaaaaagcttttagcgagactgtgttccaggccgtgaaaaaggattacagtttcggatctctggaagaggtgaaaaccgagttgctagccctgtacactgtggaggaggtcgaagctatgtttgactgcttaagagggttgcccgcatgtattaccctcgctgacgtggcacggcggaccgaatctatgaagtgcaagcccgtttccgtttatggccttcagcgtgtgctgggcgacctgtatcgcgtgggggtcataggccagaaaaaaggaaatatccttcggtggcagcacgagggagatgatgggctgttctactctggtgactgggagattgtgattcatccagggctgtgcgatgcactttatatccaggaagtggaaactagcgcgcaggaacaggcccaactcgagacgcagcagcacacctcagggaccaaaagcactaatcaggaactgcaggtcaaggattctgctacaaaacctaaagatcccgtgatgtcatccgaactttcccacgaaatgaaggcccaccaagaagaagcgcgtgaggccccaatttttggtctgtccgaggagcagtatcaattacttctcgatagtcgcaagacaccaagcctctattttcaggcgtttactctcaagacaaacggaaaaacccgtgaactgatcaggtacaaggataatgagtacggagagaagattaggcaggtccatgagactgccgctaacgacctacaaaagcagtaccgccagcatgaggcctcgtacgcatatcgggctgggggatctatcgaaaaatgcgtttccgcacacgtgggcagcacatgcttccttaagttcgacatacatcacttcttcaactctattgacgctgcacttctggcctcagaaatccgagcccagctgcatctgacggcactcagtaaggagagcgtcgaggaatttgtgcagtgcttcttcatagacggcattcttcctctagggcttgttatctcaccactgctcagcgatatctacttgcactctctggacgagaacatggagactttctgtaggcagcagcgatgtatctattcaagatacgccgatgatatcatgatctccggagtagggctccagatggatcagatggaaaccgtcttctctggcaggctctccaatcttttgaaggagaagaaactcgagatcaatcccttgaagacccagaaaatgttcctgaaggagtctggccagtatattagatacgtagggatcaacattgtaagggctgccgaaggaaatgttctgacagtgggcaggtcgtacattcaccagttggcaaaggatttcctcgactttgcgcggagaaaagatgacgcgagaacaaaaaatggggaggctctgtccgaagccgatcagcaatatttgttttaccagggtagaaggttggctggcaaagtacaattcgtgaaacaagtagaaggcgatgctggagtcgaaaaaatactgcgccgaattcaaccgcattggatcgtggaagacgaggccgatctgatgcgtttctgtctgggtaaatga

SEQ ID NO: 12122 - RNA, 2001 nt, synthetic construct
  source 1..2001: mol_type = other RNA
atgtgtaaaatcatgatcctcgtgttgaaaaagaagatcaagatagaccgtccgataatcttcctttgcgggcctttttacaaagcctcagacaaaaatgatcgtcggaacatactgaaagactttctcttaaccgagtccgacaagaaatgcatccccctgatcattgatgatttcgtaacagaggagaacattaaggacactacgatatccattcaactacttgaggagattttcgcagcgattgcacttaaaacttatgtgttcttggataccatgtccgcagctacggaactaggattgttcaccaataatgccttcattaacaaggtacaagcctacatcccagtggagaacgacattatttacaagaacatcggatactttgtcaaagacgtggttctggacaataaatctggcagagtggcctatatggagtaccatcctcgaatcaaaagggtacccattgctacagattatgtggtcgagcactatgaattcatcaacaatatcctgcctttaaacattcaggagggagttcgcaaggacttacacagctcactctggaacgaaaaagaagttgagatcaatgaatctgcagagctgccctcagatcactacaagatcaattataagtacgatgtggaggataacattttacgggttaacctgagcgtccagtatctattttacatagtcggcggtcttatttattctgaatacagcgatgagcttgtcaaaaatgagactattgactttgatgacagttgcatagaaatcctggaggagaagattaaactgatgctgcggatgttcattcagatgaatatcttctgcggaattaatcagaggacatacgtgcaggtgaacaccgtaataaaggataagatgagcaatatcatccggcatatggtgaaattcatatttctctaccatcagaagtctcgcctgaatgggtatttcctggttaacaaaaaatcgatcttgaaagaggtcatcgtggggaaatccccaatcgatttctttcattttaccgagaacgacattagctacatcaaggacatcaattctaataagggcaaatactacgagtgtctaaatctgaaactcaagggaaagaagagagagctggtgacatactccgagaatgatagggaaggtaaggctaactacgccaaatatatccacaagaaagtggtcagcatcattctggagaactaccagtattctaattcctcgtatgcttacagaaaagggtatagtattaaggattgtgttgcgatgcataagaactccacctttttcctgaagttcgacatttccaagttctttaattcaatcgacctcgacatcctggtgatgacaatcatggaagaattttctatcggcaagagctttaagatgcacgttgaagaaatagtcagtacttgcttcatagataacgaaatgcaactcgggctgatcctctcccccattctgtcagatatctatatgaagaagttcgaccaggtgctcgagaggatgggcaaggaatgtgggttcatatatactagatatgccgatgacatcctgattagcagttcaaacatcatcgccgatcaagacattcagattattaagaacgctatacagtctgaattgaagctgctgaaacttaaagagaacagtaagaagtacaagaagatttacctcaaaagcatcggacaacacatcaagttcttggggttgaatattgtcagaatgatggacgagaataagatcaccgtaggcaaggaatacaaaaactatattgccaaagagtaccttcagtttatcgatatgaaggtgaacgacgaggaagacaaaaaatgtaagttttactggggaaagcgcatcataggttatctgagttttgtgaaaatgatcgagggtgagaaaggcgaaaacgaagtgtatattcgaatactcaagagcacaggcggcaggattgcatttgaacgggagcgcctgcagggcgaatga

SEQ ID NO: 12123 - RNA, 2046 nt, synthetic construct
  source 1..2046: mol_type = other RNA
atgtatgttattgacgataagatccgaatcgataaaccgattgtgtttctgtgtggcccctattatgatccaaaagacaaatgtgacagacggacgattctgaaaaagtacctgatcgataaggggaactttttaccacttatcatcgacgattttctgatcgacgacaatatcaaggacaagaacattaacattcagctcctagaggagatcttttcaaatatttccgttaagaccctgattttccttgatactttttctacctctgcagaactcggcctgttcgcaaacaatagcttttccaataagataaccgtgtttctgcctcagaagagtgatatcctgggggtagataacatcggattctttgtgagcgacataattcttaaacaagatcccaataggatcaattacttaagttatcgccccaaaatactcagggtgcctgtcgcctctgactacgtgaaagaatttttcggcttcatcaacaatgaagttccgaagaatatcaagaacgaattggacaaaaacttgattagtaagcgggagaattattacatcaatatagagttcgacgacctgaaccttagaaacaactcctcgaacataaacatcgagaaaatatccgtgaatgacaatgggcgtgatatcaccttctacatatcaatacacatgttgttctaccttgtggtcgccatcgtgtataagaattattacgagaagttggacggcgacaagaaactatcgaaaggcaaaaacatttccaacaaaaaggacaacacgaagataaagaacaataagaacttcaccgttaaccaagtgaagaatgtagaaagactggtgcgagagtatattttcaacacctattgcaaccataagggctcctataacaaaaacactaacgtggtcattgaaactaaactggagaggaagttatttgagatcattaagcacatgatgaagttcatttacgtgtatcacgcccatgcgaaatatatgtccaacaacttcattagcgaccccaataatatcattaaagacgtaagcgaggaaaatccagtgaaaatgtttaacatcagcaaagaggacttcggtttgatcaacgatataaagaataaccctgatcgctactatgagaagcggattattataacaaacaagaagaagcgcgagatcgtcaaataccgcaacaatgattttgggatgcagattaggaaactgcacacgaagatagctaacgtcctcgagaaaatctacatttttcacgaatctagctacgcttacagaaaacgaaaatcaattgtggactgcatcaatacccatcggatcaataattacttcctgaagtacgatatcaagagcttcttcaatagcatcaataagaagatcctgctcgctggcgtgtgccatgaacttaagattgatatcaaagcatacggcaaagagattgagagcatctttagtacatgcttttacaacaacaagctccctctggggttgataacttcaccaatcctgtccgatatctatatgaaagtcttcgacgttaaactcacaaattacctgaccgagaagtataacacttgtgtttatacacgctatgccgacgatatcctgatttctaatggtgagatgctagagaaagaaaaggaagatgagatcgacaattacatcatcaatgagctcaaaggtattagtctaaagctgaacgacaagaagatcaggaaagtcaagatttcagaaacaggagatcatttcaaattcctgggtgtcaatatcgttaagggagaggaagacaattacctcacagtgggacgtgaaagaattaacgatgtggccaaactctacttaaagtacaggcacattaaagacacctacttgaatgataagaccaacgataaatggatcttttacacacagaagagaatagtaggacagatcgcttttattaaccaggtagaaggaattattggctataaaaagctggaaaatcggatccttaagtgttctaaggggaatgtcatactcactaacaatattcagtga

SEQ ID NO: 12124 - RNA, 1980 nt, synthetic construct
  source 1..1980: mol_type = other RNA
atgggtgaaaataaaatggcctacatcttgaaagacgagatcaagattaacaaacccatcatcttcctgtgcgggccatattataacgacctggacaaatccgacagacggaagatcttgcaagattttctgcttgagaactttcccaagaagtgtctgcccttaatcattgatgattttctgactaaggagaatatcggtgacaatgagatatctatccaactgttcatcaagattttcgccgggatctcgttcaagacctatatttttctggataccatgtcctcagccgtcgaactcgggctctttacaaacagtgcctataacaatagcctgtacatcatgttgccttatgagaaggagcggaattgtggcaacattggcgtgtttaccagcaacgtggtattggaggacaatgcagatcggataactgtgaggtattatcatccgaaaattgaacgaattgcattctcgaccgataatgtgggagagttttacaaattcatcaacgattgtctaccagagaagattcggaaggatatcttacaagattacgcggaaaatatcaaccttgagcacgagattcagattgctcataaagaggattatccacagaacgattactgtgtgaattaccagtacaataacactgagaatagcctgattgtgtttataagcgttaagctgctgttctacatcatttgtggcattgtttactctgagtatacagaaaatctgcgcaaaaaggagaaactggatttcgacagctataatatttacacaactgtagcgcatctaaaatcactcatcatggccttccttatgaagcacacttttgtaggaattaactctaagaccaaagtcgacatacagacagttctcacaagaaacattgaggatattgtgaagcacatcatcagtttcatcttcacataccataaaaactccaggcttaagggttactttctcgtcggaaagaacgagatcattaaagaactggaactgcagatttcccctgttgatttttttgacctgacagtgaaggacatcgaaattctcaatctgttcaaaaacaagcctgacgactttttctctacgttcgaaattaagacgggatataagaaacgcaaaatcactacctacaagaacaacatatacggcaatgccatgcgcgagttacatcaaaaaatctgcctcgttcttaacaagcagtatgtgtttgatatccacagttatgcctaccagaagaacaaatcagtgaagaaatgcatagagtgccacaaaaagagtaaaagcttccttaagttcgacatccacaagttctttaattccatcgacaaacgaaaattgagtcagaaactcctgtacgaattcgaactggacgaaatttacgaagagcagttgctgaatgtgctggacatatgctttgacgaggaaaaaatgcccattggactgataacctcacctatcctgtccgacatctatatgaaaaaattcgacgtggaattcagcaacgaattgggtgagaactacatctataccaggtatgctgatgatatacttgtctcatccgccaataatatctctctcgaggaggaaattcgtatcacccgcctcctcgtgtctaagcttaaagttctcgggctgaagatgaacaacaagaagtacatgaagagaaacttaaaggctatcggggactatgtcaaatacttgggaataaacatagtcgtggcaaagaatgggaatatcatcaccgtagggaagacatataaaaactacatagcgaagacttacctcaggtacattgaaattgatgatgagaatcgtgaagagaaattctacttaggcaagaaaattgctggctatctgtcctttgtcaatatgatagagggcgaagacggcctaaagaagatctacaccagaattgagaagagcactaagggagaaatcaaaattgagggcaagatcacggacctatga

SEQ ID NO: 12125 - RNA, 1764 nt, synthetic construct
  source 1..1764: mol_type = other RNA
atggtgtatgccctgaacgataaaatcaaaattgaacggcctatcgtcttcctgtgcgggccctactacaagagtggtgatgtctctgatagacgaaggatactgaataaagttctacttgacgaatacaagtgtttgccattgatcattgataactttcttaccccagataacattggcgatgacacaatttctattcagctccttgaggaaatcttcgctggaatctcgttcaaaacatacatctttctggatactatgagctcagccgttgaactgggcctgtttacaaacaacgtttacaacaacagcatttcagttttcgtgccgcacctggaagaccgaaattgtggtacaatcggagtattcgtcaatgataatgtactgaccaacaataagaacgtgaagaagatatgctatcatcccaaaatcgaacgggtcgcatttagcacggactatgtgggagagtactacaaatttgtgaacaatcagcttccaacagtgatcaaaaactctatcgaccaagactttgaggagataggcgatcgagagtttaaaatcaaactgaagtgcttcaatgactatcctaaggatgattttgtgatcaactatcgtttcaatgagaaagagaatactctcattgtgttcatctccgtgaagctcttgttctacatcgtgggcgacatcatctatgctgagtactccaacaatttggccagcaaaaagaatcttagaataacctctgaccacataagactggttatggcgcagctcaattctctaattcgcattctattcctcaaaaacagcctcgtagccattaacggaaagactaacatcgtaatacagaccgtgttgaagcggaatatcgatgaagtcgtgaagcatattgtgagtttcatctttacttaccacattaacaggcgtgtcaaagggtactatttaacccaccacggtgacatcctcaaagagctaaacctgaagctctccccccaagacattttcaagtttaacgatatcgacatcgatttaatccgcaagattgacaagagcttttataaggagtttgagataaagagttcgcggaaaaagagaaaaatcgtgacctacaatgatgatgagaatggcaagaaactgagggaattgcataaaaagatggcactcaatctgcaaaagaagtataaattcagtgagtactcctacgcctaccagaaggggaagtcagttgtgaactgcattgagcggcacataaactctgtgcactttcttaaattcgacatccacaagttctttaactcaatcgacattcatagactctccaaacagattagcaatttataccagctggataagttctacgagaagcagctgttagaaatacttaaaacgtgtttcaacgacgagaaaatgcccattggcttgataactagccctatcatatccgacgtatttatgcatgattttgacgtcgaattcgccagtaagctcaataaagattatgtgtataccaggtatgctgacgacatcctgatttcctgttcccatgctatttctcaggatgagctggacaatattatcctcatcctgaagattatgctgaataggaagggattatcattgaacgaaaagaagacagcaaatgtcctgctgaaggacaaaggcgactatataaagtatctggggcttaacatcgttaaatgcgaaaaaagcaatcgcattaccgtcgggaaaaatattaagatgatcctgctgcgcattatctga

SEQ ID NO: 12126 - RNA, 987 nt, synthetic construct
  source 1..987: mol_type = other RNA
atgttcggctacctcaccctctacttcaaagatatggagcgggccctcagtgttgcaaatggttatttagcggaccccgataagtacacaaaggtacacgttgtgcctatgaacgggaaagtgagaaaactcagagcttatgcagacaataaagagggtaagaggttacgtgaactacatgaggcagtagcgagatttgtgtgggacgcttttcaaagctctaacatgtcgtacgcctacaagaagggcaggagcattgtggattgcgtgagggcccatataaacggaaaggtctttctcaagacggatatccacgcttttttcgacagtacaaagctgagcactttcctgcagatgtttcttcggagcccaaagtttatggcggacaaacccaagctgaccactatactgtcagcctgcttttacgacggaacccttcctcttgggttcgtaagcagtccggctatctcagacttcttcctccacgaggtggaccgacgaatgcagatgttgtccggaattgtttatacccgttatgcagatgatttcctgatctcctccattaatgtcggcgctcagttcgtgctggagaacgccctgaaggtgctgaaaggggaaattcagaaactggggctggaactgaatgaacgcaagacgttctaccgcccattaaaaaacattggagactctatccacttcttgggcttgaacttggtcagaacttcttaccctttcaaccgggtcaccgtttcaaattcatatatcagggagacatctatcgatttggccgccgctctacagaaatccgatcagaaggcctatgaggccgcccggggcaagatttcctttgtgtctatgtgtagtcccgagtcctttgaaaaactcaagaagcttgtcatgatcaaatttcaccttgatctggaggaaatgctggacagcaagacagtgcaagaagctaaactggcaatacatctgaatcgcaaatga

SEQ ID NO: 12127 - RNA, 927 nt, synthetic construct
  source 1..927: mol_type = other RNA
atgaaaatgccagagaaatgcttctccaccgcgaaggagtaccagtgcaatcctgccgagtttgtccgcgagcatgttgtgaccattaacggaaagaaacggacactgcgagcatacgcctacggatccggtggggaagagttacgtgcccttcacactgccgtggctcagatcatatcctcgggttatatgcctagtaatgcaagcgtggcgtacaagaagggagataacatagtcaaatgtgttagccgccacctctccggctgcgttttctttaagagcgacatcgtcagctttttcgaatcaattaccctcgagaagtttatggaccgcctgaaggactccctactggataaaaactcagacctaaagaagcttctccccgcttgtttctacgagaacatgctgcccttgggattctgttgcagtccaattctgagtgacttttacctcagcgacatagataagaaatatgaaaatgggcaagggtatgtgtatactaggtacgccgacgatttcattgtatcatctcgagtggagtccggcgaggaaatcttggaggaattgagggaaaagttgtgggacgatatggaatctgtcggactggaccttaacgagaaaaaaacgtatatccggagactggaccatgatggggatcacttccatgccctgggcctcaatatcgtgagacgtgagaaagggaagaatatcatcacagtgggcgatgcttatctgagggagacatgcaaacagcttacagccatcgtcggcggcgaaactaataacgaagaagacatttgtgcagtgaggggtaaaatcgaatttattcggatggcttctcaagatagttaccggaagttcgagagactggtgaaggtaaagaccggcagctctttacaggcaatttctgagagactgtcagattga

SEQ ID NO: 12128 - RNA, 960 nt, synthetic construct
  source 1..960: mol_type = other RNA
atgaaaaagatcgacaagctaatccgtgttgctgaggggtacattgccaatgaagacgcctacatcagacactttgttgtggtgattaacggaaaaagacgtaagttggctacctacgcaaacagcgaaaatgggaacgctctccgggagctgcatacttatatggcctctttcatacgccgactataccaacaatctaatgcttcctttgcatatgccaagggtaagaacatcatagactgcataaaagtacacatccggtcagacgtgttcctcaaaactgacattcatagctatttcaactccattacgttcgaaggcgccgagcgggtcctgaacagacacaagacgtaccagaaaaactccgattctatgggcatacttctcaaagcttgtttttataatggccggttacccctgggattcgtctcatcccctgtgatcagcgatatttttctggtggcgctggatcgcaagtacagcaagagaaaggatattctctacacacgctatgcagacgattttatcatcagcgcaaggggagaaaattcagtcagcgtgctggacgaagtgcgagagactctgtctgatgatcttggcaaacaggggttgttcctgaacaccaagaagacatacatccgcactctgaaacaggccggtgatgccatccatctgctgggtgtgaacctcgtgaaaaccgaaaatgaggagaataggatcaccgtaagtgacaggtatatcagggagacatcgaagggattctccgacttgatgaattttaatggggacattgaagagaagaccgagctttgtaacacagtttgtggacagatatcattcattcagatgtgtagtcaggatagtttgaacaaactccaaaaaatggtcagggtcaagtgcggctatagtgggtctttacaggcgaaagcaatttgcagagcctgcggccttgagaagtga

SEQ ID NO: 12129 - RNA, 996 nt, synthetic construct
  source 1..996: mol_type = other RNA
atgcggggcaaatattctaaatcttggtctatcgacaccatgtatacagatgcaagaagtaccgtcgagcagtacaacgaagatcctgagaagtatgtacgttcctttaccgtgcggataaacgggaagaagcgcaacattatcacatataccccggatcggaatggagctgcactgagaaatatccactcacgatttgccttcacaatctcccattgctatcagagcatgcctgactccttcgcttacaaaaaggggtctggaattctgacttgcctgtcccagcacctccagtctgacacttttttcaaaacggacatccatgactacttcaactccataaaattcgaaacactcctgagcatgtttcaagaggataaaacgtgtaagaggagaatgaaaaagatcaaggcattactctcactttgtttctacaatgaccacatgcccataggcttcattacttcacccgtgctttcggatctgtatctgcacaaggtggacgaatcgtttctgggaaggtacgacgtcatttacaccagatacgccgacgactttatcatctccggcaagaacaatatgagtagcctagaaaaggccaaaaatgaactagaggaaagcctgagtgagtacggtctttcattgaacgcgaaaaaaacctacttcaggaccctccatcgcccaggcgatgctattcacgtactgggggttaacttagtcaacaacgaccccgatcctaacaggattacagtgagtgaccggtacatccgagagactagcaaagatatttgccgctttcttagcgaatatcaagatcagactaaggaagagaatgagattgccctgtcttccgccatcggcaaaattgagtttatccgcttcgtgagcccatccagctatagtaagctggagaagatggttcgtatcaagcatggggaggccgtggatttgtcaagggctatgctcgagggtttgataaagaagaataattcttga

SEQ ID NO: 12130 - RNA, 2103 nt, synthetic construct
  source 1..2103: mol_type = other RNA
atggcactgtccttcttcctgttcatgtacattaccaacttcatatgcagtctggattccaggcggcctttggtgttcctgtgcggaccagcttactctcctaatccacaagaccgcagatggatcctatctcattatattcagtccaaatggtccgaaaaagaaaaggataagtatgtccatgccttcccaattgttgtcgatgagttatttaagccggacgaaattaaagagaaaaaactcgatatccggttgaacatactggaggagattgtctcgaagatctcatacaaaacttacatcttccttgacaccatgtctacatcatacgagatgggtcagtttactaactttgcctataacaacgatagtgtgacaatattcgtcgacaagaaatatcgtggccgcaagaacaacgcaatcggggaatatatcaggctgtctattgacaagtcattcgtggagtataccgcgtcttatgataataacggcctgatttactttcctgagaaagacggtaaaggcaaaacacgaatccccaaggagattctgaaggtgctcgaggatgacaatcctgtgaaaaaaggctgtttcctgaataaaatccttttcagcacctatatcaacgatctgaataagccgggctacatagtgtaccatcgatccaaagatcttctgagcttcaacttctgcattcgcaacttgttctattacatatcctcggtatataagttgctgtctaagagcagtcaagccctccttaatgagattcctcaaagccccagagattatcggtttaaagagttcgttaagttcttcaaacaggaacttcttaagactttcgtgtgtgtcaacaatagttctaatatctcctttctcctgactgccgatttcagcatcgaagtcaatgtagagaatctggactgtgatgagttaatctatcacatgctgtacatttcgtacaaactctttaacatcaagagctcatctagtaggtatctaattcccgaagcctcagaccaatcatcattcgattccatttacttcgtggacggactcgaaatgtttggactctttgataatgagacaatgtgtgctctggacaaaaatcgttacctcccacacaagcagtgtatctcctttagaaccctgaagataaagaataagaccaggaatatcctagcgtatcggaacaatttttttggggaaaggttgcgtgggcttcatcagaccatcctggacagctttttaagcaagctacccacgagcaaatccagttacgcttacaagaaggggaaaaacacgctcgtatgtctgaagcagcacgaaggtaactactactttgccaagtttgatattcacaagtactttgagtctatccggctgaaaatgctcgggaacaaaatacagaactacttctacaagaagatcaatgctttgcttagcaacctttctctgtcttatagcaacaagaagaggattaattccaagctcacgtccatcctgaaacccttattctacaaatatcagcttcctatcggattcgtgtcaagtcccaaaattagcgacttttacttgtttgaatgcgatgagcgcatgaacaagcagaaagggataatatacacacgctatgcagacgacatcctcatctccagtaagagtaaaggagaattggatgagggcatacggctcctgaagagcctgctcagggaagaagagctagtgctgaatgagaaaaaaactagatttgccgttttgaaccacgaaaatgactcatttaagtttctgggtatcaacattgtgagaagaaaaggcgacttgttcgactataccattagcaatacctacctcgtgcagacatgcaagatgttctttaaagttttcgaggagtgggagtggaagaaggacattaatgaggttattaaggtgaatggaagaatctcctacattaagaacatcagcaacaattcattcaagcgatttctgcacctgttaaaggtcaagtttaaggacggcacaactatctctgacctgtattggcgcttaatctggatggattgcccactgtatctcgaactgccaaaagacattatcatgagctga

SEQ ID NO: 12131 - RNA, 1833 nt, synthetic construct
  source 1..1833: mol_type = other RNA
atggaagaaatcctagccaaggtaagcgcgtctaccttcgtctttttggacaccttatctacagctgccgagtatggtatgtttaccaatgcacaggctaataactttacgtatacactgctcccttacgaagaagacataattaatgatgccgtgggatactacgtgaaaaagtcaatcagggaaaatagggatatcagagaaattgtcgatctggttcgctaccacccaaaagtcaacagatacgctaagtcgtccgacgtggttgatgaattttttggatttatcaaggacgagttgcctatttcaattgaagagtctgtgaagaagtccctcctgaggaacaaggagaaatatgagatcgacttctcgattacaaacgagagctcatccgatttctttattaagcttacgagcgacgttctggaacctcagcgttacaatatactgtgctcaactaagctgctgttttatatcatcgagggcttcctgaaggacgaatacggtaataaatccgagatcctcatcaaccagttcaagtataaccttgatgattatgtgagtagtgtaattggcaacgtgaacagcctggtgattaattctttggtgacacacaataccatcactcccctggaggcagtaaatagtaagtttgacattgacgtggatctcagcgagtctatattcgatgtcgttaagcacatgattgagttcctgattctgttccggaacggagggaataaatactccaagaggcggtctttgatttcaaatcccaacgagatttttactcggttcaaatcaaagatctccaaaaacgatagctcgtttacaaatatgatcacaaatgacaagcagctgataaatttcacaaaaatcgccctgcaaaaaccttcctatgagtataacaagttagcctacagcagtttcatagtctcttctccgaaaaagaaaagacggatagtaacttatagcaaaaccgagtacggccagaatgctcgagtgctgcacaagaatatcgtggcattcttaaataaccacgtgctcagtgatagcaattcttacgcatataagacaggcagaagcacttacgattgtgttttgccccatctgaatagtcaatacttctttaaagccgacatatcatcctttttcaacagcatcaactctgacatactcgtcagcaaaatagtgaatcatatcgaggactttaacgttcaacagagcactattcgagacatccttcatactcagattgaaaacatggtcaacaattgttactacctgaacaagctcccaattggatttgtgagctccccaaaactaagtgacatttatctcttcgagttcgacaaggaaataggggaatactgcaaaaaccgcaacaggatctattcccgctacgccgatgacatcatgatttctagcgaaaacgagatcgacatcgagtcaattaaaaagtcagtgatcgattccctttcgaaggtaaagttgacgattaactctaaaaagctcgaaaacaagaagcttctgagcattggggataatgtgaaattcctgggtctgaacattgtgaagaaagagttaggcaacaccatctccgtggggaaatcctatgtctctgaagcgaccatcgagttctgcgatatcgttcttaataaagacatcaaccaacgtgtcaagaaggtcattggcaagcttaagtacataatctaccaggaccccaccaagagtaaacagatcgagcgcatcatcaaaagtaaactcctaagtagctataacttcacctcctccaatgattttatgaccttgtataaacagctgtcagagtga

SEQ ID NO: 12132 - RNA, 2073 nt, synthetic construct
  source 1..2073: mol_type = other RNA
atgcttgtcccatcatttcctatcagcatcgccctgccagtaagccagtcttcatttatcaaatggctgtttttcgtttgggagaaaatgatgaatcgtaccccagaggaggtgatcaatctaagacccttggtcttcttgtgtgggccgctgtatgacccttccgacaaaaaagaccgacggaaaatacttcgccagtatcttacacggtacaaaactacgttaagttacaacggtaaagactatgtcattgagccttttgccctgatcatcgacaaggtgtttaatacagaggatctggagaataaccagaatattgcactcatcgaagaggtgatagcggcatgtgcttacaagaactatattttcatcgacaccatgagtactgccctggagctcggactgtttgctaactcatattcacagaatagaaccaccgcattactacccaaagactttagaagcttcaagccctccattggatatttcgttcagcagactatcaagaagtcggataatatcgccttatgcatttatggcaataaacgcattaacaagttcatcgacggaggcagacaggtgatcgaaaacctggtcgcctttaaatcgcaccagatcccaagggagatcgagagggatatcaagaaagatttttccaaggggattgaaagctttattctccgcatagagttcacaacaaatattaaagacgcggagaagatactctatcaagtgaacaccgaagggattcggatggttatccccccacgcatactcttttacttggtggaaacctttggctccatcaacaatatcaaaaatgctctgctggattacttcgaatattacgagtgtgagaaagataaggagctagtgatcatgtctattttgattcgaaagggactctgcattctcgagctcgattctcccttcgagtattctataattgacgtgattggtagcatgagctacttcattgagaaactgaaaactcgcgtcgcctttcaccagaactatgaaaggcttcggtacgcccctatcaaacggtggaggagccgcaaaaggtttagtgcttgtgagctgctggggctggacattatcgaaatgcggcaaatgcaatcactgttcgggtataacaagaagaagagtgtgatctctaagaacctgcttatcaacgggaaaaagaggaagatcaaaatgtactcttgcacatctgaaggtttcgctctgaggaatttccatcttcggctgatgaaacagctccagaagcttttcgaactccagccatattcctatgcttacagaaaagatcgctctattctgatgtgtatgaaccagcacatcgacagcaagttctttttgaaaattgatatccgagacttcttcaactcaatctccaagggcaagatgaataagattatcaagtgccatctttgttacgatccgaaacaggcatatgaagacaacgtaatatggagaaagagccgttacttaggagagtacgtgaaggagtggttaggcattaaggagatcactgacatatgctttgtaaatggccgtctggcacttggaatggtgacatcccccatcctgagtaacatatacatggatttcttcgacgccagattccatgataactaccctgaactcgtctacaccagatacagtgacgatattttgatttcaagcggaaaatggttcgattacaagtccattctgaatttcatcgccaaagagctctgctacctggggctggaaatgaatgaacacaaggttgggttttataagctaaaacaggccggcgatcacatcaaatttttgggcctaaacatagtgcatggccctgcggaggaaaactacataacggtaggaaagcaatatatcaaggatgtgtgctccaatatcagtcagtacgaaaagaagattggcttgttcaagaaaagccagataattggtcagatagagtacatcaagtttatttccacccgagactatctgcaactgcaaaagatctacaggattaagaatcacaaggacctcaacgttgaagaattgaaccgggtcggtctgtga

SEQ ID NO: 12133 - RNA, 5223 nt, synthetic construct
  source 1..5223: mol_type = other RNA
atggccaagttcagttatgagcagtataaaaaggtggtcggaaaagccactgtcaagcccgagatcaacgttgagagcgtcaaagggtatctggataacccaaatcagtatgtgtttccgtttgcgattaatgaaaaaaacgggaaaacacggaccattattacatacaatgagagttcagacgggaaaaacctgcgcaaagttcatgagctccttgcaaaagacttcgaagataattttgccgagaggaaccaatacagttacgcataccataaaggcattagatgttacaatgcgctggaggctcacctgaagagcaactacttcataaaactcgacatccatcatttcttcgagagtataacgctggagaatttcttggatatctatggtgagtacttcaacaaaaactggcgggaaatccttcagtacctgttctactttggctcactttcaattggttttgtaacctcgcccttgttatcggatttctacatgaagaagtttgacaatgccatcgaagaatatctcaaagattacccagagctccacttttcacggtattccgacgacatcatgatctcttccgagtccaaggataatgataccagtctggaagccttgttcatttttatcaaggagcaactcaagcagttaaggctcgaaacaaacgaatccaagaccaaaaagattaaactgaacttagagaagcacaactctttttcattcctgggcctgaatctatcgaagattgatgaggagaacaacaaggtgactatctctaagaggtacattttgttcatcctgtttctgatcgcaaaacagaaacggtataagaataattgcaccccactcgacaacgagatcaagtccagagtcgcatacttggcctataatagcgaaatttcgttcgagcgatttcaaaagaagcacattaacatctacggtgaaccttacaatttcattcctaaggtcttagagaagcgcgaggttggacagaccaccgacaccataaaagattactcagaatataaggacgagtttgagttcaatatccactccaaagccgatggtgcaaacacgagcggctaccagatcaagaatggcatcactctgactaagtatctggggaagaaggaggaagtgattataccagactttgtggacattatcggtgactatgtgttcatgggacacaagatcaaaaaggttatcctcgggaacaacgttaaaatcatcgggaatgacgcttttcgcaactcaaccatcgaggagatagtgatgaacgattccctgcgccatatcggaaatggagccttccagaactgcaagaatatcaaaaaagtcgtgattccttcttacattaagtatgtgtccaacaatacctttgcggagagtgggctggaggagattaccctgccagaaggccttataaaaattaagatgggggccttcgctcagtccaatatacaaaatattaacttccccaccactttggaagccatcgaatacaatgcatttacagaatgcactaaactcagcagggtggatctgagcaaaacaaacatcaccagccttggagtaggggctttcagcaattgcgtgcagctgaaggaggctatcttgcctgaagggttgtctactatcgagaacaacctgttttctaactgctctcttctgaaagagatcaacatacccgcgaaagtgggctacataaataactcagccttctccaattgctattctctatctagcattaaagtctctgacggagtggccttcttgagtcgaaaagataatgcctccatagtcaagaagaaccacgaactcctgtttacactcaaggacaagattgatgaagacatccagattataggacgtggcctcttcgctggagtggctataaagaacatcgtaatccccgagggagtgaagatcataaaagaggatgcctttaaagggtgtctttggcttaagtctattactttaccagaaagtctggaagaaatcggcaataatgcatttgagaagtgtatttcccttgaagagatcgttattccctccaaggtaaaggcactccctaacggcctgtttgctaactgctccaatctcgtgaaggtggttatgggcgaagaagtcacctcgattggcgacaattgtttcgctaatgacaagaagctctcaatcaaacttccgaaagaactaatgctcatcggcgagggtgcctttaaaaactgttacaacattaaggacctctacataccttacaaggtgaaagaaatcaagaaaaacgctttcatcggaatgagtaaacacctgaacagcattaaggtggataacaaaaatcttgtgtactcaagcggagaagacaataatattctcttccttcagaagaagggcagcttgatcttggggaccaaccacagcactatccccggaggcataaagtctatcggcaattacgcatttgcctataattctgaactagaggagatagatctgcccgagacagttaccactatcggagaaagcgctttcaaagggtgtacaaacctgaggaaagtgaacctccactatgtgagtaagattgaaaagcatgccttcgaaaatacacctaacctgaaggacatctttctgccaaacagcctgactcatattgaggaatgcgcttttctgaactctggcctgacgtcgatcacactgcccaactctctcgtcaaattagacaagaaagccttccggggttgccgcaatgtgaaagatattcatattcccgcatcctatactagaagcctcagcgcactgttgaccactggttccgaggagatcaactacatcgaaattgacccagataattccatgtaccgctgtgtagataacaaggtgatcatcattaaggcaataaacaatgaccccgaaaagatcctgttcgtttgcaacggcgtgaaggaaatacctaatgtgcctgtaattatggacatggcttttaagggtgtgaaggggctgaaagagatagtcattcccaacaaagtttgcgtgattggctcaaacgcttttgagagctgcccggatcttgagaaggtcacatttaagtacgacgacgatatcgagattaaggacaatgcatttaagaactgtcctaacctgaaagaagtggtattaccgaaacttctcacaattatctcagccaacctcttttataactgcccgaatctgaagaaggttaagattccagaaggagtgaaagtcatcggtgatcgagctttcagctacacgggcctcgaaaaggtaaccattcgtaaggacctggtaaatattggcaatgacgctttcgcatccacaaacctgaaagacgtgattattgaggaaggggtaaaaaaactcagctatggtctgttcacagagacaaaaatctccaatatcacacttcccaattcactggaggcggttcctgggaatctgttcgctggttgtaaagaactgacatccatcgtgattcccgacaaggttgcttccattggctctagctccttttccaattgtacctcattaaaagaggtgaagctcccagacaatctggagatcattgaggagagcacattctataagtgtgtcaacctggagaatattaatttcccaaccaagctaaaagagattaaaagtttcgctttctaccactgccacaagctgaacgttccagctttcaacgagggtctggagtcaatcttttccaattccttcaattctgtggagacattgaaagatctggcactacctagtaccttgaaatacttcaacaattctgccttcgcctattgtccaattgagagtatcaaggtcagccctggggggatgtatcaatccaataacaatgcccttacttatcacaacaaaaacgcgttcaatgagctaatactcggctgtaaaaatacgacacttgacgactcaataaacttcatcgccccttatgcttttaacaatatcgactctctcctcgaggtggtcttaccgaagaacgttaccaccattagttctaatgcgttttctgattgccacaacataaaacgtatcatcctgaacgacaaattggaatcggtccagagcggagcctttgattccaacttgtgcatcgacgaactgaaaattcctgccaataccaagtactttggctatctgccaaaggaagttaataagatcgccattgataagaacaacattttatacagcgactttggaattggagtgtttgcaactaaggacgggaagattctaatgaccactcccaccagtagcctgcctgtggaaggaatcacaagtatcaatcgggactgctacaacaatcgcaagttcacaaaggtcgagttgccaagtaccctgatctctcttggcggctttaataattgcgagattgatgagctctttatcccagatagcgtgaagaccatatccctgttcgccataaacagcatcatcaaaaagatcacagtgtccgagaacaacccctattatatcgcctctgaagatgggaccatgatcttaacgaggtcaaagaaacaaatcgtgtatctgggcgaaaataccgtcatccccgagggcattacggtcgcgacgacaaatgatttgatcacctcaatccattacccttctactatatcagacagagccttgagcttggaaccgagaggcataaaacagatcgatatcgccaaagatcacccaactgtagccgctaacaataataccctatacaggaagctggatggaggcttaatctatgccgtgaatggagaagagattgcggacgaggtcactaaaatcactaacctcaatctgggaaagttcgacaacgtgattatccccaagaacgtgaatctgatactgcccagggcactaggcgggcttatcattgataacatcgccgcacataaagacaacaagatgttcgatagccgggataactgtaacgctataatacatacctctacgaacacggtactttttatcgcaagaaatgggagagttcctgacgggtgtgttgtcacacccacaactattgaccagagagtgaaagatgtgacaagtattgagattgagaacaattacagtggttatgaaactctgtcatacaacgtcatacagcgactaaataataacccacagaccactactaaaagcagtttctccaccatagcctttgacagcgatgatgatctgcccttctga

SEQ ID NO: 12134 - RNA, 999 nt, synthetic construct
  source 1..999: mol_type = other RNA
atgatcgaagtagtcgcctactcactgagctttagcccacagtttgtagctgagtgtgctgggagctctccctggtcccgatcattctaccgcagagtgtccatacctaagaaaaataaacccaacgaacgtcgtattatctatctcccatctccagagatcaaacttatgcaacactttcttgttgagcgctacatttctaaactgcctgtccatggctctgccaccgcctataggcggggaagcagtgtcgtcaagaacgctaaggcacacaccggtaattcccatttcctccttatggatatagaaagcttctttgacagtattcagaggggtagagtgaagagaatgttgctaaacaatggggtgtttgtgaacccggcagatgccgagatgctcatctcattgtgtacttacgacggacatttcgtgcagggttgtgtgtccagccccagcgtggccaatgcgtacctctatgagtttgataacaaaatggatatgctggctaggggcctgccaaatggcgtgtatactcggtactcagatgacatagtgctgtccagtagtgagaggattccggggcagatcgcagcagaagttgcggccgctttggctgagttcggattgcggatcaatcacaagaaaacacacttcatctcgaatcgacaacgcatccatataacggggattagattgaaggacaacaagaagctaggcctgaacaccctgttcaagaaggagttaaaaaacgacgtttatcagttctggaagaagtgctccttatccggcgcagatctgaaagacaaaaatagattatacggcaaactggcctatcttaagatggccgacccctcttactacaacacaattatcaccaagtataggttcggatgccgcactctcctcgactttctgcactgcctggtcctggaaaatgatcacctgatgctccctcctgacaaacggtttacagattgctctagtaaccggattgaatga

SEQ ID NO: 12135 - RNA, 960 nt, synthetic construct
  source 1..960: mol_type = other RNA
atggggatcgtgagggaggatatttctgacacctttaacatggacatgaaacgggtttccatttatgtgaacaaatccaatcagttctacaagaagatagcgatacccaaaagaaagggaggcacaagagaagtctatctgcctagctccgacattaagatgttgcagcactacatttctgagaaatacttcagcaaaatccagctgagctcaaatgccaccgcctatattaaaagcaagtctatcatcgacaacgccaggccccacatcaaaaataagcattttctgtttaccgacatcagcaacttcttcgataacattaaacgaaatctgttcagtgagatactgttgaaagaactgccttttctgtctccctatgatgtcgaggacatattatccatctgcacatacaaaaatcgctttgtgcaaggagcagtgacctcaccaattatttccaacatctacctgaagtcatttgacgagtttctccaaggcgttgtcaagaacatcccgaatggtgtgtacactagatactcagatgatatcacaattagtagtagcgaattcctaaacgagaatatcacgaaaatcatcgctgacgagcttagcaagttaggcctgttcgtaaataataccaagacgtatttctcctctttcgtggatgaaatcgagattactgggctcaaaatctcaggtaaccgtatcagtctctctaacaaaaaaaagcgcgagattaagaacatgatctaccacaagtttaacaaaaagtcgaatagttccgaaactgctgaacagattattgggcatatgttttatctgaggcaaatcgaaccacagtactataatacccttaacttgaagtacaagaagaaaaagaagctcctcattgatcggcttttcctgctaaagaatgaggaaaacatacagaagtgtactgcaacatccaatatacagacatga

SEQ ID NO: 12136 - RNA, 969 nt, synthetic construct
  source 1..969: mol_type = other RNA
atgatccctgtgagcacggcaattgctcgtggagtgggtgtctccaccgactacgtgctgggtcttccagaacgggtagattccctatatagatcccgcatcatcgccaaagataggagtgggcagggaaaggccagggtgattagtgtgcccgatcccagtctgcagctggttcaggagtggatagccgactttgtgcgagagaacacctctgaacttcccccatatgtggcggcctacgagactgggcgaagcattgttcaaaatgctctgatacatgcaagccacaggcacctgctgactttggatatccaccacttcttcccgagctgcacccgggaaatggtcgtggtgaaagtgttctcaggcatgtctgctcgcgatggagagacaggccagcggcatcagctgggcgcagatgacgtcgacctgcttgcctctctctcttgctacaagggggcactggccgttggctcgccatgtagccctttcattgctaaccgcattatgttacccgtagatggcgaaattatagctgccttgcctgacggctacgcatactctagatatagcgacgacatttcaatctcctccgacagtagaatcaatacaggacttatcacccagatcgtcgagaagatcctgagcgatcacggcttttcactcaaccgatcaaagactcattgtaggggaacggggaatgccagacgggtgacaggcgtatttctcacatccgatggttctctctcaatagggagggaccgcaaaaaggagttgtgccggcaactgtacgcgctgttgaaaaagcaggagggctccccgagtagagttctgggtatgctctttttttgtaaacaagtcgaaccagagtacttcaacaccttagtggccaagtatgctacttatggactagcgaatgactatggaggggtcatccctgctctccaggccttacgccgtaaaatgtga

SEQ ID NO: 12137 - RNA, 942 nt, synthetic construct
  source 1..942: mol_type = other RNA
atgtctatcgtggaagagatagcctccgatctgggctttagcaagagctatattaaggaaattgccgaaggagctggcggaaggtacaggaaagtcctcctgaacggtcggcgaatcgacgttccttcaagcgatctgaagctcgtgcaagggtggatagcgtgcctgctacaggagtgtatgccctgtgatgcgggctacatcaccgcctacgagcctggtcgctcagtgatcagcaacgccctcctgcacagtgagaatgcccatttaatcactcttgatatcactggcttttttcgctcttgtacaaccgaaatggttaagtccgtgtttagtcagctcagattcgtaagtcatggaagtaacaataagacggctgtaagtaaaaaggacattgagctcctgacacagctttcgtgctacagagggtccttaccaatgggctctccttgttcaccggggatcgccaacagaataatggtgcccgtcgaccaggagattatccgtgttctcccacccgattgctcatatagcaggtattcagacgacatcgccatcagcagctctcagtggctggacatccagggaattgtaggcttgctggaggtcgttctggcagaatatggcttcaatgtcaatcacaagaaagtgcactgctacgggaaaggcgacgcccgaaaaattaccggaatttacattcaccccgatgggacactagggataggcaagtcccggaaagcattactttcccggagcttgtacctgctgcttactagacagaccggatccgcttctgaattgctgggacatttgaacttctgcaaacaagtggaccctgatctgttcgtgaggctcattgctaagtactcctcttatggtgtggcagtcgaatatgggggcgtgatgccagctctggtggagatggcaaatcgcgagggttga

SEQ ID NO: 12138 - RNA, 912 nt, synthetic construct
  source 1..912: mol_type = other RNA
atgtccataattaagatgattagcagtgacctcagcatgggccagaatgagatactaagtatcgccaacagcgctgactcttcccattatcataagttcatctctggcgggagaaggatagacgcaccagatcagatgctgaagttgttacagttctgggtggcggactttgtgtgcatggagacaccagagctgcctgattacgtaactgcctacgaacagggtcgatctatcaagaataatgcttctatgcacgcccaaaatgcacacgtcattaatctcgatatccaccacttttttcagtcatgcactaaggacatggttaaaaacctgttcgcctcaattgagggatacaatctgacctctgaagatctcaaactgttggtgagtattagcacgtataagggacacttgaccatagggtccccgtgctcaccctttattgcaaaccggatcgctctgcccattgactacgacattaagctgaagctgcctaacgacatggagtattctcgctatagcgatgatatctccatctcctccaataactacatcgactatgaagttatcgtggacatcattggcaacgtcctttcatcccatgggttcgaaattaaccgcaaaaagactcattgtttcggaaaaggtgggcgacggcatgtgaccggcatcttcatcaatccagatggcacattatcgctcgggcacaggagaaaaaaacagcttgaaagcatgctttacaagtatctaatgcgtagtaaaggaaaccctaacgagatcctgggcttcataaacttctgtaattacgtggagcccgattttacaagaaggaccctgctgaaatacagcaagtacggatttgcccggaactacagttcagtcgtagattatctccgccaaatcaaaggttga

SEQ ID NO: 12139 - RNA, 939 nt, synthetic construct
  source 1..939: mol_type = other RNA
atgacaaagactagcataagcgcgctcatccagagtgacttagggcttgagacgggttatatagagtctcttgccgaacgggcatcagcactttactccaggattaagctgaagggtcgacgaatcgacgctccctctccagaactcaaactggtgcagtgctggtccagtgatttcctacattcagccgacggagacttgccttcctttgtggccgcatatgaaccgtcctgttccgtgatcagaaacgcctctatgcatgctgaccacgcccacattgcgagactcgacatttccgacttcttccattcgtgcaagcacgcaatggtcgagactgtatttcgtggcattcgatttcagccactcccagatggagagtggttaaaactggaggaggcagatgtaacactgttggctaggctgagctgctataaaggcgctctgagcgtgggctccccttgttcccctgctctggccaacaggattatgctccccttcgatagagatatcgaggcaaatatccccagctcatgtcggtactctaggtactctgacgacatggttttcagcagcaattgctggatcgacatcgcggctctggagtcaactgtggatgagatcctatcgacatcagggtttagattgaatcggcgcaaaacccgctgtagcggaaaaggcgatcgccgcagagtcaccggcgttttcgtcacccccgaaggggaactgagtattgggagtaaaaggaagcacgaaattaagcggctgctgtacgattatttgaccaaggggcaaggcgatgccgacgtgatcctgggccttatacaatttgccatccaggttgaacctaagtgggctagtgtcttactggcaaagtacgccaaatatggagaagcccgtcagtacggtgtgataggagctctccggaacgcctctgagtga

SEQ ID NO: 12140 - RNA, 957 nt, synthetic construct
  source 1..957: mol_type = other RNA
atggaggccctgcctgtgtccattgccgaccggatctgcttcgacctcggaatgactaatcgccagcttttggggctggtcagctccacagccgatagatatcattgtttctctgcaggaggccgaaagatagtcgctccaagacccgacctgaagttggttcaatgctggatttcagactatatcaacaccgaattcgacatagatctgccttacgctacggcgtacaagaaaggttcttcagtgtgtcgcaacgcaggactgcacgccaagtctagccactttctgctgcttgacatttgccatttctttgagagttgcacccagcagatggtcaggaatctgttctcgggggggacctacaggcccacaaatgccgagttccgctcaagactgaccgcggatgatgtggacctactggtagccctctcttgctatcgcggctccttagcgaccggaagcccatgttccccatttattgcaaaccggatcatggcatcattcgaccacgaaattgctgcacgactgggcgagcgttttgtgtatagtaggtacagcgacgatatttgcatctctagtacagaatggatagattctgctgagatcagcacttttgttgggtcccgattgaggcaaaaagggttcgacctcaacagtgataagactcggtgtttcggccgcggccacctcagaaagatcacaggcatctatctggattgcgatggggtcttacggctgggccctcagagaaaagctgaactaaagaggtccttgtatcaggtactcatgagggaatgtgaccgggagtgtgctcttcgtgtgctgggtcatctttcgttttgtaaacaggtggagccggatttttgcaatgccctcttggccaaatacgcctcctacggaaaagcagtgagcagcggtggagtgatgcccgctctcgttgagttagcctacggctga

SEQ ID NO: 12141 - RNA, 909 nt, synthetic construct
  source 1..909: mol_type = other RNA
atggctgacgacttactgctggatgaggaatatgttaccaagctggtgaacagcagcgccaggtactacctcactcacctcctagagatcaagggtaaaaaaagaaaagtacacaagcctttgccagacatttgtctgctgcagtactgggtcatcgagaatattctgtctcaagctcctacaccagcccgttgtgccactgcctatgagaagggatcctgtatcctggccaacgccgcagtgcacaaggacaatagccatatcatgcaactcgacatcaaacatttcttcgactctatcacctctgatatggtgttcgattactatatcggcctagatgcgagactctctgacgctgatgcccgcgcccttcagcgaatatccacctatcgggggactcttacagttggctcgcccattagcccctttttagcaaatcggattatgatccctgtggacatagagatccaggaatgcctgccatccggaataacgtacacaaggtacagtgatgatatgtgctttagttcaccggaattcattgaacctcagctcattgacgcgattcaggaggttttgtctaggtactccctgcgcttaaacacggcaaaaacccatttttccggtcgcggtgaccgacagaaggtgacaggggtggtgttgattgcaggcggcaagctgtcattgggaagcatgcggaagtctgctctgaagaaaatgctttatgagttcgtccgttacggaaaaggcaatccctccaagatactggggcacatcaacttttgcaaatcaatagatccagaaagcgtcgaaagcatcctcatgaaatattcgaccagggggcccgctgtagagcttctgaaggccgctatcgcaagaagtgaatcagagagaattagtgagggctga

SEQ ID NO: 12142 - RNA, 921 nt, synthetic construct
  source 1..921: mol_type = other RNA
atgtcagtgctggatctcatggcgtttgacctgttgttagatcgagactatcttgagagcattctacacaataaaagggggcagtatcggaggattagactgcagaacgatagagtcgtttggcagccctctgctaccctcgcattgatgcaatattggctcgtcgactggatctctgagatggacaaaagggagcttccctttgctaccgcctacgaacccggaatgggcattgtcgtgaatgccaagcgccacatcggtgctaaacatgccctggcgatggacatccataagtttttccctagtataggggcacacatgctgggaggctatttcgccagcactattgaggagagcggggcctccgctggaattgaggatagagacataggcctgcttctggacatagcattatttaatggcgggctcgttatgggttccccttgcgccccatacctggccaaccgagtgatggcccccgtagatgaacgtatctggctggaggtagctaacacgagagggctgacatatacccgctactcagacgatctcttcttcagctccccggagtggatcgaaccttcaatcgtgggcgaaatcgcaattctgctacaggagtgcggcctccaggtgaatagttccaagacccgcttcatgtcagaaggcacaggaatcaatattgccggcgtgtatgttgggcaaaagcggatcactctgggccagaagaggaaacgggagttgaaggaacgtttgtaccagttctgtactaacgataaccctaccccagatagtgcacggtctttacttggattcctctcgttttgtaagagcgtcgaaccatcttacgtgggatttatgctgacaaaatacagcacatacggtggtgacataatgctgcgcatcaaagacgcttgctcctga

SEQ ID NO: 12143 - RNA, 966 nt, synthetic construct
  source 1..966: mol_type = other RNA
atgtcgctcatcgaaaggatctcccgttccctggacattgacgagaacctcataaaaacaatcgcgagaacctctaataagtactatcgcgttttcagcatctccaaaaagtttggtggggtcaggtccatttaccaccctagccctatacttaaagtgtttcagtactggctggtccaaaatctgatttctcacctacccgtcagtgagcatgctaccgcttatggattaggatgttcaattaagcgaaatgctcagctgcacgccgccgccaagcatatagtccggatggacgttaaaaacttctttccaagcatcaggtttcagctgttggctgacagaatcaatgcttttcgggacaccattccaggaggcgccagtcttacggaagaggatctccaactcattaatggaatctgtttcgtgcgagggcgcctggtgatcggctcagtatgcgcacccgccattagcaacgccgtaatgtatccgttcgattgcgaagtgtcacagcaggccagggcactgcacttgacatacagtaggtacgcggatgacatcgtgttctctagcaatgaatggatccatccaagcattgtggaggatatagacgggcgcttagggaaattcggcatgaaactaaatagggagaagacgatcttcatgggcggatcagaccggaagatggttactggtatactgttgaatacaggccgactgtccattggccgggccagaaaagagagtatcaagaagatgctctaccagaagttgagaactggggccggtgataaccggaagatcctgggttatcttaactatctgagagacatcgaacccgatactttcaaccgcatggtggtcaagtacaactctttttttggcagaaacattatgcgtgtgcttacagaggcccctgcagatacccgcaaagcacaggcggaggcagctcctaccaaaaagccctga

SEQ ID NO: 12144 - RNA, 912 nt, synthetic construct
  source 1..912: mol_type = other RNA
atgggcatcgaaaatcgtattgccaataacctgggacttgacccacagtacatcatcaatatatctaagcggaacgatctgtatcgcaagttctatattaagaaacgaaacgggaaattgagagagattcttcaccccagcaaagagttgaaaatcatccagatctggttagtgaagaacatttttgatgagttcccggtgagcgagtatagttatgcatacagcaagggaaattccataaagaataacgccaaagagcattgctacagtaattatatcttccaggcagatatctctaactttttccctagtattgatcgggctaaactggagacatactttgatgagaacaaattcatagtcgacaaactgggattgaccgacgaagacatagacttcattctggatgtgtgtctctacaaaggtgagtatctggtagtcgggtcatgcgcttcaccctgtatctccaacttaatcatgtacaaattcgacaacgaactgaacaagaaactcctaaaagaaggtaagtacatctataccagatatgcggacgacatcgccatttcatccaaaaattatatctccgtcacaattagggatattgtggaatcggaactcaagaagatgggtttttctatcaataatcagaagacccacttttctaacaagaagagccggagaaggattacaggggtggttctcgacaataattcctgcaaaatgacgattggcaacaaaaagtacaaaggatttcaacgcaagctatataattacctggttaaaggcgagggcgacgaggggtatattaagggctacctgagcttcatcaaggaccttaacatagaacaatacaaacagctcaagaagacttacaagaggtacgataagaagaagaagtttttcactgattga

SEQ ID NO: 12145 - RNA, 924 nt, synthetic construct
  source 1..924: mol_type = other RNA
atgcgcctaagcgagcgcattgcaaaagggatcggaattgacgaaagctacgtgatcatcattgctagccggaataatctctacgccaagtactacattccaaagaagaatggaaggtacaggttgatattacagccctctaaggagttaaaagtattacaacattggctgctgagaaacatctttgcatatttccctgtctctgaatattcttcggcatattccaagggaaactcagtgagaaaaaacgctgccgtgcataaggaaggtaggtatttgctccacacagacatcactaattttttccccaccatctcaaggaccatgctcaagcaatactttcagtctaacgaaagtctgacccggaaactcgggatggccgacgaggacatcgaacttatcctggatatctgcctgtacagaggcgagaatttggtcgtgggctccgtggcatccccgcagattgcgaacatgctgatgtatgcgttcgatctggaactcaaacagatgctagatgggttcggcagttttcgatacacacgttatgccgatgatatcgttattagcagtatgtcattcattgacgaacaggttctgaaacagaccgagcagcttatgattaaatacggcttcaaaatgaaccatgagaagacttactacatgggtaagaacggcaaacgacaggtgacgggaatcgtacttgacaataaccgcaatgctctgacaattggaaacaagaagtacaagaagtttcagagaatgctttatgactacctggtcaagggtcacggggatctgggctacatcaaagggtatctggcctatatacaagaggtttcccgtcagcaatatgaccagctcgctgagatatataaacggtacgatatagagaatgtgttgtttcacaatgccaacggccggtga

SEQ ID NO: 12146 - RNA, 903 nt, synthetic construct
  source 1..903: mol_type = other RNA
atgaacctgttggaacagatgaaccgtgacctgggaattgacaaacaatacatccgaaattgtgccaaaaggaacaatctgtacgccaggtactatataaaaaagaagaatggcgggagacgggaaattctgcaaccgagtaaggagctgaaggtcttacagtactggcttatcaacaatttctttaaccagttccctattagcccctacagttccgcctatcagaagggctgttccatccgcaaaaacgctgactgccacaaatatggcaagtatatcctccacacagatattgtgcattttttcgagtccataaccagcaaatctatgaatagctttttcctccgcaacaaagacatcctaggtgatatgcacttaacttttgatgagactagactgatcttgaatctggttctatacaagggcgcatacttggtagtgggctcagttgcttcaccaatgatttccaactgttttatgtacgagttcgatatgaaactgggagagatcattaccaagcggaatatgaaatacaccaggtatgccgacgatatcgtcatctcatctgataactacattgataactctatccttgatgaaatcgacattctcctcaatgagtatggtttcaaacgaaacattgacaagacgtatttcatgtgcaagcgcaaaaagagagaagtgacaggactcgtgatagacaataatgataactcgctgagtatagggcataaaaagtacaatcagcttaagcgggacatctacaattatctgataaagaaacaggggaactgcaatcagatcaagggaaagcttgcacatctgaaaaacgtgaacatcgacaagtatattgcgattaagaagatctactccaagtatgacaaaagccacgaaattttttga

SEQ ID NO: 12147 - RNA, 924 nt, synthetic construct
  source 1..924: mol_type = other RNA
atgagtctgttacagaggatgtcctctgaactccgtctagatcctgattttattatgtccacggtcaattccaccaaaaagtacaggatctacaaaaagggctccaaattcatctataatagcagtggtgagctgaaaactctgcagtattggttgaattcaaagatcttcagcatactcgagtattctaaatttacagccgcctatcaaaagggctgctcaattaagaaaaacgctagcattcatagcaagagcaactacatcctgcacaccgacatagaaaacttcttcaataatatcaccgagtaccacatcaatattctgcttgaggagattaaccagctcggtaagtctgataaggaactgatcaaaaagatcatcttgtacaaggggcaccttgttattgggagcgtctctgcaccccacatttccaactgcgtcatgtacaaattcgacattgagttatatgacacaatcatcaacaacacaaacatgaaatacacccggtatgctgatgatattacgatctccagtaaagagtacataactcatgacgtgattaaaaaagtggaagcactgctcgttaagtacaagttctcaatcaacaacaacaagacttacttttcgtcaagagcgacccgaagacgcgtaactggaattacaatagacaattccaccaatgagctaagtctgggacacaagaaatacaagttcatcaagaaggagatctacaattttctggtgaaagagcaggggtgtaaagataagatacttggaaatttggccttcataaaggacatcaactctaagaagtatgacgaactcaagtctgtgtatctgaagtatgacaaggaaggcatcgtgtttagtaaagaagagaaagacattgaactgaaagatgaacatgagatttcaagctattga

SEQ ID NO: 12148 - RNA, 939 nt, synthetic construct
  source 1..939: mol_type = other RNA
atgtcaatgctcgaacgcatttcgaatgatcttaacttgaaagtgagctttatcgagaatgtcctgaaacaccccaagaagcaataccggatatattacataaggaaacgaaatggcggacagcgcaaaatctatcacccaagtcccgtgctaaaaaccttacagtattggctcgtcaacaatgtgttcaatgagtttaacgtgtctatctatgccactggatacattaagggaaagtctattaaggacaatgctgaggcccataaagatagcaactttattctgaacatggacatcgagaactttttcgagtctatcaacaagaaacacgtcaacgagctggtgaatgcaaacggtgaatattcctcactagatatctatcacctgaacaagatctgcttctacggcgactttctccccgtcggctcagtatgcagcccgcatatctccaactgtataatgtacaagttcgacaatgaagtcgttgagaagctgcctaacaattttcggtatacaagatacgctgatgacattactgttagctccagtagctacataaatgataacgtgcaggtgattttagaagaattgctggagaaatacgagttcagggttaatcacaataagaccagatacatgtccaaaaaacagagtcaaatgattacgggcctgaacgttaatgatggcaaggtgacaatcggtactgacatcaagaaacagttgaagaaagacctgtataataacctgaccaaagggaccggggatagcgaagtaattcttgggaagctcaacttcctgaaatctatcgaaccagactacttcaacaagctgatcattaagtactccaagtatgcgaatgtgcttaataaactcaagaacgacgtgaaggagcagaagaatatccctatcgagattaacaagtcaatagaacatacatga

SEQ ID NO: 12149 - RNA, 915 nt, synthetic construct
  source 1..915: mol_type = other RNA
atgaacattatagacattatggctgatgatttgaagctggacagttcctatatcctgaaaattgccaatcggtctgacttttattacaaggactacacaatcaagaagaaaaatggaggattccgacatatttcacagcctagcccagaattgaaaacacttcaatattggatcgtgaagaacattctatgcaaactccccatttccaatatcgcttctgcctacaataaagggaacagcattaagaaacatgctcagatacatagcggtgcaaaacacattctccacaccgatatcaataattttttcccaagcatccactttagtcacctctccagtatcctattcaagcacaaatacatattcgagaacctgtccattgatatcaatgacagccttccgtacatctccaaaatttgctttaggggggacggtctgtccataggcgccgtctctagccccatcatttctaacatcattatgaactcgttcgatgaaaggctgtacgattattgcaaggcaaataattacctgtgttcacgctacgccgatgatatctatatcagcagcaactcttatatcaacgactcagtggttgtgttcatatcaaacctcttagacgacctggacatgtcgatcaatagtagtaagacccgtttttattctactaagtaccgcatgtctgtaactggcttaataatcacaaacgattcccggattacgataggcagcaagagaagatcagagatagagaagatggtgtacaataaaattgtcaacggaattggcgacaaatattcaattatgggctacctggcgtttctgaaggatatcgagcctaacacctataacaaccttatcatcaagtattccaagtactgtgacggggatgttatcaataaaatcttggaatga

SEQ ID NO: 12150 - RNA, 924 nt, synthetic construct
  source 1..924: mol_type = other RNA
atgactttgatagaaaagatttctctagacctcaacttagataaactttatctggcccggattatttccagatccggcttttactacaaggactttataatcccaaagaagaatgggggatttcgccgtataagccaacccagcgccgaactcaaaacgctccagtattggatcaccaagaatatcctgtgcaagatccctataagcaaagcagcgtgtgcatacaagaaaggcgactctattaagaaacacgcccttctacattgtaaatcacgacacatcttgcatactgatatcaaggatttcttcgaatctgtagattcatccaagctgataaagattctcgaaaaaaaccacagcgtgtttgaggatattaacctggactacaacagcagtatcgatgacattaggaagatttgcttcaggaagaataaactctgtattggatccgtttcttcgccgatcatctcaaacatcgtgatgtacgatttcgataatgctctgaccggatattgcaaagagaatgggctgatttatagtcgctatgctgacgacatctatgtctcttcagacaagttcattaaccacgacatcttggagtttatttctaacgagttgaataagtgcggcctgagtatcaataggtccaagactagattttattcctccaaatacaagcggagcgtgaccggtatagtgatcaccaacgatagccatatttcagtcggtaccaaacggcgaacgatgatcaagaacatgatttacaacaaactggtgaattccgaaggggacagtaacgagatcttaggctacctgagtttccttaaggacatcgagcccgatacttaccagagatatctgatcaaatactcgaaattctgtacaacagacgttcttacagccctgagcgataaaaatacatga

SEQ ID NO: 12151 - RNA, 918 nt, synthetic construct
  source 1..918: mol_type = other RNA
atgaatatcctcgagaaaatttcccttgatctcaagctcgatctgacttacatctcccgaatagcggacaggtccagtttttactataggaaatacaccatcgagaagaaaagcggcgggtttcgggagatctatcagccatctgcagagctcaaaacactgcagtactgggtggtgcataacgtgctgtgcgccttgcctatctcagaggaagcttgcgcatataataaaggcaattcgatcaagaagcatgctgaaaaacaccagaagtctaagttcttattccacacagacattagaaacttctttccgtcaattcatatgtcccacctggcccctatcctgagagctaacaagggaatttttgacaagctgggcctggatcttgaacagtctatccagaatattgggaagatatgtttcaagagtgactcactttgtataggaacggtatccagtcccatcatatccaacatcattatgtacgctttcgatgtgcagatggccgagtactgcaaagccaaaaactacatttatacccggtatgccgatgacatatacatcagcagcaacaatttcatccccatcgatatagtttcgtttatcgcctctaacttaagccaaaatggtttcaccataaactctggaaagacaaagttctattctaccaaatatcgccgcaagattactggactgattatcactcacgatgggaaagtcagcgttggtctgcaaaaacgtaacgaaatcaagaaaatggtctatgacaaactgattcacaataagggcgacagtctaaaaattctagggtacttggcgtttctcaatgacgtggatccaaaggcctataatgacatcatcattaagtacagccagtactgttccggcgacattatttcagcattgaacaagagctga

SEQ ID NO: 12152 - RNA, 915 nt, synthetic construct
  source 1..915: mol_type = other RNA
atgaatataattgctagaatggcacaggacttcaagattgatcattcatatttgagcaagatcgtgtaccggtctgccttctactacaaggactactacattaacaaaagggatgggaagacccggcgcatatctcaggcaagtccccaattgaaagccatgcagtattggatagtggaaaatatcctggccaagattccagtcagtaaaggggcttatgcctataagaaaggtgattcgatcaagcgccatgctgatatacaccgactcagcaagcacattttccacacagacataaaagactttttcttcaacatccacttcgaaatgctgagatgcgcattaagcaatcatagccatatattcgatgaaatcggtatcgattcttctgaggccttttcagacattaagaagatctgttttcgcaatgacgagctttgtatcggaactgtatcatctcccatcatttcaaacatcgtgatgtacaatttcgatgagaagatgatcgactattgtaaccgtaacgggtggatttattccaggtacgctgacgacatttatatttcgtccaactactacatacctaaggaggtcaagaattttgtgtccgccgagctgtccgacaatggatttaagatcaacacgaaaaagaccagctttatttccaacaagtattgccggaaagttacaggcgtcgttctgagcaatgatggcagagtaagtgtgggcacaaaacagcgaaatgcgattaggaaaatggtgtacgacaaaattatccacaaaaagggcagtccagaaactatcctaggatatatcgcgtttctcaaagatatcgaacctcaaacctacaacaacatcatcatcaagtactccaaatattgcgcaggcgatgtgattgacgagattagcaaatga

SEQ ID NO: 12153 - RNA, 912 nt, synthetic construct
  source 1..912: mol_type = other RNA
atgaaaatggtggacaaaattgccgccgacctgtgtcttgatcctgattacatcgcctcagtcattaagagatcaaggttttactatcgcgattactacatagacaaacgagacggtggccggcgaaaaatttcccagcccagtcccgagctcaaaactcttcagtattgggtggtgaacaatattctgaataagtttcccatcagcaatagtgctcacgcataccagaagggctcctcaataaaaaggcatgcacaattccaccagaacagcaagcatatattccacaccgatatctgcaaattctttcctagcataacttacgaacacttgcagccaattctgctttctaaccctaaactattcgaagacctggagattgatttagactccgttgaaaccattcgggacatctgctttcgggaaaattctttatgtattggcacagtttccagccccatcatctccaatatcatcatgtaccagttcgatgtaatcatgctcggatactgcaagaaaaatcatctgaagtattctcgctatgcggatgacatttatttgtcctcgaactcttatatcgatctggcccatgtttcatttgtgagtgacaccctccgtaagtttgggttcagcataaacgagagtaagacctacttcagctcaccgaaatatagaaggaaagtaacaggactggtcatcggcacggactcttccgtgactattgggagtgaaaagagagcattcatcaagaaactggtctatgacaagctcgtgcacaacaagggggacggtaacagcattctaggatacctcgcttttctgaaggatatcgagccacagacatataacaatatcatcgctaagtactctcaatactgtaaggaggatattatagaggccttgaagaagtga

SEQ ID NO: 12154 - RNA, 963 nt, synthetic construct
  source 1..963: mol_type = other RNA
atgtctagcctgatcacaagaatttcatcgaatctccagttaaaagacgactacatttcaagcatcattagacgctccaactattactacaaggactactacattcctaaacggaacggaggacgtcggaagatttcccaggcctccccagagctgaagaccttacagtattgggtgaagacaaatatactctcacttctgccaatctctaaggctgcgtttgcctataaccgaggtaacagcattaaaaaacacgcgacatttcataaggaaagctacttcatcttccataccgacataaaggattttttcccgtccatcaccagtgagcacctggtggcagagttggcagctaaccgtggcatcatcgaggctgccaatctgtgggatgatgatattttggatgtagtgagctctatctgtttccggaggaatcatctgtgcattgggaccgtatccagcccaattatctgcaacatagtcatgtacgccttcgacgagcattttacgaactattgcaataggcggaattggaaatattctagatacgcagacgacatctatattagtgctcaagaatatctcccctcaagtctgcagtctgaggtcaatgagaagcttcacgaaattggcttcagttccaacgcctataaatcatggttttgcagtaagaagtgtcgcagagagattacggggctaatactgactgaaactggcaaagttagcgtgggtcttgaaaagcgcctagctatcaaaaaaatggtttacgagaggatcatgcacggcaggggggatcccgataccatccttgggaacttggcctttctgaaggacgtcgaacctaactcctataattctctcctgatcaagtacgccgcctactgtgacggagacgtgatagatgcaatcaagacaggccctaaaccccaccgagtgataactctggatctccccgacatctga

SEQ ID NO: 12155 - RNA, 924 nt, synthetic construct
  source 1..924: mol_type = other RNA
atgaattccattatagacaggattgctcgggatctgagcctcgaccgcgattatatcgcaagtatcattcggaggtcatccttctattacaaacgtttcactattcccaagcgcaatggagatcctagggtcatctatcaggcctctccggaactgaagtcgctccaatattgggtcagggagaaaatcctgaaatttctgcctgtgagtaacgctgcgtttgcctatcaggccggcaattctatcaaaaaacatgcggatttccataaggaggcccgctttattttccacacggacattaagaactacttcccttccattcacgagaaaatgtttacagatatcctaatcgcccaccaggataagcttcaagcacagggaatgtggttcgatgacatgtgcgacgtgattgcaaaaatttgcttctatcgaggcaggctcagcattggtactgtgagctcccccatgatctccaatatagtagcttatcgatttgacgaactcataattgcctattgtagagagcgcgggtacagatacagtagatatgctgacgacatatacatcagttcaaatcggtacataagccagtctaccaagaagtttgtagaggttagcttatacgagtgcaatttcaagatgaacattagcaagacatggtttcgttcaaaaaaatctcgaagaaaagtgacagggttgatcataaccgatacaggccgcgtgtcagttggattggaaacccggaaaaagatcaagaacatgatctacaataggcttgtgaacggcaacggatctccagaatctattctgggttacctggcctacctgaaggacgtcgaaccacccacctacaacaagtacatcatcaagtattccacttactgtgacggcgatgttatctcggcaatcagacgggggagctga

SEQ ID NO: 12156 - RNA, 930 nt, synthetic construct
  source 1..930: mol_type = other RNA
atgtctaagagcttggtggaggaaatatccgcgtcgctcaggattagcacggaacgcacccaagagatcattattaacgcggacaaactgtacaagatctactccatacccaagcatagtggggggaatagactgatctatcagccttcctcgcagctcaaagccatccagtactggactttggacaacattatctctttatttcccgtctctgatagggcattcgcttatgtgaaaggacggtcaattgccagcaatgccaaagcacaccgccaatccaaataccttttccataccgatattcacaacttcttccccagtatcacctctagtctcttcgataagcagtgccttaatcgtttctctagcatattggaggaaacaggattttcctttggcgacacaaactcagtcctgcataaaattctgtttcggaaggataagctaactatcggcgccgtttcctctccagcaattagcaatgccgtgatgcacgacttcgaccagtcactgacaaactactgtcttatctcagggtatgtttacactagatatgctgatgacatatacatcagttcaaaaagcctccttcctaaacagatcaaggaggacatctttgccgaaatgcacaagtttggattcagccctaactacaagaaaacatccttttggaatggctcctctcatctgaaagtgactggtgtgaacgtattagctggttcaggccgactgaccatcggcaccagaaacaagaagatgattaaggggatgctgtatgagtatctaatgcacggtaagggcgatccgacgaaaatcctgggatacctggcttacgtcaaagaaattgagccaagcttctataataccctcatcataaagtatagcgagtacaggaatgagcacatcattaagtatctgaaggacagttga

SEQ ID NO: 12157 - RNA, 933 nt, synthetic construct
  source 1..933: mol_type = other RNA
atgaattttttgaattatctccaggccactggctatcataataacctgctcattgaagtcataaacaatctcgataggtacgtctataagttcaagtttaaaggtaagtggcagatagcaccaaaatgggagctgaagatactgcagaaaatcttgaaagagtacctcaccaagtattacggctcaattatcagcgagaatgctaccgcttacattgtggggaaaaatctgtcttacaatgtgtccaaacatcaaggtaatagctacttcttcgtgacagattttaaaaacttcttcccctctattgagtttgaaaaggtcaagtacatccttaaatccaatcttaacaaggaaacagaggactccatagatctcatcctgaagatcgttttctatgataataagctgcagtatggattccctacttcaccaattatttcgaatcttatcctgatcgactttgacaagaaaattgagcaatatctgctgaactacttcaaagggaacaatattaagtacagtcgctatagcgatgatattacaatctccgcgaaatacaagattaacaagaacgacattctcagcataatcgaaaacctgatcaattcagagtatacgtatctcaagttaaacttgcagaaaaccagattctttgagaaatacagtcactctccctatattactggacttgtgcctctgaaccaacgtatctctatcggcaagaagaagtttaacatcatcaagctaaacacctatctgatcctgaataataaggccatagaaaacgacaacttttttcggaaagaaaatcagctacagtcctatttaaactacttatacctggtagacaagcacaactacatcaaattgaagaactacttcagcaaaaactacatcaatagcgacattttcaacagtttgtttcgaaaatga

SEQ ID NO: 12158 - RNA, 930 nt, synthetic construct
  source 1..930: mol_type = other RNA
atgtctttcttggagtatctggaagagaaaggatatcctaatactctcctgaggaaaatctttgacaaacacgaagactatgtgtaccattttcggattaaggggaaactgcaaatagctcccaaatgggagttaaagattctgcagaagatcctgaaagattacattactgacaattacgcctcgtatatatctaatttcgcaaccgcttacatcaagaaggaaaacatctcctataatgtgtccaaacactttggacgcaattatttctacgttacagatttcagcaacttttttccctccataaagttaaccaatatcaaggactatctctcaagtatctttaaagatgaggacagttcatcgcttgatatcatctttaacatcggcttttactccgactccttgcagttcgggttccctagcagcccaatcatctctaacatcgtgatgacaaaattcgacaatcttctgttcgaagaactgaagaccaaatttccaaagaacaacatagcctatagtagatactgcgacgacctcacgattagttcaaaatacgaaatctccccgaagattattaacaacattatcaacagcctgctgataaaggagtacacatacctctcaattaacaagaggaaaacacgaagcttcgagaaatactctcagtacccatatataacgggcctgattcccttaaaggataggactaccattggtaagaaacggttcaacattctcaaactaaatatctacctgagcctgaagaataaaaagatcaagaacaccgacttgttcgatactgatattgcgctctccagctatctgtcttacgtctatcttgtagatcctcataattacaaccgtttgaaggagtatttctctaaacgctttaagcccctagagattaagaacctttttaagaagtga

SEQ ID NO: 12159 - RNA, 915 nt, synthetic construct
  source 1..915: mol_type = other RNA
atggggaacaaatcagacattatagagctcatcagcattaggacaggcatatcttccaaaaaaatagaagagacgatcagtagttcaaagtgtgagtatagcgtggtgcatgcaaaaatcaagaagaagaagcggatcttctacatcccctctccgcagctgaaaattatccagctgcacctgattaaaatagttttggaaggatttgaggtgtccagtcatgctcacgcctacattaagaacaagtccataaaaaccaacgtcaactgccatatcggtaatacttttttcttccaaaccgacatcaaatccttcttcccttccatcaaggccaatcacattaaaaacgtgctgtcgaaggacgactccataagcaaggacgatattggcctaattctgagcgccgtggtgccttttgagtcactggatctgggatcgcccacctcacccattatctctaatatcatcatgctcgagttcgatcagaagattgaaagcttgatccaggagaattataagggcgctatttatacccgttatagtgacgatatcactatctcttctaagcagccaatacttggcattgacaagatcgttgacaaaactcttgaggagttcggctttgaaatcaacaagagcaagacaaaatacacccagctgatcgacaaggtaaaaattactgggatctttttgcacgcggataaaagaatgaccgtcggaacaaattttaagcgcaatctcaaacagcaactctatcttctatccaatggtttagatcctcagatagataacattcagattatggggatgttatcttacatccgagacatcgaaccagaatactacctgtccctcgtccaaaaatacagttcaagcacaaagagcattatcgatattatcaagtctgggatgtga

SEQ ID NO: 12160 - RNA, 1554 nt, synthetic construct
  source 1..1554: mol_type = other RNA
atgtataggttcaaagaaatccagggcaaagataactttgaacgtctggaactcgttaatgtgatggacatcttctaccttcaacacaaaaaaccatttttcaaggacattgtgaagttcgactttggctatacacttgtgtttaccgacggcgtgaatgattttgtgagtatagatcatccctctcgcctgtgggggaaaaatttcatcccaatcaagaacaatgaggaaatcagttacattcataacgacaaagtcaaaatgtcactcgacatatttaacaacaacgagaacgtgattgacaacttaaatgacctggaagagaaaatagagaactacttgtgctctaattactataacaagatcagttaccgaacagtatacaacaagtttaccataaaggagtttgataacacattcaccgtcttcaagctactgagtgaaaccaagagcattcgcaatacagttaagattcagaacttgatcaagatcgacaaagatctgattaacaagaaagaccttaacttgatcgtggacatcatcaacaacttcactaaccaaaaaacgagcgatgccgagaagaataacagctatctcaagaatatcatcaagctgttacttaagagcttcgaattgaagtactccaacaaaaacaaattcgagacgttctacattccgaaaaccgatggtactaagcgagaaattaatagccctattgaagaaatcagacccattctgaagtcgcagtcaaaaaagctgaatgcaatactcgagtataggattagcaagtataatatcgaggacaacattatagcgtatcgggatgggaaaagcatcaagaacaatgctgattaccacaaagaaaatgacaccatcatcaagtttgacgtatccaagttctttgataattgtcacttcgactattggaaagagaacctgtttttcatcctcaacgataacaaaaatctgatgaaacggtttgagaaggaaatggagggatttctttttcgcaaggataataagggattgtatatggggtcacccctgagtcctgctgcctctaatctcattgtggtgcctgtgatgagatacatcaagaacgtcatatcaaagttcaagtccgatattaaggtttctatatactccgacgatattactttctcttccaaagagataaacgatgagttcaatccatcgagactgaaaaatctcgtcaatcacgccttcgagatctataatctggactttaagatcaaggaagagaaatcactggtaatgaagaatcggaagagaaaagttactggactgagcatcaatcagcataatcaggtcactatctcccagaggcggtatcgtgagctgaggaccattcttcacctcttgtctaacggcatggagtttaaagatattaagggctttgacaatgagattgagttaacaagcctaattaactactacctcgatgtggacatgaccgggaaaatttcccgcctaatcaacaaatacgagaagacattcaatgaactgaagtccttcgaatctggtgaaaaatga

SEQ ID NO: 12161 - RNA, 1506 nt, synthetic construct
  source 1..1506: mol_type = other RNA
atgtttaagtttaacaaggtaaacaacctgaagatgatcggtgagaacgaaatccataacgaccttatgctggagagaatgatgttcgtgatgaaacccgtcttcagacgcctcgagaagaacaataaggggaaactcgtcatgctgtttagcgatggccgaaagaactacttactgtctacaagcgataagcggtactattcctctcccctcctatcctatgagggagacgagtataaggaactagagtccgcctcctacattgagagtaatatcgatagtctgaaattgctgaaagtgaagatatccgatatattgagcgacaatcaaaatattcgcatcaggaaaaacctgatgtttacagtctacgaagacgtggatgatatcaagctggttcagctgctaacccgaggcgacaagaagattcaatctgcattcaatatagagaacgttatctcgatttcaaaggacaaaatcaaactggacgatttcaaccttattaaggacctcctgaaccactacataattaagggcatcaaagatgtgtatatctctaataccatcaagctcttgatcgaagctcttgaacttaagtattcgggcaagaaggcatttgacacgttttatattcccaaaagtgatggtaccaagagggagattaattcaccaatcgaggagattagaccaattctcaaagaacagtctaaaatcctgaacgctatactcaaattcaggatcgacaaatacaaactggacgaaaatattatcgcctaccgcgaggggaagtccattaaagataacgcaagcctgcataaggaaaataaggtgatcatcaagttcgacatctcaaagttcttcgacaattgccacatcgattattggaaggaaaatctgttcttccacttcaaggaggacgaagatctcatggacaggctcatgaaagagtttgaggggtttctgttcaggaaggacaataaagggctctacatgggttctccgctgagtccttccgctagcaatttaatcatggttcctgtgatgcgctacattagcaatatcctgaagaagttcaaaaccgatataaaggtcagtatttacgccgatgatctgacattcagctccaaagtaatcaacgatgagtttaatgcgaaacggttaaaaaacatggtcaatcacgcctttaaggccaacggactggactttaaattgaaggaggaaaaatcactggttatggtgaacaataaacgaaagatcactggcttgacagtgaaccacagggacgaggttaccatatcacagaaacgttatagacagttgcggactgtaattcatctgttgagcaatggagtggagtttaaaaacattaagggattcaacactgagcttgaactcgtgagcctaattaactattacttagatgtcgacaccactggcaaagtgcggcggcttatatctcgcaatgaacgtgcttttaacgaacttaaaagaaagtccgaagtgaagtga

SEQ ID NO: 12162 - RNA, 1503 nt, synthetic construct
  source 1..1503: mol_type = other RNA
atgttcaaattcaataacgtggagaggataaatctgatcggaaataggaagatgaattacattgagcttcaggaaagcttatatacactgaagcccaagttcaagaagatcgtcaaaaacgataaaggagatttcgtgcttattttcagtgacgggaggaaagagtacattggcaatacaaatgcaggatcaatgtttaggccaaaaatgatggtggtgaactccatcgacgattataatctgttttccggcgatggccaaccttatcgcgtcgagatatcaagcatgagctcacttaataaacatctccgaaggattatcgatcagaactacacttttaacatcatcaccaagaagtttcgcatttacgaggaggacaagattattaaccttatcaagctcaagtctacaaccgaaaacgataaagacatcttcaaaatcgaggctatcctgaaaatcaagaaagaccttatcagcattgaggaactagaactgatcaaagacatcctgaatgattgtttaacttcccaagggaagtatgaatatattctcaactctctggagctcctgataaaatctatagacttgaagaaccggaacgtaaacactttttacacattctacatccccaagtcggatgggactaagagagaaataaatagccctatcgaggagatccggccgatcttgaaaaagcaggccagcatcttgaacgccatactagacttgagaatagacaaatacaacctcgacgaaaacattattgcttatcgggacggtaaatctatcaaagataatgcggattaccacaaagaaaacaagacgatcataaagttcgacattagcaagttctttgataattgccatttcgactattggaaggagaacctgttcttttcctttaaggacgaggactacgtgatggaacgtttcgaggagtatatgaaggacctgttatttcgagaagacaacaagggcctatatatgggaagttctttgtcaccagccgccagcaacctgattatggtgcccgttatgcgctacattaacaacattctgtctaagttcaagaccgacattaaggtcacggtttacgcagatgatatcaccttttcgtccaacgagattaatgatgagtttaattccaagagactcaaatccatggtgaatcatgcatttaaagttaatggcctgaagttcaaactcaaagaagaaaaaagcctggtaatgaagaatcacaaacgtaagatcaccggtctgtcagtgaatcacaacgatgaacctacaattagtcagaagcgctatcggcagctccggactatcatacacctgctgagtaatggcgtggagtttaaggatatcaaggggttcgagacaccattgcagcttgtgagtctgattaattactacttagacgttgataccaccgagaaagtcaagagactcatggacaataacgaaaagattttcaacgagctgaaaaaagaagctggtgtcaattga

SEQ ID NO: 12163 - RNA, 1530 nt, synthetic construct
  source 1..1530: mol_type = other RNA
atgcttagcttgatactgattgacaatgttcttatcgacattaacggcgaaattgtatctgagattgacatccggatgaaaaaaaacatcattagcgacaagaaggttcttgccaaactggtgaagtataacatccgcaataaactgattcagtccatcaaagatatcagttatctcgaggaaaacaataagttcgagaataatgaggagttcaatgatatacacctggagaatatcgagaagatcataaagacttacgatctgctgtctaacgatgagatttgcattaacgagggctaccccgacctgcctgttgtgacatatgacaaaaccctcattacggaattcataaacaacatttccatcaagctgagttatcgcaatctaaacatctctcatcgatatatcgaaatgaatgacggatatctctacattatcacgaataccaatgacatctacaataagtacaacatctacaagatcacagacgacaaggaaatgatcaaaatgattaagtacctcctggatatttccattagtcctgatcaacccaataacaaaccactgctcttggagctcttgctgactaggatcctgattcagaataacaatgaaaaactctaccagcactttaaaatcaaccagggcactaaaattagagacatttatgccccacataatgacataaaagatatctcccgtaagtttaacaacatattcaacgggatgctagaaactcagttaagcaataaaggagtcgaaaagcatctgtttgcataccaaaagaaaaaagggatcttagacaatgcgcttgtccacaagaacaacaagtacataatcaaaatggacatcgcaagtttctttgataattgtcgctatgaggatatctcgaaatatttcaagctactggtgctcggtaaggagaacttcaagaagaagaataacaaggatagcgtgatggatacattgttcaaggagattttcatcaatccggaaactggcgggttgtaccaaggtaatcccgcttctggatccctgagcaatcttctgatgagcaatgtcgccaaataccttaagaacgtgttaatcgattcaggcattacattttcaatctatgccgacgatatcaccttctcatctaacgaaaaatccgaatttttcaaccgaaaatacctgaagttcattctaaataaggcttttgaggtgtacaattacagtaatctgtcaattaaggacgagaaaaccataaagatgagcaacaataagagacggatcaccgggattaggattaaccacaatgatcagtgcacacttgatagaaagatgtacaggttactgaaaaccatattcttcaagttgtcaaagaacaagaacaacatcaacaatatctctatgacctttaacgagctgaaaggaaggatatcctactatcggtatattgacaacacgaacaaaatggaaaacctcgtgaatgaatatcagaacaccctcatcaagctgaaattgataaacgagcctaaagtagactga

SEQ ID NO: 12164 - RNA, 1365 nt, synthetic construct
  source 1..1365: mol_type = other RNA
atgaacgacttgttaatcatttccaaaaaccctttgcggatacttacaaataaaggaatcttttacccgtacgataaagacatcaagattatctctcggtttgataattctgagaaaaagctggttcaactgaacaatattctctttaaggacagctatgacctgctgatcaagatcatgaattactacaagacatccaattctatcgacttcaattactctaagaagtatcttctggagaattccattgaattaagagaatacagcgagttcttttctatgtacagatctttttccagcactccattggtgagtgtgagtaaaggctatatcctgctctaccccaattcgaagattagtaactccaagtatcttatctacaagctaaagagcaaatacgcctcagatattaagctattactcaaacgccgtatgagcctcgaaataattcagctctactgcatcataaaggacctggaggataacaacattgagctgtttaagaagatcaagatagagaaaaacggaaaggagagggaagtgattgatccaaacattaagatcaagaacactctgaaagagatttccaaaatccttgacaaacggctggaccgaaaaatcagcaacttgaaatatcccaacatcatggcctaccgaaagaatgtcagtataaaggacaatgcactcatgcacctgaacaacaagtacataattaaagtcgacatctctaactacttcccctccattgattggaaactgatcaattcaagattcatactcctgctctttcatggggtgacggataaatatatggatacgatcaagaaaggctttgtcgacgagaatgacaaaatgttcctgggcaatcctgtaagcggggttatatcaaacattatcatggtggacatcataaaccatatacagacgatttttcacaagtacgggattatctgttcgtcctattccgacgatattacctttagcaccaatattgacaacaacaagttgttcaacaagaagttcatcatcaaaatctgtaaccaggctttcaagatctataacgacaagttcaagatcaatgacagtaaaaccgtgtacctgaaaggaaatatgcgcaatatcaccggcattaccattaatcataaaaatcagctgaccctttcttcagaaaaatacgatgatatgaggaacaatctctatagttacatgaaaactggttcatgctattatgatgactatgagctgttggggaagatgtcatattatctacacattgatgagacaggtaagttcaggaagctttatgataagtacatcaacatcttcgagagcataaaacgcggcgatgaaaaaattgaagaatga

SEQ ID NO: 12165 - RNA, 990 nt, synthetic construct
  source 1..990: mol_type = other RNA
atgaatcgcgccaatcagtataacctgcccctcatacaagatgggcaaaagttcttgtcagtagcagacgatcagctgattcgacggttcaaggtgaaggacaaaggaaagctccgcgacgtaaacgatccaattccggaattgaaaaatgtgctccgggcttggaacgcggttattactgaccactacgcaaagaaactgaaagactccgacacttcccaggtggctcatgcttacctcccccataaaagtattcagacaaatgccagagcacatttacacagcccggtcatccagttcgacttcaaaggtttttatgacagctgtaagtttgagtacttcaaaaaggagctccgggaacttgatcccaggctagacgaccaaaacgagcacatcgtgaaaagattgctgatcgatcctcagactgggggcgtcacacaggggctaccagtgtctggcgcactggctggactgagtttaatccctttctgggtggaattagggaagaacctgccagacaacatccgttttacccaatattcagatgacctgaccttttcatatgtcggtcggatgccccctggctttaccatccctagcctcacccagaaaatctatgaggcgctgaagaaaacaggactggacttcaaactgaatcccgataagaccaggaggcagaaagaccagtacagaaaggttacaggcattagaatcaaccaccacaatcagacgactccatcgcgcaatgattacaggttccttcgacatgccctgtatgtccttagcaagtctgataaccttgataaggagttgacgaaatggggatttacatctaaatccgcctttgttggcaaggtgtcttacatgagaagcatagattccaccaacaagataaatcgcctgattatgaagtaccgtatgacctgcaggaagcacgacatttttacaacctggatcgatcagacttacaagcggagtgccttcgcctga

SEQ ID NO: 12166 - RNA, 990 nt, synthetic construct
  source 1..990: mol_type = other RNA
atgaacaataacaatccatactcattaccccttctacaggatggaagacagctgctgcacctcgccgatgataggctgattcgtaggttcaagataaagaacaaaggaaagctgcgggacgttaatgatccggtcccagagcttaaaactatcctcaaagcctggaatggacccctgacggactactatgtgcgccagctccagttaaacggtgtctctcacgtagcccatgcatatctgcccaatagaagtattcagacaaacgctcaggctcacttgtattcaccaatcattcaattcgacttcaagggcttctacgatagttgcaagtttgactattttcgggaatctctgcgggatttggacccaaccttggatgaccaaaatgagtacgtgatcaagcgtttgctgatcgatcctaatacaggcggcgtgacacagggactccctgtttctggcgctcttgcgggcctttcgctcattccgttttgggtggaattggcaaagtccctgcccgataatatccgcttcacccagtactccgacgacctgaccttttcctacaccgggcagacccctcctggttttacagtccctgccttaactcagaagatttacgaagtgctgaagaagacggatcttagcttcaaactgaacgccgacaaaacaagaactcagaaagagcaatataggaaggtgactgggatccggattaaccatcacaaccagaccactccctccagagacgactatcgattcctaagacatgctctgtatatcctcagcaagagtgacgatctggacaaagagctcgcagagtgggggttcgcaagcaagtctgcctttgtagggaaagtttcctacatgaggtcaattgacagcaccggtaaaatagatcgcctgatcatgaagtacaggactgcgtgtcgcaaacacgacatatttacaacctggatcgatcaagcttacaaacgaagcgccttcgcctga

SEQ ID NO: 12167 - RNA, 1146 nt, synthetic construct
  source 1..1146: mol_type = other RNA
atgatatatataacggtgaagcaaccacccatgtatcatcagatgacattagaagagtttctattccagaccgaaacaagaccggctgtgatcaacgagaacctcacaaatactaggacctacgagatggagtacgtttcccagcggtttatggataagtttaggttcaacatacccgctctgattcgtaaacttgatgcctttaacgattcaactgccgagttgcgagtgaagcctcggcactctctttaccgcgagtttcacattcccaaaaagtccgggggtcttaggaagatcgacgctcctgagcctgaactgatggacgccctccgtagactgaagaccatctttgaagaggactttcatgtgctgtatcacacctccgcatttgcatatgtaaagcatcgcagcacccttgactcagtaaaacgccatcaggcgaatgagtctaaatggtttgccaaatacgatctaagcaactttttcggaaacaccacactggacttcgttatcaagatgttctcgatgatctttccaatcagcgaggtcgtgaaagatgaacatggcaaagaagcactggtgacagccctggaactggcatttctggatggcgggctcccacaaggtactccgattagtccattgattaccaatgtgatgatgattcccgtcgaccacaaactcgccaattctttcagggatttcaacaggcagcgatatatctacacccgctacgcggatgatttcctcatcagttcccgctatgatttctcattcagagaagtcgagcagcacattgtggacgtgttgaaaagtttcgatgctcctttcacgatcaagtctgaaaagacacgatatgggtctagcagcggctccaattggaatttgggagtgatgctgaacaaggacaaccagataactgtcggctacaagaaaaaacggcagttccaagctatgctcgccagctatgtgatggactcaaagaatggaattttatgggacaagaatgacatccaggttatggagggataccggaattactacagaatggttgagggtgaagccattgacagaatcgtcgaacacgtaggcgagaaatacggggtcaacatcgtgaagatgattaagagtgacctgcggacttga

SEQ ID NO: 12168 - RNA, 1101 nt, synthetic construct
  source 1..1101: mol_type = other RNA
atgaccctggaagaattcctcttcgaagtcgacactaagcctcaggcaatgataaatccaaacttgaccaacacgagaacctatgaggtggagagaatttcagagaaattcctagagagattcgacgtggccaaattggttacgaaattgtcccagttcaatgcttccactgaagagcttagagcgaaaccgcggcacgacctttaccgaacctttcacatccccaagaaatcaggggggctccgaaagatcgatgcccctgagcccgagctaatggatgcgctgaggagactgaagacgatcttcgaagaagactttaaggccctgtatcatacatccgcctttgcatacgtgaaacaccggtctactgttgatgccgttaagcgccaccaggccaacgagagcaaatggtttggcaaatacgacctgtcagactttttcggatcgacaactattgacttcgccattaaaatgctcggcatggtatttcccttctctgaagtgatcaagagcacagtaggcgaacgcgaattaaggaaagctatcgagcttgcatttttagacggtggactgccacagggcacccctatctctccactgataactaacatcatgatgattcctgtcgattacaaactggccaatggattccgggatttcaatcaccagcgttttgtgtacacacgctatgccgatgattttctggtcagctctaagtatacttttagttttcgtgaggtggagaagttcattgtagatacacttaagagtttcggtgcaccctttacaataaagtcagaaaaaacccgctacgggagttccgctggcagcaattggaatctgggtgtcatgctgaacaaggacaacgaaataaccgtcgggcataaaaagaagcggcagttccaagctatgctcgcaagctatattatggacaaaaagaatggcaaggactgggataaatccgacgtgcagaccatggagggatataggaactactacaggatgatcgagggagatacaattgataagatggtggctcatatcggcgagaagttcggggtggacgttgtgcaattgatcaaggatgacctcagggcttga

SEQ ID NO: 12169 - RNA, 1140 nt, synthetic construct
  source 1..1140: mol_type = other RNA
atggtctacattaccgtgaaacaacccccgatgtataggcagatgactctggaagagttcttgttcgccactgaagccaagcaagagatcataaatccaaatatgaccaacacccggacttatgaagtggagagggtggggaataagttcctggaaaagttggacgtagccgaactaatcacaaagcttagccagtttaacgcttctacggacgaactcagatcaaagcctagaaaaagcctgtatcgggagtttcacatacccaagaagtctggcggtcttcgcaaaatcgacgcacctgaaccagaattaatggatgccctgcgaagattgaagaccatctttgaggaagatttccatgccctctaccacacctcagccttcgcttacgtgaagaaacgttccaccattgatgctgttaagaggcaccaggcgaatgagagcaaatggtttgggaagtacgacctgagcaattttttcggaagcactacgcttgatttcgtgatgaagatgttctctatgatttaccccttcagtgaagtggtccgctatgacaccggccgcgaggagttaagaaaggcactcgagctgtcttttctcgacggcgggctgccgcaaggaactccaatttcgccactgattacgaacgttatgatgatccccgttgactacaaattagcaaatggtctgcgagaatttaatcatcagcggttcgtatatacccgctacgctgacgactttttggtcagttccaagtacacattctcctttaaagagatcgagaactatatagtcgataccctcaagagtttcgatgcaccttttacaatcaagcctcagaaaacaaggtatggcagctccgccggctccaactggaatctcggtgtaatgctgaacaaagataacgagatcacaattgggcataagaagaagagacagttccaggccatgcttgcttcatacgtgatggataaacagcacgggacagagtgggacaaatcagatattcaaactatggagggatacaggaactactatcgtatggtcgagggagaggcaatagacaaactggttgaacacgtgggcaacaaatttaacgtgaatatcgtgcagctgatcaaagcggatctacggacatga

SEQ ID NO: 12170 - RNA, 1140 nt, synthetic construct
  source 1..1140: mol_type = other RNA
atgtattacataaccgtaaagcaaccacccagctatcaccagatgaccctggaagagtttctgtttggaggaaacacccagacgagactgatcaacgaaaacttaaccaatacccgcacctatgaagtggagaacatcagtgagagattcctgcagctggttaacgtcgataagctcatagaaaaactcatctggtttaatgaacgcactgactaccttagagagaagcctcgacgggattggtactacgagttccatattccaaagaaatctggtgggctgaggaagatcgacgcccctgaacccgaacttaaagaggctctttccaccctgaagacaatctttgaagtcgacttccaggctttataccacactagtgcttttgcctatattcacaagcgatgcatcatcgacctattgaagagacatcaagctaatgagagcaaatggttcgagaaattggacctgtcaaattttttcggctctacaactatggagtgggtgctgcagatgttcagcatggtcttccctttttctgaagtactgaaagatgagagggggcgggcagagtttgccaaggctattgaactgggcttccttgacggcggcctacctcagggaacgccattgtcgcccattattactaatatcatgatgatccccgtggacttcgaaatagcccggacactcagagagtataaccaccagcggttcgtttacacaaggtatgcagacgattttcagatttcctccaaatacagcttctcattcactgaaatccaaaatgtgattgtcagtatcctgaagaactttaaagcgccgtttacgataaattcaacaaagactaggtacggcagctccgcgggacagaactggaatctcggtttgatgctcaacaaggataacgagatcaccgtcgggcacaaaaagaagcgccagtttcaggccatgctcagctcctacgttatggataggaaaaacggcattgcatgggataaatcagacattcaaacaatggagggttaccgtaattattatcgtatggtggagcgcgagaagatagatggaattgtgaaacatctctctgacaagttcggggtggatatcgtgaaagccatcaaggaggacctggccgcatga

SEQ ID NO: 12171 - RNA, 1179 nt, synthetic construct
  source 1..1179: mol_type = other RNA
atggtgtatcagaccgtggagcggggcggattcgtatactacatcaccgccaaacagtcacctagataccatcagatgacactggaagaattcttgttcggggagagggagtcctctaagcactactctctcgagttcgaccctactggaacgaagacatacgaggtagagcacatcagtgacaggtttttatcaactgttaacgtggattggctgatatctaagttaagcatgttcaacgagcaaaccaaggatctgaggcagaagcccaggagaagtctgtattccgagttctatattcccaagaagagtggcggcttgagacggattgatgccccagaacctgagctaatgacagctcttagcgtcctgaagacgatttttgaacaggatttccgagccctctaccataccagcgcctttgcatatgttaaaggacgcggaacagttgactgcatgaaaaagcatcagaagaatgattccaggtggtacggaaaatatgacctcagtaactttttcgggtccaccaccccagaatttgtgctgcacatgttttcaatgatctttcctttctcagaagtcttgaaaaatgagagagggcgtgaagagttcaaaaaggcaatagacttggcgtttctgaatgggggcctgccccagggtactccgatatctccactgattactaacgtcatgatgatccccgtggacttcgagctcacacgccgacttcgcaacttcaacgaccaggcatttgtgtatacccggtacgctgatgatttccaggtgtccagcaaatatacctttagcttcaggcaagtagaaaatcttattgctgaagttctcagaggttttggcgccccatttcagataaaatcgtctaaaacacgctatgggtcctcagctggcagtaattggaatctgggcgttatgatcaacaaggacaatgaacttactgtgggatacaaaaagaagaaacagtttcgtgcgatgctaagctcctatatcatggatcaccgcaacggtgtcctgtgggaccggcacgatattcaagtgatggagggtcatcgaagctactacaaaatggtcgagggggaagcaatcgaccggatcgtcgaccacattaatcaaaagttcggcgtgaacgtggtgtctatgatcaagcaggatctcgccatgtga

SEQ ID NO: 12172 - RNA, 1143 nt, synthetic construct
  source 1..1143: mol_type = other RNA
atgtactatgtgactgttcgacagtctcccatgtataaacagatgtctttggaagatttcctctttaataccactgcttcaaccgctacaatcaatgctaacactgctaatacaaggacgtacgccgtacagtcaattagcgggaagttcttgaagaccgttgacgtggacgtgctggtcaccaagttggcttggtttaatagtattaccaaagagctgcactctaaggatcgccaggacttgtaccattccttctgcatacctaaaaagagcggcggactaagacaaatagatgaaccaaacgaagaacttatgtcggccctccgtatgctgaaggatatcttcgagaacgacttcggagcgctgtatcacacaagcgcctttgcatatgtgcgcgacaggtgtacaattgacgccgtgaaaaaacaccaggataatgagtccaaatggttcggtaaatacgacctttccaacttcttcggtagtactacaaaggagttcgttatgcaccagctagaaatgatctttcctttttgcgaggtactcaaacgagaggacgggaggcgggagctagagactgccatcgacctggccttccttaatggggggctgccccaaggcaccccattaagccccacattaacgaatataatcatgatcccggtggattacaagctgtataacaccctccggaattacaataaccagacatttgtctacaccagatacgcggatgactttatcatttctagccggtatagctttagtttcaaggagatagagaacctgatcaagtcaactcttgaggagtttggcgcaggcttttccattaattcgaaaaagacgaggtatggatcatctgcaggaagcaactggaatctgggggtgatgctgaataaggacaacgaaattaccattggacacaagaagaaaaaacagttccaggcaatggtcgcctcctatattatggattctaagaacggcaaaagttgggatatcaacgatgtgcaaagactggagggcctccggaactactaccattccgtcgagcctgaacgcatcgatgaaatcatcgaacatgcaaacgaaaagttcggtgtgaattttagaaaactgattgccgacaacctcaaggtcgcttga

SEQ ID NO: 12173 - RNA, 1149 nt, synthetic construct
  source 1..1149: mol_type = other RNA
atgactacttacatcaccgtgaagcaactcccccagtaccgacagatgaccattgaggaactgctgttcggaaccgaaccagctgatacctgtgtcaatgatggaataggcaacacgcgcacttttgtaactgagaactacgccaccgtcgacgaatatatgaaattcatagaccctgcccatctcattgaagtgcttaggaattttaatgacaaggtggactgcctaagacaggttcctcggtctagcctgtatcattccttctcgatccccaagagaactggagggttacgccggattgatgcccccaatgaacagctgatggaagctctgagagagttaaaaaccatcctggagacagagttccacgcactttatcacacatcagcattcgcatatgtcaaggagcgctccaccatcagtgccgtgaagaggcatcagatgaatgaatccaaatggtttgccaagtacgacctcacaaatttttttggctcaattaccctgccattcaccatgcaaattctggctaaaatctttcctttcagcgtgatcctccggagcagagatggtaagatcgaactcgagaaagcattggagctcggctttctgaacggcggattgccacaaggtacaccattatctcccatgctgacaaacctcataatgattcctatcgatcacactctggcgaatgcccttcgagactataacgggcagaggttcgtgtacacgaggtatgccgatgactttcagatctccagtcgcttcacattccagttccgggagattgagtctcttattgtccgggttttgcatgatttcaacgctcccttcagactgaaaccggagaagactagatacgggagcgcaaatggtgccaattggaacttgggcgtcatgttgaacaaggacaatgagatcacagtggggcaccgaaacaagaaaatctttcaggcgatgcttcacaattacatacatgatcgcgctaacggaattttttgggaactgaacgacgtgcaaacgctagaaggctaccgtaactattactcaatggttgagaaagacaccatcaacaagataatcgagcacacagacaggaaatttaacgtgaatgtacggcgtatgattgctgaagatctgaggcgttga

SEQ ID NO: 12174 - RNA, 1167 nt, synthetic construct
  source 1..1167: mol_type = other RNA
atgtatgagcaaatctcaattgaggaattccttttcaacgataacatcactaacaaagtgatcacccagaattcaagtaatacccacacatacaagctgaagtacataaacgagaaattgcaggatctgtgtagggttgaggatctgatcctagaattggacaagttcaactctgactataagtcactgagaggaattagcagggagaacctgtacaacacgttctttattcctaagcatagcggcggtctaagaagaattgatgccccaaatgcagagttgatgaatgccttacggcgcctgaaggcaattttcgaagaagacttccatgccctgtatcatacctccgctttcgcctatgtaaagaaacgatctaccatcgatgctgtgaagcggcaccagcaaaatggcagcaactggtacggtaaattcgatctgtccaacttttttggcagtacaactatcgagtttgtcatgaatatgctctccatgatatttccctttagcgaggtggtgaagacaaagcatgggaaagacgcgctcgagcacgccctcgaccttgcattcctgaatggcggcttaccccaggggacgccaatatcacctcttatcacaaacgttatgatgattccgatcgactttaaactctcgaatacacttcgttcttttccttgctcccaaccaaacaatttgggcgagactgagaattaccagaggttcatttacactagatatgctgacgatttcctgataagttctaagtacgagttcgacatcaaagagatcgaaaagtttatagtggacacccttagcgaattcgatgccccctttaccctgaactccaagaagtctcggtatggatcccgcgcgggccgtaattggaatctcggaattatggtaaacaaagacaacaatctcactgtcggatacaagaagaagaagcagttccagaatatgctggcaagctatattatggataaacacaacggaaaagagtgggataaaaatgatgtgcaggtcatggaagggtacaggaactattaccgcatgatcgaaggggaagtcattgaccgaatggttgagcacatcgctaaaaaatttggtgaagaaatcatccaccggtgcaatgggagtaacctgaaactcgtgctggaggacttacgctga

SEQ ID NO: 12175 - RNA, 1137 nt, synthetic construct
  source 1..1137: mol_type = other RNA
atggtctatattaccgttagacagtcaccaatttatcaccaaatgactctcgaggagtacctgtttcagtcttatcagacccccccagtggtaaatgctaacatagccaacactcggacgtatgaagtggagaatgtgagcgagcatttctctagcaagataggggtggaggccctgatcgggaagctggtccgcttcaataacgataccgctgaactgcgtgctaaagagaggagcgagctttacgaaacgttctacattccgaaaaaaagtggcgggcttcgacgtatcgacgcgccaaaggctgagttgatggatgcgctgaggcggcttaagactattttcgaagacgactttcatgcactataccacacagcagcctttgcatacgttaaaaagcgctctaccgtcgatgccgtaaagcggcatcagaagaactctagtaaatggttcgccaagctggatttacacgatttttttggctcgaccacattggactacgccatttccatgttttctatggtgttccctttttccgagatcgtcaaagaacctcagggtgaagccgcgctcagaaccgcaatgagtctggcattcctgaatggaggtcttccccagggtactcccattagtcctttaatcacaaatgtcatgatgatacctgttgacttcaaactctcaaatactctgagaaacttcgaaaagcaatcattcatctacacgcggtacgcagacgacttcatcataagctccaagtatgacttcgatgtgaggagcgtcgaagaactagtggtgtccactctgaacagctttggggctccctttaccatcaatgcttccaagacaaggtatggatccagcgctggcagaaattggaatttgggagtgatgctcaacaaagataatgagattaccgtgggccacaagaagaaaaaacagtttcagtcgatgctgtacaactacatcacagataagaacaacggagttgcctgggagcgcaatgatgtgcaagtgatgtatggcctccactcatattataggatggtggagaaggagacaattgacgccatcgtcgcctacatcaacaagaaaatgaacgtagatgttatccgcatgatgaaagacgacttgcgatga

SEQ ID NO: 12176 - RNA, 1137 nt, synthetic construct
  source 1..1137: mol_type = other RNA
atggtctatataactgtgatgcagagtccgatctatcatcagatgacgcttgaggaatttttatttcaaaacttccaggcgcctaccatcctgaatacaaacgtgagcaatacccgtacttatgcatatgagacagtttcggagcactttacatcacgcatagacactgatgctttgatttgtaagttggtcagatttaacgaacagaccgaggcccttagagcacaagagagaagcacactctacgagacattccatattccaaaaaaatccggaggtctaaggcgaattgatgcacccaagcctgaactgatgaacgctctacgcaacctgaaaactatctttgaggaagacttccacgcattgtatcacacctctgcctttgcctacgttaaaaaccggtgcaccgttgacgcggtcaaaaggcaccagaagaacaattctaagtggttcggcaaactggacctgcatgatttttttgggtcaaccactctggactacgtaataaaaatgctgtccatggtgttcccattctctgagatagtcaaattcccaaatggtgaggccgaactcagaaaggcccttgacctggctttcctcaatggcggattaccccaagggacaccactgtcccctctgatcaccaatgtaatgatgatccctgtcgactataagctcgctaacgcttttcgggactttgataagcagaggttcatttacaccagatacgccgatgacttcattatctcttccaaggtggatttcgacgtacatcgcgtcgagaagcttgtggtggacaccttacacgaattcggagccccgtttaccattaatgaaagcaagacgcgatacgggagtagtgccggacggaattggaatctcggggtgatgctcaacaaggataacgagattacggtgggccataaaaaaaaacggcaattccagtcaatgctctacaattacatcacagacaagcgcaagggcatcagctggcccagggaggatgtgcagactatgcagggcctgcacagctactataggatggtggaacccgaaaccattgatgcaatcgtgaagcacacaaacgaaaaaatggagactgacgttttgcgtctgatcaaggatgatctgcggtga

SEQ ID NO: 12177 - RNA, 1218 nt, synthetic construct
  source 1..1218: mol_type = other RNA
atggaaagttcccatcagtgggccctcacgtctatcatctatgtgggatataattcccgactgcgtaagggtggatttaccctagtctacattacagtaaaacagagccccatttatcaccagatgactctagaggaatttttattccagactttccaggggcctgctgtcattaatgagaatatgacaaacactcgaacctatgagttcgagtccgcctctgcacattttaccaagagtattgatgttgacgctctcgcttggacactcgccagatttaatcagtcaacagaagaacttcgggagaaggagcgtatttcactgtacaataccttctacatcccgaagaagtctggaggattgcggaaaatcaatgcccccaaccccgagttgatgaatgccctccgcaggttaaagaccatatttgaagaggatttcaaggccctgtatcacacatcggctttcgcgtacgtgaagaaaagatgcactgttaacgcagtggaacgacatcaacaaaacaacagcaagtggttcgggaagcttgatctccacgacttcttcgggagtactaccctcgattttgttatggacatgttctctatgatctttccattcagcgaggttgtaaaaactgtgaacgggaaaacggaactgagaaaggcattagaacttgctttcttggatggcggcttgccacagggcactcccatttcccctacaataaccaacatcatgatgatccctgtagacttcaaactgtctaatgccctgcgcaactttgacaaccagaggtacgtgtacaccagatacgcagatgattttatcatctcatcacgctacgagttcgacgtccacaaagtggaggagctggtggtctttaccctgcaaaattttcacgcgccttttagcataaacgccagcaagacccggtacggtagcagcgctggcaggaattggaatctgggactgatgctgaacaaagacaacgagatcaccgtgggtcacaagaaaaagcgccagttccaatccatgctgtacaactatattacggataagaagagggggatcgaatggtcccgcgaagacgtgcagacaatgcagggcctgtacagttattataggatggtcgaagagaagccaatcgacgcaatcattaaacatatagatgatcggatgggcgtggacgtgattagaatgattaaaaaagaccttcggtga

SEQ ID NO: 12178 - RNA, 1137 nt, synthetic construct
  source 1..1137: mol_type = other RNA
atggtctacatcactgtgaagcagtcaccaatgtaccaccagatgactctggaagagttcctcttcaagacattcgagaacgacaagctgatatctaaaaacaccggaaatacccgaacctacgagttcgaacggatttctgacaggtttatgagtagaatcgacgttaacgagctggttggctatcttgcccattttaatgaatcaacggcacaacttcgagaaaaaaataggcaggatctgtattccacattttacatcccgaagaagagcggaggtttaaggaggatcgacgcccccaaacctgaattgatggatgccctccgtcgcctgaaaactatctttgaagagcacttccacgtgctttaccacactgccgctttcgcctacgtgccaggccgatctactattgatgccgtgaagcgccatcagaaaaatgagagcaaatggtttggcaaatacgacttgagtaacttctttgggagcaccaccttagatttcgttatgcagcagtttagtatgatttttcctttctcggagatagttaaatacgagctgggaaaaaacgaactcgagcgggcactcgagctggcgtttcttaatggcggtctaccacaggggacccctatctcccccttgatcaccaatgtaatgatgattcccatcgattataagctcgctaataagttccgggacttcgagagacagtcatacgtgtataccagatatgcagatgactttatcgtgtccagcaagtatggtttcaacgtgcgcactgtcgagcgtgtgatgatcgagacactcgctgagtttaacgccccctttacgatcaacgaagctaagacaagatacggatcttccgctggcaggaattggaatctgggcctgatgctgaacaaggacaacgaaattacagtagggaagagaaataaaagacaattcatgggaatgctacacaactatgtcatggataggaaaaaagggattgcatgggacaagcatgacgtgcaaacgatggacgggtactataattattaccgcatggtcgaaaaggaaacaatagatcggattgtggagtatattaacaaggagacaaatgcgaacgtcttgcagtacatacgcgaagatctgcggtga

SEQ ID NO: 12179 - RNA, 1122 nt, synthetic construct
  source 1..1122: mol_type = other RNA
atgcagtcacccatgtatcaccagatgacgctggaagagttcctcttcaatacgtatgatgccaagtccccagtgatcaaccaaaacgccgggaacacccgcacctatgaattcgaaagggtttctaatcgatttctgtctcggattgacgtcaacgagcttgtgggccatttagtgcggttcaatgaatccacagaggaactaagaaacgtaaatagacaggacctgtacaccaccttctatattccaaagaaaagtggaggcttacggaggattgacgctcccaaacccgagttgatggatgcgttgaggagactgaagactatattcgaggagaaattccacgccctataccacacttcagccttcgcctacataaaggagcgaagtaccctgaaagcaatccagcgccaccaaaataacgagagcaaatggttcggcaaatttgacctgagcaatttcttcgggagcactactatcgacttcgtcatgcagcagctcagcatgatctttcctttttccgaagttgttaaatacgaacttgggaaaaatgaactcaggactgccctcgagctggcctttcttaacggcggtttaccgcaagggacacccttctctcctcttataaccaatgtgatgatgatccctattgattaccggctcgctaacaagtttcgagattttggtcggcagtcttttgtgtacacaagatatgctgacgactttattgtctcgtccaagtacagctttgacgtcagaatggtcgagagggcgatgatcgatgttttgacagaattcaatgcaccatttacactgaacgaagagaagacccgctatggaagttcagcaggacgcaactggaatctcggaattatgctgaataaagataacgagatgaccgtgggtcatcgtgctaaaaagcagtttaagaacatgctgcattcctacgcactggataggaagaaaggcgtaatgtgggatagacatgatatccaggtgatgaatggctattacaactactaccgtatggtggagaaggatactatcgacaagatcgtggagtatataaacaaggaaacagattgcgacgtgctgcgcgacattcacgaggacttgaagtga

SEQ ID NO: 12180 - RNA, 1167 nt, synthetic construct
  source 1..1167: mol_type = other RNA
atggtctacattacagtcaagcaagggcaccatgagagacaaatgagcctagaagagctgttttacgaagagtataatcctagacgattttctccacgaaacacaagcgacactcgcacggacatcagatccgcaccgagtgctgagatgatgcggtacgttgacgtaatagggttgatacacaaactcagcgagttcaacacgcagactaaggagctccgcgaatgcaacagacaagaactgtacaacacatggtttattcctaagaagtcgggtgggcgtcgcaggatcgatgcaccgaaaccaaagctgatgcttgctttgaggaacctgaaaagcattctggaagaagacttcggcgccctgtatcacacctctgcctttgcatatatcaaaaatcgttccacattggatgcgataaaaagacatcagcagaatgagtcaagatggttccttaagctggacctccacgattttttcggatctaccacgccagagttcgtgatgaagatgttcagcatgatttttccctttagtgaggtcgtgaagtccgcctacgggaaaacacagctggaaacagccctcggcttagcttttcttaatggtggactgccccagggcacccccatctcacctactatcacaaacatcatgatgattcccatcgaccatcggttgtccaattccctgaggggattcagtaccgaacgggtaaatcctaaaactctggagccttttaaagagcatttgctctatacccggtatgctgacgatttcctcatttctgacgcctacagcttcgattggaagaaggtgcaggagtatatcctaaacgtcttaaaggaattcgacgcgcccttcaccgttaacactaaaaaaaccaggtacgggtcaaattcaggaaggaactggaacttaggagtgatgctgaatgccaataatgagattaccgtgggttacaagcggaaaaaggaatttcagcgactggcatatcagtacataaccgaatctcgcggcggcaacaaatggccacttgaggaggtgcagcacctccaaggcctgtacagttattatcacatggttgagccagagacttttgataggatcgtgaagttcatgaatgaaaagtacaacgccgatatccttactatgatcaagcgcatttga

SEQ ID NO: 12181 - RNA, 1146 nt, synthetic construct
  source 1..1146: mol_type = other RNA
aaggagcatgacatgccatacatcaccttgcaacaatctccgatttactaccagctctccctcgacgatatactggatggcgccgtggacgtgtcaaaaatggttgtgcctaacgctactaacacaagaactcggtataaggagatcctctcagaaaagttcctcaataaattcgatttcgacgccatgatcagagtgcttgagcaattcaatgagcagcacgagaacctgtttaacgttgagaggaagaccctgtacgagacattttatatcccaaagaggacctgcggattaagagaaatcaacgccccagtgcctgaattaatggacgcgctacgtcagttgaagaccatctttgaagtgaacatgttcgctttataccacacatccgcattcgcctatgtgaagggaaggtctactattgactctatcaaacggcatcagcataatgagagcaaatggtttgggaaatttgactttagcaacttctttggtaacaccaccgaggaattcgtatttagcatgttcagcatgatattccccttttccgaagtagtcaaatcacagcgagaagcaaacgcgttgcgccgggccctgagtttgtgttttctgaatggtggactgcctcagggaacgcctattagtcccattatcacgaatgttatgatgatccccattgatcaccaactttgtaatgagctgagggccatggatgagcactatgtctatacccgatacgctgacgatatccttataagtagcaaggtgaacttcgacatcacaaaggtgcaggagtttattctgtcagtcctgcgcaagttcaatgcacccttttcgctgaagaaggagaagactcgctacggcagctccgcaggccgcaattggaacctaggggttatgctcaataaagacaacgaaatcacaatcgggcaccagaaaaaaaaaactttcaaagccatgtgctgtaattacgtggaggataaacggaagggcataacttgggatcttcatgatgtccaggtattcgctggcctgatatcttattaccgtatggtcgaaagagagtatattgattacgtgattgaacactgcaataccaagttcaatacaaacattgaactgctcattaagcaggacctgtcctga

SEQ ID NO: 12182 - RNA, 1134 nt, synthetic construct
  source 1..1134: mol_type = other RNA
atgccgtacattacgattcagcaatcacctatctactatcagatgtctttcgacgatattcttgatggcacagtggatttgtcacggatggtggtgcctaatgtaactaacacccgaacacactttagggagttcctgaagccaagcttcctggaaaggttcgattttgatctgatgatcgcagtgctggaaaagtttaacgagcaacacgcaaatttgtttaacgtggagaggaagtcactctacgaaaccttctacattcctaagaaatcgaaagggctgagagagattaatgctcccgtgcccgaactgatggacgcgctacgccagctcaagactatattcgaaacgaatatgtttgccctgtaccacacatccgcattcgcctatgtcaagggccgctgtaccatcgactgtataaaacggcatcagcagaatgaaagtaaatggttcgccaaactggatttctccgatttttttggatctactacagaggagtttgtgatcagcatgttttcccagatattcccattttccgagatcgtaaagagaaaagatggtctagaggctctcaaaaaggccttgagcttatgtttcttaaacggcgggcttccacagggaacccccattagcccaaccatcaccaacatcatgatgatccccatagatcatcagctctgcaacgaactgcgaaagatggacgaacactacgtttatactcggtatgctgacgacattcttgtctctagtaaggttggatttgattgcaacaagctccaggactacatcctcggtgtgctgaaaaaattcaatgcccctttctgtcttaaaaaggagaagaccagatatggcagctctgcgggacgtaattggaacctgggcgtcatgctgaacaaagacaatgagattacaatcggccatcagaagaagaaaacttttaaggctatgtgctgcaattacatatgcgacaagaagaaaggggttgcatgggatttacacgacgtccaagttttcgccgggctgatctcctattaccgcatgattgagaaagactacatcaactatgtgatcgaccaaaacaacaaaaagttcggtgtcaatctcgaagccctgattaaggaggacttgagttga

SEQ ID NO: 12183 - RNA, 1140 nt, synthetic construct
  source 1..1140: mol_type = other RNA
atgccatacattaccgtgcggcaacccccgccacatcagcagatcacttttgacgacctgttttttagtacatctgttcaggaccacttccagcccgtcagacgggacatgagcggcaccataaccaggtttgtcaaggaacctaagaaagagctactacagaggaccgacatcaattccatgatttcatgcctggagatgttcaaccagaggcatgctgacttgctcgccgcagaaaggcgcagcctgtatcacacgttttttattccaaaacactccgggggtttaagaaagatcgacgaacccaacgaaaatctcatgaatgccttgagggagttatgtagtatctttgttaacaagatgggcgtgctttatcatacaagcgcctttgcctatgtacccgggcgctcaactatagatgcaatcaagcgccaccaggccaacgaatctcgttggtttctgaagacagatttctccaatttcttcggatccaccaccgaggattttctctaccgggctttctctgtgatgttccctttcagtgagattgtcaagactaaaagaggatcggaggccctcaaaaaggctctgtcactgtgcttcctggatggtgggttgccacaaggaacacctataagccctatgcttactaacgccatgatgattcccatcgaccatcgactgttcaacggcttgacaaaacagggcttcgtttatactcgatacgcggacgatattcagatcagttccaagtacagctttgattataaggaaatggtggcacacatcaatggggttgtgaaggatttcggcgctccatttgtgattaaggaccaaaaaacacggtacggatcttcttcaggtcgtaattggaatctcggcctgatgcttaacaaagataacaacataacggtggggtaccaacgcaagaaacaggtaaaagccatgaccaataatttcattgtggatcacctgaaccatattccgtggcccaaggaagacgtgagacacttcgatggaatccttagctactgtaaaatggtcgaaaaagagtatttcgagcacatgatcaaagcttttgaggagaagtacaaagtcaacttcaagatcatgatgaaggcggcactggagcagccttga

SEQ ID NO: 12184 - RNA, 1134 nt, synthetic construct
  source 1..1134: mol_type = other RNA
atgccttatattaccgttcgccaaaggaccgagtttagacaaattacattcgaggagttgatcttgggaattgcgcctgcgccaaccagaaaacatacatctaagggcggcactatcactcgctacgttcgaaatgtggaccctagcataagggctacagtgaacatgaatgccctgattagcagtcttgagcggttcaacaatctgcaccagaaccttttcgatgctaagagggagagcttgtaccgaacattctacatacctaagaagactggagggctccgccgtattgacgccccaaacgacgaactcatggatgctctccgggaattaaagactattttcaccgatcagttcggtgcactccaccacacgtctgccttcgcatacgtcgaaaatagatccccggtagacgccataaaaagacaccaggtgaacggctctagatggtttctcaagacggacttttccaattttttcgggagcaccaccgaggattttctatacaccatggtgagtatgatcttccctttcagtgaagtcattaagtctcgggtcggcaaggaagagttgaaaaaggcactatccctgtgctttctgaatggcgggctgccccagggaaccccaatcagtccgatgcttaccaatctgatgatgatcccctttgatcacaagttttgcaacgagctgtccaagaaaggatttgtgtatactcggtacgccgacgacatacagatctccaacgaattcgactttaactatcacgaaatcgtccaatacatcagcgatacactgaagtcgcagcatgcccccttcgttattaaaccccagaaaacacggtatggatcatcaagcggtaggaactggaatctgggtgtgatgctgaataaggagggggacatcacagtaggccatgagaagaaaaaagtgttcaaggctatggtgaataactttatcgtggatactctgcgttgtgtgccatggtcaattgaagatgtgcgccatatggatgggttactctcatactataaaatggttgagcccgattactttgaccacatcatcaaatctttcaacgagaagtataaggtcgactatcatacgatggtaagggcagtccttaaaggcaaatga

SEQ ID NO: 12185 - RNA, 1140 nt, synthetic construct
  source 1..1140: mol_type = other RNA
atgccttacataactctcatgcagtcccccgcttttcaccagatcacttttgacgagatcatctctggggttgttgacatcccgactatgattctgcccaatgaatccaacacccgaacatatttcgccacaagggtgaaccagaagtttctggaaagattcgatttctccgaaatgatttccgatcttgacaagtattgtgaacgccatgccggtctgtatgacaaaaagaggaagagcttgtatactaccttttacctccccaagaaaagcggaggtctgcgtgaaatcaatgccccagtacctgagctaatggacgctcttcgggaattaaagaccctctttgaaaccaagttttttgccctgtaccacaccagcgcttttgcatacgtgcctcacagatgtgcagtggatgcggtgaaaaagcaccagagcaatcaaagccactggttcctcaaaaccgacttctccaatttcttcggatcaaccacccacgattttctgatgaggatgctttcaatgattttcccgttctctgagattatcgccaatgaacacggaaaagcagtattggagaaggcactggacctatgctttctggatggcggcttgccccaaggcacacccatcagtccaatgctcacaaacctgatgatgattcctatcgatcatcgtcttttcaattgtctccgggatttcaaaggccacagttatgtgtacacacgatatgccgatgacatcttaatttctgccagacatcatttcgattacgcagagattgtggactttataaactcgacactgaaggagttttgcgcgccattcaagataaaggacgagaagactcggtatgggagtcgcgccggctcaaattggaacctgggagttatgttgaataaagataacgagatcacgatcggcactaaaaacaaacagcggttcagggctatgctgtgcaactacaccctcgacagaaaaaatgggaaaccatgggaactgcatgatattcaggtcttaaacgggatcatgaactactacaagatgattgagaaggattacattgagggtgtcatcaaggctatgaatgagaaattcaagacggacatagtctctaacatgcgcgaggacctggggcagtga

SEQ ID NO: 12186 - RNA, 1122 nt, synthetic construct
  source 1..1122: mol_type = other RNA
atgcaatcacccatattccaccagattacatttgacgaaatcattagtgggaacgttaatttggccaacatggtgaaccccaatgagacgaatactagaacctatttcagtaaagtactgaacccaaaattcctcgagcgtttcgatatcgacgccatggtggtaaccttggaggaattctgtaagcaaaatgctaaactctacgaagccaagagatctgacctgtacgacaagttctatatccctaagaaatctggtggtctgcgcgagataaacgctcctcagcccgcgttaatgaatgctctgcgcaatctgaaaacaatctttgagactcagatgttcgcactgtaccatacgtcagcctttgcctatgttccggggaggtccaccattgatgcagttaaacgccatcagaagaatgaaagccactggtttctgaagactgacttctctgatttctttggatccaccacacctaagttcttgatgtccatgctttctaaagtctttcccttttccgagatcgtcaagagccagcgggggtttgacgcattagaaaaggccctggacctctgcttcctgaacggcggattgccacagggtaccccaattagtccgatgcttactaaccttatgatgattcctatcgatcaccgaataaataattgtctgcgggattttaatggcaaccactacgtgtatacccgctatgctgatgatagccttttcagttcaagaaaagggtttgataaggacgagatcatcggctttattaactcaacactcgcagaatttggagccccattcaaaattaaggacgagaagacacggtacggaagccgtgctgggtcgaattggaacctgggagtcatgctcaataaggacaacgaaataactatcggctacaaaaacaaacagagactgagggcgatgatttgcaattacatcctcgataggcaaaacggcaggcggtgggatctacatgatgtgcaggtcctacgaggcctggtgaactactacagcatggtcgagaaagagtatgtggactccgtgatcaagtataacaatgagaagttccacaccgacgtgatgaagagcatgtctgaagacttaaaccagtga

SEQ ID NO: 12187 - RNA, 1146 nt, synthetic construct
  source 1..1146: mol_type = other RNA
atgtattatatcaccaccatgcagcacagaaaacctaggcaactgtcttgggaggacgttatcatggataagcttgtcatgaatgattatgtgaacgacaaatcaaacagcacagccacaatcactcggaagtatgaaaatatcccggatgaagttatcaagaagataaatgtagagctgatggtccgttggttacataacttcaatgaggagagtaaagaactgtttgagagaaaacgcgagtctctttattcaacctttagaatcccaaaacagtccggcggctttcgccgcattgacgctccctgcgaggaactgcaaaatcaactaaggaagttggtgacatttatttccgatgactgcggagtgctgtaccacaccagtgcctttgcctacattaaaggacgatctatcgtggattgcgtgaggaaacatcagaaaaacgaatccaactggtttctcaagacagacttcagtgggtttttcccaaatactaccttggatttcacgatgaaaatgctgagcatgatcttccctctgagcgagatctgtaagcggaaagacggatactcggaattagaaaaggcaatttctcttgggtttctgaacgggggtttgccccagggcacagtgctatcccccatgctcacaaatatgttcatgattccaatagaccacaagctgttcaatgaacttgccgggcgaaagctggtctacacccggtacgcagatgatattcatattagcggtcaggaacacttcccctttaaagagatagtaactctcattgagaacactctcgctgaatttaatgccccttgggtcatcaagaaagagaagactcattatggcagcaggaaaggcaagaactggaacttgggactcatgctgaacaaggacaacgacattaccatcgggtggaaaaagaagcaatacttcaaggctgcattatgttccttcattctggacacgaagaataaaaagtactgggatctgggcgacgtccagcacctcagaggacagctctcatattacatgatggtggagaaagagtacttcgagaagataatcatccagcagaataagaagtggaacgtgaacgttaaggaaatgtttaaagagtacctgaatggtaccttcgcgtga

SEQ ID NO: 12188 - RNA, 1128 nt, synthetic construct
  source 1..1128: mol_type = other RNA
atgccttacatcaccgtgatgcagtcaccaagatttcaccagataactctcgatgagatattgtccggcgaggtgcaggtgtccgatatcgcgcctcgctcagttactgggaccgtaacacatttcagtgaaaggctcaacgatcggttaacccggctggcccaagtggatgagctggtcgccgttctcgagactttcattcagaaaaatgagagcctgtatgaacagaagcgctcaaagctgtacaacacattctatattgccaagaggtcaggtggccttcgtaagatcaacgctcccctcgaggaactcatgtctgcccttcgagaacttaaggaaattctggagacgaagttttctgccctgtatcacaccagcgcatttgcatacgttaagtgcaggagcacagtggatgcagtaaaaaaacaccagactaataactccaggtggtttctgaaaacagactttagcgacttcttcggaagtactacgcccgagtttctgatgaagatgctgtcccaaatataccctttttcggaggtcgtgaaattagaaaggggtagagtcgtgctgtctaaagccctggacttgtgtttcctggacgggggcctacctcaaggaacaccaatcagcccaatgcttaccaatttgatgatgatcccgatcgatcatcggatagctaatgaattgcgccgaaacaactttgtttatactcggtacgcagacgacattattatcagccataagttcgactttagtttcaccgagaaatgcgatttcatcaaccaagtgctcgccgagttcgaagccccattcaagatcaaaccctctaaaacaagatatgggtcttccagtggaaacaattggaacctgggtgtcatgctaaataaggacaataagatcaccattgggtatcagaagaagaaaacctttaaagctatgtgttacggatacattacatccaaacagaataatcagccctgggacagacacgatctggaagtgttcaatggcttaattagctattacaagatggtcgagcgcgattacatcgcttatacgattgaccactacaaccagaagtacggcgtgaacatgatggcgatgatccgtgaggacctcagatga

SEQ ID NO: 12189 - RNA, 1149 nt, synthetic construct
  source 1..1149: mol_type = other RNA
atgccctatgttacaacattcatgactagggctaaaaaacagcttacccttgaagacgtgctctttggggtgaaaaacctaagcccttatatcaatggtgtggatttcgggaccagtacaaggacttatgagtacaagaaattgcctcaggaattgaaagagatggcccgggttccttacttgataggaaaactgaagagcttcaatcggacttaccagccaaaattcgatgcaaacaatatgagagagcattataactcgtttaagatccccaagaaaagcggcggctggaggcagattgacgcacctgatgacgaactgaagcaagcgttgtactcactcaaggccatctttgagaacgactttaaggtactgtaccatacagccgcctttgcatatatcaagggcagaagcaccactgacgccctgaaggtccatcagcgcaataactctaactggtatctgaagacggatctgagtaatttcttcggctccactacattagagtttaccatgcgcatgctgtcagtgatctaccccttttgcgaagtggtaaaatatgaggacggcgaaaaggcactacgtgatgccatctccctgtgtttcctggacgggggtcttccccaaggtacgccaatctctccactgctgaccaatgtcattatgattccaattgatcacgagatatcaagaaggctccgggcttccgagacaaatgatttcgtgtacactcgatacgccgacgacgccaccgtgagttccaagaagggttttctgttcatgggggtgatcgaaatgatgaacgacgttttcaaaaaattcgatgctccgtatacgattaaaaaggaaaagacacactacggatctcgggctggccgaaactggtgccttggactcatgattaacaaggacaacaaaatcaccgtggggcacgagaataagaaagtgtttaaggccatgctcaataattatatagtcgcgagaaaggatggaaaaggatggccccctgaagaggtcatgaccttacgcggcaagctcagctactactctaacgttgagccggagtactttgactatgtgatttcctggtataacaaaaagtaccactgtgatgtcatcaagatgatggcagatgacgtagctgcttga

SEQ ID NO: 12190 - RNA, 1173 nt, synthetic construct
  source 1..1173: mol_type = other RNA
atgatatatgttaccgtgcgcatcacagaaccctataagcagattgctctggaggacatcatgctggctctgtttcagggagaaaatgtgagggagcgtactcctagatcaccctacaccagaactttcacctacgagagacttcctgaacgaatcctggcaggctttgatgttgagaaaaagatcggccttctccggacgtttaataagaaacatcacaaccttatggagtcagacattcgcgagcattatcacaaattcttcataccgaagaagagtgggggaatgagggaaatcaacgctcctgacgacgagctgatgaactgcttacgcgaactgaagctcctgctagaaagtgagttttatgcttcctcacacgctgcggcatacgcatatgtgaaaaacaggtccagtgtcgacgccgccaaggtccatcaatggaacaaatccaagtggtatcttaagacagatatctctggtttcttcccaaataccacgcctgagtttgtgtggaatgcactgtctatgatatatccattttgcctcattatggaatgtaaaagcggtcgggaagaactcagaaaagccctgtccctgtgctttctggatggcggtctacccatgggcactccgatctcgccaatgttgactaacctgatcatgattccctttgacttcgagttctctaagttcctgagatccttacagaatccagaaaacaatcctgacaaaaaaggccgacggttcgcctacacccgatacgccgatgacatgaatataagctgtggaatcgaattcgacaagagtttcattattcggaaaatcgaaaacctcttccgcctgtttggagctagctatatcattaaggatgagaaaacacactacgggccatcataccacaaaaactgggtgctcggcgtcatgatcaacaaagacaatcagattaccatcggctacaagaagaagaggaacttcgaggccatgttgtttaattacgcaaaggatcgggagagcgggacatactggcccttagagcaactccagtacgcccttgggttgatgagctattaccgtatggtgaacaaggagtctatagatggggtaattatcaggtatagccagaaatttggatttgatattgaggccgcgatgaaaaaggatttgaagaattga

SEQ ID NO: 12191 - RNA, 1131 nt, synthetic construct
  source 1..1131: mol_type = other RNA
atgccatatgtgaccacgcctttgtcaccggtaactcgccagctcacttttgaagagatcattatgggcgaggtcgacgtctcccggcccgtttattctaacgcgacaaataccaggaccgtctttgttaagtcaatctcgaatgaggtggcgcagaaagctagagtagctagtcttaccaagcagctccaggagttcgcagagaatttcaggggactatacgaagtggaccgtagaagcttatacgacaccttctacattccaaagaaatccgggggtctgcgcaggatcgatgcaccgaacgacgcactcatggcagcactgagagtccttaaaacaattctggagggagccatgcctgccgatcaccataccgcagcctttgcctacgttaaaggccgaagtgccgtggatgccgtgaagagacaccagcgcaatgactctcactggtttctgaagattgacttctccaatttctttggttctacaacgaaggagtttgttgtgaagaccatgatggaaatattccctttctgtctgttgggcgaagacgggcgcactgctttggagacagccttagagctttgctttctggatggagggctgccccaaggcacacccatcagcccacttctcactaacattgtgatgatacctgtagatcatcagataaataagagactggccaaagacgaagggaacagctgggtctacacacggtatgccgatgacatgctgatctcagcccataagtcctttgaccccaagcgcgtgatggatctcatatctgctgctttgcaacatgtggaagctccctacatcttcaaacgggagaaaacccgatacggcagtagggctggctcaaactggaatctgggcgtgatgctcaacaaggacaacgaaatcactatcggtcacaaaaaaaaggagaggttcagggcgatgatccacaattacatgactgatcgtcaaaacgggacggcttgggatcctcatgacattcaggtgctatgtggacacattgcctattatcgatccatcgaaccaagctgggtctgcgatctgctggaaagatatagccagaagttcggacggaacgtggaggacacaatgaaagaggatattcggtga

SEQ ID NO: 12192 - RNA, 1395 nt, synthetic construct
  source 1..1395: mol_type = other RNA
atgccctacatcactatccctgttagacaaaaggaataccagatctcttttgatgacatactgaatggcatcaatgagtcatttttcgccatgatgatggatgatacgtgcgacacccgaaccgtatatagagatcacacccccccccgattacttgagaagatcaatatcggtgccatggtcgggatgctggaaaagtttaacaatcgccaccgggagtacttcgacgtgcctaaagaaaatctctatgagacgttctatctaatgaaaaagaacaagggattcagtgttgtcgtgagggagattttcaagactcacaacgccaacagtgggatttcttattccgggaaggatgtgtacgcagacgtgtttgcgattttgaagggcctattgactaatcatccctgtgcagaacacaataggatcgagcaagaaacactcgcaaagtgtgtgcaatacctgaccccattaggattcgaggtcaacgaggagaaaattaaaagcttcatcaaggccggatttagaaggatcgatgctcctcgggctgaattcaagtctgtgctgacagatctgaagatcaccttcgagaacaaactgtttgggagctaccataccagtgctttcgcttacgtgaaaggacggagtacaattgacgcacttaaacggcaccagagaaacaactcacgttggtttctgaagctggacttctctaactttttcgggtctactacccatgagtttgtactgcgtcagttatcctccatattcccttattcagagatcgtaaagagcgaacgcggtagggaagcgctctcgaaggccctcagcctgtgttttttgaatggagttctcccgcagggtactccgttttcaccaaccataacaaacattatgatgatcccaatcgaccatgcaattgctaaaatgtgccgtgagcatagtccccatctgtgctatacaaggtatgccgacgatattcttatctcctctgatctttccttcacctgggaggtcgacaaggagggcagcgtgcagaacgaaattttggacatactccggcgcttcaacgtgccattctccctgaatacagaaaaaacacggtatggcagcagcgctggcagaaactggaatctcggccttatgctgaataaagacaatgagattacgatcggccacgaaaaacgcaaagcgtttaaggccgccgtttactcatttttgaacgattatactcaccaccgcgtctgggatgtggaagaggttcaggtgctgggagggcagattgcttactacaggaatgtcgagaaagaaaacattgacgccataatcctggcctacaatcagagatttggcgtggacatgatgcagataattaaggatatcatctccaaccgatga

SEQ ID NO: 12193 - RNA, 1110 nt, synthetic construct
  source 1..1110: mol_type = other RNA
atgagacagatcacaatcgacgatattctgaacgggatagatgagtctaagcttgcactgcagaaggatactagggacacgactacctggaaagtggatgccatctcccgagagctcatcgagaaaaccgatttttatgctatgcaggtagcactcatggaattcgtcgaaaaatacaaggatttgattgccgttgaggacaaatctacgctgtatcggtcatttaagattcccaagaggtctggaggcttacgccagatcgacgcgcccaatgatgaactgaagaaagcactttacgagctgaagttcatcttcgagaagaagttttacatgtcctatcacacatccgcttttgcctacgtgcacggtcggagtaccatcgactcagtgaaacgacaccagcaaaacaacagcagatggttcttaaagacggacatgcgccatttttttcccagtacaactccagaatttttgatgaaaatgctttgcatgaccttccccttctgcgagttcattaggtatgattttggatgtaaggagttgctcgaaaaagccctgtccctgtgttttctgaatggtggactcccacaggggacacccacaagcccaatgcttactaacgcgctgatgatccctgtcgaccatgcaattaacaagatgtgccatgaatacgctcctcacctgtgctacacccgctatgccgatgacatactgataagctctcagtacaatttcaagtggagcgacgttcagggtagactgatttcgattctcgagacatttggagctcctttcacattgcacccggaaaagactcggtatggcagtagcgctggcaggaattggaacctcggggtgatgttaaacgccgaaaataagatcaccataggccatgaaaagaaaaaagtgttcaaagccatggtgtttcaattcatgaccgacgacgccaaagggaatcactggtccctggacgatgtgcaacatttcctaggcctcattagttattaccgtatggtagagaaggattgtatcaatgagatcctgcagacttactcacaaaagttcaacaaagacgtcgaggcaaccgccaaggctttgctaaaaccttga

SEQ ID NO: 12194 - RNA, 1233 nt, synthetic construct
  source 1..1233: mol_type = other RNA
atgtatattacctactggaacccacccaagacacgccaaatcacctttgacgagattatcgcaggtgtccagaatgttgaggccttgcattacggcggaagtacgacatccaccatcactgtctgcaggaacgatctgaccccaagactgcaaaaaatcactaacatcccggatatgatagctaaattaacggaattcaaccagaaatacgccggcttagaggcctgtgatctagccgcccattacgaacacttcgaaatccccaaaaagtctgggggttggcggcctatagatgcgcccgacaaggaactgtcagatgcccttgtggagctgcgagaaatgctcaggacatttatgattgctgactatcataccaacgcctttgcatacattcctaaccggagttttatcgacgctgtgagaaagcaccaggcgggccacgtgaaaacaaagaaaaatgaggagactggcgtgcagacaacagtcacctttgagaaccactgggccgtaaagttcgacctccacggcttctttcccagcaccacccccgattttctgctggggatgctgtccattatctatccattcgctctcattatgaaggatgaaaggggccacgaacagctggcaaacgcgcttaagctctgctttttgcacggtggactgccccagggcactccgatcagcccatggcttaccaatgtgatgatgattccatttgaccaccttatcactcggaagctctgctatggttacaaagcaaaagacgggatcgaacgtgaattcacttatacaagatacgctgacgacatgatgttctcatgttatcactccttcgaccctatggagatacagcaaatcgtaattgacggactcaacttcatacatgcccctttcactctgaatgaggcaaagacacattatggaaatcggcactcttcgaaaaactggtgtctggggctaatgtggaataaggataatcagattaccgtcggatggaggaatttaaagatgttccgcagcgccatgaaaaattacatcgacgctaagaagagaggggagacgtgggagctggaggatttgcagaagtttatgggcaaactcaactactatcatatggttgaacctgaagtgattgatgacttggtgcatcgatacaatgagaagttcggagtggatgttatggcaatgctgaaagacgatcttcgcctgaaggacggggaggccgcttga

SEQ ID NO: 12195 - RNA, 1233 nt, synthetic construct
  source 1..1233: mol_type = other RNA
atgtacatcacctacctcaatccacctaagacaaggcagatcacctttgacgaaatccttgccggcgtccagaatgtggaagcactgcactatggtggtagtaataccagcacgatgactgtttgcaggaacgacctcacatcaaagctacgcgccataactaacgtgccggagatgatcgagaaactcgtagactataatgtgaagtacactgcgctggagtcatctgatatacccagccactactcgcatttcgagatccccaagaagagtggaggttggaggccaatcgacgcccctgatgagactcttagcgacgccctgatcgaactgcgtgagctgctgaagtccttcatgatcgctgattaccataccaatgcatttgcttatattcctaaccgaagcttcattgatgccgtcagaaaacatcaagccggccacaataaaaccgtagtcgatgaagctaccgggatgaagaaggtggtgaattaccagaaccattgggccgtcaagttcgattttcatggatttttcccttccactacacccgacttcttgctgggcatgatgtccgtcatctatcctttcgccctgattatgagagatgctcgcgggcgcgatgaattggctaaagcagtgaacttgtgttttctgaggaacggcctccctcagggcactcccatcagtccatggttaaccaacgtgatgatgatacccttcgatcattgtattacacggaagctctgttatgggtataaggccaaagacggaatagaccgtgagtttaccttcacaagatacgcagacgatattctcatctcttgctatcaccactttgacccgatggagatccaacagatcatcattgacgcattaaacttctttcacgcgccctttacgcttaatgaaacgaaaacccattacggaaaccggcactcctctaaaaattggtgcttggggctgatgtggaataaagataaccagattactgttggatggaggaatctaaagatgttccgatcagctatgacaaactatattaacgctaaacagcacgggcgcacctgggaacttgaggacctgcaaaagtttaatggcaagctgaactactaccacatggttgagccagaggtgattgatgaactcattcggagatacaacgccaagttcggtacagacattatagcgatgttaaaagaagacctgcggccaaaagagggcgttgtggcatga

SEQ ID NO: 12196 - RNA, 1233 nt, synthetic construct
  source 1..1233: mol_type = other RNA
atgtatattacctattggaacccaccaaaaacacggcagatctccttcgaggagattctcgccggggtcaccgatatatctaatctaagtcgcggaggcgataacacttctaccatgaccatctgtagagacaacctcacaccacgcttggagcagataacgaacattgactccatgatcaatcagctggcagcttttaatcgcaagtacgccgagctggaaagctcaaaccttccaagccattattaccactttgagatccctaagaagacagggggatggaggcccattgatgcacccgacaaagaactttccgacgcgctgagtgaactgcagcgtttactgaagtcgtttatgatagccgactaccacactaatgccttcgcgtatatccctaatcggtcctttattgacgccgtgcgaaagcaccaagcaggccacgtcaaaaccaaaaccgatccagagactggggagaaaaaaaccgtttgttacgagaacaactggtcagtgaaatttgaccttcatggattcttcccgagcactacacccgacttcctaaaggggatgttctcaattatttacccctttgctctcataatgaagtatcctcgcggacaggccgagctcgacaaagctttaaatctgtgctttctgaatggtggattaccgcagggcaccccaattagtccttggctgactaatgtgatgatgatccccttcgatcacctgatcacgaggaagctgtgctacggttataagatgaaggatgatatcgagagagaatttacctacacaaggtacgccgacgatatgatgttctcttgttactgtagctttgatcctatggaaatccaagaaattgtggtaaatgcactcgaattcatccatgctcagtttactttgaacgctgagaaaacgcactatggctctcgtcattcctcaaagaattggtgcctcggcctgatgtggaacaaagacaaccagatcacagtaggttggagaaatctcaaaaacttccggtgcgcacttacaaattacgttgaggccaagagccatggcaggacttgggagctggaagatctgcaaaagttcatgggcaagattaactattactatatggtggaacccgatgttatagaggatttgatccagagatacaacaagcgattcaacgtcgacatcatcgctatgttgaaggacgacctgcggcctaaagaaggggtggtggcctga

SEQ ID NO: 12197 - RNA, 1233 nt, synthetic construct
  source 1..1233: mol_type = other RNA
atgtatatcacctactggctgccgcagaaaactcgccagatctcattcgacgagatcatggccgggattctgaacgtgaatcagcttaagaacatcggtgacaaaactgctaccgttacggtctgccgaaacgacctgagtgatcgactctttcggataactaacaccccagagatgattgcgcaactctacgctttcaatgaaaagtacgtggctctcgagcagtgcgatcttaagacacactatcgccatttcagcataccgaaaaagtccggaggctggaggccaatcgatgcaccagacaaggagttgtctgacgcccagacggaattgcgcgaactgttgaacggattcatgatcgctagctatcacaccgcagcccacgcgtatattcagaacaggtccatccttacagcagttcggaaacaccaggctggccatatcaagaaaaaatttaaccctgagttgggttactctgaaactatcgtgtacgagaacaattttgcggcttcctttgacttccatgggtttttcccctccacaaatcctgagttcctcctccacatgttcagtcagatatacccctttgcactgatcatgcgctcacagaacggggatgaacaactgcgtaaggctctttctctcgtattcctgaatggtggcttacctcagggcacacccatatctccatggctgaccaatgtgatgatgatccccttcgaccatctgatgagcagaaaactgaccagagggtacactatgaaggatggagtggaacgtgaatttacatacactaggtatgccgatgatatcgatatctcgtgtccattaagctttgaccccctggaaattcagcaaatcattattgacgccctgcacttcataaatgctccttttaccttaaacgagaagaaaacccattatggaaatcggcactcatgtaaaaattggatgcttgggctaatgtggaaccagaataacgagattacagtcggctggcggaatatgaagtattttaaagccgccctcgcaaattacatcgacgccaaaaagcacggaagaagttgggagctggaagatgtgcaaacactaaatggcaagattagctattacaagatggtagagaagaacgtcgtcgattatattattgcaacgtacaacgagaagttcaaagtggacattgaagagatgattagagccgacctgaggcctgttgatggctacgccgcctga

SEQ ID NO: 12198 - RNA, 1236 nt, synthetic construct
  source 1..1236: mol_type = other RNA
atgtacgtcacttattggaacccccctcgaactagacagatcacgtttgatgagatactgtctggcgtggtcgatgtgaatcagctcaagtacgctggcgatgagacgtcaacccaaaccgtacaacgcgaaggactgaacgacagactagtggcaatcacaaatgtaacatcgatgatcactcagttaacggagtttaatcaaaaatacgccagactggaggcagtgcgggatctttccacatactattatcacttcgagattccgaagaaaacaggcggagtgaggcccattgacgcccctaccaacgaactttccgacgcccttgtggagctgagaactttgctcaaaagcttcatgattgctgattaccacactgccgctcacgcctacatcaatggacggggaaccctaagcgcaataaaaaagcaccaggcaggccaccgttatacagtgaaggaccgcgaaactggcaaggagaagattgtcacctatgagaacaactgggctgttaaattcgactttcatggttttttcccctccagtacacccgaattcatctactccatgttctccaagatttacccattcagcctcattatgaaggaccgaaatgggtacaatcagctgacaaaggctatgcggctgtgttttctgaatggcgggctcccacagggtacccccatcagtccatggatcaccaacgttatgatgataccgtttgattacatgctcaataagaagttaagctacaagtacaccatgaaagatggtatctctcggactttcacttatacaaggtatgccgacgacataaccatttcatgctacttgagtttcgatcctatggaaatgcaggatatcattaaagagacactcgatgcgatcaacgcgcctttcaccctgaacgaagagaaaacgcattatgggaaccgccatagctctgaaaattggatgttggggcttatgtggaatgctaacaatgacatcaccgtagggtggaggaacttcaaggactttaaaaaaatggccagcaactacattgtgtgcaaaaaggaaggcaaaacctgggacctggaagatctgcagcagtttaacggtaggctgaattactatcgtatggttgagaaggagtctgtggacacagttatctcacgctataacaagaagtatagggtcgacatgatggccatgctgaaagcagatttgaaaccaaaggagggagtggtcttttga

SEQ ID NO: 12199 - RNA, 1233 nt, synthetic construct
  source 1..1233: mol_type = other RNA
atgtacatcacctataaagccgcaccaaagactcgtcagattacaatagatgaaatcttagcaggaatcatagaaagcgagaaacttaaataccgggaggatgtcactagtacagttactgcctgccgtgatgagcttacgcctaggctcagggccatgaccgatattaaccggatgattcgcgagctggaagcgttcaataaaaagtatgagcagctagaatccgagccggatatgtcagtccattacacccactacgaaatcccgaaaaagactgggggtatgcgccccattgatgccccagataagatcctgtctgatgcactcaatgagttgcagactctattgaaatcttttatgctggcagattatcataccgcggctcacgcatatgtgccacatagatcaacactcaccgccgttaagaagcaccaggaaggccacgtaagaacaaagacaaaccccacaaccgggaagaaggaacaagtgatctacgaaaataactggtcagtgaaattcgacttccacggcttcttcccaagtagcaatcctgagttcgtcatggggatgctgtctgtgatttatccttttgccctcataatgcaggaccccttcggcggtcacgaggctctgtctgacgcccttaaaatcgccttcttgcgaaatggcctgcctcaaggatcacccctgtccccctggctgactaatgtgatgatgattccttttgaccacctcctgtccagaaagattcggcatggatttaagatgaaagacggcatcgcccgcgacttcacatataccagatacgctgacgacataactatcagctgttacctgagttttgactatatggagatgcaagacgtgattaagaatatccttgcttacatccacgctccctttacactgaatgaagagaaaacccattacggcaaccgacatagctcgaagaattgggtcctcggtttaatgtggaatcaggataacgagatcacggtgggatggaggaacataaagacctttaagattatgatgtccaactacattaggtgcaagaaggagaacgcaacctggacgatcgaggatgttcaggaattaaacgggttgatctcctactataagatggtcgagaaagacaaaattgaagctctgatcagcaaagcgaacaacaaatatcacgtggatgtaatggccatgattaaggacgacctgcggccaaaagacgccgcttga

SEQ ID NO: 12200 - RNA, 1335 nt, synthetic construct
  source 1..1335: mol_type = other RNA
atgcttgctcagaagctgattaagacaagccccgaagctcatcagtcaaatgaacgcccaatcggaaatcgtagactggaactcctgcggcagcctacatccctgagcgagcacaagcacaaccctcatattcggtcaacacatatggtatacattacctacaattgtcctgagcggtttagggagatgacattcgaagaactcctgaggggcgacttcaacctcgccaaccttagcactggaggccatggggccactaggaccgtaatatgcaataaggtgccaccccgcattatgagaatcacaaaggtggaacaaatgatcttccagctgcaagcattcaatcagcagtatgagtccctcagattgacgaccccacggtcgagtctgtataaccacttcagtatacctaaagcatcaggaggcctgcgttggattgacgcacctaacccagaccttatgaaagctctgaaggagctgaagaccctcttccagtcatggatgttcgctgaccaccacacctgtgctttcgcctatgtcgaggatcgctccgtgctatctgcggcaaaaagacaccagaaatttaacgcctggtggttcgcgcacttcgatttccacggattttttcccagcactacgccggagttcgttttaagccaattcgagctgatttatccatttaacctgattctggcaagtcctatcggccatgcggagctgtttaaagcgttggatctctgttttctaaatggcgccctccctcagggaaccccgatctctcccttgataaccaacatcatgatgatcccgtttgatcatgccttcgcaaaagccgtcaatcactttgagtctgggaaacataatcctgacgggacccccatcaccgatagactctgctataccaggtacgccgacgacatagaagtgtcttgcaaagtgatctttaactaccacgctgtggagcggctgatcgttcagttactttcccagatgaacgctccatttactctgaatgagactaagacccagtttcattccagggccggccgcaattggatcctaggtgtcatgttgaacaaggataatcagattacagtcggttaccgaaaaaacaaaattttcaaagccacgatcgacacttattttcgagataagcaaaaggggaaaaagtggccagatgaagacttacagagttttcaagggaacatcacatggttcaaggatgtgcaacccgacactactaagtacattatccagaagtacaatgcaaagtacggtcttgatctggaaagctgcataaaggctgacttggcccccccctctgttacagcctga

SEQ ID NO: 12201 - RNA, 1191 nt, synthetic construct
  source 1..1191: mol_type = other RNA
atggtgtacatcacctacaacacccccgaaacggtaagacagatcacttttgaagaactcatgctgggagtggacatccctctcgattcactgcgcagcggaggtcacggatctacccggaccgtggtttgctctaaggttcccgaaaggattatgaaaatcacttatctggacgccatgatcagccagctgaagatgtttaacacttgctataaggacttgatcgattaccctaataagtgggagctttacgaccatttcgagattccaaaaaagacaggcggcaagatgcgcccaattgatgctccacaccctgagctgaaaaaagcactggcgcaacttaaagatatgatgtccgggtggatgtttgccgaccaccatacctgtgcattcgcatatgtcaacggccgctcgactaaggatgccgtgataaaacatcaaagattcaggagttggtatttctgtcactttgatttccatgggtttttcccttcaactacactacactttgtgttaaaacagatggaggagatctatcccttcaacctcatccttgccgatcctatcgggagacgggagctcagacgtgcactctccctggccttcttgaataatggtctgcctcaagggacgccatttagccccttcattaccaatgtaatgatgattccgttcgaccataagttcgcaaggctgttgaatcagtttcagtcaggcaagtgtaaccccgacggcaccccgataacagatcggatttgctacacccgatatgcggatgatatccatatttcctgcagggtctttttcaattaccgcaaggtggaacgggaactcatcgccatgttacacgagctcggcgccccattcacactgaacactgaaaagacgcactttggaacacgtgctggtcgaaactggatgttgggcctgatgcttaacaaagacggagacataactgtcgggtatcggaatcacaaaattctgaagagcacaattgagacatattttaaagacaggcgaaatgggaagaaatgggatgaggaagacctacagaagtttagaggaaacatctcttactacttaagtgttgagcccgccaccatcgctggcgtgattcagaagtacaatgccaagtacggtgctgacctgctgacctgtatatccaacgacttgaagccaaaagctgcttga

SEQ ID NO: 12202 - RNA, 1155 nt, synthetic construct
  source 1..1155: mol_type = other RNA
atgccttatatcgtggtcaaagcaccacctcggtataggcaggtgtccgttgacgagtttttgtttgaggatgaagcacgtacttcttacgtggctctgtgcgaaactgaaaccatcacccggttccgagatcacatccccgggaacgtgagagatgcatacaatatcccactcgccatcagagctctccagtcatttaacgaaacacactcagagctatttgagccagaccgaacggcgctctatcatactttctatataccgaaaaggtctggcgggggagtgcggaggattgatcaacccctgcccgagttaatgaatgccctgtatgaactacgccgcatattcgaaagcatgttccacgcagatatgttataccatacgaccgcccatgcatacattcacaaaaggtcaacggttactctggtccgaaagcatcaacagaacgcctccaaatggtttgctcactacgatttccataatttcttcggatccgtcaccccagagttcctgagcaaaatgttttccatgatttacccttttagcgcagtgatgcaaagcgctggcggcaaagctgccctggagaaggccctttccctctgtttccttaatggcggcctcccccaggggacacctatttcacctatgctgaccaatatacttatgattccctttgaccacaagtttagtaaccacctggaggcgtttggagagcgcaattacgtatacactagatacgccgacgacatcagtattagctccagatctccatttgactacaagaaagtagaggccgagatcgctgcctcacttaagacaatggaagcttcgctggaattgaaccggaagaaaaccagttacggtaataatactggatctaactggatgttcggcatgatgctgaactccaagaacaacatcacagtcggttggaaaaatgtgaaggccttccgctctaccctgaatacatacctgtatgagaggagtcaggggagattctggccgcttgaacaggttcgttctctgagcggtaccataagctattataagatgatcgacgagcaatggttgaacagcatcctcgacatttataaccagaagtacaagacaagtgtgcgctattgcttgaaacaggatcagaagcggaagcagtga

SEQ ID NO: 12203 - RNA, 1146 nt, synthetic construct
  source 1..1146: mol_type = other RNA
atgtgttactacgtatgtcttccaaaaactgaatctaaacccaacatctggtcctggctcgaaggggatattcattcaccccagtggctatggggcacgaaatcagccgctgcaactgtcacaaggagggttgactttattagcgcgagtgtgaaagacaaatacaacgtcaacttcattatcgggaccttagatgctttcaataagaaatggtcctatctgggtcaggagattgagaagcactacagtcacttctacatacccaaaaagaaactggacgagtacggacgcgtcaaatggcgagagatctgcgcaccagacgatgagctgtcagaggccctaaaagatctgaaggaaatctttgaagctgccggcgttagcctgcaccacaccaacgcgtatgcctatgtgcgccataggaccgcctctgatgccgtgtccaagcatcaatacaaccatagtcggtggtggataaccaccgactttcagaacttctttggcaatacaacaaaggactttctcatgagcatgatggctcagatattcccattttctgcagttatagagagagacttcggtaaggagtgtttgtcacgcgcactggatctctgtttcttgaatggtggactgcctcaaggaacacctattagccctatgctgactaacatcatgatgattcccttcgattatatcatgaccaaaaagtgccgagaaaaggattacatctacactaggtatagcgatgatattcaggtgtcgcaccggagaaagtttaacccggacgaggtccttcgttttatccatgagactctcacccagattcacgcccctttcacaatcgagaaagagaagacaaagttcaaatctgggaatcagtttgtccttggcgtgatgtataatcaaaactgtgacatcacggtagggcacaagaataagaaggaatttaaagccaccctgtttaattacatgtgcgacagactcagcggcaaggtgtgggctctgccacagttgcagcagatgatgggaaagtatgcatattactccatgatcgaaaaggaatacttcgagaatgtgatgaaggaatattcccggaaattcaaacaagacgtgatgaagtgcattaaggctgacttaagacggtgctga

SEQ ID NO: 12204 - RNA, 1233 nt, synthetic construct
  source 1..1233: mol_type = other RNA
atgcagttcacttccctagctaggcccagtttgcaatggaccgcccacatcaaggtgacagagaagaagggattcgttatgtatatcacttacaaggttccaccgcgatatcgccagatgacctttgaggaaatgctttctaatgagacaaacctgagtgaattcaaatactcatcaaacagcatgacacggactatcgttcggaaggtcctcccttctaagttggtagacttcacggatattccccggctaattaaacagtttgaggacttctgcgagaagcataaggccctttatgaagtccctcgtgcgtctctgtacgatacctggagaactccaaaaaaaaagaaaggcccccatggggagactaaatataggaccatttgtaggcctaatagccaagaactccgcgacgcgcataccgaactgcagagaatcctggaggattcgatgatcgcatcctaccacactcgcgcatacgcctatatcaagaacaggcgtaccaaggacgcaatacaggtgcaccaaaaatggaaaagcaaatggttttccgacttcgactttactgatttctttgggagcaccaccctggaattcctgagtcagatgatctttatgagttacccattctgtctcattcctgaggagcatcgggagacagtgagaaaagccttggacttatgctttttaaatggaggccttccacagggtacaaccatatcacccatgcttacaaacctcatgatgattccgtttgatcacatggtatccaatgagttgcacaagcatgatggcgaccgcttcgtctacacgaggtatgctgacgatatcagaatatcctgccgggtgcaatttgacgtgaagcagatggagagctatctgataaagaaactcagacagttcgatgctccttttacaatcaatccagagaaaacaggatatgggtctattaatggcaagaacttttgtctgggttacatgctgaataaagataaccagatcaccattggacacgaaagaaagaagcgatgtaaagccatggtgaataactacatcctggacaggatgtcagggcagccctggtctttacacgaagtgcaagtcctgaatggccagctcaactattggcgctatgataacgaagacggtacgtacgctgtcatgattaacttctacaaacgaaagtacggctgcgacgtggaaaagtggattaaggcagatctgagcgcctga

SEQ ID NO: 12205 - RNA, 1335 nt, synthetic construct
  source 1..1335: mol_type = other RNA
atggtcatccgggtgctcgccatttatgatctcagccagcccaataaggctttcattccggtgatctccccttcccatagaattcaaaaccctactcagatcacggaaactactcataggaaagagtacatgatgatctacatcacttactcgcagcccgccagatatcatcaactgaccttcgaagagatgatggccggaattaccgtaaatgatattgccgagctccggaccggtacagtaagcggtacacgcacagtgtgcctcaaacgggtcccaaagaagtttcgcgacgcagccaacatcccagagctaagggctcggttgcagatgtttacagatacgtacaacactatgatctccaatccaaatcgccagtcctactactacaagttttttatccccaaaaagtccgggggcctgcgagaaataaatgccccattgcctgacttaagagcagctctagtgcagctgcacactatactgtctggtgcaatgctggccgatcaccacactgccgcttttgcctatgtgaccgggaggtctacacttgatgcagttaaacaacatcagaaatgggaatcaatgtggttcgtcaagtttgacctgcacgacttcttcggaagtacaacactggacttcctcatgtcaaccttctcaaagatctaccctttttgtatcctctgcgaggataaaagcggggaagaccttctgagaaaagctcttagtttatgtatgctgaacgggggcttgcctcagggaacccccatttctccgtttctgacgaatgttatgatgattccattcgaccatagaatgtttaacacaatgcgtaactttcgtttaagcgaaaaccgaaccgatcgttttgtctatacacgctatgcggacgatatgtgcatttcctgtcgcgcggggtttagatacaagaccgtggaagactatattgtgtctaccttgaagtggatgaacgctcccttcgaactaaatcgcgagaagacccactacgggagtcgatgcggtcggaattggatactgggagttatgctgaataagaacaatgaaatcagtgtgggcgagagagagaaaaaatatttcgagagcatgttgacttcttactatatgagccacggcaggggaacgtataggggccacttcgacaaggcactcaccaaaccttggccaatggaggatgtgaggaggcttcacggcctgtattcatactacaagatggtcgagcccgcccggattgcggagatcatcgaagaatataacaagaagttcggcatgaacttcgaggctctgctgaaaatggacgagcagcttatagcatga

SEQ ID NO: 12206 - RNA, 1170 nt, synthetic construct
  source 1..1170: mol_type = other RNA
atggagaataaaattatgataaccataccgcagccagagaggttccgagctcccactttcgatgactatttgcgcggcctcaactcgttcgatcagctaaaaacttacgatgcaactgggtgtgttacgcggatggtaaatgtggaagctgtccgtgggaaatttgacctttccgccttcaagttagtactgaacaactttctaacagcaacagaaaagctccgtgcggacgacattcatactcattaccatagcttcaaaatccccaaaaagtctggtgggctgaggcagattaacgccccagatgatgaactgaaattcgccctccaaatgctggttaacatactgtcaaacgtgatgcctcgaacgtaccataccaatgcatacgcctacgttacaggcagatgcacctatgatgcagtcgccaaacaccagaggtgggagagcaattggttcggccactttgactttagaaaattctttgacagcacgaccaaggagtttctgatgagtcagatggcgaagcagtatccatttgcactcattaaggaggacgtggagacttggaccaaactgagccaagctctggacttatgctttcttgatggaggacttccccagggcacaccggcctcacctttgctgaccaatatcatgatgattcccttcgactacgaggtgacacaggacatcaaatccatgcctaatagaaagtgtccaaacggaacagatcgctttatctatactcggtacgctgacgatatccacatctcatgccgggtggagttcgacattaaggagcaggaaagatatctcatcaagaagttgcgcgaacagaacgccccttttacaatcaatgctgagaagacccactatggtaataggtctggacagaattggatgctggggtatgtcttgaacgcctctaacgccatcagtattggccaccaaaacaagaaacatattaaggcgatgatacacacctacgcaatggataagcggaaccagatcatgtgggataaggacgatctcatgaccatgctgggcaaaattcaatactggcgcttctccgaaaaggaattagtggattatactctggagaggctttcccaaaaatacggtttcgacgtgctggaagagatcaagaccgacatgggaaatgccgcttga

SEQ ID NO: 12207 - RNA, 1155 nt, synthetic construct
  source 1..1155: mol_type = other RNA
atgccatacatcacgttgcgggccctaccaaattaccatcaggttagttttgaggagctgttaactaatagcatcgatttgaagcagttcttctacaataagacaccgtcaaacactagaacacactacgtgcagaatgtgaacaagaaactcattacctccattaacttcgacgacatgaaaaaatccctctatcacttcatagatctcaatcaacaattcttcaacggcaccatatctagcctgtccacaatgtacgacacattttatatacccaagtctagcgggggtctgagaaggattgacgctccgaatgatgaactcatgcggaccctcaaggatctcaagagattgtttgaggataagctcctggctatccatcatacatgtgcatacgcctacattcctggccggtgccctctagatgccattaaacgtcatcagtccaacgagagtaagtggtttggaaaattcgatttcaacaacttcttcggaagcaccacccaggagttcctcgagtctcagcttaagcaaatctttccatttagtgaacttctgaacgacgcccaaatttcggggcttttccaccaggtgctatctctgtgctttctgaataattgtcttccccagggaacacctatgtctcccatgctgactaatatcatgatgatcccaattgactttcacatctcaaaatggcttaggagcctggacaagcacacttttgtgtacacccgctatgctgacgacatgcagatttcaagccgatcccctttcaatatcgggaaggttcagaacctgatcctggacgtactgaacagttttcacgcgccctttaggttaaacgatgaaaaaacgcgctacggctccacctcgggctctaattggaacttagggctgatgctgaactcacagaacgagattactatcggctacaagcgaaagaaacagctcaagataatgctgaacaatttcttgtacgactattccaacggtaaattttgggatgcatcagaagtgaggcatctgcagggacagctgcaatattatttgagcatcgaacccgattacataagctatcttgtcgatcgctatagccagattcacaatgtcaaaatctatgacaccttcagtaaaatcttgaagtccaattga

SEQ ID NO: 12208 - RNA, 1167 nt, synthetic construct
  source 1..1167: mol_type = other RNA
atgctgtttactttctacaaaaaagaagcagagacaaacgtgaatttcacagatctcctagaccaattctataagggtactatgccactttaccatcccgaagagatcaagagctacaagaagacaataaccgtcactctgcccgcgcctataactgatgaagccgccaatgaaaaataccacgtcgacaaaatggtggaggccctgaaagagtttgaggtagcaattgacctgcttaacaatattccgcgaaaagatctctaccgtttctttaccatcccaaaacgatcaggaggactgaggcagatcgctacgccttgtcctgagctgatggccaccctcagagatctcaagaatgttttcgagtacaagataaagtgtctgccccacaatgctgcctttgcctatatcaaggagaggaactgtaagcatgccctggaggtgcaccagagaaacaagagcaggtggtttctgaagctcgacattcacgatttcttcgggagcgtgaccgttcataacatgatgactgagtttggcaaaatttttccactccagacgatcatggaacgggttcctgagctgttcgtgaagatccttgacatctgcaccctgccaaatgagcagggccaatgcgtgctgccgcaaggaacaccaatgtctcccctcctgaccaatctatatatgattgggtttgatcacacaattcagaacaccttacgggactataaccatcagcaatttgtgtacacgcgctacgcagacgaccttttgatcagttcacagtacgacttcgattacaaagaattgactgcatacattgcgagtgtcctgcagctctatcatctgcaattaaatcccgataagacccggtatggatccaacgctggcaggaactggaatctaggcatgatgttaaataaggacaaccagattaccatcgggcaccagcagaaagaacgcttgaaagctatgttgcacaacttccttagagacttcacactgggtaagccttggtccatcatagatactcaggtcttggtcggccaggtatcttattatcgcaacatcgaacctacctacgtgagagaactcatcaagaaatatgatgagaagctgaatacagactttaaacagtgcgtgaaaaagattcttcggcccaagacatga

SEQ ID NO: 12209 - RNA, 1194 nt, synthetic construct
  source 1..1194: mol_type = other RNA
atgctttacacttacaagataaagtacgttgaggagcgacataatgtcgaaaacctgctggatgtcctctacggcgacgcaccggctcagacagaaaccgtgcggagtaagaccaacaaagtgtacaatgactttagctacgatcgatttaaaacgaccgaaactacccctgagagatttatactgacttcgcctcatgtgaactcagatgagcagacgttaagacaaatctataacctcacagcagaaattgagtctttcctgaataataacccatcccccgcgaccatgtatcacaatttcaaaatccccaaacgcacaggagggttccgtgaaattaatgcacctaacgagacactgatgaagtttatgagagatatccagccctggttcacctacaaactgaacgccctgccacacgactccgcttacgcatacgtatataaaagggattgcaacaaggccattcagaggcatcaggccatcaagagcaattggttcctgaagctggatataaaaaagttctttgacaactgcgatcccgcctttcttcgccaacagttaaaaatgatctacccctttggtattatgcgggatcaggattaccaccgtttcatggacgcgctgattctattgatcacattaaacaatggactgccacaaggcacaccgctcagtccagtgataactaatctgatcatggtgccaatcgatcgcgatatcaacaaaaagctcggcacttatttcaaggacaaacagcagtctttcatgtacactagatatgctgacgacatgctcatttccagcaataaggagatgaacgtccaagaggttgtagggattatcgacaccatcttgcacacttatactaataaactgcagatcaatcctgacaagacccggtatggctctaaagccggatccaactggaaccttgggatcatgtataataaggacaataagctcacagttggttaccgcaggaaaaagaagataaagacaatgttgttccagttttacagctgttacaatgaaggcacccgggacaaagaatatgctcaggccattttgggggagctggcctatcttcacaacattgagcctgagtataccagggaactcgtgaggttcatggacgataagtattcaacggacttttacaccattctacataagacagtgaaagagaactga

SEQ ID NO: 12210 - RNA, 1065 nt, synthetic construct
  source 1..1065: mol_type = other RNA
atgtattatactcacaataccaagaatcagaacgatagcaagtatcaaagattctcaactaccaaactgaaatccgaagaaatcaccattgagcaatatcgggagttcgaggctattaacaaacagatcttagggctgactaaaaagatcaaagactggttgacaaacaaccagtcggcgatcaagtactcaatcttcaacttacccaaaatgaccggcggctttagaactattaaggctccagaggaaaaactcaaaagctttatgcgcgagatcaaatttgacctggaatctattggcatcgttccacacgattccgcctatgcctacattccaaaccgggactgtctcaaagccattcagtgccatcagagaaataaaagtaactggttcctgaagatggaccttgagaagttctttaataattgtagcgaacaggtcatagccattcaactcaagaagctttacccttttagtttgatgacggagactgattatacttcattcatatctagcctttgcggtctagcatgccacgaaaatgagctgcctcaggggacacccctatcccctatcctgacgaactggctgatgatatccattgacacacagatcaataacgcgctggccgaaaggtctgaggagagcttcatatatacccgttacgcagacgatctgttagtgagcagtaagcagccctttcggcacgaagagatagtggagctcgtcaagggagtattggaacaggaaggtacccccttcacaattaaagatacaaaaacccgatacggatctcggtcaggtaagaactggaatctcggcatcatgtacaataaggaccataacctgacagtgggacataagcgcaaaagacgcattaagaccatgttgtttcagttctatagggggcaacgagacaggggctacgcactggaacttaatggagagctggcttacctcaagaacatcgagccggattaccacgattacctgatcgggtttatgaattccaagtacaggtttaacttcaagaaagccattaacatcgctatcaagcagaattga

SEQ ID NO: 12211 - RNA, 1149 nt, synthetic construct
  source 1..1149: mol_type = other RNA
atgtacataacctctatcaaaaagaatacgggacctggaaacagtaaagcccagctgaacttgattgattccctgttcggtgagtatcaagaacctgacataattatcgatgccgggaggtttattagaaccagaacaaccagtgcttccacaaatgccttaatggaccttaacaactatgacaataacgtcagatacctgtacaggaaaatctccaacttcctgtatggccacgaaattccctctatgtattatgagttcaagatccccaagaaaagcggaggattgcgcaccatcgatgcacccaacgacgaactgaagaccttcatgtccgagattacccatgaattcgggaataagtttaagctcttgacacacgactcagcatttgcctatgtgaaaaatcgctgtgttgtagatgcggtgaaggaacataataataatggctcacggtggtttcttaagatcgacctacataacttctttgggtcttgcacaaaagactttattgtccaacaactgaagcagatctacccatttgctaagcacgaggctgaaacccccactaaggatctgctcaacgccctcgctgatctggcaacattgaataacggcttaccacagggcacccctctgagcccgatgcttactaactggattatgatcccatacgattatcgaataaaccttctgctcaatactctggttaaacaggagaaacttctgaagcagaggtatatctacactcggtatgcggacgatatcattatttcagcaaaggagaagttcgacaaagacattatcgtgaaggagatcaaaaagctctttgagcacagtcctttagagataaatgagacgaaaactcgatttggtagcaatgccggcagaaattggaatctaggagtgatgctcaacaaagataataacatcacagtgggccacaagcgcaagcggtacataaaagacaacatctactacttcatcaagttcaaagagacttgggacaaggagcagtgtcggtggctgctgggtaacctgtcgtggcttcagaatgtggaaccagaatattgcattgggctcctaaactactacaaaaacaagtacagcttcgatgtactgagggaactccatttggtcctgaaacgttga

SEQ ID NO: 12212 - RNA, 1098 nt, synthetic construct
  source 1..1098: mol_type = other RNA
atgtatctcaccttctacacgaacgctgccccgaaacagctgacctgggctgatattctgaataacccatacatcaccagacaaacctcagacatcactaagaagaaagtcactaaagagatccctgacgactacgcggaaatcctgtgggctaagcgtagagtgatgtacaatcccaacctgattccgaccgatgtgaccgctattgatacctctgaacattaccgccactttcaaattcccaaaaagagcaatcccacaaaaatgaggcagatcgacgcccctgatgatttcttggggaacatccagacgatgtacaaaaatcagattgagaatgagttgcaggttctttctcacaaagcagcccacgcatatgtcgccaaatgtagcacagtgactgccatgcagacacaccagagaaacgattccaagtggtacttacagatcgatctgaaggacttctttaatagcataacaggagagtggctaaaaactcaactgctccaggtgtttcccttcccactaattgaagagcgggaactggacaaaattatccatgttagtctgctgaacggtacattacctcaaggaagtcatctctctcctctcttgaccaatctggcaatggtaccaatagactacgttcttaccgaaaagctccacaatctgaatgggcaccattacgtgtacacaaggtatgccgacgatatcacaatctcgtgcaaggaaaaatttaacgagcacatgatccttggccttatcaagcacatatttcgcgagttcaacgtcccctttcgagtcaacaatgacaagactaaatttggctccatagcaggtcggaactatcatctggggatcatcgtgaataaggataaccagttgagcgtaggccatgagaagaatcagaagttcagggccatgatttttaacttctgcacgataggcgacgaatgggagttacacgatgtgcagaagatgctcggactgatttcatattataaggccattgaaccagacttcgtcaataaggtgatcaacaagtataacgagaagttcaacattgacattatgtccaaagcgaaagctatgctcacttga

SEQ ID NO: 12213 - RNA, 1185 nt, synthetic construct
  source 1..1185: mol_type = other RNA
atgcggcatttaaactcaagtgatttgcagagactgcccgtaattaccgtgatggaagaaactaagatgtattataccatccaccgcgaaaaaatcaattatccggaagtgaccctccggaaaatcctattgaataagcccattccagagaagacaaagctcagggagtatacaactgtggagatcccagacacgaccaactttaccctgactgaggacgccattcgatttcgtgactacatcctgaatagctgggaaagcctgtccaaaagcagtatccagctgtactcctcctttaaaattcccaagaaatctggtggcctgcgcgaaatagacgctcctgtccagggacttaagacaattcagtccactttggcctattggttgcaagacgagcttcgaattcttccacacgatgccgcctatgcttatgtcaaggggagaagtcatattgagagcctgaaaaaacaccagaatatgcaggccaagtggtttctgaaaattgacttctcaaacttcttccccgcacataataaggaatacatcctcaatatgctggagcaggtctatcctatcggggcactgatcaaaaatgatagggccgtgatatctaagatgttagacatctgtcttctcaacgataaactgccgcagggaacaccagtctctcctgcactgactaacatctgtatggttcctatcgattacgctattacgaatttatgcgtgactctggggaagaaatacaacaccttctttacatacacacgctatgctgatgacataattatttctgccggaaagtcattcaaatggaccggtgtgatcaaggagatagaaaacatcctgaacaactttaacgccccattcaagatcaacaataaaaagaccaggtacggctcgaatacaggcaggaattggaatgtgggcctgatgctcaacaaagacaaccggatcaccctcgggcacaagaacaacaaaatcctcaatgctaagataaacagattctgctacgaaaacatcgttgagaaaaagacttggacagtgcccgagattcaagagctacagggcaatatagcgtatgcgaaggcagtagatcctgattacacgaattacattttgcacaagtacaccgtcaaatacaagaccaacgttgagcaatgcatgaagaatatgctttactga

SEQ ID NO: 12214 - RNA, 1155 nt, synthetic construct
  source 1..1155: mol_type = other RNA
atgtacatcagttatatcaacaagaagaacaaccagattgaaacgcgtgacacaagcggaccgacggagaaaaatatacaggagcttgggaaaagactccagtgtttctactacctgtacgaggaggcattaaaaatactccagaatggagacgtctcgagccgctaccggaccgaggacaggctgaagaaaaataagaccaggcgacgcattgacgtcccagatgaagagctcatgaagtaccaaaagaaggtggtggacatttttaacaaccacctggcactggtctttcctcagtccgtgtatggctatgtaaaaggtcggagtcccaaagccatggctgaggttcatcggaatcagtaccaagtaatcaagatggatatcaaagacttctttcccaattgcacacttgatttcattatgaagagcatgtctaccgtctatccattttgcctgctggattcagagctaattgaaaccatcatcaagccctgtatgatcttttatgacggccaataccgactccctcagggagcccctacttctcccatcttgtctaatatagcgatgatcccagtggactatgaacttgaatccggcgccttgaatggcagagggtacaattacacatacacaagattcgctgacgatatcatcatttcacacggcgaatttgatttctcttccagtataagcgctgaggaaagaatcctcagcctaatattcggtattgagtatgaagaacctccaaaatccttggaagagaaatacagcgagattaagaagataacctgcaatgtgatcaacaccattaaggattgcttacacaaccagaacccgaacttcaaaatcaattccgagaaaactaaggttctcaacacagagtgtggaaacgtgtggatgctgggtgtgaccgttgggcaggatgtcaagattgggaatcaaaggaaacagggcctgaaagccactctgtggacatttcttaacgattgtaagaacggaaagccttggtcacagaaggacactcgccatatgttggggattctgggttatgccaaatatatcgagcccaatttcgtgaacgagctgattgcaaaatatgaacagaagaccggcacttcattcaggaaggaagtgaagaaaatcctgtgctga

SEQ ID NO: 12215 - RNA, 1131 nt, synthetic construct
  source 1..1131: mol_type = other RNA
atgtatataacatacatagaccaggacaagatgcagaaggtgacctgctccactaatattattaccgagcgtaatatcgcatacgcggagagggagaatggatccttgatctcacttgccgaggaggctagggagctgttgaagaagggcgtcaattcaaagtacacgacctactataagaagaagagcaatggccagaaacggcagataaatgtgcctgatgacgagctcaaagcctttatgagaaaggtggtcaaaacctttactgctatgagcgggttcatgtggccggataacatgtacgcttacatcgaagggagaggcatcaaacagcacgctgaactacacaaaaacgctgccgtcatcatccgcatggacatcaaatcgttcttcgacaattgcaccttcaagtttgtaacggagtctatgaaggaggtctaccccttctgtctgatggattggaatttactcgagcccatagtaaaagcatgcatgcttaaggggcgtctggcccagggtgctcctactagtgctattctttctaacattgcgatgattccatttgttacacacgccaataattggaccaaagccaagacaatcaccctgggcctggcaccaaggggaaaatactttaagatgactaagggtacccggaggaaagcaacatctattgtggccaaacgcatcatcttcagcatgtatgccgatgacattatcatctccacaaacataaaggccccttttggtgaaaacgcgtggaaaacaatccggataattcagaaattactcaactggtatacgccactgcaagttaaccccagaaagaccaaatatgtggatattcggagaaaggggggagcctgggtgacaggattgatggttaataaagaacacaacgttactgtcggccgagagaagaaggaaaagctgaaagcaactattttcagctttctggcagattgtaaaaacgggaaaccctgggacgaacatcgcgtgcgccaaatgatgggcactgtgtcctatatccgacatatcgaacctgagttcgtggacatgatcattcagaagtataaccaaaagctcaacattgattaccatgaacagatcaagaacatcatttacagttga

SEQ ID NO: 12216 - RNA, 1161 nt, synthetic construct
  source 1..1161: mol_type = other RNA
atgcgggaaaacgtggtggaaattaccagaacgcacatcacaggaggagctgcaaatcccgtcagccatatcgagaactggtacgacctggctgccgtattagggctgaaaactgggaccttgtcctatgctctgagagagcgggataaactgcaaaccaaaatccgtttaggggacagaactgtttataagtctgggcgagctctcaaagtgatacagtcgcgcctgacaacactggtagaacctcttttcgacgcacttcccgggaatgagtgcgccttagcctatcgcaccggcgtgtccgccacagatagaatacgtgaaatcccccatgctcggatgctcgtcacatttgatatccgaaagtactacgataatgtcactctaagacacattgaggagtgtctaagaggctgcggcttccgaactcttggagcgcggctggtgggtcgctactgtgtggtaaggcgggagggcaggtgcactttgcagcagggatcaccagtgagccctgcaattagcaatattgtgggtcatttctactttgataccccaattcgcgcgtggctgggctctgagtttccagacgtcagggcgacgtatgtgcgctactgcgataatatcgccttgtttctccacgatggagttccggagggtttcaccgacaagttcaagtccttcgttagagagacatttaggagcggggggttccgaactcacaaatggaattgtatcacagacagtaaccccgtaaaaaatcagaagtttcttggcgtcgtgctgaacgccgaggccagggttgaactggttgtggtggatcggctgagagccatactctttaattggtgtttgtttggcggtcaatgcacggcagacaggtttatgagtgaagagggcatccagctgcgcgacttcatgttcgatggaatgaaagtcgggaagctgaggcagataatgcggggacatattaactacgtcaagaggatcaactccaaacacggcctgtggctcgacaagctcttgggcgctgctctttatctcgatgaaaagggaatgcctgcctgcgcaaacgaggaaatgttccgccgtgtgaagaagtacaaagactgtaacgaatcttatgacgacttcatggccggtattacctcaatcaccggctga

SEQ ID NO: 12217 - RNA, 1149 nt, synthetic construct
  source 1..1149: mol_type = other RNA
atgcagatcctgcggacttacgttgaagatcagagaaccaattcagtgaggcatatccgcgactggtacggattggctgccgtgttgggcctgaagacaaacatactagcgtatgcgttgaaagaacgcgacaaattgcaaactagaattaaactcggagatcgtactgtgtataaatccggacgggccttaaaagtgattcagtcgagactgaccaccctggtggaacccctgtttgatgcgcttcccggcaatgagtgtgcattggcataccgcaagggcgtcagtgcaactaagtacatccgcgagagcataccccacgcaaggctgctagtaaccttcgacattaagaagtattacgacaacgttacacttaaacacattgaggaatgtctcacaaagtgtgggttccaagtcctcggtgcccgattagtcgggcgctattgtgtggtccgaaaaggcaacagatcaacccttcagcagggctccccggtgagtcctgccatctctaatattgtgggatacttccatttcgatgtacctattcggagctggctgacatccgagtacccagacatcgaagctacctatgtccgatactgcgataacattgcactgtttgtgcacagcgatgtgcctgacgggtttacggagaagttcaaatcctttgttaaacgtgctttaggagatggcggatttaggactcacaaatggaactgtatcacggacagtaacccagtgaagaatcagaagttcctgggcatagtgctaaattcacaggctcggatggagctgtgcatcgttgaccggcttcgcgctatcctctttaattggtgcagattcgggggattcgccgctgccgaaaggttcatggctgaagaaggcatacaactcagggagttctgcatcgacgggatgaagctggccaagtttaggcaggtaatgcgggggcatatcaactacgttaagtctattaacgagaagcacggcctctggctggacaaactgtttgaggctgccacatatctcgacgcaagagatctgtgcgcatgcaataatgccgagctgttcaggtctatcaagaaatataagaacggtaacgagccacttgatgagtttatgagaggtgtcgaagccagcgccggttga

SEQ ID NO: 12218 - RNA, 1293 nt, synthetic construct
  source 1..1293: mol_type = other RNA
atgaagtgccagaaatatacggaagaagtatttgactctccactcagcctcgtgcacggatgggacgaattgggcgcactgctcaaaatcaaaactaagtacctttcttgggtgggtggcaaggataagaatggtagtctcaggcggaaccacatgcagcacttagtgaaggtcaagggtagagacacttacaagagcgacacaactttagcgcgtatacaaaccgctctgaatattcctttcgatcagattcaggactccttcccccatgagcacctgcttgcttaccgaaagggcgtgaattacaaaaaggagcttcagaaataccttgggcgcaaatacatggtgcactgcgatatcaagggctactttgataacatatcaatgcgcaagatcgtgaagacgttgtgcgctctgggcgccatgtcagaagcaggggctaaactgatcgccagatattgtattgtacgccgaagacaaagcgaccggtgggtccatacactgcagcagggaagcccttgtagcgccctgctatccaatctagtaggctacgcgctgtatgacagggatattctagcgtgggttgcccgcaaacagaaagagtatccacgagcctctctcgaatacgtcagatactgcgacaatctggttctctttgtcgatggagatgcccccctggagctgataaaggagtatcggcaatatgtgcatgtggtgatgagtaggcgcgggtttcagacccacaaatggtctgttaccccaaagaaccacccgttcaggaatcagcgatttctgggagtggtactgaatgttaaagccagagtggacctggagcgtttccagcggattcgggctgccttgttcaatgcatgcagaactagcgttacagaggctgccaacacctatttctcactgtatcccttcagggccgcagagttccctaccgagaacgtgggagaagaccgggccgtgttcgcaatcactcaacatgcaagagatgaacagtttttgagtatcatgaggggtcacgttgcctatatcgattccgtctccaaagaacaagggtccctgctcaaaaagctttttcaagcatgtgtctttctcagggaaaaccctcagggggtcagtcagcgtttggcggagcccgtgttcctggctctgaagacatacaacaggaaggtcgaatcagtcgaggtgtttctcgaaagactttccagtgcttgtagccggacccgcaactcctcggagtctttaacccaggagaacacaggccattgggagtctgtgttgtga

SEQ ID NO: 12219 - RNA, 1155 nt, synthetic construct
  source 1..1155: mol_type = other RNA
atgaaactgcgcagcaccgaagcatctcagatgatgaagctcatcgacaacttctccgaattaggctcactactccacatcaagaacaaccatatggcatacgcccgtaaattccgagacgatcttcgccggaaaattaaagtgggtaagcgaaccgtctatgcttctaaaagtccactctcggttatccagcgcagacttgggatggtgtttaatattatgatggacgacctgccgtataacgaagtggcaattgcctatcgacctggagtcaatgtggcggaaaaactcgccgtgtgtcaaggctctgctatcatgatcaaaactgacattcgccattactacgataacattagttatgctcacatcgagaaggctcttatggattgcggcatgatcgccagaggtgccagacttatagcctcctactgcactatctggaatggcaggtttagctcactgcaacagggttccgcttgtagccctgctctcgcaaatatcgttggaaaccggtactttgacagacccattgtccggtggttgcgcgatcactgtcccgtggagcacacctactatcgctatagcgataacttggtcttattctgcaaggaagagccaggcaatgacttcataaacgagtacaaggagttcgtcaagaccacagcggctaggggagagttcaggacacacagctggagttcaatcagaaacaatcaccctactagacatcaggaatttctgggcatcgtactgaatgaggtggctaatatttcccgtgtgaaaagggataggatcagggcgattttgtggaacgcggtggtggggaatacagccgaagaggccaagaagtactttgccgacacaggagagctgccccgggggattgctgacgaagaggaggtatatacgaccaagttcatgatggccatgcaggggtatgttgcctacgccaggatgatccaggacaaattcgcaaaccggatagcaaaactgctgattgccgttcgaatcaaggatggctactttaatgaggacgggatgatattcaagtatggtctggataacaagcatattgagtgcgcaaagctgtacaaagacgattccgtaggaatagaagaatttcgtagacggtttctggattgtctaagttcttga

SEQ ID NO: 12220 - RNA, 978 nt, synthetic construct
  source 1..978: mol_type = other RNA
atgatgctctatgacctgataggtgtgtctaaaaatgactttgacaacttcatcgagaacattaacagcgtcgtgatcaaagagggtactcactggaaacatgtaaacccaagttcccacaactccgtttccataaagttcgacaaatacttcgaagatcagttcaaaaacgtaatctctgcttctagccccaaacaaggagccttttgcggaaagagtatcatccaactcctggccccccacagcagcaaaaagtacgtcttaaccctggatatcaagaatttcttcggtagcattaactttcacaaagtgcaggagtgtaccaaggatcattcgtctcttcagctgtatagcgacatcatccatatattttacttcggaggcgatgatcagctgcgtagaggactgaagggcagcgcagccatagccgaagttgtcgggttgaagattgatcacctcatccgcaaaatcatttattcgaacaaggaatactccaataaggaccttgtgtactctaggtactacgatgacattattatttcaggggactcatttggcgccctaaggagcgtggcaagtgtccttgcaaagagtatctataaggaactgggcctgctcctgaatcctaaaaagacgcgcttgcggatcctacacggatcaaagatattggggttgaggttccatgatagagatattacagttccgcagagtttaaagcataaactgcgagcgattatgtacgaatattcctccgctaattacgatgaatcagactatgagtcagtgcgggacgctaagcgccacgttggccagatcatcggcactctgaggtacatcattaatttcacatctgccaatgtgtccagatacgaggattggctggctgacttttatgaggagcttgaccggctcgaggagattcgaaaagatctcgcgcagtactatgacgacgaaaaggggatttattttgacatgtga

SEQ ID NO: 12221 - RNA, 1074 nt, synthetic construct
  source 1..1074: mol_type = other RNA
atgctggataagagacggctggccgtcaacacgaaagacttcagcatccttaaaggcatcctgcccggcgttatcgataccctgattcattatccagagggcgcttacaagcggattgaaattccgaaaaagtccgggggcatgagaattatccatgcccctcttggtgaggcaattatgcagatgaacgccgacaatacatcaacgtctctcttaggttggattcaaaagagaatcaatcacgtgctaggcttcatccttttaccctcgtccgtgtgcgccttccgacctggaatagatccatatagttttctgcgaacaactttggacggcatctctaactgtaggtcttcccaagtggggggtatctacaagatcgacatacaggattttttcaatagtgtatcggaggatcaggtgaagatggtctgggaaaagagcctacctaagctcagtggcaacttctactctaaggacatcatcaatatcctgactctgctgtcttgttacgaagggaaactgaatcagggtcctcccagctcacccattatagccaacatagttggatatttgtgcattgactccaatctccgcggactgcagcagaccagaaacattggcagcaacaggactccgaagtcattgtggattaggtacctgcgttacgcagatgatatcatgattctatctttcgacggagcaataccaagcgatatcccagatacaattaacgaaaccatcaaaaacagtggatttcacatcgctaaaaaaaaaaccctcctgttgaatgacagccactcctatcctctgctcggcataagccttttgcgcgacacctccccagtgggttttcagtttcaaattggaacagcccgtgatcgcgacttggcttccgagttactggggtaccagggggaagggattaagtcaatcgcggggaagctcggatttaataagcgcatcagtctgctgggacggtcaggggttgaggtcgagcacttccccggcaggtatagcaaacgggtggctcatgcgctttctatgaaatccgacctcctcctgtgcagccagtga

SEQ ID NO: 12222 - RNA, 969 nt, synthetic construct
  source 1..969: mol_type = other RNA
atgccctctaaagtcctgcagcatattcccctgaagttgaaccttcacgagataaaatacttaactacccctcttaagactaccgagtccagactcctgaagatcatctcaatcaagtcaaaaatcgtgaaggaaaagaagattcccaaaaagaattcagacgaattccggattttgaattacccggttggcgagtttaaactcattctgaaacggcttcataaattccttatgtctaggtccaagtttccaaaaagcgtttgtggtggaattgtcgacaaaaacctttatgatatggtgaaatcccattgcggccgagaagggatttaccagattgatctcaaagactttttcccaaacataaactccgacagagtatactcttttttcaaaaattcggggagaagtgaacggatctcccaaatcttgacagacctggtgatttacgacaagcgcctgcctcagggttttcccacgtcacctattgtagccaatctaattgcttggaagatggattatgatctccagagtatctgcaataaccacaaactcaactattccaggtggatcgacgatgtgctcatcagcggcaggatcagtgaactgaataaagccatctacaagatcgataagagcatactgaagaatggattctacatcaacaacaagaagaaaaggctgctgaagcgcaagaacagcaaagaaatcgtcagcgtcggcctggatctaaagcgccacaaacctgatgtgccaattaaggtttatgagaagctggagtatatactgcaagtgctgattacagagggtgtggagttcgcacgtgacttctttgaggaggaatttaagttgaaggacatacagaaaagcttaatagggaagatccgattcattgaagagtataataaggcgaaaggcaacttcctctctaacttatacatccagatcaattggggaaaggggatcggatga

SEQ ID NO: 12223 - RNA, 1257 nt, synthetic construct
  source 1..1257: mol_type = other RNA
atgcaattccttaaaaagctgaaactggcactggatagattgatcctaggacgatctacccccggcagaatgctagagcacgtgttcgacaggaacttgagtattctcgacaaggttctggagagcattctgcttaaggacggcctcgaacattccgaattccgcgggcgtttaactcggtggcggaagagttatatcggcaagtcttgggggttatggacggatttttctgacagcgccaacatttgcgagtttctcggcgatagctcaatagccgagagcgacatcgtgtccattttcgctgatccagatatgcactaccgccgtttctggcttcccagccgcaggtcagataacacaaggtctaaagggcgcgtacgaaagagaaggttaattcacgcgcctgacgatagcctgctgagcatccatagactactgctgcgcgaggtgttggacagttttgatctcgtgatctccgatgcggcacattcatatcggcccaggagaagcccaaggacatgtatgttccctcacaagtcatctggctggatgatctgcatggacttcagaaactttttcggaacaattactgaagacaaagttctgcgcgccctggtcgatagacttggttgcccaagtagcactgctgcctgttatagtcgattgtttactgtgaactgtgaagacaaagggatccgagtgctgcctcagggtgcaccgacctccggttttatttcgaacgtctgcttaattggctttgatcagaggctgagagccatgctttcctccgtcgactctaatatagtgtacacccggtatgctgacgatatagtaatctccggccctggcatgctcagtaaatccgtgaagtcccgagttatcgccctggtgagccaggcagctaatgggaagggatttgtaatcaataattcaaagacccgcgtctatagcggggctagtgtgatgagggccctcggaatcgacatccggggaggtgagctgttcccacggaaatcgatcatcgattacattgagaaacaggtgcggttgataaagacacgttcactgacggaagtctctaacggatggggtggactcgtcgacggccaggacaataccctgaaatacttggatcacctgtgggggctcataatctacgcctcaggaattaatagacggtacgcacaaggggttattgctgagctcgagaatgtggaaacccccctctccggcaggcttggcctgattgactcttga

SEQ ID NO: 12224 - RNA, 1131 nt, synthetic construct
  source 1..1131: mol_type = other RNA
acgcccctgaggacacctaaacctgaagagccaaataaaggcgttttgccgatttatggcgtggcgcacctgagctggatgctcgacgtgagccctagttcgctatccactctgctgggatccgagagggccgttcgctccgatttacgacgccgtggctctcgccccagagccatttatatccccgactcagagtacctcgcaattctaagaaagattaatcagctggtgttcctcccagccgacgagaggctcgacttagccgccttcggttttaggcctggctgctcacctagtgactgtatggataagcataaacacgggaagtggatgcttaaactggacatccacgaattcttctcaagtatcagcttcttcgacgtgaagcgtacttttatacgggtcggccatagcgagacggtaagtgagacattggctgagatctgtacaataaacgagaatggtagacgagtgttgccgactgggtttccaacctccccatacatctcgaattgggtgctcgcatcatttgacaagagaatgagggcttggtgcgcggaaaacaaaatctattacactcgatatgtcgatgatctgtttttttccggcaccgaagctgcccccaataatataatcggaagcatccaagggctggtggattaccgtctgggtctgcacggactgaccttgaatctgaaaaagacccggttctaccggggagatagcgtctttaaaggcctgggagttgaactccacccctctagggacgagcttgtgggggctggacggtacatgttgccttctagacgcatgcgcgcccatatcgagaaccagaccaggtgcattaagaaatttggcgtcgaaacagcaagcagacactggtgtgagcggagcggtatagatagagggcttggcattccagagtatcggtacgtccagcatcttgcaggtgcactgagctacatcaagaacatcaacaaggcttacggcaatgatctggaaaacgaactccaaattgctttaggggaatccgtttcttcatacctacttgggcatcagagtattttcccaaactctgtgtattcttcatcttatgacgtaccctccgcccgcaagttcggatccaactga

SEQ ID NO: 12225 - RNA, 978 nt, synthetic construct
  source 1..978: mol_type = other RNA
atgttcaaatttgacggagtgccaccgatcagttatcaagagtaccacatacccaagaagagcaaaggagtaagaattatcgaggaacccaacgctcagctgaaggccgttcagaaacgcatcttaccttacctgtacgattgcacaagagtgggtctgctccctgtgagtcacttggcccacggcttcataccatataggggctgtatgaccgcagtgcccaagcattcccttaatagccccgtactgattggtgcagatgtgcacgactttttctttaatttcccagctgaacccgtggagaataacctgtggttcgccatggactcaagcagagtcgattatatcatgacctgtgcactctggaaaggaaattatcctaaggagcatttcccccagggatcgcctatctctccatacctaactaacattggcatggtagacgtggaccgaatgatcgctgctttttgcaagaaaaacggactcttctttacacggtacgccgacgatatgctgttcagtataattgacggggccgaggattctccgcaggtccgaaagatgatgcgtgaggatgaacctttttcctcactatttcacggggtggaagtcattcttcaagaccatttggggcttgagttatctgcaaaaaaatctcatgtgatgtggcgccattccacttgtaagacgcaggcgctgggcatcacatttcggcaagataataaggggtacaatgctaacaaacggaaacgtcgcaacaccagagcccagctctacaacctgttccggaaggtccaagcgcaggggggccacttccaggatgaagactggcaggagtggaggagcgtgaatggttcaatgaattattgcaacctcgttaggagcctgtccaagttccctgaggttgcaggcattgacccagtctttcagttgtcctactataacgaaatcgaaaggtgggccaacgctgccgtttga

SEQ ID NO: 12226 - RNA, 1590 nt, synthetic construct
  source 1..1590: mol_type = other RNA
atgacggacaatttcgactacaaaaacccacataacataaccacagggagattgctgtactctgacgagctccccttcttcgacatgatatccttttgtatgttcctgggaactacccctacacagctccagcggatcttgggcaatatcgattctatgtatagtcgcttctatatcgataaggacacaggtcgagtgacaagcaagcatgcaggattaaggctgcgggaaataaacgcacctttggagccccttaaaacctggcagcttcgtctactggatgtgctcaatctgttccctaagcatgaggccaatacggcttttatggaggggtgctcggttatcaatgcagcaaagactgcgaccaaaggagatgttctcgtgcatgtcgacataaaagatttctttccaagccacactgccctctacataaaacgtaaactgtccgccctggtatttaaaacatttcggatgtacctccccgaggaagtcctggtggcgattactaagttaatctgttacagaatgcagctacctcaagggtccccatgctcacctatggcaaccatcgtactaaattacgatttagacacacgaatcgacgctgtggccaagaagtacaacctggagtttaagaggtatgccgatgatatgtggttcacaggcgttcagtcggacgacgtgatccaggagtttttgtacgagttacaggatgcaattcaccccttctctctcaactacaagaagactaacattatgaggactagagcctaccccaagttcaacggagtcagaattaagttcaccaaatcttacgtgccaagtacgcaagctgctaaaataatcaatatggtagttgccgctctcggcttcaccaagcacaaagctaacatctcaaagaaccaggtcctgattgagggctatcccactccccagcttgctttggacgatgtgcgcagtctgatggatagcgtagccgcaaccatcatggccaaatatccgaacttggtctttacttgcaaaccgaactggtactatatccaatccaccaagaaatgccttgggctgaatatcgtcggcgaaaatgtggtctatccacgcaaaaggtataacgacctgagactcgaggccatgcttatggggagacagcgagcgctgttcgccctatacttcgctattgtggccaagcacaaagcaaacccacggctgctgccccctattaagaccgccccttttgtgtttgcctcaaaaggttccgtgggacacgagaattttcggaatctgctgaccaacccgtttaataggagggtttttatgggaaaggttgcttatctgcgcagcattaacccagaaaaggcagataagatcatggctattgaaaaggcgagctatcaaaagtgtattgacgggtatttgctgtggtaccctacagtgaacgtggattattacccagacgtgcagtggctcagcagtcttcgcgacatccccaatagcgaagcctgcgtcgacattttcatcggttcctcaatctccaatgaggaactttcttctattctcggcgaagccggcattggctgttgggctctgtga

SEQ ID NO: 12227 - RNA, 1704 nt, synthetic construct
  source 1..1704: mol_type = other RNA
atgattgagctgatgaaaaattacagcttcaaaaccacccttaagaatctcgtaaagggcttcgtcgctgccgaaacagctgctccgaagcttttcacgaaaagtttagacgactggccattctttgatatcgcaaccttgtgtgcttatctagggatcacgccactggagttgcaggccttatgcaattgccaacctacactcctctatcaccgcttttacattgataaggcaactaacaggattgtgccattcaacaaaaccgcgaacctgcgaatgatagaagctcctcggcctgagctgaaagagtatctaatgaaactgattcccttcttcgaaaagttccccattcacaagtgtaactatgcttttatacgcggcaaaaagatcaaagatgctgtggagtctgtgaaagagggcgaggttctcatccacaccgacctaaaagacttttttacagaacatactccgctgtatattaagagcaagttggagatgctgatgctccagaacgtacccgagatgtatgaccctgagttttgtaaggtgctgactaggctgataacagtgtacacacatctcccccagggatccccctgttcccccatcctgaccgccattgtgaattatgatatggattccaccatccagtctcttgccgacgaatacaatttgacctatatgcggtacgccgacgatatctgcttttccggagctatagccaacgatgacattcgcgtgtttctggacaaacttgtcgacgccgtccaccccttccgactaaaccggaagaaggttgcaataatgcgggatgcagcatatccggtgttttctgggttaaaactctacatcgaaaacgaccgccaatacattccaagtagcctcttagggaagctcattaaactgctgaggcatgaattcgaaccaatggagttcacctccgtccacactgtggccactcagggaaagatccatttcaaactgggcaaaatcgttgagacaccagtggggagtctgaaggagaagtgcgatcgtttcagctgccacctgaatagcaagtactcagccagcggttttaagttcaagctgaagcctacatacttttacatcaaaagtctgaagcaagttctcgggatgcacattacagatggaaagatttgttaccctcggaaaatgtacaatcaacttagactggaggcaatgttggtgggtcgtcagatggccttccagttcacgcagaaatatatcgccaagaatactatagaccccatcacctcaaaacagcatgtgtatcttgacttgcagaattttgtcgacaacatctctgacaaagatgacccaatgtactccaggttttttactgtgagatacactaacgtccctgtcggtaacgctcgaaatgccctgtataccatctcatccagatcttataaattggtgtcttacgcagagattttaggaatcacacccacgtatcttagaggcaagaagagaacctcgaagggctacaggaacatgctggataagcctgtgtcactcaaggttttctatggcaaagtgaattgggtaaacactgtcgatccagaaaaggccaccaagctcaaggagatcgtcaagaagtacaagcttaaaacactggcggcgctggtgaaagcatttcaggaaagcgcgagtcgcgaatacgtaaaattctcagccgtttga

SEQ ID NO: 12228 - RNA, 1458 nt, synthetic construct
  source 1..1458: mol_type = other RNA
atggacatcaacagattccccaagctggtccgggagtattataatacgttaaccggacgtcatactccattagagtccatctgtggcaatcgggttctcaccctctctgaactaccttttatcgactacaactcattttcaagctacatgggagttactccagagatccttaccagtatcactgacgtgacagcaaaagcttgctactcacgcttctacatcgacaaaaacaccaagaagattgtcccctacagcttcggcattaaactgagggagataaatgccccaaccgaagcacttaaggaattacagctgaaactcatggaattcttcaaccagtttcctaaacacccatgcaattacgcttttatgcaggggaagaacatagtggacgctgccaaaactgtcgccaatgatggcgtactggttcacgtggacctcaaagatttttttcctgctcacaccagcctctacgttcagaagggcctggagcatctgattgccaagaatttcaacactaaccttcctttggacgtcctgagccgcattgtgaagctggtgtgcttggatggggtgttgccccaaggcgcccctacttctccgatactgaccatcatcctgaattacgatttcgattgtcgggtggcagagttggctgaaaagttcggtttcacttatacaaggtacgccgacgacctttgtttttcaggtaataagagcgatgcggagtgccaggattttatcagcgaactgtccgaagtggtccacccgttcaggatgaactacaaaaaggtgggcataatgagggacaaggcatatcctattgtgacagggtttagaatcaagacaaaggtcacctatttgccaagtacacagtctgcgaagatcatcgggattatcacaaactatctccaaatgcccgacctgaggggaacgatatcggccaaagtaattgagtttaccttttctaaggacacaaaaatacccctcgatgagctgcccgaaaccctgacacggatcactgaccttgtacataccaaatacccaaacctggaattcattgtcaagcctatgtacaagtatgtgcagtccgtgaagacggtgttgggtctacacatctccaattctgaagttaagtatccccgcagcaaatacaacgatctgagagtggaggcaatgctgattggaaagcaactcgggattcgagaggttatgtataatattcatccggccagaattgctttagtgaagaaatatgccgcgcataacaagttctttaaatccagtttccgaaacctcatggtaaagccactatccaaaagagtcttcaatggcaaacttgccttcctgagtatcgtggatcccgataagacactcaaactgaaaaccattatggataaacaccgtcagaagacggtcgaggacatgatcgacatcttcaaacgcgagggattttga

SEQ ID NO: 12229 - RNA, 1185 nt, synthetic construct
  source 1..1185: mol_type = other RNA
atgaaaaagtacactgtcaacacatccatgctgagcctgctggagggatgttctttctttgttaagggcaagggggccgagccccttccatactctcatgcagaagaaggcaagctggggaacaaatttttctataagatcagcgggtccgagtcaaaacaaattaataccattcacgaactcctgatatcctcattatttgagcggctccctgttaatcaatctgcaacagcttatctgaaaggcaagtcttacctagactttctcgagcctcaccggaacaattattacttcctgaggactgatctcaagaacttcttccattttattgacaaagagatggttgtcgaggctctgaggcatcacgtgagcgaagaacctgtcactacagaatacagtcagtcttccttggagctcgtctcacgcttagtgacccttaccctgccaaaaaatagtaagaatttggagttcgctggtcagtccatcctgccaatcggatttaaaactagtcccgtggtgagcaatgtggtgtttcgaaagttcgacattttgattgaaaagttctgcgcccagcatgacatcttgtacacccggtacgcggacgacatgcttttctcagcctcggatataaggacttccaaatacaaggagaaggacatttttagtgtgctgagaaaccccaaggtgaaggagaaaaagcctttcctgcactctagaagattccttgaacagatctcattcattgtaaatctcggcgggtttaagatcaacaataagaagacgcatatgagcaaaggttactttaccataaacggatacaccatcagcggcactaactacccgtatacatccggcaccattcgtgtatcgaacaaaaaaacgaaaatcatctgcaaactcttgcacgagtgtaagattaatgtcgatgatggagatatccttaagactgtttttaactatcgcgagacaaaagcacggctaccctataagagctccaagaaatttatgaatacgtatcacgccacccagctgaataacaagttaatgggttaccgctcatatctaattagcctgctgaagttcaacgaaacatataggtgcatggacagtacattcataaacaaatgtacctctctcgtgtgcgaactggatagcatcatcaatagacgaatcaacaaacagtga

SEQ ID NO: 12230 - RNA, 1179 nt, synthetic construct
  source 1..1179: mol_type = other RNA
atgaagaaatacacaattaatgcctccatcctcagtacccttgagggatgtagcttcttttttaaagggaaaggagcagaacccttacccttctctcacgttaaggaggggaagctgggtaataagttcatctataaagtgagcggatccgaagctaggcagatcaatctgattcacgaaagtctgatcagcacattgtttgagaaacttcctgtgaaccagtctgccactgcctacctgaaaggcaagtcttatttagactttctcgagcctcaccgcaacaaccactattttctaagggtcgatctacgcaacttctttcatttcatagacaaagagatggtcctcgaggccctgcaccatcatgtttcggaagataagattacagatgaatgcaaccaaagctctctggagcttgtcagccgcttggtgactctgaaactgcccaacgaatccgcgaactccgatttcaccggcaagagtattctcccaattgggtttaagacctcaccagttgtgtctaatgtagtgttcaggaaattcgacatcctcatcgaaaaattctgcgctcaacacgatatcctctatacgagatatgcagatgatatgctcttttcagctagtgacattagaacatcccagtacaaagagcgagacttaatctttgatctggttaaccctagggtgaagaaaaagaagccatttctacatagccaccggttcatcgagcagatttctttcattgtgaacctgggcgggtttaagctgaatgccaagaaaaccaagatgggtgagggcaacttcactataaatggttacaccatttcaggcactaactattcatacaagagtggggccatacgggtatccaataagaaaacaaagatcatctccaagctgctccatgaatgtaatacgaaagacgacgacggatcgattttgaacgcggtgtttaattaccgggtcgctaagatcaaactgccgtacaaaccttccatgaaattcctgaaggtgtactatacttctcagcttaacaataagctgatcggatataagagctacctgatttcattgctgaagttcaatgagcactaccgatgcatggaccccgcattcataaccaaatgtgaaaagttggtcagcggccttaatgagatgatcatacgtagaatgaagtga

SEQ ID NO: 12231 - RNA, 936 nt, synthetic construct
  source 1..936: mol_type = other RNA
atgaaaagctacaccatcaattctactgtcattgcgacattggagacttgttccttttactctaaaggcaaaggcgtggaatcatttccatattctcaggtgaaagagtgtaagttgaacaacaagttcatttacaagctgtccggagcagataccagacaaattaatgagatacacgacatcctgatcaagactctgtttgacaaattgcccatcaataatgctgccacagcctacctaaagaacaagtcctacttagattttttggaaccacatcgaaactccaactatttccttcggattgacctgaagaacttctttcacttcataaacaagaagatcgtaaaggaggtgctcttccaccatgtgtcatcagatcctattagcgagaaaaccacacagtctagcctcgatcttatcacaaatctgctgacgatcacactcccaaataacgttaagaatctggaatttagtggaaagagtattctcccaatcggattcaaaacctcacctgccgtttctaacatcatcttccggaagttcgatatccttatagagaagttttgcagtcgccatgacgtcctctatactcgttatgctgacgacatgttatttagcagcagtgacactaggaccgagcagtatattgagaaaagcctgttcgatatccttctgccccccccgaacaccaaacccttcctgcactcttccaagttcacagaacagatcgccttcatactgaatctcgggggttttaaaatcaacaccaagaaaacgtccatagcaaaggggaattttaccgtgaatggctacaccatttccgggagcaactatccttacaaatcaggtacgattaggatttcgaataagaaaaccaagacaatcagcaaactaattcacgaatgcaaaaagactagtcctatgagaacttactga

SEQ ID NO: 12232 - RNA, 1170 nt, synthetic construct
  source 1..1170: mol_type = other RNA
atgaaaaactatacagtatccagctcaattctgagcctggtgaaagagtgtatgttctttaacgaaggttctggcgtgaaatcccttccactttcatgcgtgcacgaaaccaaggtcaagaataagttcatctacagcatcacaggaagtgaaggagataaaataaaccacattcatgaggcattgaacagatctctgttttcaagaataccggtgaatcagagcgccacggcttatgtcaagaataagacctacctgaactttcttgagccccaccgtaaccactatcactatctgcgcgtagacttgaagaatttcttccacttcattagcgacaagattgttagggagagtctcaaggagcatgtgtctactagcaacatcagtgaaacttgtagtcaatctcatttggacctggttacaagcctggttacttacacactcccaaagtccgcgaaaaataccgatttcgtggggcgctcaatcctccccatcgggtttaagacatccccactcattagcaatattgtgttccggaaattggacatcctgatcgaaaagttttgctcagaacataatatcacctataccaggtatgctgatgatatgctcttctcctcttccacaatgcgtgatggcaaataccgagagaagactccttttgacggagtcctggggatcaaggacaaaaaaccctttgtacattcccaaagattcatagaacagctcagtttcatcataaatatcgacgggtacaaaatcaatcgccggaagacgatcaaaaaaagcggctacattagcatcaacggctactttattgaaggcagtaattacccttacattattggtgagctaagagtctctaataaaaaaaccaaagtggtcagcaagttaatctatgagtgctcaaccgataaatccgaccgggagattttaaaagccgtttttaacgtggatgtggagaaacttaagttcaggtttaaccctaaggattccttcaaggatgagtactcaaagtcccagataaacaataagttaatcggatacaggagttatctgatttcgctgataaagtttaacgactgtactcagtctatgaataaggacttcataaacaagtgctcgaagctaatttctgacatcgagctgatcattaaccggcgaatgtga

SEQ ID NO: 12233 - RNA, 1176 nt, synthetic construct
  source 1..1176: mol_type = other RNA
atgaaatcatataccgtgaattcctctgtattaagcgttctggaagagtgtacactgttcgataaggggagcggactgaaaccgctacctccgacccagtttaaagagacaaagatcggtaacaagtttatctacataccctcaggctccgagaggaaaacaatcaactatattcacgagagcctgaataagaacctttttagcagaatccctattaatcaaagcgccacggcctattccaaagggaaaagctaccttaacttcttggaacctcaccggaacaactactattttcttcggcttgatctgaagaactttttccatttcatcaatggcgataccatcaaaaatgcgatttctgaacatgtgtctagcagtgcaatcatggacgggtgtatccagagtaatttggactttattgtgaaagctctgactattactctccctaaagagagcaagaacaaagagttttctgaaaaaaccatcctgccaattggctttaaatcaagccccatcgtaagtaatattgttttccggaagctcgacattattatcgaaaagttctgctccgaaaacaacataacctatacaagatatgctgatgacatgctgttttcctcatccactaccagggatgagaattaccgcgaacgcactttagtggcctccctctttgagaagaaagacaaggtcccatttctccacagtgataagttcatcgagaaaatcagcttcatagtcaatatagacggcttcaaaatcaatagaaggaagacagtgaagtcaaagaaatatctgtcactgaacggttacatcatatctggatcggattacccctacctctcaggatctattagggtcagtaacaagaagaccaagattatttccaagatgatccatgagtgcaacaagtccaatgatgatatcctgatttataagtccatctttgggtctgacccatctaaaatcaaattccagtacaagccaaaagagagtttcttgataaagtactgtcgctctcaggtgctgaacaagctcgttggatatcgaagctacctaattagtatcctgaagttcaatacggactacttatgcatcgacagaggcttcataaaaaagtgcgaacacctgatacgtgagttggaacccctcattgagtcgcgaattgacaagtga

SEQ ID NO: 12234 - RNA, 1176 nt, synthetic construct
  source 1..1176: mol_type = other RNA
atgaaaaactatacagtcaacagcagtgtactgtctgtgcttaaggaatgcaccttctttgatgagggctccggattgaagtctctaccatctactcattttaaggagactaaggtaggcaaaaaattcgtttatgttcccagcggatccgaaaggaatcacattaacgccatacatgaaagcctgaataagagcctgttctccaggattcccattaatcaggctgcgactgcctacagcaagaacaagagctacttgaactttctcgagccccacagaaattcatactatttcttaagactggacctgaagaacttctttcacttcatcaatcgaacggtggtgagaaatagtatcagcgagcacgtctccagtagcgaagtgatcgagggttgttcacagtctaacctggatttcattgtgaatattctcaccattacgctgccggacacatccaaaaatgaagaattctcaggaaaaaccatcttacctatagggtttaagtcgagtcctgtcgtgtcaaacatagtgtttcgcaaacttgacattctcattgagagattctgtgcaaaaaacaatgttacatacacccggtacgccgacgatatgttgttctcttcaagcaccgtgcgcgacgataaatacagggagaagtcagtctttgacgacctcttcaagaaaaaggaaaaggtcccattcctccatagtgataaattcattgaggagatctccttcatagttaacatcgacggttttaaattgaaccggaaaaagaccgtcaaatccaaaaagcacctatctctgaatggctatttaatctcggggtcagattatccttacctgagcgggtctattaggatctccaacaagaagactaaaataatctccaagatgatccatgagtgcaacaaggatcaagatgatatctctctctataagtcggtgtttggggtgaatccctccaagatcaattttcggtacaaaccaaacgaggcttttctgatcaagtattgccgaagtcaggtgcttaacaaactggtaggctatcggagctaccttatcagtatcctgaagtttaacgagaattacagctgcattgacggcaagttcatcaataaatgtgagtctctcacccgttgtctggaaacaattatagaatcccgcatggacaagtga

SEQ ID NO: 12235 - RNA, 1182 nt, synthetic construct
  source 1..1182: mol_type = other RNA
atgaaaaactacactgccaactctttcactctttcattacttaagcaatgcacctttttcaacgaggaatctggactgatctctttgcccagttctcatgttattgagacacgggtgggcaataaatacatatacaagctagttgggtcagaatcagagctgatcaataaactccacgaaaatcttaacgagacgttattctgtagaatcccagtgaatcaggctgcgactgcttacacaaagaataagagttatctggactttttggaacctcaccgtaataatttttactttttgcgggtggatctgaaaaatttcttccacttcatcaaccgcgagattattaaagattcactcaaggatcacgtgtctagcaaaccaatcatctctggctgcagacaaagcaatcttgactttatagtcaacgtccttacgataaagctgcccgaaaccagtaaaaacacagacttcattggaaagtcaatcctgcctatcggcttcaagagctccccagtagtcagtaacatcatttttaggaagctcgacatactcatcgagcgcttctgttttgagcataatatcatttacaccaggtatgccgatgacatgctgtttagctccagcgatctgcggaatgataagtatcaggaaaagtccgtgttcgatgacttgtttaagaagaaggagaagaacaatttcctgcattcggaccgatttctcgaacagatttcattcattgtgaacatcgacggattcagaattaacagcaaaaaaacagtgaggtccaaaaagcacttaggtctgaatgggtatctgatttccggttccaattacccctatatagatgggaaaatccgcatcagcaacaagaagaccaagaagatatctaaactaatctacgagtgcaataccgacaaaagtgacctcgatatcttcaaggtggttttttccattgatccgtttcggattaaatttcgaaggaaacctaaggtcgaatttttgaacaactattgttgtgcacagatcaacaacaaaattatcggctaccgttcgtatctgatttccctgctcaagtataatgacaaatacagctgcctggaagacgatttcattttcaaggtaaaaggcctgataaaagagagcgagaaaattatcaacaacagaatgaagaaggagatctga

SEQ ID NO: 12236 - RNA, 1176 nt, synthetic construct
  source 1..1176: mol_type = other RNA
atgaaaaagtactcactgtctagcgtggttctggatcttctgaaggaatactcctactataaagaggataaaggagtcttgcctctctcatcctcccatgtcagagaattcaaaattgggaagaagttcgcttattccaccgctccggcaataaatcgtatccactcacacctatcaaaggtaatattttcccagtacgttagcaaaatacctgtgaaccagagtgccaaagcttaccttgcaggcacctcctattatgattttatagaaccccatcgcaacaattatttttttctccggctggacctgaagaacttttttcattcaatctccaaggacgtaattcagaagaacttccttgagtactttagtgacgagaagatttcggagacttgtgagcagacacacgctcaggccatctgcaatttgatcatgtataagctggacgtgaataacagcaacgtggcgtttaaaggtaaatatatcctacccatgggtttcccacttagtcccagcatttcaaatgtggtcttcagaaaaaccgatttgctgatcgaaaaattctgcaacgaaaaagggattacgtatactcgctacgccgacgacatgctgttcagcagtaggggaacaatcgtcccaccacccatattccggctgatcggaaagaataaggacaaagttaaagcctatgagtctccttttttgcacagcaaacgattctacgatgaaattagctacctcgtgggcctggacggatacaggatcaacaagattaaggtgatcaaggcagtaaacacaattagcctcaatggttatacgatagccggcactaattactctgatctgaagggcgacattaggctatctaacgccaagaccaagatcatttataagctgctccacgaattaaaggtccaaaaatccgatgacgttctcgtgtttaaaaagtgtttctcgtctgagatgcctgtgcccaaatataaaaagaacgtgggcaaattcatcctgaatttctgcaccaatcaaatcaataacaagttagtcgggtacaagagttacatcatcagcattttgaaatacgatacagagaaggattgtctgagtgtggagtctaagtctaagtaccttaacctgctcgggaaattagacgtggttattaagaagagaatgaaatga

SEQ ID NO: 12237 - RNA, 1173 nt, synthetic construct
  source 1..1173: mol_type = other RNA
atgaaaaaatattctctgagtcccgtgatcctagatctgctcaaggaataccctaattatgaagaggataaaggtgtgattccactgacatctagccatgtcagagaatttaagatcggaaagaagttcgcatatagcaccaatacagccattaataaaacgcactcccacttgagcaaagtcatattctcccagtatatttcgaagatccctgtcaaccagtccgcaactgcttaccttgaaggcaaaagttactatgacttcatcgaaccacataggcataactactttttcctcaggctggatttgaaatctttctttcactccatcaggagcaacattgtgtcagagaatttcctggagtattttagcgacaaaaagatttcagagaactgcgagcaaacgcattcagaagcgattttcaaccttatcatgtacaagattgacaacaagagtaagaataacacctttaaaggcgagctgattcttcctatggggtttcctctgtctccctcaatctccaatattatctttcggaagacagatctcttgatagaaaaactgtgcgatgagaatagtatcacttataccagatatgctgatgacatgttattttccagccgcgggcagatcattcccccgagtattttcccactaatcgacaagaacaaaaaaaaggagacaacttacaagaacccgtttgtgcactctaagagattcttcgacgaaataagctacctggtgaaactggatgggttcaagatcaacaagaaaaagacaaagaagtcagtacacaccatctcattaaatggatataccattaccggctccaattttcccgacataaagggagagatacgaattagtaacctgaagaccaagataatctctaagttaattcacgagctcaacaacaaaactgatgacgttatcgccttcaataagtgtttcaaaaaggaaaatcccatcccaaaatacaagaaaggtagcgaaaacttcattagcgagttttgcaagaaccagatcaataacaaattggtgggctacaattcctacataatctctatcatcaagtacgacaaggagaaaaattgtctttctcgggactcccgcgagaaatacgccaatctcgttaaggatctgaacaagctcatttcgaaacgtctgaaatga

SEQ ID NO: 12238 - RNA, 1173 nt, synthetic construct
  source 1..1173: mol_type = other RNA
atgaagaagtattccctctccccgattatcattgatctcctaaaggagtatgcttattataaggaggataaaggcgttttacctttgtcgagctcacacgtgcgtgaatttaagattgggaagaaatttgcctactctacctcaagcgcaatcaatagcgtgcattcccaagtgagcaagctgatatttaaccagtacattagcaagataccagttaaccaaagcgccaccgcatatttgtccggcaaatcctactatgacttcatcgagccacatagaaacaattacttttttctgcgcctggacctgaagaacttcttccactctatctcaaaggatataatcgagcggaactttctggaatactttagcaatgatcccatttctgataagtgtgagcagactcacgctcaggcaatctataacttaatcatgtacaagctggacagtaaatccgacaatagcacattcaaaggctgtgagattttacctatgggatttcccttgtctccctcaatttctaatctcgtattccggaagatagacctgctgatcgaaaagttttgcgacgagaagggaatagtatacactagatatgcggatgacatgctattctcttccaggggaaaaatcgtgcctccaccaatcttcgctttcttcggtaaagacaccaaaaagaggaaatcctacgatccgccctttctgcacagtaaagccttctatgaagagattagttatctccttcagctcgacgggtacaaaataaacaagaacaaggtgaagaagagcgtccatacgattagtatcaatggatacacaatcactgggagtaattatagtgacatcaagggtgacatccgaatttcaaacatcaagaccaaaacaatcacaaaacttatccacgaactgaaagtcaacaaagacgatatcctggtttttaagaagtgcttcaaaaaggagtttcccacgcctaaatacaaaaagggcgccaatgatttcattagcgacttctgtacaaaccagattaataacaagctggtcgggtacaagtcctacattatcagtattgtgaaattcgatggcgataaagactgcctttctaccgcctcaaggtctaaatacaccaaattgcttgaacagctggataattcgataactaagcgcctcaagtga

SEQ ID NO: 12239 - RNA, 1182 nt, synthetic construct
  source 1..1182: mol_type = other RNA
atgaagaaaattctgctccatcccagcgtggtggagctgctgaagaattttagcaactacacagatagcaaaggcattctgccactcttaagttctcacgtcaaagagttcaaaataggaaaaaggttcgtctatactctcagtgagaagatatctccttcctacaaacatatcataagagccattcacacgcaaaatctggcgaaaattcctgttaatcagtccgcaacagcttatcttaagggcaaatcctactttgattttatagaaccacaccgtaacaactacttcttcattaagcttgacttgaagaatttcttccattccatatctgaagacgtgatcaaatccaatttcctcgaatatttctctgacgagataatctttcccaattcaacccagacccacgctgaggccatttacaatctcatcaagattgacctgtctgaaaaatcatcgaacaagaggttcatcaaaaaatccattttgccagttggttttccgctgagcccaatcattagcaatatcgtgtttcgaaagattgatcttctaatagagaagttctgtgacgagaaaaacattgtatatacacggtatgccgatgatatgctgttttcctccaaggggaaaatagaatataatcccttctcaaccaagaacaacaagtacttaaatccgtacctgcactcaaaaaatttctacgacgagatctctttcatcctgagtatcaacaactacaagatcaacaagaacaagattaagaagtcggtgcataccatgagtctcagcgggtataccattacaggctccaactatagcgacattaaagggttcattagtatcagcaacaagaaaactaagatcatcagcaagcttatccatgagcttaaaatcgaaaatactgatgaagaccgcgatagagatagagatatcctgaagaaatgcttttctatgatacctcctaaacccaagtatcgcaaaaagaccgacgaatttatcaaaaagttctgcgagaacatgattaacaataaattgctgggataccggtcatttctaattagtatcctgaagtacgacaagaatcacgactgtatcaacattgagaacaatgagaagtacaacaagttgctgaacgaaatcaatatcatcatcaggaagcggctctcattaaatgatttttga

SEQ ID NO: 12240 - RNA, 1197 nt, synthetic construct
  source 1..1197: mol_type = other RNA
atggaagagatagaaatgaaaaagatcacgctatcaaagacagtgtttgatatcctcgacgattactcattttttgataaggccaaaggcctaactccactgtcctttgaaaacgtcaatgagtttaagattgggaaaaagttcacttacacccccgaaagcaacctgaaacctttacaccaaaaattgagcaggttcatcttgaacaattacctgtctcatatcccacttaatcagagcagtgtggcgtatcagacgaaaaaatcatacttcgatttcatcgagccccatcgcaataattactttttcatccggattgatctgaagaacttcttccatagtatttcccctgccatcattaaatctaatttcctgaaccacttcagtgatgacccaatctctgagtcctgcccccaatctcacgctaagctcgtttacaacctgataacattaaagctcgacgagaactctaaaaataagaccttcatgaacgaggaaatcttgccaatggggtttcctctttctcccgtggtgtcaaatataattttccggaagatcgacatactcattgagaagttctgcgacattcaccacattaaatatacccgatacgctgatgacatgcttttttccagcaagggatcacttcttccgaaacctatcttcgagccgatcgtaatgggtctgaaagccgtgacaaaatcgtacaagccccactttattcacagcgaaaggttcttggaagagatctccatattactgaacctggatggttttaagctgaacagaaagaagaccactaaagcagtcaacaccctaagcctcaacggatatactatcagtgggtcgaattttcctgacatcaatggcaccataaggatcagcaataagaagacaaaactgatttcccagctgattcatgagttgaattcagaagaacccaagacagacgttgagattttcaagctgtgctttcgccatgagtttcctaaaccaaagtataagaagaatgcaggacagtttatcgaaaccttctgtataaaccagattaacaacaagctcatcggctatgtctcttacctgaaaagcatcatttattatcacgacgaccataattgtctgtccaatgagagcatcaacaagtacagtaagattataaacgagctcagtacgatcatttccaaaagagtgaaatga

SEQ ID NO: 12241 - RNA, 1152 nt, synthetic construct
  source 1..1152: mol_type = other RNA
atgaaaaagtattcacttacaccagccatgttggaggtgtgtaaagaatataacttcttctcagatgtgtctggatttatgcctctgacttccgagaatatcaaggaaatcaagattggtaagaagttcgcctatagtcaccaggataataataaacccacccatcagaagcttagcaagatcatcttcgagaattttctctcaaacattccgttgaaccaatctgctattgcatacgtgaaaaagaaatcctacttcgactttattgagcctcacaggaataactatttcttcttgagaatagacctcaaagacttttttcattccatttccgaggatctactgaaacgcaccctgtccgattacttttcatctgagagtctgagcgaaacaattaaacagtccaacatcgatgctatctttacctttctgacagtcaacttaaaatctgacagctctaacgtgaaattcctggacaaaaaaatactgcccataggctttcctctcagccctaatctggccaatatagtttttaggaagacagatcttctcctagagaaattgtgcgatatgcatggggtaacatacactcgatacgcggatgatatgttgtttagctcccgtggaattatggagaagaacctgctcttcagaaagaataacaactacaaaaagccctacattcacagcgacaatttcttatcggagatcaaatatctggtgagtattgacggatttttcatcaaccacaacaagactatcaaatctgtcaacactctcagtctgaatgggtacaccataagcggtacgaattttccagatatagaaggcaagataaggcttagtaacaaaaagaccaagattatcgagaaggtgattcacgaaattaatattaaccccgacgacaaagtcactttcgaaaagtgttttaagaaggagttcccaaagcccaaatatgagaaaaatcgcgacaacttcatcaacaacctctgcaccatcaaaatcaatcagaagctgcttggctatcggtcctacttaatctcgatcatcaagttcaataacaagttcaattgcatctctgaaagctcagaagacaaatacaacacgctgctgagcaagatcgaaaatgttattaagaagcggatcaagtga

SEQ ID NO: 12242 - RNA, 933 nt, synthetic construct
  source 1..933: mol_type = other RNA
atgtctgccgtagcctatatcgagggcaagtcctacctcaatttcatcgaacctcacagaaataacttcttttttctgcggctcgacataaagaatttctttccaagtatcacagaggctctcgtcaaagagtgcttccgtgattatttcagcgaagagcccataaatgatgtgattaaacagagccatctggatgccttcgtgaacttcgtaacgttgaatatcactaactcttctgtgaatgacacctttaaaaattccagtattctgcctatggggtttccactgtctcccataattagcaacattatcttcaggaagatcgacattataatcgagcggctgtgcgttcagtcctacattacctatacacgctatgctgatgatttgctgtttagcagccgcggaaaggttgacatgtcactggcgtcgttcatgaaaatcaactcaacctacaccgcttttattcacacagagcgattctgtgactccattagaaaaatcctagcagtcgatggatacaagatcaacaagacaaagactattcaagccaaaagcattgtgtctcttaatggttataccatcattggttcaaactattccgacgttagaggggaaatccgggtgtccaataagaagactaagaaaatcgagaagcttttacatgagcttaagaagaagatttccgaccaggctgtctatctgaaatgttatagtaaccagatcccggtgcccaaatacagttcaaagaaagaagtgtttctcaacgccttctacaagaaccagatagacaacaaactgtctggctacagggcatacttaataagcatgatcaaatttgacggcgaatacgattgctttgatagccacgcactccagaagtacaaaaatttgatcagtcaactagacctggccctgtcaaagaggaaatga

SEQ ID NO: 12243 - RNA, 1182 nt, synthetic construct
  source 1..1182: mol_type = other RNA
atgaacaagaataaattcaacaacgacttcctgaaaagaatcgtcgtggactacaagaattacaatgagagccacaaagttcccagtatagaacccgatatggtcgtggagttcaaattgggtaagaaatatgtgtacaagcttaacgaagcgcactctgattacgaagggatttccaagtgccaaaacaagctgatcactgagtttttgtccaatataccaatctccacagttgccaaagcctatgtttctggcaagtcctatctggactttctcgagccacaccggaataattattatttcgtacgaatggacctgaaaaacttctttcattcaatctcttccgaactgatccggaactcttttgacttatacttcgaaaatgagttcactaacgaggacaaaaagcagaccctcatggacgcatttattaatatcgctacctacaaactcgatcaggagtcaaaaaacgtggccttctctgggaagaggattctgcctatgggctttaagagctccccgatcatttcaaacattatctttcgcaagatcgatattctgatagaggatttctgttcgaaccataatatcacctatacacgatacgctgatgatctgctattttcctcaaaaacgaatagtgacccttacggtagtgtatttttgaagcggtttaattccaagccaaggaccggatttatccactctaacagatttttggatgaaatctcatacctagtgcgcatagacgggttcaaaatcaacgctagtaagaccataaaagccatcaatactctgagtctcaacggatataccatcgaaggctccaactattctgatctgcagggaacaattcgcattagcaataagaagacacagataatcagtaagcttattttcgaggtcaagaaaggcagctctaatttcaacgtgatgaagaagattttcgatttcaaagtgtcgaataagtacttcaactatatcccccccaaagaagaacatattgaaaggtactgtagggaccaaattataaataaagtcagcggctatcgtagctaccttatcagcatcttaaaatatgagtcagagtacaaatgcatcgacgaaaagagcattaacaagtacaacaagctcattaaggagctggagtggattcttactaagcctgagtttgcaagctga

SEQ ID NO: 12244 - RNA, 1104 nt, synthetic construct
  source 1..1104: mol_type = other RNA
atggacaaaatcgataaagataccttctttagcgaattgctcgttggagactatagtacgctaataaatcagggcgtaccccagacagatttcggtgacgtcacagagattcagtctggaaagaagtttttctacaaactgaaagaggactcagatctgaacaagtgtctcaaagtcctgaccactaggtttttgaacaagatcccgattaataatagcgccaaagcattcagatcaaatcagtcttacctgaactttattgagcctcacagaaaaaactaccattttattcgcatcgacatcaagaatttctttcactccatctcagaagatattctgaaggattgcttttcctcgtattttgagaaacaaatcgtgaataccaagtcccgatccctgcttgtggacagcttcattaatttagtgaccttacggctcagtgagaactccaaaaatgaggtgttctctaacaagatcatacttcccatcggctacaaaacgagtcctatcattagcaacataatcttccgtaagttcgacattctgattcagtctttgtgtagcatgcataatatcgagtatacacggtacgctgacgaccttctttttagctctcccaaacactccaacacaattcactctactttcttctacaacgagatctcgtttatcctgagtctggggaggttcaaaatcaaccagaagaaactcttgagcgctaaaaagattctcagcattaagggttacactattgatggcaccgaagatgaaaaacggttggggactatccgaatttccaacaagaagatcaagatcatagagaagttactctatgaattcgacaaagggtcatccaatatcaagatcctaaggaaggtcttcaaaataaacgtggaaaagaagaagttcaagtataagccaaaaccagagtttatagataagtacgcgaaggatcaggttcataacaaaaccctgggatatagaagttacctgatctcactcataaagtttaatcaagactacaagtgcatcgatgacaaatctattctgaagtatctgaagctggtgaaacgccttgaaaagctggccctagaaattaaatga

SEQ ID NO: 12245 - RNA, 1233 nt, synthetic construct
  source 1..1233: mol_type = other RNA
atgaagattatcgagaaaaaggactttgtgaatcaggtgctgcaaggatatgatgggtattcaaatgagatgggagtgaagaccttgactcccaacgagattgttgagtttaagatcggctcaaagttcggctacaggtgtagcaacaacgatcttgccaagtccctggaaaacacccaactgcgcgctctctcccgggtcgtgaatacattggaaatcagcaaatgtgcgacagcttttgtcacgggatctagctatctggattttctcgaaccccatcgttattcataccatttcattcggttggacattaaagacttctttcactctatctcctcctctgtcatctcagaatcttttagtaagcacttcaaggacactaatatcactagcggcgagactaaacagacactgctcaagtctttcctaaaccttgttacatatacgatcccacctgattccacgaataagaaattcgcaggcaaaactattcttcctatagggttccggacttcccccgccattagcaatatagtgttccgcaggctggattgcttaatagaggacttctgctaccgaaataatgtaacttacaccagatacgccgatgacatgctgttttcgagcaagataaatacaaagttcaagtccatcttgcagaagaaagatgtcctcccacctattccgattacccataaagagcacaaaaccagattagctaaaatcaaaagagaggaggcactgaaacacgggtgttttctgcacagcgacaagtttacaaacgagatctctagtattatccggataatcaacctgaaactgaacatcaaaaagacaatcaagtccaatcagactattagtctaaatggctacaccatcgatggtgtagatagctatctgtctgctggtacaattcgagtgtcaaataagaagcttaacgtgataagcaagatcattcacagtctcaacaaaaacatgtctgccattgaaatcatggaaaggtacttcaagatgaacaaagcccatgaatgctttaagtaccctcccaaatatgactactacaacaccttttgcattcagaagcttttcaataagatcaccgggtatcgctcgtacctggtttcattgatcaaatatgacgaggagtataactgtattaccccaagtagtttaaagaagtacaaatccctcatagcagaactcgacaaaaccttcaccaaaatcaagctgtga

SEQ ID NO: 12246 - RNA, 1143 nt, synthetic construct
  source 1..1143: mol_type = other RNA
atggtcagcgaaaagaaaatagggaataaattcgcgtactccctcaaagtgaacggtgatgaaggccagaatatactggctatacacaacaaactgaatcagctgttcctgaataatatcgagattaatcgttgtgccaaagcattcataaagggaagatcctacttagattttatcgagcctcatagagagaactttcatttcataaggctggatatcaagaagtttttccactccattggaatcgatcttctgaccgaggcctttgaaaattacttcaagaaggactacctcatcaataatgagaacaaacagtctctgttgaacgcctttattaagctcgtaacctatacaatccccgacgactcacctaacatcgaattacgaggggtgaccgttttgccaattggcttcaaactgagtcccgtgatatctaacattgttttccggaagttcgaccttctgattgaagactactgttatcacaacaacataacatacagcagatacgccgatgacatgatcttttctatgaagatctctaacaagttcaagaactttaagaggatcaaattcccatccctcctgatcaatgccgaagacgatagggagaggaaactggaaattctcagctttattcacagcgacaaatttatcgatgacatctccgatattctcagtattggacagcacaaatttcacttgaaccccaaaaagacaatccggagtcatcatactattagtctgaatggctatgtcattgagggttgcgaagaccatttctcgacaggctccatccggctgagtaataagaagactcactttatctccaaggtgattcacgctatcacgaagaaaaagctgtctccggagagcattttcaagactatcttgaaggagtcaatcgataagtctaatattccatacacccctgctacccctgcattcaaaaaacagtattatcgctcacagcttatcaacaaacttgctgggtatcgaagctatattatctcatttctcgtgtacgattcaaagcaccattgcattgaggacaagtacattcgcaaatatttagagatgatcaacgcaatcgaaaagagcataaacaaactagagaaacaacgcctacaacagcccaagtga

SEQ ID NO: 12247 - RNA, 1119 nt, synthetic construct
  source 1..1119: mol_type = other RNA
atgaaatacaagaaactcacagtgaaatccttcgtgagtatgctgtctgatgaagcctccgatcagttggaattacttaaacagcccattgaaccctacaaatttagcgatgtcaaacagagaaagctggggaagaagacaatattcaaactcacgcctgcaaagtctcagtaccttgaccggctgaataacaaactgttctctcatatccgcattaacaattccgccatcgcctatgtcgaaaaaaaatcatacctggacatgtttgagccacacagaaagaacatcaattttctgcgcctcgacattaagtccttctttcatagcattaatcgtaaaaccttggaggagactcttagcccttatgtgacagacgaaaactttttcgaggtcgggtctgtgaaacagagtctaatagatgccctcttaaatctcgtttctctgagggtatccgtggagtataatgacgagtcactgcacaataaagacattttgccgatcggcttcaaatcctcacccgtgattagcaacattgttttccggaaatttgatatcatcatccaagagttgtgcgctaagaatgacattatttatacccggtatgcagacgatatgctgttcagttcaccagtccattccaagtatatccacagcgataaattcttaaacgagatcagttacatcctgtcattcggcggatttcgactgaatcagagcaagaccatcaaggacaagcgtatgatttctataaacggttatgtggtagaggctggagagaatggagattcggggacgatccgcataagcgaaaagaagactaggaagatctacaagcttatctatatgatggagaataacatccctccaaagactattatgaaccgcatatttaaggttagggatcgggacatcgtgtaccgatacaagaaaggtaaggcgaagtttaaagaaaccttctacaaaacacagaccttgaatagactgactggctatagagcgtacataattagcctactgaaatacaacaacaagtacaactgcattaaggaaaggcaggtcaacgagtaccaaaagatgattatcaagctcgaaaagcaaatctataggctgaacctctga

SEQ ID NO: 12248 - RNA, 1146 nt, synthetic construct
  source 1..1146: mol_type = other RNA
atgtgtcgcggccgctctagagatataatgaagtacaagaagctcacaactaaagcttttataagcatcctgagcgacgagacaagcgatcaacttgaactcctgaagaagccaattgaaccgcacggcattagtgatgtgaaacagggaaaattgggaactaagtccattttcaaacttactcccgccaaatcccagtatctgggtcgactcaataataagttcttctgccacattcaggtcaataattcagcagtcgcttatgttgaaaagaaatcctacctggacatgtttgagcctcatcgaaagaataccaatttccttcgtatcgacataaagagcttttttcatagcatcaacagggagatactagctgaagccctgtcgccttacgtaacaaatgaaatctttttcgagtctgggaaagtcaagcagtccttgctcgatgcgctgcttaacttagtatctctgagggtgagtacggagtataatgaccaaagcctgcacaataaagacattttgccaattggcttcaaaagcagtcccgtgatctccaacatcgtgtttcggagattcgatatcattatccaagagctgtgtgccaggtcagacataatatacaccagatatgcagacgatatgctgttttctagtcccgaacacagcaagtacctacataccaacaaatttctgtctgagatttcatacacactgtcattgtccgggttcaagttgaaccaggcaaagacgatcaaggacaagaacatgatttctgttaatgggtatgtgattgagtcaggcgagaatgggaacagtggatctatccggatttccgagaagaaaactaagaagatatacaagctcatctacatgatggaaaacaacattccacctcggaccatcattaacaggatttttaaaatccgcgatagagatatcatctattcctacgacaaaggaaaacgtaagttcaaggacaaattctacaagacccagacactcaacaaattaactggttatcgggcctacatcatttcgttactgatttacaacgagaaataccactgcatcaaagaagagtatatcaacgagtataagacccttatcggcaaactcgaagtgcagatctataagctggttaagtga

SEQ ID NO: 12249 - RNA, 1131 nt, synthetic construct
  source 1..1131: mol_type = other RNA
atgaaatataagaaactgacgaccaaaactttcattagtatcctgtccgacgaagccaacgaccagctggaactattaaagaatcccatcaaaccctacaaatttagtgatgtcaagcagggcaagttgggaaacaagtccatctttaagttgccaccggctaagtcccagtaccttgaccgcctaaatgtgagttttttctcccatatccaaataaacaactcagcagttgcatatgtgggcaagaagtcttatctggacatgtttgagcctcacagaaaaaatactaactttctgcgtgtggatatcaagtcattcttccacagcattaataggaagactttgaaaaaagccctgagcccttacgtaagcgatgagaactttttcgaaaaggataaggttaaacagagcctgttagatgccctgttgaatctggtgtcattgcggataagcaaagagtataatgagaaatcccttcataacaaagacatactccccatagggtttaagagttccccagtgatttcgaacatcgtgttccggcggcttgatattctcattcaagaattctgtgctaagaatgacatctcatacaccaggtatgcggatgacatgctgttttccagcccaacccactctaaatacattcacaccaataagttcctgactgaaatctcttatatcctctctttatcagggttcaaaatcaaccagtctaagacaataaaggacaagaatatgatcagtgtcaacggctatgtcattgagagcggaaagaatggcaacagcggttcgatccgcatttctgagaaaaagacgaaaaagatctacaaactgctgtacatgatggagaataatattcctcaccgaaccataatgaatcgaatttttaacctgagggatcgcgacatcatttacaatcatgagaaaggtaagggcaagttcaaggataagttctacaaaacacaaacactcaacagactcaccggatatagagcctacatcatctccctcctcaagtacaacgaaaaataccattgcattaaggacgagcacattgaagaatacaaggacattatcaaagggcttgagaaccagatatataagatcacatatcagcccacaaaatga

SEQ ID NO: 12250 - RNA, 1116 nt, synthetic construct
  source 1..1116: mol_type = other RNA
atgaaatacaagaagctgactaccaaagcttttctatcctttctctccgacgaccctaatgacagattggaactccttaagacaccaattgcaccgtataatttctctgatgtgaagcagggtaagttggggaataagtctatcttcaagctgagtcccgccaaaagccactatctcgaaaggttaaatcggaacttcttgtccaagatcaagattaacaatgccgctattgcatacgttgagcaaaagagttatttggatatgttcgagcctcatcgggagaacactaactttctgaggctggacattaaatccttctttcacagcatatctagggagactctggctaaaacctttgaaagttatattagcgacgaagtgttctttgaagtgggcaagacacggcagtctctgctcgatgccttccttaacatcatttgtctgaaagtcaccacggatttcaatgatctgtccctgcatgacaaagagatccttcctattggttttaaaagctcaccagtcatatccaatatcgtgtttaggagattcgacatcatgattcaagaattttgcgctcgacatgatataaactatactagatacgcggacgacatgctgttttcttcacccaataagtctcagtatctccacaccaaaaagtttttcagcgaaattagctacatcctatcattaggagggttcaatattaatcaggcaaagacgatcaaagataagaacatgatctcaatcaacggatacgttatcgagaattatagtgatggcgtgcccggaagcatcagagtatccgagaaaaagacaaagaagatatacaagctcctgtacatgatagaaaacaacgtcagctacaagatcataatgaatcgtatcttcaacgtgcgtgatcgagatatcgtatataactatgagaagggcaagcgcaaattcaaagacaagtactataagacccagacactgaaccgcttagccgggtaccgcgcctatatgatctcgattctgaaatacaacgacagatacaattgcctgccaaaaagtaaatcagacgagtacttcaagattatcaaccggcttgagaaacagatcctcattattaaatga

SEQ ID NO: 12251 - RNA, 1143 nt, synthetic construct
  source 1..1143: mol_type = other RNA
atgtgtcggggtagaaatcggtacatcatgaaatatcggaagcttacaacaaagaccttcctgagcattctctcagatgagattatagaccagttggaattatccaggaaccctattcaaccctatacagtgaaagatgtcaagcatgggaaaatcgggactaagtctatatttaagttggcacctgctaagagtcaatacttagagcgtctgaaccagaagttcttcagcaatatagaggttaacaattccgccgtagcttatgtgggaaaaaaatcctaccttgacatgtttgagcctcatcgaaataatgcgaattttcttcgcctggacattaaaagcttcttccactccatcaacagggaggcactgaaaaaaaccttttctgcctacatatcagatgaagtgttttgcgaagatggcaaaagcaagcagcccctgatcgatgcttttttgaacctcatcagcctgaatgtgacaaaagactacaatgacccccagctcgttaacaaaagcattttgccgatcggctttaaatcaagtccagtcatctctaacattatcttcagaagatttgacatcctgatccaggagctatgtagtcgctcaggaatctcttacacgcgctatgccgatgacatgctgttctcttcaccaagtgaacatacatacctccacaccaacaagttcttcaacgagatttcctatattctgtccctgggcgagttcaaaattaacacttccaagaccataaaggacaagaacatgatttcgatcaatgggtatgtcatcgaaagtaaaggcgatggacgtaacggcaccattagaatttcggagaagaaaaccaagaagatttacaagctaatctacatgatggaaaagggagtcccacacaaggtcataatgaatagggtgtttcgcgtgcaggacagggatatcgtgtacaactttaagaaagggaaggaggagttcaagaagaaattttacaaaacccagactcgaaatcggcttacgggttacagggcatacatcatcagcattctcaagttcaatgacaagtatcagtgcatagaagccaagtatgtgagcgaatatcaaactattgtagagtctctggaaaagcagatctataaagttatctga

SEQ ID NO: 12252 - RNA, 1119 nt, synthetic construct
  source 1..1119: mol_type = other RNA
atgaaaaatcgcaagttgacaaccaatacattcttgtccatactctgtgacgatcctttagagataaacgagctactgaaaaagcccattccggcctataccaagcaggacatatctgagacaaaggtgggcactaaaaccatatttaagcttactccagccaaggcccattaccaaaaaagactcaacgatcggtttttctccaggatacctctgaaccagtcaagtgtggcttacactaaacggaagagctacctggacatgttcgaaccccatcggaaatcatataggtttcttcgtctggatatcaaatccttcttccattcaatctcccgcgacctactgaaggacaccttgagctctcacgtgtctgaggacctgtttttcagcagcaattatgccaaacagactcttattgacgcccttttgaatattttaacgattaacctcggtgatacctacaaagataaagatctcacgaatagagacatcctcccaattggatttcccagctcacctgtcgtatcaaatatagttttccgtaagttcgactttctgatccagaagctgtgctccgaaaataacattatctataccaggtatgcagatgatatgctcttcagtagcacagcagatagtaagttcatccactctgaacacttcatccgagaggtgtcttacattctgagtttgggcgggtttaagctgaacggtgacaagaccattaaggagaaaaacatgatctcgatcaacgggtatgtcatcgaaagtaacggaaaggataaaaactccggacacattcgcctcagcaataaaaaaactgctatgatctgcaagctgatcgataagctggacaagaatgtggcacacaaggatattttaaagaagatcacagggttgaaggagaaccatattaaagtgtcctttgacaagggcaggaatgagtttctggctcagtactacaaatctcaaattatcaacctactggcgggctatagagcctaccttatcagcatcatcaagttcaataaactctacggctgtgttgaagacaagtatctggacaaataccagaacatcattgacgatattcagaaacacctgtttcggctggtctga

SEQ ID NO: 12253 - RNA, 1089 nt, synthetic construct
  source 1..1089: mol_type = other RNA
atgataaagaggaagaaattgaccaccaacacctttctatccttgctgtctgatgaccacaaggatcgatttgagctgtcaactcagccgatcggcgacatcacatccaaaaacgttattgagttcaagatcggaagtaagacctgtttcaaattcaaaaatgccggtgtgctggaacagtaccaagaacgtataaatcggttgtttctgtcagagatcgaggtaagtcatagcgcctttgcttatgtaaaaaacaagtcctacctggagatgtttgaatctcataggaacggatactattttctcagagtggatatcaagagcttcttccacaatatttccagacagctcatagccgatagcctgtccggctacatcagcgacgaagactttatcaagaacaaacagaagctcatggatgcattcataaatattatcacccttaacgtgacgaaagaacaatcttctttcgtgggtagacagatcctgccaattggattcaagacttcacctgcagtttctaatataatcttccggcgatttgacaatttaatccagtccctgtgctccaaaaataacatagtttacaccaggtatgctgatgatatgttgtttagcagtcccctaggctttaagttccttcacactgagcgctttatgaacgaactgagctacatcctttcgctgggcggcttttctattaacaacaagaaaacgctcaaggacaaacatatgattaccctcaatgggtatgtgattgagtcgagcttaactagtgggaagatcgcatcaattcgcatttcaaacaaaaagacagacatcatttccaaactcattaataagctggagtataacgtcgacagcaagttaatcatgcggaaacttttcggactgacaaatgaaaaagtcaaaccccaattctctagtaagaagaacaagttcattgaccagtactatgagtcacagctgctgaacgcgattgctgggtatcgcgcctaccttatcagcatcgtgaaattcaatctcaagtacaattgcgtcgagcaaaaatacattttgaagtatcaggggatgatcgataagacatga

SEQ ID NO: 12254 - RNA, 1122 nt, synthetic construct
  source 1..1122: mol_type = other RNA
atgaagcgcaagaaaatcacagtgcgagctttcctgtcaatactgagtgatgatccgcatgatagggcggaattaagcctgcagcccatcaagtctattgaagcagatcgtgtaactgagtgtaagataggcagcaagactgttttcaaactcaaagatgctaagcttcttgagcagtaccaagaccgggtgaatcagagattcctttccaatattgaggtgtcaaacagcgctatagcctatgttaagaataagtcttacctagacctgtttgaaccacacatctacggttaccactttctgcgggtggacatcaaatcttacttccatagtatcagtagggagctcattaaaacctcctttagcacttacatcaatgatgaggatttcatcaaaggccaacagaaactcattgacgccttcacgaacatcctcaccttaaatgtcggggataaacccaagaataacgcactggcaggtaaagaaattctcccaattggctttaaaacctctcctgccgtgtctaacatcatttttcgcagatttgacaatctgattcagtcgttgtgtagtaagaaccatattacatatacccgctatgccgacgacatgctgttttcatcacccctcaagttcaaatttatccacactagaaagttcatggatgagctcagctatatcctaagcctgggcgggttcctgatcaacgacaagaaaaccgtgaaagaaaagcatatgatttccttgaacggctatgtaatagaatcaaatggggtcacaggacagcctgccaagatcagaatctccaaccgaaaaaccaatataatcgccaagctaatcaacaagttggaccacaatgttgactgcaagctgattatgtccaagctgttcaatttatccgagaaaagtatcaaggtcaaatacaaaaagggaagggatgactttatagaccagtattaccggacacagctgattaacgtgatatctggatatcgggcttacctgattagcatcattaagttcaactgcaaatacaactgcattgataagaatcacttgagcaagtatcaactcatgatcaacaaacttgagaagcacttgcttaggctgtccaactggtga

SEQ ID NO: 12255 - RNA, 1122 nt, synthetic construct
  source 1..1122: mol_type = other RNA
atgaaaaacaaacggattctgattgataaggtgttctatgaacgatttctcagtgtcgattcttttaaggagaacctgatcagccaaattcctatccccaagatcacaaataaagaagtcaggttgatttcttcaggggctaaaacgttttatgctattaacaacacctcaccccactcgcatgtacaataccggctgaatagatatttcttctcccacattcctattaactctgccgccaaagcctttgtgaaaggtgggtcctatctcaaatatctggagccccacatttatggatcaagtttttgtaggctggacatcagcagcttcttcaataatatcagtttcaacgacgtggagatgtgcctgtctccctacataaaagacgaataccttatcggaaatgaacagaagttgctgagcgcaatactgaatagtatcgggtatgaaatccctattcacaagaagcataccttgattgtcccaatgggatttaagacatccccaatcataagcaacattgtttttcgcaagatggacctgcttatacagaacttttgcgcgaagaaaggcataatctactctcgttacgctgatgacatgttattctccaatccaaaggagtctaagttacttatcagcgattacttcttcgatgagatatcaagtctgctgtccattatgggcttcaagatcaatgaatcaaagtacatagcaagagagaaagagatttctatcaatggctatgtgatcgaaaacaaaggcggttacggggctgttggtactatccggctctcgaagtcaaaactcaagactatactcaaggtgatccacggcctaaatgaaaacatgccgcataaatccatctgcaacaagtacattgacatcagactcagcgagtccgacttcaagtacgaaaacaaaaaggccgagtttgagaaaaagtattacagggaccagttaatcaactatctgtccggatatcgcgcatacatcctaagcctcattaaattcaacattgagtaccgctgtgtgaataatcactttttgagccagatctccgccatgcttgatgatattcagaagcatatcatcaaggagaaaaataagcgactgcggtga

SEQ ID NO: 12256 - RNA, 1134 nt, synthetic construct
  source 1..1134: mol_type = other RNA
atgaaaaaacaggccatccttattgacaagtcgttctatgagaaatttctgtctgtggaaagcttcaaggaaaatatcactttgcagacggcaattcccaagattacaagtaaagaagttcgcttgatttcatcgggtgccaagacattctatgccatcaacaaggcatccccacatagccatgtgcagcatcgcatcaatcaatattttctgtcccacatccctctgaactcttcagccaaggcttttattaaaggcggcagctacctcaaatatttagaaccccacatctatggatcctccttttgtcgtctagatatatcatccttcttcaacaacatctcattctatgatgtcgaggaatgtctttctccctatatcaaagacgagtacctcatcgggagtgagcaaaagctcatagacgcgatcttaaactctatcggatacaactcacccatacagaataaaatcatcgtgccaatgggctttaagactagcccgattataagcaatattgtcttccgaaagatggacatattgatacaaaacttctgcgcaaagaaaggaattctttactctcggtacgctgacgatatgctgtttagcaatcctaaggaatccaaaatccttctgtccgattactttttcgatgagatcgcctctctgttgagtattatgggcttcaagataaacgagtccaagtatatatccagaaaaaacgagatcagcattaatgggtacgtgattgagaataaggggggatatggtaaaattgggagcattagactgagcaaatctaaaatcaacaccatcctgaaggtaattcacgccctgaagcaggacattccaaataagattatctgcaacaagtacatccagattaggctgaaagaaaccgatttcaaatacgaaaacaagaagctggagtttgagcagaaatattatcgggatcagctgattaattacctcagcggctacagggcttacctcatctcactcatgaagttcaatctgatctttaactgcatcaatcacgactttctaacccaagctaatatgatcctgagtgacatccagttatacctccacaaaattaagaacaagagaagtcctaggcatataaataacatttga

SEQ ID NO: 12257 - RNA, 1125 nt, synthetic construct
  source 1..1125: mol_type = other RNA
atgaaaaccaaaaagatgattctggtcgacaaggtgttctatgagaaaatcctctcagtggagtccttcaaagaaaacattatcacacaatcagcaatccctaagatctccaataaagaagtacgccttatcagctccggatccaaaatcttctacgcgattaataacactagtccacatagccatgtccagctgcgattgaataggttttttctctctcacataccactgaatagtgcagccaaagcctttgtacgaggagggtcttatcttaagtacctggaacctcacatttatggaagtagctactgtaggctggacatcagtagcttcttcaacaacatctctttcgatgatgttaaacagtcgttatctccctatatcaaggatgaatacctgataggcacagagcagaagttgattgacgccatcttgaattcagtcggctatgagagccccatccggaaagataagggaatgattattcctatgggctttcgcacgagccccgctatctcaaacatcgtgtttagaaaaatggacctactcatccaggatttctgtgcaaagaagggggtgatttattctcggtatgctgatgatatgctgttttctaatccaagagagagcaaactgttaatgagcgactactttatcgacgaaatcagctccctgctgagcatcatggggttcaacatcaaccaatcaaagtacattagtcgcgagaaggagatttccattaacgggtacgttatagaaaacaaaggcggtaatggttctatagggaccattcggctctccaaatcaaagctgaatactgtgctgaaagtcacccatgctttggcccagaacattccgtacaagaatatctgcaacaagtacattaaggtgagactgaaggagaagaacatcaaatacgaaagtaagaaggacgaatttgagaagaaatactatcgtgaccaattaatcaactacctcggtggctataggtcctaccttatttctctcgtgaaattccactcggagtataagtgcgttaattccgacttcattattcagataaacggcatccttaatgatatacagaaccacatacagaagataaagaataatcggaggctatga

SEQ ID NO: 12258 - RNA, 1113 nt, synthetic construct
  source 1..1113: mol_type = other RNA
atgaagcgaaatactttcgtgatagacaaggaatactacgaaaaatacctgtcagctgaaagcttcaaggagaactttatctcaattacacctatccccaagataacgaagaaagaggttaggctgattaaatccggctttaaaaccttctacagcctgcagagcaccagtccccacagtcatatccaaaatcggcttaacaactacttctttagcaaaattccgttaaactccgcggccaaggcctatgtgaaaggcgaaagctacctgtcttatctggagccacatatctatggaagctctttttgcagattggatattaagtccttcttcaacaacatctctttcactgatgtgaaaaaatcactttctccctatgtaaaggacgaattcctgattggaaaggaacagacagttcttgaagctattcttaacagcgtgggctatgatgacgagaagtatgacagaacactgatcccaatgggctttaagacttctcctgtcatttcgaacatcattttccgaaaaatggacatcctgattcaggacttttgtatcaagaaagggctaatctacagcagatatgccgatgacatgctgttctccaatttaagggatgggaatctgctactctccaattactttttcgatgagatttcaagtctgatctccatcatgggatttaagctgaatgagagcaagtatatcgcaaagaagcggatgatctcggtgaatggctatgtgctggagaataagggagggaggggtgtagtcggcaacattcgcctctcttctgagaaattgtccaccataaataaagtcatccacgccctcaattcaaaaattccgtacaagaccatatgtaaaaggtacctcgatattaagttgaaggacggtgattacaaatatgagtccaaacgggaagattttgaacgcaaatactaccgggaccaattaatcaattttatgaacgggtacagagcatacctcatcagtataataaagttcaactccgactataactgcatgtcaataaagtttatcgagagtgtgaacttgaccctcaatgagattcaggttcgcatccgtgagatcattaaaaagcgtatttga

SEQ ID NO: 12259 - RNA, 1116 nt, synthetic construct
  source 1..1116: mol_type = other RNA
atgaagaataacaacattctgatcgacaaagccttctatcaaaaattccttacttccgaaagctttaaagaaaacctgatctctggtatccctatcccagtgatctctaacaaagaagtaacctgcttttttagtggctacaaaaagattcatgtgattcgcgatacatcaccgcatagccacgtgcaatatcgactaaacaaatactttttcccccacatccccctcaatagcgccgcaaaagctttcgtcaaaggcggatcttatcttaaatttctggagcctcacataaatgggtcctccttttgcaggttggatatatgttctttcttcaattccatctcctttgagtatgtcgaggagtctctgtccccttacatcaaagacgagttcatcattgataataagcagaagctggtggaggctgtgttaaatagtataggctttaaagacgagaagattaacaaggaggaaatgatcattccaatgggattcagaacttcacccgccatcagtaacattatcttccgtaagatggatatacttatccagtcattctgcagcaagaaaaacattattttcagtaggtacgccgatgacatgctgttttctaccccaaaggagagcaaaattctgagctccgattactttttcaacgagattgcatcgttgctcagcataatgaatttcaagatcaacgacaagaagtacatcagtagagaaaaggaaatctccctgaatggctacgtcattgagaacaaaggtgggtatggagcttcagggtcgattagactatccaataagaagatgatggttatcacgaaagttatgtacgcgttgaataacaacattcccgcaaaaacaatatgtctgaagtaccttgacattaagctcaaagagaagaacatcaagttcgaaaacaagaaaagcgaatttgaaaagcggttttatcgggaccagttgttaaattacctcgggggataccgctcttatctgatatcaatcctcaagttcaatagctcatatggctgtataagggacaatttcacccatcacatcatctttattctgaatgatatccagctccacatggtgaagattaagaagaaaatctga

SEQ ID NO: 12260 - RNA, 1134 nt, synthetic construct
  source 1..1134: mol_type = other RNA
atgaaggaaaagatttctaagatcgacaagaacttctatatcgacatcttcataaagtccagttttcaaaaggagttcgaaacaggagatatcatcccgctgattgccaacaaagaagtctcgatcattaacgacaagaacaaaactttctactccttggctcactccagccctcattactctatccaaactaagatcgagaagttcctgttaaagaacattccactgaatgcatcttcatttgcctacaggaaggatctgtcctacctgcattatctggaaccacacattcagaatgtgaaatattgtcatctggacatagtgtccttctttaattccatcgatattaacctagtccgggataccttttctgtttatttttctgacgagtttctggttaaagacaaacagagcttacttgacgcatttattgccagcgtgacctttagcaccaaagtgggggatgtagagaaaactataatccccatggggtttaaaagctctcccagtatctccaacatcattttccgcaagatggatattcttattcagaaattctgcgacaagaataacatcacatatagtcgatacgcggatgatctgctcttcagcacgaaaaaagaaaataacattctgtcgtccaactttttcattaatgagataggctccatcttatcaatcaattcattcaagctcaacaagagtaaatacttgtacaaggaagagacaattagtctcgggggatacgtaatcgaaaacacactgaatgacggttcaaaaggtaatattaggctgagcagctcaaaacttaatatcctgcataaggccctccacgaaatcaacaagggctcatcagctaagcacatttgcaataaggtgttcaacctaaagataaaggagttcacctacaagaaaaataagaccgcctttgagaaaaagttctattcttctcagttggtcaataaactcttgggctatagatcctatcttctcagtttcgtgaaattccagaataagtacaaatgcatcaaccccgtttttctcgagaaatgttttcgtctgataaacgagatcgagaacataattaacaagaatagccacgcacagggaatgaatgctcctatgagcaactga

SEQ ID NO: 12261 - RNA, 1101 nt, synthetic construct
  source 1..1101: mol_type = other RNA
atgaaagagaaaatctctaagatcgacaagaatttctacaccgacatatttatcaagacatccttccaaaatgagtttgaagcaggtggggttattcctcctatcgccaaaaaccaggtgagcaccatctcaaataagaataagacattctactccctggcccattccagtccccactatagcatccagactcggattgaaaagttccttctgaaaaacatcccactcagtgcatctagttttgctttccgtaaagaaaggtcatatctccactatctggaacctcacacgcaaaacgtgaaatactgtcatttagatatcgtctcattctttcactccatcgatgtgaacatcgtacgagacacctttagtgtctacttttctgatgagtttctggtgaaagaaaagcagtccctcctggatgctttcatggcctctgttactctgactgcggagctggacggcgtggaaaaaacatttattcccatggggttcaagtctagtccgtcgataagcaatattatcttccgcaaaatcgacattttgattcagaagttctgcgataaaaacaagataacctacaccagatatgccgacgatctgctattttccacaaaaaaggagaacaatatcctatcgtctacgttcttcattaatgagatttccagcatactctcaatcaacaagtttaagctgaataagagcaagtacctttataaagaaggtactatctccttaggcggatatgttatcgaaaacatactgaaggacaacagtagcgggaacattagactgagctcttcaaaactcaaccccctttacaaagctttgtacgagattaaaaagggctcctcatccaagcatatatgtatcaaggtcttcaatttgaagctgaaacggttcatttacaagaagaacaaggagaaattcgaggacaaattttacagctctcagctgaaaaataagctgttaggatatcgcagctatctcctcagttttgtaattttccacaagaagtacaagtgcataaacccaatttttttggagaagtgcgtgtttcttatttcagagatcgagagcatcatgaataggaaattctga

SEQ ID NO: 12262 - RNA, 1113 nt, synthetic construct
  source 1..1113: mol_type = other RNA
atgaaacacaagatcacaaagatttccagtgacttctacaagaatttttacctgcgtgaaaccttctcagatgatgtcattatgcattgcggggttcccaatatcacaagcaacgactacaagtcgatatcattcaataacaggatgtttttcagcatcaagaataactcccctcataaaaagattcaggaacggttgatcaaaaattttcttcagaagattcccctgagttcacctgctatcgcatacagaaagaaactctcctatctgcactttctggagccacatgtacatggcgaaagcttttgtcgcatcgatctatgcaacttcttccacaatattaactacgactttgccaaagaatgttttcagtcatactttgaggacgagttcctcctggataagaaaatcaaggtgattgatgccttcctgaattccttatctatcgagatggaaatctccagtgggaaaaaaaagatcttccccatgggctttgccacttccccgtttattagcaacatcatattcaggaagttggacattcttataaagaacttctgcgataagaagagcattatctatactcggtatgccgacgatatgttgttttctggatcagggacggataaactgctgggtagtgagcacttcgataaagagatcgcttctattatatccatcgccggtctatccctcaacatgaacaagaaaatttacaagaggggaattatctcgctgaatgggtatgtgatcgaaaataacaacggcggaggcgaaagaggatctttacggataagcaatggcaaaacctatcttattagaaaagcgctcaagaaatacaagaatggtgacagtaaagagattatctgtaagaaggtgttcttggttaagaaaccatctatcaagtacaagaagaacatcgacctgttcgtcaataagttttacgactcacaatttagcaacaagctcgctggctatcgcagctactttatatctctcatcaaattcaacgacaagtatcgatgcttcaaagatgacgagatcgcaaaatatagcgcaattatagaggagataagttctgtgctgcttaaatcccagcacaaaattaaatga

SEQ ID NO: 12263 - RNA, 1098 nt, synthetic construct
  source 1..1098: mol_type = other RNA
atgaaacataagatcaacaagatcaacaacgatttctacaagaacttttaccttcgcgaaaccttttcagacgatattataatgactcatggagtgcctgaaatatccaatgacgactataagtccattagtctcaaaaataggctctgcttcacaatccggaaatcttcccctcataaaaagatccaggagcgcttaatcaaaaactttttggtcaaggttccccttagttccccagcaattgcttatcgcaaaaaactgaactacctgaactttctggagccacacatccacggagagaatttttgccggatagatttgtgtaacttcttccacaacattaactacaactttgccagagagtgttttaagagttatttcgaggacgaatacttggtgaataagaagattaaggtgattgacgcatttctaaattcactcagcatcgaaatcgtggtgaataacaagaagaagaagatctttccgatggggtttgctaccagccccttcatatctaatatcatcttccggaaactggacatactgattaaatctctgtgcgacaaaagaagcattatctatactcgatacgccgacgatatgctgttctcgtcaagtgggaaagataagttgcttggcagcgaacactttgataacgagatcagcacaattgtaaatacagccggcctgtcgctaaacaagcacaagaaaattttcaagaaggggatcataagcctgaatggatacgtcattgaaaataagaatggcggaggcgagcgaggttctattcgtatttccaatggtaagatgtatctgatcaggaaagccctcgacaaatttaaaaagggctacagcaaagagcacatttgcaagaaggttttttctgtaaagtcacccaccgttaagtataataacaatgcagatcagttcgtcacggatttctacaatagtcaattcagcaacaaactcgctgggtacagatcttatttaatctcactggtgaagttcaacgataaattcaggtgtttccatgagaatgaaatcaccaaatattccgtgatcatagacgagatctccaacgcgctccttaaaccttga

SEQ ID NO: 12264 - RNA, 1098 nt, synthetic construct
  source 1..1098: mol_type = other RNA
atgaagcataagattacgaagatcaactcggacttttataaaaacttctacttgcgggagacattcactgatgatatcattatgactcacggtgtccccaacataaccaatagcgaataccaaaacataagcttcaacaatcgtgtcttcttttcaatcaaacagagttcaccgcacaagaaaatccaggagcgcattatacggaatttcttacagaaagtccctttatcctcacctgcgatcgcctacaggaaaaaactttcatacctgcattttctggagccacacatctatggcgagaatttttgcagaatcgacttgtgtaactttttccacaacatcaactatgactacgcacgggaatgcttcaagtcttacttcgaggatgaatatcttgtcaataagaagatcaaggtggtagatgcctttcttaacagcctgagtgttgaagtggagctcaacgataagaagaaaagaattttcccaatggggttttcgaccagtcctttcatctccaatatcgtttttcgaaagctagatgtgctgattaagaacctgtgtgacaagaggagtatcatgtacaccagatacgccgatgacatgctctttagctctagtggcaaagacaatctcctggggagcgagcattttgacaaagagatcagctctattgtgaatatcgccggcctaaacctgaacgtgcacaaaaagatattcaagagggggatagtgagcttgaatggatacgtgatagaaaataaggacggaggcggtgagagaggatccttgcgcatttccaatggaaagacatatcttattcgcaaagcactcgacaaatacaagaaaggctatagcaagaagcatatttgccaaaaggttctgtccgtcaaacccccctctgtgaaatataagtccaatgctgatcagttcgtaatggaattttataactcccagttccataataagctggctggttatcgatcttacctgatttccctcgttaaattcaacgaaaagttcgggtgttttcacgagaaggagattacaaaatacagcgctatcatcgacgaaatttcatctgtgctcctgaaatcttga

SEQ ID NO: 12265 - RNA, 1098 nt, synthetic construct
  source 1..1098: mol_type = other RNA
atgaaacactccatcactaaaatcaattccgacttctacaagaacttttacctgagggaaacatttggggacgatattattatcacccgcggcgtcccaaatatcacaaatgacgactaccagaagattagttccaacaatcgaactttcttttccatcaagaattcttcacctcataagaagatccaggagcgcctgattaggaatttcttgcaaaaggtgcccttgagtagcccggccatcgcctatcgaaaaaaactcagctatcttcactttctagagccccatatttacggagaaaacttttgtcggatcgatctctgtaatttcttccacaacatcaactacaacttcacgagagattgttttaaatcgtacttcgaagacgagtatcttgtgaacaacaagattaagttgatcgatgcttttctcaactccctgagcattgagatagactttaacgacaagaaaaagaggatatttcctatggggtttcctaccagtccattcatcagcaatatcatcttccggaaactcgatattgttattaagaacctgtgcgataagcgtggaattacctacacaaggtatgctgatgatatgctgttctcttcttcaggcaaggataaactgctggggtcagagtacttcgacaatgaaatctccagtatcgtgaacatggcaggcttaagcctcaatactcacaagaagatcttcaaaaaaggcattgtctccctgaatggttatgttatcgagaacaaagacggtgggggcgaaagaggtaatcttagaataagcaactggaaaacctacctgataagaaaggcactggacaaatataagaagggatactctaaagagcatatatgcaagaaagtgttttccgtgaagaaaccctctgtacggtataagaaaaacgccgccgcgttcgtgcagagtttctactcatcgcagtttagcaataaacttgccggatatcgcagctatctgattagcttgattaagttcaatgacaagttcgagtgcttttcaaacgaagagatcgcaaagtactctgctataattgaggaaatatccgaagtcttactaaagtcttga

SEQ ID NO: 12266 - RNA, 1098 nt, synthetic construct
  source 1..1098: mol_type = other RNA
atgcgacaccagataaccaagatcaactcagacttctataaaaacttctacctccgggagacattttctgatgacataattatgaccgacggcgtgccaaacataaataaagacgactaccagcacatccttttcaaaaaccggatattcttttccatcaagattaatagtccccatcgcaagatccaggaacggctggtgcgcaatttcctccaaaaagttcctctgtctagtcctgccatagcatatagaaagaagctgtcctacctgcattttctcgagccccatatttatggggagaaattttgtcgtatcgatttgtgcaaattcttccacaatatcaactacgatttcgctaaagagtgttttaagtcctactttgaagatgagtatcttgttgacaagaagattaaagtcgtggatgcctttctgaattctgtgagcatcgaaatagatctcaacgggaagaagaaaaaaatattcccgatgggcttttccacttctccattcatttcaaacattatcttcaggaagctggacattctgatcaagactttctgcgataaaaggggcattatctacacccgctatgcagatgacatgctgtttagctcactggggaaagacaagttacttggaagcgagtattttgataaagaaatctcgtacatcgtcaatatggccggactgtctttgaatacgcacaaaaagatcttcaagaacagcatcatcagtctgaacggctatgtgattgaaaataaggacggttcaggcgaaaggggacgactgagactaagcaatcggaagacatatttgatcagaaaagcgttagacaagtataagaaaggtgaatccaaagagaacatctgtaagaaagtattcctcattaggacacccagcatcaagtacaaatccaatgcttctctatttgtctccaattactttaagagccagttcaataacaagctgagtgggtacagatcatacttgatcagccttatcaagttcaacgataagtttaactgctttgaggatgacgagattattaagtactcgaacattattgaggacatttcgaaagtgttactcaagccttga

SEQ ID NO: 12267 - RNA, 1098 nt, synthetic construct
  source 1..1098: mol_type = other RNA
atgaagcataagatcacgaagataaatagcgacttctacaagaacttctatctaagagagactttcagtgacgagatcgtcagcagtagaggtgtgcccaatatcactaatgacgactaccagagcatatcactgaacaaccgggtctttttttcaatcaagaaaaactctcctcacaaaaagattcaggatcggctcattaagaacttccttctgaaagttcccttaaatagttctgcaattgcctaccgcaaaaaattgtcatatctccatttcttggagccacacatctacggagaaaacttctgtaggatcgatttatgcaactttttccacaacatcaactacgattttacaagggagtgtttcaaatcgtattttgaagacgaatacctgatctccaagaagattaagctgatagatgcgttcctcaatagcctcagcatagaggtggagttgaacaataagaaaaagaggatctttccgatgggctttagcaccagccccttcataagtaatataatctttaggcggctcgacattcttatcaaaacattttgcgacaaacgttctatttcatatacacgttacgctgatgatatgttgtttagctcttctgggaaagataaaatccttggctccgaatatttcgacaaggaaatttcttccattgtctcgattgctggcctgagtctgaatacccgaaaaaagatcttcaagaagtccatcatttccctgaatggatatgtgattgagaataaaaacggggggggagaaagaggcaatctacgcatcagtaatcggaaaacctacctgatccgcaaagccctggacaaatataagaaggggtactctaaggaatatatttgcaagaaggtgtttagcgtgaagccacctgtaattaagtacagaaataatgccaccctgttcaaaaaggagttttataactcccagttttccaacaagtttgcaggttaccgatcctacctgatctctctgattaaattcaacaacaagttcggctgtttccaggataaagagatcactaagtattcagtgctgatcgaggaaatatcacaagttcttctcaaatcctga

SEQ ID NO: 12268 - RNA, 1131 nt, synthetic construct
  source 1..1131: mol_type = other RNA
atgttcaagaagctcaatagtaaggacttgcttaatattctcagcagcgactcccaaagcagactggtggttctgacacagtcatggccaatgttaaatgtggatgatgtgaagaccctgaagttcaacaacaaaaccttcttctctttagtttcccgagtggaacgggatggatacttgaaaaagctgaacttgagtttcctttccaagattaaaatcaacagcgcttctgtcgcatacaaaaacggaaaatcatacctggacttcttctctcctcatgtggagaattataatttcctgaggctcgacctaaagagctttttccactcaatctcctatgaaatcattaaggaaaccttcgagagttatttcctagacgaatattttgtcgacaatggaaaggagaagggaaaagagaaaatcatagacgtctttctgaacctggtaatgctgaatgtaccctccagttatggcgattcctttatctcgggtagacggatcctgccgatgggcttctctacatcccccctgattagcaatattgtgttcaggcgatttgacatcgtgatacacgagttttgcgaaaagcacaatattaagtactcaagatacgccgatgatatgttgttcagctcaaacatttcagacaagactctgtttagtaaccggtttcatgaagagattaaatacatcctgaaccgcggcgggtttaaactcaataacgctaaaacgattcagtcaaagggggttctaagcgtcaatggttacgtgatagacagctatttagagcgtaagggcctgagactcagttccagcaaactcaagaacattaacaaaatcatccacgcgttgaagaaagggtggagctatgagattatacttaagaagtatgccaagaaagactttgataagactaactactacaacaagggtatctctaagtataggagtgaatacgagaaatctcagatactcaatctgcttgtcggctaccggtcctacctcatttcttttcatgaattcgatcgcaaagacaggtccatcgataatgattttctggttgtgtctgggaaaatcatcaaatcgatagagaaagccatcaacaagatctataaggatcgcaaactttga

SEQ ID NO: 12269 - RNA, 1125 nt, synthetic construct
  source 1..1125: mol_type = other RNA
atgaaaagactgagtcgccctgagtttatcaacctgatagataatgacactttcattgagttcacagcagggaaaatttttaacattccatcctctggagttgtcgagtttcagctgtccaataagtttttctacaagttgcgaactgatattaagctctggtccttcttacgcgtaatccattctaaccttaacaagaacttcttgaagaagattagccttaatagttctgctatcgcttttagatcaggactgagctatattaactttttttccccacacatagagaattacttctttctgagactggacatcaaatccttctttcactcgattagtaagaatctgatcaacaacgtgttcagctcatatttcagggacgaatttatcgataagaattcccagattagcctcttagaatatttcatctttctgacaacgctatacatcgatgaaacttacaagaacaaccagtttaagtaccagtatatcctacccatggggttctctaccagcccgctcataagcaatatagtctttaggagtatcgacatccaaataagcaatatctgcctggagtatggtgtcacctacacacgatacgcagacgatatgttgttttctatgcctaaaaatgcgaatccccatatccaaaccgatgtgttctacgtgtctataaaatccatcttatccaaatacggcttcttcattaacaaacacaaagtgatttcgaagaagaacactatcagtatcaatggctatacacttcagaatacgccaaatatgtgtgaattccgggtgtcaaataagaagatcaagatcatccagaagattatctatgagtacaacaagaacaccgaaatatcagccattctgaagaagtgcttcaagtataacatcatcaaacggtttaccacccctgagaaagtgcccaataatctggttgaaaagtataacaagcaccagcttattaacaaaatcgccggctacagggccttcctgctctcattcatactctttaatcatcggtctaaactgatgagcattgagacaagcaacaaatatctcaacctgattaacgaattggagaaaattatgcgtaacatttacctcactttggactga

SEQ ID NO: 12270 - RNA, 1098 nt, synthetic construct
  source 1..1098: mol_type = other RNA
atgaagaagcttgataagaagctgtttttcgacatcctcaatatcgaagagcaggttcttaatcccttcgtcgaagaccaggtgtcatcgtttaaaattggccgcaaattcgtatacgccctgggagataggtctagggaaaaattgtaccagcaggaattaaatcaacggtttttgtacaagatcccactgaacaacgcagctaaggccttccggaagcatacgtcctattttgacttcctcgaacctcatagatataactacaatttcctgcgtctggatattaaaagctttttcccctccattactaagcccagtattgttgagacattttcacattacatcgaggacgaactggtggtggacgacaccggcgaaaaactactactgaattgctttgtggatttagtcaccttcactatcccgtcccactctgcaaatcgaaagttcgccggagagagcgtcttgccaatggggtttgtgacaagccctgcgatctctaacattatctaccgcaagcttgacataatcattcagaagcattgcagcattcacggcatagaatattcgcggtatgctgacgacatgttgtttagctcactcgcctcttctagttacatacactcaagatccttcctggatttcatcagccagctcctgctcaagcacggatttgagctgaacaagcgaaagagtatctacaaaaagcacgtgctgagcctgaacggttatgttatagagggggccaggagtgattttccttctggcgatatcagactttcccacaagaaactgaagcttctcgacaagctgatttatgagctgggtaacgggaaaagcaatagtgaggtcctcaaatcagtgttcagcttagagattgataaagtgaatttccccataccaaataccgaacaagagtttaaagacgcatactgtaaggatcagctgctcaacaagattggcggatacaggagctacttgatcgctttcatcaaattccttatgctgaacaacatttcctccagtgtatccatggaacgctattcagagctattgatcaaactcgagaaagagtattccaagctgcataaatcttga

SEQ ID NO: 12271 - RNA, 1107 nt, synthetic construct
  source 1..1107: mol_type = other RNA
atgcacattatcgacaaaaagttcttcaaaaccgcgattgcttcgaaagatttgttcgagaatgacattttccctccaattccgtcaaagtacgtgttcgagaagaagctgaaaaagagatacgtgtactcactcaaaaaagactcagccatcttcaatgcacagcagaacattattgacctgttcctccgaaagatcgatgttaataattgtgctgtgggatttcgaaaggacaagagttacttgaactttcttgagccccatagcggcaactactattttctgcggttagatatcagaaacttcttccacagcattgatgaaaagctgctgaaagattgctttagcccctattttaaggatgaatttatcgatgctgagaacaaacagaagttgatctccagttttctgaatcttgtgacattccacgtgggtaaaagttacggaaatatagactttgtagggaagaagatcgttcccgtgggctttcctagctccccatttataagcaacatttacttccggaacattgacgtgatacttcagaaactgtgcgccctacatgatatcacatatactagatacgcagatgacctgctcttctcttccagccgtgataataagttcgttcactccgactcatttgagaaagaggtaaaggtcatcttgtcctctcggaaactcaaggtcaatgaaaaaaaaatcgtgaaagccaagcacaggatttctctaaacggttatgtgatccaatctactgcactcgtcaataataaaaacgacaacaatgtctctggaatctttatctccaacaagaaaacgagcatcctgaaaaaggtcctgcatgaattcgaatcgaaacctgttaactataccaagataatggagcgcatctttaaggagaagattcgccaggaggactttttctaccccattaccttagacttcaaaaagaagtactacaagacacaagctaggaataagatctgcggctttagggcctatctcataagtttcatcaagttcaacgccatttatgggtgtattccagaatgtcgcatacaggcctataaaaagcttatctgccagatagatacctttctggtgtga

SEQ ID NO: 12272 - RNA, 1107 nt, synthetic construct
  source 1..1107: mol_type = other RNA
atgcacatcattgacaagaatctgttcaaaaccgagattgccccaaaggaccttttggaggacgatgtgattcctagcataccatactcatccgttctggaaaagaagatcaagaaacgctacatctactccttgaagaacaagtctcccgcactactcgcacagaggaacctgattgaggtacttttgagacgaattgacctcaatgactctgctgtcggctttcggaagggcgcctgttatttaaacttcctcgagcctcattctaataattatcatttcctgcgctttgacattaaaaacttcttccactctatcgatgagaagttattaagagattgctttagcagttacctgaaagacgagtgcattgatcccgggaacaagcaaaaacttatcagttcctttctgaacctgattctgtttcacgttggcagctcctttgggaatgatgatgataaaggaaagaggatcctgcctgtcggtttcccagcctcaccctttgtgtccaatattttcctgaggaaaatcgacatcataattcagcggacctgtgcgctgcacaatgtgacatatacacggtacgctgatgacatgctgtttagcagtagtcgtgctgataaatacattcattccgactcattcgaaaacgaaatcaaagtgatactgtctagccacaagctaaagattaacgaaaagaaaatcgtgaaggcaaaacaccgaatttcactgaatggctatgtaatccagtcctcgtcactcaccaacagaaaaaatgtcaatgacatatctggtgtcttcataagcaacaagaagataatcaagctcaagaagatcatccatgaatttaacaagaagcctgtggattacactaaaatcatggaagggatcttccgcgagaaaatcaaaccaagcaatttcacctttcccattactggaacatttaaacagaagttctacaaaacgcaagttcggaataaactctgtggatatagagcctatctcattagtttcgtgaacttcaaccttaggtatgactgcattccggacggcaagatcgagttgtactccaagcttatcaacgagatcgatgtgataatcaaatga

SEQ ID NO: 12273 - RNA, 1107 nt, synthetic construct
  source 1..1107: mol_type = other RNA
atgcatataattgaccggaaccacctgaaaatcagcatccttccaaaggatatttttgtagatggaatcgtgaatcccatcccttcttctgccgtcacagagaagaatgtgaaagggagatgtgtgtacatcctggaaaagaacagtgactacgccattgcacaacgcaatttagtcgagcagttcctgtcaaaaatcgaggttaataattcggctaaaggcttcaggaagaatctgtcttacctaaattttttggagccccatgcctcgaactactacttcctcaggctcgacgtgaaaaatttcttccatagcatagatgagcggttgctgaagaagtgtttcttcatctacttcaaggatgaattcattgacagcaacaacaaacagaaacttcttgacgcttttatgaatctcatcaccttttatgtcccttctagttccaaaaacataaactgcaaggaaaagcggatcattccagtgggcttttcctcaagcccgctgatatcaaacattttttttcgctctatcgacattcttcttcagaagctgtgcattgcgtttaatataacctacactagatacgccgatgatctcctcttctccgcagttagaggttgtgaatacattcacagcgattctttcgagaaagaagtgcgtatcattttaggcactatgtccctgaagattaacaacaacaaaatcatccgcgccaagcaccgaatttccttaaatggttatgttattcaggcacgaagtttgagcaaaaaaaaaagcgctaacgattacaatggggtattcatatccaataagaagacagagacaataggaaaagtgctgtatgagctgagtctcaactcagtggactacaagaagatcatggaaaaaatcatcgggaacaagatcaagatctccgattttaactatcccctgacctacggcttcattatcaagtattataagacgcaaaccaggaattatttgtcaggatacagaagttatctcatcagctttctgaagttcaatgagatatataggtgcgtccctgacattaaaatcaacgtctataaagacctactggacaagattgacaagtttctggtgtga

SEQ ID NO: 12274 - RNA, 1125 nt, synthetic construct
  source 1..1125: mol_type = other RNA
atgcttaataagatcgacaagaactacttcgttaacaatatcctgaacagaaagattgacatcatcaaagacggcgaaattaaaagcattacctcagataacgtgattgaatttacagtgaaagacaaactgctctactctctggggaatggaaatttatactctttcccccaaaaacggatcaatgatttcctattcaagttcataccattcaacaatgctagcaccgctttcaagaaggacttctgctattttgatttctttaagcctcacattggaaacagtctttttcttcggttagatatcaagagctttttccatagcattaacattgataagctcaaagacgtgttgaataagtacgtcgaggacgactttattgacgagaaaaaaaaccagaagatcattgattccgttattaacatcatctccttggacattactttgaactccaagaacaagtactacattaacaagaagatcatccctatcggattttcaagtagtccattgatatcagatctgtactttaggagaatcgatattctcatacagaaaatctgcctaaagaactccattacttacacaaggtacgccgacgatctcctgtttagcgcagcccatgaaaataattacgtccgcaaaaattggataggttttacagaggagatacgcaaactcctgtattacttcaacttcaatctcaacgataagaagactatccagaaaaaggggctgctttctctgaatgggtatgtgatcgagactagactctcaacaggtaacaataagctcattttttccgagctgcgattttccaatgagaaactctctaaactgatcagggcaatttatcacctggaagtattaggcaccagtcccaccgtgataatgatcagcatattcaaagagaagatcaaagacttgaagttcaaatatcacatcacgccggcgttcgccgcccgacattatcggtatagcctgctgaataaactaaggggctatcgttcttttatcatctcgatactgaagtacaacatcaagcacaatattcttaacaagaagaccaaggagaaatataaactgctgaccgaaaaacttgaacgcgaaattttgaagctgtga

SEQ ID NO: 12275 - RNA, 1119 nt, synthetic construct
  source 1..1119: mol_type = other RNA
atgttgaaaaaaatagatcgcaactacttcaacgacatcatacttaacggtaaaaaagacatcatctccgatggtgaggtaaaaactatcccctctgactcaattaaggagttcagtgtgaaaaacaagttcttctatcagctgtccgataagagcatctacaaaaagccccagcagatcattgcagagttcctgagtaaacacgctacatcaaacaatagctcaattgcgtttaaggcaggcctgtgttattttgattttctgaagccacacctcaataattcgagattcctcagactagacattaaatctttcttccacagcattgacatagaaatgctgaaaaaaaccctgtcacattacatagaagacgattacatagacgacatgaagaaacagaagattatagatgccctgatcaatattgtgacaatcgagaattcagaagacctgaatatcaagattaagaaaggctccaagtttttaccaatcgggtttaccagctctcctctccttagcgatgtcttttttcgcaagattgacataatcattcagaaattgtgcgttaaacactctatccagtacaccaggtatgccgatgacttgctattttctgtgtcgcataaaaacactttcatcaataagaactgggaagggtttaccaatgaaatcgagaagattgtgaattacttcagactgaacattaaccggaaaaagacaacgatccgaaagggcttaattagccttaacggctacactattgagacaaagatgcttaacggagccatcttgaacagtgaggtccggctgtccaatgataaactctctaagctcacaaggactatatatcatctggatacgctgggaagcagccctaagaagatcattaacattgtgttcaaggaaaagatcgagaatatcgagttcaagtataaagctacccaatcctttattgaacgtcactacaaatttgtgctcatgaataagctgtgcggataccggtccttcatcatcagtattctcaaatataactccgggaagaagatcctgaatgagaagtccaagcaaaaatatgagaacatagttagtaccctggaaaggcttatcttagtcttgtga

SEQ ID NO: 12276 - RNA, 1158 nt, synthetic construct
  source 1..1158: mol_type = other RNA
atgatcaagcttaatagagagttctttacttccgacattatcgtgctgaagaattccgagtctggactctctgagttcataaactcaaacactatcccttgggacaatgtaaccgagatcaaactcaaaggcaagtactattatagtttcagcaaacggatagtccataatattgactacgtgaaatctcaacggaacatctatgactactttagcaacgtaatccccttaaataacaactcctttgcgtataagaaggaaacctgttatctggattacttaaggccacatataggcaactactttttcctcaaaatcgatattgcaagcttctttcactctattaaggaatcatacgtgcgcaagctattctacaactatatcaatgacgaattcctcgacaatgataaaaaatgtagcttgatcgatgctcttattaaacttacctccatcgatattcctagcgagtcgaagaatatatcctatgttaacaaacgggtctttccaattgggttttccagttctcccattatctcagaaatttatttccgtccgattgacgtgttgctcatgaaactgtgcagtgatttcgaactgacttatacacgatacgctgatgacatattaattagcggtggcatcaataataagtacatagccaacaattgggactttatctacaatcggattttcgaaatcttctcatactataagctgaagatcaacacgagaaagacgataaataagaagaaatgcctgagcatcaacggatatgtgctggaatcaatgtactatgataacaggctcttgttttctgagctacgcatttccaacttcaagcttaagaagatcaataaagccttgttctacctggaggagaacacatacatcaagaacgaaaccattaagtatgtcatggagaaagtgtttaacagtaaattcaagaaggacaagttcaagtacaccattacacagagctttatcgatcgacactatgttttttcgctgacaaataagatgagggggtttagagcctatctgctcagtttcataatctacgatcgcaaatacatgatcctgcagaaagagactaaagacaaatacctgaagatcattggtagaatcgagcttattattgacaggctgctgaagaaatga

SEQ ID NO: 12277 - RNA, 1149 nt, synthetic construct
  source 1..1149: mol_type = other RNA
atgaataagattactaagaagatcctgatcgaaaaaatcttgttactaagcaaggatgagattgatgagttttaccaagctgaaattcctgattcgaatgttgtcgagaagaagcacaaaaacaaattcatgtacagcctgagttatagctcaacctttcgcaaaatccagtctaatattaacagtgctctgaatccccttctcgacctgaacaattctgctatagcgtacagaaccggtttgagttatttcgatttcctcgaaccccatgccaaaaattatcactttctcaggatggacattagcctgttttttcactcactgaacatagacgacgtgaaggaagccatttcacagtacatcgacgatgatatcattaacacaaagcacaaccagaagttgatcgacgtcataatcaagtgcatctcttataagattcccaagaagttcaaaaacaccaaccttcacgataaaaccattctgcctatgggattcagcacctctcctatcatttctaacataacctttcgcaagatcgacatcctgatccagaaactgtgtgccaaattagatatcacatacacgcggtatgcagatgacatgctattttctacgccgcgggacaagaagataatccattccgaatttttcctcaaagagatcaaaattctcgtatccctgctgggcttaaagatcaacgcaaagaagactatcgtgaaatcacatacaattagccttaatggctacatcatacagaatcagatccgactaactggattcgcagggctgttctcaccaatatcgccagccgagattagactgagcaataagaaaacagccattatcgataagctgttgcaccatattctggttaaaaaatccgattccgatgtgatactgaataagctttttaaagaggacgtgagggacctgatgcatcacggtaacaaagagaaatacgtcaaggaatatagtttggaccaaatcctcaacaaacttacaggctatcgttctttcctcctttccattatttcccacaataagaagttcaatagcacttccgtggggactatcaaaaagtacagttccaagatcaccaagattgagaaatgcataaacatcctcgacaaaaagaagatttacacatga

SEQ ID NO: 12278 - RNA, 1149 nt, synthetic construct
  source 1..1149: mol_type = other RNA
atgaacaagattaccaaaaagatcctgatcgagaagattttacttctgtcgaaagatgagattgacgaattttatcaggcagaaattcctgacagcaatgtcgtggagaagaaacacaagaataagttcatgtactccctctcgtactcttccacatttcgtaagatacagtccaacataaattcagcgctgaatcctctgctcgaccttaacaatagcgccattgcatacagaacaggactgagctattttgattttctcgaaccccatgccaaaaattatcacttcttacggatggatatcagtctgtttttccacagcctgaatattgacgacgtgaaggaagccatttcacagtatatcgatgacgatataatcaacacgaaacacaaccagaagctaatcgacgtgattatcaagtgtatctcttacaaaatcccaaagaagttcaaaaacactaacttgcacgacaaaaccattcttccaatgggcttctctactagtccgatcataagcaacataaccttccgaaagattgatattcttatccagaaactctgcgctaaactagatatcacctacacaaggtacgcagatgacatgctgtttagcacaccccgcgataagaagattatccattccgaattcttcctgaaagagataaagatccttgtctctttgctgggtctgaagattaacgccaaaaaaaccattgtgaagtctcacacaatatccctgaacggctatatcatccagaatcaaattcggttaactggttttgctgggctgttttctcccatcagtcctgctgaaatcagattgtccaataagaaaactgccattattgataagctcttgcatcacatactagttaagaaatcagacagtgatgtaattctgaataagctcttcaaagaggatgtgcgcgacctcatgcatcacggcaataaggagaaatatgtcaaagagtactccctggaccaaatcttgaataagctgacaggatataggtcatttctgctctcaatcatttcccataacaagaagttcaactctaccagtgttgggactatcaagaaatacagcagcaaaatcaccaaaatcgagaaatgcattaacataatcgacaagaagaagatctacacgtga

SEQ ID NO: 12279 - RNA, 1149 nt, synthetic construct
  source 1..1149: mol_type = other RNA
atgaacaagatcaccaagaagattttgatagaaaagatcctggtcctgaacaaggatgagattgacgaatatttccaagcagagattcttgattctgacgtcattgagaaaaagcacaagaacaagtttatgtactctctgagctatggtaataaatttcgcaagatccagagcaatatcaatagtgaactcaatcagatactggaactgaacaactccgctatcgcctataggaccggacttagctatttcgactttttggagcctcattcaaaaaactaccatttcttgcgaatggacatttcctccttcttccactctcttaatccagaggatgtaaagagttctctgtcccaatacattgataacgacgttgtaaacgaaaaacacaaccaaaatctgattgatgtgattctcaagtgtattacttacaagatccccacaaaatgtcagaataaaaaaatccacgaggccatcatcctccccatgggcttctccacaagcccgctaatttcaaacatcgtgtttaggaagattgatatcctcattcagaaactgtgcacaaagcttgacgttacttatactcggtatgccgacgatatgctgttcagtacccccagagataagaagattattcacacagacttcttcctgaaagagataagtatcttagtgtctctacttggcttgaaactgaatacaagaaagacgatcatcaaaagtcatactatcagcctcaatgggtacatcatacagaatcaggtgagactcattggttttgcgggactcttttcgccaatatctcctgcagaaataaggctgtcgaataaaaaaaccgctgtgatagacaccctccttcatcagatcctggttaagaagaatagcaataaccagatcctgaaacacttgtttaaagaggatgtccgcaaactgatgcgtcatggcaataaggaaaaatatgtggaggaatacagccaggatcaaattttaaataagctgaccgggtaccggtcatttctgctctccattatctcccacaacaacaagttcaactcaacttcattagacaccatcaacaagtacaagagcaaaattacgaaaatcgagaagtgcataaacatcctagacaagaagaaaatctacacatga

SEQ ID NO: 12280 - RNA, 1149 nt, synthetic construct
  source 1..1149: mol_type = other RNA
atgaagaaaatcactaagaagatcttgctggagaaaatcctcctgctaaataaggacgagtttgacacgtttattcaagtggaaatccctgattcagaggtgatcgagaaaaagcataagaacaagttcatgtactcactgtcatacgcttccaaattccgtaaaattcagtcaaacatcaacagcattcttaacagtaccattcagctgaacaacgcggcaacagcctatagggccgggcttagttatttcgatttccttgaaccccatgtgggtaactaccattttactaggctggatatttctagcttcttccatagtcttaaggtagaggatattaagacagctttggagcagtacgttgaaaatgacactctcaacgaagaacacaatcagaaactgatagatgtcatcttaaagtgcgttacctacaaagtgacgaaagaaagtaacaataaccgcattcacgacaaggtgattatacctatgggattttctacctcccccgtgatttccaatctggtctttcgaaaaatagacatcatcattcagaagctctgtaccaagttagatatcacctatacaagatatgctgatgacatgctctttagcgccgctaagaacaaaaaggcaatccatagcgactacttcataaaagagatcaagatactggtatctctgctcggcctgaaactgaatgaacggaagacaatcaaaaagagccacacaatatccctgaatggctacatcatccagaatcaagtgaagttgtctgggttcaaaggactttttagtccaatatccccagcagagattaggctctccaacaaaaagactgtgattattgacaaactcctacaccacattatggttaagaagaacaatcacaatgacatcctgaagaagttgtttaaagaggacgtccgccatattatgcggtattcaaataaggccccgtatatcgataaatatgccaaggaccagatcatgaacaagttaaccggctacagatctttcctgctgagcatcatctctcacaacaaaaagtgcagcagctcctcgaatgagacaattgaaaagtacaaagccaaagtcgtcaaaatcgagaaatgtatcaagactttggataccaataagatacacacctga

SEQ ID NO: 12281 - RNA, 1146 nt, synthetic construct
  source 1..1146: mol_type = other RNA
atgaaaaagattacgaagaagattctgttggaacagatcctcgacgtcaaaaaagaagatatcgatgcattcctccagaataatatcaacgatagtgacgtgtctgagaagaagattaagtccaaatacacttacaccattaacgacaataagctcaaaaagatccaatcaaacatcaatgagttcctgacccaaattatagatcttaacaatgccgccatcgcgtaccgaaaaggcttgtcttattttgacttcatagagccccatgccaaaaattaccactttattaggatggacatcagtagctttttccacagcctggatgttaaagacattcaggaagccctgtaccaatatgtggacaatgatgtggtgaacgatacacacaatcagaaactgatcgatgtaataatgaactgcataacctatacgattccaatcactgctaacaacgaaaagtaccataatattaccgttcttcccatggggttttccacctcaccactcattagcaatctgatcttcagaaaaatcgacatactgattcagaagttatgtaccaaactgggagtcatttatactcggtatgcagacgacatgctgttctctgctccttttgacaaaaaaatcgtgcacagtgagtttttcatcaaggagataaagatactgatctcccttatcaaattgaagctgaacaagaacaagaccattattaagtcacatacgatttccttgaacggctacatcattcagaacaagatcaaggttaatggaataagaggtctattcatcgagcctacaccgagtgaaattcgcttaagcaacaagaagacaatcatcatcgataagttattgcactacatcgaggtcaaaaaaagcaagaataacatcatcctcaagaaactgtttaacgaagatgtacgggaccttatggtgttctctaacaagaagaagtatatcgatgactattctcttgatcagatactaaacaaactgactgggtatcgttcatttctgctcagcattatcaagtacaatgagaaaacgaacatcacctccaatacgactattcagaagtaccagaataagataaagaggattgagaagtgcattaattcgctcgacaaaaacaataagtacacatga

SEQ ID NO: 12282 - RNA, 1173 nt, synthetic construct
  source 1..1173: mol_type = other RNA
atgtataagatcaataagaagtacttcctgacttacctgcagcccataattgaaaaggggatagtcacaaccatcaaaaaagagaaggtgaaagagtataagttggggaaacactatttttacgagattaccgacgagaaaatcaggtatattcacgagtggctaaataagtcttttcagaagaacatagaccttaacaattcaagcatcgcctatcgaaagggatacagctatcttaatttattcgagccacaccgccataattattactttctcagactggacatcaagagttttttccattctatccaaatgtctgacatcatcgctgtctttgaaccttatttcgataatgaacacatcgatgagaaaaagaagcaaaaactcattgatggctttattaaccttgtgactttcaaaatccctgtgtcctttaagaacaaagaattcaagtctagccggattctgcccataggttttataacttcccctgtcatctctaacatcattttccgtaaaattgacctcctgattcagaaattctgctccgaaaagaacataatttacacacgctattctgatgacatgctgttctcaagttccaacaattcaaaatacttgcatagtgaggatttctacaaggaaattagcattttcctgaacatcatgaactttaagctcaatcagaacaaaaccctatacgccacgcatacactgtcattgaacggctataccttgcaatattccaatcagccgaatagcaagaatgaacagttaatcaatgagttcagactgagtaacaagaagcttctgatcattaagaagatgatatacctcatcaacaagcaggaaaaatccccaaaattcatcctgaacaagctctttaacttcggaatcaataaactcagcactaaatatcccatagagagcaagaatgtgaaggaaaaatattactacgaccagctgctgaataaacttaccggctacaggtcctacgttttatcgattgtggtatttgataagaagcacgattgttgccaggacaaaacgattgataaatacaccgatatcgttgaagacctgaacaagattatcaaacggtacatcaagaaaatcgagacaatttcaaagaagatcgaggacgagattaaagagagtgagagcgcaaaatga

SEQ ID NO: 12283 - RNA, 1077 nt, synthetic construct
  source 1..1077: mol_type = other RNA
atggggaaaatcagtaaagacggatttaagaagttcttacagaccacgactcaaaccaacattaacgagttcaaaatcgggaagagttatttttatgagctgaaagacaacgacaatctcttggcatttcacagagtcctcaatcgggagttccagaaagtaattcccctgaacaatgctgcagtggcctttaggaaaaacaaaagttaccttgacttgttcgaaccccaccgtaagaattactactttctgcggctggacattaaagccttctttcattcgatacagatcgacgacataaagaagaccttttcaacatacttcgaggatgagtatatcgataacgataagacccagacactcattgatgcgtttatcaatctggtcacttataaagtgcccgataacagctccaataaagacttcagaggtaaacagatcctacctatgggcttcgtgactagccctgtgattagcaatatcatatttcgcaagatcgacattcagatacaaaagttttgtagcaagcgggatattacctataccaggtacgccgatgatatgctgttctccagcgacaagaattccaattatgttcactcagatggcttcatcaatgagatatccatctttgttgcccagctcaaattcaagctgaaccatcataaaactctaaaagcaacacacacattgtcactgaatgggtacacaatccagtattctaacatcaagaaggatattctgggagctagggacgaggaagttatttctgaatttcgcctctccaacaagaagatcaacataatcaagaagatgatccacctgattgaagtggaacatcaaacgccgcagtatgtcttgaagaaacttttcaactatcgacttccaaatgatgtgccagctgagaagaaagaagaatactacaagcaccaaattaccaataaactgactggctacagatcttacatcttatctttcatcacattcgacaagaaataccattgcatgcagaaaaacaccgtagagaagtacatcaagcttattaagctgattaaccagaacccttatctccagtga

SEQ ID NO: 12284 - RNA, 1110 nt, synthetic construct
  source 1..1110: mol_type = other RNA
atgaaaaagattattcacaagtccttcttcaagaactacatcatcgagggtgaggtgcctagtactaaaatcccctccgtaaatgagttccaactgggaaagaatttcttttacgaggtggtcaacaataagaaactgctatccttgcataaacagctgaatgatgtgctgctcaataagatagaccttaataatgccgcagtcgcctttcgtaaagactacagctatctgcacttatttgagcctcatcgaaccaactattatttcttgaggctcgatataagatcgttcttccattctatcagggttgatgacattaaggaaatcttcaaggcttacatttcagaggacgaatacattgacgacaagaagaaacaatctattctggaagggtttattaacctggtcacatacactatccccgccgactcaaaaaacgataagtttaaggagaagcaagttttaccaatgggctttactaccagtccagtgataagcaacattattttccggaaactcgatattcagatccagaagttttgcagcaagaacaacattatatacaccagatatgcggatgatatgctctttagtagctccctggctagctcttttgtgcacagcgaatccttcataaaagaaatccggatcacaattagccagatgaagttccagctaaatgaaaacaaaacaatcaggacgaaacacaccatatctcttaatggctacactatccagtacagttacttcgagaactttcttaagttgcataagcaggagtacaaaattaatgaggtgcgcctgtcaaacaaaaagaccaacatcataaaggagatgatctacttgatcgaagttaaaaagatgtcatcccagaaaatcctgtggaagttatttcactacaaactccgcttcaaatttgtgattacagaaagtgacgtccgaaaaaagtattatgatgatcagctcctgaataaagtatctgggtatcggtcctatctgcttagcatcattaagttcaacaagaagtactcatgtacaagagacaccacgatcaagaaatattctgagctgatcaataacctcgacaaaatcatcgactataagtattga

SEQ ID NO: 12285 - RNA, 1377 nt, synthetic construct
  source 1..1377: mol_type = other RNA
atgaacaaattaatcactatcgactacttcaagcgtataattctgaagaataaggtgccgaatatcagcaaagataacattcgcgaattcactgtaggaaagaattacttttacgagctgacagacaagcagcaactgttggtccaattccaaatcttcaataagctgagcaacaacatcgagctgaataatgccgctatcgcatttagaaaagacctctcctatctgcatctatttgaacctcacagaaagaactacaactttatccggcttgatattcgaagcttttttcactctattcagatcgacgatatccgcgaggtacttaaggtgtatattcccaaagatgagtacatcgataagaaagaaaagcagtccgtcctggatgcgttcattaacctagttacgtataaaattccctctacaagcaagaatgagaagtttaaagggaagcgcgtgctacctatgggctttcaaacatccccaataatcagcaacattgtttttaggcaacttgacattctgattcagaagctgtgtagttcacacgaaatagtctatacccgttacgccgatgacatgttattcagctcctccaagaataggacctatgtgcataccgatgactttattaaggagatcaggatcatcctgtcgaccatggacttcaaacttaacgagcacaaaacgctgaaagccaggcacaccttgtcactcaatggatatacgattcagtactcagacatatctactatgaagagcaagaagaagattatcatacacaatgagagtgagctccatgaattacgactgagtcacaaaaaaaccgacatcgtgaagaaaattatccacatgatagtgacagaaaagaaagagccagaggtgatcttgaaaaaactcttccagtacaagataaacctcaagttcatcccttccgaaaccctcaaaaataaatacagccatgaacagcttttgaacaaaattctcgggtatagaagttacttgattagtatcatccagttcaacaaactgtactattgcactcaggacaaaaccatcgataagtatatcaagatcatcaatgacctggagaagatcgctacacagtatcggatgaagatagagaagctggaacggaagattgataaagaaaagaaacggatcaagtcaatactgatgcagcccattgacaaactgcagttcactatttgggagaaagatgcactctctgaagtgggatacaccactctcaactccttgaagggcgtcacagagaaacatctgtacggtaatataaagggcatcggtgaagtgaaggccaagaacattgtttctattgtcaacaaagagctttcaaagacgaaatctagaatttga

SEQ ID NO: 12286 - RNA, 1071 nt, synthetic construct
  source 1..1071: mol_type = other RNA
atgaagatcaacaaaaagcagctttttcagcaaatcaaactgctgctgaattccaataataggattaataacctggaggtagaagagtttaagattggcaaaaacttcttctacaagatcgacaacatcgagattattaagtttcacgactggctgaataattacctgctggacaaaatcgaaatcaataattcctcgaaagcctttatcaccgacaaatcttaccttgatttcttcgaaccacacattaaaaactacaacttcatccgattagacatcaaaagcttcttccactccataaacattaaagacattgcaaacgctgcgaaagcctactttgataaagacacaatagagctggataagaaatatcccctgctcagcttcttcctgttttttacaacgtacaagattcctgatatctccgagaacaaaaagttcattaacaaacgtgtgcttcccatgggctttaagacgtctccaaaaatatctaacatcgtgtttcgcagcttagacatccaaatacagaagctttgcattaaaaacgggataacctatacaagatacgtggatgacatgctgttttctagcaagaaggatctaacatatatccacactgatagtttcatagagcaaatcagcttcattttgaatcagatgaacttccagttgaattcaaagaaaaccatcaaggctaaacataccatcagtctgaatggttatactattgactctagcaaaaaggagtttaggataagtaacaagaagctcctcaagattaagaagctaatctacatgaagaacatccagaagaaatccgccaaggatatcttgaagaagttgtttcctaaggatttccggaaatataaacttcgctattgcagctcacagttggaaaataagattaagggatatcggtcatacctgctgagtttcattgttttcgacaacaagtataagtgtctctccgaaaataccaagaattcatacatcgacctcataaacaagttagaaaaactcatcctcctggacactaaagtctacaatgacgagattgatgaggatttttga

SEQ ID NO: 12287 - RNA, 954 nt, synthetic construct
  source 1..954: mol_type = other RNA
atgctgagtcagattgaaattaacaactccgcctttgcttttgtacctaaaaggagctatctcgattttttcactatccatatcggcaattacaactttgttaggctggatatcaaaaacttctttcactctattgacctgaagaaattggaaaaaatgctgagcgtgtactttgagaatgaatttatcgacaccgacaaggaccagctgatcataaagagtttcatgaatctggtcacctacaagattccactggccagcaaaaatacaaccgagaaaggcaacaccattctgcctattggattccctacctctcccataatcagtaatatctatatgcgcgacttcgacataaagattcaggagttctgtgcaagacacaacatccagtattcacgttacgctgatgatatgcttttctcttccaaaaaagactcggacttcgttttctcagaaacatttatgaaggaagtggcaatcttgctatcattgaaagggctccatttaaatacgaagaaaacgatcaagcggaaacacaccatttctctgaatggatacacactctctaatagcaaccccactattaaggaaacttccccacattttgagttccgaatctccaacaagaagattagcaccctcaagaaattcatattcttgacaaagaacgtcaacatcagttccagagagatcatggaaaaggtgttcagcttcaacatcaaaaagcaaaagtttcggtatccccccaaaaagaagtttatcgagtcttactgcaagacattactggtgaataagataattggttaccgctcctacattattgccatactcaaacactcagagaagcaccaagcgtgcaacgattcgactatcgagaaatataaactccttctttccgagcttgacttttatctagataagaatccgccagaggatttcagcaagactctgtga

SEQ ID NO: 12288 - RNA, 1143 nt, synthetic construct
  source 1..1143: mol_type = other RNA
atgctgaagatccatgccggtcaattcaaacagctactgaccggacagagtattttcaaaaatgggaccattcccaccatagaagacaaatttatacgggagattcaactcaaagggaagtttttttacgcaatccagaatagtccagagctgtcttcaactcaggccaacctgataaacgagctgtttatccagattgagatcaacaattcagcctatgcttttgtcagcaaaaaaagttacctcgactttttcaccaatcacatcggaaattacaacttcgtgaggtttgatatcaagaattttttccactccatcgacgtaatcaaattagagaaaatgctttccgcatatttcgaaaacgactacatcgataacgagaagcaacagcctacgatcaagagcttgatgaatctcatcacatataaggtgcctttgtcctcaaagaatattgcgaaacgcggcaacacaatcctgcccataggattcacgacaagcccgattatctcaaacatatacatgagggacttcgatatcaagattcaagaacactgtatccggcataatatcaattacagcagatatgctgacgacatgctgttttccagcgataagtcttcggagtatatattctctgattcctttatgaaggaggtcagtattcttcttggcttgaaaggcctacagctgaatgctaagaagactgtgaaacggaaacacactatcagcctgaatgggtacacaatttctaacaaccatattagccagattcttgagaagcctgcctttgaattccgattatctaacaagaagttgtgcatcctgaaaaagtttattcacttgagcaagaaggatggcgtgacttccaggctcattatggaaaagctcttctctttcaacattaagcgccagaaattccgttacagacccaaaaaggaattcatagagtcctattgcaataccctcctgaccaataaaatcacaggttacagaagctacctgatttccatcatcaagcatgcccttaaatataacatcagttcagattgttcgctggagaactataacaagattctgaaggaactggaactctacttagacaaaaacccagttccagatcactcaaaatctgacaagatatga

SEQ ID NO: 12289 - RNA, 1143 nt, synthetic construct
  source 1..1143: mol_type = other RNA
atgctacgaatcgacgcaaccacactcaagaaaatgatcatatccgagaatctgctgatcgagggcattattcctcccatcgagagcaagtttgtgactgagtttagggtgaaaaacaaattctactacagtgtccagaataatccagaattactgctggcgcaaaacaagattatcagtgacattctaagcaaagtggagttgaataactccgctttcgcatttatcaagaataagagttacctggacttcttcgaaccacacatgggaaattataacttcgtccgcattgacattcagaatttcttccattctatccataccccccagctgaaggaaatattgtcccactatttcaaagacgaatttatcgaccccaataagaaacagaaaatcatctcttccttcatgaacctgatcaccctcaatataccactgagttctaaaaaccagaactcaaagaacaacaacatccttccaattgggtttactacaagtcccattatttctaacatctacatgagagacttcgatataaaaatgcaggacttttgtatccgtcacaatattacgtattctaggtatgccgatgatatgcttttttcctcaactgaacaaagctcatttgtgttatcggatgctttcatgaaagaagtgagcatacttctcaacctcaagaaattgaagatcaacacatccaaaaccatcaagaaaaagcatacaatcagcttaaacggttacacaattagcagctccctgattgttgatggcaaagtcatttctccggccgagtttagaatttcgaataagaaaactgccatcatccggaaattcattctcttgtcaaagaaggaaaagatcacgtcacgctacattatggaaaagctgttccactttgataagaataaggttcactttctcttccctcctaaagacaagtttatagagtcttactgcaacactctgctggtaaacaagattaaggggtatcggtcctacataattagcctcatcaagaacgccaagaaatataacaataccaatgagaacaccatcaagaagtatcaggagataatacttgagttgaatatctacctggataaaaatcctctgaaaaatttcagcgagaacaagaaaacctga

SEQ ID NO: 12290 - RNA, 1101 nt, synthetic construct
  source 1..1101: mol_type = other RNA
atgattaagaacaagatttccgatgatttcttcaaaaaggctattctcaaggggaacgaaggcctgctgaacgacttttcgcccagcgtgcgagagtttaaggtgggctgcgacaacttttttgagatttcacgggacagtgagcataagaggattaatgacaggataactaagttcgtgcttgataagagcccaataaattcttcagcgtgtggatttgtgcagggcaaatcttactacgattttttacggcctcatatccaaggatactatttcctcagacttgacatcaagaaatttttccacagcattcctagtcacgaagtgaagagtctcctcgctcagcactttaacaacgaaaaaaacgggaagaagtattctgccttggatatagcctacatgagcatcacccacagggtatccgataactatatcgataaagacttcaggggcaaagagatactgccaatcggtttcagtagttcaccggtgatcagcaatattattttcagacgggtcgacatcctgattcagaagctctgtgaagataagggaatcatatactcacgctatgcagatgacatgttattttcctgcgacaattctaagtatttgcactccgaacaatttgagaaagacatttccatcttcgtcagcacgctttcgctgaaactaaagaagagaaaacgccgagccacagagaataccatctccctgaatggttatgtcgtgcagaaccgcaagcgcaagaaggggtttctccatgtctacaaagagaaacctgtggggaatatccgtttgtccgacaaaaaactgaagccactgaaaaagctaagcgccttgttaaagaaacagaaagaccccatctacattatggagaacatcttttacctgaatcccaaaaatttcatcagacgttatggcggaaacttcgcattctattcaaaatacgctgatgatcagctgcagaataagctgaaggggtaccggtcttatcttgtctctctgatcaaatacaatgacaagtacggctgtgttaacattgactgcatgaagaaagtaaaaggtctggttgaggttttcgaaagcaacataaagtga

SEQ ID NO: 12291 - RNA, 1101 nt, synthetic construct
  source 1..1101: mol_type = other RNA
atgattaagaacaagatttccgatgacttctttaggaaagcgattcttaaggggaatgaagatctgcttaataatttcagtcccgcagttcgagagttccagataggatgtgataatctcttcgaaatcactcgggagacagagcataagcagataaatgaccgcatcaccaaatttgtgctggagaagacccctatcaattcatccgcttgcgggttcgtacaggggaaaagctattatgattttctaaggccccacatttctggctactacttcctgaggttggacatcaagaaattctttcactctatcccatcctatgaggtgaaggccctgctcagccaattctttaataacgaaaagaacgggaacaaatacagcgcactggatatcgcctacatgagcgtcattcacaaagtgagcgatacgcatattgataaggactttaggtccaaggagatactgcctatgggctttagtagtagccctgtgatatcaaacattatctttcggaaggtggatattctgattcagaagctgtgtgaggataaaggcattgtctacagccgctatgccgacgacatgttgttctcctgcgacaactccaattacctgcactgtgaccaattcgaaagagacatctccatcttcatttctaccctctctctcagattaaagaagcgcaaacgtagggctactgaaaacacaatcagcctgaatggctacgtggttcagaacaaaaaaagagaaaagggctttcttcatgtctacaaggagaaaccagtcggttcgatacggctgtctgacaaaaagttgaaaccgcttaagaaattagcttctttactgcagaagcagaaaagtcccgttgttatcatggaatcattgttcagtctcgagcggagaaagtttatcaatcgctacggaaacaattggaacttttattgcaagtatgcagacgaacaactccagaacaaactgaagggatatcgttcatacttggtgtcactcatcaaatacaacgataagtatggatgtgtaaacgtcgagtgcatggagaaactgcgagccctagtgggtgtgttcgagcttaatatcaagtga

SEQ ID NO: 12292 - RNA, 930 nt, synthetic construct
  source 1..930: mol_type = other RNA
atgatgaagaacaacatatctgacgactttttcaaaaaggccatccttaaaggtaatgaagacctgttgaatgactttagccccgccgttagggagtttaaggttggctgtgataacttcttcgagattagtaaagattctgaacacaagagaatcaatgaccgcattactaaatttgtgctggcaaagatcccgattaattcttcagcgtgtggcttcgtgcagggaaaaagctactatgacttcttacgtccccacattcagggatactattttctccggctcgacatcaaaaatttctttcactcaatctccgcacacaaggtgaaaaatctgttggcccagcatttcaataatgaaaagggcgggaacaaatacagcgcactggatatcgcttacatggctgtcacccacaaggtatcggatacttatttggataaagactttcgcggtaaagaagtcctcccaattggatttagcagtagccctgtgatatcaaacattatcttcaggaaggttgatatcctaattcagaaactctgcgaggacaaggggatcatctatagccgctatgctgatgatatgttcttctccagtggaaatagtaaatacctccatagcgaacaattcgagaaggatatttccattttcgtatccacattatcactgaagctgaagaagtctaaacggaaggccacggagaacacaatatccctgaacgggtatgtggtgcaaaaccggaaaagaaagaaggacttttttcatgtgtacaaagagaagccagtcggcaacatccgactttctgacaaaaaactgaaacccctgaagaagaacttccgaatcgcccagaagaccaagatttccaatatatacaacggcgagaggcttccttttaaaccaaagaaggtctgccctaagatcagagagtga

SEQ ID NO: 12293 - RNA, 1107 nt, synthetic construct
  source 1..1107: mol_type = other RNA
atgataaagaataagaagaagatcagcgacgattttttcaaaaaggcaatcctcaatggcaataaagcccttctttctgactttagcccttctgtatcagaatttaaagttggaggcgatcggtttttcgagatctctcgcggatccgaacacaaatccatcaataacaggatcaccaaaatcgtgctcgacaaaattcccatcaattcctccgcttgcggatttgttcagtgtaagagttactacgactttcttcgcccgcacgtgcatgggtactactttctgagattggatattaaggagttcttccattcgataccatcgattgaggtgaagaaactattaagccagtacttcaacaacgagaagaacggcgccaagtacagtgccttagacattgcgtatatgtccgtcactcatagggttagcgatacatatattgaggaagacttcagggggaaggatatcctcccaattggctttagcagctctccagtcatctcaaatataatattccggagaatcgacatccttatccagaagatgtgtgaggaaaaaggcatcgtgtatactcgatacgcagacgacatgctgttcagttgcgaaagtagtaagtacctccacagtgaacagttcgagagagacatttcaattttcgtctccacgttgagcctgaaactgaatcgcaagaagcgtaaagctgctgagaacacaatttcactgaacgggtatgtggtccagaataccaaaatcaacaaagggttttttcacgagtatattgaaaagcccgtgggaaacataaggctgtccgataagaagctgaaacccttgaagaaactgtccgtgttgctcaaaaaagaaaaggatcctatctacatcatggataaagttttcaacctgaaccctagcaagttcattcgaaagtacggtaagaattacgagttctattctaagtatgcagacgatcagctacaaaataaaataaagggttaccggtcatatctgctgtctctcatgagctataacgataaatatggttgtgtcaatgccaaatgcatgcaaaaagtaaagggcctggtggaggtgtttgagtctaacattaagtga

SEQ ID NO: 12294 - RNA, 1122 nt, synthetic construct
  source 1..1122: mol_type = other RNA
atgtaccaagtggaagcgtctatgatcaacactaaaatcagcgatgagttcttcaagaaggcaattcttaagggccagagcgagatattcaatgaattttcaccttccgttcgggaatctaaggtgggccccgactcctttttcgagatcgcccagaactccctccataaggacatcaatgacaggattacaaaattcgtgctcaataagaacccaatcaattccagtgcgtgtggctttgtcgccggtaagtcatattatgactttctgcgccctcatattaccggttacttctttctcaggctggatatcaagaagttttttcacagcattcccgttagcgaagtaagggaacttttgtcgcaacacttcaatgataccaaaaatggagccaagtactctgccctggatatagcatacatgtccgtcacacacaaggtcagtaatgaccacgtggatcaggatctcaaggctagggagattcttccaattgggttctcatcttctcccattatctccaacataatatttcgccgagttgacatactgatccagaagctgtgcgaagagaagggaatcacatacacacggtatgcagatgacatgttgttttcaagctacaagtcccgttacctgcacagtgaacaattcgaacgcgacatttcaatcttcatcagtacgttgagcttgaaactcaagaaaagaaagagaaaagaggcagagaataccatttctctcaatggctatgtcatccagaacaaaaagattgagaagagcctgtttaacgttctgaaagagaaaccggtagggaagatcagactgagcaacaagaaacttaaaactctgaaaaagctggctgctttactacgaaaaaagcagagtcctacctacatcatggagaaccagttcaaattgaatcccaacaaattcaaagctaagtttgggaagaacctgaatttctataacaaatttgccgacgaccagctacagaacaaaatcaagggatatcggtcgtacctggtggccttattaaaatataacgaactccatggctgcgtgaatattgattgtgtgaaaactgtcgagaaactgattaaggtgttcgagcttaacgtgaagtga

SEQ ID NO: 12295 - RNA, 1101 nt, synthetic construct
  source 1..1101: mol_type = other RNA
atgaataagaaggtgagcgatgaattctttaacaacgcaattctcaaagggaacgtggcgctcttggatgatttttccacctcagtcatcgaaagaaagagcggcgctgatatatttttcgaaatcctgaaggatagcgaccataaaattgttaacgatcggattacgagatttgtgctatctaaaatccccgtgaattcaagtgcctgtggattcgtaccaggcaaaagttattacgatttcttgcgccctcatatctcagggtactattttctgcggctggacattaagaaatttttccactccatatccgtccttgaggtgaaaaatctgctctcccaatacttctctgacgacaaaaagggagcaaagtatagcgccttagacattgcatacatgtctatcacacacaaagtgaacaataatttcgatgacgatgacattaagaagaaggaaatcctgcccataggttttagcagttctccagtagtgagcaacataattttcaggagaatcgacatcctcatccagaaattatgcgaagataaagggatagtctattccagatacgctgacgacatgctgtttagtagttcaaaatctcgataccttcatagcgagcagtttgagagggatattagcatcttcgtttccaccctgtctttaaagttgaagaagcggaaacgcaaggccgttgagaacactatctccctaaacggctacgtgatccaaaatacaaagctgaagaagaatctcttcttcaatgtctataagcaggatcctatcggctcaattcgtctttcagacaagaaactgaaacacttgaaaaagctgtctgctcttctccgcaagaatagggactccgtgtacatcatggagtccatctttcagctgaactataacaagttcaaacggacttatggtgagaacataaacttctacatccagtacagtgacgaccagctgcagaacaagattaaaggatatcgaagctacctggtatcgctgattaaatacaatgagaagtatggctgtgttgccaataactgcattgtgaaggtgaaggagctcgtcagggtctttgaatcgaatattaaatga

SEQ ID NO: 12296 - RNA, 1104 nt, synthetic construct
  source 1..1104: mol_type = other RNA
atgaacaacaagattatcaagaacgacttctttgagcaggcagtgctgaaagggaaaacgcagctcctaaataagttcacaccgagcgctgtggagaggacagtgggaaatgatatctttttcgagatccccaaagatagcgatcactttttgatcaatagacgaattgagcagctgattttatcaagcatccccgtcaactcttcttgctgtggcttcgttaagggtaaaagctacctggactttcttaagccacacataaaaggatactatttccttagactggatatcaaagacttctttcactccattcagctatccgacattaaggccttgctcggggactattttgaagatgacaagaagtctttcaagtattcccctctggacattgccctcatgtctttgactcatagcgtgagttccacacatcctgctaaagatatgaggggcaagaccatcctgccaatcggattcccctcgtcacctgtgatcagtaacattctttttcgtaaggtggatataaccatccagaagttttgcgaagacaagaaaatcacatattcaaggtacgcggatgatctgctgttttctagcactagttcccgcttcttacacagcgagcagttcgagaaggaaattagtatcttcataagcatgctgaccttacggttgaaacggaagaagcggatcgcaggtgaaaataccatttcgctgaatggctatacgatccagaacaagaaaaaatccaatgtcagtttcctgcgggactaccaacaagaccccattggctctattagactgtcaaacaagaaactcaaaactctcaagaagttggcagccagccttatcaagaagcattccgctgtatctataatggaaaacctcttcgggctgtcatttcagaagtttaaacgcaatcactttccagataaaaacttctaccgaaagtacgcccgcgaccaactacagaataaactcaaaggctataggagttaccttatatcctgggtcattttcgacgataaacattcctgtgttgcttcagattttctgctcaccgccagatgcctgatagacatttacgagaagaacatcgagtga

SEQ ID NO: 12297 - RNA, 1104 nt, synthetic construct
  source 1..1104: mol_type = other RNA
atgaataaaaacaaagtgagtgatgacttcttcaagaatgcaatcctcaaaggtaacctcggactgtttgacaagtttgatctgtccgtgattgaacgtaatatcgggaataacgcatttttcgaaatatccaaagactcggagcagtacaagattaacgaacgaatcacaaagtttgtcctgtctcgacagcccattaattcagccgcgtacgggtttattaagggcaagagttactacgattttctcaaaccgcacataaccggttactactttttacggctggatattaagaatttcttccactctattccagtgagggaggttaatagtttgctggagggattgtttaactcctcaaaggaaggcaaactctattctgccctggacctggccaaaatgacgcttctgcatactgtgtctaaagacttcagcgacagcagcctgagaggggattatgttttaccaataggcttcccctccagtcctgctatatccaatattattttccggagggttgacatcctaatccaaaagtattgcgatgacaagaatatcatctattccagatacgccgatgacctgttattttctagcgcgaactccaatttcattcattcagagcagtttgagaaggagatctctatattcatctcgaccttggctttgaccctcaagaagagcaaaaggaaggcttgtgagaatactatctcacttaatgggtatgtaatccaaaacacccgccctaagaaaacactttttagtaacatcttccgggaaaactctaccggagcaattcgcctatcaaacaagaagctacagacattgaaaaaggtactgcggtcactcttcaagggcaaaagtgccatttacatcatggagacattttttggactgaactacagcaagttcaaaaacaagttcaattccgactatcgcttctataacaaatatgctacggaccagctgcagaataaacttaggggctacagaagctacctggtcagccttatcaaatataacgaaagctacgattgcgtggatcagaactgtctcaaaactgtgaagtccctggccaaggatctcgagaaatatatcgtctga

SEQ ID NO: 12298 - RNA, 1104 nt, synthetic construct
  source 1..1104: mol_type = other RNA
atgaacaaaaaccgggtatctgatgacttctttaagaatgccattctcaaggggaatactgacttgttcgatagttttgacgtgtcagtaatagaaaagaagataggcaacgactgctttttcgaaatcccccgagattctgagcagaacaaaatcaacgagaggatcactaaatttatcctgtcaaggcaacctgtcaactccgcggcttgtggctttataaaaggaaagtcgtactttgacttcctcaaaccccataccaccgggtattacttcctgaggctggacattaagaatttcttccactccattcctgttcgtgaggtgaataatctgctcgagtcccttttttcaagctcaaagaatggcaagagctattctgctctggatctcgcaaagtcaacagtccttcacacagtgtctaaagattttcccgatctatccctcagaggtgaatatatcctgccaattggttttccctcctcaccagccattagtaacatcattttccgcaaggtggacatcctcgtgcagaagtactgtgatgacaagaatataatctactccagatatgctgacgatttgttattcagtagcattaacagcaactttatccatagcgaacagtttgagaaggagataagtatctttatctctactctgtccctgaatctgaaaaagagtaaacgcaaggcctgcaaaaataccattagcctgaatgggtatgttattcagaacaccaaaccaaagaagatcatctttagcatgttctattctgacaaccctgtcggaacgattcggctgagcaataaaaagcttcagatcctcaagaaagtcgtggcagccctattcaaaaagaagtctgccatctacattatggagaacattttcgacctgtctccgtccaagttcaaaaaaagcttcaactcatcctactatttctacaacaaatacgcagaagatcagcttcaaaacaaattaagaggatatcggagttacatcgtgtcgctgattaagtacaatgaaaagcacgagtgtgttgataaaaattgcttgatcacagtgaagagcttagccaaagctctggaagagttcatattgtga

SEQ ID NO: 12299 - RNA, 1095 nt, synthetic construct
  source 1..1095: mol_type = other RNA
atgatcaacaacaagattcacgacgatttttttaagaacgcaattctgaagggcgacacatccctctatgacgactttagccaaagcgttattgaaaaacaggtggggccagatgtcttttttgaaatcaagaaagactctgatcactacaggatcaacgaacgcataactaaaatcgtcttgtctcaggtacctattaattcttctgcttgcggctttgtgcctaacaagagttattatgacttcctcaaaccccatatcaaaggttattactttctccgactcgatattaagaacttcttccattctatcccgaagaagtacgtggaggagcttttcaaacagtatttcagcgataagaagaatgagcagaaatattcatcccttgagttagctctcatggccgtgctgtacaaaaccaacatctttgatgacgaaaaggacaaaatagtgttgcccatagggtttcccagctcaccagtaatctccaacattctattccgtaagatagacattttgatccagaagttttgtgaggagaagaatatcatctattcaaggtatgccgatgacatgttattctcttccagcaaaagtaattacctgcacagtgaatatttcgagcgggaaattagtttctttctgtccacactggccctgaaacttaaaagacgcaaaaggaaagcgacggagaatacaatttccctgaatggatacgtgatacagaatgagaagccaaagaagcgctttctattcaatgtttacaaggaagagagagttggcaccattcggttgtcaaacaagaagatcaagattatcaagaagctgagcgcccatctcatcaaagggtcgtcccccgtggtcatcatggaaaatctgttcaacttaaacccttacaagttcaagaaaaagtacaactcgaacattcaattctacaacaaatacagccgggatcagctgcaaaacaaaataaagggataccgatcatatctcgtgagcctgattagattcaacgaaaaacacggttgtatcgataaaaagtgccttgagactgcaatcaaactggtcagtatcctggaggacaatattacctga

SEQ ID NO: 12300 - RNA, 1104 nt, synthetic construct
  source 1..1104: mol_type = other RNA
atgaaaaacaagatactgtcagacgactttttcaaaaacgccatcttaaaaggcaattcagctctcttcaatgaattcacccccagtgtcactgagagagaggttggtccagatgttttcttcgagatagaaaagaactccgagcacaggaagatcaatgaacgtatcaccaaattcatcctgagtcagattcccataaactcatcagcttgcggttttgtacaaggaaagtcctactttgatttcctgaatccccatattaaagggtatttttttctgaggctcgacatcaagaaattttttcactctatacctgcaagcgaggtcaagagcctctttaaggtgtacttttccaatacgaagaaagaggaaaagtattcggcccttgacatcgctttgatggcagtgctgcacaagactagcaagtctctgtccgactcagagctaagagacaaggaaattttacctataggatttagctcaagcccggttatttccaatataattttccgaaaggtggatatccttatccaaaagtattgtgaggacaaaaacatcgaatacagtcgctatgctgatgatctcctcttcagcagtgcgaaaagcaactttatccatggggaacagtttgagcgggaaatttctatttttatctccacactgtccctgagactgaaaaaaagtaagcggaccgcaagtgagaatacaatcagcctgaatgggtacgtcatccagaacaccaaacagaagaagcttttcaacatgttcttctacaaagatgccccaattggcactattcgggtgtctaataagaagaccaagatcatcaagaagatgacagccttgctgcgccagggcaaatctcctatctacatcatggagaatgtattcaatctcaaccgaaaatctttcaagcccaaatataccaacaattacacgttctacaaccgctatgccacagaccagttgcagaacaaaatcaaaggatataggtcctacttggtgtcgattattaagttcaacgaaaagtacaagtccattgatgagaagtttctaaagagcgccaaaaaactggtgaaagagcttgaagactctattccatga

SEQ ID NO: 12301 - RNA, 1098 nt, synthetic construct
  source 1..1098: mol_type = other RNA
atgaagaagatcaataacgagttcttcaaaggggccattcttaaaaataatgaggctctctttgacgaatttaaaccttcgatctcagagtttaggattgggggagataacttctttaagattagccctaatacacctcaccacgacatctctgaaagaattaccaaaatcgtcttctcccaggtggaaattaattcatctgcctgcggcttcgttcagggtaaatcatacttcgattttctgaaaccgcatatccacggctattacttcctgcgactcgacataaagaaattcttccactcaatcaagatcagcgatgtttctgcactgctggaagactgcttttccaatgagaagggaaagttcaaatacagtccctacgacattgccttaatgtccgtgacccataaagtttccagcaatttcagcgatataaagctgagggaaaaagacattttacccattggactgccatctagtccagtcatctcaaacattatttttaggagagtggacattctgattcaaaagtactgcgaaaacaagaaaatcacttactccagatatgcagacgatctgctattttctagcctcaacagtaactttatccattcggagaattttgagcgggagatttccttttttctaagctgtctgagtttgcgcctcaaccacaaaaaacgtaaggcgtgcgagaatacaatctcactgaacggttacgtgataaaaaattctaagcccaagaagttggacttcttcaatatccacaaagaagatcccgtaggcaagataagtctgagcaacaaaaagcttaagatcatcaagaagatcatccatcaccttaagaaggggagctctgccattacgatcatggaggagctcttttatctgaacttcaataagaaccggtccaaattttataactactatggcttctaccagaaatacgctgaggatcaactgcagaataaactcaagggctatcgaagctatttattgtccttggtaatattccatcagaaaaacaagtgtgtggatgaactctgtcttcgcactgtcaaaaagatgatcaaggacataaacaagaagatagtgtga

SEQ ID NO: 12302 - RNA, 1098 nt, synthetic construct
  source 1..1098: mol_type = other RNA
atgaagaaaatcagtaatgagtttttccagagtgctatactgaagggaaactccgccattctggacgacttctcgcctagcgtcgtggagcagaatgtggccaacaatacattcttcactatccggtcagatacagctcacaaaagcatcaatgagagaattacgaagatcgtatttagcaaaatcccaataaacacatcagcttgtgggtttgtttcaggcaaatcttattatgacttcctatccccgcacgtgtactcttactattatctccgcctggacataaaacaattctttcacagtatcccaatctctgaggtcaagaaactgttggaagataactttaccaaggataaagggacttttaaatactccccctatgaaattgcattcatggcccttacccatagggtgagcaagaacagctctaataaggagttgatcaataaggacctgctgcccattggattttcttcgtctcctgtgatatccaatattctctttcgcaagatcgatattctcattcaaaagtactgcgagaacaagaagattaaatatactcggtacgcagacgatttactgttcagtacccttaattcaaagtttgtacactctgagcagtttgaaaaagagatcagtatcttggtcagcaccctggggttaaaattgaacaacaagaagagaaaagcctgcgaaaatactattagcctgaatggctacgtgattcagaatacaaagcctaaagaaatgaccttcttctccgttcgaaaagatgacccagtcggtacgatacgtctctccaacaagaagctcaagatcattaagaaactcatcgcagcgatcggcaaaaatattccctccgtgaccataatggaagatctgtttggcatgaactttgacaagttcaggggcaagcatttcaacaacctcatgttcttcaacaaatatgtggaggatcagctgcagaataaactaaaaggatacaggtcataccttattagcctgattcagtacgacaagcgggttggtcatgttgacgtcgattgtcttgaatccgtgatcgagctgatcaacaagatcaacaagtacatcaagtga

SEQ ID NO: 12303 - RNA, 1104 nt, synthetic construct
  source 1..1104: mol_type = other RNA
atgaacgagatgaacaaggacttttttattaacgccatccttaacaaggatgaaaccttgctgaatactttcaaaccatcagtggtcgagcaccaagttggcgatgattttttctttgagatccaagatcgtactcctcataagaatatcaacaaacggattaccaacattatcctgtctcaaattcctctgaactcctccgcatgcgggttcatcagaagtaaaagttactacgacttcttacagccgcacgtgaccggctactactttctaagactcgacatcaagaattttttccacacgatagattcagatctcattgacgatctgctgctttcactgttttctgacgagaagaaagggtcggacacattgtccccttttgatattgcctcattagtcgttacacataaggttagcgaaagttgcagctgtgagctaataaatggaaaaaggattctccccattggctttcctagctctccagtaatatcgaacatcatattccgcaaaatcgacttgatcatacagaagttctgtgatgacaagcggataaaatatactcggtatgcagatgacttactgttctccagccccgacaataagttcattcactctgaacagttcgaaaaagagatttctatcttcgtcgcgatccttaacctgaagctcaacaagaagaaaaagatcgcttgtgaaaatacgatcagtctgaatggatacgtaattcagaatgagaaaggtaagaaaactcgacatctccatgtgtataaggaagagccaattggaaccatcagacttagcattaagaaaacaaagatcatccagaagatggtgtatctgctggacaaaaaaattgctcccgtgacaattgtgagcaagctcttcaagatcaattaccatacccacaaatttaagtacaggcgcaacctggaatttttcaagaaatatgccgacgatcagctccagaataagttgaaaggttataggtcttatctgttgtccatcatcaactataacaagattaagccctgcgtctccaccgagcacatcgataaatacctgtaccttgtggacaagataaatagctacatcaaagagtga

SEQ ID NO: 12304 - RNA, 1101 nt, synthetic construct
  source 1..1101: mol_type = other RNA
atgaaactaattacgaatgaggtgttctccaagacaattcttaaaggcaagagcgagctttttgatacatttacccccctgtcgactgaacgacagatcgggaaggaggtgtgctgtatcataccagacagtactgaccataaggtaattaacaacagtctgacgaagattgttttttcacggatacctctgaataattccgcatacgggtttgtcccgaatagatcatatctggactttctcaccccacacgtcaaaaactattatttcctgaggttggacatcaaaaagttcttctactcaatcgacattagccttatcaagaaactcgtgcaatctctctttagtcaggataaggaaggcaaaaaacactcaccttacgatgttgtgatggaggctattacccacaaaacatccagcgactttcccattgctgaaatacgcaataggcaagtactgcccatcggatatccctcttccccagtgatctctaacatcctcttccgtcctattgatatcttgattcagaagtactgtgagggcaagaagataacctatactcgctacgccgatgacatgctgttttctggaaataccaaacggattttgcacggggagaatttcgaaacagaaatcagcatactccttgcgacaatcggtctaaagataaacaataagaagactatcgcctgcgaaaacactatctctttgaacggctatgtcattcaaaatatcaaacctaccgttaacgagttcctgtctcagtattacgaaaccagtatcggtcatattcatatcagcaacaaaaagactcagttaatctgtaaagtgatccatagtctgcggaagaaagaaagcccagagaatatcatggccacacactttggaaaaacctacaacaagcacaaattcaagtacaccaaggattactccttctacataaagtatgccgacatgcagctgcagaataaattaaagggctatagatccttcctcatttccctgatcaagcacaacaaaaagaacaactgcattagcgataaaaacattgagaagtactcaaatctggcaagggagatcgagagacatattaagaattga

SEQ ID NO: 12305 - RNA, 1098 nt, synthetic construct
  source 1..1098: mol_type = other RNA
atgaagctgataaataacgagattttcatccgtacgatactgaagggcaacaccgatctttttaatacattcgttccaacttctgcagaatgccagatcggtaaagaattctgttgcgtcattagtgattctacaaaccataaggccatcaatcacgccctcactaagataatcttctctagaatcccccttaattcctctgcgtgtggctttgtgaagaataaatcctacttagacttcctgacaccccatatcaaaaattactatttcctgcgcctcgatataaagaagtttttttacagcatcgacgtatccttggttgaaaacttggctaaatcgctgttttcacaggacaaagagggaaacaaatttagcccatataacatcgtgatggatgcaattacccataaggcctcagccagttttcccattactgagctgaggaacaagcaagtgctgccaatagggtacccctcatcccctgtcataagcaatatcatcttccgccctatcgatattctgatccagaaatactgtgagggcaaaaacatcatttatacaaggtatgctgacgatatgctcttcagtgctaacacaaaacgggtgttacacgaccggagcttccagaccgaaattgctattctgctgtccactatcaacctaaagatcaataagactaagaccattgcctgcgaaaataccatttccctcaatggttatgtgattcagaatgaacggcctattttcagaaagagccctcaccaaaactacgagcaaccaaccggacacattagaatcagcaacaaaaaaacggagatcattcataagatcttgcactcgttgcgagagaaggagtccccgagcaccatcatgaaaaagcactttgggaagtcatacgacaaccacaaatttatctacaagaaggactatgccttcttcatcaagtatatagagacacagctccagaataaacttaagggataccgatcttttcttataagtctaatccagcacgataagaagaacttttgcattgcagacgaacatattgagaaatactctaaactgaccaaagaaatcgagaggtatattatttga

SEQ ID NO: 12306 - RNA, 1050 nt, synthetic construct
  source 1..1050: mol_type = other RNA
atgtttgatgactccatctttaatcgcatcatactccaaaatcacctttcacttaggaaggattttcaccccaaagtgatcgggatcaagatcaacaagaatctgtacttctctattaacagcgatatccatagggacatcaataagcgcattgtgaactatattttgtcagacatccctgtgaatagttcggcatgtgcgtacataaaaggaaagtcctacttagatttcctcagtccccactgcaaaaattgctactttcttcgtctggatattaaaaacttcttccatagcttcccagagcgaattctcgatgaattcctgttgtcactctttaataacgaaaagcccaagggttctgatgaattatcctcttacgagcttgctagactggtgctgctctataaatgtgacgatgagtatagtgacgattccatcaaggggcgaagtattctgcctattggctttccatcctcaccgataatctctaatatactgttccggaaaatcgacattttgattgagaagtattgctatacacgcggcatcacttataccagatatgccgacgacatgctgttctcctccaaaagctccgggtttttgctaaaatccgagtttgaacgtgaaatgagcttccttataagcctcctgggatttcgcctgaataacaacaagaccataagaagttcaaacgagctgtctctaaacggctacgtcatctacaactacatggaaaataatcggtctggcatccggctgagcaataaaaagctgtcaattattcggaaggtcatctactacaagaaaaacaagatgagcaacgacttcataatgagaaggttattcaacatccacatcaacaacttcaagttcaagtatggaaaacacgagagttttttcgaaaaatactgcgaggaccagattcagcataaaattaggggctttaggtctttcctcctgagcttttcgaactatagcaaggagaattacggtgtttgtgaggagtatatcgaactggtaaatgaattggagaagtacattatctga

SEQ ID NO: 12307 - RNA, 1095 nt, synthetic construct
  source 1..1095: mol_type = other RNA
atgaagaagatcagtcgtgatgatttcgttaaagacattctgggcctcagcgtctccacctctttggatagccctacactttctgtaaagtaccacaagatcaaatcacaagatacatacagcatcgtggaacagacccttcattattatgcaaataaagccatcaacgacaacatcctgtcaaaaatatccgtgaactccagtgcgaagggattcgtcaaaggcaagagttatctcgacttcctgagcgagcacaaggacggttactactttctcagactggatattaagaagttctttccaagcatctcacagacggatatcaggaacgttctaagtcagtatctttcgtacaagattaacaagaaagacaagatttcgactctggactacgcaatgaatgtgattactcaccgcgttgaccctaaatctgctccgtttctgcctgtcgggttctccagtagccccaccctcagcaatatcattttcaggaagatcgatattctgatagaaaagttatgcttggacaaaaatgtcaagtacacacgatacgccgatgacctactgttttcatcttcaaataatcccgagatcctggatgacaagtttataaacgagatttccaagctggtcagcattctgtccctaaaattgaacgtgaagaaaacaaaacggaaaaaagggctgatatctctcaatggatatgtaatctgcaacaaaagccccgaccagccatggttatttagcaaaaagaagaggtacttcactggaaatctttgggtgtcaaacaaaaagaccaagaacttctctaagttgatctatttgatggaaaagggctattcctctgattacatcgccaataaagtgctgaaaattactcccaacaataaccatgtgttttatggtgtgaatgtggatttctataccaagtactgtaacgaccaagtgctcaataaagctagagggtatcggtcttttctgttatcccttataatctacgacaccaagaataaatgtgttgaggagaactacatcaacaaatattccaagctcgtaaatcgcctggatctcgtgattgacaagtacacgagttga

SEQ ID NO: 12308 - RNA, 1128 nt, synthetic construct
  source 1..1128: mol_type = other RNA
atgtcaatgtgttctatgtgtcatacagtgaacttttgcttctgtataaaagacaaagcctattacatgagcaaatacattgagcggaagatcggccctagccttaccagtaaactgttgagtaacatcgatcggaacgtagtgagcgagcttaaagtagggaaagattatacctattccatgctgactgattcacacctagaagtcattaataaggaactggtggagaacctgttttcccacattcccttgaataattcatgtgtaggcttcgtgaagaagaaaagttatcttgatctgctggaaccccataggtactcgaaaaagtttacccgattggatatttcaagcttttttcactccatcagtatctctgacgttaaagctagcctgaccccatacgtgaatccgctgtttctggacaaagagaagaaaatctccaccctggagaagattattgagtgtatcacatatgacgtccctctgacctcctccaatacaattttccgcggaaagaaaatcctccccatggggttcagctccagcccagtgatttcgaacgttgtgttcagaaagattgacatacagatccagaagtactgcatcgaaaacaagatcatatatacgcggtatgccgacgacatgctcttctcctctaacaaagaactagtttctcaagtggaattcatcaacaagatccagtctctcgtgtctcagttgtcattacgcataaatgaacgcaaaactatcactacaagcggacatatcagcctgaatggttacgtcattgatggttcttccggcactattaggctctctaacaagaagctgtctcgaatcaataagatcacccaccagctcctggttagaagtaaaagtccttccagcgtcgctaagaaattatatgggtactcaattagccagtataacttcaagtactcatactccaaggagtttttcgagcagttctgcaaagaccaacttcacaataagatagcgggaaatcgtgcatacctcatcagcgtgttaaagtttaatgacaggtacgagtgcatatgcccagattacctgaagaagagtaaggtcatgcttgataggctcaacgagattttggacaactggagatga

SEQ ID NO: 12309 - RNA, 1062 nt, synthetic construct
  source 1..1062: mol_type = other RNA
atgtccaaatacaacgagagaaaaataggtccttccctgatctcaaaactgctggcagacgtggaccataacgtgatatcagaagctaaggtgggcaaggatttcacatacagtatgctcacaaattcggacctggaggtcctgaataaagagcttgtgagcgactttttcagcaagattccactttctaactcctgtgttggatttgtcaagaataagtcttacctggatctcttagagccccacaggttttcaaatcatttcaccagacttgatatctcctcgttcttccatagcatcagtattgacgatgtgaaatctagcctgtctccttacgttaaaccggaattccttgatgaggacaagtctataagcagtattgagaaggtgatcgactgcatcacttatagcgtgcctaccacatcagaaaatgtcaaaagcaggggtaagaaaattctgccaatggggttttcaagcagtcccgtagtctccaacattgtgtttcgccggatcgatatccagatccagaagtactgcattgagaataacatcatctataccagatacgccgatgatatgttgttttccagtaccaatgaactggtgataaaggttgagttcgtgaataagattaagagtttggtcgctcagctgtcactcaagattaacgaaatgaaaactatcaccacttctgggcacgtgtcattaaacgggtatgtaattgacggcgttaatggaacaattcggctatccaacaataagctcagcaggataaacaagattacgcaccaactgctggtacgtcgcaaaccacccgagtatgtcgccaagaaattgtatggctactccatcagcaaattcaaatttcgctacggattttctaaggatttctttgaccagtactgcaaggaccaactccacaacaagattgcgggcaaccgatcttacttgatctccctaatcaagtataatgaacgacaccagtgtatgtgtcccatctatttctccaagagtaaactcatgttagaccggctcaacaacatactggataattggaaatga

SEQ ID NO: 12310 - RNA, 1062 nt, synthetic construct
  source 1..1062: mol_type = other RNA
atgagcaaatattccgacattaaaatctcccctagtcttaactctaaactgttggcaaacgtggacaggaatgtagtgtctgagattaaagtgggaaaggactatacgtattctattatggccggctcgaatctagatgtgctgaacagggaattagcatccgatttcttttctaagatcccgctcaacaacagctgtgtcggatttgttaagaataagtcatacctggatcttctcgagccacatcggttcagtacaaaatttaccagactggacattagttccttcttccattcaatcagcatagaggacgttaagctttcaattgaaccttacgtgaagcccaagttcctggataatgacaaaaccttgctgagcatagacaagatcatcgagtacattacttacgatgtccctcagaaatctaagaatgtcaagttcagaggcaaaacaatattacccatggggttttcctcctcacccattatcagtaatatagtgtttcgcaagatcgatatccagatacacaaatactgcaacgacaataacatcatctataccagatatgctgatgacatgttgttctcatcaaataatgagattgtggggcaacgtatttttatcaacaagattcggagcctggtgtctcagatcagtctaaagatcaacgagcggaaaacaattactactagcgatcacatctctctcaatggatatgttatcgatggtgcttccggcacaatacgcctcagtaacaagaagctcaacaaaatcaacaagattacccaccagctgctggtccgagacaggagcccagccgtggttgcgaagaagctgtatgggtattccatatccaagtacgactttaaattcggttactcgcaggaatttttcgaacaatactgcaaagaccagctccacaataaaatcgccggcaataggagctacttgattagcgtcctgaaattcaacgagcagcatgattgcatctgtccagaatacgtagtgaaatctaagattatgctggaccgattaaacaagatccttgataattggcgctga

SEQ ID NO: 12311 - RNA, 1071 nt, synthetic construct
  source 1..1071: mol_type = other RNA
atgaataaaaccaaagtgatcacgttacagtcggaacacaaagtgcttctttgtgaggatgccaatccggatgacatttcaagtatattctatttggggaagctggcgttcaagattaaagccaactgctttagagagcaaatcgctatttacattagcaactctatccaggatgtgatcccaataaattctgcagcaactggctttatcaagagaaagagctacctggacttcctcagtcctcaccggcgctcaagtttctttataaggcttgacgtcaaggatttcttccactccatcaaagaagaggatatcaagaaaagtctgtcgaactatattgttccgtcccatattatgattgaggacaagaagactccaacaatcgaccagcttataaagtacatcatgcatgagatccctgatgactttcctgacaagaacctgaaaggaaagaagatactccctattgggttcccatcatctccctctatctccaacctggtatttcgtaagattgacattttgatcagcaagtattgccagcatgaaaacattatgtatactcgatatgctgatgatctcttattctcttccaaaaagaagctgccccccgagctcgagaataagatttcagagtatctgagcatcctctctctaaaacaaaacaacaaaaagaccctgtgtacaaaaagccacatatccatcaatggctatgtgatcgacggagaaacaaattccattaggctcagtaatcataagttgcagcgcattaacaaactgacccacgccatcattaatcggaaagatagccccaaagaaataatgaaggtcatgtacggtaagactttctcccagtatccctttaattacccaaaaggcaagaggaacttttacatcaagtactgtattgaccagatcaataacaaactgaaaggttacagaagctacttgctgtccatcattaaatacaacaagagcgagattatcatcacctcaacctataaggaaaagctaatgacagttataacgcggatagaaaagtgcatcgacatctacaataaactgaaatga

SEQ ID NO: 12312 - RNA, 1143 nt, synthetic construct
  source 1..1143: mol_type = other RNA
atgctcactgctagtaaacttccctctcatataaccagggtcagctgcggcctgcaagtgacatgcgaaagcttgttctgtatcggctcagacatgaaaaccaacaaaatcaagctgccagcaagtttgggggcttttctgaatgaaaactctgacaccgcagtgaaagagcggaagattaaaggtaactatttttacagcgtggatgattccgtgctggataagcaccagacgctggctaagattctgtccgaggcaatcccaaagaatagtgccagcaagggcttctccgccgattgctcatatctcgatttcctgaaaccccacacccctagccgctttttcctgcgcatggatatctcgtcttttttccactctatccccgtagaacagatcgccaataagctgaaaccttactttgacaacaatgcggacaacgaatctcacgccgtgtccgtcgactccattctcaaaaaagtgacatataaggtgccagaaaccagctctaacaagaaaattctaggagagacgattttaccgatgggatttccatgcagtcctactctgagcaatcttttttttagacccctcgacatcgtcattcagtcatactgtcttgaacacgatgttatctacactagatatgccgatgacatgttgtttagcagcaaatataatcagaccatcggctcaggggacgtggagactttcattaaacgtctcatgaataagaactccctcttgatcaatacaaaaaagacactgtacaccgaagggcatatatcactaaacgggtacgttatcgactctaatggtggctgtatacggttatccaattcgaagctgctgacaattaacaagttaaccaagatgctcattgttcagaaggtcagcctgcggcatgttgcggagtccctgttcgggatgaacataagaaaccttccttatgagaacgccaacactaatgctttcttcgaaaagaaatgtaggaagatcgtcctagacaaagtgcgaggtttccgctctcatattatcggagtgaagaagcacggaatcgcaacaagttcaatatccgccgagagtgtaaagaagtacgagaagattatcgagaggttggagaaaattatacttcaacatggctga

SEQ ID NO: 12313 - RNA, 1056 nt, synthetic construct
  source 1..1056: mol_type = other RNA
atgaaaattacaaagattgccctgtccgatgaccttagagcattcctgacaaatgatgacgtgcaactggtacgcgaaatgaagatcaaaaaggatttcttctaccacctggaaagcgaggaaacggctaggtaccacaagaagattgagatcctcataagtaagtacattcctgtgagccgatcaagctatggatttgtcaaaggtaagtcatactttgacttcttatctccgcatttggatagcaaatacttttcccgtctagacataaaaaagttcttccactccataagcgcggacgatttgtcaaaaaagttgaaaccctacttcgttgataaacttgataaagactccaatgttcgacttatcgatttaattctcaagaagctgacttatgaagtgccagcaaacagtaagaaccagtactttatcggtaaaaagattctgcctatagggtttccatgcagccccattatttctaatctggtactgaggcccattgacattcagatcgaaaaaatctgtaaggaacataacgtcatctataccaggtatgctgacgacatgctcttctctagtaaatacatgctttcactgtttaacggggagattaaaaactccgtgaatcgcattatctcacacattgggctaaccctgaacgaatccaagaccgttattaccagcggccatatatccttaaacggatatgtgatcgatggcactaccaatactctgcgcgtgtctaatgagaagacaatgaagctgaagaagactatccggctgatcatccttaaaaaagagcggtttagtgctatcgcctgtaaatactacggattgaatatcaagaacctcagataccacaatgccaatacagacaaatatttcgagacgtattgcaagaacatagtcctgaataagctcagtggctatagagcctatttcatctcgattctcaagtttgattctgagcataatgtgttggatgagaagagcataatcaaatataacctcatcatctctgacctggacaagatcctaaacgagtaccggaactga

SEQ ID NO: 12314 - RNA, 1035 nt, synthetic construct
  source 1..1035: mol_type = other RNA
atgaaactatcacagaaagaggtattaaacgcactcaaggtgcaaagcatcgatgacatcaagaagatatccaacgaattttcctttaaggacggcttctatattcccgagtcgatggaatataagatcctgtctaagaacctgtcagtgatctttagcaagcttcctctgtcttctgctgccaaggcctacaggaaaaagcactcatactatgatttctttaggccccatctcgaaggagagcactttcttcggttggatataaaagccttcttcaacagcattactagtgagcatctcgaggggtttctcatatctcacctgaaaggaaagaatgcgtatgagataaaaatgctcgcaagagctatcagttttttccttaccgtgaaagttgacaaaaagcaaatcctgccaatcgggttcccagccagcccttccattgcaaacttgatttttcgtcccctggacatcacaatagaaaagctgtgtcataacaagaagattatctactccagatactccgatgaccttctgttctccagcgctagcgggagtgtcattcactccagctggttcgagagtcagatctcttacattatttccaaattggacatgcgcctgaatacctcaaagcgaatcgctacgagcaaagaaatatcgctgaatggatatgttctctatggtgaggaaaataacaagaaaatccggttcagcaatcagagactgagaattctgaaaaagctcatccactacaagaaagtccgcaatcttccggaccgagtgattgccaagaaactcttccaggacgaagtgaggatcttggatagttcactgaggttcaacaagaagtctgaattcctagatacattttgccgcgaccaggtgattaataaattgcggggctaccgttcatacttaatctctctgctgaaatacgacaatctatatagttgtgtcgatcgggagtacaagatttacatctgcgatttaattggcgagctgaactctatcatcttttcctatgatcgcggttga

SEQ ID NO: 12315 - RNA, 1029 nt, synthetic construct
  source 1..1029: mol_type = other RNA
atgaaactttctcagaaagagattttcaaggctctagaagtgaagagtatagaggatattaagaagatcagttctgactttgccttcaagaatgggttttacattccacgctcccccgaatataaaacatcaagtgaaaacctgaacgttctgtttagcaaattgcctctgagctcagtcgcaaaggcataccgaaaaaaacacagctactttgatttcttccgtccccatctcgacggggaacatttcctgcgtctggatgtgaaggcatttttcaactcgataaagcgggagcaaatcgagatttttctgatttctcatttgcggggcaaaaatgcctatgaagtgaaagtcctcgcgaaggcaatcagtttctttcttactgtggaggttgacaagcagagggtactacctatcgggtttccagccagtcccgccatcgcgaacctagtgtttcgaccgctggacattgctattgagaagttatgtcacgagaaaaagatcatctattccaggtatagcgacgattttctgttctccagcgctagcaatagcatcatacactctaactggttcgagtctcaaatctcctacataattagcaagttggatatgcggttgaataatggcaagagaattaccacctcaggcgctatctcccttaacggatacgtgatctcaggtgaggaaaataacaagaagttaagcttctctaacctcagactgaaaacgctgaaaaaattaatccacttcaagaagatccgcaagctttctgacaaaatgatagccaaaaagctgttccaggacaatctgaagaacctcaatttgaaatactccgatgaaaagtcattcatcgataaattttgccgcgatcaggtcattaacaaactgagaggttacaggtcctatctgatatcacttctcaattacgacaacctctattcctgtgtagattccgcccatcggagacacatttgcatcctgatcgaggacctcaattcgattattctcagttatgacaggggatga

SEQ ID NO: 12316 - RNA, 1035 nt, synthetic construct
  source 1..1035: mol_type = other RNA
atgaaactctcacagaaagaaatcttcaaggccttgcaagtcgagagcatcgacgacattaagaacatatcaagcgatttcagcttcaaggggggattttacattcctaacgacctcaaatacaagaccagttcccagaacctctcgaaattattcagcaagttgcctttgagctcagcagccaaagcctaccggaaaaaccattcatatttcgacttctttaggccacatctcggcgggaagtactttctgagattagacattaaggccttctttaactctattaagcgagaacagattgaggatttcctaatctctcacctgaaaggtaaaaatgcgtatgagatcaagtttctcgccaaaaggatcagtttttttctgactgtggaggctgataaagatcagattctacctattggtttccccgcttcaccagctatcgcaaatcttgtgtttcggcccctggatatcgctattgagaagctgtgtcaggagaagaaaatcatttactctcgatactcagatgacctcatgttcagttcggagaacagttccacgattcattccaactggtttgaatcccagatctcctatataatctctaagcttgacatgcggctaaataccaggaagcgtattgcaaccacagataccatatccctgaatggctatgtgatttctggcgaatctcccaataaaaagatcagcttcagcaaccagcgcctcagaatactgaagaaactgatccactacaagaaagttagaaagttgccggacaaggtcatagccaagaagctgtttcaggacaatctgaaatcccttgattcctccctcaagttcgcgaagaaagagagttttcttgatacattttgccgggatcaagtgatcaataaattacgcggattcaggtcttatctgatatcactgctgaattacgacgacctgtatagctgcgtacaaagcgaacaccgcgaacacatcagtagcttgacagaagagcttaacactatcatcctgtcttatgacagagggtga

SEQ ID NO: 12317 - RNA, 1026 nt, synthetic construct
  source 1..1026: mol_type = other RNA
atgaagaagatttcagtggcagagattttgacaagcctgggagtaaaaagcatagctgaaattgaccagatcccaaaggatcacagactcgttagtagctatcatgtggccggatcctctgcatacctggcagcctcaaaaagtatcgggcagctgatttcaagattaccgctaaatagcagctcggtggcctacaggaaagggctgtcttattttgatttctttcggccccatcttaaggggaaatacttccttcgtctggacatcaagtctttctttcacagcataacaatcgactccattatcagaacatttgattcccacatcaagggtagtaaacgacgggagaagagtgaactgaccaggaaactcactgactttttgaccattgaattcgagggcaaaaagattctccctatcggctttccagcttcaccccaggtggcgaatctcgttttcaggcccctggatatccaaatcgagaaactgtgtctcgaaaagggtgtctcctatacacgctacgccgacgaccttctgttctcctcccagtctgaaaaggtcatccattctacgtggtttgagtccaccattagcagtattatttcacagcaggagttgaagctaaacaacagtaagaagataaagactaagggcaaaatcagcctgaacggatacttaatctctggctcagactacaagaaaatcagcttctcgaataaaaggcttactgtagttcggaagctactctatttcaagaacaagaaaaactacgatgacctgagcatcatgcggcgcctctttcctaccgatcttaaaaatctgcatcttgtgcaccctaacaaaaatgaatttctgaaagtgttcgctcaatctcaaatactgcagaagttgaagggattccgctcatatttgctgtccatagtgaattacggcgaaaaatataattgcattgagcagtctcaccgaatcgtcctgctcgagctcatatccaatctgaacgatgtcattttaaagtatgagaactga

SEQ ID NO: 12318 - RNA, 1029 nt, synthetic construct
  source 1..1029: mol_type = other RNA
atgagtaagatcagtatactggaagtgctgagctctctgaatgtggagtccattcaggatatcgacaaaatccccaagaacagtaaacttaagagcggctatcatattccagataatggtgcctatagcgaggccagtagcgctttgggtgagttgctgtcaaagctcccgctgaataactcatcagtggcgtacaggaagggatactcctactttgacttctttcgccctcacatcaaaagcaattacttcttgagactagacatcaaaagttttttccactccatcagcaaatccgtgattgagcaaactatagagtctcatttgcggagctcaaaagaactggataaatccctcctagcaaggaaggtcagcgaattcctcacgattaaatatgacaaagtcgacattttgcccattgggtttcccgcatcaccaagggtggccaatctcatattccggcctctggatattcagatcgagaaaatctgtcttgagtctggcattatttattctagatactccgacgatctgcttttttcctctatcaacgacaaaaccattaagagtaattggttcgaaagtcagatctcgtatgtaatctcccaactcaacatgaagcttaacaacaaaaagaccataaagaccaagaatcagatctcgctgaatgggtatgttatctcaggctccgaaaataacaagtacatgtccttcagcaacgaacgtctcaaactgatccggaaactcatttacttaaagaaggtgaagaagatctctgacttctcaataatgcgcaagctgttttttaccgaaatcagcaacctcaaactgatctatcataacaaggctgagtttacacaggtatacgccaaatctcaagtcgagaataagcttaagggcttccgatcttacctactgagcctggttaattatggagatagatacgattgcgttcagttagagcacaagaagatgctgattaacttaattgaagagctgaacctgcttatattccagtacaataactga

SEQ ID NO: 12319 - RNA, 1071 nt, synthetic construct
  source 1..1071: mol_type = other RNA
atgaaaaccattaccaaaaagtacttcatggagaacattctaaactctaacccccctggggatatccctgacaattcaattcaggaagttaggattggcaaagactttgcatattcgattgacaagaaattcgagtcctacagtatcaataaacgcctgacaagtctggtatttaacaaagtcccactgaatgattccgctgtggccttcaggcaagggatgagctactatgactttatgtttccccacaagaataattacaagttcctccgattggatgtcaaaagctatttccattcactgagaatacgggcaataaggaactgccttaaacattacttcatgggatctaggctgaccaataatacgacgatggtggaccaggcgctgaaatattgtacatacactatccccaccgatagcaaaaacgtgaagttctccgaaaaagttgttttacctataggtttcccatcctctccggtaatctcaaatatcatttttcgtcagctggacatagagattcagaaaatctgctacaaacacgagatcatatatacacgctacgccgatgatatgttgtttagcgctaagaagagcaatatttacatccacaacgccctttttgaggaggaaatctctagattactccagcggctatccctcaaactcaacaataagaagactctgaagaagaatcatacactgagccttaatgggaatgtcatagcctttggcaaagctggaggttcgttaagattgtccaacaagaaagtgaagttgattaacaaggtgacttatctggccctggtgaaggaagagagtgccgtgttcatcatgaataaactcttcaacgtgaacattaacaactacaactttcagttccagcaggacgaaattttcttcaagaaggtctgtatggaccaactttttaacaaagcagtcggctatcgctcatacctgctcagcatcatccaatttgacaagaagaacaattgcctggagactagataccgaaagaagtatagtaagatcattacccggctcgataagctgatcgatatctattcttga

SEQ ID NO: 12320 - RNA, 1029 nt, synthetic construct
  source 1..1029: mol_type = other RNA
atgaggatcaatagtaagttatacgatgatctggagaactacttcagcatgtctgtgaacgagttaacaattacgacctctttggaggcaaaagatcgggttgagatcttttctatcgaaaagaagaacaaggagaaaagagagatacacagtgtcgatacaaaaaccacgatgtggaaagtgcaaaatttcctgaacaataagtacttctaccagaataacttccctgagtatgtgtttggattcttgaaagggaagtcatactttggctttctccagtaccatgtctccaagaaaaacaccaataattttctgaagctcgacatcaagaatttttttggctccatcgacactgaggtgttgattgaagacattgtgaacgacttcgaagaggacacctataagaaggaagagctgaagatgctgttcaaagtggtcctgacatataaagatcaactcccacagggattccagacctcgccctatctgagcaactattatttcctgagggcagatctccggatcaagaagtactgcgacaagctcgattttaaatattcacgctatgccgatgacattattatctccaccctctcaaaaggggaaaaactgttcagtaagggcactgtttccatgatagaccggatcatagcggattttgacctgaagcttaataggagtaaaactcgagtggccaagcgtgaactggtcctgaatggtttcgtgatatcttccgaagtgaggctgagtcagagcaagctgaaagaacttcgcagagttttgttcatcatagagcacaaccagtgtaaaaattcagaccagcttttagacctaatcaattccgacaaaaagattaacagcaagaacaaaaagcgatactacagcactgaatatttgctaaagtacctctctggtattcgcgcctttcttatctcctcactaaagaacattagcacaaaaagcgattggtacaagacagcttctaaactgatcgtaagagtcgaggctgtaattcttaaaatgtactga

SEQ ID NO: 12321 - RNA, 1005 nt, synthetic construct
  source 1..1005: mol_type = other RNA
atgtataacttaagtgaccacatcgaacacgtttacaaaaagaacattagcgagctgattgaccagttagaactcgataagaagaacaatgtcgaggaattcaatataaacaagaacaacgggacgaaaagaaatatcaccatggttgtgggggattgcatcttgggccgactgcagtctttcctgtcagataattacttcaataaggttgagttccctatcaattccttcggatttagggagaactgctcttactttgatttcctcgatatccattgttcgagcgaggaaaaagacttccttaaattggaccttaaagacttcttctctagtattgacgctaagctcgtgtgcgaaaacctggccaaagattttgaacgcaatgtgaagaagcgggtgaaactggaggagttatttttcacagtgattaccttcaagggtaagataccacagggttttaagacaagcccctttatatcaaactactttttcgtgagggcagatctgcgttttcaaaaatactgtgacaagctcaactaccagtattcacggtatgcagacgacattatcatctctagcaatacaggcaaagacttttttgtagggaacactatcgccatcgctaaaaaaatcttggctgatttcaacctgaaactaaactccagcaagactaaatatgcgaagaatgagctcgtcctaaacggatatgtcattagtaatgagactagactgtctcagtccaagctgcgagaaattagaagggtactgtttattatggagtcatccgtgaatctggatgtcgcaaccgaccgcttgaatagtaagaagtacttcagctctaagattagcaaccggatcttcgatctcgagtatctgtttaattacctgtccggctatagatcctttcttatatcaagcatccagaagaaggagacaggaaaatggaaagacaccgcctccaagctcatcaaaaggattgaagcccagcttctgcgccaagaatga

SEQ ID NO: 12322 - RNA, 1029 nt, synthetic construct
  source 1..1029: mol_type = other RNA
atgttaagtatccatgagcatatcaaggataggttagaaattagcattgaggacttggtaaaggttatcaagtccgagaaacttaataacgtgtgcacctataatcttagcaagaaaggcaaggagagacaggtggtcgaggtcgataaggacactacactttactatgttcagaccatattgctcaagtttttttcctctatcaaccattttcccgagtacgtatttggcttccagaaacacaaatcctattacaaattcctggacatgcatactactggtaacgacgaaacgtatttcctcaaactggatatccagaattttttcaccagccttgacgctgaaaaactgcttaccaatctggtggcacaatttgagcaggtgacagccaaccagcctatagtcaaagagttactctatgccgcactcacatataataataagatcccgcaagggttcaagacttctccattcctgtccaattactacttttttatagccgatttgcgaatcaagaagtactgcgataaacttaacatcaagtactcaaggtatgcggatgacatgatcttttcatcccactttaagaaaaacatctactctaaccgtaccattaaagctttcgaaatcattctgttcgatttcaatctcaagctgaataagagcaagacgaagctgtctaagaaagaactgtgtctgaatggatacgtggtgtcgaacgaagtgaaactgagtatgaacaaattgaaggagttgaagagaatactattcattatcgagcaaaacaagcaaaaacagaccaaggacctgctgatttcaataaacaatcacacttatctccacagtagcaggaagaagaacacacgctactttagtgaagagtacctgaaaaattacctgtctgggtatcggtcattcctgctcagcttcattaaggaaaacacacaccagaaaaaatggcgggaaatctccaaaaagattattctccgcatcgagaaagccctactgattctctatgacctacagtga

SEQ ID NO: 12323 - RNA, 990 nt, synthetic construct
  source 1..990: mol_type = other RNA
atggacattttttctaagaagcagtttgaacacctgttgaatattgatattgagaatgacacacagaagatcattgaagagaagaacaacatcaagaacatcgagatcgtggtgaacaacaagactaggaatattctgcgtctacccacatcaagtcttatacgcagcactcagaagaagatccagcataccatattgtccgacgaatattatccggattgcgtgtgtggatacgtgaagaaaaagagctactttgactttctgaaacctcattgtgataaaaagtacttcctgaggatcgacatcaaagatttcttcgacagtatttccagcgagaaactcactattctcttggccgagaaaatcaggatcaacgacccaaaagagcgaaaggagatcatggacttcctactcaatatcctgttcgttaacaaaaagttacctcaaggcttctctacgtcgcccgctctttctaatctgttttttaagcgggccgacctgcgcattgagaaatactgtatgacacagaagattacctatacccggtatgtcgatgatttgctgttttcctctaatcaaaacaatctgatcgggaccaaaatactgacgacaattaagtacatctgcaaggattttggcctggagatcaactacaaaaagataaagcgcggtatcgataccttctctttaaatgggttcgtcattgataactcagaaattagactttcccggaaaaagttggcgtacctcaaagaagtattattcttcctggaccacaattgccacaaagacaaccttgacatactaatttccaaagaattcggatccaagttttactatactgagaacattctcagctttctgtcaggctatcgagcattcctgatcagcagcctgagtagtaatccatcaacatggaatgataagtgcagacttctgatcaacagaatagaaaaactcaccatcatactcagcaaaaagatcctctga

SEQ ID NO: 12324 - RNA, 1005 nt, synthetic construct
  source 1..1005: mol_type = other RNA
atgcaaatttttatctacaaggaggagtacttctatgataaaattttgtcgagcagcaaggcattaatcgaagaaaccattaaggacaaagacaaattctacagggagaagaaaatccctaaaaaaaacggtgacaggacactgttctgtcttaagaaagactgccccctatctaaagttcagcagaacattcggatgaacttcttgaacaaaattagtattcccgactatgtgtacggatttgtaccgaatcactcctataaagatttcttactgccccatactaataagaagtactacatccgactcgacatcaagaatttcttcgattctatcaactcggaaatactctctgagatcttttcctactactttcaagtgaaagacgtggtaaatgatgttctgctgcgacagttcatcgaactcgtgacactgaatgatagagtgcctcagggggccattaccagcccaattatttccaatatcatatttcgccagctggatctcaggatacggaaatattgcgcgaagtttaacatcacctatacaagatatgccgacgacttgctgttttcctcagataacccatatctgcacaaggacttcttcatcaagaagataaagtatatcgtcagtacgaaaggctttcaattaaataaggggaaggttagatacgacaaagatttcatcagcctgaacggctttgtcgtggaaaaaaatatccgtctgtcccggaaaaagttgaagaacatttcaaacactctgtttatccttgaacgctacaagaataagttcaacctgaacattgtcctcgccgagatcaataagatgcagttgaagaaggagatcagctcaattagtgagcttatcaattaccttgctggataccggagctttctcatacagctactggataaagagaatcttgagaatttcgaaaacgagaaattcctcaagtatattaaccgcatacagaccgctattatatttctggattctcagtga

SEQ ID NO: 12325 - RNA, 1005 nt, synthetic construct
  source 1..1005: mol_type = other RNA
atgcagatttttttataccgcgaggatttcttctacaacaaagttctctcaagcagtaaaaaagcggtggacgagataatcaaaaacaaggacaagttctatcaggagaagatcatccccaagaaaaatgggtatagaactctgtcatgcctgaagaaagatagctctctcagcaaaattcagcagagtattcgctccaattttcttaacaagatttccattccagactatgtgtatggattcgtccctaaacatagttacaaagacttcctcagtccacacaccaaaagaaaatactacattcggctggacatagaaaacttcttccaatcaattgatcctgatacactaaaagaagtcttcgcatactattttcagatcaaccacgtgaccaacgaagaattgctcaaacagtttatcgagctggtgacactggataacaaggttccgcagggggccataacaagccccattgtatccaatatcgtcttccggcagctggacctgaggataaggaattactgtaagaagttcaacatcacctacactaggtatgctgatgacctgttatttagctctgacaatccttacatccataaggatttcttcatcaagaagatcaagtacatcatttctacgaagggctttaaactgaataagaacaagattcggtacgataaggaatttatttcgttgaacggatttgtagtggaaaataatatccgcctttcccggaagaaactgaaaaatttgtctagcagcctgtttatacttgaccgatataagaacaagttcaaccttaatgaggtgctgatggagatcaacaagatccccttcaaaaaagagattaattccatcggctccctcataaattatctgtctggctatcgtgcctttctcatccaattgctgaacagagagaatctagaaggtgacgagaataagaagtttttaaggtacattgagcgaattcagaacgctatcatctttctcgattcacaatga

SEQ ID NO: 12326 - RNA, 1002 nt, synthetic construct
  source 1..1002: mol_type = other RNA
atgcagattttcttgtataaggaggacttcttctacaagaaaattcttctggactctaaggagtccatccaggagattattaaggacaagaacaacttctaccgaaagaaaaagatcccaaaaaagaagggctaccgtactctgtgttgcttagaaagggacagctctttgtacaaagtgcagcagtccatacggaaaaactttttgaacaagataagcatcccagattacgtttatggctttgtgcccaagagctcttacaaagattttctcgtccctcatacaggtaagaaatattacctaagactcgacatccagaactttttccagagcatagataccaaagtgctgaaggaagtattcctttattactttcgactgaaggacaataacgaggaaactctgaataattttgtcgagctcgtgacactggaagataaggtgccccaaggggccgtgacatcacctgttatcagtaacgtcatttttaggaaactcgatctgcggatttataactactgcaagaagtttaacgtgacctacacaaggtatgcagatgacctgctgttttcctcagataatatctacattcaccaagagttcttcatcaaaaagatcaagtacattgtctcgacgatgggttttgaaatcaataaatccaaatcccgctacgacaaagacttcattagtttaaacggattcgttatcgatgaggacatacgcctgagcaggaaaaagatgaagaatctctcttctatcttgttcgtcgtagagaagcatcggaatagatttaatttaggagatgtgctgactgaaattcagtcacttatccacaacaaacaaattgattccaaacatagtctgatccactatctagctggctatagagccttcctcatccagttcatatcaaaagaacagaagaccgacctcgggaataaaaagatttttcgctatatcgagcggatcgagaataccatacttttcctgtatagcctgtga

SEQ ID NO: 12327 - RNA, 1005 nt, synthetic construct
  source 1..1005: mol_type = other RNA
atgcagatatacatttacaaggaggacttcttttacaacaaaatcctctcaacctctaaaacacaggttgaggagattctcaacgacaagaatagatattacacaaaacgcaagatcccgaaaaaaaatggatttcgaaccattaactgcctagaaaaaaatagtgcgttatccaagattcagcagtctatcagactcaattttctgaacaaagtctcaatccccaattacgtgtatgggtttgtgtccgggcagtcttatagcgactacctgaaacctcatgttaggcagaaatacttccttcggttggatatcaagaattttttcgagaacatcacgtcacagaccatcgagagcgtgttttcttattacttcaggctgaacacaaatactaacaatgacgaggagttgcaattttttattgacttagtcaccctgaacggtaaactgccacaaggcgctataaccagtcccacaatttctaacatagtattccgtcagcttgacattagaattaacaagtactgcaagaagttcaacatcaactacagcaggtatgctgatgatctcctgtttagttccgataacgatttcctccacaaggaattcttcataaagaagatcaagtacatcctgtcctccagaggctttgagattaataagcacaagatacgctatgagcaggattcaatctccctgaatggatttgtgatagaagaaaatatccgcttaagtcgatcgaaactgaaaggcctgagcaaagtgctattcattattgacaagcataagaacaacctggatactactaaagtgattagcgaaatcaatgacggtgggttcaacaaagaaatcaagaataagtacagcctgcttaattatctcgcaggataccgggccttcttgttgcaattccttgatcgcgagaacctggaagactataacaacaagaagatcaataggtatgtcatccggatccagaatgccattgaactgctctatcaatga

SEQ ID NO: 12328 - RNA, 1002 nt, synthetic construct
  source 1..1002: mol_type = other RNA
atgcagatatacatctacagggaagactttttctacaacaaaatccttgccaccagtaaatcattggtagaggagattctgaaggataagagcaagtactatacaaaacgtaagattccgaagaagaatgggtttcggaccattaattgtctagagaaaaacagtgccctctctaagatccagcagagcataaggataaatttcctgaacactatttccattccaaattacgtgtacggttttgtttctggccagagctatagtgattatctgaaacctcatgtgcgccgcaaatattacctgagactggacatcaagaatttcttcgagaacataactaacgacaccctggaatcagtgttctcctattacttccgcctcaacgataacaagaataatgaggaattgctcctgttaattgatctgatcacgctggacggcaaactgccccaaggtgctattacatcccctactatctccaatattgttttccgtcagttagatatcagaatcaacaagtactgcaagaagtttaacatcaattactcccgatatgctgacgatctcttgtttagcaccgataataagtttcttcacaacgacttcttcatcaagaaaataaagtacatcctgtctacccgggggtttgagcttaataaacacaagattcggtatgaccaagactcaatatcgctgaatggcttcgtgattgaggacaacattaggatctctcggtctaaactcaaaggacttagtagcacactatttatcattgacaaacatcgctccaatttcgacatcacaaaactactgtctgatattaacaactcaggattgaatcgagagatcaagaacaagtatagcctcctcaattatctggcagggtatagagcgtttcttttacagtttctcgatagggaaaaccccgaagagtactataacaagaaagtctcgaattacgtcatccggatccagaacagcatcgaattgctgagaggatga

SEQ ID NO: 12329 - RNA, 1017 nt, synthetic construct
  source 1..1017: mol_type = other RNA
atgttagggtacatctataccgaggactttttctacaaaaagctgctctcctctgagaaaaagatcgtcaaaaacactctgctcattaaagagagtttctataaagagcgagatctgtctaaaaaaggcggaactagaaccctgtcatgtatcgagaagaatagctccctgtataacttacagaacaatcttaggagcaatttcctgaataacattcccattcctgacaatgtgaaaggatttgttcccggtcactcctatcgggacttcgtgattcctcatctaaacaacaagtattatctgcggcttgacatcaaaaacttctttgacaacatcactttcgagacggtcaaagaagtatttggcgaatactttaagttggacaacgcatccaataacaataaattgctggaaacctttgccgaaattatcacacttagagggtccttgcctcaaggcgctgtgacaagcccaacagtgtccaatatcattttcaggaggatagatatccgcatcgcccgctactgcaagaagtttaacatcaattacacccgctacgccgatgatctactgttctcgtcaaatcagtctaatctccataaagggttcttcatcaaaaagattgcattcatactccgggatctgaatttgaagataaacagcagcaaaatcaagaagaccaagaactacattagtttaaacggctttgtcgtagataaggatatttctctctctagaaagcgtaagagtgacctcaccaaaatactgttcattatcgacaagaacaaggcggtgtgcagtacagatgccctcctgtttattctgaataccgagagctacattcacaagtcatactttttcaaagacaagtggtcacttgttaactatctaagcggatatcgagctttgctgatcgattggcttccaatcaataaggagacgatgaattacgaaaagtcgaaaaagctcataactaggatcgaaaaggtgatagactttctgctgggtgagaactga

SEQ ID NO: 12330 - RNA, 996 nt, synthetic construct
  source 1..996: mol_type = other RNA
atgatcattatcttcatctacaaggaagactttttctacgattacgtgttacgaaatagcctagaagaaatcaacaaacagatcattgacaaacagaactactattacactgtgaagattccgaaaaagggcggcattagagtgttgaactgcattaagcagaaaacccctttatttgagttgcaaaatctgctgaaggttaacttcttggacaaaatacctatagccgaaaatgtttttgggtttgtgaaggagcaatcttataaggattttctggtgccccatacctgggagaattccagggagagatattatttacgggtggatatcaaagacttctttggttccataacaaatgataccatactggaggtttttgactattacttcaagacaaacgagaaaagttcaaaggagatgaatgaattgcttatgcagatcattagtctcaatggttgcctcccacagggggctgttacgagcccagtagtgtccaatgtcgtgtttagacagctggacattaggattcaaaaatactgtgagaagttcgatgtgacttattctcgttacgcagatgacctactttttagttcagaaaaactgaaactgcacgataagttcttcataaagaagatcaactccattctcatgtcctcaaacttcaaagtcaatgacaagaagatcattaagaccgaatcggaaatttctctgaacggatttgtcgtcggaaaaaacgtccgcatctctcgatcaaagaaaagggatctgaaccggatcctgttcatctatgaggacaagaaacccaagaatatcaaagactttcttgatctgctcaacagcaacaagttcaaaaatcgcgtgaaagtaaataacaagtacttcaacgacaagaacaacctcctcaactacctgaatggctaccggagcttcctgatcaattggcttaataataacagcagcagtatcgagtataaaaagcagaagaaggtatattga

SEQ ID NO: 12331 - RNA, 1068 nt, synthetic construct
  source 1..1068: mol_type = other RNA
atgcgaaaatactctttcaacttcgaggtgatcatcatctacatctacaaggaggactttttttatgaatacgtgcttcggaatcccttagaagaggtttctaaacagataaagaacaagcaagactgctattataccgtcaaaatcccaaaaaaaggtggagtaagggtgctcaattgtatcaaacaggacacatccttatttgaactgcagacctcactgaaagtgaatttcttggataagatccctatagctgaaaatgtgtatggttttgtgaaggagcagagttataaagagtttttgtttccgcacgtttgggataatggcaaaaaacggtactacttaagggtggacattaaagactttttcggaagcataacttccgagacactgatcaagacgttcaagtattactttaagacttcggataaggtgagtaaagaactaaacgaactcctgatgcaaattatttctctcaatggggtgctacctcagggcgcagtgacaagccccgtcgtcagcaatatagttttcaggcagctcgatattcgtatcaagaagtactgcgacaaattcgatattatttacagcagatacgccgacgatcttctgttttcttccagcagcatgcgcctgcatgacaagttctttatcaagaagataaaccacatgctgaagagtctcaatttcaacatcaacactaagaagatcaagaaaaccgagtcagagatttccctgaacggcttcgtcgtcgggaaaaatgtacggatttcaaggtcaaaaaagcgggatcttaaccgagtactgtttatttacaaagatcagaagccaaagaacatcaatgatttcctgaacctgttgaacaacaacaagttcaaatcccgcattaagaacaacaacaacaagtacttcgaagacaagatcaatctccttaattatctgaacggatatagaagtttcctgattgggtggttgcataataataccctgtctgttgactatgagcaccagaaacaatatatcgagagattggaggaatttattctcaatgtgaatcgcatgaactga

SEQ ID NO: 12332 - RNA, 1068 nt, synthetic construct
  source 1..1068: mol_type = other RNA
atgcggaaatattcctttaaggtcgaagtggtcataatctttatctacaaagaggacttcttctacaattacgtgctgcggaataactccctagaggagattaataaccagatcaaaaacaagcaagactcttattacactgtgaagattccgaaaaaaggtggaattcgagagctgaattgcatcagacagcatacacccttgattgagttacagaggtctataaaagagaattttctggacaagatcccaattgccgaaaatgtgtatggctttgtgaaaggccagtcgtataaggattttctgactcctcatatttgggagaacggaaagaaaaggtactacttgcgcgtagacatcaagaactttttcgactcaatttcagaagatacactcattaagaccttttcctactatttcaaggccaccgtcaaggctagtaataccatgaacaagatattgatgcagatcatcagcctcaatgggaatctgccccagggagcagtcacttcgcctgttgtgagcaacatcgtatttcggaaactggatatcagaattcagaagtactgtgataagttcaactttacatacacccgctatgcggatgatcttctatttagtagcacatccacccggctccacgacgattttttccttaagaagatcaagtacatcctcaaaagctcagatttcaaggtgaataacaagaagatcaagaaaaccgagaatgaaataagtttgaacggcttcgttgttggggaaaacgtcagaatttcccgttcaaaaaaaagggacctcaatcgagtgctgttcatatatgagacgtataaaccaaaacgcatggaggacttcctcgtgcttctgaattccagcaagttttctagccgcgtggagttcaacgacaagtacttcaacaacaaaatcaacctgctgaactacctcaatgggtatagatccttcttaattagttggctgcacaactctacttctagcaaaggtaacaacaagcaagttgaatatatcgaacgtttagagaatctgattctggaacttaataggatgtcttga

SEQ ID NO: 12333 - RNA, 1038 nt, synthetic construct
  source 1..1038: mol_type = other RNA
atgatcatcatattcatctacaaagaggacttcttttacgattacattctccaggactcccttgaggagattaagaaggtaatcgaaaataaggagaacaactactacatcatcaagatcccgaaaaaagatggactgcggaagcttaattgcatcaagaaagagacgaaactttatcagtatcagaccctgattaagaataagtttctgaaccgaatcccaattgcagaaaacgtatacgggtttgtcaaaggccaatcctataaagactttttagtgccccatacctgggaaaacaacaagaaacgtttctatctcaggatagatattaaggacttcttcggtagcataaatacagacaccctccgccaggtgttcaggtactatttcaaaacagacgaaaatgcctcaaatgagatgattgacctgctattggatatagtgtcactagacggctttctgccacaaggcgctgtgaccagtcccgtgattagcaatatcgtgtttagacagttagatctgagaattcagaagtactgtaataagctgaactttacctatacaaggtatgccgatgatctgctcttctcaagtattaacaagcgaatctatgatcccttcttcattaagatgatatcaactatcctcaagagcagaaacttcaagatcaaccactctaaagttaagacatccgacgaagagataagccttaacggatttgtcgttggtaaaaatatccggctgtcccgctctaaaaaacgggatctgaataggatcttattcatattccaagaccagaagcctaaaaacattactgactttcttagcctgttgaattcgaagaagtttaaatcccggattaatgtcaataacgagtacttcagcaataaaactaacttgctcaattacctcagtgggtacagatcttttctgatttcctggctgcctgaaaacaaaagttctcctgatttcaagagctctaagatctatatcaagcgcattgaagagttgatcctgaacatcaacaatatgaactga

SEQ ID NO: 12334 - RNA, 972 nt, synthetic construct
  source 1..972: mol_type = other RNA
atgaaggagaaaataaaggacaaacagcaaaactactacctaaaagacatacccaaaaaagggggacgccgctatttaaactgtattgaaaaagagacaccgttatatgtgtatcagacctccctcaaaaacaagttcctgaacaatataccgatttcagagaacgcctacggctttgttaaggggcggtcatattacgactttttggtgccccacacacgtggtaataatgagaatggaagatactttctcagaatcgatatcaaggatttcttcgattcaatcaccaccgatatcttagaagagacgtttaagtactacttcaaaacagacgaaaagtcaagtaatgaaatggtggggctgataatagacattattagcctgaatgacgttctacctcagggcgcagtgacttcccccgttgtgagtaatattgtctttaggcagctggacattcgaattcagaaatattgcaacaaactgaaggtggtctatacccgatacgctgatgatctcctgtttagtagcgtaaataaccggacacatgaacctttcttcatcaaaatgatcagcaatatcctgaagacattgaacttcaacatcaacttctctaagatcaagaagtccgaggaagaaatctccttgaacggatttgtagtcggtcaaaatattcgtatttcccggaaaaagaagagagatatcaacagggtgattttcatctataaggacaagaaaccgaaaacgactagcgagtttctgaccctccttaatagccagattttcaccactaggactcgcaaaaacaatgaatacttctcttctgagatcagcctgcttaattacctcagtggctatcggtcctttttgatttcgcttctcccaagatctaagcagtctatctactacaagaacatgaagaggtatatcaacaatcttgaggagctgatcctgaacattataaatctggagtga

SEQ ID NO: 12335 - RNA, 1038 nt, synthetic construct
  source 1..1038: mol_type = other RNA
atgaggatcgatagcttgaacaagttcgagaagaaagttttgcgcggctcaatcaccgagtataatgaaagtctgacagacgattccattaaccaggcataccacactaaaatcattaagaagaacgacaactctgaaagaaccttgcagtgcatcgatagcaatcacgacatttataagattcagaagaagctcaagaacaatttcttcgactttattcctctgagtaatcatgcgtatggctacgtcaaagggaagagctactatgactacctgacccctcacattaagaaaaagttttatctgcgactggacatcaaggactttttcaatagcattaaggagaaaaagctgcgggaagtgatcgagtacgacatcgataacatcaaaataaacgaagacacgactcttgtggattttctgatcaaaacggtaacttttaacgggagcctcccacaaggtgccgtaacatctcccgttctgtccaatatggtgtttcgagttctggacattcgcatatctaggtactgtcggaagttcggtatagaatatagtagatacgtcgatgatcttctcttttcatccaatgacctgctaattcataagaaagtgttcacaaacggaatcaccaaaatcttaaaatcccaaggcttctatctaaaccacaataagttacggaaaagtaaggatgagatttcactgaatggcttcgtggtgggaagcgaaatccgtctctcgcgcaagaaaaccgccctcctgtctgctctgatattttgctaccagaacactcagaagaagacattcgataacctttcaacagagttcaaaaaacacttcgggattgacaacgagaaaataattaatgccgacagactccataattacttggctggctataggtcctttctgctcgggctcttaccatttgattctgtcggagtgcttcccgataatatgaccaaaatcaaccagaagtacctaatcaagatcaacgagatagaaaagcttttgaaactgaccagcaaagagatgaattga

SEQ ID NO: 12336 - RNA, 1023 nt, synthetic construct
  source 1..1023: mol_type = other RNA
atgagaatagaatccctgtccaaattcgaaaaaaaagtgctgagggactctgtcagccactacgtagatcttcttacagaagagcagctcctgactgcgtactataccaagatcatcaagaagaaagacaaatctgatagggtaattcactgcatagataacgagcatctcatttacaagatccagaaacagctgaagaacaactttcttgatttcatccctctgagtaactgtgcatatgggtacgtgaaaggtaaatcgtattacgactatttgaagccccatgtgaaacatggatattacatgaagctcgatattaaggacttcttccacagtattaaggaaaaggagctgcgtgaggttctgaagtattacgtcgatgacgtgagcatcaatgagtctctgaccatactggattttataactaaggtggtgaccgttaatgaattcttaccccaaggtgccgtaacgagtcccgtcttgagcaatatttactttcgcttcctagatatccgcatatcacggtattgtcgcaaattcggcattaattacacccggtatgtcgacgaccttctgttttcaagcgacaatctgttcattcacaagagggttttcatcaacggcattacaaaaatcctgaaatcacagggatttcagctcaaccctaaaaaagtgagaaaaacgaagtccgagatcagccttaacgggtttgttgtgggcgaaaacatccgactcagtagaaaaaagactgctatcatttctagcctcatatattactaccaatgctctccaaataagaccctagaggaattgctaaccgaggtggagaagaatctcgagattaagatcaagatctccaacctccacaattttctggctgggtaccggtcatttttgttaggactgctgccgttcgattccgtcggcgtgttgccagaagtgattacaaggacagacaagaagattctgtataaaatcaacgagatcgagaagatcttagacctgactgccgccaatatttga

SEQ ID NO: 12337 - RNA, 1029 nt, synthetic construct
  source 1..1029: mol_type = other RNA
atgcacatcgaggacctgaacacttttgaaactaaaattctacgggaaagcaccaaaacatgtgtcgagattctgaaagtggagaagatatccaaagcctactacacaaaaaccatttcaaagaagaacgggatgaaacgaactctccattgcatcaacaacgaacatatcctctataagttacagggaaacctgaagcggaacttttttgattacatccctctgtccagccatgcttatggatatgtgaagggcaaaagttactacaattacttggaaccacacgtgggcaatgatatcttcctaaaactcgatatcaaggacttctttggcagcattaaggaaaacaaacttcgcgaggttctgggctactatgtcgacgacattaacgttagcgataactttaccctcattgatttcatcgtgaaagttgtgacagtagatggtaagcttccccagggagccgtgacgagtcctgtcctctcaaatatactgtttcggcacttggatatccgtatttccaggtactgcaagaagtttggaatcacctataccaggtacgttgacgacattctgctctcgagtgcatctttctatcttcacaaaaaagtcttcgtgaacggcataaaaaagatcttgaaaagctacgacctgtatctcaacacaaacaagatcataaagactaagaacgagatctcactgaatggtttcgtaattgggaaggaaatcagattatctaggaagaaaacagctttcatttctgccatcatctattgttatcaacagaccaacaagaaaaacgtggacaacttcattaaagagatcaaggagcacttcaaacttacggactcaaccgagattaatctgctttggctgcataattatctggcggggtaccgctccttcctgctcggtctactgccctttgattctgtgggggtcttaccagaacacttgagcaagtccaacagaaagcttttgtacaagataaatgagatcgagaagatactggacctgctcattctgtga

SEQ ID NO: 12338 - RNA, 1020 nt, synthetic construct
  source 1..1020: mol_type = other RNA
atgaagatattctccctggattattttgaaaaccgggtgcttaaggaaaagattgaaacgctcattatcgaccctgtcgaaaaagattcctgttacacccagatcgcagttaagaagcgggcggggggaataagaacccttagttgcatccatctatactcaagagtatatcactctcaaaagcgcttgaaagagaattactttgacaaaattcccacttcagacttctgctacggctataagaaagggttgtcctacaaagatttcctggcccctcatgtcgactctaaatacttcttaaggatcgatctgaaggacttctttggaagcatcacatgcaatctgttaagcgaggtcctgaccagttatatatcttgtcttccggttaataacacaacactgctggatctaatcattgacatcgtgacccttgatgggaagctcccacagggtgctatcacatcccctaccctttccaatattgccttccggcaactggatatccgcatatataaatactgtgagaagtaccaggtgatctattctaggtacgctgatgatctcctgttcagcagcaacaacatggttatccacaagctcttttttctgaaaaggatcagtaacatcttgaactcaaaagggttttcgattaatcgggacaagatagtgaaagcaactgagcagatcagcttgaatggctttattgtaggatccgagctgaggattagcagaaaaaaacgtagactgctctcggtgatcctctattgttttgacaagtacaaaccacgaacctataacattctgctgaatcacgtgaacgctgagctgggtgccaagcccattaagactactgaatacctcaataacttcctatcaggctatcgcagcttccttattggctggctcccatatgactctttgggctgcttaccctctgaagcctttctcagtgagttcgacaagaagaatctgcgactgatcaaccagattgagtacatattgaagaaattcaacccctga

SEQ ID NO: 12339 - RNA, 1047 nt, synthetic construct
  source 1..1047: mol_type = other RNA
atgaaaatctacaaagtagactacttcgaaaggcaaattatgaacaatgaatacagcaccgaagacctacttgacgtgttcctaaaaaaagaggagcattacaacctttacgtcataccgaaaaagaagaatagaggaacacggaagctgtattgtctgtcgaaaaacaaggagttatacaggtgccagcaattgctgaaggttaatttctttgataggattcctgtctcagactattgctatggctacagaactggaaaatgctacaaaaactacctagaaccacatattggaaagaagtactttctgcggctggatatcaaggacttttttgactgtatcggcaaggatatcatcagagacttcctgcttacttatgtatccgaggatatcgagaataccattctggggaaagaaattagctttgggctgttggatcttatcactgaacttgtgaccattaatggccacctgccacagggcgctatcacaagtcctgtgataagtaatctgatctttcgctcactggacattaggatctatagatattgctgtcggtacgggattacatattctcgatatgccgatgacctgctcttctcatccgagaactctgtcttgcacaaaaacttctttaccaacaagatacagcacattttaaagtctggccagtataatttcgatataaactaccgtaaggtcaaaaagtgtaggggagaaatctccctgaacggtttcgttgttggtgagaacgtccggctctcccgcacaaagatcaaaaagatgaacacgatcatacatgtgttcaaaaaggaaaaggatctggacaagtataacatactcatcgagttgaaaaagaactacaatctcgtgttcgagaacgtggtggacttaaataattttttgagcgggtatcgatctttcctcattggtatcctcccctttaatagcctgggcgagctccccaataatattaaccgctacgataccaagaacctccgcattattagtgagatcgaggggatcctggaaaaggtgaataaatga

SEQ ID NO: 12340 - RNA, 978 nt, synthetic construct
  source 1..978: mol_type = other RNA
atgaagaaaaacgccgagattagcaagatcacaaaccggaagatacagtgttattttcgggtcagcattcccaagaaaggaggcgagaggattatctattgcataaacccttcgtgtaaccttcggactctccagcagaacctgcaaaggaactttctgaatcgtattccgatccccaataacgtatttgggtttaagaagggatacagctataaagacttcctggaaccccatgttaacaaaaattactacctgagagtggacatcaaggatttcttcaattccatcagtaaggaacttatttacgatgtactcaccaattacttgaaaatggatgaagctgacaataaagaggtgctcgatactgtctttgatatcgtgagcctccacggaaagataccacagggcgcgattacatcaccatctattgcaaacgtgatattccgtcagattgacatgcgcatcaaaaagtactgcaaggtttttaacgtcgagtatacgaggtatgcagacgacatgctgttcagttcagacaatgagtatttgcttaagccttacttcataaagaagattgccaaaatcctgttctccaaagggtttcggatcaattctagcaaaatcaagaagtccaataacgggcagattgtgctaaacggcttcgtgatcagtgactccctgtctatctccagaaagcgattatcagatatccaaagagtgctcttcctgtaccaaaaagggggcgctcctgtttcaattagtatctttctagatcgcatcaattctgaacagtatttataccgcaaaaagatgaacggtaaatactttcccacccgaggttccctgattgattacctctctggctatagggccttcttgatccagtggctgccagaggacaaaaatagcaatgtctatgagaagctgaccacccttataaacagaattcagtacttgctgatcaatattgaggaaatctga

SEQ ID NO: 12341 - RNA, 1017 nt, synthetic construct
  source 1..1017: mol_type = other RNA
atgtttatctataacgaggatttcttctacggcaagattctgaattgcagaaaggatgccttagaagatatactgtctaataagtccgacgaataccaggaaaggattatttcaaaaaagggtggaaagaggtatttgtcttgcctgagtgatacatctagcatcgctacccttcaaagaggattatccaataaatttctcgatcacattcccgtaccagactatgtgtacggttttattaagggcaagtcttacaaagactatcttgtgcctcataaaaatcgggagttttaccttagagtggacatcaaggactttttcagctccataaataaagacctcgtaaaagaagtgctggactactatattagaacagataatgacaccctgaacaagaatttgattgacatcatctacgatatcgtctctctcaatgatagcataccgcagggcgcgatcacttcacccagcatttctaatatcgtttttcgatccctagatatccgaatcaataaatactgtaggcgcttcgggataacctacacgcgctatgcagatgacttgctgttctccagtaacaacagttttctccataacaagtactttctgaagaaaatcagccacatcctgcagagtaagcgcttcaacattaactccaacaaggttatcaaaagcaacaagattatctcgctaaatgggttcgttgtcggcgagaaaatctggctcagtcggaagaggctgcacgatattaacaaagtgctgtatctctacaagacaaatactttctcaaacatcaactccctgttgtatgtccttaattcaagcgactacatttatcggaagaccaacaataactcattcactagcaaaatggagatcgtgaattatctggccggataccgttcgttcttactgcagtggtatgagtttcaaaatggggacaacaagaacttcaagttgctcaacaaaatagacgaaatcgagcggatactgattgagattgagcagcttaaatga

SEQ ID NO: 12342 - RNA, 1140 nt, synthetic construct
  source 1..1140: mol_type = other RNA
atgaaatggattatcattatggccattcggaccatttacgacgaggagtttttctataagaatattttgcgcgaagagaaagagaacgtcatagagatcattaacaagaaaaaggagtactactacaacaagaccatcaacaaaaagaatggagtgcgcaatcttaaatgtataattgaggatagccccttatatttcctgcagaaaaatctcgtgaattactttctcaacaacattcccctgccgctgtatgtgtacggttttagaaaaggggtcagctataaaaagtatctggaagtgcacctgagagaagaggttgacaacaactatctcgaatccaatagtagaaaagatgtgtcaaaagactgtctacaacctcatctgaggaattacatcggaaagaagacctgctacatccgtattgacatcaaatcgttcttcgattcaatcaatctggacctcatcaagaagattttcagcaactactttactcctaaagattcctttcttaaggatgagctgcttgaaattttcagtcaaatcgttaccttggataacctactgcctcagggggcagtcacgagtccaacaataagcaatatcattttcatccgagaagatatcaggatttataactactgcaacaagctgaatatcaaatactccagatatgccgacgatatgttattttcctctaagcacaataaggtattcaaaacgtacttcatcaacatgatcacaaagatcctggatgagaatggcttcaagatcaactattctaaaaccaagaaggggttagacgagatatctctcaatggattcgtaataagtaactgcatcagcctctcacgaggcaggaagcatgacatctcaaagatcctgtatatctttgacacccttaaacccttctctacttctacttatttgaacatgttgaacgacaaggacaacaacttcaagtatataaagtacaaggctgactgttacttttcctcccggggcaaactgattaattacctctgcggttatcggagctttctgataaattggttgccacgggagaatgaggaactgacatacaataaggttaaaaggctaatcgatcgcattcaggaagtgattcttaaaatacaggaatga

SEQ ID NO: 12343 - RNA, 1035 nt, synthetic construct
  source 1..1035: mol_type = other RNA
atgattgtcatctacatatacaagaaacacttcttcatcaacaaggtgctgggcacaaagaccaaaaatatctatgacctggtggaggaaaaagataaacactacttcaacaagacgatccaaaagaaaaatggggttcgagagctgaagtgtctgaaagagggagactttaagcatatccagcaaaacctcaagaagaattttctagacgaactgcccattccagattacgtttacgggttcgtaaaatactcctcatataaggactttctgctgccacatattggaaaaatgtattatgtgcggttggacattaaagacttttttccgagcgtgaagaaagatcttctgtttcaggcctttaagtcctattttaagctcgatggctcagacaacgatgacgtactgaatttgtttgtggatattgtgactcttaacgaggaactgcctcagggcgcagtcacaagccccgtcatctccaatatagtcttcagaagcttggacatcagaataaagtactactgcgataaacttggtattacctatacccgctacgctgatgatttgctattttcttccactaacgagcagctgcatagccggtatttcatcaaaaaggtttcgaagattctgggcgataaaaagttcaagctcaacaccgacaaaattcttaagtacacagacgagatctctctgaacggatttgtggtgggtgagaaggtacgtctcagtcgcaagcgaaagagtgatattgctcaggtgataagactgtgcaggaatgttaagaaacctgtcgactttgatacgctgctcagtcaacttaatcagttggatctccggtatcgcaaaaagactgtgagcgacaatggcgaggaggtgtacttctcatccaaagaaaccctagcgaattatttactcgggttcaggtctttcttcatagactggttaaacactaacttaatctctgacaaaagggaaatcaaattcttcatcgaccagattgaaacattcatcgataagcactacgccatctga

SEQ ID NO: 12344 - RNA, 2307 nt, synthetic construct
  source 1..2307: mol_type = other RNA
atggtctttatcaaaatctacagtaaggacttcttctacaagtacattatcgaagacaaagaacaggatgaattggccgaaatcatcagcaataagatgtactcttatctcaggtttgagtacgagaaaaaaaatggataccgcttcatctacagtatgaaaaaggacactgggttatatgaagtacagaccaaactgaaggataactttctgaatgagattccaatcgccgaccatgtgtatgggtttgtctctggctattcctataaggactttcttgttaggcactgctacgaggataagaacaaaaccacctatttcttaaggctagatatacaggactttttcgaatccatcaagactaagatgattaaagagacactcgagtattacatcaagataaaagacgaggataaccctactgtgctcgatctgattaacgatctcgtcaccataaacgactttctcccgcagggagccattacatcccctgttctaagcaacatagtattccggcagttggacattaggttccaaaaatactgcaggaagatcaatatcaagtacagccgatacgcggacgacctcttatttagtagcaaggagagttatctgcacaagcgcaattttacgaataagattcggcatatcctgaaagacaaaggcttcaaactaaacttcaccaagacaatcaaatctcagaatgagatcagcctgaacggcttcgtggtcggcaataatatccggttgagcaggaagagaaaccatgacatatccatgatcctgtatctgtacgataaccaaagcgtggacgagttcataaacatccttaataaggagaacttcatctaccgtaataagaagtacgacatgaagacaaatgacgaaaagtactttatcaaccaggacgatctcattaattacctcgcaggctatcgttctttcttgattgattggatcccaataaaggatggcaaacacaaagagaagcacattaaactcatcaagaatcttgaagtgctacttgaagacctgagcgatattaacaatgaatacaactacaagggggataaaatgtcccagaaagaaaatatcccactgtcagtgccgaacctctcgaaagatattttgcccaatatagaagagactattgagtcgggttgggtttccacagggggaaagttcattgatcaatttgaggaaaagctggctgactacgtaggtgtggaccaagccgttagttgccagtctggaactgctggactgcacctggccatgcgggtattgggcattgggccaggtgatgaggtgattgccccgaccgtgacattcatcgcagcagtaaaccccattagatatatgggcgcggaacccgtgtttatcgattgtgattctgacgatggacctgctgggccctcagcagagcctactaacgcgtttaccaacgaggggtcagtcaacatggacttagataaactggaagagttcctcgaaaatgagtgtgaattgaccgatgggagggtgatcaacaaatcaagtggacgcgagattaaggcaattaacattgttcatgtcttcggcaatcctgtgaacatggagcgcctgatcgacattgctcgagagtatggtttgaaagtgatcgaagacgccactgaggctctggggtcttactacaccgaaggacggtacgccggaagatattgtggcaccatcggtgatatcggcgtctactcattcaatgccaacaagataatcactacgggtggaggcggcatgattgtggcaagagagtccgatctcctggaggaagccaaatttctctctacgcaggctaagtccgatagactgtattatagacacgacgaggtcggatataactataggatgaccaatatacaggccgcttttggcactgatcagatcgatagactggaaggctttattgccacaaagattgaaaactatcgacgatacaaagaggctattgcggagatagacggcctggagcttatggcatttaatgaagggtgtcgcccaaaccattggttctacagcgtgcttgtggaccctgacctgtatggtatcgaccgcgacgagctgctgcaggagttaaatgcagtggggatccagacacgtcccctttgggggcttatccaccagcagaagccatatctggactgccaggcttaccggattgaacaagccccctattaccaacaaaacctaataaatctgccctgctcctcaaatcttacagccgagcaggttaagaccgtcgttcggtatctgagagagttcaaaagctga

SEQ ID NO: 12345 - RNA, 1002 nt, synthetic construct
  source 1..1002: mol_type = other RNA
atggaaggcatcgataaagaaaatctcctggagataattgccaacaaggaaaaccattatggcaagaatgaaatcagtaaatccaacggtaaacgtataatctactctatcgacaacaactctcagttatataagatgcagaagcatctcgtgaacaattttttgtcccaaatacccatcgcagatcatgtgtacgggttcgttaaggattatagctacaaggattttctcttgagacacattcacgataagaacaataagacgtactattaccttcgactggatattaaagacttcttcggtagtatcaactcaaatctcatcgaggagactcttgactattacattaaagtgaacgaagcggagaacggaaactctattattgagattatcaacgggattgtgacacttgaaaatttcctcccacagggcgctgtcacctcaccggtagttagcaacattgtgtttcggcagttggacatcagactgcagcgctactgcaggaaactcgacatcaaatactcacgctatgctgatgatctgctattcagttccaccaattcgaatctgcataagaacaactttttcaagaaggtttcctacatattgaaggacaaggactttcggctgaactattctaaaacaataaaggacgagaacgaaatctccctaaatggctttgtagtcggcaataatatccgactgagtagaaagaggaagaaagacatttctaaggtcctgttcctgtacaacaataaacctgacaatcaatcattcgtgagctacttaaatgaacacgaattcctgtatcgcgataagattggaagctcctactttctgaataaagacgaccttattaactacctggccgggtatcggagctttctgatcgattggatccccgtgaaagagggaaggcacaaagagaaacacataaatctcattgagaacatcgaggacttactggagaatatcagcgatgtcaataatgagtataactga

SEQ ID NO: 12346 - RNA, 1020 nt, synthetic construct
  source 1..1020: mol_type = other RNA
atgtacattaagatctataacctgaactacttcttgaagaaaatcttggagatatcggaagaaaagttaaagaagaccctgacgaataaaaagaacgcctattccaagtataagattcccaaaaagaacgggtataggaaaatacatagccttaaaagcggcgatttaagtcacttgcaaagcaacttgaaaaagaacttcctcgataacattcctatcgcagacaatgtgtatggttttgtcgaggggtacggttacaaagatttcctaatcccacacacatacaaaaaatactacctgagattggacataaagaatttcttcgagtccattaagaccaataagcttgaaatcatcttcgattactacataacagccagcaacgacgaggagaaagacaaaattcttgactacctgattagcatcattagtctcaatgactatctgccacagggcgccattacttccccggcaacttccaatatcttttttcgagagctcgatatacggattcagaaatactgcaaaaagctgggatttgactactccaggtatgccgatgatatcctcatctcctctaataatgataaactgcccaaggattttgtcatcaaagcggtgaataaaatcgtttctgacagaaagctgaagctaaactacaagaagataatccgtgaaaagaacgaaatttcactgaatggatttgttgtgggcaaaggcatcagactgtcacggaataggcgctatgacatctcaaagatcaactttctcttcaagagtaacaaatctgtgagccagtacaagttcgtagaactgctcaataatgctaatggcgggtttaaatatcggtacaagaataacaacgggaaattcttctctgatatagacgacctgattaactatctggctggatatcgctcatttctgattaactggatccctgatgaggacaacaagtactataacaagcacatcaacttactgaatgacattgaggagattcttctctggcttaattga

SEQ ID NO: 12347 - RNA, 972 nt, synthetic construct
  source 1..972: mol_type = other RNA
atgagcaaaacgctagagaaaaaagaaaacttctacgaggtgattgaaatccccaaaaagaatgggatacgtgtgattcactgtattagcaagaattcaccgctgtactatctgcaggaccaactgaggaagaattttctggaaaaaataccctgctccacaagcgcctgtggcttcattaaaggatcttcatacaaggatttcctgattccacatcagaatatggaatactatctccgcatcgatatcaaggacttctttaactccatcaagaaagacaagattaaggaagtattgcgacagtatctgaagctaaataacgagaaaagcaacgagatcctcaattacatcagcgagttggttactatagacagttacgtcccccagggggcggttaccagtcctcagttgagtaatatcattttccggaagttagatgtccgcctgcaaaagtactgccagaatctcaacatcaactataccagatatgccgatgacctcctctttagctctaaattcggtaaagtgcatctcccattttttctaaacacgatccggaaaattctgctgtccgagaattttctgatcaacaagtccaagataatcaagactcgcaaggaaatttccttatccggattcacagtgggcagaaatattaggctctctagatcaaggaagggtgatcttaccaaagtcctgtttctcttcaaccaaggcggaaagcctaaatctatcaatcagttgttagagcgactgaacagtgaaacatatcgttaccgcatggtgagggaggagagaaacaataactatatctacttcacctccaaggaatcgattcttaactaccttgcagggtatcgggctcttctgatcgattggggcaaccacaataaatacaaatcacttaaggacgagagcaagctgatactgcggatcgagaagattataaaagacatctctcagttgtcttga

SEQ ID NO: 12348 - RNA, 1032 nt, synthetic construct
  source 1..1032: mol_type = other RNA
atgaaccacattaagatctatgatgagtccttcttctatagggctattctcgagatcgagcatgaaagtatgatttcaaaggtcgtggagaacaaaatcaacagctacaaagagatcacaatcagcaagcacagcgggagtcggacaattcactgcatcaataataacgaccagctgtatgggattcaacgcaatctggtggacaatctgtttagcaaggtggcgctccccgataacatctgtggctttgtcaagaagcggtcatatagagactttctggttcctcatctctggaacaacaatgagaaaagatactatcttaggctcgacatatctgacttctttggaagcataaactccgccaagattcatgatgccctagacggcctcattgatctcgatgaggaaaaaaaggtgaagatgttgaagctgatctctgagatctgcactctgaatgatattctaccacaaggtgccgttacatcaccagcaatttcaaacatagtgttcaagcggttagatgtccgtattcgaaactactgtcgaaagttaaacgtcacctacaccaggtacgcagatgatcttttgttctctaccacgaaagaaaaaactttagggggatatttcgtgaaaaagatcgtaggcatcctgaaatcctctggcttcatcttgaatcgcaagaaagttaaacgtggaaagttcgaaatcagcctgaatggattcattgtgggcgaaaatataagaatttcccgcaaaaagaagcgcgacattgctgcctttttttttctgtacatcagaggtgggaaacccaaaaacatagtggaaatcttggagaggctgaatgattatgactttagatttaggcagaagctgttcacttcgaaaaatgacatcatcaattaccttgctggttaccggtccttcatcattgactggctccctcaggaaacagagagtaacgtacacaaggacctgaagaaaatcattgacaagatacaggaaacccttgaagagatagaggagctggaatga

SEQ ID NO: 12349 - RNA, 1032 nt, synthetic construct
  source 1..1032: mol_type = other RNA
atgaccaagatcaaaattttcgacgagaacttcttctaccgcagcgttctcgggatagaggatgaacacatattcaataacctcgtgattacgaagttcactagttataaagagatcgctgtgcctaaaaatggcggaattagaaccatccagtgcattgacaaggaaaatcagttgtacaagatccaaagaaatcttgtcgataacttcctgagcaagatacatctgcccgacaacatttgcggatttgtgaaacgtaagtcctatcgagattttctgataccacatgcatgggaaaacaacaacaaaaggttttacttaaggcttgacatctctgatttcttcggttctattaacagtgccaaaatccacaattccctgaacgatctaattgacattgaggaggacaagaaaaacaagatcctgaacatgatttctgagatctgtactctcaatgacgtcttgccacagggcgctgtgacaagccccgtactcagtaatatagtttttaaacggctcgacatccggattagaaactattgtcgcaaactcgatgtcatatacactcgatacgcagacgatctccttttttcgaccacgaaagaaaggtctttgggcggatttttcgtaaagaagatcatcgggattcttaagacaagcgggtttatactgaatcggaaaaaggtgaagagaggaatctcagaaatctcactgaatgggttcattgttggtcagaatgtgagaatttccaggaagaagaagtcagatatcaccgcctttttctatttgtttatctatggtggccgcccgaaaacaatcaaagatctgatcgagcggctgaacagctataaatttcagtatcgtaggtcactgttcgtctccaaaaatgacatgattaattacctggcgggctaccgctcctttctgattgattggttacctgaggacaccgagacaaaggtgtacaaggagttagtgaagatcatcaataagatccaaaacactctggaagaaattgaagccctagagtga

SEQ ID NO: 12350 - RNA, 1044 nt, synthetic construct
  source 1..1044: mol_type = other RNA
atgtttgtaggcgacataatccttatctacaagaagaacttctactaccagacagttttaggcgtggatgattccagcatggtcaaggaggtcatagagaataaggaaaagcactacaaaccaatcgtgatttacaacagagggaaaaaacgggagattaattgcattgaggaaaaacgcgaactgtacaatttccagtcaaacctggccaagaactttctgaataaactccccctccccgacaatgtatgcggatttgttaagaataggtcttatcgcgactttctggtaccacatattaactcacacaattctgatcgtttctatcttcggctcgatattaaggatttcttcaatagcatctctgaatcacacctgagagaagtcctacaggaatatgttaccattatcgacaaggaggataatgaggaggtgattctgagtatggtgaatttagttacactgaacgggtccctaccgcaaggcggagtgacttcccccgtgttgagcaacttggtgttcagaagtattgacatcagaattcgcaattactgtcgaaaactcgacgtcacgtacacccgttatgcagacgacatgttattctcatgtgacaaagaaaaagtcatcaacggcttcttcattaagatgatcatctccatcttgaaaagcaagaagtttgtgctgaataggaggaaagtcaagaagggtgctagccagatctcccttaacggcttcgtggtgagccataacataaggattagtcgaaaaaaacgacaggatatcaatcggtttatatttctgtgggaaaagggtggaactcctaaaaccatagatgaactcatcctccggctgaactcttttgatttttcttatcggatcaaggactttaacagtaaatacagcgtgctgaactatcttgccgggtacagatccatgctgattaattggctgcctaacgagttcgatgacgagtggtatcaacagtcggagcgcctcattaggaagataaacatgatcatcatgaagatcgagcagttggagtga

SEQ ID NO: 12351 - RNA, 990 nt, synthetic construct
  source 1..990: mol_type = other RNA
atgctcgggatcgagaaagatgagaactttaagatcataatcgagaagaaagccaacaactacaaaaatctcctgatctcgcgcaaaggcaagcaacgagagataaaatgtatcaataaggagagccagttgtataggattcaagctaatctcgtacagaactttcttaacgagattccccttcctgacaatgtctgtggatttgtcaagaagaggagttacagagacttcctggtgccccacatcaataattcccctactgaccggtattacttgcggctggatatcaaggatttctttgacagtataaccgaagagaaaatcgagaagagcttacaggaatacgtgacgatcaatgacggagcagagaataaggaggtgctgaaggacattattgacatcgttaccctgaatggttgcttaccccagggcggcgtgacaagcccagttatctcaaacattatttttcggaggctggatataagaattagaaagtactgctccaaactcaacattacatactctagatatgcggatgacatgctgttttcctcccagcataatcgcctgtttgatggctttttcgtgaaaatgattgccaagatcctaaaggatagtaacttcgttctcaacaggaagaaaattaaaaagggggtgtcattcatcagcttgaacgggttcgtcgtaggaaagaatattcgaatctcacgtaaaaaacggcaggatatcaaccgcttcatattcttattcgaaaaaggcgggaacccaaaagatgtgaacgaacttctgagcagactgaataaggagaagttctattaccgtagcaggaactttgaatccaaatctagtgtgatcgactatctggccggttatcgctctatgctgatatcttggattccggaagactccgatgaagcttggaaagaaaatgtcaaaaacttgctagacaagatccagaagattattatgaagatcgagtacctcaagtga

SEQ ID NO: 12352 - RNA, 1050 nt, synthetic construct
  source 1..1050: mol_type = other RNA
atggccttttatatctatcataccgagcagttctttcagaatattatcagggacagcagtgccaatatccaagcgtccctcgaagagaaagaaggcagttatgagaaattctccatctcaaaaaacagtgggactcgaaccatatatagcattaagtctgagagcaaattgaagaaataccaaaagaatctgctgagcaacttcttcgaatacataaacataagcgatcagtcttatgggtttgttaaagaacggagttacaaagactacctgcagccgcacatcaataataacctctataaggatcgatactacctgcggttagacattaaggagttttttgagagcatcaagagggagacaattaaggaggaactatcgttctactttcgccttaaggatagcaagcagacagaggaaatccttaaattggtcactgacatagttaccctgaacgactcaattccacagggggcagtgacttctcccacgctgtccaatattatttttagagagctcgatgtgaagattaacgcatattgcaatcagcttggtgtggtgtatacaagatatgctgacgatatgctgttcagctcgtttcgggaacatgataagtttgcccaacccctgatcaaagtcatttacaagatcctcaagacaaaaggattcaagctgaactacaagaagaccatcaagggaaagaaccagatctccctgaatggattcatcgtaggtgataacattagattatctcggaaacgcaagaaagatatcaacaacatcattttccactactacaaatccggcaagaatatagaacaattcctgaactctttgtcagaggtggacctaatctaccgtcacaaaaacatcaattcactcggctctctggtaaactacttgaatggctatcgcgcttttctcattgactggatacctgtgaatgtgtccaatgacaaaatcagtaaacattccaagaacatagacaccattgaacagattgtcgagaggctggagaacttcaagaattcaatcaggaaacttaagtga

SEQ ID NO: 12353 - RNA, 1056 nt, synthetic construct
  source 1..1056: mol_type = other RNA
atgcggtatctgctgtttctgtttgcatgggaggatagcatgtacacgattgagtctttttgcaacgcaatttgggaaacaagttattccaaggtcagtcagggagtaaccaaagaggagtatggcgaatttgagattcccaaaaaagggggttccagagttattaactatctggggagggacacttccatgtggaatctccagcataagctcctgaagaacttcctggagaaacaggatctgccggtgtgtgtcaaaggatttcgccagggagaaagctatcatagcttcttggccgagcacataggatcaaaattcttccttcggatcgatatctccagcttcttcccatccataaccgagaagcaaatcaaaaacgagcttagccgcttgctagcttgtaactcaaacgaagaaaaggaaaaactgcttaagctgatctgtgacatcacaacattaaacgactgcctgccacagggcgcctgtaccagtcctgctatttccaatctcgtgatggctcgtatcgaccaacgtattaccaaatactgccaggtgtttgatatacgatatactcgctatgcggacgacctgctgttcagctctgagggcttcaatttcaagtcgaagaattggttccttaagaagatcaagtacattctctcatcacagaacctcaaattgaactacagtaagatcaagtacggtgagaatgaacttgtgctaaatggctacattataagcaataaggggatctgcctgtctagatctcggctgagcgacatcagacacgttgtctccttcgccaaaaagaacaggaatctgatcgaggagttcggcagtgagcgctttttgcaggaaattaacaaactccctctcaggcacagggatttaactgaatatcccttcaataccgtgtttcaatttattcagtacatgtgcgggtacagagcctttttaatatctctagtggatcggtcttacgaagaaacctcatttcagaagcaactgcagcatttgatccgaaagctcgagacacagatcacgcactacacttga

SEQ ID NO: 12354 - RNA, 1017 nt, synthetic construct
  source 1..1017: mol_type = other RNA
atgtttacgatcgagtccttttgcaatgccatttgggaaacttcttacgcaaaagtgtcacttaatatactcaaggatgattactccgaatttgaaattcccaaaaaagacgggaagaggaagataagttacctggacaaagacagtggcttgtggtctttacagcacaagctgctaatcaatttcctgaataagcaagacctgcccgtgtgcgtgaaagggtttaagaagggcgaaaattatagatcattcctggcggagcatattggtgccaaattttttttgcggatcgacatttcttcgttcttcccaagtatcaccgagaaacagatcaagtcagagttagcacgcctgatcatctgtaactcagacgaggataaagaaaaattgctcggacttctgtgtgatatcaccacactcaacggaagcctacctcagggagcctgcactagccctgctatttccaacctggtcatggcccgcatcgaccagagaattactaagtattgccaggtgttcgacgtgcgatatacacgatacgcagatgatatgctttttagctcccacgtctttgacttcgacaagaagaagtggttcctgaagaagataaaatacattctgtcctcccaggacttgaagctcaactactctaagatcaaattcagccaagaccagctcgtgcttaatggctacgtgatttctggcgatggtatcagactgagtcggaataggttatcagatatcaggcacgttgtttctttcgctagcaagaactatatgcttattcagaacagtgagtcccagaaattcctccaggaggtaaataagctacccctgcagtatcggaacctggtcgattatccatttaaaaccgtcttccagtttgttcagtacatgtgtgggtatagggccttcttgataagcctggtcgatcagaactacgctgagacaagctttcaaaaacaggtacaacgtctgatccgcaagctcgaaatacaaattgtgcattgtacctga

SEQ ID NO: 12355 - RNA, 1173 nt, synthetic construct
  source 1..1173: mol_type = other RNA
atggctatgcctgccgccggtgtgagaagggaccatagctccatgtgctgcgtcaaacacgcacttcgggacctgctcggaaagtatttgtacactgccctctgtttttttctgctcgagaaaaacgccatgttcacgacggaatctttttgtaatttggtttggggcacaagctatctgaaggttctgcgcaagatctcgaaagaggactataatgaattcgagatcccgaagaaaggcggaacacgcaccatcaattacgtggatcgacagtcatccctgtggaagttacagcgggagcttcttaacaagtacttagtgaaacaggatctaccaatttgcgtgaagggttttaagaagggggaaaattacaagtcttttcttagcgaacacatcggagctgagttcttcctgagaatagacattgcaaatttctttcccagtatcaagattagctctgtcaaacgtgagctggctctgataattaggtgtgacaatgatgcagaggaggagaaactcctggatctaataggagagattgtaaccctggacgggcgcttaccacaaggcgcgagtacctcccctgtgatttctaacctggtgatggctaggattgatcagagaatcaccaaatactgccaagtttttaacgtccaatacaccaggtatgccgatgacctcctcttttcgtcaaacactttcgactttgaaaacaaaaagtggttccttaagaagatcaaatacatcctgaagtctcaggaactctctctgaactatagtaagattcgatacggccacaaggaaatcatcctgaatggctacgtaatctccaataatgaaattcgactcagtagaaaccgcctctttgatatccgccagatagtgaagttcactaaagagaacgtgcctttaattagatcaatcgggcttgatgagttcctgagcaaagccaacaagcttccattgaaacatcggaatctaaaagaatatcccttcaagagcatatttcagttctcccagtacctgtgcgggtatcgtgcgtatttgatttccatggtcgacacaaactgtctgcaaacatcattccagaaagaattgcagaggctgattcggaagatcgaggcccagatactgctgctcgagcaggcattgcccatccggaatagcaactga

SEQ ID NO: 12356 - RNA, 990 nt, synthetic construct
  source 1..990: mol_type = other RNA
atgatttggaactactcgtacagtaccgtgcagagtaagatcgctcagaagaagtacaaaacaatttcgatcccaaaacgaaatggcttcagggagctgtcctttctcgaccccaaaactgatttgcatatgctgcaatccggactggtcaacttcttgaaaaagatagaactgcctgtttgtgcaaagggctttgtcaaaggtgaatcctatctgagctacttagaacatcacatcggctcaatccacttcttgagactggacatcaaagattttttcccgagcatcactcggaagctaatcgagcgcgagatctcatgctttatgtctttcgattccgaggaagagaagaaaaagattgtgaaactcgtaagtgatctcgtgacataccacaattgccttccccagggagcggtgtcttctcctgtgatcagcaacatcgtgatgattcggatagatcagagaattctgaaatactgtcaggttcttgggattaagtacacgcgctacgccgacgatctgctgttcagttccgaggagtttgacttcaatgacaaaaaatggtttctcaggaagattaagcatattgtaagcgacgggaactttaagataaactacggcaagcttaagagcagcacccgcgagatatctcttaatggatatgtcatctctcaggaaggtttgcgattgagccggcagagacttaacgacatcaagaaagtggtcagttttgcttcatctaaccgtcaaatgctgcagtctgatcccaattcatatgtccaggccctgaatcagctcaatctagaacacagagggctgtcagtttatccattcaaaagcgtgtatcagttctatcagttcctctgcggctataggtcctatctgatctccttcctcaagtacgacatagagtcccaatttaggaaaaagctgtgtaagctattagacaagctggaaaagatcattaaacaaattgccagcgtgttatga

SEQ ID NO: 12357 - RNA, 1005 nt, synthetic construct
  source 1..1005: mol_type = other RNA
atgactatcgagtcattctgtaaggttgcatggaatctctcctataaccaggtgagatcctccattacaaagaaggactacatccagtttgacatacctaaaaaaaacggcgtaaggacaattactctgttacccgagggctcttcattatacgtgttgcagaggaactttaacaagtactacttgaataagcagggactacccatttgtgtcaaaggctttgtccgcggcgagtcgtatatttcttacctcgaatctcatataggtgccaagtatttcgtaagaatggacataaaggactttttcccctccattaccagcgaaattatcaaagacacatttagtcacttgctgtccttcgatactgatgaagaaaaagaaaagatcctagagctcatctccgagatttgcacatatgagggtgtccttccacaaggggtgccgacctcacctgttatctctaacattgtgatgacaagaatcgaccagcgcattactaaatactgccaaatcctggggatcacctatactagatacgcggacgatatgctcttcagttccaatatgttcgatttcaaaaccaagaaatggttcatcaagaagatcaaattcatcctggctagcatgcactttaagataaactacagcaaactcaagttcagcgaaaatgaaatatcactgaacgggtatgttgtgtcagacaccggaatacggctgagtcggagcaggctgatggatatcaagaaggccattaccttttctaaaaacaatcatacgctgctgaaaaccgatcctaccgggtttcttcgacttgtgaatgagacgtctttggagtacaggaacctgaaggtgtacccatttaatagtgtcttccagttcactcagtttctgatcggctatcgaagctatcttatcagctttctgcgctatgacattgatagtacattccgtaagaaagctgagaagctcatccggaatattgagggagaactggagttttactga

SEQ ID NO: 12358 - RNA, 1017 nt, synthetic construct
  source 1..1017: mol_type = other RNA
atgttcgatctggaacagttctgtcagaacatatttggcaaaggattcgacgaaatcaaggagaagattaacaaagaggattatagttccttcgtgatccccaaaaagagggggatgagacagattattgcattaccaaagaactctgagttacgccgtatgcaaaagctcctccttgataagttctttgctaactactcattacctataccagccaaagggttcgcgaagcatgagagttataaaaactatctcatgccccacatgggagccaattatttcctccgcatcgatatctccaatttcttcaacagcattaagtttgaacacgtggaagagctgctgaaggatttgttcgtgtttatggataaagacgagaagagcaaggttatagaccttatttgggacatcgttagttataatgactccattcctcagggtggagtgacatcgccgattatctctaatttgatctttcgcaagctggatcagaggatactcaaatactgccagttgttcgacatcgaatacacccggtatgccgacgacctcctgtttagttcctacgagttcaattttatggacaaaaagtggttcctgaagaagattaaatacatccttggctccagaaagttccgaatcaactaccgtaagattaaatacggttacaaagagatcagcctgaatggctttattgtatcaaacagagacattcggctgtcaagatcaaggctatttgatataaggcatatcgtgagctacatacggaacaatgaagacgccaaaaggaaagacaaatgtctgctggggattaataaccttcgatttaagcactacgatatcgaaaaataccctttcaagagctactatcgcgtcattcagtttctatgcggctatagatcttttatcatctcttggatcgatgattgcatccccaacatcgcaaatcaaaagaagctgcggaaactggtcaatgaaattgagaaggctattaacatcttgagcgagtatatatga

SEQ ID NO: 12359 - RNA, 1032 nt, synthetic construct
  source 1..1032: mol_type = other RNA
atgaatgcaaaggagattttttgcctcaaaattataggagacagcaattttgagatccttacagtgctgtccaataagaaaaacgagtacgaaaagatcgagatacccaaaaaaaaaggttaccggaagatatattgcctcaagagcaattctaaaatcaagcgctaccagcaaaatctgatcaacaacttcttcagtcattatccgattcctgtggtggccaaagggttcgtagaaggcgagaattacttttcctatatgaaggagcacgttggcagcaattacttcttgcgaattgatatcaaagacttcttcgaatcgatcaaatacgagcactttgaaaacttcatgtacgaaatggaaacctttaaggacaagaacaatgaaggcattatcaaaatcatctggaacataatcagctataacgattacttagtgcagggtgccgttagctcaccaatgatttctaacctgattttcagaagaaccgatcagaggatattgaaatattgtcaggaactgggcattaaatacactaggtatgctgacgacctgctgttttcatcctctaactttgagttcaaaaagaagaagtggtttctgaagaagattaattacatcctcagacagaacaaattccaaatgaactgtagtaagctaaagtgttgtgactatcaaattagcctcaacgggtttgtgatttcttacgataatatccggcttagtaggaagaagtaccacgacatctcacaggtcgtatggtatgtcaacaagtccgacatctatgaaaagaattttttcgacgagctgcataaactagggttctacaataacaaacttcgcacgattaatacctattattccttgctccagtacctgtgcggataccggagctttttaattggatcctacaaagagtgcgagatgggcgatgatacaaagcgtaagatagagtatatcatcaagaagatcgatatgtccattataaaggtcatctcgaacaaatatcccacatactgggtgactaaatga

SEQ ID NO: 12360 - RNA, 1047 nt, synthetic construct
  source 1..1047: mol_type = other RNA
atgcgcatttacaaagaggagtacttttacaactcaattctgcagtgtaacaagcaaaaagtgctcaatggtctggaagccaaatctgaggcgtactttaagtatgaaattcccaaagctaacaacaagaagagaactattagtgctttagataaggattccctaatctacgagctccagtcaaacttatacaagaactttttcagcttccagccgattcccgtttgcgtaaaaggatttgttaagggcaattcctacttagactttttgaacgcccatatctacgacaattactctacttatttcgtcaggctcgacattcgagatttcttcgatagcatttcgaaagaaacaatgatctcaaccctgcaagagtttataaacatcgaggatgtgatcaatgtgatttatgacatttgcaccctagaagacaaactaccacagggagcagtcacatcacctctgcttagcaatcttgtgctgaggcgcattgaccagcgtgtcacactctattgtcagagtctgggggtggcctatacccggtatgcagatgacctgttgttcagtagtaacgaaatcgattttagccaacaaaagtggttcgtcaagaagataaaatacatactgggttccatagacctgaagatcaattacaacaagatcaaatacgggaaggacctcatcagtatcaatggatatgtggtgaactctaacgttaacctgagccggaagaaactgtataatttgactagcgtgctctactttttcaacaagaacaaaggcaagtacaaaaaagtatacaaggtggacaataagatcttcatgaatacaaactggcttcacgatctgaatacgtatttgaaaaacagcaccagcaccaatctggagtttgtctcagtgcataaactgcagaatttcctgattggctatagagcctatcttatatcctgcatctcttactcttccgagaacaaggttaatcagtattcttccaaaatcaagcacattgaatccatcatcaataagttgcttgagctcaatcagtga

SEQ ID NO: 12361 - RNA, 1044 nt, synthetic construct
  source 1..1044: mol_type = other RNA
atgaagatctacaaggaagagtacttttacaattcgatcttgaagcatagcaaggaaactgtcctcaagggcctcggagcgaaatcagaagcatatttcaaattcgacatgccaaaagccaataatgagaaaaggaccatttccgctcttgataaagacaatttaatccacgagctgcagagtaacctcaacaacaatttttttagccttcagcccttgccgatttgcgttaaagggttcgtgaaaggcaacagctacctggattacctgaacgcacacatctacgataattcctcaacatattttgtgcggctggatattaaggactttttcgactcaatctctaaagaagtgcttatctcaaccctcagggaattcgtgggcatcgaagacgtcattaacgtcatatatgacatatgcaccctggaggagaaactgccccagggtgccgtcacatcccctctgttgtccaatctcgttcttaggagaattgaccagcgtattacattgtattgccagagtttaggggtaacgtatactagatatgctgatgatctgctattctccagcaatgagatagatttccgcctgaagaagtggtttgtgaagaaaatcaagtacattctctgttctatcgacctgaagataaactacaagaaagtcaagtatggcaagggattgatttctataaatggttacgtggtagataacaatgtgaatttatctcggaagaaactgtacaatcttacctccgttctatacttcttcaataagaacaaggggaaatacaagaagatctataaggtggacaacaacatctttctgaaccgcacgtggctggaggatctcaataccttcttgactaacagcacatccagtaaactcatctttggctcaatccagaaactgcagaactttctaattggatatcgagcctatctgatttcttgtatagggtatagtagcgagaagaaaattgaccaatactcttcgaaaatcaaccatatcgagagcattcttaataagctcctgcaactgaactga

SEQ ID NO: 12362 - RNA, 1041 nt, synthetic construct
  source 1..1041: mol_type = other RNA
atgtttattttcgacgagaactacttctacaacatcgtcattaaatgcgacaggaaccagctgctgaatatcatcaaggaaaagaatctgcaatacgagagtttcgagattcccaaaaatgatgggatgagggtcattagtgcaatcaaaaaaaacagccaattggtcagattacaaaagaacctcaacagcaatcttttttctaagattcctctgccggtatgtgtgcgtgggtttgtatcaggcgagtcatataactcctatttagtggagcacatcggtaaaaaattctttcttcgggccgacataagcgccttctttgattccattaaaaaggataccatcatcagcatgcttaatgaatttatctccgtgataaacgtgatcgaacaaattagtgaagtggttactttggacgacaaactgccccagggagcgattacctccccatccgtgagcaatttgatatttagaaggatcgatcagagaataactaagtattgtcaggaactgaatgtcacgtacacccggtatgccgatgacatgctcttctctagcgataaactgaatttcaatgagtcaaccttcttttatgccatgattaagaagatcctcaaggagaatggttttgcttgcaacaataagaagaagaagattgagatcgatgagattagcttgggcggcttcgttatttcgaatgacgtgcatctctctcgcaaaaagcttgagaacatcaacaagctaatctacttttttcgaaaggacaagacattcgaaaaacagaaatacctggtcgactcactagtgttccaggataagcattggctgaatgaagttaacaacctgaaactgaaagaaaacatctccttcaaatgtttctcttctaataaccagctcatagattatctgtgcggataccgcgctttcattatttcgatagtgcaggcaaacgacaacaatacagaaaatatcaagcagctccggaaaaagatcaacaacatagagatgatcatcgaggctatcattaagcacagtacatga

SEQ ID NO: 12363 - RNA, 1095 nt, synthetic construct
  source 1..1095: mol_type = other RNA
atgattagcgtaaatcgctacctgaagctgtacagtaagaagtacttcctcactaggattcttgaatgtagtgaggaggagctcgctcaggctaaaggagagaaagggatagtgtgtattgaagaccggataccaaaaaaaggaggctttcgttctatcgtgtcagtgaagcccggatcatccctagcgaagcttcaaaagaagctgtacaagaattacctgtcccagatccctgtgtcaacggccgccaagggcttcgtaaagggttgttcttacgtcaatttcctggaggagcatgtgggacattcttattttctcagagttgatatccgagactttttcgacagcatcacaaaggagaaactggccgaatgcttagaacccttcgctgaaaaagagattgccgacgaaatcatggagttgtgtacttggaatgggaaagtcccacagggcttttccaccagtcctgccttgtctaatctcgttttcagacgcatcgatcagagggtcaggaaatactgtagaagctaccacaaggagatggatcgtcgaattttttatacacgctacgcggatgatatgctgttcagctctgctggtacacttgagttcgacttttgcaagaacaaaaatttcaagcggatgatagcacacattttacatcagaacggcttttcctgcaacgaaagcaagaccatctatgccaaaggagagataagcctctctggctatgtggtgtcaaacgacgtgcacttgagccggcaaaagttatgcaacatcaacgaagtgatttatcagttcgaccagagaaaatcctatgggtcgattagttactcccttgacaaggctacagtcaatattaagaacatcatgtgcaacctgaataagaggaaaatgaagaaagcagatggcactgttatccaatttgacagtctaagcgatctggtgtattacgccgcaggctgccggtcctacctgatgcagatcgcctcaaccgaacacggggacaccgggtatgataaacagattgcaaaaaagatccgcaaactggagatgatcctggattatctctcggaggaattgggtgaagtctga

SEQ ID NO: 12364 - RNA, 1008 nt, synthetic construct
  source 1..1008: mol_type = other RNA
atggtgttgtacagttacgagtacttccttgacaagatcctcgagtccacacaagaggaggtggagaaggccaaacgtgaaaagatattcgtctgttctgagatgaaactgccaaagcagtccggcttccgcaacatagtcagcgtggaaaaagacagcattatgaaaaaactgcagaagaacctgcagaaaaattttctagacaagttgccggtctgtccctcggctaaaggtttcgtaaaagggaattcctatatggattttctggaagaacatatcgggcacgaatactttctgcggatggacattcacaacttcttcgactctatcgccgaaggtcttttggatgaaaatctcaagaacttcgtgagagacgaggaagagatgtcacctgatttagaagagttagagtccggcgcgaagggcagtagaattcgagaagacatcatcgaattatgcacttggcaaggacgtgtacctcaggggtttctaaccagcccaagcatcagtaacctcgtgttccggagactcgatcagcggattagaaagtactgcagggcttatcaaaaagagcagaagagggaaattttctatacacggtacgcagatgatttgctgttcagtagccaagggttcgactttaagaggaataagaactttaagcgcatgatatgtcatatcctcgaggattacggattttcttgcaatgagaacaagacgatctatcagaacggtcagatttcactcactggatatgtgatcagaaaagatgttcacctttccaggaagaaactgcgaaacataaatgaggttctgtaccagtttcgcgagattatcgagtgcgacgagcgagtgcgctctgaaaaaattaaagccaatctgcagatgatcctgcagaatctgaatcagaagaagatgaaaaagagcaacggagatcccatctactttgccgacggcaaccggcttattcattatgttgcaggctataggtcatttttcaccctgtga

SEQ ID NO: 12365 - RNA, 1098 nt, synthetic construct
  source 1..1098: mol_type = other RNA
atgaagaagatctatggctgggactactactgtgagaggatactgcggaaatcacagctgtttattgagaatagtcttgccgaaaaggaaaactcctacatagttttcgacatccgagatagaggaaaggagcggaccatttgccaggtggataagacaagcgggctgtaccaactccaaaacaatcttaatcgcaacctgctggccaaaattccattgtcaaaagccgccgccggatttgtgcgcggtttatcctatcaagactacctgaggagccattgcgggaagaagtttcacatgcgattagacatccaccatttcttcgatcacgtcactgaagagcaagtgatcaaaagtctcgaggaatttgttcaggacgaaaaaatccgcgagaacataggcgaaatcactacctttaacgggaaactcccacagggcgctgtgacatcccccgcagtatcgaatattgtgtttagacgcattgatcagagaatcttaaaatattgccagtccgtccggaaagtccgggaaggaaagaaattctatcaggaggatctgatctacacgcgctatgcagatgatatgatgttctctagcgactacctcgacttccgtcgggacttgtttgtatacaggatgatcaagcacattttgaaggaaaacggatttagcctgaacgtcaagaagacatatatggctgagggggagattagcctctctggcttcgtcgtgggcggtgaggaaaatggctgctctgtgcgtcctagtaggaaacgtctgagagagatcaatagaatactcgcgtatttcgatgcgcgaagggagctggacgggtgtccttacgaggctgacattaaaaaactaagagatccgagggtgattgataatgttaacctgatgtttcccgacgggtcagtggccagattcagcaacaagaagtccctaattaattacctttgtggctatagggctttcctgatcaccttcctcaagggtgaaaacggccagggatcttcacagcgcgcacttcagggaaagatccggaatttggaaaagctgatagaccagtgtcagcgatggtggtttcatatcgagtga

SEQ ID NO: 12366 - RNA, 1098 nt, synthetic construct
  source 1..1098: mol_type = other RNA
atgaagaagatctatgggtgggattattactgtgagaaaatcctgtggaagaatgatgctttcattgcatcttccttggcggagaaagaggagtcatactcaacatttaccatcggcgatcggggtaaatctcgagttatacagcaggtggatcagactagcggactgtatcagctgcagaataaccttaacaagaacctgctttccaggattccactgtctaaggcagctgctgggttcgtgaaagggaagagttaccaagactacctgcggccccactgtggaaagcgtttccacctgcgcttggatatcagacacttctttgaccatgtgaccgaggagcaggtagttgagtcgttgaaggacttcgtgcaggatgaaagaatccggatcaatattgggcagatcactaccctcaatggctgtctaccccaaggcgcaatcacatcaccagccatgagcaatattgtcttccgccagattgatcaaaggatcctcaagtattgccaggccgtcaggaaagtgaaggagggaaagcaggtgctatatgaagacattgtttacactcgctacgccgacgacatgatgttttcctccgaatatttagacttccgaaaagagctgagcttttataagatgatcaagcacattctcatggataaggggttccgattgaatcatgacaaaacgtacatgacagaaggcgagataagcatgtctggatttgtcgtcggaggtgaagcgcacggctgcatggtgaggttaagtagaaaacggatgagagagatcaacagaattcttaactacttcgacaagagagctaaaatagacggcagcccttatgaagtagacgaagaaaaggtgaaagactttcgggttgtcgataaagtgaacgctctcttccctattggtaaaatcgcccgcttcagtaacaagaaggcccttatgaattacctctgcgggtaccgggcatttctgatcacctttctgaaaggagagaacggccaagccctgcatcagcgtgccttagagcgcaaaataaagaatctggaacagctcattgatcaatgccagtccaggtggtttggcatgacatga

SEQ ID NO: 12367 - RNA, 1119 nt, synthetic construct
  source 1..1119: mol_type = other RNA
atgaagcggctctatggctttgagtactacgctaagaacattttgaagattgatctgctgaatcaagatgaaaagaccaagttcttcaacaaactggaaacaaatatctctgagagctatgtgaaattccagattccaaagaaagatgggatgagagacatatgcgccatcgataaatcttccattctgtataccatccagaagaatctgaacaagaatttcctgtcgaagatccctctatcaagcgtggcaattggttttgtgaagggaaaatcctacaatgattttttggcgcatcacattgggaaaaaatactatatgcgtatggacatcaaggatttttttggcttcatcagtgagaaacatatcaaagagagtctcaaggagttcgttcaggagtccgagattattgaatccatcgtaaatatctgcatgagggagggtgaactcccccagggagccgtgacaagtccgacgataagcaatattattttcaggaggatagaccaacgcattataaaatactgtcagagcatacagaacattaggattgctaagaagaactacaacgaagacattatctatacccggtatgccgacgacatgctgttttctagtaatatcctggactttaaggagaacaagtactttaagaagatgatcaagaacatcctatcgaacaatgaattcaaagtcaactacaacaagatgtactactcatctgattcaatctctctgtcaggattcgttattgaaaaagatgtccaccttagccgcaaaaaaatgaaaaacatcaactccatcctctatttctttgataagcgcatcgaatacgataagacgaagtacaacataaacattgacaagatcgaagacactcagttgattaaacagctgaatgacctcaacttaaacacacttaatggccggaaaataaattttgagaacatcgcacagttcatcaattatttatgtgggtatcgaagctttcttatatccttcttgaaaatggacatcagaaaaaccgatagcattaaccttattgagaagaaggtgaaaaagatcgaggaactgatcaacaaaatcaacgagataaatgacttcagaactcaaaattga

SEQ ID NO: 12368 - RNA, 1125 nt, synthetic construct
  source 1..1125: mol_type = other RNA
atgaagatttatacagaggagtttctgcgggatggaatcctcgagatacaggagcaaccttttgagaagcttctggtcgagaagaataagtggtataagtgcttcgaaatcagtaaaaaggacggcaaaagagagatatgcgcgctgtcagacgaagagagcgggcagaaagtcaagcgcttgcagaaaaatttgcttcatcgcttcctgagaaagatcccaattgccgtgtgtgcaaaaggcttcgtaaaggaggagtcatatcagtcttttcttgagccacacatagggtctaaatactttatgcggttagacattcggaactttttttcgagcttttcagaagatttgatctggaagggactgcatgagttcgtggagaatgccgaagccttggatatgatttgtgagctgtgtacatgggagaataccctgccccagggtgctgtgacaagtcccgcactctccaatatcctgttccgcagggccgaccagcgcatcctgaaatactgtcagaccatcaccgaacgatgctctaagaaccgatacagacctgaggctgccggcaacgagaacactctatattatactcgctacgcagatgacatgttgtttagtagcgacttcttcgatttctccaaggaagagtactttatgaaaatgatctcccggattctgaaagactatggatttgagctgaacagggacaagacggtgattagcgaggatcaaatcgttctgaatgggtacgtggtaggtaacgccgtttggctgtctagaaggaaaatgcgtgatttaaaacgtatcctctacttcttcaggaacaaaaatcacgagctataccgtatcgataagcttaaggtgaaaaagacaatcgaaagcctcaaggaattaaattgcttcatggagaagaacaactcagaaagaaataatttcgcgaacagtctagaacttattaattatctggctgggtgtcgcagctggctgatagctattctgcaaatgaggaccgaagacaacaggactagacgaaacctcggcaaaaccaaagtcagaattgagatgctcctctccgaactctcccggtgcgaagaagaaaagcagcggtgggcagaaaggggctga

SEQ ID NO: 12369 - RNA, 1203 nt, synthetic construct
  source 1..1203: mol_type = other RNA
atgtatcgggtaaggttcttccactcactgagtagcccaggaatcaccccaattcggaagttttcggagagtgcttgcagcttccccaagaacattatgaagatctacacactggaatttctctttaagattctcgagttgcagcctgaggaattcagccagattctacttaagaaagaaacggcctacaatacatttgagatccccaagaaaaacggtcgcagattaatccacggtttggacgcaaaagacgggaagcctcttaaaaaactccagcagaatctctaccgtaaagtgctgtgtaaacagcccactgctatccccgccaagggctttctcaaaggagagtcttacttaagcttcctggaacctcatgcgggaaaccaattttttctcaggctggacatccacgacttcttcggatccttttctgagaagatgatcagagacaacctgaatagcttcatcgaggataaagaagccctagaattagtctttgagctgtgtacagtgagcaaaaaactgccacaaggggctgtgaccagtccagccctctccaacatcatgttcgcccggcttgaccagcgtattctgaaatattgccaggcactggaacagaataagcgggagcagttgcatagggaaaaagagtcatggtgcaatgcttcaatatcttacaccagatacgcagatgacatgctcttttctagcgatttcttcgatttccgagagaacttagcattcctgcacatgatatctcgaatcctgggcgagtatggcttccatcttaaccgccaaaagactatgatggccgaaaaggagttgtccatgaatggctatgttgtcggcgaaaacatccggctttccaaaaagaagacatcggagctgcgcagaattttgtattgtctgaaggatcaggaagccgagacttatcagctgaatcaggagctgatggatgatcctcagaagatcctgaaaaagattaaacagttctcctccgaaactcagaaggggagtcgaaccttttccgatattcacaagctgatatggtaccttggtggctgtcgctcttggattatatcagttctccaaacggaagccaagtttgggaaagaggaaaagaacatggtgaagctaattagaaggatcgagtgcgtgttggacgcgctgcaagctatgaccgaggacccgaatcgcaggtga

SEQ ID NO: 12370 - RNA, 1095 nt, synthetic construct
  source 1..1095: mol_type = other RNA
atgcagatttataactacaagtttctgctggagaaaattctgaagacttccgatgagaagctgcatgccgtgctcgagggaattgaatatgcctacgaagagacagagatccccaagaagaatggcatcagagtgattcacatgttgcgtaagacgcctgaggggaggaatcttaccaattttcaaagaaacctggttcggagattcttacaaaaaattccgattgctatccccgcgaaggggttcgtcaccggagagtcttatcagaattttctgatgcctcatgctggtaatcactacttcctgcgaatcgatattaaagacttctttgacagcttttctgaaaaactgatgaaatcaaacctgaaggagtttattcaagacagggaggcactggagactgtgtttgaactctgtacactcaatgctaagcttccccagggtgctgtgacctcgccaatcttgagcaacattttcttccggcgaatagaccagaggatactaaaatattgccagagtatcgaggagaggtatcgtaaagaaaatacccgttcagaaaaacagggcatcaggcgcatcagctacacaagatacgccgacgatatgctattctcatctgatttctttgactttggcgagcatatctatttcctgaggatgctttccaaaatcctaaaggagaacggctttgaaataaaccgctccaagactatgatgtgtaagggggaaatcgggttgaacggttacgtggtaggagatggccttaggctcagccgccgcaagctccagtctgttaaagaaacgctctatttcttccggaaacaagaccaggagctgtacgaagtcgatatgcggaaagcagaggacttgaaggaaagtctcaagaagcttaatgaaatgcgcagagagaacaacaaagaagcacgcgaattccgatcccggcaggactttatacactacctggccggctgcagagcctggatgatcagcgtcttacagacagagcagttactgaagaaggatagtaaacggctcgagaaaaccatacagagactggaagagctgttgaaggccgtggaaaaggaggagggatga

SEQ ID NO: 12371 - RNA, 1083 nt, synthetic construct
  source 1..1083: mol_type = other RNA
atgtttatcaacgaatacgactacttcattaacggcgtattgaaaacatcggagactacactgaagaatgtgcagaaggatatcaaagcaaactacaccactcataagatccctaagaaaaatggggaacggatcatacacgccattaagaaggactctgatctctataacttgcagaaaaacctctgtctgcacttcctggacacaatccccctgccaaaacccgtcatagggttcgttaaggatgagaattatgtccgcttcttgagtcagcatattggaaaacgatatttcctgaggctcgatatcaatagcttttttgacaccgtcaataggaagatgctgcagaagaccttcaaggagttttttccaggctctgacaacacttcactatccacctttatcgatctgtgcaccattgatggcaagctgccacagggagccgtgactagccctgtgatttctaatattgtgtttcgccggatcgaccaacgtatactaaagtattgtcagaacttcgacgatgtatacatcagtaaacgaagcaataaagagtctatcacctacactagatatgcagacgatttactgttcagcagcgacattatagacttctccaagaatgctttctttatgggcatgatcatatccattcttaaggacaacggattcacagtgaataaaaccaagacaaggtgtagcacaaatgagatttccttctcaggctttgtgcttggtcgcgatgttcatttaagtcggaagaaactgcatgagctcaacaaggttatctacttcttcaataaggccgacgaacactcatacaaaaagtacagacttaacaaagctgtgttcacgagtggtgattggctggcgaagattaattctcttgaactggaaggaccctttgggcagaaaaaatcatttaagaccccggaggaactgcttaactatttatgcggttttaggtcctttctcctactgattttgagagagaaccccaacgggtcccctcacatggaacaactggataaaaaaatccacaagctcgaggagatcattgacctcatcttgtgccacacgtga

SEQ ID NO: 12372 - RNA, 1119 nt, synthetic construct
  source 1..1119: mol_type = other RNA
atgctgatagatgtatatgccgccttcgcactaaggacaaggctgattttcagtgagggcacatatagcattttgacaatatattccgggggtaacaacattaatatctacgaagagtcctacttttacaagaaaatcctaggatacgaatccatctctctccccttatcgctaactaataaactggatgcgtacaattcttttgagctgagtattaacaacaaggtgagaaacataaacgcaataaattccaagagtgatctgttcgcttttcagaagaacctgttgaataacttcctgatttatatcccattgccaaattgcgtgtgtggcttcgtaaaaggaaaaaactacctcgatttcctgaaagagcacctcaaaaaggacttttatttacggcttgacatcaaagactttttccctagcttgaaaagcgaaaatatcaaagacgtgctggatgagtacattatcatcagcgacattaacgaaaagacccatgtgctggacaccatcattgacattgttactttgaatggctctctcccccagggggctgtcacgtctccacaggtgtccaatgtcgtgtttagacgccttgatatccgaatccgaaactactgccggaagttcaatatttcctatacaaggtacgccgatgacatgctcttttcgtcaaacgattcacgtctccacaaagacttctttgtcaaaatgatcagcaagattctgaaggataattgtctggagctgaatagatcaaagattaaaaagaccaaggagcaaatagtgctgaacggatatgtcgtgtcaaaccgcatttctttatccaggaataagttgaagaaggtcaacactctcatctacgcctatgagaaccttgacggtaaaaaaaagaagccgaagaacttcaatgagtatcttaatcggattactacgctcgaagacttctttccttctcttcctagcaatatcgaggggagacgtaacgttatcgttaattacctcgctggctaccggagttatctgcttagctttgataaagatacctaccgcgacatctgcgtgacctatcccaacaagataaaaaagatcgaattcatcctgaaggaactgatgtga

SEQ ID NO: 12373 - RNA, 1029 nt, synthetic construct
  source 1..1029: mol_type = other RNA
atgaatatatatgaggaatcgttcttctacaagaaaatactggaatatggactgacccccccgacagatattacttccaacaaggcagacgcctataacacatttgagctgattatcaatggtaagaagagagagataaacgccatttccccaaaatctgacctatataacatccagaagtccctgttggataattttctgacgcacatacctcttccaaattgtgtgtgcgggttcattaaaggcaagagttatctggattttctcgaggcccacttaaaaaaggaatattacctgcggatcgacatcaaaaatttcttccccagtctgaaggctgaaagggttaaagaaaccttgagcgaatacattaagatctcaaactacaccaagaagcaggaagtactcgataatatcgtggacattgtgaccttgaacggatctctcccacagggagcagtaacaagccctcagttatcgaacattcttttcaggagattagatatccgcatccgcaactattgtaggaaattcaacgttgactttactcgatatgccgatgacatgctgtttagttctaatgacgaccggctgcacaaagacttcttcgtcaagatgatctccaaaattctgaaggacaaccaactcgtcattaaccgtaaaaaactgaggagagggcaaaagaagatcgtgcttaatggctacgttattagcaatcatatctccctgagccgaaacaagttgaagaaagtcaattctatcctgtactccttcgagaacatcaaagggaaaaaactagagcctaagaatttcctcgagttttattcacgcctgtccagcaatagaagcatatttcccgattcaagccttacaatcgagaagaaatacgacattctctttaactacctagcgggctaccggtcttaccttctgagcttttctaaggagaagcataaggatacttgcgtggattacagtggtaaaatcaagaaactcgagtacgtgctctcaaagttgaataagtgggcttga

SEQ ID NO: 12374 - RNA, 963 nt, synthetic construct
  source 1..963: mol_type = other RNA
atgttagccatcatagataaaaatctggcgtacaaatcattcgaaatgacaaccaacggtaaggtacgcaatatcgatgctattgactctaaatcttccctgtacaagttacagaggaactttcttgataggttcctgatcgatatccctctgcccgactgtgtctgcggctttgtgaagggtaaatgctacctcgacttcctgattccccactgcggcaagaagtattacttgcgtctcgacattaaggattttttcaactccctgaaggttgacaaaatacggtcagtcctgggagagtatatccaggtgagcgatctaaacaaaaagaatctgatcctcgacgacataggggtgatggtcaccttgaatgatagccttcctcagggggctataactagtccacagattagcaatattctattccgcaggattgacattcggatcaggaattattgtcgcaagtttgatgtcgaatatacacgatacgctgatgatctgctcttcagctctaacaaatccaaactccatgacaagttcttcacaaagatgatcttcaagatcataaaggacttcgacttggtagtgaaccgaaaaaaaatcaagaagtcagaagagagactcgttctgaatggatacgtgattgacaaaaacattagtttgagtcgggccaaactgaaaaacattaatacccttctctactgcgtggagtataattccggcactaaagcatatccacgcacaatcatcgagttttttgacagactgaaaaacgttaagacctgtctgcggcttacttctgacatcaagaagaacaagagcattgtgatcaactattttgccggatacagagcctttctgattaatttttcgaaggtggggtataaggattactgtaaagattacaccacgaaaatcgacagaatagagaaggcattagagatcatccaagaaattaagtga

SEQ ID NO: 12375 - RNA, 1329 nt, synthetic construct
  source 1..1329: mol_type = other RNA
atgaagatctacagtgaggatttcttctataaggggctgttgggatttgatagcagaaccgtgatgaagaattccctcatcgctacaaactcttatcagagctttgagctggaggtgaatggtaaaaaacgcaagattgatgccataaagcctaacaccaagctctattacattcagaaaagactcctgaagaattttctggtgaatattccacttcccaattgtgtatgcggatttgtggaagggaaaaactatctggactttctcaaacctcactgcaacaaaaaatactacactcggctagacattaagagtttcttcaactcgattaagtctgagaatattaacggtatcctcgaagaatacatacaaattaacgacgaggaaaagaaacagcagatattgaatgacttctgcgagattgtgacgctcaacggcagcttaccacagggggccgttacatcaccacagttatcgaatatattcttccgtcgaattgatattaggatccgcaattactgtcggaaatttaatgtggaatacacccgctacgctgatgatatgctgtttagttccaacgaggagacgatgcataaagacttttttatcaagcggattagcaaaatcctgaaggactacaagctgaagctcaacaacaagaagattatccaatctgaaaactctatcgttttgaacggctatgtcgtctccaataagatatcactgtcaaggaaaaagctaaagaagatcaacacattcatcaacgccttcaacaatagtgacggcaaaaagaagaagtttatcggaactgaagactacacatatcggcttactaaatccaagaatctgtcctttactatgaccgatgacctttatatcaacaagctgaagatcatcaactaccttgccgggttccgctcatatttaatgaccttcagcaagcccaataatgaagactactgtgaggattatttcgacaagattaacaacatcgagaaaatgctggagaaactaacaaaggaaggtctgccttataacgacaaaaagagcaacattgcaattatcatcgaccacgttaagttcggccgtgtcaatggattcaacatagaggtgaggaaaatcaataaatcttcccacagcaatagaatgctgtacaaacatctcaaaatgaatctcaacgataggacccttttcgtaaaattttatccctttccgttgaaactggatgagttgataaatgacatcgataagaaagcactgaagaacagaatcctgcagaataatatcaacgagatacgatacgcgttgaagattaatgaaaaaggctga

SEQ ID NO: 12376 - RNA, 984 nt, synthetic construct
  source 1..984: mol_type = other RNA
atggacattctggatgaggttccaaccatcgaggatatcaacgagtactatgacacgttcaatattcaggtgaacaagaaacagagaacgatcaatgccgtgaagcaaggcagcctgctcaggaaactgcaggaaaaactcttggtcaatttcctggagaacatccctctatcggattgtgtatgtgggttcgttaagggcaagaattatttagactttctgatcccgcactgcgagaagaagtactttctccgcattgacatcaaggatttttttaacagtctgaaggtcaatttggtgcgcgacaccctgtcagagtacatagacattaagattcctgatgaaaaggaaaacgttattgacgagattatcactatcactacacttaatggatctctcccccaaggtgctgtcactagcccacagttaagtaacattttgatgcggaggatcgacatcaggatccgaaaatactgcgaaaagtttaaggtcgagtattctcgttacgccgatgacatgctgttctccagcgaaacatccgagatccataaaagcttcttcatagggaaacttaaggagatcctgaaagatatcaacctgcgcatcaattcaaaaaaggtgataaagaccaacgagaaaattattctcaacgggtacgtggtatccaacaacatctctctgaccagaaaaaagcttaagaaattgaacacactgctatacactttcgagtacaacggctcaatcaaaaaatatccccagacctttacagaatatattagaaggctccagagcgtgaatcccattctgatcgacttatcaaaaggtgacgattggtccaaagtgcagattataaattacctggcaggatatcgggctttcttgctgagcttcaatgcgctctctataaaggattatacctgcgacttttccaatcgaattaagagaacagaaaagatgcttgaacggcttagtgatataaagtga

SEQ ID NO: 12377 - RNA, 921 nt, synthetic construct
  source 1..921: mol_type = other RNA
atggtgaacaagaaagtacgtaagattaacgcaattaagacgaattcagtgttacataacctacaaaagaagatcagcaacaactttctggataatattccgctcgccgattgtgtctgtggatttgtcaagggtaaaaactatctcgatttccttctgcctcactgcggcagcaagttttatcttaaggtggatataaaggacttcttcaattcgctcaaagaatctttagtacgggacacattaagtgaatacgttgacatcaagaatcgagaagagaaagacagggtccttaaagaactgatctacatcacgacattgaacggcagcgtgcccctgggggctataacctctccacagttgtccaatctgttgctgcgcagaatcgatctccggatcaaaaagtactgcgagaagttcaatgtgatctacaccagatatgcagatgacatgctgttctctagcaacaatcaggaggttgcgaaacccttctttctcggtcgattgaaagacatcctgatagacttcgagctcaaaatcaactccaagaagaccatcatcgccgagaacaagattatccttaatggctatgtgatttcttccagggtcactcttaccagaaacaaaatgaaaaagctgaacacactactgtacaccttcgagtacaagtcaggggttaagagatatccacggacatttaatgagtttctgcagcggctgaaaactgtgaatgaggaactctttgatttgtcaaagtccatacctgaaactcgcattcagatcattaactacctggctggatatagggcctttctgctcagcttcaataagtccagtattaaagactacacttgcgacttcagtaaaaaaataaagcgcaccgagaaaatgctagacattctgtcagatattaggtattga

SEQ ID NO: 12378 - RNA, 984 nt, synthetic construct
  source 1..984: mol_type = other RNA
atgaatatttatagcggcaagagctttttcaaggaggtgttcgaaatgaaatacgaagatgtaaagaaggtgactgacagcaatatagaggaaaactacaacatcgtgaaaatcccgaaaacaaaggggcacagagaaatatattgtatcgacgactcttccgagctgtacattctccagaagaacatattgatgaatttcctcgatgacatacctatctcagagaatgcttttggcttcgtgaagggtcgatcctacattgatttcttatatacccacgtgtacaagaactacaaaaacatctactacttgaagctagacctgaaagactttttcagttccatcaaatcattccacatcgaacgtactctcgaaaagcatgtccatacaaatagcagcaaaatttccaaagagatcatcgacaacatcgttaaactcactaccgtcgataataaactgccccaaggagcagtcacgagcccaagtctgtctaatatcgtgtttcggttcaccgacattaggatcgcacgctattgtgagaaatttggaattaggtactctcgatatgctgatgatatgattttctcaagtgacagaaaggtcatccatgcccccttcttcataaagaccattaagaagatcctgaatgaatccaacttttatgttaacaaccgcaagactaagttttcaattgggagcttgaatctgaatgggtttaggattaccgataagattaacctgacacgcaaaaaacgggcgaaactgaacacatgcctgtacatttgcaacaatacgaaaaaaaagcacgtacttaccaagcttaatctttctggcttcaacttttcggacttcgaggatctggccaattatctcaatggtacccggtcctttttaatcatgatagccagatctagtaacaacaatatcgttatcaacgagctaatcaaggagattgaggtgaatattaacaagtttctgcagtga

SEQ ID NO: 12379 - RNA, 1014 nt, synthetic construct
  source 1..1014: mol_type = other RNA
atgattatctactctaaggagtttttcgataacaacatcttgaagatcagcaacgaaattgactacattaatgctatccagacaaaagagtcttcctatacccataaaagcattctgaaaaagaaccgattgaggaatatagaggttatagatagagacagtctcttggccaagatgcagattaatcttaaggacaacttcctgaacattatcccaatccctcatttcgtgtacggttttgtaaaggggaaaagctataaggattaccttatccctcacataaacaatatgtcgaagaacaagtactacattcgactcgacattgggaatttttttgacagtgtaactgtcgagttaataaaaaatgccctatccgagtatctttctctcaatgatctgcaggaaaaagaccaaatcatactgaatatagccgatttggtcacactggacggtaaacttccccaaggcgctattacctctccagtgatttcaaatatcgtgttcagaagactggacttgcggataaagaagtactgcgaccagttaaacattacttacacccgctatgcagatgacatgcttttctctagttacgacaacatcctgctgaaaaataatctcatcaatctcgtgagggcggtcctcaacgactatggattcgaactgaactttgataagacgattcgcactaaaaactttatctcactgaatggattcgtggttagcgataatttatccctgtcacgcaagaaactaatcgaaatcaaacggatcctgttcatcctggagaagaataagaagaacaagaacagtctgaaaatcctcgaagaaattaactccttcggcaaatacaagaagcgtaataaatttaccagcgaagaggcattgcacgattatctggccggctatcggagcttcctaatttccctgctccccgataacgatgacctgtggaaggagaaatgtatttcaacaatcaacaggatcgagaaggctatcagcgtgtccttttga

SEQ ID NO: 12380 - RNA, 1044 nt, synthetic construct
  source 1..1044: mol_type = other RNA
atgcaaatctttgataagggctttttctacgaaaagctgatagctaagagtaatctgcacgatttaaacaatgttcgcgacgtgtactatcggaagttcaatatcgtgataaacaacaagaagaggagtatcgctacagtccttgagggtacggctttatataaattgcagttccggctcaagaataattatctggataaactaccccttcccgactgcgtcataggctaccgcaaaggcaaatcttatcgagactttctggttcctcacgtgaagttagataaaaatgaccgcttttttgtgcgtcttgacatcaaaagttttttcgactccatcaacgaagatgtcattaaagaagcgctccaagactatgtcaaaatagccggagaggaagacaggaatcgagtgatatccgacattatcgacatctgcaccctcgaggggaagctgccacagggagcactgactagccctgccttgtcaaacatctgttttaagagacttgacctacgcatccggtcatactgtcggaaattaggctatacctatactaggtacgttgatgatctgctgttcagctcaaccgacctgagcttgatccagccgaaatttatccagatgatcaagttgattctctccgattacgggatgaaactgaaccatagaaaaatcatccagacaaagaacttgatttctctgaatggattcgtcattagtgacgagattaggatctccaaaagcaaaatgaatcatctgctaagccttctgttctgcattgaacagaacctcaagtcccgaaacctcgcagagctgctggaaaaactgaaccagattcgtcagcatgacggcaagagggatttcttgacagtggatgatgtaatggagttcctctctggtagccgggcctacctcattgcctggaattcatctgactcttcggcatggaaggtaaagtgtaccaagttcattcttagaattgagagacagctcgtgtccctggataagaagcacgggcaagagctgagagaggtgaacttttactga

SEQ ID NO: 12381 - RNA, 969 nt, synthetic construct
  source 1..969: mol_type = other RNA
atggattcctttaagatcctcaacaaagagacttggcttcaaaccttaaatatttccgaggaagagctaatgaaagtcgcagagctgaagagcctgttttataagaaataccggaaggagaagccaagtggctacaggactatctatatcatcaacaaagacagcgtactgtactcacttcagtctaagatacagaaaaagatcttccgcaatatattcctcccggaatgtgtgtacggatttcgggagaactgctcctatattgattttttgacacctcacatcagtagcaagaataagttttatctgcgacttgacatcaaggacttctttgaatcaatttcagtcgagtacatcaaggatttcttccagtactatatcgacgacaaaatatctaacgaagagaagacgttcatagttaactcaattatcgatgtcacaaccctgaatggaaaatttattcagggggccgtgactagtcccagtatcagcaatttcgcatttagagaaattgacataaggattctcagctattgccgcaaactgaatgtgcggtatacaagatacgccgatgatatgctattcagctccgaaaacaactaccttaactccaagcatttcattattgccatccaggctatcatcaatgacctcggctataccctgaaccacgcgaagaccctgaagtataaaaatgagatttccctgaatggctacgtgattggggctgacattcgtttgtctcgcaggaaactccataaaatcaacgaactgatctttcagctctcgaagtctgatttctacggttttgagaataacatcgagaaataccacatcaagaaccagttggccggttaccgatctttcttgatacaagtgaatcggcacgttgtggacctgccctatagaagacatttagaagagaggattctgaccatagaaaaactgatcattaagcacttcacatga

SEQ ID NO: 12382 - RNA, 903 nt, synthetic construct
  source 1..903: mol_type = other RNA
tgtctgagccagaagacagactgctacagggtgtacagcaaacaaaaaaaagatggcactaggaccatccatgccatcaaatcagactccggtttgtacgtgctgcagcacagaatgcagcagaagtttttgaacaacatctatcttcccgacactgtttacggctttcgggaacactgctcttacatcgactttctaatcccacatatttccgaggaaaaagacagatgtttcttgcgtctggatatcaaggatttcttcggcagcattcgcatcgacgatctcaaggaagcactaaaatattatgtcagcgatgagatcgagaacgctgaccaagaaaaaatcctcgacaaaatgatcgagatcgtgacggtcgatcagaaagtcgtacagggggctgtgacctctcctatgctgtctaatttagtgttccgacagcttgacattagaattgagcgatactgcagccggtttaatctcaagtatacacgatacgctgatgatatgctctttagtggtcggacatcatacattcactcacggaagttcatggccgccattgctgccattatagagtccaagggattttcacttaattactctaagaccctgagggcagagcaggagattagcctcaacgggttcgtgatcggctccgagctgcgggtaagtagaaaaaagctgcataagctcaacgaaataatgcaccgtttaaatagtcgcgaatttgataagttctccagtgactatgagctttatcacgttaggaatcaactggcaggatataggtctttcctgctgcaggttttgcataccgatgagtcggaagcccgcaaatataagattcaaatcaagatagaccgcattgaagcgctgatgagaaagtactgtaagatagactga

SEQ ID NO: 12383 - RNA, 978 nt, synthetic construct
  source 1..978: mol_type = other RNA
atgaagtcttggcagattcataattacgatagcctgatctcagacattctggagactagcccagaggccctggaagaggctttcaaaaatgtagacaagtactacgagagattaaatctgttgaagtccgacaaaaagtcctataggactatttatcgtcttaaggaaagccccgtgagcatcatgcagaaaaatctgcttaatcgattctttagcaacatttacttcccttctaacgtttttgggtttagaaagggttgttcttactttgactatctgaactaccaccagatgatcggcgatgggacatattatctgcgcctcgatatcaacagtttcttcgataacattacgatcgagaactttgaggactctatcacatattacatttcagacgattgcagtgatgaagagaaacagaaaataatcaagacgctcctcaagattacaacctataaaaaccacttcgtacagggctccataactgctccagttatatccaatatagtcttccgagaactcgacataaggatcgaaaaatactgcttcaccatgggcattaaatattctagatatgccgacgatttgctgttttccagccccagcagttttcttcactcagacaggtttatccggatgatcatcaacatcctgaatgataaaggattctccattaaccatcaaaagacactcaaacaggtgggacaattggtcattaatggctacgtggtcgacagtgcagttcatctgtcacgcaataaactccggaccatcaataagattttacacaccatcgagaaaaagaaatcgaaggtgctactgacttcttggggcgcccctaactatagggtgttgaattacctgtccggatacagatcgtaccttatcaacgtgatgaagtactgtgacgaggaaaagaagaacaagttagggaagaccctagcgcgcatcgaagatataattaaccggtactattga

SEQ ID NO: 12384 - RNA, 990 nt, synthetic construct
  source 1..990: mol_type = other RNA
atgaacaacataaccatcaaggataagactgcctttctcgacctgatcatggagaatccagaagatcaggataagtttgatcgagagaaagccactacgtaccgcctgttcaaaataaaaaagcacaatggcgaccgccatatttatgctatcaagcccacttccattatctgtaaataccagcagaatctttacaagaactttctgaccaaactgttgtttccggagtgcgtatgtggtttccgcaaggacaggagttatttcgacttcctggtccctcatatcagcaaacagaacaagcggtactacctgcggcttgacattagtgatttcttcgaatctattcagctgtccgatgtgaaggattgctttcagcactatcttaatgacgatatggatgaggaggtcaaggatgatatttgcaactacttcataaagatcgtgtcatacaagggtaaaatcgttcaaggggctgtgaccagcccagctatcagtaatttagttttcagatccctggacattaggatcacaaaatattgccaaccctttggaatcacatataccagatacgccgacgacttgctgtttagctgtaaccacaagaaaatcttttcatacagcttccagaagtgtattcaggcaatcttgtcggacaaagggtttaccttgaacattgacaagaccctgaagtttaaggacgagatcagcctgaatggctatgtgattggagagagcattagactatctcggaagaaggtcactaggcttaacaaaatcctctttgagctctctcagtctaacttcgatgaactaaaatccgaacgcgagagatatattttaataaatacgctcgccggctaccgagcgttcttcatcaattcaatgcggtatatgatagaccctgtgcagacaaaaaaaatggaaaggaagattcagcaaacagaaaaggcaattgacaaaatccgtgcactccccatccagcaaatatga

SEQ ID NO: 12385 - RNA, 975 nt, synthetic construct
  source 1..975: mol_type = other RNA
atgattgggtttagaattacctccaagtctcaattctttgatgaaatcgtagaaatctctgaggaaaaaatggccctcgctctcaataataaaaaaagcgcctatcactgctacaaaaaagccaagaaggagggttttagaatcatctatgccatcaagaagaacaatcttatctacgaattgcagaataagctgaagaactccttcttcatgaacctgttatttcccgagtgtgtttgcggcttcagaaagaggaaatcgtattatgactttctgattccgcacatctcttcaaacgagcctcgctattaccttcgactggatatttccgactttttcggctccatcgacgtcgacgatatagaggaatcattgaactactacattgatgacagcatatcctcagaggaaaagcagctgattatcaacaacattattggcattaccacaatcgatgacaaaatcatccaaggagctctcacaagccccatacttagtaacttggtgttcaggtctttggacattcggatcgaaaagtactgcaaaatgctgaatatcacgtatactcggtatgcggacgatatgttattctccagcgattctagttatatccataactacaggttccagaatatgattaagacgatcatcagtgagaaagggtttaatctgaacactaaaaagaccctgaagtacaagaatgaaatttctctgaatggatacgtcgtgggaaattcaattcgtctaagccggaaaaagctgagccagcttaacaacataatctatgagatgggcaagaaacagttcaaagggtttaagtccaacaaagagaagtacacaattaagaacaagctggcaggctatcgagcattcctcatccagagtattccatacattaatcgcaacaatctagtgcagataagcaaaaagataaccaagatcgagaatctcataactaaatactgtgctgactga

SEQ ID NO: 12386 - RNA, 981 nt, synthetic construct
  source 1..981: mol_type = other RNA
atgaatagttttcgaattgagacgaaagaggagttcttcaagatcttagattgtgacgaggacacctttacttcagccattaaggacaaagaaaaggcgtacttcaaatataagcttcagaagaagatcggtagcagatacatatacgggctagtaaaagataacctgatctacacactgcagaaaaagatcaatcgcgaaatcttcaagaatatcttgtttcctgactgtgtttacgggttctgcaaacgcagatcttatttcgactttcttgtctcacatatctctaacaaccaacgtaaacactatctccggctcgacatcagtgatttctttgactcaattgagattgatgacatctatcagtgcctgtcctattatatcagcaatgacatatctggtgacgaccgagattacatcctgcaacttatagtggatattacaacgttgaacaaccatgctattcaaggcgcaatcactagccccgccatttcgaacatcatttttagatcgctggacatccggatagaaaaatactgtgagaaaatcggcgtccactacactcggtatgccgatgatatgctctttagctccgagagtagttacatacattcctacaagtttaccaacgctattcaggccatcataagcgataaagggttctacctgaatcgcaaaaaaaccctcaaatgcgagaacgaaatcagcctcaatggatacgtggtgggaacaaacatcaggttatcccggaagaagtacaagtccatcaacaagatcatttatactttgacaaccagctctttcaccggcttcaagaacaattaccaccagtacattacaaggaataaactagcaggatataggtcttttctgattcagtattccaggtatatccaagatgaaaatcagaacaagaagattcagaagaagattgaaaccatacagaatctgattctgaagtattgcgtgtcttcaatttga

SEQ ID NO: 12387 - RNA, 1050 nt, synthetic construct
  source 1..1050: mol_type = other RNA
atggacagttttaagatagccaataaggaggaattcattgagcttattgatgtgtctgaagacgaactgaaggaaatcctgaaaaataagcagaacagctaccacaaatgctttgtgaataagaaaaagcgggattccattagaattatctttgctctggaccagaagtctaacctctttaaaatccagcgagcattgcagagaaagttcttctgtaacttttatttcccaagcaatgtctacggcttcatcaagcaacggaattacattgattatctggagcctcattgctctaggaacggaacacgcaattttctgagactggacatcaaagacttcttcggtacaattgacatcaaccacatcaaggaatgtctgaagtattacattgcggatacctgtgatgaaaacgagaagaagtacataatcgattcgatcgcagagattgtcacgtacgagaacaaattgattcaaggcgcaattacatcacccgtaatcagtaacctcgtttttaggaaactagatataaggattgagcgcttctgtgaaaaaaacaatgtaatctacacccgctatgccgacgacatgcttttcagcgggattgactttgacgtgcataaacggacttttatcaatatgatcgccaccattatcaaagattatggattctccctgaactataagaagactattaagatgcacgaagagttgtctataaatggttatgtgcttgggcgtgatataaagatcagccgaaagaaatatgagtcagtgaattgcctcctctactacatcaattccaagattaacaagatcccgatcagtcggagctttaagtaccagttaatcaacatactcgctgggtataggtccctgttcatacaagtgttaagatacgttcatgacagccacaacaaagaggtcatccagaaaaaaatagccgaaatcgagaaaggcattaacaagatttcacagttcaaggagaacaatattggagctaataaagactacgaagataaaatcctggaggagatctgctccaaaaagtga

SEQ ID NO: 12388 - RNA, 1095 nt, synthetic construct
  source 1..1095: mol_type = other RNA
atgctgcatagggcctccaagcagggagatgacacgttaaaagtttggagagtcgataactacaatgactacttcagcaacatcgttaaagtgcccgaaaaggaattcaagagcaaaatcgcggataatgaaaagaagctcttttactctgagtacattaacaaaaccaagaagaatggtctgcgaaaaatttattgtgtcacagagaactctgacctgtataagatccagaagaacattaagaacaacttccttgataacatcatgctgagtgactcgtcttatggctttagaaaaggccgaagctattacgactttttagcatcccacaagagcttctacagtggaaagtattttctgcgccttgacattagagattttttcggatccattgagtactctttgatagaggacgtggtcagttattacttcgtggtcggggaaaatcttacctcgtcacaaaaaaaggagctgctgcaaaacacactgagttccatgacctatgaaaataaggttcctcagggggccatcactagccctacactgtccaatattgtatttcgtcagctcgacttacgcatcgaaaaattctgccagaatgtggatgctatttatacccggtacgccgatgatttgctgttcagttcatacaacaggaacctacactctgccaagttcatcaacttcatcagatccattctgatatccaagggcttccacataaaccattcaaagactattcggactaagaatctcatcagcctcaatggttttgtgatctctgagaatgatatccacttgtctcgtaaaaaacttgcatcactgagccggatcctgttttgcctcgaaacaccaaagtggataaattccaaagccagcttcgtgaatctgaacatgaaactcaaaaccgagggcgacaaacatctgtttgaggggaagtacgcattgctaaatttcttggctggctttagggcttttatcataccaattgtgaggtcaatggacgacagcaagctccggaagaagcagcagaaatatattgtacgcatcgagaagaccattgaaaaaatcgagaaacttccgcccaagaaatga

SEQ ID NO: 12389 - RNA, 1050 nt, synthetic construct
  source 1..1050: mol_type = other RNA
atgaaagtatggaaaattgagaactacgacgactatttcaactttattgtgaaagtctctgaggataacattaatgaactactgtcacaggatgagaaaaagaaatactacagtggctatattgagataaagaagaagatcgggaaaagaaagatctattgcgttgataaagacagtaaactgttcaagctgcagaagaacattaaaagcaacttcctcgacaatattatgttgtccgacgcctgctatgggttccgcaaagggtactcttattacgattttctctctcctcacaaagacttttacagtaagaagtacttcctccgaattgatatcaaggagttcttcaactgcattgactattcaataatcgaggatgtgattaagcattactttgtggtgggagataacttaaccaagtctcagaagaaaaaactgatccagtatactctgaaggcagtgacctacagaaaaaaggttattcaaggtgctatcacctcacccgtccttagcaatataatattcagacagctggatcttcggattgaaaagtactgtaagtacatagacgttatctacacaaggtacgccgatgatctgttgttctcctcctataatcgttttctgcactcgagggcctttattaatatcatctccaggatcctcaacagcaagggttttgacatcaattatagcaagatcatccgggcgcggaattcagacaaaaatagtgtcagcatcaatggctacgtcataaatgacgaaatccacttaagccgcacaaaacttaagtctctgaacagggtactgttttatctggagaacacaaagtggaaaaactgtaaaaatgacttcgagtccttgaacaaaaaaatgaaggctgaaaacgatatccataattttagcggaaagtatgagcttgtgaacttcctcactggctatcgagcatttatcatatccatcgtgaagggaacggacgatattattctgaagcaaaagtaccagaagtacattgaacgcatcgaactattggtgaagaaactcgtctga

SEQ ID NO: 12390 - RNA, 1041 nt, synthetic construct
  source 1..1041: mol_type = other RNA
atgaaaagatggaggatcgataattaccgcgatttcttcaacaaaatcttaaaagtcgaggaggacgagcttatagcactcctcgaaaacaaaaacaatgtgtacagctcctataagattaagaagaagaaaggccaccggactatctactatctcaaagataacctcgaccttgcgaaaatccaaggcaatctcatcaaaaacttcctgtccaatattatgttgtccgaaagttgttatgggtttcgctgcaatctgaattacatagactttttggaaaggcacacaaccctgtccaatgatagatattttctgcggttggacataagcaacttcttcgaatcaatctctatggaactactgattgatgtgctgagttattacatagaagacagcgaatatgtgacttcagacgagagcaacaagatcgtctattacatcaaggagattgtgacatttgacgacaagctggtgcagggaattgctacctctcccatcattagcaatatcgtatttaggcagttggacattcgtattgagaaatattgccggaagctcggagttgaatattctcgatacgctgacgatttactattttcgtcggagattaaaagcaaaatccacggtgacttttttattggcaaaatagccaagattctgagtagcaaatccttcaaccttaaccataagaaaacgataaaggccgataaggagctttgtatcaacggttacgtcgtgggaaaaaatatccgcatctctcgtaagaaaatgcagaccatttctcgagtactttttttcctgaacagtgttaacatcaagaagaatttgaacttcctggatgagctaaaccataagctcaagaatgagatgaaggataataggatttacttcctcaataagatccagttaatcaactacctgtcagggaatagagcctacctgatatctattctgagatattccgacgagtacttcgggaaacggatcattaagaagatcaacaatatcgagaagctgattctggagctggatgaatcatga

SEQ ID NO: 12391 - RNA, 1044 nt, synthetic construct
  source 1..1044: mol_type = other RNA
atgaagattgctaagataaataacagggagcaactgtacaaaggcgtcctcgaatacgaaaaacgtattatcgacaccgctttaacagattctgccaaaaaacagtactatggcaagcgcataaatattccaaaaaagggcgggagccgaggcatctactgcgtagattcgaatacattcctctacgaagtccaaaagtccttcgcaaagaacttccttaataatattcccaacagcgatgcagcacacggcttcgtgaagggcaagaactactactccttcctcaacgcgcacgtctatccatattcaagaatcagtttcctccgtcttgacataaaggacttctttgaaagcattacgtcagaaatggttagaaactctctggactattatgtcagtaatgacgatccccgaatgcatgatgaggtgcttaatattatgactgacatcgtatgttacgaagggcgcttgatccaggggtccccgacaagtcctgccatctctaacattgtttttcggcctgttgacatcagaatcgagcgctattgcatgtctcagggagtggtgtacagccggtacgcagatgacctgctgttttccagcattagcggaacccagttatccgagagatttatatctggtattaaggccatcctgaaggataatcattttaggttgaacctgcagaaaactattcggtctgtggattacatctctctgaaagggtttgtgatagagggtcaaattaggttgtcaaggaagaagaccaagtcaatcagacaggtgctgtatttcctagagaaaaatcgctatgagaataccaatgcctggatgtcgtccttcaaggaggagatggagggcctgggtaacgactccgccatggacatcaacaactcatatagtctgaaaaactacctcgccggaatgcgggcttttatcatcagctccatcaaagagagtggagatatctattacaaaaagcgggctgcgggaattatcagcaggatcgaaaaacagatagacgagattgaaaacaaggggtga

SEQ ID NO: 12392 - RNA, 1056 nt, synthetic construct
  source 1..1056: mol_type = other RNA
atgggagataacaatgggatgaacgggtggaacatacaggataaggaagacttctacaatcgcatcggtgtgaaaactgacctggagctcaaatcctatgtctcttttttagccaagaacaagtactacaaacaatcagtagagatacccaagaagaatggtaccaggctgatctacaatattgataagactagcgaactctaccgtatccataacaacctaaagaaacagtatctcgacaggatatacattagcgacgctgcctacggctttgtgaaaaagcgctcctattatgactatctggtaccccacctgaacaagtacaagaatcgccattacatgagaattgacatctcttccttctttgattcaatcaaatccgagcacattgagaatgcgttcggcttcatacttaaagaatgtaaggacagggactatatcatcgagagattaaaagagatcttcctgtacaacggaactttggcacaaggaacaccaatcgcacctgctgtttctaacattgtgtttagagagcttgacattcgtatagagaaatattgcaacaaacggaaagtcgtgtatacacgatatgccgatgatctgctgtttagttcggatgacaatacggtgatgcgcaaggatttctaccgggggataagaaagatcttgggctctcggggcttcaacatcaacgaagataagaccatcaatatgtccgatagcattgttatgaatggaatcgtggtcgggaaaagtattcacctgtcaagaaagaagcttaaaccaattcgaaccatgctcttcgccttgaagctggttgagaaggaaaaagacattgaaaagtgtctcaaatgcatcaacaacacatttcagaaggctaaaattgataagaccttcaatagcgcaatcgacgtgcggttttacctgtgtggctataggagttacctaattcagatccttaagtattgcgaagacatcaatattgagaacaggttgaagaagatcataaatagcattgaaagctacctgaatggtcctaaaaaatcatttctctga

SEQ ID NO: 12393 - RNA, 1008 nt, synthetic construct
  source 1..1008: mol_type = other RNA
atgtggggaaaaaagacattcttcgaacctaacccattcttcaagcgccggctccagtggctgtatcgacagctcttaccattgtacgagccgcccgcatgcgcctttgcctatatcaaaggccgcaattacgctcaatacagagcagtgcaccagaagaatcattatatctacgccatcgacctcaaatcctttttcaacagcattacaacaccacaggtgaacaacgcccttcaatccttctgttcccctgccgtggccggttatctagcagacgcgctcactgccgagggtgttctccccattgggtttcctactagtccactgatatctaacatagtcttcaagaacctggatgagaaaattgtggagtttgcaaataaagaagggctgagctattcaaggtacgctgacgatatcctgattagctctaacaagaaaatcacaacccagaatctgaatgcctttgtatacctaatcgagaagaatggcttcaagatcaacttcaagaaattcaagaaggtggataagaacaccaatctgtctacgctgagcttgaaagagcgtagattccttaatttgcttctgcaccagtggcagaaaaaaggctacatggacaccaatctctggtttctggcagctcataggaagagttatgccaaaccgcaagatgctttgagtaacttccttcgggcgaagatttttccctttaaggatgacttccctaagctgtgggctcagtttgagagaatctctaagcagtatccctaccagactcaaaaccaaatggaggaaaatagcatacctgccactgagaaaacgcagattatgaaagaacagcccaagtcaccaacccagtacgctcaggcacccgaaccagttgttgtcagtgctactacaaacgcgaccaaactgaccttttccgcctcgcggcaggaattagaacagtaccgaaggacccctgtctccggatcaattgacaattttttcaagaaccactgccaatga

SEQ ID NO: 12394 - RNA, 1509 nt, synthetic construct
  source 1..1509: mol_type = other RNA
atgaagaagctgaacagctataaagtcaagaaactcattgacagatacatgacttcttctgaagagctcgggtcgatgttattgcgagcatccaatctgagcagacacatactcaacaccattgatatgaacaataccgacaaagcaacccataaattcctgtcaaattacaaggaggagatagacgatatccaggagcacaattcgtatagcctcagcaagtttagtagctctaaactcggactgagtaataggggtatcctaagtacttccatgtctctggctggaagttattcaaaatgggacgctcggcattgggtcagttatcgcgaggatgacaataggaagacacagttgtataaagaaggatcagagatcctctccccatctccatccgggatcgagtttgactttaacaacgatgtgttcatgggcgaggtaatcggtaacattaatcaattgatgggagtgattgggaagatgtccaattccgtgatctttcgacatcgattcgtggatggccggcgcatctccatgataaatcccaagctggaaaaaagcctgcgcgatattatagaggcggaatttaagggctatgctaagaacttctataagatgtacaacagctttcacctgaatattggctcaaatagggagcacgtgaccgggttcattaagggtaaaagctacattgatcatgctagggcgcacttaggctgcagaagcgccgtctcaatcgatatctcaaagttctacgataacatctcactgctcaacatcatcaacaacaacctcttctacaattcccttttgtcttttttcaagcaggagacggggctgccattcgaagcatcttcttttaaggaaggatatcactatgatctcctgtccaagctttttggacttatgaatgttcaattcgtgggcttgatgacttttctaacacataacggactgcttcccaccggtgcccattactcccctaacattagcaacctgatattatctaacgtcgatctgcacatggtggacgagatcaagaacatcaatagtaacctaaagtacacaagatacgccgacgatatctgtattagttccgacaaagacaaggatgagaatggggaatactacttgaatatggacttcattaagcggctggaaactattattaacgatcacggctttcacctgaattacgacaaaacaatgattatgggcgccagcgaccgtaaaaaaattgccgggataattcttgaccatacggcaaatcctcccagactcagcatcggcagtaggaaaaaactggagctgcaggagcggttcaatggtaaagactggaaggaacttaccacatctgacataggaaccatcaactgggtgaagaccatcaatgtgaaccagtataacttcgtatgctcggggatcacaggcgaacgcttaatgcctatcccgcggggctgtgaacgtgatcccatcacttcactggtcgttgacgccgttcctttttga

SEQ ID NO: 12395 - RNA, 1296 nt, synthetic construct
  source 1..1296: mol_type = other RNA
atgaaacgtctggccttgaaaaggacccgatataaaaagctgaggaagcagctctgtataagccggctgccaaagaataacaatgatctttccgcggtgtcttttctggctctctacatcgattttctcaagttatacagatcaaccctgatactgtgctgtagtatcgtgtattctgacagcattgcgattgagatctccaagaaaaaaaagaacaaggacttcttcaaccaacatgatatcgctctgtttgactctctgtatctttccataatcagcgactacgatctctacaagaaagacctgaacgaaaaaaacagagctgtggtggttgcacggatagatcgcaatagtaaattattgatgccggtcttcaattccctgtttgagctatttggaagcgtttcaaatacgtttatctttcgaaacgtggtgattaacaatcggcagctgtccataatctcggatagcattgatgccggtttgacctaccacattaagaagaacaataaagccatctcactctttttctccaggtattatagcatcttcgttaaccattactcactaaatgacaatgtgtatgggttcattaagaacaaaagttgcgttgataacgccaactaccatcttgacaactcacccgccagcctcattaacatagacatcaacaagttcttcaacaattgcactgtggtcaagtgcttgaagaataatgttttcaccgacactatcgacctgtttgacgcctcagtcgatacaaaaatcgccttcagcttcggtattatttctcttctgggatactgtacacacaatagtgtcttccctactggcgcatcgtttacacctgtattgagtaacatcatgctaattccagtggacgtcgctatcaaatcttacctgtccgaaacctttgggaacaacgtgtgtaatattagatatagtcgctatgtcgacgacatatctataagctctgatcgcgcgaaaatcaataaatcttacgtgctgacaatcgatacaattaagtgcattgagagtatcctcaacaattacgggttctatgtaaagtattccaagaccagcatcgcaggccccggcgataaaaaatccgtcaacaatattatcctcgacaataataaccacaagttatccattggaacggacaagaagcttaagtacaagactattttctcaaagctgtttgctgatgaagagcacgactatgtggtagcaaatctgccctacatcaaggatatcaacaaagaccagtacgattacatcactgagcagaaatga

SEQ ID NO: 12396 - RNA, 978 nt, synthetic construct
  source 1..978: mol_type = other RNA
atggattacaacaccgtgattactctcctcggccatgataacgaaagctggcaaaatctgattgcaaatggtatccgctattctgtctttcagctcccaaaggccaataagaagctgcgtctgatagaggcaccgcagggcgagctcaaacgcacacagaaatatcttaacaacatcctgtacgccgagtaccaccctcagagccccgactgtgtccatggatttattcgaatgaaagctgctccacggaacatcttgtctaacgcaaggactcacctggggaagaagtacctaatcaacattgacctgaaggacttctatcaccagataaccactgagagaaccacagacctgctttggaagcggtttcccaatcttctgcccaacgaagtggacgaattgaacaaaatcgtggtaaaggacgatagactcccaatgggggcccctacatcaagtgttttatcaaatatggcgtttcaagaatgcgatatggcacttatgacgtattgcgaccagcataagattgtgtatacaagatatgtcgacgatctgtccttcagctcgaataaacagatcaacagcgccatcttagaaggcatctacaccataattaagctgaatgggttcagtgagaatcctaaaaaggtaaaacactatggcgagtctgatgttaagatcatcaccggaatcgcgatgcagggactccactggcatgtgtccgacgacatgaagtcaaggttggaaaagaatatgtccgagtaccggaagctacgaaaactgattaacaatctcaaattcctgggcgtggaagctaaggccaaaacgaaactgaaaactttgaaaagggctattgccggtcaattagagtttgtgaaacagatagaggggatcgattccgatttctaccgctctatgaagaagatatggaagcaaagcgatgccgataccgtcaacgttgacctgagtgtgtacatttga

SEQ ID NO: 12397 - RNA, 993 nt, synthetic construct
  source 1..993: mol_type = other RNA
atgcatgccctgtttaaaaatgaacctgatcagctggcccagagcttgaattggcccgacgactaccaagatgtgatcaagaagcagaattaccatcagttctcaatgccgaagaaggatggcactctgagagcaattacagctccaggtaacaaactcaaatttctgcagaaaaccctttcccacgccttccagctgacctatctgaacaagatccccgattgtgtgcacggatatgtgccaggcgacatccatccagaagttgggacccgacacattctcagcaatgcccaggttcactttggagctaaatacttgctgaacttagatattgacgacttctttccgaacctcgatagtcttcggatactggatgctctgcgctactggtatcccgaaatgccccaagctactcaagagctgttggtggggatctgctgctacaacaatcaacttcctatgggggccccatcttcacctgtcttgtctaacatgtgtgtgcaccagatggatctcgccttacttacactatgtgctcagcaccaggtcacctattccaggtacgtggatgatatgtccttctcaagctccagtgataatctgctggccctggagcccgctttgatagaagcactccagtctttcggctttactatcaaccaggcaaaacgtatgcatttcggacccgagggccctaagattgtcaccggccttatcatggacgagacagacataacggtaaatgacacattcctcgacaatctaaacgagtgcattaaggaatattcgcagctcagatggctctctaggcagctggagatggacaagaagtggctacaatccaaagttcggttcgcagcgcagagcattgagggacagctggcattcttaagtcaaatccagggtgccgatgacgcggtataccaaaagtatcataggaagtttgacaaagcccagagcatgcgccctccaaactacgacttttatttttga

SEQ ID NO: 12398 - RNA, 1017 nt, synthetic construct
  source 1..1017: mol_type = other RNA
atgaatatcctgaacttacagaacgcgtctaatagagtgcagttttgtaaagtcctggctatttccgaggacgccctgaaaagcgctctggcaaatcacaagtactataccttcaaagttaccaaaaagaacgggaagctgaggaaaatcgaagatcccaacgatgagagacagtatgtgcagcaacgtctgagctttgagctctacccactgtacaagacggttctgccaccttatgtacatgggtatatccccacagctatttcccaaaacggctcaaggtctatcttatctaatgcagaggcccacctaaattgcaacttcatggtgaacctcgatctcctcgatttcttccatcagatcaccataagtaaaattcgaggatgtctgagcaaagtctacaagatacgaagtctcaacataattgacctaattgtcaagatagcatgttacgaggggcggcttcctatgggttccccatgctcaccggtgttgtccaacatgatagtcattgacttagatggagccctgtttgactattgccaggcccagaatatcacttacacacgttatgtggacgatctcagcttctctagcaagcttgaaatcaccggcgtccagatcgagactctgaagaagatcattctcaatgagggtttcctgctgaatgaggaaaaatttcgcatctttcaccagaacgaccccaagaaagttacaggactggttgtgcatcaaggcaaacttgatgtgtcagatgactaccttaattccctctcgagaaacatcaaaaagttgaagcggattaagcggacataccagcacatgagaatgcttcatcctgagttgaagactaatctccagtcacggtaccgcctgatcaagagtagtgtagcgggccaactatccttcgtgcaaaggattttgcagcccgaagacgaaaggtgccttgccttggccgaagagttcgatgacgctcgcacctctagcgaagtggtggacctgcacctgtatttttga

SEQ ID NO: 12399 - RNA, 1692 nt, synthetic construct
  source 1..1692: mol_type = other RNA
atgtattctaagaaagtgaagacgcctagtgatttcctccttctaagcaatgagcttgaaaatatccgagactttagcggactggccgtcctgctcggcgttaaccaggactatttgctaatgaatatcctcccgtcttacacttgtttcgagatcaaaaagaagagcaccttgagaaaagtctactaccccgagtactatgtgagtgaaatccagcgcacattaaacttgtacctgactgcttcttacctcacaaactattatctgccaacgcaactccctgtgcactcatatatcccgagaattaccctcacagaacaatcagattccgatatctgtcgtaataataaatccaacgccgaagtccacttcgggtccgaacgcattctcaagctggacttagccaacttcttcccatctatcaaatccatccacgtgagggacggtcttcggcgactgctgcccagactccctcagtattgtattgagtggctggtccatctgactacatttgagggttttctgccagctggcgcacctacttctccaaccatttccaacattattctctacgacttcgacaaattcgctaatagcataaacggaatcaagtatagtaggtatggagacgacctgaccttttcagccattgatgggcgcataaatctgaagcaggtagagcgagacgtgaagattgagctggaaaagtggcagtttcagatccaggaggccaaaacctttttccttaggaagggccagcggctgcgcatcacaggagttgtcctgaatgagaagctcaatattagtagggagtaccttaagtggttacgcgctgtagtatactcctgtgagagcataggtattgagaaagcagcaacgaaatatggcgacaggtactttgagaaaatgttgaactccacaaggaagaagtaccgctatatcggggtctatgtggataaaggtctgatcaaaaaatgcataaccaacaaagagctcgtctccttccttaaagccagtctgctgggccatataagctacgtttcctccgttcgtgggaaggatgatgtgtacgttcagaacctgagaaatcggtttatcaattgcctgagggaagaaggcttggaaaagaaggagatcgaatttgaagcgaagtcatttaaggagaacgagaatctggtgtatattactaacgccacctcacaatcggtagtgtactatgcctatgtgttcctgaagtctgctaagttaagtgatgatgacattaatcgacttcggaagcacttctcttataaagacagtagcaatatcgacttcaagaaaattaaggagaacttcatcaaccagtcaatttacttcctagagctgtacaattacatgttttaccgggaccggtttaagttgttctacgaatcactatcggatgatgaatggaatcagctttttaaccgtgaccagaatttcgcgaataagagaacttatcccagatggatataccaccttgattttaactgctctaacatcagaaacaactataacgaggaaggcgtgttccatcccaatagcggagtgttttttgaagaggagaaagcaaaccaagtgtacaacgcatacttgttggaaaaaaacttcctcgatcagttagggatgcggacctgcctgatctgccaaagcaatataagcgagttcacatga

SEQ ID NO: 12400 - RNA, 981 nt, synthetic construct
  source 1..981: mol_type = other RNA
atgaaaaacaagagcgccttttatcacttcgcaaagtctttcaatttggagcaggaggacctgtacctggtttactccgcacccacctatcatacctttgagatccccaagaggaatggcgatctgcgaacgatctatgcaccagccccaaacctaaaaaaaatacaacgcaagatcgcagagaagctttcaaagtactactcggagagcttacctgctagcgtaatggggtttgtgaagacagccgcctggaaaaaaaaacgggacattgtgagtaatgccagaaagcacattaaatccaagcacctgataaatatcgacatcgagaattttttcccttccataaaaaccgaccatgtggctcgtgtcctgaacgaaatcatcaagctcgataacgaaggtgttcagatcatacggcaggtgttaatgaaagatgattccctgccgcctggctctccagctagtcctatcctctcaaacctcgtctttaagcccattgacctcgccattgaacacttctgtaagggacagaagattatttacaccagatacgtggatgatcttaccttttcctcaaagaaggaaatcacaaaaactcagatttgcactattgcggacattctgacaaaatacaatttcagggtgaatgaggacaagactgtcatctataaaaagaacgacatcaaagagatcactggaatcgctatagtagacaagaagttgaccctatgcgaaagcacaattgaggagatcaagaacaacattttgtactacaaggaatggaaacagcagatcctgcaacaatatggtcccaacgagtctgttaggaagaagattagtcatatgcagcggagcattaaaggccagctgaatttcgccaaacgcatagatggggagaaaggagaaaagtataacgaactcaaagagctttacgaacactctctggatgaaaaagagttcgcgttcaaggtgtatatctga

SEQ ID NO: 12401 - RNA, 1200 nt, synthetic construct
  source 1..1200: mol_type = other RNA
atgactaatgcccctgacagtgccccccttactaccccttcagggaaaaagccaccaggactgtccgttacactgaccgtcgaaagacaccggctcctgcatgtgattcttgaccccgcagcctggaggatgtttcgggaggccctacaaacccgcggtgcttggagcagacgtggacgaattctaaaggcgacgttggtcgccgaggattttcgcgggtggtcaccgaggccttacttgccacctgactcgcctgactggagtgaaaccgtcatggaactgcaccccccaaccgaaccggctgcattcgagaggctgatcgcaactgcgatggagcacttccgaatcctcgagcaggaagacgctgctgcctttgatcgcagtctgagaaacacatgggagaaggttaggcgggccgcgatggcagctcatgctcttgcaccatctcagctgccccgcccctttccggtgtatgcagctcggctggcggccatccccaagaagaggccaggagagtttcgggttatagccgtccctgatagggcacaactggctgccgggcgatccttgctgccctatctgcactctcgactggatcccgccctgcctatccacggcttcgtacccgggcgcaacccagtgactaatgcacagccccatcgcggcttcggatggtccctaactatggacctggccgatttcttcgatcatgtaacagccgacaaactcgtggacgccggattgccacgtagcatcgctcgcttgattacagatagagatggcgtggcccgacaaggctacgcgacaagccctgccgcaagcaatctcgcttttcagacagtagaccaccggatacttgctcttcttgccgcagaatgtcctggcgccgtgtatacccggtacgccgatgacctgacgatttccgccaatgacagagaggctttaatccgcgtgcagcggaacctcgaagccttaattgccagcgcaggcttcaaagtgtctgcgcgcaaaacccacgttctcgcggctagggcagggagaagggtggtcacgggtgtggccgtgggtgaaactgatctcagagctacccgttctgccaggagacggctgagggctgctgagcatgcagataacaggatgcaggccagaggcttaagagagtggtcactcctgaaagcaccacgtgacaagctcccgtga

SEQ ID NO: 12402 - RNA, 1146 nt, synthetic construct
  source 1..1146: mol_type = other RNA
atgaatgactatatcacccttgaccttaaggggcgtagtgagaatggacggtctaggcaagtccatctgacaggagagggcctaagagaattcggagaaaaacttgaaaagaatggtttgcagaccgaagcgcccttaattgttagggcactttttctgcggggtgaagccggaaacttggactcccgcccctgtttcaacggtaatggctgggacggcaatatgctggaaattcacctggcaccgggtatcggcagcaaagtggccgaggcaggggtcgaggcttatctcgacgtgacattcgaccggaaggccgatgggctgttcgataggaaatggagagccgaaatggccaaggtgcggggaaactttccagggtttccaggggggggagtagccccttttccagcattcgatgcccccttggtacggatccccaaacgccgacctggcgctttccgcctgatagccacacccactgcagaccagaaaagagcggcaagatggctgctgcccaccctggataagtggattgattaccggctccctatccacgggtttgtgcacggccgcaaccctgttacaaacgcgaaagttcatataggatttcgattcagcctgggctttgacctcgaggacttctttgatcacgtcaccgtaaagaagttggtggccgccgggctgcctcgttcattagctgtggccgtgaccgatggggcaggtattgcccgtcagggatacccaaccagcccaactgcggccaatattgcttttcaggaggtggacagagctctcctccgaactgtggcccagctggaccagggagttgcttactctcggtacgccgatgacctgacgttttccgcagattcctggagcgtgttgcgcaggttaaggggcctggtcgaggagctcgttccacgatatggcttccggatctcacacaggaagacgactagttggtccgctttcgccggtagacgtatgatcacaggcgtcgctgtgggcaaggatggagtgtgcgcaccccgcgaaatccgcaggaggctcagagctgctcgccatcaaggccgagcacctcaggcctctggcctagctgagtggaacagagtccgggagccgcatgtcttcaggagatcggattga

SEQ ID NO: 12403 - RNA, 942 nt, synthetic construct
  source 1..942: mol_type = other RNA
atggcagccaggtttgcacgagggccgcaaggcttacagagcgatccatcccacctgaaaacaacagggtcccatactagtaaccgcgcggctatttgtggactggtcgacgtgttcatagttgaattcggaatgcaagtgctgcgcatcccgaagggtaacggaaaggtgagagtggtttacgctccttctgaagaggagaaggcagaactgaggtccctgctccccgctcttgtgaaaattgctaagcgacgatgcaatctcgaagtcgtacatggctttatgccaggtcgctcgcctctgactaacgccctccctcacgtgggatatcagtacactgttaatatggacctacaggatttctttgacaccgtcctcatcacacatgtcatgcacctcatcccaccccagattttggccaaggtgatgcggtatggcgcagcccgtcagggtttacccaccagtcctcttgtggcaaatattgccgctgcccagttggactgggatctgataaccgccttgcccgaggatgtcgtttacacacggtatgccgatgacttatcattttctttcgatgaccagaaactgaccaaggagctacctttgctggtaaaaaagatggtggaggaccacggcttcgctgtcaacacggctaagactaaagtgcaatgggcaggggcggggcgcagaatcatcacagggatcgcggtagaccacagccgggtttttgcaacgagagaagtgcggaggaagcttagggcggcccatcaccagaataacaagggctctaaagccggactcaccgagtggtgccggctgaaactccccgctctttacctggccgagcagaccagacgtggcaagaaaagcaaatcacaccatagggccgaggaaccagtggtcgaaaagagcaataaggagaggcgctccctgagactgtga

SEQ ID NO: 12404 - RNA, 1293 nt, synthetic construct
  source 1..1293: mol_type = other RNA
atgaaaattttgaagatcccaaagaagaacggcaagtatcgaactatttacgcccccgatgcagaggaaaagagggcactcaggggcatcgtgggaatactgaatcaaaaatgccagcatgtttgcgacccagccgctgtgcacggctttatgcccctgaaatcaccagtcaccaatgcattggctcatgtcgggagaaagtacacagttagcttcgacctcgaagatttctttgatacagtgaccccagaaaaagccagtaagtgtctgaccaaagagcagaaagagttggtcttcgttgatggagccgccaggcagggactgcctacatctccagccgtcgccaatctagcagctaccgacatggatcgcgccattcttaagtggatcgaaaagtcaggaaagtccgtggtgtatacccggtacgccgatgatctggctttttccttcgatgaccccgagcttattcctgtgatacagaaaaaggtgcctgagattattaggcgctccgggtttcgggtgaatacagacaaaaccactgttcaggccgcggtcgctggtcggagaataatctgcggtgtcgcggtcgatgatgaaggggttcaccccacccgggaagtaaagagacggctgagggctgctaaacaccagggaaacgagttggaagccgctggattagaggagtggtgtaaacttaaggtaccgtctggcaagcgacaaaaggcaagggagactacggaggggctcgacgagttaagaaagcattggaagctaaggaagatcgacatggcaaaagcagtgagccgtaaggtgatccccgaaaaggacctgggggacaattgttacattacgaacgacccagcctattttatgggaatgtctacttttaccactggctggaaaagctgcatgcggatggacggcggggagtaccgcaaaggtgtgatggcttggctcgcactgccgggtactagcgtagctgttttcctttcggatcgcacaatgaacatcgcgggcgttgagcgccgtaggatgagagccagatgtctggtccacaagctggagaacgggcagctggtgtatgaccgactctacggtaaccccgacgatacacccgtgctggtaaaaaaattagaagaggccggcatccggcctatacgcgagttcgcagggaagggcatttacgtggaaggagacgtccctgcgagtatggccatgccttattgcgacaacctctgggaagaaaaaatcaatatcaagtccggcaaacgagtggtgagattctatgtgtga

SEQ ID NO: 12405 - RNA, 1296 nt, synthetic construct
  source 1..1296: mol_type = other RNA
atgaagattgtgcagatccccaagagaaatggagagtacagaaccatttacgtccccgataagaaggaaaaacagaaattcaagaacctattgggcgagttaaatagaaaggccaagaatattctgtcaaatgcagttcatggattcgtccccggaaggagtccggtgacaaacgccctggctcatgttggttacgagtacactatatcgttcgacttagaggacttcttcgatactgtgacacctgaaaaagttagcaagtatctcacaaaggaggagaaggaaactgtcttcgtggatggcgcagcacgccaagggttgccgacttcccccgtggttgccaacttggctgctgcggacatggataaagctattctgaagtggatcaaaaagacccagaaaaatatcgtgtacacacggtatgccgatgacctgaccctctcatttaatgagccagagctcattccagtgatcaaagataagatccctgagatcgtcaaacgaaatggcttcaagatcaacgagaaaaaaaccagggtccaggccgctattgccggcagaaggataatttgcggaatcgcggtggacaaaaacgggatttacccaaccagggaagtcaaaaggagactccgagccgccctgcaccaaggaaaaatacggcaggcaaagggtctggaagagtggatgaagctgaaacttccaaactcagagaagaaggaagagaagataaaacggattgaggaagcgaaggtcctcatcgaactgtggggtattaagaaaatagatgtagagaaggcactccgggagaaagctatccctgaaatggacctcggggataattgctatatcaccaacgaccccgcatatattttcggcatgagctattttactacagggtggcgcagctgtatggctcctgacggcgggtatggaaaaggtgtggtgacctggatgatgcttagcggcacatccgtggccgtgtttctgtctgaccgtaagaaggctacggggtccgtcgagcgcagggtaatgcgagcacgctgtctggtacaccgcctgcgtaccggcgaactggtatacgaccgtttgtacggcaaccctcaagatatcgagtttctgaagaaaaagcttgaagagcacggaatcaaaagtgccagagaaatgcccaaagacagtaaactatacgtggttgggaacgtgtctcggtctttgcctcagccatattacgatacgcttcggaaggaaaaggtggttctgaaggaatcccagaaaaaggcctatcgcttttttatctga

SEQ ID NO: 12406 - RNA, 918 nt, synthetic construct
  source 1..918: mol_type = other RNA
atgagacggatattaatcccgaagagccaccggacctggagaaccatctatgttccaggacctgcagagaaagcacgactgcgtgggcttgtgcccgtgctccataggctcgagaggtccgccgcagaacgtcacggaactattcatgttgcccacggctttgtaccccacagatcacccgtcacatgcgccctggcacatctcaactgcgcctggacgctaacagcagacttggccgattggttcgaccacattcacgagtcacagattgctcatggaatcgaactggggggcggagatcctaacgttgctgcgcagctctgtgtggacggggcacctcaacaaggactgcccacatccccgatcgcagccaatctggctgctattcccatggatcggtggatcctggatcggctccctcctgatgccgtgtatacaagatacgcggacgacctgcagctgagcttgcgcaccgctccacacgacccacaggccatcgtaggtatactcgaagaggccgcctctcacatgggctggcagatcgcgcctcataagactcgcatttacgatgcgcgaaggggtcacaggataatcgtgggtattgctgtcggctctcggtcgatcgctatacctcggaccaccaggcgccgattaagagcagccaggcatcagcgaccccaacatccgcatacacagggcctggaagaatggtgtagactgttgcttccacgcgctttgaggcctcgccgtcgactacgctttgagcaagctaccgacactccaccagccgggctttcctccctgagtacgccctcttcaagaattagtcacgccggcactatcgagaggagccagcagcacaaaccagggcttcgccgggtgttcagattcagcgtccggaatcagagcagtccctga

SEQ ID NO: 12407 - RNA, 972 nt, synthetic construct
  source 1..972: mol_type = other RNA
atgaataatgactactccaacactcagggcggtagtgtcaatgataaccagtggaaggaagacctggatggcatatggtcgataaccctgacaccaaagttgagtaacatttacaacgtactagcctatggggaatggctttccgatcccaataaaatagaagccctgagcgtcaaaaaaattcacgtagacactggtggcaagaaacggttgatctactcacctaacatggattctaagggattctatcaggccatcttacctaagttaaatgagacgttcgagaagatggaggagcgagctgtggcgtatggattcgttcccaagagatcctgcgtcgaccaggccctccaacacgtgaactatgcatacaccatttctcttgatatcaaggacttctttgaccatgtgaagattaaacatgtgaagggtctgatcgacgaggaacttatcccttatctgtttatcgatggggccgctcggcaaggattgccaacatcaccgatggtttctaacatcgcatttaacgccattgaccttgaaataatcacctttctggaagaaagaatgggctttaccactagcaaacccaaagctgagcgagacatgttcttctgggacctcgacctggatttcgaccaagaacagaaacggtattatgcatacacaagatacgcggatgatctctctgtcagcttggatcagtacgaggacattgcacgcgttattaacggagtgcagcgcattctcctcaggcacgggttcgagctgaatgcccgtaagacgaagatcctagactccaataatggcaggagggtgatttgtggagtgggggtcgatgaggagacagtgtacccaactcgcaagaccctgaagaaactgagagctgccaaacaccagaagaacctgtcaagcatgtttggccatagggcttggatctacagtatcgataaaaagaaacccgtgcggtga

SEQ ID NO: 12408 - RNA, 951 nt, synthetic construct
  source 1..951: mol_type = other RNA
atgaacaatgattattctaataacgaaggctcttcagtaaatgaaaatcagtgggaggacaacagcaacggggtctggtctattacgctgaccccaaaactgagcaaaatatacgccgatgtggtctggggggagtggctatcagagcctgggatgatcgaagtgctcaatgtcagaaaaatacatgtggatacagggggtaaaaagagacaggtctattcccctgatatgaatagcaaggttttctatcaagcattgctaccaaacctgaatgaaaccttcgaaaagatggaggagcgcgccgtagcttttggctttgtccctaagcgttcctgcgtggaccaagccctccagcaccgcaactacgcctacacaatatcccttgacatcaaagactttttcgatcacgtgaaaccaaagcatgtgaaaggtttgattgacgaagagctgatcccctatctgttcattgatggagccgctcgacagggcttacctacaagccccatggtttcgaatatagccttcaacgctatcgaccgggagattattgcatttctggaggacaagatcaccctgatcgcggacaagccgaagtatggaggctcatcttggggaggcgaggagaagaaacgctactacacttacacccggtatgctgacgatcttagcgtgagtctggactcctatgatgacattgcgcgggttatcaacggagtacagcgtattctcctccggcatgggttcgatttgaacgccaggaaaaccaagatcttagatgcaaaaaacggcaggcgagtcatctgtggcgtgggtgttgatgtggaaacagtgtaccccactagaaaaactctcaagaagctgagggccgcaaggcaccagaagaatcttagttccgtgtttggacaccgcgcttggatttacagtatcgacaagaaaaagcccgtgagatga

SEQ ID NO: 12409 - RNA, 951 nt, synthetic construct
  source 1..951: mol_type = other RNA
atgaacaacgtttactctaattatgagggctgtggcgtgaacaacaatcagtggaaggaagaccaaaacggcgtatacagcatcactctggcacccaagctgtccgagatttacgctgatgccgtgaaggatgagtggtttttcgaaccttcaaaatctgacaccttatcagtcaagaagatcaatgtggacaccggagggaaaatccgaaagatctactcacccgatatgcagagcaaggtcttttatcaggctcttctgccaagtctgaatgaggcctttgataagatcgaagagcgcaccgtgagctttggattcgttcccaagagaggttgcgttgatcaggcattgctgcacctgaactacgcttataccatctctctcgatatcaaggactttttcgaacatgtgaagataaagcatgtgaaagggttgattgacgaagagctcatcccatatctgtttattgacggcgcagcccggcaaggactacccacatcccctatggtcagtaatattgccttcaatgccatcgatagacagattgtgacattcttggaggacaaaattggacgggtggcctcgcgccctaaagacgaattcttcttcgaccttgaagatgatctcaagtgctactgctcctacacacgctacgcagatgacctgtctataagtctaagcctttatgaggatgtcgcgcgagtaataaacggggtgcagcggattctcttaaggcacggctttgagctcaacgctaggaaaactaaaatactggacgccaaaaatggtcaccgggttatttgtggtgtgggggtggacgaggaaacggtatatccgacacgtaagactctgaaaaaactgagagcggctaggcatcagaagaatctttcctccatcttcggccacagggcctggatttatagcatcgacaaaaagaaaccagtcagatga

SEQ ID NO: 12410 - RNA, 915 nt, synthetic construct
  source 1..915: mol_type = other RNA
atgaatgacaaccagtggaaggaggaaattaatggtgtgtggtcgattaccctcaccccaaagctaagtaaaatttacgcagatgctgtatggggcgaatggctcagcggagacggcaaaagcgaggccctgacaatcaaaaaaatctgcgtggacactggaggcaaaaagcggcagatttacagtcccgatactcatagcaagctgttttaccaagctttgcttccgaacctcaacgagacgttcgaaaagatggaagagagagctgttgcctttgggtttgtccccaagcgctcctgtgtggaccaggcccttcagcacatgaactatgcatacaccataagcctggatatcaaagatttcttcgaccacgtgaaacccaagcacgtgaaagggttaatcgatgaggagctgattccttacttgttcattgacggggctgcgaggcaaggtctgccaacctcccccatggtttctaacatcgcctttaatactattgatcgggagattgtgaagtatatcgaaggaaaaatcggcctgtccaacacaataaagcagacggacgacttctttatttggggcgatgaaaatgattggaagtatgcatacaccagatatgccgacgatctatccatatctctgaacgacttcaatgagatccctcaggttataaatggtgtgcaacgcatcctcctgcggcatggattcgagttgaacgcaaggaagacaaaaatccttgacgcgaagaatgggcgaagggtaatctgcggggtcggcgtcgatgtcgaaaccgtgtatcctactcgtaagacattaaagaaactgcgcgccgccaggcatcagaagaatctctcttcagtctttggacacagagcttggatatactcaatcgacaagaagaaaccagtgcgatga

SEQ ID NO: 12411 - RNA, 1935 nt, synthetic construct
  source 1..1935: mol_type = other RNA
atgcatgagttaaggatcaacaaggggaatggaaagtttcgcagcgtggtagcggttgggaaagaggagcggtatttttaccgcgaactgctcgagaaccaactggaacaaaccctaactggccatcttaaggaaaatggcctgttcaatgtagtccacggccggaagtattctaatactgtggcaaacgccatcccccaccagcgatatcagtacaccctctctgtggatctgaagagctgcttcgatagcatgaccagagacgtagcagccaagaacggttttcctgatctgccggaggactgctttgttgctatttctacttcctctgagcccgttgctgcccaaggcctgccaacgagcactgtcatctgcaacctactgctggtgaaaaccgacataaagatcctgcacctcctccataaaaccttcaagggagaattcgcctacacccgctatatcgatgacctgacaatctcgtttaactcctttaacgaaaagaaatacaccaccttgcttagtaatttagtgtatctggtgtcgcagagtgggtttgaagttaatatgtccaaagtggaactccagcgtgccttggacggcaggagacgcgtctgcggtttggccgttgacgagggcggagtttacctgcctcggaaactgaagcggacaatacgtgccctcgagcacaaggagtctatgaacttatttccatcaaaacagactcgaacacttaggggcctgttagcatacggcgaactgaaactacccaataagctcggggcccagcaggaggatacggaatctcttatcaagtcaatagtagtgtctggcgagtggggaaaaaaatggctctgctatcttattgaacttagtagcaagcaatccaaaaatcccggacaagagatcttttgtttccgagttccacacaccttggacgatggttccataaggcagctggtggaggcttacaccatccaggagagttccattgagaatgacagaaagacactggacataaatcaggtgtcatccactgaacagcccgatatcagaacactgtccagctacgacattatcgcaacacaccatgaagtcgaggtgctggggtgtaccgatgcacagagcagcaagctgaaacaggcctatttcgagaagcgagtgaacttcacaagtcaggatcggaaaattctcgggttcctcgaaaggcgtgaacccattcctagaagtttacgcgaagtgattacaattccaccaaacacaaaaaagttggacgccctcgtgtgcgcaattactggactgttcgattcagaaacgatcttgaacatttgtaagcgcgagatctggctgtctggagcccttgagaacgtgctgaacgacgaagacaggctcttgttcctgagccaacacccctatgcttacagatacatgctccactttgtcaatgaacgcgatctggtcaaagtgcttgagtcaaacttctactcagctaagcatatctttcctcacattaaaaccgcacagatgaagcgagcgctaggtaatactcgggagctttataggaaactggtgtctactaactcatacggggctatgtacctggtgccacctgaatggttcaaaaaggagaggttcatttccttatgttctgagtactttaacctcacgagcgtgatgctctatgaggtctactcgaggtccgtcgcgttctattacctacgggaaagactttatgatagtaactttgagtgcgcgtccctggacgacgtcatccgccagtgtaaggctcataccttccgggtggtcgagagcgaattccctgccgctaaaaatttggatcagaatgagatctgtaccgtagagttgagagtgaataagctggttacagagatacagagcagatggccgtggaagtttgtcattaagaatatgggctga

SEQ ID NO: 12412 - RNA, 1164 nt, synthetic construct
  source 1..1164: mol_type = other RNA
atgaaggacagaattgagaaaattatcacgatctccaagaataatgggaaattcaggaaggttttcgtgcccacaccatcttacgccgaacagcttaataagaatctgaagtacctgaacgagatcctattggaaagagacaaatgcaaagtcaatcacgcttttctcaccgggaggaattcagtgaccaacgcaatgcaacacattggctaccggtattgtctccagctggatattgaggattttttcgactctattacctctgaaagcgttaagggccttattaacgatgaagtcataaacttggtgtttatagacggatttctgaagcagggtctgcctacatctcccatgatatcaaacatagcatttataccggttgatcaggctatactgaatttcgtaaagaatctcgatgaaaacatcgtctacactaggtatgctgacgatttaactttctccttcaacgacattagatgcaaaggtgtgatccacaagcggatcattaagatattggacgaatttggcttcaagattaacaacaagaagacaaagttccagaaagcagtcaacgggaatttcatcatcacaggcattagtgtgaatgagaaaggtgtcttttccacgcgtaaaactaaaaaaaaactccgagccctagagcatcagtaccaaaagaacatcaagttcatcatcaacatcatcgaagacattagcttcatggaaaaagatatccttaagttagtgaacgtgctgaaactgctgaatacctactataagaacaaggacaacatactgaattggaacctcaagtttttggacggattcctcaatgaggcctgcaatatctttgtgagcttttcagggaatatctatatctccgacgttaaagagatcggacgatatcacaagtacctgaaatataacagtgagtacaaccatatcatcaacaatcataccgatttcaagtggattaaataccggaaatacaagattaagctggaggacattatcaaaaaatgcgacgagtgtcgctataattttcactcggtaattggctttcgcggatgggccagctgtgcgcttcctaagaaggagaaaaaagatgccaaggtgaatcagtccagcagtaacattttcttcgatgatgataacatccccttttga

SEQ ID NO: 12413 - RNA, 1164 nt, synthetic construct
  source 1..1164: mol_type = other RNA
atggagaatagaattgctaaggttatcaccatcagtaagcacaatggcaaattcagaaaagttttcgtacccaaatcttcttataccgagcagttgaacaagaaaaggaaatacctcaacaagatactgctggagagggatgaatgcaaggttaatcacgcctttttagcagagcgcaattcagtcaccaatgccatgcaacatatcggttaccggtactgtttgcagctggatattgaagacttctttgattccatcactagtgaaagtgtcaaagacatcatagacgacaaagtgtgcgaccttgtgtttattgacgggattctgagacagggactacccacaagcccgatcgtaagcaacattgcttttataccagtggaccaggctatcctgaagtttgtcaaaaaactggatgagaatatcgtgtatacccgctatgcagatgacctcactttcagcttcaatgacatcaagtttaaagatgtgatctacaagcgggtgattaaaatactcgatgctttcgggttcaagatcaacaacaagaagacaaaattccagaagtcagtcaacggcaatatcattattacgggagtggccgttaacggcaagggagtcttcccaactaggaaaacaaaaaaaaaactgagggcgattgaacaccaatatcaggccaacataaagtttctcatcaagatcatcgaagaaattagtgtgcgagagaatgatgagtccaaactggtgaacattttcaagcttctgaatacctactataagaacaaggacgacattttgtcgtgggattgggaaaaacttaacttcctcttaaatgacatcgaagcaatctttaagatcttctctagcgatatctacatatccgatacaaaggagctgacgaaataccagatgcactacatccataactcaatctattactcaaacgattccgagtgttttaaccggaacaattatactgacttcaagtggcttaagtaccgtaaatacaagataaagagcgaggacattattaacaagtgtaatgagtgccgctataactttcattctctgattggctttcgaggttgggccaactgccccctacctaagaagcgggagaaagggaataagaatagctccaacttcgacaatgatattccttattga

SEQ ID NO: 12414 - RNA, 951 nt, synthetic construct
  source 1..951: mol_type = other RNA
atggatgacttcaccgagtatcatttcgagggaagctcgtggatcactccctggtattttccatgttggaattctgaatgggagtgggagtacgatgacaagatctatagaactatccatgagtggaacgccgcgggcagaatcatcaagaagggggagaaaaagaaatgctacctaccctgcagaaagcgcctcgtcttcacaattgatcagaccgccaggttcgacctgttttacatctctaagaagaacggaaaattccgacgaatttttagcttgtaccgtaagcagaaagatcagttgcggaagcttatcccatacctcgagaaaatattactgaagcacgatgacgacaaggttaactatgcatttataagaaaccgcaactgtgtggagcacgctatccagcacattggctataagtatacagtgtccatggatctggaaagtttctttgaatcagttaaccgcgaacacgtgtccaaatacctgaccacgaatgtcatggaccagtgttttatctcaggggcaccgcagcaaggactgcctaccagccccctaatcgccaacctggcctttctcgattgcgataaggctattctcaattcccttgaaaagtacaacattagctctgtgtacacgcggtatgccgacgacctggtagtgtccttcgacgacaaaaaagatatagggaaaatcatcttcctgatcacaaatattgtcaataaggctggcttcaaagtgaataagtccaagaccaaaatacagtctattaaaaacgggaggatcatcataactggcgtagctattgacaataagggtgttaggcctaccaggaaaacattgaaaaagattcgggccgcaaaacactcaggcaatgataagagtttaagcggtcttattgaatggtcaaaatgcagtctgcctaagactcatccacaaaagatttga

SEQ ID NO: 12415 - RNA, 957 nt, synthetic construct
  source 1..957: mol_type = other RNA
atggagatagaggaatacaagatcagtaaaatacctaagggaaaaaactcattcaggctcctgtatatcccaacacccaccctgaaaaaaaagcttcagtcacacctatcttatctgcagtacaagaatctcgagcttgacgaacatagaacgtgccacgcattcttaaagggaagaaattgtgtcactaacgctctccagcacgtcggctacaactattgcgttagcatggacatcaaagacttctttgacagcgtgcggccacatcacgtagagaacaaggtgtctcgggaggttatccaggattgttttatagacggtgcacccaggcaagggctgcctacttcgccattgctctccaatctggccctgttggatgccgacgctaaaatcatagaattcttgaatcagttccgtgtagtgcatcgatatactcgctacgccgacgatatttccataagttttgatgatgagcgcgcgactggaaggatcatcttcattgtgaacagtgtgctcgagtcctacggtttcagcgttaaccagaagaagaccaagattcaatccaaagagaacggcagaattattattacagggattgccatcgacaaaaatggcctgtttcctacaaggaaaaccaagcgaaagatccgtgccgcctatcatcaaaagaatatttcaagcgtccgcggactggaagaatgggctaagtgtaaactccccaataacacacctaagaacccgaaacggtttattagaatcgtgggcaaaacgctggtgtcttgcatgcactgtaatcagagcaacctgatctgggcagagcagtaccccggccgcacatttcttgtcaattctgaatccgggagtcggcacaagtgcaaattcttgaacgctatccttagccaaagggatctaatgacccagctgaagaagtgggggaccagaacctcatttttatga

SEQ ID NO: 12416 - RNA, 1464 nt, synthetic construct
  source 1..1464: mol_type = other RNA
atgcagacagagtttactatcaagaagatccctaagggtaaatcatttaggaccctctatatccccagctccgcttacaaaaagcatctgaaaagcaaactgccactgctactcgaacgctatatcctctttgaaggagacaacggattttgtcattccttcctccccggccggaattgtgtaaccaacgctatcccgcacattggcttcgcttataacatatccctggacatccaggactttttcgacgccattacgcctgaccatgttaccagcaaaatatcccgagagctcatccaggattgttttatagacggcgcacctcggcagggacttccaacctctccgctgatagcgaacattgccatgatcgacatagataatgagatcgtggcctcaatctctaagttgacctccgaattcgtgtacactcgatacgccgatgatatttgcgtttccttcaaccagaaacagtatttataccaggccaagtacctgataaccaatttactgaacaggcacggcttccgcgtgaacaataagaagaccacatttcagtcacttaagaatggaagactgatcatcaccggtattgcagtcgataaagccggagtgcacccaactagaaagacaagacgtaagatgagggccgcagagcaccagggtagcgagagctcttatcgcgggctgcatgagtgggctctgtgcaaacttcccggtcaagggatttcccactcacaggaactgcaccagatttctcctaagagtatctcttgtcagttctgcggggaacaagatttagtgtggctacgaattggcaagagcaagttaagactgtattccaaaaccacgaagatgatccacgattgcggccaacataagcggctggatgtgtttgagcatctgactgcactgggcttcacaaaattcgagacatctcggaaaccctggtttacagggttctacatcttgcagcaggaatcgctgttgctcctatttaggaaacgtggcattgatatctacaggattgatttcctcgaatactttcacgactgtaccagtcctgcggaagtcattgaggacgtgaacagcactctggtagaccatgaaatgtatgaaaccactacagagaacaatgggagtgatgaactgtacttggaggatcacgtccgggaggagctcctccaagacaatcagatcgatgagttccaaagaggatttacgcctagtgaactctgcagagacattttccgccccgagtctaaatatcttagtttgatggagagggttaattacaagaagtttcccctgaaagtccacaagttcatcctgtcattgactactccaattaacttccgcgaagagttctactcggcctataataacgctataagccagcaagcaaaaaatgggacactagattttgacgaccttgaccttatcgactgggacattccattctga

SEQ ID NO: 12417 - RNA, 3054 nt, synthetic construct
  source 1..3054: mol_type = other RNA
atgtggctccagtcctctgaggctagagagatcttcgacacagacttgacaaagacaataggcatcgacgcagccgaaatagagaaatttagaagagaactcgccgccgtaccttctgccaccttggtaaagttctggtttggcgcacagaggacttcggaacccacaacactggagaaacacctgcgggagaagctcagaaccagggccgcgctgttcagctgggtgcatggacctggaactagcatagcacgcgacttgctttacgtgaaactgccctcctctgaaaagaggcgtctagtcaacctgctgctggcctcgcttaggtctaggatgccatggatcgagtctagattaattcacgcaatggcctttcgcccagctgagttgaacagagttgctgagaaaacggtggggaaaacgaagggtttccagcagtggggacctctgtatagaggcgtgaaaatcggcaaaagaaggggctataggcagctgtggattcccaacacccccctcaaggctacccagggggctctactccgactgattgcccctggactggccagagtactgcaaccttttgtctttggtgccagctcaggacggagagggccaactttcgagaatgcagcagcccatctgggaaaagcctacgtggccaccttcgatctccgcgatttctttccgtcaaccagagtgggcgacgtcatacgcgggatccaatgggccgcagaccatggccatctgctcgtcgacgaaacacgcgtgccaagttatctcgaagagaacccccaggtccgttcacttaggtggacagacgacgcaatggttttggtggcacggttggccacctatcgggccagactaccacaaggatccccactgtccccacttctggctaatgtggcattcgctcgcttcgacgagagaatcctggatgccctcgggagggagtttggcaagagggagttcgcgtacacccgctactttgatgatttaaccatctctttgtccggtgctgccgccagggacttgggactcaagcagacctccaccgtccgggaccggattgagcagaagttgcaagaggttctggaggggagcagttttgccctgaatgcatcaaagagccgttgtacagcgcttactgtggaacggcggcccgctgctgggaaaaccatcgctaacagcctgggccaccatgtcaccggggtgatccttcggcgagagagcgtcgagttgacacgcgatctcaaacgagaactgcgaactacgatccaccgactgaagcaccgcgacttcgttgaagatgcacgggtgtggcatcaatccaaaaactttctgcccccagctttcaaaagccttagtaagggccatcgatgggagggtaataccataatttcacgcaggtgtagcgccgagcgcttaagcgtcctgatgttacgccactttcaccccgagttaagagtgcgggcgatcctgagggagtggtatccttggcaggagcgcttcattgggggggagcaagttcgtcgcggcaaacaggcttggcccctgattgagtggctcctcgctgctctctgggagggtacagtgactgcgaggagacacggcgacaatacaatccgattctcccaggggggagttgccgtttgcgatgtcgaagcagagtccgcattacagttcttcctgctggccaaggagagtgcgatcgccgtgacggaatattggcatcacctgcagggacttaagggttatctaggcgcctgccctatcagacctgagtttagcgatattattgagtggcgtgataggctggtggaggctatgagtgctctggagatcaggggttacgaaatagaggccaccgaaccgatcgtggaaaacacttcagacggggacccagaacccctaacggtgtcagatcgagtcaaggagcgcagtgataggtttattgtggtgtaccgggagtttgcgcggcggatgtccatcgccggtgatacattcttaggcacttgcgaagacgctgctagggttgtagccactaacagtgcagacttcgatcgctggatttccgccattcgaggcctcttcgtcactcgcttgcctcgcctacccgcagtcgtggagcacagggattctttcgacagaaggagactctttgatgccgttagagtgtgggacgacggcacgaagaggttggttgcagacgactaccagttcgtggccgacctgcgcgtggctctgaagattgatcgtctggattctgaagacacctaccagtttgctcgtgcccaattgagactatttgactggcttctggcctcattcgagcgatcgacagaaacacggcggtgtggcatcggcgaggttagcgcactggatcgaggatgcgacttacctgtgaacctgtggtccggcaccctgaaagaaaggctggctgaagcgtttgaggagctcgtgtccgcccacgaggtacttcggtcatctgacggcgaaacaaagcttttcattcagcggtcaggagaggagctccaccgagaacgggaaactatccggtgcactgaacagtggaacaatgaccgtgcatgggaacacctttgtcaggttgcacgggtcttgttcataactacccaagaaagtgtggaaccgtctctgtggagagatccagtggaggatgatcaacctgtgagcgcgcagaatgaactgagacgcaaaaagacatggaagggggtgtgcgatcgggtagatagtgaattgcgtcatagggcgagactcctggccaaactcagaaaccgagatgcccataaggctaatgacgataggcgagccgaatggtgtagcattcaggctgacgtagcccgcatcctgggacggagctgggaatccacctctggacggaaacacccccagtttcacgctaaggatgacttagagctatttgggcatgaggtcactgtagtgaagcttgaactcattcgttctcttaccgcactctttaatcgcgcagctgaactgcaggtctggaggccggaacacggtatggatagatga

SEQ ID NO: 12418 - RNA, 2529 nt, synthetic construct
  source 1..2529: mol_type = other RNA
atgacatcgcgcctgattcatgcgctggcatttcgaccctcttatttcactaggcatccaagctcacgctggggggctctctatcaccgacgggagatttctagaggaactaacaagcctagggtcctctatatcccgaataaacctctcagatccatccagagggcacttctgttcctgtttcttaaccgcgccagtcacgagctgggccaatccgtttttggggcaaggcccggacagagatgccctctgatcaataatgccaaacggcacctggggcagatgtatatcgtatcttttgacctggctgactttttcccctctatcacgttgggccacattgtttcagccctggctcacatcaggaccccgctaggccattgcgctcttcaggacaacgaggctaacctggatcggcctcgccgtgacttcccatggacacatgacgccgccgttttagtagctcgcctgtgcacttaccgagggagactgccacagggggcctctactagccccctgttggccaacatcgctttctccaggtttgatgacttgattgctgagagactgggcaccggactcgtttactcgcggtatttcgatgacattacgattagtgtgagcaagtctgctgccagaaggctccaccttaataacgcaaaagccttggccgattacgcccagacgtgtatagagacggagctaattcctgccggctttagactcaatgcaaagaaaactaggttcggaacagccgctgccggattcactgtcacgggccttaggataaacaagaataccatcgatataccaagaaaaacccgcagacaaatccgagctttactgcacactatctccacctctgggttactagcggccgctcggaaaacatggggcgccgaattggaagcccggataaggtgggactcagcccgtcaaagtcaccatagcgcaggaaggcggctccctcaggagaaactgtgtgctctgatgctgaaacggctcctgcctgacctggtgatcagggtctttgatcgcgacgaaaccgaagccccccggacaacagagatcaccggacgccaggcaaccagggtgttggaaaagctcctgacttatgcatggacacacagagtgagctttcgcgtacatgatgactacgtggctgtgaaggcagcaggtgaaagggagatagcacgattattctccaaagtctcgatcgaatttttcggactggccccaaacgagctgattcggtgcactgagctgtttcacaagcttgccggctggagcgcatttctggaggacgcagaaaaccatggagaggcgcgtagagtggccgacttgggtagggaactcagacgagttctcgccggtgtgcaagccgggacccgaagtgaaaccactgcctacgagactggcgcacttagagtggacccggcaggtttacccctgaccgctgaacaggagaatcgccagctggcgagggaggtgtttgaattgattcgccagttcatgctcttcgtgtcccccggcccaatttcacatgacttacctgagcttgagaggaatttcaaagctgtggctaattctgaagagacattctctcgttggcttgaaaccaccatgcgcttgtatcagatccgtgcagaggtcgttccacccgaatccgcgcgtagggaattccgcggccacgatattcacgaaacaatccggctactgagtgatcgactcgcagggagacgggcaccaacctacgagatcgagcgggacttctacaagaaggtgagtaaagatgatgtacctgatagcccgcgcgcctaccttagacatcaatttagagtacttggaagacttaagtccgcctttgattgctccttagctctacgaaaccagcgagggcccaccgcctggattcagactcttaacgagaatacctggagcaggagtattgcggctcggctgcatacagccgtccaggtgctgagggagagactcgtggaaatggcgagccaaccaggcgtgatgcgggtgtttcagaatgctgttctcgccgacctcaacgccggcatgagcgaactgatgacgacagtttccagtacaacatcagaactgcgctggaagtccctgttcgccaccggctctgtgctgtcaaagctaatattggaacaggtggaggcttcccgattggagactgaaactacagagaagcgttcacacaccgaaatcgctatcgctagcctgaccgcaggtaccggcgaaagccacgcggatctgctaaggctgatacacctgttgcggtgtcgcgatgcccatcctgcgactgatgagcaaatgaacgactggatcaagctccagcgtctgtgtggttcacggttaagacgggtcacaaccaacatcagaatgcccgacaacgccggagccatgttcgggaatgggcacctcgagctcacagagttggaggcaaatgacctgaagctctctattattgagggtgtcgatcgcttcttgcggcaggtcagcgtcgtgtga

SEQ ID NO: 12419 - RNA, 921 nt, synthetic construct
  source 1..921: mol_type = other RNA
atggcattccgcgaagatcgatttcagcgtctctttgccccagcccacggcgaactttaccgtcgcaagagagtgccaaaaggtaagtgctgctataggaccctgttcgtaccatgtgcccctctggcaagagcacaacggctgctgctgagccgttgtctgaaccagatgctgggtcactctcatccgggagtctacgggggccgacctcagacaagtgtctatggcaatgcccagcggcatcttggtcaaaagtttgttgtgactttggaccttagagacttcttcccctcagttacagtcaaccacgtcgtcgccaccttactgcgcttaccccccgtgtcactcgtgaggcacgtatggctagatcagcctacccaaggggggagagcaagggtgccacaaatgcatcggtacgcttggacgcagagggccgcagttcttgtggctcgactgacaacatttcgcggaaggttgcctcagggagcccccacttctcccgcaattagcaatctcgtgttcgcccgctatgacgacagaatcgctaccgctctgccgggatttgtgtataccaggtacgtggatgaccttaccttaagcgtgtccgagactgccgcgcgcgatttgggcattcggacggctaaacaggcccaggccgtggtcgtagagagagtagagcgcgcgctccgtcgaagtgggttcatgctccaccccgacaaaactagagtgactgctatcgaacgggagcatcgcatcacagggctacgggtgggcgctgacagggttgatgtgccaagaagagttaagcggaaagctgcctccttggcgcgggatctccggaagctgggattggttgacacagcgaggaggcgaattggcgcagagatacacgctgccacccaggcaaggccttgggtctga

SEQ ID NO: 12420 - RNA, 2868 nt, synthetic construct
  source 1..2868: mol_type = other RNA
atgtctgaccacattgtagagaagatcaaggcccttgacgctcaatttgtacagcttgagaagctcccccaccacgtgatatattcagagttcaccactcctcaacagttactgctcgaccggaaaatccagtatcgtgagggagcttatcagctgctggactggtaccccccaattagggaagccagggagttgctaaagcacctgcccccttttgaaatgttgaaactggtgggaggaaagccctgtagctcactgtcactgttcactttcattaagcgccatctggccaggaagggaacaaaaagtatcttccggtggtccgatcggaaaaggtttgtttactgggtttataggaacaagctcctgtccagtgtgcttccctacgtgaggccggcctctgaaagtaaacacttggtactaaggtaccttctcaagccccttaaaaagcagcaagggtactactcctccaaagtggtgcacgcttgggccttccgtccagattttttcaaagccaaggtagattatgagccattgtacataacacgcaagattgcaaagtctcagcgcgggtatcggaccttagacattccttttgccggactggctaagcttcagcgagccatcttgaaaatgctgctgaacccagcctgtcagcgcgtgttgaccgacagcgtgtttggttttacacccggaaatgatcggactatttttagcgcggccgaggcacacctgggtgcaaaattccttgttggctttgatatcgccgacttctttcatacggttaaattcaacgacattacttcaactctcatgaaactgccccctgatattctgagagcatccaactcagctatctcaaaaaacaagtcccctctaaaatgggagtgggacctggtgctccttctggccaagctgatggcgtacaagggacgccttccacaaggcgctccgaccagcccagccttagccaacctcgtcttccatgaatacgacgtcctgattcggcagcagttgtgtgatagcttcgagtacacgagatatgcagatgacctgacgtttagcatttctgctaccaaggctaaaagactcgggatccggtctgaactcgatgcaaggcagtacctggagaagcgcttaattcagctgttcgaatcctccagcttcacactgaatagcaaaaaaagtagagccgttaacttacgccagggcggtcgagtgttggggctgtatctcaataacgaaggtgtgggagttccacgcagcacccgccgagatcttagaacaaccttgcacaagatgcggaatcacggccttctgtgcaccgccaggaaccatcctgcgttacccgattgttccgaattcgtccatcgagatacaaaacgaggcgtgcgtcatttcttcaagtctgggagagtgagcatggaacggctgtgcagcctcactgcccacagaatctgtagaaatctcactatttcagacctacgcaatgaggggtctaccagggagctaatcggcaatcgcctgcgggacaccctggaaagagtcatttcaaatgcctggctagggaaattggtgctcgcgaaacaggactccaaaagcttacttgtgtcgtttaacagtggggatcctgcgctcctgctgagagcagaaacgggaatagactttctgctgctgggccggattgactgcgtcaaatgcgccttactgcaccagagcctctccggctacctgtcttttctggagggggctcctaacagggctacgttcgcagccatccatgacctagccaaacagctgggtgacgtactcggcagcctggacataggccaattccagcccgcagcaagtcgtcaggctggcactaccgacggagagaggccatcacttacaatcgacgaagatgtgacaagaaaagcccgagcttttctcgctaaactgggagtctctgactttgaacaccctgattggagtgtgctatgcagggccgtatattctcgggagcaacttgattcctggttaactgctacagataagctcatcaaggagaaaagagtgtttgcggagggttcccgccgaaaccccgtcaaatttatcgacattagagctggcaagatattcggcaggcgcaccggaacctatgatgaggaaaatcaataccttgtgaggagattgtccgaggacggtctgagtcgtcccgacctggccttgcagctccaggaggagctcatcgaagatctgatagagtatgccgagcaagctggcgaacagggggaaaccgcatacccagagcagtcggtccggctagaacgcgtgtgcgccgatcttaagaagttgcggaaccagctgactacaacaaacgaaagtatgctcctcttcgcaagaaggtgctcaccggaaaatgacaccaacatcaggaagagattagaaaagcttgagcagccaatctcaggcgattcgtctggggcggtgtggtacagtctgtttgagttcggcttctgttttgttcagagtttccaggaaagcttggagcacgatgatgaaggtaagccggtcgcaaccagccgtgcctggaaggacatcaagcggtataatgtcctgtctctgctgcgaaatcgccatgcacatgggtgggttaagactgcagctaacctggccaatctcgatgagatccaacggaccatcgccaagcgtctgggcaagatctggaagcctaagaaaaatcaagtgggggacacactcgagtcccttatcacattggagttgacctcttttgaggctaatgagttcactctggatatactgaaccagctccgagacagcctcattgcagtcagacaagaactgcagacacccccttccccatga

SEQ ID NO: 12421 - RNA, 945 nt, synthetic construct
  source 1..945: mol_type = other RNA
atggaaaggactgaaataaccccctggttctactacgacatctataagacagaaaaacgtaccatacataagccttcacatgctttgaaaaaagtccagcgatttattatgcggaagtttctcaaaccccactttaaacaaatgacaaccaacgaagcagcttccgtgcactgcgggaagaaatggattatgaagctggatatcaaagactttttcaactctatcacggagaaacagatcaaagacgtgatcaagaaatatgtgtcctatgacaactacgactcctctattacatacgagcacacttgggaagtgtttagcgaggaacagattttcagcgtatgtaccctgaagggaaaactcccaacgggggcctcaactagtccctatatagcaaacctggttctgagggatttcgatatcgagatcgagaatttctgtctgcggtatggtgtgagatatacacggtacatggatgacctgtttttctctactaatcgcgagcagtactttctcagccttgtggaactggaagttctcagactgtttaaggagcttggtttcgagattaatgtcccgaagatcaagtacatctcgagtaataagtgccaacagattttaggcctaggcgtaaacaataagaaaccagtgctgactaaagataccaagagggagtatcgcgcctatttttataacttactcgcgcctatacagtttaacaataccgaggagtacaagaagcacgagaaagaattgttcggacatctagcctacatcatgagcgtcgataaaaagttctactacaaaatggttgcctacatcttcaacattatcaagcgcttgaatatttggcgtaagccttgccttaagaatctgattaagaagattggcaacaactttgagacagaaatcgagatgttcagattctgttcctatctgaagtga

SEQ ID NO: 12422 - RNA, 1248 nt, synthetic construct
  source 1..1248: mol_type = other RNA
atgccccctgcagaacccacaccttccctaggacaagctatgcgccgcttgcggttagctgccggactgagccaacgtgaacttgccggtcgactcgctgtagatcccacttacttatctcatctcgaatctgaccggcgagatccaagtgtcaggttcgtgaaaaggtttgcggcgctggtggacgtgccagtcacctcactcctggtggttgccatgtgggatgagatggcccccagcgagcaggacatgttccagcccgtcgtgagctcgctgatgcacctgacagaggcggtggtgaggatgcccgcttcatctcctggcccacttcggcgtctgagtgtgcagaagctcgtggctgtgtgtcggctctctgaacagcagtttgcgagactgttggaaagccgagaaaaggaatatcacgaggtatcctgggagaaagagcctggtaaaaccaggactctgcacattcccagcgagaggcttaaggccgttcagcgcctgatactgcgctacatgatcgaccgagttcctccgcatccctgcagtgcctgcgtgaaaggaagaggcaatcattgggcctaccggagacatgctcgtcatccatcaatgctgaggctggacattagtgatttctttccatcagtgggcgaggacgccgttagagaagcattcatacgccttggcgcaagggaaccggtggcagacgctcttgtccgtctcgtaaccttacccgagcgcttaccacagggggcacctacgtccgtggctgtagccgatatggttctctttcctctagacgttaggcttgccggaatggccgagaagcacggcttcacctactctcggtatgtggatgatattacactgtccggtgggaataggctcgctagattcgagcagactgtccggagaatcgttacagacctcgggtgggaactgaacgagaaagggggcttggtgggttcagatcaaagacactccctgctggggggaatcgtaaacgcaaagccgaatgtggcctctgagtattatggcagggtccggagctacttgagactggtcgcaaaggggcgcgagcaacctgacgaagacgattttagaaagctgcgctccaaagtggaatggatcgtcagcgtcaacccagagcggaaagccgccctgcacgccttggtcgatgaggcactaaccacgttgaagcagcaggaggcttccatccgcagacgagaaaagattgtgccacagtga

SEQ ID NO: 12423 - RNA, 963 nt, synthetic construct
  source 1..963: mol_type = other RNA
atgttttcactggatgagcttctgagtatattcaacgacgtcgaagaggtggaaatgtccccaagcttcgcattcgtttatagtcagctggtcgagaagggcaccagcgccttttggctgggggtgaggaaacacgccctgcgagactggtatgagcagtatcacaacgtgctgagcgaagacgtgaaagtggaatacacccccgtaaggatcccaaagagatccggtgggttccggactctctacatcccttcagatcaactgaaagagcggcagcgtgcttggttaaagcttacgtatattcttgttcccaaggttactcatgcctacgcattcgaaaagcggaggagtctgcgggatgcgcttgagaagcacgtcggcaattatttgtttctgagactggacattaaggacgcatacccatctataaggaagaaggttttggactcagtgctcgttaaacatgacgttccactttccgtaagacagatgctaatccgcgattgttactttaagggactacctcaaggcgctcctacaagcggccgcctgtttaatattgtgttgtcccagaccgatttagtgattgccgaggtcattgctagactccatggcgtgtatacaaggtatgcggacgatatcttggtgtctttccccaaagacgccaaaatctccattagcaaaaccagtcaggtaattaaccgctacttgaacaaaatcagcctggagctgcacccctctaaactccgcgtcggtcgtggtaaactccgagtgttaggatgcgtcgtccactcggataaggtgacaatctcacgaaaagtgagacggctgtaccgcgccatgctccataataacaaaacaggaaagatctctctgtccaagcacaagatcaatggaataaaggggtggctcaatatggtgtacaggagcgaaactgtacctgctatcgggccgatatcttga

SEQ ID NO: 12424 - RNA, 1410 nt, synthetic construct
  source 1..1410: mol_type = other RNA
atgatcttcataaaacttctgctgctcccgttctacctgatttttggtgtgctgcgaaacatcctgtctgaaggagggcacccgttcgacggcgcatacaacgacatggtcgctcgccaaaatgaggagcatcgaaaaaacctcaaagagcgaagcgacaaaatcaaaaaggccatcaacgagattgaaaagaaatccaaggaagaaccactgtggaagctctcaaaactgacgaaaatttcgatcgaggagctaaaacataccaccggaacatataggaaagtgaacgtcaagaagaaaacaggtgggtatagagaattacaaatccccaatgaccagttgaagcaagtacagaagaagctggctaagttcataaatagccagtttaagaacgatatctctcccttttgccacagctacaggaataaccgcggcattataagcaattccttaccccatcttaactgtaaagtgctggttaagctggacgtcaaagactactttcagaatatcaccttcgagcaggtgatgcgggaacttgacctgggctttgagagcatccagttccacccacagagtaacttcattcggcacaatgtgagcgagcctgacagcagaatttccagttaccttgcttccgaggaagcgcaggagattttgaagaaactagtctattctgaacagggactcccacaaggtgctccaacttcccccgtaattagtaatcttgtcctgagtgattttgataaggaagtgtatgcacttgtgacctccttgaatggcgcatacactcgctactcagatgacatcaccataagctttaaagaggattcgtctcagaagatagcccaggtgatcaagtttgttgaagccaaactggccgagaatggctttaagctgaacaaaaagaagggcaagattaacgttctcagacctcatcaagctcagcggatctgtggggtgactatcaactctggaaagcctaccatttcccgtaaacagcggcgtctgattagggcagcagagcacaatgccaagcaaggaaaacctacaacattcaccgaggaccaaatcaaaggacatgaatctttccagaagtatattaaggaacacggggagttgctagccgggaatgagcgcatacaatatctgaagactaaggtcatcagtgctagagggtgcaaagtggataagaacttcgtcatcctcaagggcagccagttcgatatctcaaaatttgatgaggccaaagaagaatttcagacattgttcaaccagctcaaacaggagggcgtaattgttctcaagcagaatgtggccaggttcaagcggaaccaccagttcaaatccaagactctcgcgacgtctctgttacacttgaggaatgtgagatcatcaaagtgggtttga

SEQ ID NO: 12425 - RNA, 999 nt, synthetic construct
  source 1..999: mol_type = other RNA
atggaattcgccgtggattcaatttcatacgagcttggaactgtgttggcactcttggtggtcctggtgggcctcgttctgctcactaagagcttagcccgggattacgtctccaagtatggaggcggagctcgaaagcatgctcagcgaaagaattcacgtaccctactggataccatagatgtaagggaggacgttttttttggcgtcgcaacagactacgcccttgtcaaaatccctaaacggactggaggaagtagacagttacagatccccaatgccgagctcaagcgcctgcagaggaagctgctggtgtatctgacagctaaactggggcatagagtgaaccggtccgtgcactcttataagaaatacaggagcattaagaccaacgcaaccgtgcatttgggcgctgcagtggttatcaagctggacattgtcaatttcttccccaaggtgacgctgaaacagtgccgccaggttctcaaacttctgaatctgactaagcccgttgaggatcgtctcgtcgcgctgttaacaacgccaggcggcctacctcaaggggctcctacctccccgcttctgtccaatctggtgttgcgggctctagacaagagtgtttggtactattgctggtctaggggtcacagatacagccgttacgcagacgacataacaataagccttccaattgatgaccgccaggccgtgcacagagctatcagctttgtaaaccacgccctcaaacgggccgggttcaaactgaaccggcgacgcggcaagttccacattctcaggcgccatcaagcccaaagaatttgtggtgtaaccatcaattccggtaaaacaactatctcgagacagaagcgaagagaacttagggcaatccggtataggctggagaacaacatggaagcctcaattagcgaaatccagttggaagggtatgaggcctacgtccgcatggtgtctggggtaagtgtgaaagcgttttcttga

SEQ ID NO: 12426 - RNA, 1098 nt, synthetic construct
  source 1..1098: mol_type = other RNA
atgctgccacaccagattagacctgaacacttagccgaagctatgggcctaagtgtcaacatgctgtggtcctttgcccgcaatatggatgcttgcttcaaaccacgaaggatgcaatgggacgggaagaaacatagacctatcgatcccctgtataaacccccgaaacggctgctcaaaaagctgcacaggtttcttcagaaccaccacctgtgtcatcccgcagcccatggcggagtaaggagacggtccacattcacatcggcccagatccatgttggttcacggaacgtgtggacgagggatgttacagattgctatccatcaatttcacaggccgcaatgtttagccaactgcgaaagctgaagttccagcatgacacagcacttgtgctcagcatgttgttcacctatcgcgacggagttccccaggggagccctattagcggggatgcactgaacatctttttctggcctctggaccagctcttggccagtatggccggttccctcaagctccgctatggtcgtaatgctgacgactttgtgtggtccggttcgaatcgcgagaatggagacaaacttgcggcgagattggaatctgagatagaactactgggactgaagatcaatgagaagaagaagagggcaaacgggctacagactagcagtgacgagcggttggtccacgggatatccgtttctaaaccaagcggcactgctattagcagactgcagtcaaagaaagctctggcccttggcgagaagtacgtggcggcttgtcgatccgtcactgccgatagtttagaagccgtcgctgtgaaacgggcccaactcgccggatggatgtactactgccgacaagcacacataggcccggcgcggaccatcagacagctcttggaggctggcgataggcatgtgctcaagaagcttagggccattggactgtcttctcagaaaaacaagtggtggatcatcgactaccgccccagacgcaataagccttctagaaatgagccaaaacgtttagctaacgcatggcgtaccaggctggcccggatgtctcacaaaaacgtagtggcaaccggcctgtga

SEQ ID NO: 12427 - RNA, 1080 nt, synthetic construct
  source 1..1080: mol_type = other RNA
atgaagcctagcgaaatcagggtggaacaccttgccgaagcgatgggcctctcaattaatgctttttggttcttcgctaggaacattgataatgcatataagcccagacgtatgagatgggacggaaaaaagcaccgccccattgacccgctgaagcccatggctaaaaaggtgctgagaagacttcaccgcttcttgcagcggaacagactatgtcatcctgccgcgcatggcggaatcaaagggagatcctgctttacttctgcgcgggtgcacttgggcgcaaggaacgtatggacacgcgacgctaaagattgctacccaagcatcgctcccgaagccatgcagaaggagctgcaggctctctcctttagaaatgatactagtaaagccctggtacttctcttcacttatcgaggcgccgtgccacagggttctcctatctccggggatgccctgaatatttttttctggcgattggatcagctgttggcaagcatggccgggtcactgaaattaggctactccaggtcagctgatgacttcgttttcagtggggacgaccgggacgcaggagatcagataaccgcatgcctagagaacgaactgcttaaccggggcatgaagatcaatcgtaaaaagaaggaggagtcgggacaccaaacagccagcgatgagcgtttagttcatagtatcgccgtcagtcgcaggaggggtacaggagtttgtaggctgcatgcccgcgaagcactcgagctgtgccgcatctttgtggctgcctctcggtccgtgagcgccaattcaattcaatctgtcgcatccaagcgagccacgatacagggctggctgaactattgtcggcaggcagactttggacctgctaagaccgtccgacagcagctggaggcgggtgatcgccacgtgctcaggaagctgcagtctatggacctctcggccaagggcaacaagtggtggtacgtcaatagcacccaagggcgagacgagccacggagattatctgcaacctggcgggctaaacaagctaaaaaaagcgcggacctcgccggttccaacgcctga

SEQ ID NO: 12428 - RNA, 1047 nt, synthetic construct
  source 1..1047: mol_type = other RNA
atgaaccccaagtccattacgcccgcagagatcgccgccgcaatgaaaatgaccgagcggcagctctggactttcacccggaattttgaaaagctttttaaacccacccgagaaattatgatcgggtctaaaaagcgcgccattgacgccccaagggatagtgcgaaaaagaagctaaagctgttgcataaatggttctttgagaaaaaactgttccacccatctgcccatggcggtgtacgtcaccgatcatgttttacatcagctcagcagcacctgggaaagaagtttgtctggacacgggatgcatccgattgctatccatccattactccagagatgttcttttatgaactcaagagaatcggcttccgccaagacacagcgacgctgttgacccgcttgtgtaccgtgcgagggtctataccgcaaggttctcctgtgtccaatgatgcaattaatctatacttctggcggatagaccagttcctgaaaagcctgtcaggcgcaaacgacctgtcctacagccgtgttgctgatgactttgtgttgagtggctataagaagtacttaggggataatattctcctcaggctcgaaggcatgctgcagcagtttggaatccaaatcaacgacaagaaaagaaggaaaagcggattccagaacagatctaacccgcaattagtccattctatccgggtcgacttacgccgcgggactaaaatttcgcaggagcatagaacaaagatcatagatctggccaacagctatgaggctgcctgcaagcgtgttcagcccagtagcctggaacctatcgctcataaaagacagcaactcattggataccttcactacagcaggcaggccgacctgagccctatcaagcaccttaagagtaagatacagaatggcgacagaagagtgtccaggatccttaaaaacctccacatttcagctttcaaaggtaagtggtggctggtgtcatccaaacgcaatgagcctaggcggctgaagagtatctggatgaagaggctggaggctaattga

SEQ ID NO: 12429 - RNA, 1155 nt, synthetic construct
  source 1..1155: mol_type = other RNA
atgctctctaagaactggctgaagtggaaacacggctctatgaggtactcacctgccgtgaagacccgcttgtcgccacccgacctcactgttaagcgtctggcggctgtggcgcaagtagacccgtccgaacttatgaggtatgccggaaatactgcagtgatgtatcggagcgctaggaaacagtgggatggcaaaaagcaccgggtaattagaccgatgaacaaaaagttcaagaagatgtccaaacggttgcacaaattttttcagcggcagccttggtggcatggcgcagctcatgggagtatttgccatagaagttgttttactagtgccgccagacatgtaggccagagacacgtgttcaccagagatgttgaaaactgtttccccagtatcaccactgacgctctgtaccgccagcttctgctgctccgattcaagccagacgtcgctgacctgctcgccaagctgatgacctgcgatggtaccatcccccagggatgccctacaagcacggacgcggtcaatttgttctttgccggcctggatcaacgccttgcttcgactgccgccgctatgggagcacagtactcccgtgtggtggatgatgtcgtcgtgagcgcaaaagataaagacgccggccagattgttataaatcgggttgagcatgagtttgaacgattaggtttgaagacaaacctcaagaaaaaacaaaccgacgggtaccggggcccacatcagaaacgccacgtccacgggcttgatatctcttcaaagagaggggttcagatcagccgacagtgtaaggaaaaggcactagccgtggcccagtcttatctggactcatgtaagtcagctacccccttaagcctggagtccattgccgcgaagcgcgagagggctatgggttatatgcaacacctaagacaaggaaccgggtccacattccgccagctcgaccagaaagtcaaggcaggagatcgagcagtgcaagccaaactgcggcgcgtgggggtgacatgcaggaaaaacagatggtggatcattaggggtcctcaggacaggataacaaaggcagcccggaatatcgtgcgtgaggtcgctaggcagtggcacgccacaaaatacagcacgccctcttccagcccatga

SEQ ID NO: 12430 - RNA, 1059 nt, synthetic construct
  source 1..1059: mol_type = other RNA
atgaaaccgtcagacattaccccagcgatgattgccgaggcttgcaaagtcgatgaaggccgtctgtggcgtattgccgaacggacagagtctcagtaccattccccccgacctaagctgatcaaaggaaggcaccgagagatagacccacctaaccatgactttaagaaggtgcttcgacgcttacaccggtacctgcagagatcactcacctttccgaggtgtgtgcatggggggctacggggtagaagctgtgtgaccgctgcggggaatcacgtgggtcggaagtacatcgtcacacgcgacgtgaaggattgttacccatcaatccctacggaggccctcaggcgtagactcatcgacgagggcttcagaagtgataccgctctgctgttatctcggctaatgacaaatcggggggtgatacctcacggggcaccagtgagtggcgatgccttgaatctgttccttgccgattctgaccgtcgactcgatcactgcgtgagacgccgcggaggctcttatactcggagcgctgatgacatggtggtcagtgttggtgccagggagtccgttacgccccttgccagagtgatcgaagacgaaattgaagggcacggcctgagagtgagcgaacacaagaggaggcagaagggagttcaacattcaaacactcgagggggacctcgcgtgcataatctcctggttaacaataggagaggcgtaggcgcagtacccgagcatcgcgcaaaaggactgagactggctgagtcttatgtatgcggcgcacggagcgttcgacccgagacattagagggactggcaagtcgcagggcggaactcgtcggcatgattaactatttccgtcaattgcgcttttccccagcaaggcacttggcccgcttgctgaggcagggtgacagacttgtccggagccggctctccactgtcggagtgtccctgaccgccaaatggtgggttaatagccgcaagcggaacagacccagggaaatcggcgatagatggaggctgaaatcggacaactcccccgctgcctga

SEQ ID NO: 12431 - RNA, 1023 nt, synthetic construct
  source 1..1023: mol_type = other RNA
atggcgtcgctggatggcatggctagcaacatggcatcttggtacaagcccgcgcgaaaagtattgattaagggtaagctgcgagaaatagacccgcctacacctgttctgcgctataggctcaggaagctccacaggtttatcgccgctaactttagaccacaccgtggcgtgcatgggggtgcaaaagggcgctcttgtttctcaagtgctcgcgtgcataaaggaagacggtatatcataaaacgggacgtgaaagactgctatcccagtattaagactgcagccctcctcgatcgacttgtggcttacggattctgcgaggagacagccagaatcttgtccctgctgatgactctgaacgggaggcttccacacgggagtcccgtgtccgctgatgcacttaacctctttttgttcgaagcagacgaagtgattgtagccaagtgtactgttctggggggcaagtactcccgtacctacgatgatatggtcgtttccaccaatagtggagcagctagccgagagctaggcgaggtcttagagtctcagatcgccgcccacggcttggaggtcaatagcaggaagcgggctaaagaggggttccagccacctcataagcggcagctggtacataatatcgacgtgcggtctgctggaggtgtgagaattgtccgcgagcatgaacaaaaagccctagccgtggccacacgctatgtccgggcagctcgctgtgtgtctcccgaatcccttgagcctgttgcgctgttaaggagccaagccgccggctacatgcactactgcggtcaggccgactttggcccagctaagcagttaagacgtctgctgaagcagggagataggcacgtccggaaacgcctgacgaatgaatgcgtgacccgatgtagaaagtggtggatcatcagcctgcggagaaacaaagcaaagcaaattgcccagaggtggagggccctccaggacgaagagtcaagatcctcagcgccgagcacctcaatagcctga

SEQ ID NO: 12432 - RNA, 1107 nt, synthetic construct
  source 1..1107: mol_type = other RNA
atgaaggagaagtaccgcatgcagtgcaagcacaaggacgtgaaaaaaccactgaaagggatgacagtggaatggctggccgaggaatgcggcacgacaggagatttcctttggatcttagcaaaggactcaaccttcatgtacaaaccccctagaaagcagctgaagaggtccggtaatggatatagagagattgacccccctaagcaccaatacaagagaatcctgcggaaaataaccaaggttttgtctagcaacatgagacaccatcctgccgctcatggaggcgtgccttaccgctcttcctttacatccgctaagccacactgtggcgccaagtttatcgtcacccgcgatatccgagaatgctatccgagcattagcagtcagaatctcttccgctcttttcgactgcttggggctagcttgtcattcgccaaatttctctctgctattatgaccgttcacaaccatattccgcaggggggccccccttcgagtttagcattgaatctctatttcagacggatggacgatcatttctaccggcgggcacagtctcaagggggcaactaccggagatttgccgatgactttgtgatcagtaataacagcaggaaaaaagctgtagctttggagtcagagctggaccatagtatctcccaccgtgggctagaggtgaacgaaaagaagcgtgagaaaaaaggattcttgtccggcgatcagctgaaagagattcactcccttgtagttaactgtaggaggggcctcaaaccaaaacgcgaacacatcgccaagggtctgcagcttgcggagcattatgcgagatgttgtacttgtgcaaaacctgccgacctgcccagcctggcaaagctgcgacaacgggccactggaatgatgtattactttcgtcaggccgacttctcacccgctcgccatatacgaaatatgctggaacacgcggataagaaagtcctgaggatgttacagtcgaggggtctgcagccccataagaataagtggtggctcgtgcacgccactcggaacgaaccacagaggctcctatgcctctgggagccatctgcccaagtctgcagcgtggcatga

SEQ ID NO: 12433 - RNA, 1101 nt, synthetic construct
  source 1..1101: mol_type = other RNA
atgaacagcgaaaccgcctcaagaaccgccgatgccggaacgctgctgagaggaatcacagtggaggccatcgcgcaagcgtgcgaaacttcccctgacgagctgtggcgactcgccagaaattctaaactcttgttcaagctaccgcggcagcaacggaaaaaggggggtggctttcgggtgatatatcctcctaccaaaacccacaagccactgctcaaacggatggcccgctttctgagccggcagatccccgtccatagtgctgcacacggtggagtcaagggacggtcaagcttcactagtgctgctaaacacctgggggcaactgttcttgtggtacgcgacattgaggagtgctatccgtcaatcggcccccaggccttggctaacgctctaaaacgtctcggtgccagcccatcgctggccaagtttctcagttccattatgactgtggatgggcagataccccagggtggacccttatcctccctcgcactgaatctattcttctataggcaggatgagcatttgcataggaaggcccgtcgcgtgagaggcgcttacacaaggctcgccgacgacctggtagcctctgtcggcgatacagagacgggggctgctatggggcgagaattcgactcggctatttctagccgacaccttcgcgtgaacgcgtctaaacgggcaaagaaaggccttttagggggcgacaagttgaaggaaatccacagcctgattgtgaattccagaaggggccttagaccaaaggatgaacatgtgcagaaagccctgaggtttcttcagaactactgtaggcgatgccgctctgcaacacctgcggatctcgaaagcttagcctacctgcgacgggttgtctgtggatggatgtactatatgcgccaagctgccagaagtcccgcaagacatatgaggaagcaaatccacttggcagacgccagggtgacccagatgctgaagaagcacgctattcaggcgaaaaaaaataagtggtgggtcctgtcatccaagcgcaatgagccacgtagactggcagcacagtgggtttggcgcgaggttaacgctgcaagggccggctga

SEQ ID NO: 12434 - RNA, 981 nt, synthetic construct
  source 1..981: mol_type = other RNA
atgagtgagcacacctttctcgactgggtggccaggggggatgaacggtttctaccaactaggattgatagcagctctgggaagtttcgggaactggacgtccccaagccgtctgatatgcgtatattccgcatgttgaataaaagcctgggattcgaccggttgtttcacagggtagcacacggcggtgtgaaaaggaggagtagcgtgacctctgccaaaagccatatcaaggccccattcgtgtgggtgatcgatgtaaccaattgtttcccctccgtgaagttcgaccgctttgcttcagaactgggccatttgggagtgactccagctatgcagaagattatcgccgagactctcttttgcagaggccagattccccaagggtgtcctacaagcaacctggccctcaatcttttcttcatggctctggattaccagatggccgagtactgctggaaacgcctgatctcattcacacgcatggcagatgacatcgttgtaggagctaaggaaagaagtcgcggcgagcacgctgtggataaattggttgcagggctggcaaaactggacctaacagtcaacgagaagaagagagcaaaagtgggtttccagcctaacacgggccaacagctcgtccactcactcgagatctcttctggatcacttttattatgcgatgaacatcggaaccgtgcccggcaagtcgctgagaaaaccgttggcgcgtgccgatcggttcagcctcagtccctcgaaagagccgccgattatcgacgacagcttaatggttggtttcactattcgtcccaaagtcaggacctgttaacgtccgacctggccaaagcgatacgcgtgtccgacaacgctgtcaagtctaggctgcagagagctcagctggactgtaagcggtggagatggtgggagattaagaccgccacagagcttgcggcacgttggggatcccatattagcgtgtga

SEQ ID NO: 12435 - RNA, 1218 nt, synthetic construct
  source 1..1218: mol_type = other RNA
atgggggatctcatccacactaggcggtgggatcttccagatatcgacgagctgctgcgggaacgaggtctgccagaattgtccgacgggggaaatagggtcccaattagcagcttgcctatccagcgaatagccgtgcggagaaggcctagaaggccatccgaaggaaacgagctggacgtcctgatgcgcatttgcacggctctcggctgtaacgccgattggaccacagtggttcaggtggccagggcctctcattgggagaggcaccgacgttacaagaaaagtggcgctattcggtggctcgatgtacctgaggaacgtctgaagacggccctgggtgagattcacagactactgctgagcagcatgccgcgggatggaacaagcacagccttccatgcaggcgcatcccctgcactgcacgctagggttcacagcggagccgtggcagcagcagcagcagacattagaaacttctttggcagtgtgcgtccgcggcacctcttgccttggttcggcttgactgactaccctaaggcaagcctactgcccggctggtcggagcttgggagaaaggccgtgtgccagttgctcttcagatatagagatgggaaaccagcgtacctggcgcaaggtgccccatctagtcccctcgctgccaatctggctgggctttggcttgaccgggctatcgtgtctgctgcggctcgccagtttgctcccgggaaatttgcctattctcgctatgccgatgatctggtgctgtccgctgtagactgcgaggaacccacccgctttgccgaagaggccgcccaaatcctcgcgagatcagttgccggccagggctggaccatccagtcatctaagagtcggcagtggacaactgccgactccgtcgccttacacgtctgtggattgcgcgttcccactaggcccggcgagcctttaaccctgggtagagaaacctggcgccgcgccaggtcagctcttcatcgacttcgacaccggtccgattttggactgcatgctgcaggctccccagccgtggcacatggtctactcgcttatagctactctgcgaccggagacttacgttggctggcttacacatccgcaagactcgcgtacttagccaggcgcttgggagggcccatattctctgaaagtctgctggctgggtggtcagacgagtcgtcactcgccgacgtcccctga

SEQ ID NO: 12436 - RNA, 1065 nt, synthetic construct
  source 1..1065: mol_type = other RNA
atgccatttagcatcaagaagcgtgagaaaaccaagctacgggacaggtttcctgtactatggcaagttctcggagacttgctcgcaaacgaaacctgttactgcgcctcagactacaacagcttcacatttaaggcgcgcagatccagaaaaagtcggacgatagatgccccttgccctcacctgaaggctctccagcggcaggcattgaacatcctgctggcgccagtggttgtacatgaagctgccatggctttcgcacctggcaagagcatcgcgatgaacgccaggtgccatctgggggcgacacacctctattctacggatattcgatctttctttacttcagtgagtcgtgtccatgtgaaggaaatgctggccacccgagtgaagtatttatcagtggaggcaagagaggagattctggaccttgtcacctggaatgaacgcctgcctcaaggcgcaccaacctcgccacacatcgccaacctggtcatgttcagcttcgatgagctgtgtacagatatggccacacgcgtgggcgctacatatacccggtacgccgacgacatttccatttccagtactagcgccgacgttcttctgcagatgcagaaagtggtgaatatgggcctcggagcactcgggatggagccacaccccgagaaaacacgacaccttggtcctaatcagacgaagttagtcaccgggctggacatcggtggatctcacattaggcccactcgggccttccgcaaaaagactaccgctctggtgaggatgtctgtaaagtatccagctgagatggaaaaacatcaggaggtgatctttgggtacttagccttttggtacgatgtcgaccctggagatccccagttggcaaatcttttgtggcagatgggtcaacctagggaagcctccagagctaaggctacccgccagaaacagataggcatgatgtccaaaccatcaccgactacaccgccgcccaaagaacagcaagccgtgcccctgaatgctgagagaaaacccagcaagccccccgttactaagcccgatgtctga

SEQ ID NO: 12437 - RNA, 945 nt, synthetic construct
  source 1..945: mol_type = other RNA
atggaggacgttttctatgatcgcgcaaactcataccacagttttacaataaaggccagacgctctgccaagatcaggacgattgacgcacctaacccccccctgaaattgttacagagagctaccttggacaagcttctcgcacccgttgtggctcacgatgccagtatggcattcgcacctgggaagtctatcgcaatgaacgcccgaaggcatctcggggcttcctatctgttttctactgacattcggtcgttctttccgagcgtcacgagccaacacgtgagggaaatgctggaggccaggttccagcacttctctcccgaggctcgtgaggaggtccaagatctggtgacctttaatggccggttgccacaaggagcgccaacctccccgcatatcgggaatcttgtcatgttcagctttgatgagatctgctgtgccaaagctgccgaaatgggagctgtgtacacccgctatgcagatgatattagcgtgtcctccaattcaagtgaacctcctcagcggatgcaggaagttatcaccggttatctctccgcgatgggcatggagctccatcctgacaagacacgacagctgggcccaaagcagactcggattgtaactggcctggacattggccgatctaggctgaggcccacaaaggcctatcgtaaaaaggccgccgccctcgtaagaatgagcagtaaataccccacaaaaatggcgcggcagcattacaagatactaggttaccttgcctactggaacgacatcgatccttcagacccacagttagcagccctgctggatcagatgaaaagaccgtcatgggcggctaaagtgcgcgctagcgctgctcgccaaaagccaagaggacaggccatgttccacagatttcccgaggaactgctaaaagacctggggccaggattgcggaagtga

SEQ ID NO: 12438 - RNA, 1056 nt, synthetic construct
  source 1..1056: mol_type = other RNA
atgatttttgggagcgacgaccgcaaggttaatattctggaggaatatcctacactgtgtcaagtgctggaggtcagccaggaggaagggaactgtgattgtgaggtgagttacaatagctttatcatcaagtcccggcgctccaaaaagtaccgtacaattgacgccccatgcccccatcttaagtccattcaaagagccctgctggaccgccttctagcaagtgtcccgccacacgacgcagctgccgcttttgtgagaggaaagtctattgcgatgaacgcccagcgacatcacggggcaagccacttgtttactacagacattagatcgttcttcccctctgtgaaggattctcacgtgcgagaaatgttgagaatccacttcccacatttcagtcaggttttctgcgaagagataatatccctggtcaccaacggcggacaactgccacagggagccccatcttcccctcacatagcgaatttggtcatgtcaaaatttgatgagcggtgccaggaggctagcgataacttaaaaaccgtatacactcggtacgccgacgatatctcaatctcctcaaatgatgctgcgagtctcagacgcatggaacgggttgtgcggatcggcctggacgctctggatatggaaatacacagtgaaaaaaccaggcacttaggtccccagcagactaagctggtgacaggcctcgacatcggtggctcaaggatcaggcctacgagggcctttcgtcgaaaaacctccgctttggtgaggatgagcgtgaaatatccggggaagatgaacaggcatcgcgatactatccgtggctatctagccttctggtacgatattgaccctatcgatccccaacttccttctctccttaatcagatggccctccatcgatgggaggtacggctgcgggcagcacaggagacaaatcagaggctcttacccattcagcccaaccctctgcagggcagaacccaaacgaatggatataccaaggtccgcagcaacatcgtttctctgttcaaaaagctcagagactga

SEQ ID NO: 12439 - RNA, 972 nt, synthetic construct
  source 1..972: mol_type = other RNA
atgtcgagcgagcagtcagtactttcttctgtactgggcctagacagtacagccatcaagcctgtcatgggatggtatgggccaatgttttaccacagcttcgacgttaagccaaagagacgcggccgaaaggcacgccagatcctcgcacccattgatgaactgaaaacaatccagagagctattctggagaaattactgtctcacgtctcaccgcatcccgccgctactgcattctttgcgggacggtcaattgttagtaacgcacgacagcatcacgggtgccggtacctgtataagaccgacatcagcgacttttttccctccgtgacgaccggcatggtcagggttgtcctcgagcggcacttcccgcacttgtcccaaagtgcaatcgacgaaatcattagattaactacccatgaggggacccttcctcagggtgcccccacttcacctcatctcgccaaccttgctttgtacgatttcgatgactctttgtccagactatgtaatgaaataggtgccaggtatactaggtatgccgacgatgtgacggtgagcgctcaggatgaatatgccctgagcatagccgccggagcgattcgtagcggctttgcggaactgggcctcgcacagcacccagctaaaacacggtgtttcggacccaattgcaggaaaatcgtgacagggctggacgtgtccggggaggtgattagacctccacggtctttccgcaaaaaggctgctgccctggtgcggatgagcgagacatacccaaagaggatggagaggcattcgccccgagtgatgggctacctggcccactggcaaggtaccactcctgatgatcctgaactttacaacctgaaacatagaatgcgccagttgcaacgccgtgaggctatagcggaccacaccgtcaatgcagtgtcctcctgggccatcgaggatgacctcaagattagtttttga

SEQ ID NO: 12440 - RNA, 1362 nt, synthetic construct
  source 1..1362: mol_type = other RNA
atgactgcacaaacccccgagaggctggtttttgagggacgggagcatccaatgttttcagagccactctccgatttcttgcgcagtgggagcgggcgccctgaattccagatgcagtctacggcatgctggagaggctatatcggcacatgggaagttatcggaaggagactttatctggttaagctggaaggccggctgaagtctggggaaaaggccaatctagctgcagtattccccagtagcgaagagcgtgtattcgcgcggtggttctctggaatcattcagctgccgcagggcgacgagatcgagtacctgcatatcggcttcgcttccatctatgagagagacttgcttcttagatttgaggacggagagcttgtcgaccgcagattgcgagtgaacggtgagacggggagtgatgctcccggtgactgtgcactactcccgaggcgcgaagatgcaaagctggctgccggccccggacatcagttgtgggagcagatagagcgggccgctgaagagctctccacacaaccaaaaacttttgccgccctggccctccgcgagttttactatacggaggggagtgtccggatagcacggaaaatcagagccctggcgtgtccctccgaacagctcaagaaactgcagaggtcaattctgactagcattctggacgtggccgctcctcacaaacaggctacagctttcttccgagggtgctcgattatacagaatgccaggcaacaccacaacaagcactacatgtttaaaaccgacatccgaagcttcttcggttcaattaccaccgaggatataaccacaactttacgtagatttatccccaatctctctcagaagaatctagaagcattgaccaaggtgctctcatgtgatggtaccttacctcagggcgcccctacctccccacatgttagcaatcttcacatgagggattttgacgaactggtgtcctcgcaagcgaaaaagcacaaatgctcctacactagatacgccgacgatattgccgtcagcagcgataacaagttcgctgtgcaccagatgtctgaaatcgtcggagatgcactgggcaacgcccggtttacccagaacacccggaagacacacctccttggaaaattcgataggaaaatcgtgactggcttagacgtgagtggggaccatattcgcccaacaaagaagttccgaaaaacaactaaggcgatggtcagagtgtttatcgtgcatgacaggaaagcaatgctgcctaacatacagtcccgactcgctttttggcgtagcattaggcctgacgatccagaaatgctgcaactgcgcaagtctattgcctcagcctga

SEQ ID NO: 12441 - RNA, 915 nt, synthetic construct
  source 1..915: mol_type = other RNA
atgcttaccgaggccccccgtcaccacctatggaaggaaatcgaacgcgctgcagaggagctctccacacaccatcccatcattaaacttaatgccttcaatggctactccgggagggagtttttctacaccgagggctctataagggtcgctcgaaagcggagagctctcgcctgtccttccgaacagttaaaagaactgcagcggatcatcctgacgtctattctcgatgtggccgctcctcataaacaggccactgccttctttcggggttgctcaattgtccagaacgctcgccagcatcaccgtaaggattatatgttcaagaccgacatcaagtcctttttcgaccatatcaagtcagcggatatcatgagagctgtgcagagatttattccgaatttgtcacaagccaatcttgatgcactaaccaaagtcctgtcttgtgacggtgctctccctcaaggcgcaccaactagcccacacgtttcgaacctgcacatgcgagattttgacgagttaattagcgccgaggcccgcaagagagggtgcagttacacacggtatgccgacgacatagcaatcagtagtgacgataagttcgctgtgcaccagatgagtgaagttgtgggggaggcgctggagaaagcaggattcacacagaacaagcgcaaaacacatctcttgggcaaattcgatcgaaaaatagtaactggactggacgttagcggagtgtatataaggcccaccaagaagtttcggaaaactaccaaagcgatgacgcgcgtatttattgtgtacggcagaaaggcaatgctgcctagcatcgaaagcaggttggccttctggagatccatccggccagatgaccccgaactgtttcaactgaggaagtctattgacaacgagaggtga

SEQ ID NO: 12442 - RNA, 1485 nt, synthetic construct
  source 1..1485: mol_type = other RNA
atgggcaagtctaagaacaacgaattttccagacggcagctgctgattgcctttgcttccacatcaatcattggcataatgccaagtatcacctcagcctctagccacatctacgagaaagagaatgcattaatttggcttatcggtacactgcagcccattagtttgaatgagcttgagaacacctccttttttccagaccgctcttggctgattgagactattaataacttcgaggagcagctactaattaacaagcataagcggatctccgagttttatttctctttgacccacgagggtcacgaaaagctgccttggatccacgctcatagtaaagatatcaccagactcagcattctccgttcaagcatcttcaggtccaagaataaggtcaaattcgatcgctggatagcatctgctggtgtatcccccccgaaacggacgaacgttccagtgagcctgggagctcacaacttcgcccgcattgaagacgagatggtgagttccgacagacttttttccgacaaaaaccagctgattagctttaatagtgcacaggacctggccgatagtatcccccagaatctgtcccagagcgaggtccctttgtacaagttcgcaattgacctaggcattagcgtggaattttttcaaaagttcttcgaacaccgttatgaaatgtacaagttcaagaagacacgcaaacagaacggaacgctgagggaaattgaaatccctcttgagaatcttaagactctccagagcgtaatggcatggaagctctcatttcagctgaagcctcacaagaccgtgcatagttttatacggggacgatcgagcattactaacgctaaggaacacatacgaggcgactttatcggcaaatctgacatcaggaatttcttcccaaacatttcatctagcaagatctatacatctctgatctcctcaggatacaacagattcgaagccaaattcatagccctcttctgtacaatacaaaagaacaagcgctccaaattgccgcatgggtcccccacctctcctatcctctcaaactttgtcctctacgatgccgatgaaaccatctatcagtactgcaaagccagggatatcacatatacccgatatgcggatgatttcactttcagcggcaaaaattactcaaaaatccaacaggcgatcaaataccagatttctgccttggagaatcatgactttcaacctaatcattcgaaggttaaaatcagcaatgccagggactttcccagggtgacagggattaacatcagcggggatatattccccccacggaatctgaaaaagagggctagagctgtttttcacctgatagagacggggaatagttcgccaaaagtgagaagccaagcagccggatacctggggtatttatctcagttcacctcattcactagaactgcgacttacaagaaatggcagaccatcttagagcgccggtga

SEQ ID NO: 12443 - RNA, 1005 nt, synthetic construct
  source 1..1005: mol_type = other RNA
ggctactacacgttcaccatcccaaaagggtcaggtggcaccagattaatcactgcgcccgatgatgagctgaaagcaaaacagaggaagctgttgaagaagatgcagaaaaagcactggatctcaagaaaggcacatgggttccgcaagcgacataactgccttaccaatgctcaggtccacgccggcaagaaatatattctgaacatcgacgtaaagaacttttttcccagcataacttctatcgcgtatcggaactacgctactcgggaaaggaatctgatggagacaaagtataaagatgaggaccgcggctttcccaatttgttcttctacgcagctacacctgtgtttcactccggatctctgcctcagggagccccaacgtctcctttcattagtaacatatacatgcgtcgcttcgacacacagatcgaaaagctcctcaggcagtatatctccgacgacatcctatacactcgatacgtggatgatctcacatttagttctaatagcagagccgttgaaagagtgatccctattgtccgcgggaaactgaaatccctgcgccttgagattaacgatgataagaccaagtttatgtccccctcgcaaaggcaagagataacaggaattaacgtaaacagtgggaggccgacaatcgggaaggcctatagacggaaagtgagagcgattgtccaccgcgctgaacagggttgggtgattacttcagcacaaaaggaacgattattgggcatgattagccacatcgctctctgtcatccgagtgaggccgcaaagtatcgtgacgccctgcttccagttagcatatccccaaatagcgcccgtatgttcagcggtgtgaatcgggttaagctgcccgtcaaaaagaccaggtcaaaaaagaaacagtctaattccaatgccggagtcaccggagctaaccggaccgtgaaacggaaaattgccatagacaaaaagggcgaggtgcatgacatcgactga

SEQ ID NO: 12444 - RNA, 1071 nt, synthetic construct
  source 1..1071: mol_type = other RNA
atgctcatggggccacaacagatgcaacccgtggctgcagcggccgcatggaatgttcctcgcatagaatccccagacgccttagccgactggctccgactcactcctggagagctgagatggttcgcagatctcaaccacctgaatgatcgcagcagaattcaaaagctgtcccattaccactatcagatatccacaaagccagctggtgggtggcggttgatcgagtcaccaaagcctcgcctgaaacacatccaacagcaagtgctgcaccatattctggaacgcattcctccacaccgtgccgtacatggtttcctgaagggccgctcgatccagacatttgccgctccgcatgtcggcaggcgtgttgtcttgagaatggacctacaggatttctttcctacgttccgaggcgctcgtattcgcgcgttcttcagaaccctgggataccccgaaaccgtggccgaccttctgggtggactctgcactaatgccgtgagccacaatgcgtggcctacgcggatgcatcacgaagactctgcccacaggtctagggtccaggccttctacagcagggtacatctgccccagggggcaccaacaagtccccttctggccaacttatgtgcgtatcgtatggactgcaggttggccggacttgcagagtcagctggcgctcggtataccagatacgcagacgatcttgctttttccggcgagaaggattttgaacgggggatagagaggtttagtacccacgtggctgcaatcctccttgaagaggggttccaggtgcactttagaaaaacaagagtcatgcggcagggcgtgaggcagcatttgaccggcatcgtggtgaaccgacgactaaacgttatgcggcccgattttgacaggctgaaagccattttaactaactgtgttcggctgggacccgagagccagaatcgagagggtcacgccaacttccgctctcacctggagggacggattggctttatggagatgatccatccccagaaaggggctcggctcagaaggatctatcgcgaaatcagatggccgtga

SEQ ID NO: 12445 - RNA, 1329 nt, synthetic construct
  source 1..1329: mol_type = other RNA
atgcagaagctcttcctagtgaaggttattgccggtgcatttctgtctggcgaacccacgattccagaaattgtcgccaggttgtctagaactctcgggaagagatgggactggatccatcctctggcccagaggtatataaagacaatcgcaggtcgaacccgcccacgacggagagatgtagtgaagtttctgctgcaggactctggcttcaagaaggcctggtccaatcatgcgcaccagctctccattaagcagtggttaaccgagccccaacgaatgcagccggtcagtgccgctgaaaattggggaattccagtgatagagagcatcggcgccctggcacagtggctggaactgactcccagcgaactcctttggttctccgatctacgcgggctaggctgccgctcagatgagcgtcgcttgaggcactatcactaccgcatcctggataaacaatatggtaacatcaggctgatcgaattgcctaaaccccgcttaaaacaactgcagctccagatcttagcgcagatactggagaggattcctccccacccatcggtgcacggatttgtgaagcggagatcaatcaaaactttcgttgccccgcacgtgggcaggcctatagtccttagaatggacttgcgggagttcttcccaagttttcgtgccgccagaatccagacactgttcagaaccatcgggtatcctgagccagttgccgacctgcttggagggatctgcaccaatgctgtgagccgcgacgtatggaaaaaaccttcccccgacgtgcatccttgtcggtggagcgaggcgcggattctgtactcaaagcctcacttgccgcaaggagctcccacctctcccgctctggcaaacctatgtggatacagaatggattgcagactggctgggctcgcaaagagtgtgggcgctcaatacacacggtacgctgacgatcttgccttctccggcgataaagcactcgaaatgcgcattgagaggtttgcgacacatgtggcagccatattaatcgaggagggctttatggtccactaccggaagacccgggtaatgcgtcaaggagtccgccagcatcttgttggactcgtgatcaaccaccatgtgaacacgattaggcccgactttgaccggttgaaagctacactgactaactgtgttcgtctggggccagaatcacagaatagaaatgcccacccacatctcaggcttcatctggaggggaggctgggcttcgtcgagatgattaaccctagcaaaggtaagcgactccgagctatttttaaccagatcaattggcagtga

SEQ ID NO: 12446 - RNA, 1329 nt, synthetic construct
  source 1..1329: mol_type = other RNA
atgccgttcagcagcctactgcgaactgttgcggcctccttcgtagcaggggaaacgacaaccgaggaaatcatcgccagactttcctctacattgggacggaggtggaggtggttgggccctcttgcccagcgctacgtgaagttcgtctcagcgagaacacgccccagacactccgaagtagtccagtttctgcgccacgatgcgggctttcgaagggcttggagccggcacaagaacgagatctctatcgagcagtggttaagtggtcccgctcaaatgcagcctgtgaccgcagctgcaggttgggacctgccagcaattgagtcaataggggaactcgccgcctggtttggactgaccgtcagtgagcttctctggttcgcagatctgaagggcctcgggtataggcagaagtctgagaaactccatcactaccattacaggatactccctaagcctagcggtgagattcgcctgatcgaggcccctaaaccccgactgcgcgaattgcagagacacatactgtccgggatcctgtccagaattcccccacatcccgctggtcatgggtttattaagggccgttcgattaaaacattcgtgctgccccacgtgggccagcacgtgatcctcaggatggacctgcgtcacttttttcctagttttcgagctgcgaggatccaaaccattttcagaaccacaggttatcccgagccagttgctgacctcctgggagggatctgtgccaattgcaccccaagagacgtctggaataagtacggcagtgagtccgattacgactgccggtggcaagcccgagtgctgtattgtagaccccaccttccgcagggagcgccaactagtcctgcccttgccaacttatgcacgtatcgggccgactgccggttaagcggcttggcacgcagcgcaggtgctcgtttcactcggtctgccgatgacctcgctttctctggcggggccgattttggaagacatgtggagcggttttcaacacacgttgcagctatattgctcgaggagggcttcgacgtgcactacaggaagactcgtgtgatgcgccaaggcgttcgccagcatcttgccggagtcgtgctgaatcagcacgtcaacgtaatgagggctgattttgatcggctgaaagctactctgaccaattgtgtgcgactaggaccaaaatcacagaacagggaatctcattcaagcttcagatcccatctggaaggacgcatggccttcgtggaaatgattaacccagccaaagggaagcggctacgggcaattttcgaccagatccattgggaatga

SEQ ID NO: 12447 - RNA, 1356 nt, synthetic construct
  source 1..1356: mol_type = other RNA
atgaggaatcactcgctccttacatctctcgccaggtcatttctggccggggaacctgacaccgatcaggtctttacaagagcaagtcgcttacttggaagacgttggcgctggctgcggcctttggctaggaggtatgttatggcatttgcggacaaggctaggcctagacagagagacgttgtccgctttctcctgcacgatcccgatttcaagcacgcccgtgaaaagtatttcaaagagcttagcgtgcgacagtggctgatcggcccacaacagatgcttcccgtggccgccgcagaaacatggggagttcccgctattggcagcattggggccctggccgattggttgcagttgaccccgggcgagctgcagtggttcgctgatcttaaagccctaggatataaacgaaaggactgcccacagctccagcactaccactataaggtgttttcaaagcgctccgggagcatcaggttcattgagagtcccaagcctaggctaaaggagctccagcgtcaaatactggctcgcatactggaccgcacgccagcgcatcctgcagtccatggcttctgtcggggacgatccattaagaccttcgcagcatctcacactggccggagggttgtgttacgtatggacctgcaggacttcttccccagcattactggagctcgcgtgcaggccctgtttagaactgctggctaccccgaaagtgtagcagatctcctggggggaatctgtaccaatgtagtcccacgggatgtctggaaagagccagcccacgagatcgatctgcgacagctctgggaggcaagagtgctgttctcccgacctcatttgcctcaaggtgcaccgacctcccccgctttggccaacttatgcacataccgcatcgattgccgacttgccggtttggccaaaagcgccaatgcggagtacaccagatacgccgacgacctggcattcagcggcggtcacgaatttgaaagatctgtagaacggttctcaactcaggtggctgccatcctatccgaggaggggtttgcgatcaaccatcgcaagacccggatcatgcggcagggcgtcagacaacatctcgctggcctggtgatcaaccagagggtgaacgttacacggtctggatttgactgtttaaaagcgactctcacgaattgcgtgcggctggggccagaatctcaaaatagggagaaccatccaagtttccaggctcacctggagggtcgcatcgggtttgtggaaatgataaaccccgctaaagccattaggctgcggaggatatttgagagaattcaatggacaggcatggaatcacagagagagcggtga

SEQ ID NO: 12448 - RNA, 1329 nt, synthetic construct
  source 1..1329: mol_type = other RNA
atgtctaggtcatccctcctgagagtcctggccaccagtattcttgcaggagagcctacggtggaccacatcgtagtgcgcgtgtctaggacactcggtaggacctggagatggctcccacctttgtcccaacgatacgtcaaggccttcgccggaaggactcgtccacggagacgcgacgtcgtccagtttttaagacatgaccctgggttcctgtgtgcctggtccaaacactttcacgagctctgggttgagcagtggcttaccgaacagcagagaatgcagcctgtggctgccgctgaaacttgggctgtccccgtaattgagagtcctggcgcactagccgattggttgggcctgcggacagtggagctgcagtggttcgctgatctgaaagggctcgggtataagtcctcccgacctaagcttagacattatcattaccggatcttggccaagcagtctggtaacatccggttaatcgaggcaccaaagccccgtctgaaagaattacagcgccaaatcctggcccagatcctagaacggattccaccccatcccgcagtccacggttttgtgaaaggcaggagcataaagacctttgttgcaccgcatgtaggacagagggtggtgctgcgaatggatttgcgtgatttctttccgagcttttctgctgcgagaatacaagcaatcttcaggacgctcgggtatccagagtcagtggctgacctgctgggcggcatttgtactaacgccacaccccgcgatgtttggtcacggcctgcgtttgacattgacctgagtcaggtccaggaagctcgcgccctgtactctcgcccccatctaccacaaggagctcccacctcgccagcactggccaatctgtgcgcttacagagtcgattgtagactgagcggcctcgccaaaagcgtgggggtggagtacacacggtatgccgatgacttagcattcagcggcaacgaagccttcgaacgttgcgtggaccgatttagcacccacgtggcagctatccttttggaggaggggtttgcggtgcactttcggaaaaccagagtgatgaggcagggagttcgccaacaccttgcgggcctggttgtcaatcagcacatgaatgttatgcgacctgacttcgatctgcttaaggccacattgactaactgcataaggctgggccccgaaagtcagaatcgggacgcccacccccgcttccgatcacatctcgaggggcgcgtgggtttcgtggagatgattaacccggtacggggacggagactcaggactattttcgaacagatccaatggaggtga

SEQ ID NO: 12449 - RNA, 1338 nt, synthetic construct
  source 1..1338: mol_type = other RNA
atgagtaagagctctctgcagcgcgcacttgcgaacagcttcctggctggtgaaccatatctggagcagctcgtatcaagggcatctcgcaccctggggcgagattggaggtggctgcgatcactcgcacacaggtacctgaagaggtttgcaggtcagacccgccccaggcatagggatgttgtgcggtttcttaacgacgattcgggctttagacgtgcttggcttcagaaccacagcgagttgactgtggcccattgggtgaccgagccccctaggatgcaaccggtcgcagcagccgagtcctggaagattcccagcataagctcagctggcgacttagctgcctggttagggctctccattggcgaattgcagtggttcgaggatgttcgccgactggtgtacaaggagggctccagtaaactccgacactatcactatcgtgtagttgccaagcaattcggagccgttagactgatcgaagcgcccaaaccaaggctcaagacactccagcggcagatcctgtcccagattctggagcaaatccctgcccatccggccgcccatgggttcattaaaggacggtccattaaaacatttgtgagcccccacgtcggacggagggtgatccttcgcatggacttgcaggacttcttcccatcgtttgcagctgcacgcatccaagccctcttcagaacctttgggtaccctgaatctgtggctaatttgctcgccgggatctgcaccacaactacgccccagtctgtgtgggagggtacagggttcgatgtgagtctgaaacagctgcaggaggcgcgcatcctatattctaatgcccaccttccacaaggtgcccccacttcccctgctctcgccaatctgtgcacctatagagtggactgtcgtttacggggtctggcttctgcagcgggagcagcatacactagatacgccgatgacttggcctttagcggcgacacccagttcgaacagggcattgaacggtttagtaatcacgccgctgctattatcctagaggagggcttcgctgtccacttcagaaagacgcggatcatgcgtcgaggggtccggcaacatttggcgggaatcgtcacaaaccaccatataaacattatgcggccagatttcgacaggctgaaggctatcttaactaactgtgtgagactaggacctcagtcacagaatagagacgcccactcccattttcggctgcatcttgaaggaagagtaggctttgtcgaaatgattaatccagccaaaggctaccgcctgagacgcatactggatcagatacagtggcctaccgagacatga

SEQ ID NO: 12450 - RNA, 1335 nt, synthetic construct
  source 1..1335: mol_type = other RNA
atgggcggcccaggcttctatgcggccttagcgaatagcatggtggccggcgaggctaccgaagatgccatcgccgctcgcctagcccaaaccctcggacatcggtggagatggatcaggccactcgctcggaggtatgtggcccgctttggtggggcaatgcgacctagacgccgcaccatcgcacagttcctgataacagatgagggattgtcccgcgcgctgaggcttcaccggaaagatattcgtatcgctaactgggttgctcccgctggcgacatgcagcctcatagagcagcaaagaactggcccgtacctgccattgaaaccgttggcgcccttgctgaatggcttcaggttacacccagtgagttggagtggtttgccgacctcaaaaggatgattagcagaagagaggacggattcgagggacccctgagccattatcactataggatcctggccaaaccagggggggacgtccgtcttattgaagcaccgaaggaaagactgaaaaagatgcagaggcagatcctggccgacgtgcttgaaaaaatccccgtgcaccccgccgtacatgggtttcgaagaggacgatcaattaagacatttgcagcgccgcatgtcgggcaacgcgtcgtaatccgaatggacctgcgcgatttttttccttctatctctgctccccgggtgcaggcattattccggactgcaggttaccctgagagagtggccgacctcttagggggcatatgctcaaatgccaccccaaggactctgtggacgaagaagggcagtggtattgatccactaaggatggctgaggccaggcagcactacgcttggccgcatctgcctcagggtgcaccttcgtctccagccctggcaaatatttgcgcctacagggtggactgtcggctgacatgcttggccgaagcctccggagctgtctacactcggtacgccgacgatctggctttctccggcggcatggatttcgagagatgtgcagagaggttcgctattcgcgcagcggctatactcctggaggaaggttttgcggtgcatcacaggaagacgcgaatcatgcggcagggcgttcgccaatacttggccgggattgtggtcaatgagcacgtgaacgtgatcagacgtgactatgatgccctcaaggctactctgaccaactgtgtgagacacgggtgggagtcccaaaaccgggaaggacacgttaacttccgcgaacacttggccggtcgggtcagcttcgtcgaaatggtgaatgctaagcggggagccaaactcagagcactgtttgagcgtatacgatggtga

SEQ ID NO: 12451 - RNA, 1206 nt, synthetic construct
  source 1..1206: mol_type = other RNA
atgacattgggtagaccatggcgctggctaagaccactgggccagaggtacctggccaggttctcgcaaggcactaggcctcgaacggccggagttgtcgacttccttctgcaggatccaggatttcgtcgggcagcccaacggcatgcacgtagcctggacgtggcgaattggctctgtgagcctcgccagatgcaacctgtggggaaggctgccggctgggatattcccactattgaaaccgtgactgatcttgcttcatggctggaaattcccttagacgcccttaattcagccgctgtcccatttgccacaagccatcactatcactatcgcctcctgtccaagcagagcgggatgctgaggctgattgaggcccccaagccacgacttaaggctttgcagagaaggatcgcagcgggcatactggactgcatccccctgcatccggccgtacacggctttcgccatgggcactctatcaagacatttgctgccccgcatgcgggacaacgggtagtgttgcggatggacttaagagactttttccctactataacacgggcacgtgttcaggcctttttccgcactgcagggtatcctgaagcagtggccgatatgttgggaattctctgtactaactcaacccctggaagtatctggaaaccggccgatcccaaactagtccctgagatgcgcgcacttcacaggaccccccatttgcctcaaggcgcacccacctctccagcgttagcaaacctgtgtgcatatagattcgattgcagactctctggcctagctctcgcctccggggctttctacacaaggtacgctgacgacctggccttttccggtgacacggatttcgagaggtccgtggaccggttcaccacacacgccgctgctatcctcatggatgagggcttcagcgtccaccacagaaaaacccgcgtcatgaggcggggagttcggcaacatctggcgggactcgtgaccaatgatatcccaaacatctaccgaggtgattacgaccgactgaaagccattctgaccaattgccttcgacacggccctgccagtcagaacagaaatgggcatcccgatttcagagcccacctcgacggtcgcatcagttttgtggaaatgattaacccctctaaggctcggaaactgcgtgcactgtttcaccagataaactgggcttga

SEQ ID NO: 12452 - RNA, 1329 nt, synthetic construct
  source 1..1329: mol_type = other RNA
atggccaacccctcattgcccaatctcctggctcgtagtttcttggcaggcgaaccctcactagaccaaattgtttcccgatgcacccaggtgctggggcgcagatggctttggctgaggccgctggctcagagatatctggaaactaccacgagtaaaactcgtcccaggcaacgcgaggtcgccgacttcatcttacgcgatcccgtgttcagcaggatatggagcgagagggcacatacactggcgattgaacaatggctgccagctccatcccgaatggcacctgtgccagccgctagagcttgggatatccctctcatagattcccctgcggccctggctgactttctctggcttgactacgccgagctggactggttcgcagatcttaagaagttaacctacaaaaccgcccacccacggctgaggcactactactatagagtcctcaccaagcagagtggcggcgtccggttaattgaagccccgaagcggcgtctcaagcgactgcagcgcgagatcctggccggaatcctcgagaagataccccctcaccccgccgttcacggattttttaaaggaaggagcatcagaacatttgtcgctcctcatgttggccggcgggtcgtgttgagaatggatctccgggattttttcgtgagcttcggcgcagcgaggatccaggcctttttccggactctcgggtatccagagagcgtagcggacctgctcggcggaatttgtacaaacgcggtgcctaggcacgtgtggcatgatgcagggagtgacatcgatccagcagaattcgaacgcgttcgctccctatactctcgccctcatctgccacagggagcccccacttctcccgctctggcaaatctgtgcgcctatagactggactgccgcctggccggtcttgctaaatcggccggggtaacgtacacgcggtatgccgatgacctggctttttctggcgggtcagagttcgaaaaacacgtggagaggttttccacacacgtggccgcaattgcattggaggagggtttttctgtgcatcaccggaagaccaggatcatgagaagaggtgtccgccagcaccttgccggcgttgtcactaatgagaggattaacatactacgtgccgactttgatcggctcaaggcaaccttaacaaattgtgtgaggcatgggccggcttcacagaaccgaactgcccatccaagcttccgagctcaccttgacggtcgcgtagctttcgtggaaacaattaaccctgaaagaggaaaacggttgcgaaccttgttcgagcagatcgactggagatga

SEQ ID NO: 12453 - RNA, 1308 nt, synthetic construct
  source 1..1308: mol_type = other RNA
atggccaacccagccctggttgcacaccttgcgcgctgttttgcgtccggagagacaaccgccgacagaattgctgaaagggcagcggaagtgttggggcggacctggttctggttactgcctcttgcccgacgctaccttaaagagcataagggttccactcggccgaaacagcacgatgtcattcgatttctactggatgacggggagtttaggagaagagcaaacaagctgagcgtggcccggtggttaatggccccacagaggatgcaaccagtacctgctgctgctacctggtccctgccagaactcgtgacggccggagacttggctgcatggttgggcgtaagtcctggggaactcgactggttcgccgaccgaaagggcctcaacgcacgaaccaagagagctcccctggaccactatcactacagaattctcgcaaaaccccggggaggcttaaggctgatcgaggccccaaagccgagactgaaagagatgcagcgaaggatcttgactgaaatacttaatcgtattcccgcacaccccgccgcccatggtttttgtccaggacggagtatacggacattcgctgaaccccacgtgggacgcagcatcgtactcaggatggacctgcaggacttctttcccagccttccggctgctaggatacaggctgtgttccgcacccttggctatcccgagtccgtcgctgacttgctggccggtgcctgcactcatcgcacactttcgtctgtgtggagggcagcagagcctagcatctctggggccgaactgttcctggctcgccaactgcatcagtcacctcacctccctcagggagctcctacctcacccgccttggcgaatctgtgcgcctatcatgctgattgtcggctaacaggtctggcaagacacttcggcgcggtgtatacgcgatacgccgatgatctggccttcagtttcgatgagccaggtgacgttagccggtttacctcttacgccgccgcaatcctgctcgaggagggctttgctgtcaataatagaaagactcgtattatgactcgggggagacagcaacggttggcaggactcgtgacaaacgctcgcttaaacattccacgctctgatttcgatcagctcaaagccacactcaccaactgcgttcgtttcgggcctgcggagcaaaatagagccggcgtggccgattttagggcacacctgctggggaggattggctttgtcgaatcaatccatcccggcaagggcaggcgcctgcgtatcctatttgacaatatctgctggtga

SEQ ID NO: 12454 - RNA, 1308 nt, synthetic construct
  source 1..1308: mol_type = other RNA
atggcaaacccagctctgttaagcattctggcccggtgcttcgcgtcaggagaacctacagcggatggtatcgctgcccgaactgcccaggctctcggtaggccatggttctggcttctgcccttagcgcgcagatatctgaaggcccacggcgctttgacacgtcctaagagacaagaagtcattaggttcttgctcgacgacaccgggtttcgccaccgagcacacaagctgagtgtagccaagtggctgacagagccacagagaatgcagcctgtgcaggcagccgctgaatggaatctgcccgagttggtgactgagggggatctggcttcttggttgtccgtccgcccagaggagctggattggttcgctgacccgaaagggctcaatgccaggacatcgcgcccacctttagagcactaccattaccgagtgctggccaaacggcggggaggcattcggttgatcgaagcccccaagccccggcttaaagaaatgcagagacagatcctcggcgagatcctcgatcttgtccccgcacatcccgccgcccatggattttgccctggtcgcagcatccgcaccttcgctgaaccacacgtggggcggccagtagtgctgaggatggatctgcaggacttcttccccagccttccggcagccaggatccaagcagtgtttaggactctgggctaccccgagctagtggccgaccttcttgccggtgtgtgtactaacagaacccactccagtgtattgcgtacaccccggccagctatacctcaggttgaactcatcgaggctcggcgcttgtatcactggcctcatctaccgcagggggctcctaccagtccggcattagctaatctgtgtgcctacagagccgattgtaggctgaccggactcgccaggaattttggcgcaatctatacaagatacgctgacgacctggcctttagcttcggacagccatcagatgtcagacgtttttctacgtatgcagctgccattctgctcgaggaaggctttgcagtgaaccaccgaaagaccaggattatgacgcgcggtatgcaacaacgtctcgcaggcctggttactaatgaccatctgaacatacctcggtctgattttgataccctgaaagctattctaacgaactgcgtgagacttggccccgcgacccagaatagagcgggggttcctgactttagggcccatctcaacgggcgcgttggattcgtcgagtccatacacactggaaaaggctcccgactgcgggcaatcttcgacaacatttcatggtga

SEQ ID NO: 12455 - RNA, 1323 nt, synthetic construct
  source 1..1323: mol_type = other RNA
atggatcgcaggacactcgcgactgccctggctagggcactgtgtgctggcgaagctgatgcagccagcgccgctgagcggttagagcagaccctcggacgtaaatggagatttgtggcacccctggctcgaaggtatgcagcggcctttgaggccgttgtgcgtccacgcctggcagatgtggagcggttcctcagtcgggacggcggtttttgcagagctgctcgaaggcatggaccacagctcgccgtggctcagtggattcaggaacctgcaccagcaatgaggcctgccgccgctgctagagaatggggtctacctgctgttgcgactccgggggacttagccgcgatgttggggctggaggctgccgatctggactggttcgcagatctgagaggctggggtgcagggggagttgacgccaaactggagcactaccgctatcgtgtggttcctaagcggtccggccgcctcaggctcatagaagctcccaaacagaggctcaaacaggtgcagcggcgactgttggctgaaatccttagaagcgtaccccctcatccagctgtccacgggtttgtggcggggaggtccgtagccacattcgcagagccacacaccgctaagcgcatggtactgaagatggatctgcgggacttttttccaagtgtgagggcggcccgtatcgaagcctttttcaggacggcgggctatccagaacctgtcgcccgagctctgactgggctagtgactaatgctgcacccaggagagtcttcgctaaagagggggagttgggtttagtgcacggcgcgcgaagcctatactgtagaccccatcttccgcaaggagcccccacctctcctgccttggcaaatatttgcttcagacgcgccgaccaacgccttgaggcacttgcccggtcagctggtgccgactatacccgctacgccgatgatctcgctttctcaggcggcgacgatttcgcccgacacgccagaagattttctttgcacgtcgcagcaatcgcaacagaggaaggcttcgccgtcgagcaccggaagacacggttggctcctgagtcgggcaggcaacggttagcgggagtcgtggtgaaccatagacccagcctgccgcgagccgaaattgagacgctggaagccatcctgaccaactgcgcccgcgactctccagaaacacagaaccgcgacggacacccccgttttcgggagcatctggcaggacgcatagcctacctcgccatgcttaatccctccaaggccgccaagctgagagccatcttcgaccggattgcatggacctga

SEQ ID NO: 12456 - RNA, 1326 nt, synthetic construct
  source 1..1326: mol_type = other RNA
atgcagcggagcctggtgataaaaaagttggccgaagtctttctggcctctgggataaacagtcctttcttgacttcacggtgcgcagtcgtgcttggccggaattggagatggctgaggcccctggccgatcgatatgtggtgaccttcagcaatcgtataaggcccagctacagagaagtcttaagtttcctcgaaaccgatactggcctcaaagaggcatttacacgcaactccggacagtttgaaatcaagcagtggatagaggaaaccccccacatgaggccagttccagctgcccaagcttggcccgtaccccctattgagacaacgggggcattggctgagtggctgtggctggacgcaggccacctggagtggtacgccgacttgaaagcctttgccgagacatccatctcagaaaaacttagccattattcttaccatgtcctgcgcaagagaaccggaagcgttcggttgatcgaagccccgaagcgccagatcaaaaagcttcagactcagattctcgagtggatcctaaatccagtgcctccccatcctgctgttcacggctttattgcgaagagatccattaccactttcgttgctccacacacaggccagcgggtggtgctgaagatggatctgcgaaatttcttcccgagtctgagggcggcgagaattcaggcattttttagaacggcagggtatccagacgaggtggcccagctcctcacaggagtgtgtaccaacatcacaccaaggaggttttggcgcgctcccgaactgaacctgaccttgcaggagattcaagacatgcgggatctctacggaaggccgcaccttcctcagggtgctcctacctcacctgctcttgcaaacttatgcgcatggcgcctggactgcagactgcaagcgttagcggcctctgcaggggcccaatacactcggtacgcagatgacctagttttctccggggacgagcatttcgaccgttctgtcagtcgttttagcgcccacatcggtgccgtggtgctagaggaaggcttcgctattcatcacgctaagacgcgaatcatgcggcaaggacaacagcagcgcgtcgctggccttgtagtcaaccagcacgccaatgtggccagacctgattatgacaggctcaaggccattctgacaaattgtatccgccatggacccgagtcccagaaccagaatgctcatacttcattccgacagcatctggagggtcacatctcgtttgtgcacatggtaaacccagccaaagccctcaggctccgagccctgttcgatcagatcgcatggtga

SEQ ID NO: 12457 - RNA, 1134 nt, synthetic construct
  source 1..1134: mol_type = other RNA
cgcgataggggacttctgcgggcctatgaaaattacggtcaccgaatcaacgtaatcacctccttcccagaggtacaggaaatgtgtcccgtcccagctgcgaggacatggggagttccaccaattagaactgagggcgagctggccacatggctggggatagagctgaatgagctttattggtttagtgatgtggcaggcttcggcgccagacttggtgcacctccgaagactcgccactacagttactggattctcactaaacgctccggaaacatcagactgatcgaggctcctaaatctagattgaaggccctgcatcgaaagatcctctctgaaattctggagcgtgtgcccatccacgacgcagctcatggctttgttaaagcaagaagcatcaccacattcgcagctccacacattggacggcgagtggttctaaagatggacctgcaggattttttcccctcctttcatgcagcacgaattcagactctgttccgcaccataggataccctgagcgagtcgcagacttgttttccggcttgtgctgtgccagcacgccgagagaactttggaagcagatgcctatcgaggtgaatccacagcaatggagggaatcacgggacctctacttcaggacacacctaccccaaggtgcgcctacgtcaccggctctggccaacatctgttgctaccggctcgattgcagattagcctctctggcgaattcggccggcgctgcttataccagatatgctgatgaccttgccttctcaggggtgggtcagtttgtgcgcggcatagagcggttcgctaaccacgtggccgctgtcctgctcgacgaagggtttagcgtcaactttaggaagacccggattatgcgtcatggcgtcaggcagcggttaaccggactcgtaatcaatcagcaccctaacgtgccccgtgatgagttcgatcgcctgaaagccattttgacaaattgcgttaggctcgggcccgacactcaaaacagggaggggttgagccattggcggcagcacctggaaggacgcatcgggttcgtggaaatggtgaaccccaagaggggcgccaaattacgcagaatatttgacgtgattgcctggaattga

SEQ ID NO: 12458 - RNA, 1332 nt, synthetic construct
  source 1..1332: mol_type = other RNA
atgcgccccaacgtctgcctctttgaggcactcgccagcgccttcgtagccggtgatcccaccgtggacgggatcgtcgcacgcagtgctcgcatgctgggacgtgattggcgttggctccggccactggcccaaaggtatgttgaaaccttcgcaggtcgtgtaagacctcgccgaagcgacgcggttgacttccttcggggtgataagcgattcagacggatctgccagagaatcccatcccatattggcattgcacattggctgactcagtcccagcgcatgctgccaatggctgccgccaagggatggagggtgccttccattgaatctgtcagtgccctcgcagattggctagggactgatgaaaattacgttgaatggttcgcagacttaaaagcattaagctgtaagtccgaccacaacaagctgagacattatcactaccgtgttctgctgaaagatagtggcgacgtgaggctgattgaggcccccaagcaaagcctgaaaaggttgcaacagcggatactaacggggatactgaatggcataccagcccaccccgctacacacggattcgtaactggcaggtccatcaaaacctttgctgctccccacgcaggcaaacggattgtgctccgaatcgacctgcgcaacttctttccctcgttccgggccgcccgcattgaagcatttttcaggactatggggtacccggaaaccgtggctgccatgttggctggaatctgtactaatgcgacccctcgggatatatggcataacgtgaagccgggaggcggacccgtgcagttttgggagacacgcagcctgtatgcgcgccctcacttacctcaaggggcccctaccagtccagcaatcgctaatctgtgttgctacaggctggactgtagacttgcaggtcttgctaggtctgcgggggctgtctacacaagatatgccgatgacttggccttttcaggctcaaagtcatttgagaaatctgtggagagattcagcattcacgtcgccgccatcgctttggaggagggtttttcagtgaatcaccataagacacgaatcatgaggcagggagtgagacagagactcgctggcgttgtcgtgaaccagcatccaaacgtgcttcgacatacgtttgaccggttgaaagccacactaaccaattgcgttcggtacgggccgagctctcagaatcgggagaggcacatcaacttcagagcgcacctcgaagggcgcatctcctttgtggagatgctcaatcgaaacaagggctctagacttcggaagctgttcggccagattaggtgggagtga

SEQ ID NO: 12459 - RNA, 1338 nt, synthetic construct
  source 1..1338: mol_type = other RNA
atgaccggacgcatcgctgccgcaatgaacgccgcgttcttagccgcactcgctcggtccctcatggcaggtgaacaaacagtggaagctgcacgagcgagagccatgaggactctcggacgcaggtggaggtgggcaggtccattcgccgcaagatacattgcagcctttcgtcatggaccgcggccacggttgaaggacgtcatcgcattcataagggccgatgaggggtttgatctggccgctttgacctatggctctaagctgagtattgctcactggctggcggccccacagaggatgcttccatatggccccgccgctgattgggatctgccctcaatccatactgagggcgatctggcccgttggcttgcgctgcacgcaacggagttggactggcttgccgatcgcaaaaatctctgtagaaagcaagcgaaccccaagctgcgccattaccgatacgtgatcgagcctaaacgcagagggggaatcaggctcatcgagagccctaaaaggctccttaaggaactgcagcgacggatcctggctgaaatactagacagaatcccccctcacccagccgctcacgggtttgtgaaaggccggagcatagtaaccttcgcaacgccccacaccaaccagcctctggtcatgagactggacctggagaatttctttcctagctttccagcagcgagagtgcaagccctgtacaggacactaggatatccagacgccgttgcagacgtgctgaccggcctgtgcaccacttcaactttacatgacattgtcagagcccagacattcgaggaccgccgtttgtatgagcagcggcaccttcctcagggtgctcctacaagtcccgcccttgccaatgctatggcttaccggttggattgccggctgtcgggacttgccagaactgcgggggctgtgtacaccagatatgctgacgatctcgccttctctggcggtgatgaatttcggcggaacgcacaccgattccagcaccatgctgctgccatcgccctggaggagggcttcgctgtgaatttccggaagacgagaattatgcgtcagggggtaaggcaatcattggccggcttggtcgtgaatggcgggttatccattcgtcgcagggacctggaaaccctggaagctatactcacaaactgtttaagacacggacccacatcccagaaccgagccaaccatggcgactttcgcgcccatctcgaagggcgcatttcctacgttgagatggttcacccggagaaaggtcgccgactcaggagcctatttgacaggattgattcttgggcaaatactctgtga

SEQ ID NO: 12460 - RNA, 1299 nt, synthetic construct
  source 1..1299: mol_type = other RNA
atgaaaatttcttttcctgctgccgttgtcagtgcggttgctcggtcactcatggccggagagccgacagtggaaggagcacatgtgagaatgatgcgcacactgggccgcccttatagatggctgctgccattggccggccgatatgtgagagccttcgctggaagaacccgtcctcgattgcgggaagtcgtgcagtttcttctgaacgacaggggatttaggagggtgcgccagagacagctcgccgtagaacactggctcaccgagcctcagcgaatgcttccctgtggtcctgccgcagagtggggcttacccgtggtcgaatgcgaggctgaccttgcaggatggctgggcctgcacctgtctgagctcgagtggttctccgaccgcaagggtctgtgtcgtaaacacggaagcgagaaattgcaacactaccactacagaatggaagagaagcgatccggcggcataagactggttgagtgcccaaaaagggaactgaaggaactgcaaaggtggattttggggagtcttctcgatcggatcccggcacatgccgccgcacatggtttcgtgaaagggcggagcatcgtctctttcgcggcaccacatgccggcaaggcagtgctcctacgtatggacatggagaatttttttccctccttccccgcagctagggttgcggcactgtttcggactctggggtatcccgaggtcgtggcggaacatttgatggggctgtgcacgaacgctgtgcctcgtggtgtatggggaacccgggtcgaaggcagaatgctctactcccgcagacatcttccacagggtgcccccacatcgccagccttggcaaatgccatggcctatcggctcgattgccgcctaactggcttagcccgcaccgcaggcgccgtatacacaaggtacgctgacgacttagccttcagcggcggggaagaattccggcgagtggttgatcgattcgggatacacgtggcagctgttgccctcgaagaagggtttgctgttaaccacaggaagacgcgggtgatgggtcagggaatgcggcaggctctagctggggtggtcgtcaatcagggcgtgtcaattaggcgcgatgagctggagaaactggaggccatcctgactaattgtgtcagaaccgggcttgctgcccaaaacagggagggggtagcggattttcgggcccacttagagggaaggatcggattcgtggagatggtgcacagagagaagggccgcagactgcgcgctattttcgagaagatcaggggctga

SEQ ID NO: 12461 - RNA, 1035 nt, synthetic construct
  source 1..1035: mol_type = other RNA
ctggtggccgaatggctccctgaagcacctaggatgaggcccgtggcagcagccgaagagtggaaattgcctgcgattgaaaccgttggggatttagcagattggctctccctttacccagccgaactggagtggttcgcggacctgaagcatctgaacaaccggcgacccaagctgcagcactaccactatagagtccttgtcaagaggtcgggaggcgtgagattgatcgaaacaccgaaagccacccttaaggcccttcaaagaagggtgctcagcggcattctcgatcatgtacccgtgcacccggatgtccatgggtttgtccgaggccgtagcatcgtgacatacgctcagccccacgtgaggcaggatgtcctgctgcggttagacctggagaatttctttcccgcctttcctgctgcacggatccaggccctcttcagaacgctggggtatccagagactgtttctgatagactggggggactgtgcagcaatagcgctcctgctgacgcctgtggtgcactctacgcacggccccatttgccacaaggcgcacctactagtcctagtctggccaatctgatggcgtaccgccttgactgtcggctctcagctttggctcggacagcgggtggtcggtatacaaggtatgccgacgacctcgccttctcaggtggggtaccctttcgccgtggagtggaccgcttcgcttcccacgccgctgctatcgccctagaggagggcttcggggtgaaccaccataaaaccagaataatgcgcccatccacccgacaacagcttgccggaattgttgttaaccaccacgtgatcatctctcgtagggagctggagctgttagaggcaatactaactaactctgtgcgcagaggcccagcctcacagaatcgagacggaacgccagactttcgcggatgcctacagggccaggtatccttcgtcgaaatggtgaatagggctaagggccagccgttgcgcaccctgtttgaggccattgattgggaaagatga

SEQ ID NO: 12462 - RNA, 1359 nt, synthetic construct
  source 1..1359: mol_type = other RNA
atgagccgagcggccatcctgtctgtcctggcacgctcactgcttgccggcgaacctgcgtatcccgcagctaggagtcgggcagaacgaacactaggacgccggtggcgctggttgggacctttggctagacgattcgctggccgatttggagatgcagtgaggcccaggcaccgcgatgtcgtcagattcctcgctcgggacgcgggcttttcagaggccctgcatgcttatgggggccggattcggattgctgagtggttggctgaacctcagagaatgctgcctgttgaagctgcactggcctgggatctccctgtgatcgagactgctggtgccctcgcggagtggctaggtgtgaccgtggacgaattagactggtttgccgaccggaaagacctgtgtgggagggcgaacgcctctgagcagctccgtcattatcgtctccgactgctggcaaaacgcacaggaggagcccggttgaccgaggctccgaaacctaggctgaaggccgtccagagacgcatcctggaaggcatactcgatagggtgccgccccatcctgccgctcatggttttgtgcaggggcgttccatcgtaaccttcgcagagccccacgccagaaggcggatgcttctcaggctcgacctggcggacttttttcctgccagtcccgccgccagagtggaagcactcttcaggacattagggtaccccgaggccgcagccggactattagctggcctttgcaccacagccactcccagggccttctggagagactgcccagcctggttgggagccgaagagtggtccgctgcccgaacgctgtacgctagaccacaccttccgcagggggctcccacatctccagccttggcaaacgccatggcctacagacttgattgtcgtctggcagggctagcaagaagcgcgggagcggtctatactcgctacgcagatgacctggccttctccggcgatctggagttcgcaagaggcgtacacaggttcgccgcacacgctgccgcagtagccttggaggaggggttcgccgttaaccaccggaagaccagaattcgcggtcagggtgcccggcaaagactggctgggctggtggtgaatgaccgccccaatctgccacgcagagacttagagaggctcgaggctatactggtgaactgcgctcggcggggtccacaagggcagaatagggcaggcgaagctgattttcgtgcccatcttgaaggccgtgtgggctacgttgaaatggttaatccagcaaagggagagcgacttcggaggatcctggagactattgcttggccagaacgccaaggccgcacgctcgatagctga

SEQ ID NO: 12463 - RNA, 1005 nt, synthetic construct
  source 1..1005: mol_type = other RNA
atgcctgaggcctggggcctccctaagattgctagtgctgaggccttggctgaatggcttgggctcgatccgcctgacctggcctggttcgccgacttgcgaggtatgacgagacaggccccaacagaggccctacggcactaccgttatcacgtgatcgttaaacgacatggcaatctgaggctgatcgaagcccccaagccgcgactgaaagcgatccaacggcagattctgacagagatgttggaccgggttcccccacacgaagcggcacatggatttgtgcacggtcgttcaatagccagctttgccgctccccatactggacagtccgctgtcctccgcctggacttggaccacttctttcctagattacagcgggcgcgcgtacgcgctttcttcgaaaccctcggctataggaagcctgtggctaccctgcttggggggctttgtaccaatagagcccccaggttccttccatggcccgacttcgcaacaatgcaggttcatactgccccccacctcccacaaggtgctccttcatctccaagtatcgccaacagctgtgcttacagagcagattgccggttagcagggttggcagctgctgcaggagtcaggtacacccgctatgccgatgaccttgccttttccgggggtgacgagttttctcgcggagcactgacatttgcaacgcacgtggcattcattctgggagaggaggggttcgccgtgaatcatagaaagacccgtctcatgagacaaggggtgcagcagtacctgaccggactggtcgttaaccagcacctgaacgtggatcgggaggattttgatcgacttaaggccactctcacaaattgcgtccgcagaggcctggcgagcgaaaacagggagggcttaactgactttagggcgcatctggaaggcagggtaggcttcgtggagtggatcaacccacggcgcggcgaaagattgaggggcctaatactgcagattaaagattga

SEQ ID NO: 12464 - RNA, 990 nt, synthetic construct
  source 1..990: mol_type = other RNA
atgcacgcaaggttcgccttaagccatccgctgccaccactgcccacagaggtggctctcgccgattggctctgtctcagtccatcagagcttgactggttcgcaaatcgcagaaatctggcgacctctgccgccagaagccactaccgataccatctgcttaccaaaccctccgggggagtccgtctcctggaagctcccaagtttcggttgaagtgcctccagaaacgcattcagactggcattctggaccttttgcctccgcatcctgccgtgcacggctttgtgaaggggcgatcggtgaagtccttcgctattggtcacgttggacagcccggcgtgttgcgcatcgatctcgagaactttttcgcttccgtgcgctctgctagaatcaccggattgttccggacgcttggctatccccctccagttgccaagctgctatcagaactctgcacgaattctgtaccaaagacagtcctggccgaccatcccgagaggtttctgtacttcaatagacacctaccccaaggagccccaaccagccccttgctggccaacctgtgtgcatatagagccgactgcaggttagcagccctcgcaaaagccgatgggagtttatataccaggtacgctgacgacatcgcattctcaggtttcgtcaacaacgaccttgctgcccaagctagtgcgatactggcagaggaaggctttacagtaaatcaccacaagactcgccttatgtccgagggagttcgacagcatctggcgggcctcgtcgtgaacgccaaaccatctacacctagagatgagtacgatcggctgaaggcaactctgactaactgtgcccggtatggtctagatagccagaaccgtgacaagcaccctaattttcggcagcatctggaaggtcgggtggcttgggtcgaatacatccaccctgagaggggggcgaaactgaggaccatattggctaaactggaaccttga

SEQ ID NO: 12465 - RNA, 1299 nt, synthetic construct
  source 1..1299: mol_type = other RNA
atggcacgcatccttaacggagctcccttcgacgtccccggtatgatcgcctcagcagacgagatgctaggacgacggttccgctgggtgcgcttactcgccaaacggtacgccagcgctatggcaggcaaaacacggccccgccttcggactacccgtcaattcctcatccaggatggcgctgtatccgaagcgtggaggaaacacaagattagagttgagcagtgggtcacccacggaccaagaatgcaacccgctccggctgcctcagaatgggacctcccacggattgaaacatcgggcgatctggccgactggttttggattgaacccggggagctggagtggttcgccgatctcaagcgtctgggcaataagttgggtgttgctaagttgcagcactaccgatacttgatactcaagaagcccaatggcagactgagactgatcgaaatgcctaagaggaggcttaaaagcttccagagacagatccttgagttcatattggaccgaatccccgtccatccggctgcgcatgggtttgtgaaaggcagatcaatccatacattcgttgcaccacatattggacaggaggtagtgctgcgaatagatatcgccgatttcttcccagccattagtcaggaacggattcaggccctgtttcgcacgatgggatatcctgaagcagtatccgacctgctcggggggatatgcacaaacgccgtgccatacgaggtttggggacagaccccggagggtgtcgatgctcgggtaagatatgaagccaggaatctgtatagatgggcccaccttcctcaaggcgcgcctacttcccctagcctggccaacctgtgtgcctatcggttagactgtcggctggccggattagccaatgccgcaggcgtgcggtactctcgttatgcagacgatctagctttttctggaggcggggcattcgttaagaatgtgagacgctttgcggtcagtgtcggctctattctgcaagaagaaggttttgctgcaaaccacaggaaaactagggtgatgaggagaggagtgcagcagagactaaccgggctggtggtgaacgagaggcctaatgtgtcccgcgaggaatacgatcgtctcaaagcgatcctgaccaattgcgcacgacatggggctggtagccagaaccgggaaggccacgccttttttcgcagtcacttggaggggcgagtcggctttgtggaggctgtgaacccagagagggggcaccgcctcaggaagattctggagaggatcgactgggaggagtga

SEQ ID NO: 12466 - RNA, 1365 nt, synthetic construct
  source 1..1365: mol_type = other RNA
atgcctctcgccctggaaattgaaatctgcgccgccttggcacaagccttcacgaacgcggcgtccttacccgacatggtggctagcgcagatcatcttctgggtagcaggtggaggtgggtaagactgctagtgaagagattcgctgctgccaatcctagcgccacacgacccagataccgcgacgcatatcagtttctcgccaaagacggagctgtccggagggcactgtatcggcatcccggcgaaatccatcttgcccacacaattccctctcccccaagaatgcggcctgtcccagcagcccaaccctggaatctgcctacccttgaaactctaggggaccttgctcagtggttttggctgtcacctgagcagctagattggtttgctggcctcaaccgattctcaaagaacggatccgaggagctgcaacactatcgctaccgtctcgagccaaaatcacatggaggcttaagacttatagagattccaaagccccggctgaggaaattacagcgccagatcctccactatattttggacttgatcccggcccaccctgcggcacatggatttgtgaaaggtaggggcatcctgtcctttgctcaaccgcacgcagccaagcccattgttttacgactggatctccaggacttctttccatctatctacggccccagagtgcagactttgttcaggacatttggctaccccgagaatgtcgccgatagcctggggggtatttgtacgaacatagttccgtctcacatttggaacactaccccagagggcacaaccttggacgctaaggtggccgctaaggcgctctaccggtcgagtcaccttcctcagggtgcacccaccagcccagcactcgctaacctctgcgcataccgcttggattgtcggctgaccgggttggctaaggccgcaggagcagtttatacaaggtacgccgacgatctggccttcagtggggatgcgtcctttgcacggggggtagaccgtttcgccacccatgtggctgccatcgccgctgaggaaggcttctccgtgaatcatcgaaaaactcgcatcatgagactgggggtgcgacaacacctagccgggcttaccgtcaacgaaaaacctaacatacgtagggacacattcgacgagctgaaggctatactgactaattgcctccgccacggacctgctacccagaatcgggaaaatcatcctgatttccgcgcccacctggagggcagggtgagttttgtcgcgagcatccacccagccaagggactgaaactgcagtctctgctgagacagatccagtgggccgatactcctagacccgccgctccaagtccgccatga

SEQ ID NO: 12467 - RNA, 1377 nt, synthetic construct
  source 1..1377: mol_type = other RNA
atgaaacctcatgattttgccacagtgttggccatagcacttctggccggtgatcagagcgatgacgccgcagttgcacgcctgaggttggtggcaagagggaggcaacgggacctgctcagactcgttggctattaccgggccctagcgcctaatggtgttgcccccaggagaagggaggtggcaaggcagctgcgcgcactcttcgacgcccagagagaacgaggagcagctccctgggttcgggctaggacgcaagtggatgtgcccctgccctcgccagtaatgaggccgagtgcaatgcgcacatctgctgtgcgtgctgctccagcccatgcatgggaccctgccccaagagacaggcctgacatcgccaccgtaggagcgctggccagctggttagaactgcctgtcgaggaactgctttggttcgctgactgtagagacttgaaccgccgccattccgctccgagtcttcgtcattatcatgtgtccactcgtccaaaaaggcacggaggggtccgcgtgattgaagccccacaaacccgcctgaaggccatccagagaaaaattctatcagagatactcgaaaccatccccctctattatagcgcagcccacggtttcgtgaagggccgttctgtgcgatccttcgccgctgagcacgtcgggaagcctctcctgctccggattgatttagctgatttcttccccactgtgtcaggggccagagtccaagccctgttccggacactgggctacccagaggctgtggcggaccttcttggcgggctgtgcactgcgacaacctctagacacgtctttggcgcggttcgggcacaggtcgacagaaggatgctgcagcacgccatggagttgtacaccaggccccacttacctcagggggctcccacaagtccggcactcgcaaatgcctgtgcttttcgactggatgcccggctcactggtcttgccgattgggctggagccgtgtacagccgatacgccgacgatctggcgtttagcggcggagacgaatttgccagacgaattgaccgcttttgcgctgaagtgggcgcgattgccagggatgagggctggagggtgcaggaccacaagacccgaatcatgcggagaggagcacgccagcagttggctggcgtcgtcgtgaacgagcgcctgtccacccctcgggttgcctacgagcagttgaaagccacgctgactaattgcgtgcggtttggcccagcatcccagaaccgcgcggctgtagtcgatttcagagctcatctactgggacgtatggcttgggtagcttctctccacgcagcccgagggcggaagttacacgccatcttcgatcggatctcatggtga

SEQ ID NO: 12468 - RNA, 1344 nt, synthetic construct
  source 1..1344: mol_type = other RNA
atgccccaccaatcactgacgatcgcgttggccagggctttgactggcggctcgcaggacgagccttccattgcactgaggttagcagtaacccttggccgaccacctgctcgctggatagcgcgattcgcccatcggtatgtccgtgcattttctggtaatactcgaccccgtgagatcgaggtcgcccagtttatcgttgccgataggtcttggagtgcccgcttagcgccaacccccactcgacctagacagctagtggcgcgctggcctcttgaaacaccggggatggttccagttccagccgcagcagactggcccgtaaaacgtatcgagtcagtaggggatctggccgaatggctgggaattgacagcagcatgctcgactggttcgtggatgctaaaaacatcgctcacaagcagcctcatacaaagctgcaccactatcattacagggtgctccagaaacggtctggcggcatcagaatcatagaggcccctcaggagcgattgaagatcattcaacggaaaatcctcaaggatattctcgaacaggtgccacagtattactccgccgcccatgggttcgtcaagggtcgctcagtgcggacatttgccgcaccccacgtgcaacaacaggctattctccgaatagacctgcaggacttctttccaaccatcggccgggccagagttcaggctctgtttcggaccctgggctatccagagactgtcgccgatgcacttggcgccctctgcacgaatacaaccccccgcaggttcttcgccatgaccccgagaactgccggagacgtggcgcttcaggtgaaggctagacacctgtacggaaggccgcatgtccctcagggagcacccactagtccactgattgctaacctttgcgcttatcgcctagattgtagactaaccggactggccgattgggcaggggccgtttacacaagatacgcagatgacgttgctatttctgggtccgggaatttcgcccgcaacgtagaacgctacgctgcggaagtgtccggcattgctctcagagagggctggagcgtgcaacatcacaagacaaggataatgcggcgcggtgtgcgtcagcatttagccggaatcgtggtcaacgagaggctcaatgtcagtaggacggacaccgatcggttgaaagcaattctgaccaactgtgtgagacatggtcctacaagccagaaccgggaacaccaccccgactttcagagccacctgcgggggagagtgggatgggtgacctttgtcaatcccctgaaaggacaaaggctggctactttgttcgagcagatcaattgggaatga

SEQ ID NO: 12469 - RNA, 1191 nt, synthetic construct
  source 1..1191: mol_type = other RNA
atgcacaccctcgcacgagcgtttctcgccggggaactgaatgcccagtcagcagcagctcgagcagcagcgctgttcgctactcccccccgttggttgcccgcactagcagctagattcgtcgcggccttcgcaggaaaaacgcgaccgagatttctgcacgcagtcgcctttctccaagcccagcctccacgcgcggccaaactgattaattggctcacagagcctgctgtcatgcagccagttgaagccgccaagggttgggctctgccttccctcacttcaactggggagctcgctacgtggctggggctgagtatacctgagttggaatggcttgccgacttaaggggtacagcgcgccccggtcactaccattaccagcctgtggctaagcagagcggagccgctcgtttactcgaagcgcccaagcctcgcttgaaggccgctcaacgacagatcctgcgccagatccttgatctcgtgccaggccacgccgccgttcatggatttcggagacatcggtctattcggacattcgccgccccccacgctgctagaccagtagtcctgcgcatggacctgagggattttttccccagcatctccaggacacgggtcgatgctgtgtttagaactctagggtaccctggccccgttgctgcccttctagctggactgtgtaccactgctgccccgactggcggtccattatataggcaaccccatcttccgcagggcgctcctaccagtccagcccttgccaacatttgctttcacagatctgattgccggttggcgggtttggcagctgctaccggcttacagtatacccgctacgcagacgatttggcattcagcggcgagttcatcagcgagaacctgcaggcaagaataggcgcaatcgtgcttgaggagggcttcacgctgcagtatcgaaaaacacgcctgatgagacaatcggtgaggcaacacctggccgggctcacagtgaatgccgggtgtaacgtacggcgggttgacttcgaccgcctgaaggccacactgcacaggtgcgtgcagctaggaccacgtgacgaaaccagggatgccctgaccggccatgtggcctttgtggaatccgtgaacgcagccaggggaaggaaactccgggccctgctggagagaattcagtggacctctcatggatga

SEQ ID NO: 12470 - RNA, 1347 nt, synthetic construct
  source 1..1347: mol_type = other RNA
atggagcggcccttgcagcctctgtctcactcctcaaacgagttcctcagcctcgctcacgcacttctgtcagccgagcaggccgtggaaccacacctacagatcttgcgtactgcatttcgggcagaacctccccccggaaggcttagacccctggctgtacgaaccgtgggatgggcaagcactaggcccagaccgagaatcagacgattcatagaacagctacgggctgagcctcgccttgtgcgcctcatagaacgccacgggctccgacagctgccattggtgagtgtaccgctccgtatgctccctatccctggtactgcgcctgtggtgttggagacagccgggtccttggctgcatggttggaggtcgaagccggacaactgctgtggttcgccgacctgcgggattggaacaggaaagcggggggtgaccgcctgaagcactatacctgccgggtgctcgctaagccatatggcgctattcgcttactggaagttccaggacccagactcaagagcatgcagcggagaattctgcgtgagattctcgcccctgttccaccccatccagccgcacatgggtttaggcgagggcgcagtatcgtctcttttgctgctccccacgcaggccgagaggtcgttctgaggatggacctgcgtgacttcttcccctccataagcgggccgagggttcaggcgctgttcaggactctggggtaccccgaacctgttgccgacctccttggcggcctttgtacagcgaccacaccgaggggtgtgtggcgcaatactggatgcgagctgtcggcagcagacctccaggatgcgcggatcttttacgccaggccacatttaccacagggcgcccctacatctcctgctattgcaaatctatgcgccctgcggttagatcggagaatcggcggcttagctgaaaaagccggtgtgacatataccaggtacgccgacgatcttgctttctccggagatgcactctttgctagaggagccgagaggtttgccttgcgcgtcgccgcaattgccgccgaagaaggcttcgccgtccatccccgcaagacgcgactgatgagacggggggtccggcaacatttggccggtctgaccgtgaatgctcagccccaactgccacgccgcgagctagagagactggaagctattctgacgaactgtgtgcggcacggcccagagggacaaaatagagatgggcacgccgactttaggaggcatctggagggcaaagtggctttcgcaaccatggtaaaccctgcccgtgccggccaccttcgagagttactggagagaatcgcgtggggcgattga

SEQ ID NO: 12471 - RNA, 1797 nt, synthetic construct
  source 1..1797: mol_type = other RNA
atgggatatcacgagcccaccccggcaatttcagtgccggcaagacccagggtacctcacgtcagtcgcgtgggtgacatggggtaccatgaacccacacctgcgataagtgtgcctgctcgaccccgcgagcctcatatctcaaggctgctcgaaacatgggatactaccaacctgaccagaccaagcgccctctctcacgagaggcggtgtgatctcgctctggcttcgcggcctcttgcagcacaacggccagctgctattctcttaatgcgtcgatccgccccctcttggcagggcaaaaaaccgagtggattggccctcacgtctctgggcctccctcaaggtaacgtagccattagggcactagtcgccggcgcctccctgagatctcatgccgaccagttgccaccaggtcagaccaggtggtcgacccctttagcccctcggctgtccaagagtgtgctgatacgtgcattagctactgctttcctgcacggggaacccactacagaggagctgatccaacgagcagcccacactctggggcgcaactggaggtggcttcggccagttgcccgacggttcgtggagagattcgcagggaaagttcggcccacaagacgcagcgtgctcgccttcctacgtgaagatgagaacgtcaataggacatggcacagccgtaggcatcagctcaccgtggcgagctgggtggtggaacctgatggcccagccgcaatgcagcctatggcagcggcagcagattggcctataccagccatcgccacagtcggagacttggctcgatggctgggcctgaccatgggcgatctcgagtggttctccgacccacggcggcttacggctaagacacgcactcccactttacagcattatcattatagggtctttccaaagagcagcggaggctttcgcctgatcgaagctcccaaatttcggctcaagaaagtacagcggcagattcttcacgagatcttggacagggtgccgacacatgcagctgtgcacggctttgtgcctggtcggtccattaaaactttcgcctcactacacgccggtaagcaggtagtgctaaggatcgacctgcgagaattctttccatccattggacgtccccgcgtgcaggctctgtttcgaaccatgggatatccagactctgtggcggggttactgagtgggctttgcacgaacgcgactcctcgacgcgtctggagagaaggcaccgctcaacccagccggagcgttgacccagcagcctcattcgaagccgcccagttctacgctagaccccatttgccccaaggagcccctgcgagcccagcattggcaaatctttgtgcctttaggctggactcccgtctgcagggactcgctaatgctgccggcgccacctacgctagatacgccgacgatctggccttttctggggacgcagccttcgctcgctcagcagagcgcttcgctgccagagttgccgccatcgcggaggaagaggggtggacagtcaatcataggaagacgaggatcatgagacagggcgtcaggcagcaccttgttgggctggttaccaatacccacgctaacgtgcgccgcgccgactttgatcggcttaaggctattctgactaattgcggactgcacgatcccgcgacacagaatagagaaaaccaccccgccttcagggcccatttggagggcagagtgtcctttgtcgagtctatcaacccgggcaagggtagaagactccgcgcgctgtttgatagaatagtttggtga

SEQ ID NO: 12472 - RNA, 1452 nt, synthetic construct
  source 1..1452: mol_type = other RNA
atgagggcgtatgccagctacctgactccagaccagacccgttggtggggaagcgctgctgctcctactatgctcccctcgaggacccaagtgactccccctgttgagtgcacccgcaataacttggcccgagcactggctagtgcaatggccgccgggccagtcgaaacagatgctctcatggaacgcgcctcacgactgctgggtgatcaggagcagcataaacggctgagctggctgcgcccccttacgagaagggtggaggctgaatttggggcaggtccacgacctagagctgctgccctggctgagtacttgttgtgtgacgagggatttgaacgggcctttcagaaacacgcgccttggccggtaggccttgtatctgctgcccccgctatggcccctatacctgacgccgcagattggagagtagcccctctgaccaccgttggccaagctgccagctggctcgggttaagtgtgggtgagcttcggtggttcgccgactgcagggcctgggaaagaagacgtccagccggccccctccgacactatcagtatcggggactaactaaacgattcggccagacccggttaatcgaggcgcccaagccaaggctgaaggccctccagagacaagtcctggaacgtgtgttagacagggtgccgccccatgatgccgctcatgggttccggagaggaaggtccgtggggaccttcgcagctcctcacgcaggacagagggtcgtattgaagattgatcttcaggacttctttccgtccatcgcaggggccagggttgctgcactgtttcggtccgttggctatcccgagccagtcgccgacgtgcttacaggattgtgtacaaactccgcaccacccgatgtctgggcagagggtcccacgtcaagagcagccgcccagcaaagacgcctgtactccgctcctcatctgccgcaaggggctcccacaagccctgcactagccaatctcatcgcctaccgccttgattgtcgactggcggccctcgcaaaatctgcaggtggcgtgtacactcggtacgcggacgacctggctttcagcggcggtcaggaattcctgcgcagtgtgcaccggtttcggacacacgcgtgtgccaccgccatggagcagggattctcagtcaaccaccataagacacgtgtcatgccctcttcccagcagcagcgcattgctgggctcgtggtgaatgagaggccagccgtttctagagtggagcgcggcagactgaaggccattctgagtaattgcatcaggcacggacctgaatcacagaaccgtgacggccacgcagattttagggcgtgccttcaaggccgcgttgcatgggtggaaatggcatgcccaccacagggcgcgaagctacgctctctcctggatttggtggactggactgccacgcggaaaagatga

SEQ ID NO: 12473 - RNA, 1323 nt, synthetic construct
  source 1..1323: mol_type = other RNA
atggaaactgatattcaatcagtggctagagctctcgctgcagctttcgcagcagggccactgaccgctgacagattggtgggatgcggcgagaggacactgggtcgaaggtacagatggctgaggcctctggcctggagagttgaggccgaattcgcatacgggcctagacctcgggcagaccacatcgccgatttcctgctgctggacgagcggttccgagtgtacgcggcaaggcacgatgcagccgctgtctccagagtccatgacccagtggagttctgcccattcccggcagcacaagcttggcccgttgctcgactccgcacacctggacaacttgcgggctggttagacacaccacctcagcagctggcctggcttgctgacgtccgtggatgggaaaggcggaggaggagagggcccctacgccattatcattaccgggccctggctaagagattcggagccactagactcatcgaagcacctaaaccacggttgaaggccgtccagcgtcggctcctggctgagatcctgcaccatgttcctccccacgatgcagcccatgggtttcggcccggacgaagcattcggaccttcgccgcaccacactcaggccagcgtgtggtactcaaattagatctggaggacttttttccaagcacccccgctgcccaggtgaatgccctatttcgcagcctggggtatcccgaagccgtagccgatctgttgaccggtctatgcacaaacacggcgcccgcagccgtgttttctcccgacagtgcgcgtgattggagggccgctttacagcgcgcccggtatgcacagccccatcttccccaaggcgctccaacaagtccggctttggcaaacctgtgcgcttaccgcctcgattgtcgacttgccggattggcagcagccgccggaggtgtatatacccggtatgccgacgatctcgccttttcgggcggcgctgagtttgcgcgctctgttcaccgatttaggactcatgccgctgccatagcgctcgaagagggctacagagtcaaccaccacaaaacgcgcgtgatgccgaccgctcagcaacagaggatcgctggcctggtggtgaatgcccagcctgccgtttccagggctgagagagacaggctcaaggccgtgttgaccaactgtgtccgccacgggcctgcatcccagaatcacactgggcacactgacttccgcgcccatctgggcggtcggattgccttcgtggaaatggcctgtgccagacaggcggcgaagcttcgccgtgtctttgaacagatagagtggggctga

SEQ ID NO: 12474 - RNA, 1338 nt, synthetic construct
  source 1..1338: mol_type = other RNA
atgaggccaggccacagcaccgcggtagccttagcaaccgcattcgtggccggcccgttagaagtggaccccctcgtggaccgaggagcacacgtgcttgggggtcgaccccgttggttacgtcctctcgcccgtagagtagcagcgagattcggggaccagacacgaccaagggtcactgctgtggcccgcttcctactggccgacagggcattgttacgggccgccctcacctgccaaatacagcctggcgctggtctggggcttactccagagatggcaccactaggccctgctgctcggtggagaacaccatcactgtgtaacaccagagagttggcggggtggctcggacttcccgttggagaactggagtggttcgctgatctgaggagcctggagtctcgccagagagaagggcccctgcggcattaccactaccgccctctcacgaaacgattcggccagactcggctgattgaggcacccaaacctaggctgaaagctatccagcgggtcatcctcgcagagctgctggaccacgtcccaccccatccttctgcccatggcttttgtcggggcgggtccgtgcgaacctttgctgcaccgcatgccggaaggcccgttgtgcttaagattgacctggaggacttttttccctcaatcgccgcagccagagttagggccttgctccgcgccataggatatcccgaacgcgtagctgatcttctggcagggctgtgcactaatgctgtgccgcctgatgtctggaaggaagccggagctcctgccacaggacatgctgaccgacagctgcggcggtatgcccaaccacatctaccccagggtgcacctacatcccctgcccttgcgaacttgtgcgcgtaccggctcgattgtaggttggctgggttggcagaagctgcggggggtgtttatactaggtatgccgatgacctggctttcagcggaggcgacgcttttgccaggtgcgtgggcaggtttcaaacacacgtctgtgcaaccgccatggaagagggatttgcagttaaccattacaagacgagagtgatgcgtaggggccaacgccagcagattgccggtctggtagtcaaccacagaccaggcgtcgcccgggatcagagagatcggctgagagctaccctgacaaattgtgtgcgccacggtccagccagtcaaaatcgcgaagcccacgctgatttccgggcccacctaaatggccgcgtggccttcgtggagatggttagtccggagcaggggcagcgcctcagaagacttttcgaagagatccgttgggaggcgggctgcggagtgtga

SEQ ID NO: 12475 - RNA, 1323 nt, synthetic construct
  source 1..1323: mol_type = other RNA
atgccaacccccagaataacggcagacgctctggcggccgcatttttggccggggagatcgaaaaagaccagttgatagcccgtgcgtctaggatgctgggaagacgccctcgttggctagcccctcttgccaagcgcgtagccactgcatacggcaccagaacgaagccaaggcgcgcagctctggcgacctttctcttaggagatcccggctttcgcgccgctcttgctaagggcccactcagaatcgtggattggactaccgatgaaccggccatgaggcccacaactccagcggctgcgtgggttttgcctctgattggcaatatttcagaactcgccgcatggctgggcgtcagtctacatgagctggcatggttcgctgacatgcgctcatgggaggcaaaacggtcctctggggccctacgacactaccactatagaatcgagagtaaaaggttcgggcaggttaggttaatcgaggctcctaagtcccggcttaagacaatacagcggcggatcctggcagagctgctggaacccattcccttgcacgaagccacccacgggtttcgacggggtagatctattaaaagctttgcagtcccccatgtgggtcaggcagccgtgctcaaaatcgacctccaagacttcttcccttcaattgccgctgcccgggtgcaggctctgtttaggactgtgggatatcccgagccagtggcggatgctcttgctggcctgtgctgtaacgccacaccggcagatgtctggaacaggtccgaagccgacggagatgccgctcaacggcgacaaacccgttggctttatgagaagccacatcttccccagggagcacctacgagccctgccattgccaatctgtgcgcctaccgcctcgattgcaggctctcagcattggctgcttccgctagggccgcttacaccagatatgccgacgacctcgcctttagtgggggagccgacttcgcgagaagcgctggtagattcgagactcaggtgtgtgcaactgtaatggaggaaggatgggctgttcgccatcggaagacaaggttaatgcgacagggcgttcgtcagtcgctggcaggcatcaatgtcaataagcgactgaacctctgtcggcgcgacgtcgatcaactgaaggccacactgacaaactgcgtgaggatgggggccaccagccagaaccatgctgaccacgcagatttccgcagccacctggaaggtcgggtgtcttttgtggaattcatcaatccagagcgaggcgccaaactgagaagattgttcgagcggattgagtggtga

SEQ ID NO: 12476 - RNA, 1323 nt, synthetic construct
  source 1..1323: mol_type = other RNA
atggccagcgagacaattgtcaggctattggcggcagcttgcctggccggcaaccttgaagttgacgaagtggtggatcggtgggggagggctatgggcaaaaggtggcgttggctgcgtcctcttgctaggcgcgtcctcgccgaatttgccggtgacgcacgggcaagagagtctgcagtagcgcggttcatagcctctgaccgagggtttagaagagccgcgttgacccacgatctgcgtgtcgcagaggtccttcatgcctctgggcctggaatgtcccccgtgagggctgctgaagtgtggcagctgcccccattacgaaccgcaggcgagctcgctcagtggctcggaatcgatacacgacagctggactggtttgctgaccgcaggagctttggcagtaagcggcatcagggccctctcaggcactatcattaccggacggtagcaaaaagattcggtcaagtgcgcctgattgaatcccccaagccgaggctgaagcagatccagcgtcgcatactcgccggaatcctcgatctgattccgacacaccccgccgttcacgggtttaggcggggaaggtcgattatgacatttgctcagcctcatgttggtcaacgaatcgtggtgcgcatcgatcttcaggacttctttcccactgttggcagggcctgggtgcaggcattgttccgcactgtaggctaccccgaagtggtcgccgatgtgctggcaggcgtctgtacccacgctacccctgcagatgcttgggaaagtgtggattccgagcacttcggccgccagcctgacagaatccaccggttgtactcaaggcctcatctaccgcaaggggccccaacgtccccagctcttgccaacctgtgcgcctatcgcctggactgtagactggccggtttagccagaagcgcgggagcgtcctacaccagatatgcagacgacctcgcctttagtgggcaagcagacttcgtgagagtggccccccgattctgtctgcacgttggagccactgctatggaggaaggattctctgtccaccatcgcaagacaagacggatgaggcagggggtgcggcagcatttagctggactcgtcgttaatgagcgcctgaacgtacgacgcaaggatttcgatctcttgaaagccaccttgactaactgcattagatcaggcccacagtcacagaaccggggtaatcaaagcaatttccgggcccacctagctgggcggcttagctttgtggagctggtgaatccagagaaaggccgtcgactgagagagctgttcgacagaatcccatggtga

SEQ ID NO: 12477 - RNA, 1323 nt, synthetic construct
  source 1..1323: mol_type = other RNA
atgtctgacataactgtggcacaggccttgacaacggcgtttctgacaggagagcccgatttagatcagatcgtggataggtggagtgtgacactcggaaggcggtggagatggctccggcctttagccgtgagactcctggccaatttagacgaagccgatcaaagacgcgaagtagcagtcgcctggtttctcttccttgacagaggcttccagagggcctgcgactcccacgatctggatgtggctcagtggattcacatcacacgtcccccgatgaggcccatagcagcagcaagagactggcaggtgccgtcaatatgtacccccggcgaactcgctgattggctggacgtcgagccaaatcggctggagtggtacgccgacctacgtagcctggagtcgtattggcctcaaaataaactgcgccactatcattatcgcctgcttgagaaacgtttcgggcaggttcgcgtcatcgagtctccaaagccgcggttgaagcaaattcaaaggcaaatcctaaccggtattctggatcacattcccccccatcctgccgcgcatggattcaggcgcggctgttcaattagctcctttgcccggccacacgtgggcaaacggatcgttgtgagaattgacctgcaagatttttttccttccatcagccacctgcgaatcagggccctctttttgtccctgggctacccacagcaggttgctaaacgccttgcaggtctgtgcacaaatgtcgtgcctctcgacacttggctgggggattgtgggaacagatcaacgttcggacccagcggtgtccagagactgtattccacccctcatctgccacagggcgccccaacctctccagctcttgcaaacctctgtgcttttcggctggactgtcggcttgccgccttggctaactctgcaggggctacctacactcgctacgctgacgacctagctttcagtggtgaacgggacttcgaacgagttgctcataggttccacctccacgtgtgcgcagctgtaatggaggagggcttccgcgtccaccatcacaagaccagacggatgaggcgaggagttcgtcagcacctggcgggcttagtagtgaatgagagattgaacgtctgcaggcaggacttcgatcgactgaaggctatcctgactaactgcatcagacacggccctcagagtcagaaccggatggcgcatcccgattttcgcgggcatctcgccgggcgaataggattttttgaaagcgtgaatgccgcgaaggcaaggcgcttgcgagcccttttcgaccagattgcctggtga

SEQ ID NO: 12478 - RNA, 1323 nt, synthetic construct
  source 1..1323: mol_type = other RNA
atggactcttatgccaccatagccgacgctctcgcaactgcctttttggccggcgacatcgagacagacgagttggttgatcgaggctcacttctgttcaacagaaggtggaggtggattcgtccactcgcacggcgggtcgttgagacttttgcggccggcgtaagaccccgacagactagcgtcgtagaatttattctggcagatcggggtttctttcgcgcttgccagaagcacgaccttcgcctcgctaataggctggtggcgccaccaatgatgcgacctgtgattgcggctgccagttggcgtgtggccagtattagaactccacgcgaactggcagattggctgggggtgagcttcggggagctgtcctggtttgctgacctccgaggtctggaacacaagcggaaccatggacggctacgccactatcactaccgccctttggctaagcggttcggccaggttagactgattgagagtccgaaacctagactcaggcagatccagaggcgtgtgctgaccgacatcttagaccacatccctcttcatgacgccgtgcacggatttaggaggggacgctcgattaaaacgttcgcagccccccacgtgggacgtagagttgtactcaagatagacctgcaggattttttccccagcatcagcgcagccaggatccaggccatcttcagaacaatagggtaccccgaagaggtagcagaccttctggccggtctgtgtatgaattccgctccgaccgacgaatgggaccacgagttttcaggatcttcagggagacaggtcaggcagttccgctggctgtactcccaaccccatctgccacagggcgctcccacaagccctgcattggctaatctctctgcctaccacttggattgccggttaaccggactatcccggtctgccgccgcgacttatacccgctatgctgatgatctcgcatttagtggggcgcgggattttgagagagtggccatgagattccacaaccatgtgtgcgccaccgtcatggaggaacgatttacggttcatcatcggaaaaccagaatcatgcggcagggcgtgcgtcaaaggcttgctggactggtcgtcaacgaaagagtcaacgtgccacgggtggatttcgatcgactgaaagcaacactgacaaattgtatccgccaaggccctcagtcccaaaacaggcagggccatcttgactacaggggccacctccaaggtcgcatatcattcgtggagatggtgaatcccagcaaggggcatcgactacgcgctttattcgatcagattgattggtga

SEQ ID NO: 12479 - RNA, 1335 nt, synthetic construct
  source 1..1335: mol_type = other RNA
atgaatttttgcaacgtaactgctagagctctctcagcagcctttttggccggcgactttgatgtcgacggtcttgtggtacgtggatcaagagtcctgggaaagagacggcgctggttgaggcccttggcacgacgagcagtggagacgttcgccggacgaccaagaccacgcagggtcacccttgcggagttcattcttggtgatcctggctttctgcaggcatctcgacgacacggtctacggccagctacactgcctactgcaccctctatcatgtgccccgtgggcgccgctgaatcttggcaaattcccagcatccgcagtgctggagaattggccgattggctcggggtcaccattggcgagctcgagtggttcgccgataggagatccctggaatataagtggaatcatgggaggctgaggcattatcactaccggcctttgacaaaaaggtccgggcaggttcggatggtggaggcaccaaaaccaagactgaaggccatccagagacgtatcctggctggaattcttgaccacatccctctgcatgatgctgctcatggtttcaggcgcggacggagcataaacacctttgcatctcctcacgccgggaagagggtggtgctcaagatcgaccttcacgatttctttccctccatcaggctagcccgcattcaggcgctgtttcggactattggctacccggaagaggtagctgacctgcttgcaggcctgtgtaccaatgccacaccgcccgacgtttgggaagccgacacgatcagactggccgggggccaattgcaggaggcgtgttggctgtactcccagccacatctccctcagggtgctcccacaagccctgccttagccaatttatgcgcataccggctagattgtcgcttacatgggctggcacagagtgcgcacgctgtgtataccaggtatgccgacgatctcgcgtttagcggcgacagagacttcgagcgggcagctaaaagattccacctgcacgtgtgcgccactgttatggaggagggattcagtgttcaccatcgtaaaacccgcataatgcgtcagggggtgaggcaacggctcactggactggtcgttaacgaacgcctgaacgtgagccgcagacagttcgactgcctcaaggccacactgaccaactgtatccgcttcggcccacagtcccaaaatcgttcaggccacggcgaataccgggcccatctcgatggtcggatatcgtttgtggagacaatcaaccccgccagggggcaccgcttaagagaactgttcgatcgaattgaatggcctgagcgggactga

SEQ ID NO: 12480 - RNA, 1323 nt, synthetic construct
  source 1..1323: mol_type = other RNA
atgagcactcgtaatcataccgccaacgctcttgctcgcatcttcttagcggggaaatttgagtcagacgagatggtagagagggcctcacacctacttgcgaagaggtggagatggctcaggccgttggcccgacgagtagtagccgcttacgatggcaaacccctgccgcgatccatcgctctgaccaagtttattttgtccgacctgggcttctcccgggcgcttgaaaaacatgaagtgcacgttgtgcacccacttataaacgtcccaacaatgaacccaattgctgtggccaacacttggcgactcccctccatctgcaccatcaaagaattggccgatctactgtctataactgtgtctgaactgaactggttcgcagatcttaagctgttcgagtataagcgcaataggggcgctctgcggcattaccgttataggccagtcacaaaacgctttggaagaatacgcctgattgaggctcctaagccccggctgaaggtgatccagactctcattttatcaaccatcctgaataatgtgcctccccacaccgccgcccacggatttagaagggggcggagcatcaagacctttgcagagcctcacacggacaagatggccgtgctcaagattgacttaagcgattttttccccagcatcagtattgctcgcgtgcaaagtctcttccgcgccctgggctatccagagttggtcgctgacacactggcaggcttgtgtagcaacgcaacccctctggatgtatgggacagtcccaaagttgactctccggccaaaaacatcaggcaggtcagatggctctacgctaatcctcatctacctcagggagcaccaacgtcgcctacactggcgaatttatgtgcataccggcttgattgtaggctgagcgccctcgccgaatctgtcggtgcagtctacactagatacgccgacgatctcgcattttccggggatgactcttttgcacgtgtggccaagcggttccaaattcatgtgtgcgcaactgcgatggaggaggggtttagagttcatcacagaaagacacgtatcatgcgaaggggtgtgcggcagaggattgctggactggtggttaacaaacatctgaacttggccagaaatgatatagatcgcctgaaagctattctgaccaactgcatccggttcggtgcccacacacagaatcgcagtgagcaagacgacttcagagcacacctctatgggcgggtggccttcgtcgaatccatcaatccccgcaagggctcaaagctcagacagctactggaacaggttgaatggtga

SEQ ID NO: 12481 - RNA, 1380 nt, synthetic construct
  source 1..1380: mol_type = other RNA
atgtctctgcgggccagactggaaagtctcggctattcagcagcttgtctcattgcgatgtcgtcacccaagcgaattgctgaacctttggccgcagcctttctggccgggccattagaagtcgaggggatggttgcccggggtagccagttacttggcaagcgctggaggtggctttctcccctcgccaagagaatgcaccgctactttggggggacaactcggccacgtcaggctagattaataaatgtcatgctctgtgatgaggggttctatcgcgcgtgcactaagtacgagctgcagctcgtcgaccttcaggcatgccaacccgccatggcaccctctttggccgccttgagctggaacgtaccggcgttgtgcacaaccaaacagctcgccgattggctgggactggccgtgtctgagctggaatggttcgcagatatgaggaggtgggagacaaaacccgcctctatgcagactcaacactatcgctacagagtgctgtccaaaagaaatggccggctgcggcttattgaagcgcccaaaagcaggctcaatatgctgcagcgacagatcctgacacacctccttgaccgattccccgtccattccgcagtgcacggatttcggcagggaaggtcaatcagaacgttcgccgttcctcatatccaccgtccggtggtgctgaaactggatctgagggatttttttccaaccatacggattgcacaattatccgcactgttcaggacggcaggttatcctgagcgggtggccgatctactggccggtatctgcactaacactacgcctaccgaggtttgggacgacgaaggcctggctgcttccccaagcgagattaggcgaatgagaatgctctacgagcagccccatttacctcagggggctccaaccagcccaaccttggctaatttgtgtgcctacagactggactgtagactggctggccttgccgaagcgagtgggggtgtatacactcgctatgccgacgatctagcctttagtggcgacgagaggttcgccaggacagcagaaagattcgctatccacgttatggctaccgtcatggaagagggattcgaggtccatccgcgcaaaacccggctaatgaggcctggcgtatgccaacgcctaacaggcctcgtggtgaaccagcatctgaatatcgctcgtagcgaccgggatcggttgaaggctatactgaccaactgtgtgcgacacggccctgcaacccagaaccacgagggacatcgagactttagatgccaccttcgtggacgcgtggcttttgtggaatccatcaacccaacatggggcaagaagctccgcggactgttcgaccaaattgtttggtga

SEQ ID NO: 12482 - RNA, 1314 nt, synthetic construct
  source 1..1314: mol_type = other RNA
atgtgttcatacgtgtctatcgcacggaatttggcagcctccttcgtggctggccagtttgagtcagatgccatagtcgaaagaggtgcgcaacttctcggaagacgttggagatggctcaggccactcgccatccgcgtgatcgagaagttttccaaaggccctaggccctcccacgcttctgtcgtccagttcattctgagggatcacggtttcatccgggcctacgagaagcataatctgcaactcatcgacttgattggtgaagccaccgagatgagtcctattaagaaagcacaaccttggacagttcctataatcaataatattgccgagctggcagattggcttgggataacaatgggccacctggagtggttcgccgacctgaattctctagaatacaaatgcaaccgcgggcgacttagacattaccactatagaccgttggccaagcggttcggctcggttcgccttatcgaggcgccaaaagcgcggctgaaagagatccagagaaaaattctgagcgggctgttggaccagattcccgctcatgaggctgctcacggattccaacgcaaacgaagcgtgaagacttttgccgcttgccacgtgggcaagtcagtggtgttgagaatggatctgcatgactttttcccctccatcactttaagccgcgtacgggccgtttttcgtagtacggggtatcatgaaagtgtgtctgatctgctggccgggttatgtactaactgcgcccctctcgatgtctgggaaaatctggtaccttcaggccccggccgacagtcgatcatgttatacagccagccccaccttccacagggagcaccaaccagcccagctctagccaaccttatcgcttatcggttggattgtcgactgtctgccctagcacactccgcaggagcagtttatacccgatacgccgacgactgtgctttctctgggggtcccgagttctttaggatagtgaagaggtttgcttgccacgtaggcgccgtcgtgatggatgaggggttttccgtgaacttcagaaaaacccggattatgagagaaggagtgcggcagaagctcgcgggactcgttgtcaatgaaaagacaaactttccacgtgcagactatgaccgcctgaaagccaccctcgtcaacagcattaagcatggcccggaaagtcagaacaggacacagcacagggactttagggctcatctgctcggtcgcatcagcttcattgagatgctgaaccccaatcgcggccggaagctgaggcagctgttccagggaatagcatggtga

SEQ ID NO: 12483 - RNA, 1134 nt, synthetic construct
  source 1..1134: mol_type = other RNA
atggcaaggtttattctcagcgatagaggctttctgcgggcttatgagcgccacaatttgcaactggttgaactcctcacaactgcaccagtcatgcttcccctgcctactgctgaagggtgggaggtaccacagttacctgaagtgaacgaccttgctgattggcttggagtcagtttggccaccttacactggcttgcggacacaaggtgtctcgagtccaagtggaatagggggaagctgcggaattattactaccgccccctagctaaaaagcagggaactatacggctcatagaggtcccaaaaccgagactaaagggatgtcaaagacaaatcctgacaggtatcctcgatcatatccctccccatgacgctgcacacggcttttgccggggccgttctatcaaaagcttcgctgacaagcacgtcggtaagcaggtggtgctgcgactggatctgcaggactttttcccatctgttcacggaggccgcgtgcaggccgttttcagaagcctggggttccccgcatcagttgccgacttgctggccggcatttgcacgaactcgacccctcgcgatatctgggaatcattgcaatttccgcagcctcagctgcgactgacccaatggcagtacgataacgtccaccttccacagggtgccccaacatcccccgcactggcaaacctgtgcgcctaccgcctcgactgtagactgagcgctttggcgaggaccgtgggagccgattacacacggtatgccgacgacctggcgttctcaggcggacaggacttctctagagccgtacggaggtttcatgtgcatgcatccgcaattgccatggacgaggggtttcatgtgcatttccgaaaaaccaggattatgagacggagtgccaggcagcgtttggccggtcttgtggtaaaccagcacgctaatattagcagggctgagtatgatcgcctcaaagccactctgcacaattgcgtgcgctctggccccagtgatcagaaccgaaccggccatacggatttccgggcttacttaaatgggcgaatctccttcatagaaatggtgaaccctgcgcgtggggcccacctaaggagactctttgacagaatcccctggtga

SEQ ID NO: 12484 - RNA, 1365 nt, synthetic construct
  source 1..1365: mol_type = other RNA
atgacccatgctaggccagatagcctgggggtcctcgaccgtttcccgatgactcattctgaccagaccatcgcaagattccttgccgcagcctttgttgcggggccccttgtcgccgacgaaatggctactcggggggcaaggatgctgggacgtaggtggcggtggttgactaggctcgctctgagggtaagcgaagagtttcagcatggccctcgccctagaagagctacagttgaagaattcttgttgggtgactcagtttttcacaaggcctgtgagcgccacgaattggagattgccaattactccattaccgcacaaatgtgccctgtggatgctgcaagaaactggcccgttcccccactttgtaccttcgcggatactgccgactggctgaacgtgcggtccagggagctggagtggttcgcagacttgaggggccttgctgctcgcgcctctcatcagaagcttcggcactaccactaccggacactgtccaagcgcttcggtcaggtccggctgatagaggctccgaagttacgattaaaagagatccagagacagatcctgcgggaaatactggatgccatccctgcgcataatgcagcccacggcttttgtgctggccgctctatcaagaccttcgcagcaggccacgtggctacgtcggtcgtactcaggatggatctgcgagatttctttccaagcattagtcgagcgcaagtcgaggccgtgttcagatccgtagggtatgctgagagcgtggcgaatgttctggccggcctctgcacaaattgcgcccccgatgatatctgggacggagtggaggtccctgtgcagcagctgcgaagtgtgatagcccgctatgccagaccacacctaccacaaggagctcctacaagtcccgcactcgcaaacctctgcgcctatcgcatcgactgtcggctagccggcctagcagaatcagccggggccacttatacgagatacgctgacgaccttgcgtttagcggaggtgacgaatttcggcgttcagccaaaagatttagccagcacgcatcagccatcgtgatggatgagggtttcgacgtgaaccaccgcaagacaaggattatgcagagtggagctagacaacggctcgccggcatcgtggtgaacgcccataccaatgtgccgaggaaagattacgaccgactgaaagctattctcgttaactgcctgaggtctgggccccagtcccagaatcgtgatcaacacgccgattttagggctcatctgaacggccgcgtcgcctacgtggagctgattaatccacccagaggaaaaaagttacgcgaactgttccggcgaattgactggtga

SEQ ID NO: 12485 - RNA, 1323 nt, synthetic construct
  source 1..1323: mol_type = other RNA
atgaatgaggcggcaatcgccaaagcgttagctaccgctttcttggcagacactatgactattaccgctatggaagctcggggcagccatgttcttggccaatcttgtgattggattagaccactagccgcccggatcatggctgcctttcccggaggtgtgaggccacgtcgtcagagggttgtggagatcatacggcagtcacgtgctttcctgctcgcctgcgaagagcatgactttcatgcactgaatcccacgttgctcccaaccaaaatgcaccccgcacagtcgatccggacctggaatgtgccttccataacgagcactgatgccctggcaagatggctggggatttccccagcacagctcgattggttctcaggccgcttccgcaggtcagcatctgtgcgtattgggagtctgggccattatagataccggcttttacagaagtcatccgggcaagtgaggctgattgaaattcccaagtggagactcgccgaactgcagcgccaaattttgacacgaattctgaaccacatccctcctcacgccgctgcccatggctttcgccagcagcactccatccacaccttcgtcgcccctcataccggccaggcaatggtcgctcgaattgacctccaagactttttcccctctatcacacttccgagggtggcggccgtgtttagaacggtcggttaccctgaggctgtagcagacgcattagccgggctgtgctgtcaccaagtcccggaccacgtttggcactcggaagcggggaatctgggtactagcagccgcaaccagctcagactgctgtatcgacagccacacttgccacagggcacacccacctctccagcgatcgccaacctgtgtgcttaccgcctggattgccgacttaccggtctagcccagagtgcccgcgccacttacacacggtatgcagacgatctcgctttctctggagatgacgaatttaggcggagcgccaaatccttcgtactgcacgcctgcgcgtgcgtaatggaggagggatttacagtgcacttcagaaaaacccggataatgcctgccgctgcccgacagagactagctgggctcgtggttaacggcaagactaacgtccccagagaggacttcgataggctgaaggctatactgacaaattgtatcaggtccggacccgatagccagaaccgcgaacagcatgtcaattttcaagcagtgcttagcggaagaatcagtttcgtggagcatatcaaccctagtaggggaaggaagttgcggacactttttgagcagatcgtgtgggcctga

SEQ ID NO: 12486 - RNA, 1380 nt, synthetic construct
  source 1..1380: mol_type = other RNA
atgcagtccaacagggtgttgattcgcaccatcgctattaccttacttagaggagactggcaagttgaagcgatggctatcaggaccgccaagctgctgggcaagcgctaccggtggatatctccactgatcaagagactagaccagcagttcggcagtagcagaaggcctaagcagagcgagctgattgactttcttcggctcgaccgcggcttgtgcagagccttggaaaaacacgaaccagagatctttgactggcttcaagaggccgacgtgatgcagcctattccaagtgccgaagcatggcagatccccagtattaccacagaaggggagctggctgagtttctgggggccgcaacgtcggacttaatctggctcgctgacgaaaagtcactgcactccaaaaatactaaaaagtactcagggcactaccatcatcacctggtaaacaaaaaaaactctgttctccacttctgtaaccctcatgatctggatgctatcgccaatcggctcagaatccctagcgagagcatcaggctgatcgaggctcccaagcgccggttaaaaagcatacagcggaacgtgctaaacgggatactggatagggtcccccctcacaggtcgtgctgcggttttaggcagggggagtccattgttgattattcacgccctcacgtgggcaaatcaatcgtgcttaagatggaccttagaaatttttacccgacaattacgctgaaccgcattatctctatctacacatctttgggttttccggagactgtctccaggttacttgcacatctgtcaactaccgtaaccccccccgaaatatggcgtaatcataagggtgcatcccagctgcgatatctggagtccctgtatacttgccggcacctaccacaaggagccccatcctccccagcgctcgcaaatctggtggcattcagattggattgtcgactcgaaggcctggccaaacatgtgggggccgattatacacggtacgccgacgacctcgcttttagtggaggagatgaattccgtaggattgccaagcgcttcagcacttctgtgagtgccatagtaatggaggagggcttcggagttaatttcagaaagacaagaattatgcccgcggcttctcgtcaacgactggtcggcctggtggtcaatcatgggttgaacgtgcagaggcaggaatacgatcggctcaaggctatcctgaccaattgtatccgacacggtcccgaatctcagaaccgggataaccacccgagctttcgacgttatctcgagggaaaaatcgccttcgtcagcatgattaacatagagaagggcaataaattgctcggccttttccgcgcaattagctggtga

SEQ ID NO: 12487 - RNA, 1131 nt, synthetic construct
  source 1..1131: mol_type = other RNA
atggcgaaccagtccggacctcaggacagagatcgcgtaaaaccacgtgtcgtttcatggaggccccggggcacagaaatgcgtccagtaagtgccgcttctcagtggcatgtccctgaaatcaggacaccgagagagctggcagcgtggttaaatgtgagctttaagcagctggactggctggctgatattagatcactcgaatatactccgggcagaggacggtcccgccattactgttatagagtgttgtctaagcggtttggcgccgtgcggttgatcgaggctcccaaatcccgcctaaaagccatacagcgacagataagcagtgagatcctgtcacagatccccgtgcatgagtcggtgcacgggttccggaggggtaagagcattaacacttttgccgcccctcatgttgggcgagcatgcgtcaccaaaattgacttggaagacttcttcccaactgtcacgcgaagttgggtgagagggatctttcaaagcgcaggctaccctgacgccgtctctgttcttctagctggactgtgcaccaattctgcacctcacgacgtgtggcaggacatgcgggagcaactgccaaggcaacgactgcgctacatcgaagccctgtacgccacaccacatctccctcagggtgcccctagcagccccacactcgctaatctcgcggctttccgcttagattgtaggctgtccgggctcgcccgaaaaatggagctcacttatacccggtatgccgacgaccttgccttttcaagtgatagccccgcgactcgggatattcacagacgcctgccctatatctacgctattgtgatggaggaaggtttcagaattcacttcaggaagacgagggtaatgccctccgcaggacgtcagtttttgaccggccttgtggttaacgatcggcttaatatcaccaggacagactacgatgttctgaaggcaatcttaaccaactgcgtcaggcacgggccagatggacagaacagggatcgccgcaacgacttccgtgctcacctctccggccggatagcatttgtggaatctgtgcaccccgagcgcggcaataagctgagacagctgttcgagagaattcaatggccaacctga

SEQ ID NO: 12488 - RNA, 1332 nt, synthetic construct
  source 1..1332: mol_type = other RNA
atgcataccatccagttctatgctatcaacttagcgggcgtatttgtagacggcccatttgatgtggacgccctggtcgagcgaggcagccaaattctctccaaacgcggacgctggctgcggcctcttgccaaaagattagccaagacatttggagacaggattagaccacgtaaatccgatgttgtgtcctttctcctagctgatcaggggttccgaaatgcttaccagaatgggagatttaaatttagcagcctgctgcgcccagcaccagaaatggtcgctcctgccgttacaaccacctggcaagcccccctcaatctgaggactcctcaggatctctcacactggctggatcttaaacccggggagctcgcatggttctctgatcggaggcagctggaagcaaagcaaaacaagcccaaacttcaacactaccggtacagactgctgcccaaacggccaggagagttccgcctcatcgaagcacctaagccccgattgaagaccatccagagaaggattctgaaggatatactgaaccacctccccccacatgacgcgtcacatggtttccgttgtggaagatctatctcctcttttgcacgtccgcatattggccgggaggtggtgttgaaaatggatttgcaggactttttcccttctatcagggccgcccaggtgcaggcaattttcagaagtctgggatatccagattgtgtggccgaccttctcactggattgtgcacaaacagtgcgcctactgagatatggaacgcattagaccacgctcctcctgccaagatccagtacaagatccggcgatatgccagaccccacctaccccaaggtgctccgacgagccctgtccttgctaacctctgcgcctttcggatggacagtcgacttgctgggctggccaggaagatgaacgcctctttcacccgctatgctgatgacctagccttcagcggcgactgtgaattcgctagaatatgcaggcggttctcagtacatgtggcggctattgcaatggaggaaggttacacggtgcactaccgcaaaactaagataatgcgaaaaggcgtgcggcagcggattgcaggcatcgttgtcaataagaggccaaatatcctgaggaaggactatgacagactgaaggccattctgtcaaattgcgttcgcacaggtcccgcctcccagaatcgcgaagggcatgacgacttccagagccacttggcaggcagggtgtcgtttgtggagatgatccacccggatcgcgggcgtaagttgagggccattctggagcagatcgattggaccgtcagttga

SEQ ID NO: 12489 - RNA, 1329 nt, synthetic construct
  source 1..1329: mol_type = other RNA
atgcatagtgtgacacatagcgcaaatatattggccaccgcctttgccgctggtaggtttgatcctgaggagctagtgcagagggggagccaagtagtggcatcacggggccgatggttgaggccactggctgtgagacttgcggaggcgttcgccggaaaaattcacccacgaaagagcaccatcgttgcatttttggtggccgatgccggattttgtcgcgcctatcacaatgaccgtgtgcagatcgcgaacctcttaggccccattcccgaaatgatccctactgccacagcggctaactggcaaggttgtcttgccctgcccacgcctcacgatgtaagtagatggctaaatcttgctcctggggagctggactggttcgctgacagaaggcgaatggcccacgcccagtctaaccccaagctgcagcactaccgctaccggttactgcagaagcgcccgggcgagtaccgtctgattgaggcccctaaacccaggttgaaagcaatccagcggcgcattctcagtgacattctcaaccacgtgcctccccatgaagccgcccatggatttagacgtgggcggtctatcacctccttcgctgctccacacgtgggcaaacaggtagttcttaagatggatctccaggacttcttcccgtctacccgggcagcacagatccaatccatattccgttttcttggatatccagacacggttgccgacctgctcaccggcctgtgcacaacttcggcaccccaggatatttggcccactgctgcgccaaggcctgctcaaccaacccagagacagatgaggcgctacgcggagcctcatctgccgcaaggagctcctacatcacccgtcttggccaacctctgcgcctataggatggacctccgattctctggtctggcatccactgtgaacgcttcctacaccagatacgctgacgatatggccttttccgggaatcaagatttcgccagagtctgccagcgctttagtactcaggcagccgcaatagcaatcgacgagggctataccgtccattttcgaaagacaagaatcatgaaacagggcgcctgtcagagggtggctggaatggtcatcaacagaagactgaatatctcacgcaaggactatgatcggctgaaagcagtgctgacaaattgcgctcgacacgggccagatagccagaaccatgatgcccacaatgacttccggtcacacctggaagggcgcgtcagcttcgttgaacagattaatccagaaaggggccgccggctgcgggctttactagaacggatagattggagcaagtga

SEQ ID NO: 12490 - RNA, 1398 nt, synthetic construct
  source 1..1398: mol_type = other RNA
atgattccccatgccgagagggactcactagtcatcccaccatcaaccttcttcttaatgcgtacgtccaagaagaccctggcagcagcacttgcgacggcctttgtggctgggagcttcgaagtagacgatttggtggaacggggctacggagtgattgggaaaaagcccagatggatgcaaccgctggcagagcgcctacatgccgcattcccatgggatatgaggccccgaagggcttctgtggagaggttcctgctgtttgattacggcttccatcgggcctacagacgctccaaactgactgtggcatctaggatcggttcaagtcccgtaatgaatcagggcgttgtcgccagtgggtggaaagcaatccgccccctgacaactccagctgagctggccgactggctggatgtgcctctgagacagctcgactggtttgctggggtgggcccttataaacgggtccccacggagatgaagcttcagcactacagataccgggtgttaaaaaaggttgacggcaacgtaaggctcttggaggctcctaaggcgcgtcttaaaaggatgcagcaaaagattctcacagaaattctgaaccatgtgcctccgcacgctacttgtcacgggttcagacggggcaggtctatcaccacattcgcaaagcctcaccaaggccaggccgtggtcgtcaaactggacctgcgtgactttttcccctccattagagccgctcagatacacgccctttttttgtatttaggctatcctgagcccgtcgcccacctcctgacaggactgtgcacaacctcggccccagaaaccgtctggcgagaaatcggagcgagccctagaaacaatctcacccaggaacaaattagacgctatgctcgcccgcatttaccccaaggagcgcctacaagcccagcgctcgcaaatctgtgcgcttaccgactcgactatcgactgtccggacttgccttggctgccggtgcgacctatactcggtacgccgatgacctcgctttctctggagatgctgtgtttcggcgagcagcacagaggtttgtggtgcacgctaccgcaatcgtactagaggaaggttaccaggttcatcaccgaaagactcgcgttatgaggcagtccgtgcgccagaaaatcgccggattggtggtgaatcaacaggccaacgttcctagaaaggactttgataggcttaaggccactctgaccaattgtgtccgtcatggcccagagagccagaatcgggccgatcacgccaactttcggttgcacctccgcggtcgcattgcttttgttgaatcaatcaaccagaaacggggggagcagctgagaagtatattcgcccagataacatggccacagagcgcctga

SEQ ID NO: 12491 - RNA, 1314 nt, synthetic construct
  source 1..1314: mol_type = other RNA
atgcactccaggaagctgctcgctgccactctggcgtccgccttcgtaggtggacccgtggagacagatgcgctggtggagcatgtgagagtattgctgctggacaaacggaagcaaaggtggctgaagcctcttgttaaaaggtttgtgcaggcttcaagtgtggggccaaggcccaggcaacctcaggtggaggcattcctgctggctgactacgggttcctgaaagcatatcacaagaatcacattcgcttatcaggggcgttggccccctcacccgtaatgagctccacaatagaaagcattacgtccagcgatcgcatctctcttattactcctgccgagttagctagatggctcgacctgccaattagagagctcgactggttcgcagaccgccgtggttgggaggctaaacatgcaaacgcaaagctgcagcactatagatacctgacctttgccaagccctcaggcgagactagactcgtcgaagcccctaaaagcagactaaagggcatccagcggcgtattaatactgacatcttgaatcatgtacggcctcacgaagcggctcatggctttagagctggacactctgtgcgtagtttcgccgaaccacacgtcgggaaacgagtggtgctgaagctagacttacggaatttttttccctctataagggccgcccaaattcatgccatctttagaagcatcggatatcccgatgcagtcgccagtttgctcaccggcctttgcacaaacaccaccccaagcgaaatatgggaggaaagacttcctcttgccctcgacttccctatgtatgaacgcccccatctgcctcagggcgctccaacatctccggccttggctaacctggcagcctatcgactggatgcccgactcggagggttggctaaaagtgctggcgccaactacaccaggtacgccgatgatctggccttttccggtaatacgccattcgaacgggtcgtccgacgctttgctgatcacgtcgcagcgaccgttatggaggaaggtttcttcgtgcatcaccggaagactcgaatcatgccgcaaggggttcgccagaggatagcaggagtcatcgtgaacgagcatctcaatgtggacagacggacatacgaccggctaaaggcagtgctcaccaattgtatccggcttggcccggattcgcagaacgtggatgcacacgagcactaccgccatcacctggagggacaggttagctgggttgaatccatcaacccacagcgtggccagaggctgcgcgagttatctaacaggattatgtggtga

SEQ ID NO: 12492 - RNA, 1341 nt, synthetic construct
  source 1..1341: mol_type = other RNA
atgctgaatgaccctgagtcccccactaaacgctggcaaatgctcgccgatatactccttcactgtcggtggaccagcgccgatcatctcgccttggggatgggcgcgatcaaaagacagcctaacgctgtgaggaatatgatcgccgcgattcaccaggccttcccatgggtgccatcgagaactcagctcgtgaccttcctggccagtcgatcagaccttttaaaggggttgcgctggaagagactgccagacatccaatgtcagcggaggctgtaccctacaacgatgcagccgactaggtttgcacagcagacatgggaaccaccacccctgcccaccctgggatctgtggctgacgatcttctgcgcctccccgcaagcctggttgaatggttgagtaatcctcgggtacagcactatgtcgtcagtgttatcgccaagcgaggttctgcagggtccgcaggtaccggtgcagcgactggaaggattcttgaacagccaaaaaggttgctgaaggccgcccagcgggacattctgcgcgagattttaagggacgtcccagcacaccccgctgctcatggctttgtcccgcaccggtctgtggttacatttgctaaacctcataccggacgcccagtagtggtgcgcatggacctggcaaacttctttacaagcatccctgctgccagggtgaacgccgtgttcaggagcctgggatatcctctgcccgttgcccatcagttaacaaatctatgcactacggcctgcaaattggacgctgtcgagggcttagccgactattccgccgcggagcgagttcgcttggagaacctctacggtcggcctcatcttccccaaggcgcacccacttctccagccctagccaacctggtggcctatagactcgatgcacgtctctcaggcctcgcaagaagagtggggtgtgagtacacacggtacgctgatgacctgctgttctcaggggataggcgcctactgcgacaggctcagtcccttgtcgtgcaagtaagcgcgatagcactggatgagggattccaggtccagcaccgtaagacccgaattatgacacaggccgtgctccaagcagctgctggcgtggtactgaaccagcacactaatatcgatcggagggattacgacaacctgaaggctaccttgaccaactgcgttcggcacggccctgctacgcaaaatcatctgcaacatccgaattaccgtgaacatctacttggcagaatcggatgggtgcaccacctcaaccccaccagagggtccaagctgatgcgtatttttgaaagaatacagtggcccaattga

SEQ ID NO: 12493 - RNA, 1335 nt, synthetic construct
  source 1..1335: mol_type = other RNA
atgcagacaccccacaccgtagctgaaacactcgccgaagcattcctgcaaggcgagttcgccaccgaatccttggttcagaggggtgcacaggctctacagggcactccaccaagatggctaagaagattggcctctagggcggtgcaaacatacggtctggggccacgaccagcgttacctgccctctcaagattcatcgcacacgatgccgctttccagtcggctatgcgtggaaggaggcccgtcgtagccagagcatggctctgtgtccccgaaatgtttcctatcgcagctgcgagatcttgggaggtacccccgctgtgtactctgggcagcctggctgaatggcttgacgttcctgtcggacgccttgatgcactgagtgatgtgaaatcacttgagcgcctgcaccctcgggaaagcctgagaaactaccgctacagggtgctttccaaaggcggcgggcgtgtgcggttaattgaagcccctaagcctctccttcgggccatccagcgacaaattctcgccgagattctgcgggctgcccctgttcacgacagtgcacacggtttttgccatgggcggtcaaccaagacattcgcgacccctcatgtggatcagagtgtggtcatctcactcgacctcaaggagttttttccctccatcagcgccgcacgtgtggacgcactgttccggtccctcggatacccagcacgagttgccgccgctcttaccgccctgtgcgtcaactgtaccccgagctgggtatggaaaaagctgtctggggatgccctgactaggagacgaattgaattggagcggctctatggctttgcccatctgccacaaggggcccccacttctccagctctggccaatctgtgtgcttacaggctggactgccggctagccggcttagcagccgtttgcggcggaaactatacccggtacgctgacgacctcgcctttagcggtggagagagattgcgccgttctgcggccaggtttcaggtccacgcctccgcaattgtgatggaggaggggttcaaagtcaatcatcgcaaaactaggatcatgagccaaggcgcttgccagaagttggctggagtggtggtgaatcgcacaacgtctctaccgagacgagacgtggatcagttgaaggctatcctgacgaattgtgtgcgctttggccccacaagtcagaacagggagggacatgctgattatcgagggcacttacgggggcgcgtggcgtatgttcagttcctgcaccccggacgcggtgctaagctgagagccatattcgagcagatagactggaacgcatcctga

SEQ ID NO: 12494 - RNA, 1392 nt, synthetic construct
  source 1..1392: mol_type = other RNA
atgccagatgatcttgcagcagcacggcgccttgccttggcctttctcaccgcagagtggaacccacagtctatggcagaacacggcaggcgcgtattagggcttaagggcagccctaaatggatcctccggctggcggagcaggtctgtaggcagtatccagcagcccctcctcccacgcagctagagctgtctcgcctcctggccacttcaggcagactgcgccaggccattagacggagggaacagtccaaccagccactggacagcgggacactgctgctcccacctatgcccatgcgccctgtggtgggcttaccagcgggatgggaactaccgaacttaactagtgccggccagttggccgcttggctcgatataacccctgacgaactagactggttcgctgacgtgagaaggctgcaacgagataggccaccgggacccgccagacactaccagtacagatggatcccaaaggcgggaggacgccaacggctcctggaatcccccaaaccgagattgaaacaggtccagcgaagcctgctgcatggcctgcttgatcgaatccccccgcatcctgctgcatgcgcttttagaaggggccactcccttgcttccttcctcgcccctcatgccggacgcaggattctgctgcacgttgacctgcgccatttttttcccagtatctcatcagcgcgggtacacgctttgttccggaccgtggggtatccagaggccatggctaggtctttgacaggtctatgcacaacttctacgccaaggcaggagttagaccgccctcaggatcgtgaggccgaagctgccttgcacagactgtatggttcgccccacctgcctcaaggtgcacccacaagccccgcactcgccaacttgtgtgcccgtcgtctcgacgtgcgcctgaatggactcgcccgcagaactggcgccgactacaccagatatgctgatgacctgctgttctccggggggcacgagttggagagaatgcttagtcggtttcgagtttgggtgtgtgcgatcgcaatagatgaaggcttcaccattaggcataggaaaactcgggagcttccccggagtggcaggcaacaagtggcaggagtcgtcctcaacgaaaagctgaatcagccccgggccgaatacgaccgtcttcgagctaccctgcataattgcatccgtcacggggccgcctctcagaatcgaaatgggcacccacggtttcgggagcatctgggaggtaggattgcttgggttaatatgttaaacccaaaccgaggggctagactcaagcagctgttccagcagattgactggcctgaggagtcaacaggtagcccccccgcagatagccaaccggctaagcctgattga

SEQ ID NO: 12495 - RNA, 1386 nt, synthetic construct
  source 1..1386: mol_type = other RNA
atgacagatgtcagggccgttgccaggggcttggccacagtattcctgtcaggggaatggactagagccgggatcacccaacgggtgcagacggctttagagcagcgggtgaagtcccgcgccgtcgatcttctagtgggacgcattcttcgggcttgcggagaacagccccctccaccaaccttgcataaacttactaagttgattctatccgaccccgtgtttcacaagtacattgctgaggaggacggctatccgagaaggctaaacctggcccacctgccaccccctgttatggctcccgcacctgctataccgtcagactggcagctccctaccattctgactcctggggcactggctgactggctggggttaagttcccccgagctcgagtggttcgccgattgccacggacgggaaagacaacgtgcccgggaggcccttcgccactacagatatcgatggatccccaaaagaaccggcggccgcaggcttctcgaaatccccaagcagcggctgaaagacctgcagagaaccattctgcagtggatcctaggccgtatcgaaccccacgcagccgcacatgcctttcgtcgaggccggagcatagcctcgttcgcccaaccccatagcgccaagagagttgtgctgcgaatagacttgcgtcatttctttccatccgtgcagccctctcgcatcaagtcactcttccggactgtaggctatcctgaagcggtggcgaggctgttatgtggtttgtgtactaacagtgtgcctgacgacattttaggcgtggcagaacagcagtttgccacaaatgagaggcagcccgtcgagagactgtacgctgcagcacacctcccacagggagctccaacttctccggcccttgctaatctggccgccaggcgacttgatgggagactcagcggcttagcgacagctgtcggtggggattacacccgctacgctgatgatctggtcttttctggaggcagggctctggagaggtgtctgccacgatttcggacattgctcctcgcaattgtgctggacgagggattcagcataaggcaccgcaagaccgcagttatgccggccggtgggcgacaacaagtagcaggtatcgtcgtcaacgaacatccaaacttgaaccggaaagagttcgatagactcaaagccatcctgtataattgcgcacaccacggacctagaagtcagctgacaggctgcctccctcagccaaatgagccccctaccgaggcgacgctggaacagctgcgctctcatctcacgggtaaagtggcgttcgtgcgcatgatcaatccagctaagggggaacggctgagcaagctcctgagggagatcgactgggttggatga

SEQ ID NO: 12496 - RNA, 1347 nt, synthetic construct
  source 1..1347: mol_type = other RNA
atggatgatagttttcggcagttcactgctaacttggctgagacactcgcccgcggtacctggtctttagacgagctactcaagagggccgatcagtccttaacagagacaagtagccgtgcatggataataagactgaccgaacgaaccatggtggcctttcccggacgccagagccctcaacactgtctgctgatgcagttcctggcacatgacagaggactgagacgagtttggaacaattgcgaacgcgacgagcgcccattccccgaaatcgacttgaccaaactggtaccgcccgttatgcagccagcctccgaggtgatagcagcatggcccgtgcggccactcgtcactattcaggatgtatcacagtggttgggcctgacgcttggcgagttagattggtttgcagatcgtactcgcagaaaaagcagggtgccagaaggccccctcagacactacaggtaccgctggatcgccaagtcttcgggtggacagaggcttctcgaaatccccaagccccggctcaaagaactgcaacgaaaaattctggcagagattcttgacgctatcccaccacaccctgctgcacatgccttcaggagaggtcggagcgtacgtgggtacgtcaccccccacgttggccaacaggtcgtgttgcatatcgatctcagggaattctttccctctattagggcttcacaaatccacgctctgtatcggacggtgggctatccggaacgagttgccgctatgctgaccggtctgtgtacacatattacccctcgtgacgccatacctctcaatggagagcagcaggcgtctaattcaaactggaaacgcctggggagtcctcacctacctcagggagcccctactagtcctgcccttgcgaacctggtggccttccgcttggactgccgattggcgggactgagccagaaagtggaggccgtctatacaaggtacgctgacgatcttcttttttctggcgggaaggaactggctcggtgcgcgtcaaggttccggctactggtgacagcaattgcccaccacgagggctttgagattagagcccgcaagtcccggacgatgcattccggcactagacaacaggtggccgggattgtgctgaacagacagccaaatatcccacgggaagagtatgatgctctgagagcaacattgtacaattgtcagcggcatgggcccaccactcaaaatgtcaatcagcacccgcacttcagggaccatcttttagggaagatcaactactggtccaacatctgccctgagcgaagcaggaagctcagactcctgtttgaccagatcgtctggccatga

SEQ ID NO: 12497 - RNA, 1329 nt, synthetic construct
  source 1..1329: mol_type = other RNA
atgcatgactttgaggatgagttcccaacaccggatgccgaaagcgtcgcccgggtgtttcttgcgggagctttcagcccagagtcctgcacggctcgtctcaccgtggtgttcggcagagttcaccatcgccgcattgaacgcctggtccggctggtttttgcagtgttccccccccatagtgccgtgcccacattgagacgattgacactgttcctcctgaggtttgagtcatacttccccgaccagttccgcatatcccctccgagagacttaaccggccacagaacgatacctgcagaggccatcactgggagcctaccaatactcaacaacattcgggaactagctgagtttctcgacctgacgcccgaaaggatgctgtggctcgccgacccgcacggtttcgaaaccaaacgtcctagggagagacagaggcactaccggtacagatgggtggaacggaccgggagaaccccacgacctctggagattcccaagcagcggctgaaggccattcagaaaaagatcttagccgaaatcttgaacaagctgcgaccacaccctgccgcttgcgctttccgcaaagggcagagtgtgagagatttcgccaaaccccatgttggccggagggtggttatacggtttgatatcgccaatttttttcctagcatccttcagccccgagtccaggccacattccgggcagtaggttatgtcgaagaagtcgcttttctgctaagtgccctgacaaccaaccggctccctactgaccaactgcacgccgaggcgactggttctggagcacgacacttaagacagcacctcctctctgcccatcttccccaaggcgcgccaacatcacctgcactggccaacctctgtgctttccacctggataggaggttgaccggcctggcagcaaggttctctctgagttatactcggtacgcagacgacctgttgttctccggaaatctgtccgacgctgaaatttatcgcttccgcattagggccttggccattctcatcgatgagggatttgaggcgagatcatctaagtccgcggtgctacgtaaaggaagcagacagcaggcatgtggcgtaattcttaatactaggctgaacatcgccagggaggattatgacgctctgaaggctactttacacaattgcatccgccatgggccagaacttcaaaaccatgagggtgtcgcagattttcgcagcgtgttgcgaggccgtatcgcatgggtacactcgcttaatgtggctaaaggggagaagctgcttgctatgtttgagcaaatccattggaatacctcatga

SEQ ID NO: 12498 - RNA, 1278 nt, synthetic construct
  source 1..1278: mol_type = other RNA
atgtccgagagaattcggatggtcatggcggctcggcgacagtccaggtggcatgaccagctcgccaagcgtgttcacgacgagttcgccgctgtaatacctcgcccaacccgcgacagattggctgagtttattctgttcaaaggtcgcataccccgcagagtgagggcacccgagcacagagatggacctctgcgaaatacttctctcctgtctttaccagctcccgccatgatccctgctgatgccatcgccgcacgtgtcgcccttccagctattacaactcaaggccagctggccgactggctgagcatatcaccctccgaattagactggttcgcagatcccgccgctctattggcccggtggggagttgcagatcgcggtaccctgaggcactatagaaccagactgctgccaaagccaaggggccggtggaggctcgtggaatcccctaaacctaggctcaaggagatccagcggaagattctggcagacctgcttgatctagtgccagtccatcctgcggcccatgccttcgtgaggggacgaagtatcgtgaccggggtaacgccacatttcgggcgcgacgttgtgctgagtatcgatctgcgagagttcttcccatcagttcacgctgggaggattcacgcaatgtttaggacactcggctatcccgaaagagtggcaagtttgttaacaggattgtgtaccacccgaactcctgcagacagattggcccagggtgcattctcgacggcccagagacagctgtaccagagccttcacctcccccaaggagcccctacaagcccagccctcgccaaccttgcggcttggaggctggactgcaggcttgaaggccttgcgcgaaggtttggcgcggcctacacacggtatgcagatgacctgatatttagcggggattccactgtgcatcgggcactgccgaggctacggatgtgggctactgcgatcgtcttagatgagggctttgctatccaacgccgtaagacccgggtgatgccgtcaggtcagcgtcaaaccgtgggagggctgatcctcaatgcccgtgctaatatccctcggcgcgagtacgaagccctcaaagccactatctttaactgcctgacatacggcccctctagccagaaccgggaacagcaccccagattctatgaacacctgagaggccaaattgcctgggtcgctgcctcttcaccgcccagagctgcacgcttgctcgaggagtttcagcgcattgactggagccggtga

SEQ ID NO: 12499 - RNA, 1341 nt, synthetic construct
  source 1..1341: mol_type = other RNA
atgcctagcgagtttatcaggaagctatcttgggtattactcgccggcaggtgggaacgtggggaactggaaaatagagggaggctggccttgcgaagggctacctgtcccatgtggatggtgcagctagccaaccgcctgattgtaacttttggcgacaatgtcacagtgcctcagcggagacagttagagctgttcctgtcctgggacgcccccctgcaaaagagaatccgtacctgggatcgcaatggctccttcccgaagttagtagttcctccacagaggatggctcctgcagctgaccgctttattgaatctagactcccagagctcacaacaacttccagtctggctgcctggctgtctataagccccagcgagctggattggtttgctgaccagcgccggtgggaacgcaggcaagtgaacgaggcagcacggcattacagatatctctggattcccaaatctggcgggatgtgtcggcttctggagagcccaaaacctcggctcaaagccatgcaaagggagatactcgactgcattctcgcgaaggtgcccgtacatgacgccgctcacggattctgcagaggccggtctgtgagaacttacctcgagccccacgtgggtagagatatcgtcttcagtgtggatctgcggcagttttttccaagcgtgcgcgtgtcacagatcaatgcaatattcaggacagttggctatccggaggaggttgcgcgtatgttgacgggcctttgcaccaattcaaccccagaaaacgttctgcactccaagagggttccagatgccggagtcgagaacagccgcatgcttagacgctacagagatgtccatctgccccagggaacgcccacctctccgatgctcgctaacctggcagcattcaggctggatagaaggcttaccggactggcctccaagtttggcgcgtcatatacccgatacgcagatgacttaacattctcaggagacagcgattttcgatgcgccttggaacggtttaaaatcttggtgtatgccattgtcatcgatcaggggttcgaaattcgacacaggaagactagagtcatgacacagggtcagcgacagcttgtgaccgggctggtccttaataaccgcttgaacgtgcctcggaattcatttgacgtgctgaaagctactctacataactgtgtgcggttcgggccttccagccaaaaccgggaggccatcgacaacttctcggaacacctggccggacgcatcagttgggtggacagtgttagtccagcacgtggtgccaaattgaaggctctcttcaatgagattgactggtcccgatga

SEQ ID NO: 12500 - RNA, 1257 nt, synthetic construct
  source 1..1257: mol_type = other RNA
atgccaagccgacggccgtctcccagctatatagccctctgcctggcagtggcttgggagcataagaccggaagaaacgacgaactgcttgaggacgcggtcgctgtgctaggactcactgatagacctagatggctccgtcacctatgtagacatctggcaggtaggtggggcgatcctcttcgcagaccatcgcggggcaaggttgtgcggctgctgttagcatctgaatcattcatcgccgcggtgggggctgttccactgcaagataatctggcccctgccccctattggaccacaatcctgcccgcctggagttggaatttgcccgagtttccatccactggggccctggctaactggttgtccgtgtcaccagcggacttagactggctcgcagatgttcgtgggctcaaccctagaagccccgaccctcagctttggcactaccattattccgtccggccaaaaagtgacgggcgatctaggttgatctctgccccgaagttgcgccttaaacagcttcagagacaaattctgggccagattctccagaggatcccagtccaccccgcagcccatgcttatgtgagcgggcgctccatggcaacctgtctagcccctcatgtcggccgggatgtcgttctgcacctcgatctggacagcttttttccatccatccaggcttcacaggtgcgcgcggtctggacatatgtaggctacggtgcttccgtggccgctatgctgaccggcctatgcactgagaacgtacctgactctgtgctgagccgcctgaatgcgagcaggcaggcagttgacaggttccgggaacgtcatttgcctcagggagcacccaccagtcccgctctctcaaatctctgcgcctaccgcttggattgtaggctttcaggactggccggccactttggagccgcctacacacgatatgccgatgatctgattttctctggtgacgctcacttccggaggcgcctgtttgatttccggacgacagtgggcgccattctgcttgatagcggatttaacctgcaagggaggaaaacgagagtgttaccggcaagtcgaagtcagcgtgtggggggattagtcgtaaaccgccgattgaatattccccggagagagtacgacgacatgagagcaatcctccacaactgcgctaggttcggtgctgaatcccaaaatcgcgaacgacaccctcactacagggagcatctcctgggccggatagcctactga

SEQ ID NO: 12501 - RNA, 1356 nt, synthetic construct
  source 1..1356: mol_type = other RNA
atggatgagcccgagtttagggagagggtggtactggatgcacttgcccggaccctgctgccgttggctgatgatgtatcagtcgcagtccgagcggctagacaactgctgggctggaaacctgaacggtggtttcgcacactggttgcaaacgtgctggcatggcccgagatgagggcaggtcagatgactgcaggcgaactcgccgctagactctccggcatcccatctttgatggaggcacttgatgaaggaaagggggtggttctggatctgtccgcaatccctcggccccgcatgaggagaagcccagtagctggaatggggcctattgtcagactagagacagttggggactgcctggactggctgggactcggtttgaatgaactggactggctcaccgaccccaagggttggcttcctgcagccggacagagtcgattggcccattaccactgccaatggatccctaaaccagctggaggggtgcggcttatagaggcccccaaaagaagactaaaggccatccaacggaagattcacgaagagatcctcagacacgtgccaccgcacgaagccgctcatgcttaccggccagggcgaagcatggtgaccgctttgaccccccataccggccaggaaacggtgtggcaccttgacttaacttccttcttttggtctattggctcaggccgcgtgaggcgattcttcagacgcatcgggtatccagagggcgtggccggtgtgctgactggactgtgtacttctcgtgtcgccccgggcttattggagcctgctccactctctgagcgcgaaaagcagcagctgttagcaagacatctcccacagggtgccccgacaagccctgctctgagcaacctgtgcgccttccgactggactgtaggctttccgccttgtcggcgcggtacgacgtcagatacacacgctatgccgacgacctggtcttcagttgtggccctaaactgcgaaggcggctccctggattcaggaataccgttctcgcgatcctaatagatgaaggctttcagatacgtcgccggaaaacaagggtgttacgccggggacaaagacagcaggtggggggtctaattcttaatgaaacgctcaacgtgcccaggagcgagtatgacaccctgcgcgccattctgcatgattgcggcaggaacggacccgtcgttgcgaatcgcgaccagcacccatcctttcgggagcacttacaggggagagtagcctggattgctcacgtgtcacccgggaggggacgtaagctcaaggagatgtttgagcgtatcgattggagtgggagtgaggaacccactggcgccggctga

SEQ ID NO: 12502 - RNA, 1317 nt, synthetic construct
  source 1..1317: mol_type = other RNA
atgacataccgcgcttttctcaggtccctggctttcatactggatcaaggcttttggcatgaggaggccgccctggagcaggtcttggacgtgttacctacacggcagcgacaggccaagtggccaagacgcttgattggcagaattttcactacctttagccgctacacccggccctcattcggagagctctcgagattcctgcagggcgataaagagctcaaggccgacctgagaaggctgacagcaatacctctaattgtatggcgaccaggggaccagacgcgtcctcatcctgtgctccgtgtcagtggcgatctgcccatccttaagagcgtgagggatttcgcaaatttcttgcgcatgccggttaatagcctccaagctctggctgatgttaactctcgcgaggccaggaccttagacgcacggcacagacattataactaccgttggatccaaaagaggagtggcggacagagactcatcgaaatccccaaagagcgtctcaaacacgcccagagccagctgctcgaatgtatcttacgccacgtacccgtgcatgaggccgccagagcctacagacgaggactaagtcttagagatgctgtcgaacaacatgtcgggcagcgcattctgctcaggatcgatctgcaagactttttcccatcgattggggtgggaaaagtccgacaggtgtttcgccacctgggctatccatctgtggtcgctatgcacatggcagggctgtgcacaaatgtggtacctcaagctgttcttgaaacaacctcctctaatcacaggctgagccacgtgtaccagttgccacatctgccccaaggagctcccacctctgctgtgctgtccaatctggccagttacaggatggacgcgcgacttactgggctcgccgcatattggagcatgcagtacactcggtatgcagacgatctgcttttctctggcgactccctttcagctgcgcaggttagccgtcttcggacccagatactggccgttgcctccgacgagggtttcaggatcagacggtataagactaaagtcatgagggcgggaaggcagcagtctgccttgggtctaactttgaattcacaggccaatacgatgagacgagactttgacaacttaagagccctactgaacaacgcggtgcggcacggtctggaatcccagaatcgcgataaccacccgaagtttctcgaacatctcgcaggccgggtggcatatcaccgctccatgaaccctaagcggggggcacggctggatcggttactgtcaaggttgaccaacgaatga

SEQ ID NO: 12503 - RNA, 1308 nt, synthetic construct
  source 1..1308: mol_type = other RNA
atgaatggggagattttacgggcggcaaggattgctgaggctttgctggctggcccctgggacctcaagagcttgacgggaaggcttaagactacttttcacgcagtagcccggtcaagatggcccagacaaaccgccgtagagttggtggcagaatttccagcccctccacgagccatcagattggcattctggataacgaggaacaggcaccttgcgccgcggcagaaagatgtgccccttgcggatcttccccggcctcgtatgcgaccccatccagcagcagcttctctgctcgtgccagcgctgtgcacccctggagatatcgctgcatggctccgcttggacccgggtcaagtcgacggattagccggggccggcgttcctgaacgtaggagacacgcccgcgcacgcaattacgcatatcgatggttgaagaagagtgacggcagggtgagactgattgagtcccccaaatggcgcctgatggccgtacaacgccagatcttatcggatctcttagaccacgttccaccgcatcctgctgcccacgcattcgtgcgcggtagatctctgcagaccttcctgagccctcacgtccgacgcaactgggtcttacgcctagatctggctgactttttcgctacaatagcagcaaaccgggttgtcgaggtgtttcggttcctgggctaccctgaggcctccgctcagtggcttactcgcctgtgtgtgaacgccgctccaagcgacgtgttgtgcgatggaatcggtcacgccgccgatgctcatgtgcagcggcttagatcccgcctgtctggactccatctcccacaaggcgctccaacatctcccgcgctagctaatctgtgcctgtttagatttgaccagcgactcgccaggctggccgagtcaagagggctgcagtatactagatactgcgatgatcttgtgttctccggggacagagaaaccaggagtgacgtcgtggatctgcggcgtacactctttatgattctggccgacgaaagactgtcagtccggcacgccaaaacacgtatcatgcccgccgggaggaggcagaatgtttgtgggctaaacctgaatcacggcctcaataccccccgagccgcattcgatcaactgagggccatactacatcggtgtggcacaaagggactcaccgccgaggaacagcaggactccagccgtttccggcagcatctccagggcaggatcgcgtgggttagtagcattaaccctcatcggcaggccaagctggtgaaactgttcgaagctatcgcttggtga

SEQ ID NO: 12504 - RNA, 1371 nt, synthetic construct
  source 1..1371: mol_type = other RNA
atgggtcagcagagcaggcggcttgccgaagcaatcgcccagactgttttaaacggcccctttgcttttgacgcaattgtgagtagactcaagagaatcaccccagggccttgtctgagagggtggaaacaaagggtcgcccgttccgtgctagaccggtttggtgagggtggaggcgtgccatccctgttcactctgcgacagtaccttattgacagtggcttgctcatagatgtggaggcagatgactttcccgaggactggatcgacgagacagaaacaactattatccgcccggatcgggtgccccacgctgtattctgtccacgcatcgcggccttccagaacctcgggctgcctgagtggaccaccacaagagagctggccgattggttcggcctgacagatgggcagcttttatggctttccggaggccggcggtccgatggaaaatctgccttcgagaggtatcgcctgaagtgccaaaggtcatcctcaggaaaggtgcggtgcttagaggtgcccaggtcaatgctgaaatctattcagagggaactcaatagagacttgctcactcgcatccccatccatagctgcgcgcacggtttcgtgcctgggcgatctatccactcttacgttgaacctcatgtgggccaggacgtcatatggaaaactgacctggcaaatttcttcccaagcattacaagatccaggatcgaggcccagtttagactgtttggatacccagatgctgtcgctcgaacccttagtgggctgatgaccgtcagacaggatcggaccaagatagaggaactgtcccagcaatttcccagggatcagttccgagacttagccagcctccttacgcaatctcacctccctcaaggtgcacccacatcgcctgccctcgccaacctggcagcttaccgactggactgccgcctgtcgggactagctactaagttccacgcgaattatacgcggtatgccgatgacctgacctacagcggcggacagcggttccagagaagtttggataccttccgcgtgcatgccttggctattattgtcgacgaaggatttcgtaaccggctccgcaaaactcgtgtaatgatgtcttcaagacgccagacggttgcagggttggtgatcaatcagacacagaatgtaccgcgcgaggagtataaaaccctgaaggctatcctgtttaactgtagactacatgggccggcaagccaaaatagggacggcattcctgattttcaggcccacctgaggggccgtattgaatttgttcgaagcgctaacccagagaggggcgaaaagttgatggccatgttcgaggaaatagaatttcatgcggaaacctga

SEQ ID NO: 12505 - RNA, 1341 nt, synthetic construct
  source 1..1341: mol_type = other RNA
atgaatttgttcctcgacgcgttggccacggtcgtcctttccggaccattcgatcagaaagctatttgcgcccggataagaaagagtctggtcgtgcgttctgatgcgcctctggaagtgaagctcaccactcggtgggttacccccctcgtgaaagctttcctgtccgccgtacccgctagacctaggcatcggcaggtggtaagctttctgagtacccaacagctgagtgcccaggccgagtatttttcgatagagacatcccggtgtagcccgcccctttttttgcccttaaaacctcagtttgcagagtggggcctgccacagtggcgcacaactggacagctggctgatttcttgggcatatctcccgttagactcgactggctgtgcggccgttaccccgttagagatagccaggaaatcaggcagcgctatcaaatcaggtggcaaagatctcggacggggaagctccggatgatcgagatcccttgcccacagcttatgcgtatccagcgccagttacttcacgacgtgcttgacaggattccagtccatgccgctgctcatggctttcgggctaagcactccaccctcacctgtgtgtccccacatgtggctcaggccgtcgtatggaaactggacttggcatcatttttcctgtctatcccgcgctgtagagtcacagggttattccgaatgctcggatatcccgaggcagtcgccgaggatctgggttggctgacaactaacgcagttccgtcaaaagttctgcaaagaatgaaggcaaagattggcactgaccagttccaggagctagaacgatttgccgctgcaggtcatctgccacaaggggcaccttcttcacctgccttggccaaccttattgcctacagactggactgtaggctaaacggactggcaaccgcatacggcgcgcattacagcaggtacgcagatgacctgctgttcagcggcgattataggttcaaacgatatttggccggatttaggatccaggtgctcgcgataatcctagacgaggggttcctgattcgtcgacgcaagtccaaggtgatggtgcacagccgacgccaacaggcccttgggatcgtgattaatcagcaccctaacctccctcggcaggaatacaaattactgcacgctattctgcacaattgcgtggtgcagggtccacacagtcaaaaccgcgacgggcacctggattaccatgcccacctcgctggtagaatcgccaatctacgcaggcttaaccccgcgagggccgctaagctccagacaatgtttgaacagattaattggcaacggttcgattcatga

SEQ ID NO: 12506 - RNA, 1272 nt, synthetic construct
  source 1..1272: mol_type = other RNA
atgtcgagcgatgagcttgcgactatcctgttgtcgggcgcttttgaacaggcggcttttgaggaaaggctcgtgatggcagtgggggcaccaaagttctcacgtaagttggcggggcgcgtgattaggcattttggttcaggatcccgccccagcgtcagaatgttagccgagtggttagagagtgaccgacggtaccagaaaaagcagaggagaggtgaactgcagctgagcggccagatactccccgccgaaatggccccagacatgcgcgtagctgccgactggaaaattccgtctatcacgacgagcggagatcttgctcactggctcgatttgcctgtcagccagatggagtggttcgccggagactataactctgtgcccgctgatactaaactgtctcactacacagtgcaaacagttgttaagaagagcggcggctttcgggtgctggaaaagcctaaatggcaaatgaaacaggtccagcgctacattctgcacggaatccttgatcatctgccccctcatccttgctcccatgggttccagaagaaccgatccattctgagttacgttcaaccccatatcgggcggaaaatgctgatcaagatggacctcaaagactactttcttagtatcgagcggtcacgagtcagagcactgttccacttgcttggctaccctccactagtgtccgtccagctagccggctgttgcactaatagactccgcttagctgatgtgccaagtggagtggcacagcgagacaggtataccgtaagccacctcccacaaggtgctcccacctcacctgcactcgcagataggctgctgtatagactcgatctgaggttgcacggactggcccagaaaatgcacatggactacaccaggtatgccgacgatttcgccttctccacaaacgactctgttagaaggccccaagtggaggccttcctaaatctggtcgaccagatcgtgagagaagaggggctgcagttgcacaagaccaagacatctgtgatgcatcattctcagagacagcgtctggcaggcctggttcttaatgagaaacataacgtagctcgcggggaatatgatcggctgcgcgccatactgcaccggtgtggacagaatgggttggacgccgaaaataagaacgaccacccgtccttcttacaacacctcgagggtcgggtggagtttattcggcagaccaacccacgtcgaggcaagaagctgcaaggcatgctcgataaacttgtctga

SEQ ID NO: 12507 - RNA, 1338 nt, synthetic construct
  source 1..1338: mol_type = other RNA
atgaagattgatccagtattcctggacatggcgagggtgttgctcgcgcacccatgggatcgggcagctgttctcgcatgcgggcacaagctgctgggcagaaagcccaaatggtgggccgctgcagtcgagaagtttgtcgcatggttccctaccagacctccaacagccgccagacttgcccggctgttagccgcacaccccaggttggctgccctgagagataaggataagctgccacagcctcgggccgatctcttacgcgaggcactacaataccaagttgaccatctgagataccctgacttaccaaaactcgccactcccgcccaactggctgactggctgaatgtgcccgagcctgtgcttcgatggctggccgatatcaagtgtctgaacgctcggcaggctcccgcagtgcagaactatcggtaccactgggttgccagacggcggggtggtcataggttgatcgaagcgccaaaggagatattaaagaggctccagaggcagattctggaccgtatccttgacctggtgcctccgcacgatgtagcacacggatttcgcgctggcaggagcatcctcactcacgccgctccgcacacagggcagatcgtcgtgatcaagtttgacctcaaagactatttcccatcggtggccggtaaaagggtgggatccctcttccgctggttgggataccccgacgaagtggcgtggttgctgacctgtctttgcactaccattactccggcagccgtggaagcaacagcacctgcaggggccgacgatgtatctctcacctttcagacactgtaccgaagaagacatctacctcagggcgctcccaccagtccagctgttgctaacctatgtacgttccgactggatcggcgactttcaggcctagcggccaaactgggcgcccgttacaccagatatgctgacgacctcctgttctcaggagatgccgtcttcgcgcgcaaaaggcgatcttttattgcctgcgtttatcgtgtcatactcgaggaagggttccagcctgcattccgcaaaactcgtgtgatggcccgctccacacggcagcttgctacaggtcttattctgaacgagacgctgaatgtgccacgccccgattttgatgaactcaaagctatcctgcataatgcgatgaaacacggattagcctcccaaaacagagctggccatccccattttgtggacagcttgaggggccgcatagcttttgttagccaggccaatcccagaaggggggccaagctgaagttgaagttcgaggcagtcctggagaatgaaaaacgcccggccagtacctga

SEQ ID NO: 12508 - RNA, 1290 nt, synthetic construct
  source 1..1290: mol_type = other RNA
atgacacccaccactctctggctcaaaaatctcagcactcttcttctggaggaggaacggcaactagatgcttggctcgcccttatccggaaagtgattcctggaaagccaaggaggaactttctgataatcacaagggaagtttggaaggttgcaaagactcgcacagtactcgagaatcgggaacttcaacaaattttccgcgaaaatagaaggttttggaactggcagcggaaatggtacgcaacccggactcctctacccccagccttgatcgtgggccctgccacaccagtgttggatacctccgcttggcatcttcctgagttagccacggtgggcgacctggccgacttctttgccttacagcccgacgatctgggctggctcttgtcacccaaggcccagcattaccatgaacagtggttgcctaagcgcaagggcggccgtcggttacttgagtcccccaaaccgctgctgaagcaggtccagaggaccctactgagagagctgctggacaaggtgccaccccacgaatgcgcaacggggttcagagccggacactcgattgttgacttcgcacagcctcacgctaacaagagcatcgctctgaaaatggatctcgcaaacttttttccttctctcggtcgctcccggattaaacgtctgttcatgtcactcgggtatcgtgagggagtggcactggcgctggcggtactgacaacccaccgatcagcaagtcccgacctgacattcactgagaaggagctgtacagcaggtatcatctaccccagggggctccgacatcaccagcccttgcgaatctggctgccttcaggctggattgccggttggctggtctggctaagtctgccggtgccagctatacccgatacgccgacgatctgctcttttccgggactgaagaactcgcgcgaggtcttcacaggtttgagaatagagtcattatcatcacccgagaggagggcttagaaattaacttcaggaaaacccgccgaatggcagctagtcaaagacaggcagccgctgggttagtctttaaccagaaattgaatgtgccgcgcagagagttcgacaccctgaaagctatcctgcataactgtagaaagcatggcgtcagttctcaaaatcattctcaccaccctgactttcaggctcacctgcgcggaagaatagcctggatagcaagcctccacccagtgaggggagagcgcttgagagccgccttcgaggaactggattggtccaagccaaacgcacaggaatga

SEQ ID NO: 12509 - RNA, 1434 nt, synthetic construct
  source 1..1434: mol_type = other RNA
atgtccgattacccaaccgccgtcggcttcgagctcacacagcactccgacaggctagcctcagcccgacttgagctgagccctcgtaacgagcgaatcgttcaccgcgcatccttgtcacctgtgtttactatggccccacggcctgtcgtaaaacggtctgtgagcgccgcagagctgaccaagcttctggctgcctccctaagtgcaagatggctgggcgacactgaatccgtgagccgaagattgcgcaaacttactggttctcgcgcgaaatgggtgcaggaactggccgtgtcactgaaccagcagttcggcaaacaagggtacgccagtggagccgagataattagacacttaagaaataacccctacctgcagtctgcgcggaagaataacaagctgtttagactccccgtagcagaggccattagcgcacctgagagcgatagcccaagtatcgagacggatacccagctggttgacttcctgggcctgccgtctcttcgggcattggaatggttgctcctgccccatctgcgcaggcagacaaacgtcgaccattatacccgcagaactctgcaccagaccaacggtaagaccagattaatcgaagaaccaaggcctgtgctgaagagggttcagcgactgattctgactgagatcttgtctcacgtgcccatacatgacgtcgcacacgcttacaggcctgaacggtcggtatttacttgcgctgctccacataccgattgccgtgtcgtgctgagaatggacattagggatttcttcgggaccattacgctcaggagggtggccgcccaattcagacggtgcggctacccgaggccgattgcgttcacactggctcggctctgcacggctgctaccccaattacgagcgagtcaacagaaagggagcaacacctcaccatccctcacttaccccagggagccccttcgagtcccacccttgccaatgcggtggcttttcaactagatcgccgactcgccggactcactcgcgcagttgacgctaattacacacgctatgcagacgacttgctgttctccgggggccaatgtcttgctagccgggtcgatcgcattgcgacaacagtagccgtcatagcaatggaggagggttttcagatcgcacatagaaaaacaaggacaatgttttccgggcaccagcagcgagttttaggcctcactgtgaaccagaagctcaattgtgaccgtcgccagtatgagctgctaagagctatcctgaccaattgtttgcggcacggatgggaatcacagaaccgggattctcatccaaactttgccgaacatcttcgtggtcggatcgcccagatcgtgcaagctaatcccaatagaggacagaggttactccatctgtatgaacaagtgagttggaacgatcccgggtga

SEQ ID NO: 12510 - RNA, 1395 nt, synthetic construct
  source 1..1395: mol_type = other RNA
atggctccccccagcgtggccaaaagaaccgtaactgcctcacaactggcagacctgatcgcatccgagctcgcaacccgatggctgggagacgtggacgaggtgacaagacagatctctaagctgaccgggtccagagctaagtgggtccgcactttggctacctctgtgacacagcagtttgggaagacaggccatgccacaagaatccaactcctcaggagtttaaggaacgaacctcacctgaggaacgcacgcaaaaagaagaaatccttcaatgttcccgtgttaagtacaactcaaccaactagttctctttttcccaccattgaaacagacgatcagctggtggacttcttgcagctgccttctctcaccgttttggactggctccttgttccacattttcgcagacagactcaagtcgatcactataccaggcgtgtgctgagacggagggatggcactacacggctgattgaagaaccacgaccactgctcaagcgaatccagaggctcatccacagcgaggtcctggtggatgtggtcatacatgatgtagcccacgcgtaccggggtgaacgctccatcttcacatgtgcagcccctcatgtcggccaccaggcagtcttaaaaatggacctccagaatttcttcggaaccataactctgcgccggattgccgcccaattccggaggtgcggattccctcggcctattgccctgacccttgggagactgtgtaccgcaccgccggtgagtgtggtaagccctcagacgggcaaaggcttcgtacaggttaacctcattaattcaggttcagccaactccggaggcaatctgaatgccgtgcgtatgccagctcacttgcctcaaggcgcccccacatctcccacgctggcaaacgctatcgcttttcagctagaccggaggcttctgggtctggccaacgcggttggcgccaactatacacgctacgctgacgatcttttcttttcaggcgaccgcggatttgcgagccggatcgaccgatttgctaccactgtcgcagttattgctatggaggaagggtttaccgtggctcataggaagacccgcaagatgttttcggggcacaggcagcagttattgggtcttacggctaacgagaaactaaacagccaccgtcagcaatacgagcagctaaaggccattctgacgaattgcgtgcggcatggatgggagagccagaatagagaaaatcaccccaatttcgcggatcatttgcgcgggcggatcgcccagactttgcaatgcaacccaaacagagggcagcgtctcatgcgactgttccacgagatagcctggaatgagacacagccaagcagaccctcccctgataaaccggatccctga

SEQ ID NO: 12511 - RNA, 1338 nt, synthetic construct
  source 1..1338: mol_type = other RNA
atggctgccctcagcctcgttcctcttcggatggacgagaaagcagctgtgaatcgggccgcgtttatcaaggtcctggccttcgagcttagtcggacttggctgggatcacgccagcgcataagacaggtgttgagacggatgcttgggcgaatgcccgcctggtgtgaagaattgtcatccatggtgcatgaggagttttctgccgctgcttacgcgaaccaactgcagctcagacgcttccttggaagggttgccgctcttcggtcagtgtttcgcaaaggacgcaatctcaggattcggactaccgccctgggtcgtgctactgcatatcggtggcccgttccacaggcaagaaatgaagctgaactacaggacctcttatgcctgaggtcaaccgtggctctggattggctaatcaaaccccacgtcgtgagatccacaaacgtagatcattataggcgcaaaatgatttgtaagcacgatggccagatcagactcatcgaagaaccaaggcccctgatgaagagagtccagaagaccatacataggcacctgctggctgctatcccagtgcactcggctgcgcacgggttcatctgtggccgctctattttctccgccgccagccctcattgtgggaagcgtttggtattgtgtatggacctggcaaacttcttcgggagcatcgaccggcgcagaacgagtgccctgtttcgactgtgcggctaccctgctcccgttgccttcctcctgggatgcatttgcaccgccccggagtctaattctccagatatgcctggtggcgagctggtgaaagtaagcaggttaccccaaggcgccccttcatccccatctattgctaatgcagtcgcctttcggtttgatcaaaggctggccggattagcccattccgtcggcgcggactatacacggtatgccgacgacctcacctttagtgggaacgagcagttcgtgaattccgcaagtcggttgattcctttagtgggcgcgatcgcaatagaggaagggtttgcagttaaccacagaaagacaaggagattttacgcaggccaccgacaaacggtacttggtttgacagtgaacgtcagccccgcagctgcaaggcagagctacgagtctctgaaagccctgctcaccaactgcgtgcgacatgggccggagagtcagaatcgcgataacgtcgataatttcaggagccacctccgaggccgaattgcctacgtgggtgcacagcatgccagccgtaacaagaagctgctggaactgttcggaagaatccactgggaccaatccactccacgtgacctacagtga

SEQ ID NO: 12512 - RNA, 1281 nt, synthetic construct
  source 1..1281: mol_type = other RNA
atggagagcagcttgaccagaagccaactggccatgctgataagtagggatctgtcaaggcgttggctcggcaactcctccgtaatacaccgacggctccgtcgcattacaggctcccgtgctcggtggactgaccagctagcggaggctctccatctacaattcgggagggccggccatgcccaacaagttcccctgcaggtttggctggacggccatccagtcatgaaggccgcattccgcaaccgccagacgttacgcgttgacgtggcaacagccaaccagatcaatcgcccgggatataggtggcccgtacctgccgcagctaaccttctggaactgacggacttattgtgtctgcgcactccacgggccatcgattggctcgtcagacctcacctccggcggagtacatccgtggatcactatgtccgacggcgtatacccgggagacaagggcgaggccgatggttacaccagcctcgaccactgttgatgcgggtacagaggtgtatcgctagagagatactcaccgaaattcccctgcatgccgcagcccatgcatataggagaggactgtctgtgagggactgtgctgctccccacgtgggacatagagtggtgctgaagatcgatcttgagaatttttttgggactatttctctgagacgtgtcacagcgttgttccgcgccgcaggttaccccgatgaagttgccgtgaccttaggtagactgtgcaccgtccctgcaaggacaccttctggcaccgaggactgcaggatcgctgggacgtgtctgccacagggaggtccagcctcaccagcaatctcaaatgctatcgcgttccaaatggaccgacgccttgctggactggccagctcagtgggagcgagctacactcggtacgcagacgatctacttttctctggcggccccgacctggccagtagaatcgatagagtggccaccaccgtgtgcgtcattgccatggaagagggatttcaggtgcagcacagaaaaactagaaaaatgtacagcggtgacaggcagcggttgctcggcttgaatgtgaatacacagcttagtactgaccgctccgactttgaactcctgaaggctatcctcaccaattgccagcggcagggttggcgctcgcagaacagggatcagcaccctgagtttaggctgcacctgcaggggcggattgctcacattggccagacaaacccggggcggtatcagaaacttgcccgcctcttcgatgcaattgattggacctga

SEQ ID NO: 12513 - RNA, 1305 nt, synthetic construct
  source 1..1305: mol_type = other RNA
atggctgaaaagacacttgaccccgctctcgttagtcggcgccagttttgtcgacagctcgccggctgcatgtcccgctgttggttagggaacgatgctcacgtgcgcgaaagactcgaacaagtgctggactgtcaggcaacttgggtggccgagctggccaagtccttgagcgcgagcttttctgagattggttatgcaaataggtttgccctggagtcatggctaaggaaacagccgacgatcaagctcttcttcaagggaaaaaagagtcggcggctcactgatgaagtccagagagctctggcctcacgcaaccataggtggcctgttcccccgttagattccgacgacgatctatgtcgtctgcttgagattgcgtctcttagggaactccagtggctggtgttgccacacgtaaggagaaatactgctgtggaccactacaagaggacatgcctgaagaaaaaattgggcggatatcgttggatagaggagcctcgtcctaaattgaaggccgtgcaaaggagaatgctggaatctgtcctgccagggattcctctgcacagcgcagctcatgcttatagaacaggttgttctgttcagtcttgcgctgagccacatgtggggcagagagtcgttctcaaactggatctgcgggactacttcggcaccatcagcattttcagagtcaaagccttatttgccaatgcaggctatagttggcccatcgcccttaggttggcccagttgtgcaccgccccagcgagaatggacgacctgagggatgaagccagatcactgaccagaacacgactcccccagggtgctcctactagtccctccatagccaatgctgtggcttaccgcatggatcgacgcctggccggacttgcagctagcgtgggagcatcgtacacgcgctatgccgacgatctcatctttagcggggacgataacttcgccgcccgagtagatcgattcgcaacctcagcggcagcaatagtcattgaagagggcttcgccatccagtttcggaagactcggaagctatttcatggggctgagcagcgcatcctcggggtaacagtgaacgaaaaactgaaccttaacaggagggccttcgagggcctgaaggccgaacttcacaattgcgcccgccggggatggcgaacccaaaatcggaccgagcacgcggactacagagctcatctgcgtggccggatcgcatacgcacaatccttaaacccaacccggggtgcaaaactgctgcaattgttcgagcaggtgaagtggaatgagtga

SEQ ID NO: 12514 - RNA, 1389 nt, synthetic construct
  source 1..1389: mol_type = other RNA
atgaccgcccgccgcgagactagaattgatataggaagggctaggctcgtgcgcattttaatcgctagactgaaccaccggtggctggaaacgcctgcacaggtactgaggctgacacaggggctgttcggttcgcagcattctctcgagaaacagctcgccacccaactgagtcaggctcacagagaaaaccggttaagcactcagcaaccgctgtcccggtggctgttgagaaacgaacttctgattcgctatttccgcaaaaagcagacaatctctatttgcaagtccatcgtcgattccatcgaaaagagcgagcacgcctatcggtggagggtgccagccgtcgatgatgaagtgcagctcgccaagttcctactgcttgggagctcacaggttctgcagtggcttaccttgccccaccggagacgtagaaccgacgtaaaccattaccgtcggcgcgccattcccaaaagagatggcaccctcagatggatagagtctccatctcccatcctcaaacgtacacagcgtatcattgctgcagacttactgccacacgtgccgctgcacgatgccgcaatgggttttagacgagggcacagtatccatgactcagccgccagacacgtcggcaaggcctcagtcttgaggctggatctccaggacttcttcggcagcattcattttggccgcgttcgaagtctttttgcatacgccggttactcctctaaagttgcttcaacactggcaatgttgtgtaccgcgccaagtgagacagcgccactggacacctcacccccctgtataactcctcttagcaacagtgctagaacttctacacgcagcgccttgcctgaactgcctagccggttgccccaaggaacacccaccagccctgcaattgctaatgccatcgccttccgaatggacaggaggctcgacgggctagcaaccgcagcaggagctaattatacccggtacgctgatgatctggttttttcctttgacagcccatccgtggctttcgctaagcggtttgcgacttctgtggcggtgatagcaatggaggagggcttcaagatgaactttaggaaaacgcgtttaatgaggcgcggtaatcggcaacgggtactgggaatgacagtgaacgagaagcttaatgtgtccaggcaggcctacgaaactctgaaggcaatcctccataattgcgccaagcgcggaccccggtcccaaaatcgaactgaacaccctaatttcagggagcatctcagagggcgaatcgcccacgtcgcttcgatccatactggccgaggcaacaaactaaccgcggtgtttgagacgattgactgggacgatgatgccccagactataggcagcctgactga

SEQ ID NO: 12515 - RNA, 1293 nt, synthetic construct
  source 1..1293: mol_type = other RNA
atgtccagtcacacagtcaccatagacgtggatttgaagcggtttgctggcctgctccataggcggctgcaatacaggcacctgccagctcccgcttccgttcgagacgccatacagcccttgttcggcagggataagaaactgtgcgaagacctggtgcagcagattgtcgacgcacagcggaatccacagcctctgcgtcatcctcagatgctaacatggttatccaaaaatccggctgtgaagaagagattcagacaccgcaagcgcataaagatccagcagtcccttgtgatccaaattgagagtgacggggtgtatcgctggcccgtgcctccaatcgccaatgaaggtcagctggcagattttctgagtctgtcaacgccacggatcatcgattggttaaccctgccacatcgacgccgcagcacaagtgtggatcactatacaagggttgcctctaccaagcgggacgggaccattaggtggatcgagcaacctgcccccacccttaagagagtccagagactgattgcccagcaaatcctctccactatacctcttcacgatgccgcctcaggctttcgggccggtcattctgttcctgactgtgctcgccagcatgtacggagatctttaatcatcaggatggatatgcggcacttctttggttctatacacgtgggcagggtcagaaacctcttcctcatcgccggatatccgccgcaggttgctcgcaccttggccttcctatgcaccgcacccgcatcgattgaccctgatgcagatgagcttctgcgacgtagccggctacctcaaggcgctcccacaagcccagccattgccaacgcggtcagcttcgccatggataggcgcatcagcgggctctgtaaaactctcaacgtgacatacaccagatatgcagacgatctgattttctcatgcgaccatttcggcttgtctcaggcaaaacgatttgcgactactgtggcggtaattgctatggaggaagggtttcaaatcaattttcgcaagactgcgtttatgcgtcacggcaacaatcagagagtactgggactcacggtgaaccagaaactgaactcagccaggaaagagtacgagactctgagggccatccttcacaactgtcgtcgagacgggccagctggacaaaatcggcatgaccaccccaagttcagatgccacttgcgaggaagaattgcacacattgcaagcgtcaatccccataggggagctaaactcatggaacagttcgaccagatctactggtga

SEQ ID NO: 12516 - RNA, 1335 nt, synthetic construct
  source 1..1335: mol_type = other RNA
atgcctcccgccacctactcccttgatcaggtagccgccgcttttgccaaagctgcagttgtgggggtgtggaagcgcacagccgtgctggaccagtggcgcaagctcatcgaacccttgccgaacggactgaagtcagtggccatgcaactaattggacagttcgcacacgtccccagtcagcaggttgtagcggaatttctccaatcaaacagaatgtttcagcaggcctacgccaaaaaccttgtgatgcggagggtggggtggtgtgatcatcagatcgtggatgccgccctagctccaaaaagcaggcacgtgaggaactgggaccttccggaattaacctcccccactgatctcgcctcactcttggactgccccgagaaccttctgtggcagctggcagatcatcgtcgctgctattggctgcgacagagccattatcgcttacggatgtctcgtaaacgctctggcggcctcagattaatcgaggcccctaagccaaagctgaagacagtccagagaagaatctggaaaaggatcatcagatggattcccgcgcaccaggctgctcacgggttccaaccgcgaaggagcatccgttccaacgcagccttgcataccggccaatcggtcgtaattcgaatggacctgcaaaatttctttgcatctgtgagcggtgcccgcatcgccgcaatctttcgcaccgccgggtaccctgaaagtgttgcgctgcttctggcccggctctgtacgtcgaaggtgtcaagattcgtgtggcagatgctatgtgacgaaaaccaggctgctgacctgcacggcctcgtcgaccaggtcagtgtctggcacctgcctcagggtgcacccactagcccagccctggcaaatctcgccgcttttaggctggatcggaggttgacgggactggcggcgtctatgagctctcggtatagccgatacgctgacgaccttatattctccggtccaaccgacctcgccaaaaggtcccaagctttcgtggcaaaggtcacagagattatggtggaggagggctttttgcctaatactaggaaaacacgtataatgcggccatccgttagacaatctgtttgcggactgaccgtaaatcagaaggtcaatagtaatcgggctgatttcaagcagttgcaggctattttacacaactgcgttactctgggacctgccggccagaatagagctaatgtggcggattttcgcgcacacctggcagggagaatacagttccaacggttcattcatcctcagcgggctgccaagctggaggcaatgttcgtgcgaattaaatggccatga

SEQ ID NO: 12517 - RNA, 1353 nt, synthetic construct
  source 1..1353: mol_type = other RNA
atgccaccagaaccactgcctgagtgtatgattgctgccgccgctgaacagttggccggatggcttcagctgaggcttctccccgaggcccagtcactggaagctgccctggaaagtggtctgcctggctccatctctgataggaagccgctgttacgtcggctgtccggcatcaaagagatcgccacgatgccggaggcggatctcgcgaaaatcatcgcggccgacccatggtttcaggcccatggcgcgaggagcgcacgtcattggcgccatcagacaagagtgcgggaaatgaccccacggtgggaggggttacccattctggctaccgaaggcgacctctgcctgtggctagggggtttgaggcccgcagagcttcactggctcgcccaaacagagcgcggagatcacgacccagccggcaagttggcccactacgtccaccgatggattccaaggcggcatggcgcaccccctcgattactggcatcccctaaacccctgctcaagtcactgcaaagaaaaatcctgcgggacctgctcgatcacctgcctctgcacgaagccgcccatgggtttcggaggggtaggagcataagatctttcgcccacccccacacggctaccgactgtgtgctccggctggatctggcagattttttccccagcatccgtttcgggcgagtcgcagccctgttcgagactgctggttatccgtcacccgttgctcggctgcttgctggcctgtgctgccacagcgcacctagggctgtggtgagatccgctggcctacctcgagccctcgctgatagactcttgcgaccccatcttcctcagggcgcacctactagcccggccttatctaatgctgttgccttcagactcgacaggcggttagctggactagcggcagcggcaggagctcagtacactagatacgccgacgacttggcattttccgggggccgcgatctttggcgaggtgctacaagattcttggaccgcgccaccgcaattgttctggacgaggggtttgaggtgaacttcagaaagataagggtaatgcccgcctgtgctcgccaaaggatagccggcgtcgtggtcaacgagaagaccaacaccgtgcgcgagacatatgacgcactcaaggcagccctacaccgttgggagacacgcggcctcccagaagacgatgccctttttcctgaacgccttctgggacggattagtgcgctggctcagttgaatccagaaaagggagccaaactgcggcagcgctatgatagagtaagagagggaagtggattccatgaaatgggatcgcccccaacttctggggggctcttgtga

SEQ ID NO: 12518 - RNA, 1041 nt, synthetic construct
  source 1..1041: mol_type = other RNA
ccccatccggctgtgatgacagctcgatgggaaggtctgcccctcctcccctcgctgagcgatcttgccgactggctggagatcgcgtccctgagcgagctccactggcttgcgggcattgatagaggacgggaagcacctccatccagagctgtgcactacacttatcggtggatcctcagaaagaatgggtcacctccacggctgcttgagtgcccaaaacctaagctgaaggcgattcagcgcaagatcctaagacagatccttgataaggtccctctgcacgatgccgcccatggattccgtcttcgccggagcataaggaccttcgccgtaccccacacaggacgcgaatgtgttctacgagccgacctggctgacttcttcccatcaatcaggtttgggagggtggccgctttttttgagacgagtggctaccccgcatccgtggctaggttgttagccggcctctgttgccatgcaccctctaaaaggggcattcgggcagccaagctgtctccattctcagccgccaaatggctgcgtcctcacttgccgcaaggcgctcccactagccctgcgttatctaatgcaatcgcattcaggcttgatcgccggttgagtggtctggcacaagcctccggggcccattataccagatacgccgacgacctggcatttagcggcggaagtgatctgtcacgaggtgctgatcgatttctcgccctcgtcgctaccattgccctggaggaaggattagaactgaactatagaaagtccagggtgatgcccgcatgcagcagacagcggatagctggggtcgttgtgaacgaaaccccaaacacgactcgcgcaatcttcgatgagctaaaagcgtgcctgcacagatgggagacaaagggcttcgacgcatgtgctgctgacgacccagagttttctgaccgcttgctgggacggattgccgccttggcccatctcaatcctaggaaaggtgagaaattgcgacagcgctttgaaagactcaggggggctcgtcagtga

SEQ ID NO: 12519 - RNA, 1155 nt, synthetic construct
  source 1..1155: mol_type = other RNA
atgaccactgccatccccaggctgcttgcacaggcattcctaaacggcaagctccagcgggctgggatgattaaaagaggagcggaactcctgggccagaaatggaagtggcttggcccgctggccacaaggttcctgaaagagttcgggggcgctaaaccacgcttaggcgacgccgtccgattcctgcgacacgacgaagggctgtgcgttgcgcgtgctgggttacggatagctaaatggactccatctaacggggtggctgcaatgcggtggaagttaccagaaatggagtctcctgcagcattggccgaatggctgggcctgacagacgcagaggtggcctggtttgccgaccgcaaaaatatcaataagggtaaaagttcccactacacatattgcgtgtttgaaaagcccggaaagccagcccggctgattgaagcccccaaaacacgaatgaaggagctcttgcgccggctgctaacggacgtatttgagaagatccctgttcatgctgcggcccacggattcgttgcccgccattcaattaagactttcgcagccccccacgctggacaaccatgtctgctcaagatggatctggcaaacttctttccctcgattagccgggccagggttgaatccctcctcatcacagcagggtatgatgagagagtcgctgagctcctggctgggatttgtaccaaccgcgccccacgtgatgtagcaccggatcccatttataccaggcctcatctgcctcagggcgctcctactagccctgccatcgcgaatctttgtatgtttagagccgatcgtcgactgcgaggacttgccgagagtgctggagccgtctacacccggtacgccgacgacttggcatttagcggcgcttctgtgggtgacaggagtgcgttgaggatcgtcaggagaacccaccttagaatcgtgcggagaacccaggcagccgagccagtgaagcatgagagccctaggttgagacattcccgcgctggcagacccgtgcaatgctcctcaatgcgcacggattcacaccagatagctatcaggataattcgcgtgtttggttgctgcggatgtgccgtgtgggtcttccacgatgacagacaacccccgcagcggatcatgggttga

SEQ ID NO: 12520 - RNA, 1323 nt, synthetic construct
  source 1..1323: mol_type = other RNA
atggccacccatagacatattgcaaaggtgatagcggggactgctgccgctggtcaactgaccgaggatgagatagttgccagggtcgccggcgtcctgggaaagagatggcgctggttgcggccacttgcacggaggatggaggagagatttgccggtcggaccagaccgagagagagcgctgtgcacaggtggatcatcgcagatgacggatttcaccgcgcatgtcgacagcatgcgatagttatcgtagaagaactgccgcatcgcccagaaatgcggcccccaaccggcatcgctatgacctggaacgtgcccacaattactacagtctacgacctggctcactgggccgacctcccactcgacgaactggagtggctggcagaccggcgaggcagagaaccttctgccgaggctaaataccggagatatcgatatagagtgttaagcaagggccagtctcggttccgcctcattgagacacctatctacaggctgaaattactgcagcgacacctgctttctggcatcttggaccatttgagccctcacgacgcagcccatggattcagaaaggggaggagcatccatacctttgcagacaatcacctcggaagacaagtggtgctcaaaatggaccttcgggattgtttcaccactattgacttcggcagggtttcccatctgtttcgccttgcggggtacccggaacgcgtagcagatactctcgccgccattacgacaaatacagtgcccgatcaagtttgggaggctgctagcggcgcgcatgtgttttgccccagtgaacgcctgccttcaatctatgcttccccccaccttccacaaggggctcctacttcaccagccatagccaacttgtgcctgtacaagcttgatctccgtctgacaggactggcgaaagcatgcggcgcctcatattcccgctacgccgatgatctggctttctccggggacgcagatttcgccaggtgtgtgcagagggtacgacaccatatcgccgctatcattcaggaagagggattcgaagtcaatcacagaaagacgcgtgtgatgcgcgccagtactcggcagcgtattacgggtattgtggtgaatcagcaccggaacatacccaggagggagtatgatcagctaaaggctatcttgcacaactgcatttctcggggcctccagtcgcagaatcgtgataaacacaccgactacagagcccacctagcagggcgcgtcgcctttgtcgaggccgtttcccctagtaggggtcagcgattaagggacatgctgaaccagatcgatccctga

SEQ ID NO: 12521 - RNA, 1347 nt, synthetic construct
  source 1..1347: mol_type = other RNA
atgaaacgcgtcgcggagtggttcgcggtgcttttctccagagctgcaacaatcggcgagatgaagggcgctgctgctaggctgatcgggggacagccacgttgggttgccccaatgctccggcgtgctgaagccgatgcccaagtgagggacccccctagtgagttggtgggactcagcttccagtcttggatgcactggttgttgcatgaccgaggcttcctcgcacgcgtgtctgatccttttgcggccattcaccgcgggccggctgaatcaatgatgttgcctgccgccgcagctatggattggcccgttccccagatccttaccgtaggggacttagctcattggcttgatatctccccagccgagctgcactggttagccaatctggatgctagttggaagttgaccggacgcgagggacgacattatcagagagtcgcacatcagaaaaggtttggggaagtccgcataattgaagccccgcggtatcgcctgaaagtggttcagcgacgaattctgcatggtctactgaatagaattcccgctcacgacgctgcccacggtttcgtggcaggacgatctacccggacttttgcagagatgcacgcccggagccgcatggtgctgagaatagacctccggaacttttttgtgacaatcagacgcttccaaatcgccggcgtgttcgcactggcgggttatccagctgatgtggcctacgtgctcagccgcctgtgctcagctcaaatgtccgtccaggaatttagcgacctcgttggcagccccctcgagtttcggagggccagtggtgccccatcacttgcgcaaaccagaaggctgtacactagacctcacctgccccaaggcgcacctacatccccgatgctggcaaacctgtgcgtttaccggctggattgtaggctgtctggacttgccgccgcagtaggcggtcggtatagcaggtacgctgacgacctagccttctcggcagacctcgacgtgcggcagtccaagcgtctgtgtacccagatagccgccattgtgatcgaggaggggttccaggtacatgatcggaaaacaaagaggatgaggagagggacgaggcagcgcattgccggagtggtcattaacgagcatcccaatgtcactcggcagcaatacgaccagttaaaggcgatccttcacaactgtgcacgatacggccctgaatcacagaatagagatcagtgcgcagattttagagcccacctggaagggagggtcgctcacgtagggatgctaaacccaacgaggggcgcaaagctcaaacgtttgctgcagcagatcgactggggcagatga

SEQ ID NO: 12522 - RNA, 1017 nt, synthetic construct
  source 1..1017: mol_type = other RNA
atgaagttccctgtccctaagattaggaccctgctgcagctggccaatctcttggagatcgaaccggaacagctgcgctggttagcaaacccttgtggtaggagaagtgctcccgacagctggagccgccactatcgatcacactggattagaaaacgaagtggcggctggcgcttgattgaggcgcctagatcccgactgcggtacgtccagcgcatcctgctggacacaatctttaacgccatgcccccacatgtccttgccttcggcttctgcaggaaccggtcagtgatagacttcgtgaaaccccacgtaggaaaggacgtctgttggaggtttgatctcaccgattttttcacgtcggtgactacagggcgggttgcagggcttctgcgcaatagcggttacccctgcgatgtagcgaatagcattgcgatgctcaccacagtgcaaacttccccgcggatcctatccgtggagcatccaagggccacattttcagtccagtcccccaagcatctccgtcggcacctgcctcagggtgctccaaccagtcccgccatagctaatttatgtgcctatcggcttgacgcacgtctgtctggcttggctcggagcgtgggaggtgtgtgctatagccgatacgccgatgacatcctgttctccggcgattctgaccttgcccgccaatcaggacgtctccgagcccatgttggagcaattgctatcgaagaggggttcgagatcaattacagaaaaaccaggctagcacgcgcttctcagcggcagtttgctgccggaattgtgcttaatgagaagctcaacgttccaagagaaaactttgatcgcttgaaggccatactgcacaattgcgtgaggagtgggccaacttctcaaaacagagacaaccaccctgcattcagacagcatctcgaagggagagtgcagtgggttgagatgttgaacaggggccggggcgagaaactgaggaaattactggaaagaatcgagtggtga

SEQ ID NO: 12523 - RNA, 1338 nt, synthetic construct
  source 1..1338: mol_type = other RNA
atggcaacgcagagattcgttgcggactatctcgctagtgcatttgtgtgcggccggtgggagtgcgatgacctggttgatcgcggcgcagacgctcttggtaggaggtggagatggttaagacccctggcccaacgtgccctccacactttgggccatgataggcgcccttcccgtttccaggtcctgcgctttctgcgccaggatgagggcttgagacgcgcttgccacaagcacgatgtgcgtgtcggcgggctccagagaaaaccacccgaaatggccccaactgccggacacccagtaaactgggacgttcctcctttagtgaccgtgggagagcttgctgactggctggatctcaagctaacagaactggattggttcgccgaccgacggggacttgagaggaaagtgccgagaggcccactgagacactatcgctattactggctctctaaaagaataggtgggagcgccaggttgatcgagtccccgaaacagcgtctgaaggctattcagaggtgcatcctccacgaaatactggaccggatccctccgcatgaagcagcccacggcttttgccgcggccgttctatcagaagctttgtggcacctcatgctgggcagtccatcgtgctccgggccgatctgagagactttttcccttgtatccccaggcggcgagttgcaggcgtttttcgaacagccgggtacccagaggaagtctcacagtgccttgctgcactgggtaccaatgaagtgcccgacgacgtatggcgaagcttcccacaatatggaaacgtggccgaccggtggaggcatcagaggctctacgggcagccacatcttccccagggtaccgcaacatcacccgccattgccaatctctgtagttacagacttgattgtcggctggccggtttagcccggtcattcaggggacggtacacacgctacgcggacgacctactgtttagtggaggccgagtgctggctcggtctattggcaagttccaccgggtagtgtatgcgatcgcgatggatgagggattcgagataaaccctaggaagactcgcattatgcgccaaggggtcaggcaatgtgcggctggtctgaccgtcaatcggcatcccaacatccccagggacgagtttgatcgattgaaggctattttgtacaactgtgcaagacggggacctgggaatgagaaccacgcccgcctgccagagttccgcctacacttggatgggcatgtgagcttcgtcgaatccgtcaatcctgcccgaggccagaaactgagatcgctgtttgaaaggattcaatggcccgctacctga

SEQ ID NO: 12524 - RNA, 1338 nt, synthetic construct
  source 1..1338: mol_type = other RNA
atggtgaaccaggaccttgtggcaagcgctctggccgcagcctttgtcgggggtagatggcaggttgacgaactggtagcccgtggagctcgcgctttgggtcgcagatggagttggctgaggccccttgccagcaggctcttacacgtgctgggagaggacagtctgcccagcagatcccaaatcgaacggttcttgctccaggacgccggctttcagagagcctgtttagagcacgctataagggtgggcggaccaggtcggaattaccccatgatgtctccagctgcgggcagtcctgcctcttggggagtccctcccttagtgacagtgggtgagcttgctaaatggcttgggctagaaggcaagcagttggattggtttgcagatcgcaggtctttggagcgaaccacccctgccggacctttgcgacactataaatactactggctgagcaagcggttaggagggtcggcacggctggttgaagcaccgaagtggaggctgaaaatgctacagaggagagtgctgcgtggcattctggataatatccctccccatgccgcggcacacggtttttggcgcggacgatccattcgctcatttgcggctgcccacgtaggacaggctgtcgtgctgaggatggacctgaaggacttctttccatccatcgccaaggcccggattgttgcagtcttccggaccgcaggctatcccgaagatgtgtgccaactcctcgctgccctctgtacaaaccacgtgcccgacgacgtgtggcaacgcttcccgcagtatgggggggctgccgatagatggagacatgagggcctgtatgcaaggccacatctcccacagggtacgcctaccagccctgccctcgcaaatctatgtgcctatcgcctggattgcaggttgacagggctcgcccatgccgtaggagggaaatacacacggtacgctgatgacctgttgttctcaggcggcgaagcgcttgccagatctctgcgaaggttcgaggcgactgcttgttcagtgataatcgatgaggggttcgccgtcaacttccggaaaagaaggatcatgcggcagggggtgagacaacacgctaccggccttgtgctgaaccgccacgtcaatgttgcacgtgacgagtacgatcgtctgaaggcaactctccataactgcgtatgccagggcccaactgggcagaacaggggaggcgttcgtgactggcgcctccatctgcagggccgaatcgcttttgtcgagtccattaatccagaccggggccggcgacttagaagactgttcgatcggattcaatggccccgcgattga

SEQ ID NO: 12525 - RNA, 1344 nt, synthetic construct
  source 1..1344: mol_type = other RNA
atgagctcccggaagtcaattgcacgtaggctgactgtagcagtcctggcgggccgtttcggaaaggactctatactggaaagaaccctgccactgatacagggctcccccacatggctgaaacgatttgtggaccagttgatccggcggttcggcaatcagaggcctaagaggagctacgtccttgccttccttttgtcaaatagagagttcatcgacgccagtctgaacgaagactttgatgtgcagccatacttgcttccatccgagttttctccaagccctgggaatttcgaagccattgacgtcattcgactccggagcagcggtgaagttgcggcatggctcaagctgaatgagaacgaattatcctggttcgcagacagacaccagctcgaaagactctcaacggtcgggcctctgcgacactataggtacttttggaaacttaaacggcacgggagatgccggttgattgaggcccccaaatttcgcatgcgggagattcaacggaggctgctacgggagatcctcagcaggatccccgtgcataacgcagctcacgggttccgccggggtagaagtgccaattcccatgccgccccacatgtgggtagatcagtggttctgaaacttgatctggaagactttttcccttctgttcctcctatgagattgacacgactcctgatgcacaccggctaccccgaggatgtagcggagatcctgacagccctgtgttgcaatcacgtgccaagcgatgtgtttgactcttttccccatagggatgattggaagctgaggagacgcgccaaacaactatattgtaggccccacatcccccagggagctcccacttctcctgtgattgctaatttatgcgcataccgcttggacacccgactggctggtcttgcccagagtgctaacgcgacttatacgcggtatgctgacgacctgctgttttccggcgatgaccaattctcaagaggcattgataggtttagaatattagccgctgctatcgcaatggaagagggattcgcagtaaaccaccataagacccgtgtcatgaagcgttcgattaggcaagaggctgttggactagtgctcaacgaaaagatcaatactcgccgcgatgagttcgatcgacttaaagccacactgcaccgctgtatcctcaaggggccagaggctgtgaactgcggacagcatgcccactttcgccaacatctcataggccgcattcagcacatcgcccagagctcgcagagtcgccataccaagctcatggccttattcgaccagatcaactggtccgatccgcagtctccgagtacctga

SEQ ID NO: 12526 - RNA, 1326 nt, synthetic construct
  source 1..1326: mol_type = other RNA
atgaatacccccgaaagtgccgccaggagacttgccgtggccatactcgccggaaaattcgagaaggaagccatcttacagagaactctcccaataatctctggaagcatcacctggatgaagcgtctggtaaaccagatcatcaagcgcttcgggaatcaacggccaaggcgccgcgaccttgtcacatttcttctgcactcgcgcgggttgtctaacgcaagcgagcaagaggattttcaaattcgcgcctatgaccaggccgctgattttttaccatccccaggcctatttgaaaatgtcggggtcttgcctctcaggtccgtgggagagattggtgagtggttcggtttaggtgagtcagaactgctctggtttgccgaccggagacagctggaacgagtgctgccagacggccctctgaggcactatcgataccactggaaactgaaaagacatggaaaatgcaggctgatcgaagcacccaagttccgacttagagaaattcaacgcaagcttctccgtgaaattctgaaccagatcccagttcacaacgccgctcatgggttccgcaaaaaccggagcgctcagtcacacgctgctgcgcacgtgggcaaggctatcgttctcaaaatggacttggaggattttttcccctcaattgcacctgcacagttggtgcgtatcctgatgcacgtcggctatcccgaggacgtggctgaggttctgactgccctgtcctgtaatcacgtgccttacgaggtgttcagcagtttcccccacatggcagatggccggcagaagagacatgcccagcagttgtattgtcgaccccactttcctcaaggcgcaccgaccagcccggctattgccaacgtgtgcgcctttcgtatggacagacgactcgccggactggcaaggtctgctaacgcggtgtacaccaggtacgcggatgatctgctgttcagtggtgacgaaaagtttgcgcggtcaataaatcatttcaggatctccgtcgccgcaattgcaatagaggaggggttcacaatcaaccatcataaaactagggtaatgaagcgaagtgtccggcaggaagctgtgggcctcgtgctcaacgagaagttaaatacgcggcgggatgagttcgacagattgaaggctattctacatagatgcgtactgagggggcctgccgctgttaatgaaggacgccatgccgatctgcggagccaccttcggggcagaatccagtacgttgcacagacaaatcagggcaggcacgcgaaactatctcgcctgtttgagcagattgactggtccgattga

SEQ ID NO: 12527 - RNA, 1440 nt, synthetic construct
  source 1..1440: mol_type = other RNA
atgtcagtggcgagattcatcgcgcgagcaacacttagatggcgcgccgatcccctcacccataacgggactcgatggtccacagtgcccctgagcaccctgatggagttcgctaatcaggtcgcccgccaacttgccatcgccattcaacagggacggattgaagaggaagctttggtccaacgcatccgcgaacactgcctgggacggcagaggtggttacgcagctttgccaggcgctttgtggctcacttcggtgaggggcgacggtggagacgactaaggatggagcggtttatcctaaaagacgcaggcttcagacgagccgtcgccatgagccagctgtctctcaggagtggcataaatccagccccaggcatgtgtcctgcagcaggagccccggagcactggaagcttcccgagctcgctaccacaggtgatctggcccggtggctgaatctggagcccggagagctggcctggttctcggactccagaacccaggaacagacgctgccagaaggccctttgaggcactatagataccattgggtgctgaagaggggtggcagtgctcggctgttagaatgtcccaaacaacgtctgaagctttttcaacggcatgtgttattccagctcttaaatcggattcctattcacccagctgcacatggcttccaggcaggaagaagcgtacagtctttcgcccagccccatgtcggccgggaaatagtgatgaggctcgatctgcaggacttcttcccctctgttatgaagagccgcgtgctggccatttttctcactgctgggtacccagaacccgtagcggccatgctggctggattgtgcaccaacgctagtcctttcgccgttctcagttcctgtccggccacggtacacccaacccagagatgccaccttaaggatttgtaccgccgtcctcatctgccacagggtgctcctactagcgccgctctggccaacctggctgcctttcgtttggacctccggctgcacggcctggctaaagctgcaggagctgcctatacacggtatgcggacgatcttgtgttttccggggactcagcgtttgcaagaatggtcgagaggttttatatccaggtttgtgccatcgcacttgaggagggatttgcggtgcagactagaaaaaccaggatgatgcgtaggtctgtttcccagagggcagtgggcctcgtcctcaacgatcgactgaacacacctcgcagggaattcgactgcctaaaagctatcttgcacaattgcgtggtgcaaggggttgcagcacagaaccgtgcagatcatccacgctttaaggagcacttggccgggcgaatagcctacatggagtcaatcaatccgggccgcgggattcggttaagaagagatttcgacaggattatctggcctgaccccacttga

SEQ ID NO: 12528 - RNA, 1329 nt, synthetic construct
  source 1..1329: mol_type = other RNA
atgagactcgccgcaaagatcgcccatgccctcgcgacagccattctgaacggcactctcacaaccgaaggggtttacaagaggggtgcggccgttttaggctgcagatgggcctggcttcgcccactagctaagcgcatcatagcacattttggcgaggggacaaggccccgggtgtttcgtctggaaaggtttattctggccaacggcggcttcctaaaggcttgcgagaaacaccagctgacgctgcggcccgatgcccatttcgaacccgctatgtgtcctgcagctggtccacccaggaggtggaaggtccctagaattaggactcccggggaattggccagatggttgggggtggagttcaaccaacttctgtggctggctgattgccgcacacaggaacagaaactgcctccaggccctttgagacactactgctatcactggcaaccgaagcgagatagtagcgcgcggcttatcgaatcaccaaaaccgaggttaaaaaccattcaacgccaggttttgcacgaaattctggaccgcattcctccacacgccgctgcccatggtttcagagccggaagaagcatacgctcctttgtgaaaccgcatgtgaagcgggaggtagttttgaagctcgatctgaaggacttctttccacggatagccagggcacgggtactggcaatattcctgacggccggctatcccgaagcagtcgccgaactgctcaccggactctgtaccaattctgtcccttccgaggtgatcaaagcttgtccagcagccaccaacccccttagggcacgagaggctaagcagctctaccaaagaccccatctgccgcagggagctccaacctcccctgcattggccaaccttgccgcataccgactggactgtcggcttgcgggcttagctaaagcagccggtgccaggtatacaagatatgcagacgatctggtgttcagcgggggaaaacccttcgctcgtatggtggaccgtttttacatccaggcctgcgccatcgccctagaggaaggcttcgaggtgcacactagaaagactaagattatgcggcgttctctctcacagcgagctgctggcatcgtgcttaatgaacaccccaacgtccctcgccgggagttcgacagactcaaagctgtcctgcacaattgtgtcgtgcatgggccagcgagtcagaatcgggacggagtggctgattttcgggcccacttagcgggacgcgtagctcacgttgaggtgatcaatcctgcacgagggcgaaagctgagggagggatttgagcgcatcgagtgggagtga

SEQ ID NO: 12529 - RNA, 1161 nt, synthetic construct
  source 1..1161: mol_type = other RNA
tcgcgtactgctctcaccagattcattctcggaaatgctgggttccaggctgtttgcgaagaggaccctgatctgagcctgagtggctcacggcactttgttccagcgatgactcctcagaactcccgtgctgcatcttggcccgtgccaccacttgtggccctacagcagctggctgactggctgggcatcacgcctggcgagttggcctggttcggagacttgaatagcttgcaacgctccgtgccgaacggaccgttgtgccattatgggtaccactggattagaaaaaggggcggttctttccgcctagtggaatcaccaaaagctcgactgaaacagctgcagcggaaggtgctgcacgagctggtcgataaaatacccccccatgacagtactcacggtttcagacagggcaggagcatctgcagctttgtaaaaccccacgtaggcaaacgggtcattctcaagatggacttgcaggactttttcccttccatcaccaggtggagggtcaccggcatcttcctttatgccgggtatccagaggaggtcgcaaggctccttgcagggatatgtaccaacgaggcccccccgcaagtcttaaggagcctccctgcatgtgaacggcaaagggcctggcagctggaatccctgtaccagataccccacctccctcagggagcaccaacatcaccaggcctggctaatttatgtgcctacaagctggattcacggcttgccggactagcaagagcagccggagggacgtacacacgctatgccgatgatctgctgttttccggtgacgatgcctttgcgaggtctgtgaagagattttacatccatgccgcggccattgtgcttgaagaggattttaccatcaatttccataagacacgcattcagggacagtctgtgcgacagcgagccgctggcctcgttatcaacagtcacgccaatatccaacgcgacagctttgacaatttaaaggcgacactgcacaacgcagcccgttttgggcctgcaggccaaaacagagggggcgtggcagatttccgggctcatctgggtggtcgcattgccttcgtggaaatggtttgcccccccagaggggaaaagctccggcgaattttcgagcagatcgcttgggagggatga

SEQ ID NO: 12530 - RNA, 1356 nt, synthetic construct
  source 1..1356: mol_type = other RNA
atggaacggcccccactgtcctcctccagctttcataggctgaggcgctactgcctcattctcgcgcgcgcattccttgctggtccctgggagagacagggactggtcgagcgtggtcgcgcaacggtccaacggaaagctaaatggttggactctgccgctaagcgtgcaatggaggcctttccaacctgtgccgctctgcgagaggctaggttggcggatcatctagcgggcgacccagacgtgcttaaggctgcgactagcggccgagttccccttcgcccacaagctcttgtcgacctgaggcctgagatgaggcctcctcccggaccgtctgctgcatggagcgttcccgctatcgcaaccccagcggagcttgccgccttctgcgatgtgagcccggttcagctggagggattagccgattgtcaggggcgggaaagacggacacctcgggaacccctgcgaaattaccgttaccgcgctttccccaaagcatcaggtggctttcggattatcgaggcccctaaacccagactccgccggatgcagaggctcctgttggatgaaattctggccaaaatccctgctcacgaagccgcacacgggtttaggccagggcgctctgtgatgagtttcgtagagcgacacgtgggaagacatgtggtattaaagatggatctggcggacttttttccctcgattaccgccgctagagtgctagccatcttcatgaccgcaggctatcccgaggacgtggcaaagctgttagccggcttgtgtacaaacgccgtcccgatgcacctggagaggcttctcggggggacaccagtgggagactggcgatccaggaagctgctggctggcccacatcttccccaaggagcgcctacaagtcctgccctcgcaaacctggccgcatatcgcctggatttgaggctcgatgcattggccagatccgccggtgcccattacactcggtacgccgacgacatggtgttcagcggagacgaatctttcgctcgatcagcaggccgcttcgccctcagtgtatcagccatcgcactggaggaaggcctcgctgtgcgaaaccggaagactcgggtgatgagaagaggcgtccgccagagagctgcagggattgtcctgaacgaaaggcctaaaataccaagggatgactatgataagctgaaggccacgctccacaattgcctacggcatggcccggccggacagaatagagatgggcacatggacttccgggcccacctgttgggcagaatcgcctatgttgctcgtatccaccctggtagaggggaacgcttaatgaggagttttgatcgtataacctggtga

SEQ ID NO: 12531 - RNA, 1326 nt, synthetic construct
  source 1..1326: mol_type = other RNA
atgagcagttcccgccatccccacagaaggtttgcgttggtgcttgcacgtgccttcctggccggtccctgggaacacccagagctggtggggagaggccgaacagccatcgggagaaaggggcgatggctggacgcagttgctaggcgcctgctggtcgcctttccttcacctgctgccttacgggcccgatggatcgcagaccatctgctggccgatccacagtttcttaaggccatagggaaagctagagtgccactccgtgcagagctgtcaccagtgatgaggccggctccaggagaaccagcctcttggctagtgcccgccattaccacccccgctgaactggctgcattctgcggcgtcacaattacccagctagagggactcgccgattgccaggggagggagaagaaagcccggagggagcctctccggaattatcggtaccgcgtcgttgcgaaacccagtggcggcagtcgcctcgtggaaagccctaagcctcggcttaaagcaatccagcggaggcttctcgacgagatcgtagcccgcataccaccgcacgacgctgcccatggctttagaccgggacggagcgtgtcatcatttgtcgccgggcatgccgggcgacacatagtgctgagaatggacctggcagacttcttcccttcgataactagcgcccgtgtcgaggccatctttatgactgccggctaccccgaagacgtggctaggctgctcgctggactgtgtacaaacgtggtacccaggcacttggaagacggggatggcgctgatcgggctacgggatggcattctagaagactgctggcggaaccccatttgccacaaggagccccatcctctcctgcattagccaacctggccgcccaccacttggacgtgcgactagacgcactggctagagcagcaggtgcgcgctatactcgttacgccgatgatcttgtgttctctggagatgatgctttcgctcgcagcgtccgccgcttctccattcacgttgcagcgattacattagaggagggttttgcagttcgacaccggaaaacccgtatcatgcgaaggggtgtacgccagagagcagcgggcattatgttgaatgtcaggcccaatatccccagggaagactatgatgccctcaaggctattcttcacaactgtgcgcggcatggccctgagggacagaacagggccggtgtttccgatttcagagctcatttgctcggcagaattgcttacgtgtccggcatccaccctcaaaggggtgcacgcctcaagcggaccttcgaccggatcgcatggtga

SEQ ID NO: 12532 - RNA, 1350 nt, synthetic construct
  source 1..1350: mol_type = other RNA
atgggtcggcctccactcctgagtacccaaaatgccgagttcatcgtgcgcgagcttgctaacgcattcgtggagggcgtgtgggatctggacggtctagttgctagaggggaacagactctggggagacgtccgaggtggctcagacacctcgctaggcgcttattagccgcctttaacgatggtaggcgtccaccggcagctcagatcgcaagattcatccacaatgatagagggtttgatcgggtcagggagaggtatgaactgacaatggagtggtccaggaggcctccccctgtaatgtcgccaggaccaggagaaccagaaagttggcccgtgcctgcaattgtgactccagaagacttggcagaacggctgggtctgaccagatctgagctggattggttcgctgattcacaggctcgcgaaggccgcggatctccagagaaactgcggcactatcactaccgatggcaggccaagcggagtggatccgctaggctgattgaggcccccaagcctaggctcaaagcgattcaacgcaggttgctggacgagatagtcgccatggtacccccccatgacgctgcccatgggtttcgacttgggcgatccgtgcggacatacgtcgagccacacatcggccggacaattgtcctgaagatggaccttcgagacttttttccgtctatttctgctgcctggatcaccgccctgttcctcactgcaggctaccccgagccagttgcacggcttctcagcgggttctgcacaaacagcgtcccccctgacatttgggccgaccccagatgtcccatccaaggccccgagcactggcgtctcagacgtttacaccgacagactcatctacctcagggagcacctacctccccggcaatcgccaatttgtgcgcctatcgactggattgtcggctgcaggctctcgccacgtcagtggaggctcggtacacccgctacgcggatgaccttgctttcagcggggatcaacgattggccagggccgtcgaacgcttccagacccaggtaggcgccatcgcgctggaagagggctttgtggtgcagcatcgcaaaacaagagctatgagacaggccgttcgccaacgggttgcaggcgttgtgctgaatgtgcgccctaatgtccctcggccagactatgatagactaaaggccacgttgactaactgcataaagcagtcaccccagagccagaatagagacggacacgcagactttcaagcacatcttaggggcagaatagcgtacgtggccgcgttgaaccccaaccgcggacagaggctgcgtgctctcttcgaacagattgcctggtga

SEQ ID NO: 12533 - RNA, 1338 nt, synthetic construct
  source 1..1338: mol_type = other RNA
atggtactgtcagcaagcagccttccgctgcgtctggcacgcaccttactcagtcggcccttcacatggcaggccgtcgaagaggcactcgttgatgctagggggggaccagaccccggcttgactagattggtgaccgtgctgttactgcgactgcgcgctctgcgcacacgagcaaggtctagggccgcactgcatgagctggtggactatctcgataactctcggcgggtcgaaagactatttggggaggtcggcccggaactagcagaacttcccccgccaaccatgctgccccttccaggtgcccccaaacgatggcaggtgcctgccattacgaccgtggcccagctcgcggattggctcagagtgcagcctgacgaactgctggctctggcctgcagatggcggcaggatagagagcatagagatgatcggctgcaacactaccaccgtaggtggcttccacgcaggggaggtcctcccagattgttggaggctcccaaggcccggctgaaagcggtgcagcgtcgcattcttaccggcatcctcaatgctgcccccccacatagagccgcacatggtttcgtacgaggacgtggggtaggcacttttgccgctgctcatgttggagctgcgtgcgtcctcagactcgacgtggctgatttcttcgcatccgttcgcggagcacgagtcaggggggtatttttggcgatgggttacccaatagatgtcgccgagctgctggcatgcctgtgtactacccgcacgcctgatcgtgtgtgtcatcggggcctgcacgacttcggcacagtaggcgcagtgctggccacacgattgagggccaggcacctacctcaaggtgcccccacttcccctgccctggctaacctggtggcgttccacctagacgcccgccttactggattggctcggaggtttggggcacggtatagcagatacgccgacgacctactcttcagtggagtgggtgccttcgtgagaggcgcaaaccgcttagccgtgtatgtcgccgccgtgttattgcaggaagggtttgcagcggcccaccgcaagacacgcagaatgcctcagggagtggctcagcatgcggctggcctcgttctgaacgtccacggggctgttccacggcgagagagggagaggctcgaagctgtcctggttaattgtgtgcgccacggccctgcctcacaaaatagagtcgggcgggtggactttgaggctcatctcagaggccggatcgcccacgttgagcaccaccatgcaccacacgccgctaggctttggaggtggtttgaccggatcgtgtgggaatga

SEQ ID NO: 12534 - RNA, 1320 nt, synthetic construct
  source 1..1320: mol_type = other RNA
atgcccttatccgtcgagcagcacgcccgggatgtggctaggacgcttgtagctcgcccctttaccgcaccggctattgaggccgtcctggttgttgagtgtgggcgaccagatcctcggttggccaggctggctaaggctctggcgctacgctttggaggactgcgacggcccagagcacgcgaagtggcagattatctggtcagacgccgaagatacgccgagacagcggccgcatgtgagatgcagctgcaagacttgccaagaagatctatgctgcccttaccaggagccccagccacatggaaagtaccggctatcgtgacaaccaccgaactggccgccttcctgcgtgtcggtgctgaggaactcgcagcctggtgcaggaggtggcgaaggagtccgggcagacctgatcctagacacgagcactaccactgtcgttggctcccacggcatggtgccccaccacgtttgctagaagtgcccaagaccgcactgaagcgcgtgcagcgcaggatcctcaccggcattctgcaggctatacctccccatccggtcgcccatgggttcgtgagaggtcggggagttgcaacattcacagcgcagcacactgacagggactgcgtgttgcaactggacatcgaggatttctttggctcgatacaggaaaggcgtgtgagggccgtttttgtcgccgccgggtatccagtagatgtggcagcagcccttgcaagactctgcacaacccatacgcctccccgcgtcttagccgaactggtgagcaacgatagagcacggcggttggccacgcgcttagccatgacccatcttccccagggcgctcccacttctccagctctggccaaccttattgccttccggtgcgacctcagacttgccggtttggcgcgtaggtttggcggtgggtacactcggtatgctgacgaccttctgttctccggaggccccgagtttgccgctgatgctcgaaggtgtgcgactcacgcagcggccatcctggagactgaaggcttcgctgtggctcaccggaaaactagggttatgagacgtggagtagcacaacgagccggggggctcgtgctaaacagacatggagctgtgcctcgggctagcagagaaaggctggaggcaatcctcaccaattgtgttcggcacggccctgcgtcacagaatcgcgcaggggtggtggacttcgccgcacatctgcaaggcagggtcgctcacgtcgcccaccatcaccctcctcacggagtgcgcctcctacgactgctcgctcagattgactggtgccgctga

SEQ ID NO: 12535 - RNA, 1311 nt, synthetic construct
  source 1..1311: mol_type = other RNA
atgaatcggcctgacttggctgctgcccttgtcgcgaggagaatagtggctggcactattgaacccgccgcggtgacagaagcccttgtcgagactggtgggctgagattgaggcgcgcacggccacttgctcgccagattgttcgacagtttggtggagtgctgcggcctcgttggagggacgtcgcaaggctgctggctggcaaccgtatgttccggcgacaatgccgaggttcagctgcagccggagctgctgcacctcctaccatgcggccagctgctggagcaccccaacagtggcccgttcctcctctcacaacccctggcgagctagccgcatggttacgcctgagtcccgaggagctcctgttccttgctgccagatggagagagaggttaccgtcggagccccgcgtcaggcactatcactacgcctggcatccaagaagacacgggccccccaggctattggaagtcccgaaggccaggctcaagtgggttcagagaagaattctgagggggatcctcgatcacatcccgccacatgcagccgctcatggctttcgccgtgggtgtaatatccttagctacacttctacccatacagggcgggcatgcgtgttgcgcatggacgttcaggattttttcccctcccttcggagaggccggatcgtacgaattttcctgaccgccggctatccagaacctgtggccacactgctggccgatctgtgtaccaccgcgaccccagccgaagtgctcagaccactggccgctcccatatctgctcgggcagcacagctacgggtcgcactgagaagcagacacctgccccaaggagcccctacatccccagcgctcgccaacctgtgtgccttcggggttgatgcgcgcctggcaggattagccaggaggtttggcgctacctttactcggtacgctgacgatctcctgttctcaggcgatgccggattcgccaggtccgccagacggtgtgaggtacgcgtaggcgcgattctcttggaattaggcctgacggtggcccaccgtaaaactcgagtccttccacgcagtgtgtgccagagggctgcgggtctggtgctgaacgagcgacctgggttaccgcgtcgcgaacgggacaggcttaaagccatcctcacgaattgcgtgcgccacggtcccgcttctcagaacagagccaatctgccagactttgccgcacatctgcggggacgagtggcacacgcattggccacacatcctgctagcgcagcccgcctcctcgcattgtatgagaggatcgtgtggtga

SEQ ID NO: 12536 - RNA, 1320 nt, synthetic construct
  source 1..1320: mol_type = other RNA
atgagcttgctgtctagggacgtggactccctcgtcgatgcatttgtggctggagagtggaccgaacctagtatgctgcatcggtgtggagtgattgtcgacggcaaacctaagtggttgcctttcctgattcaacgagtattgaaacggttccccggtgtgcgcccaacaaggcgagccttaaccgatttcctctacgaggacagacgcttggccgccgcatcagagcggataacaacattaaccaatcacattaggatgaacagtgaattcgactgtcaacttacctcccttaaatcttctgtgcgacctacctggactactgttcggcagctggccgattggtttgatcttccggtcgaacacctgctgtggttcgcggacagctcccaaattggccgtcaacatccacacggccccctctgccattatcactatagatgggtagaaaagcgacgttcagggagacggctgatcgagtcacctaaaccaggcttaagacagatgcagcgcagactgctgaacgagtgtctccggcatctgcccgtgcatgatgcagctcacgggttctgcaagggaaggtcagtagacactttcgtgcagtcacatacgggtaggcaggttgttctcagaatggacctccagaattactttccctccctgaggccctttcgtcttatgcggttgcttatgctcgccggatatcccgaggtggttgcccgcactttaagtaacctgtgcaccaataccacaccaagctccgtcctgagagattactcgagcatctctctcagcaatagcgacagacatttgacagtgctgcttaggcagccacactttccacaaggcgcaccgacaagccctctgatcgcaaatctgctctcctataggctggatgctcgactgcagggtttagcccagagcgctgggattcactactcgaggtacgcagatgatcttctcttttccggcgacgagaggtttcgccgctgcgtcaaacagttccggatccatgtggccgcgatcgtgattgctgaaggcctcaacgttaaccaccggaagtctcgcatcatgctgcagagtcggcagcagcgtgctacgggtctagtcctgaatcagcacccggcggtgtcccgaagagactttgatctattgaaggccatactgcacaattgtattcgcttcggacctcagactcagaaccatagtgggatcgacaacttcaggatgcacctactggggcgcatccagcacatggccagataccatccctctagagctcagaagctaatgcactctttcgagcaaataaccttttga

SEQ ID NO: 12537 - RNA, 1305 nt, synthetic construct
  source 1..1305: mol_type = other RNA
atgaaggtgtctcacttggctgatgccatgcttgctggagtctgggtgcagcaggagattacggagagagtcctgcaggtagttaagactccgcggcgctgggttccctctttggtacggagaacaatcttagccttccccgaccatcgtccattgaggagcgtgctctgccagttcctgatgactgatgatagtcttcggtcaagggcatgcgacgacgaatttgaggtactggcatattcaggcaacgatgagtttgataaccatcgatttgatgactcggctcgcagaccagtgcgctggcagacatttggacaactggcagaatttctggacctggagatctcggagctctcttggcttgcagacctgcgaggtttacaacgaaccgcccctgacgggcctctgaaccattaccaccgaagatggcagctccgacgcagggctgtccctaggttaatcgaatcaccaaagccccgtctgaaaagcgttcagcgccggattctacagtgttgcctgagtaggctcccactgcacagcgccgctcacggatttcggaagggtcgctccgtgagtacgttcctccaacaccacgccggccagtcctgtgtggttcgactcgatctccatgacttctttgggtttcttagcccaatacggctgttgcgtctcctaatgatgtttggctattccgagagcgtcgccaggaccatcaccgcgatctgctctaccacaactccagaacataccatcgagcggatgccccagaatttcgtggataggagacaggctactaccctgcagcgtctgcggtcacgtcatttcccccaaggcgctcctacatcccctgccattgcgaatctgattgcatggaaactggaccaaagactgactggactcgcgaccaccttcggggccacgtactccagatacgcagatgacctgctgttttccggggacgaagatttcaggagacgggcgcagtggttcacaacatgtgtcgcagccgtggctatggacgagggttttgaagtccagcaccggaaaacccgcataatgacaaggagtgtgcggcaacaggcttgtggccttgtcctgaaccacagaccgactgtgagcaggagagaatacgacgtgttgaaggcaactttacacaacgccgtgaggttcggacccgagtctcagaatagaagccgccactctggcttccggcagcatctattggggaggattaattatgttcgccagtggaatcctgccagggccgtgagactcatggcccttttcgattccatccgctggtga

SEQ ID NO: 12538 - RNA, 1296 nt, synthetic construct
  source 1..1296: mol_type = other RNA
atgccatccaggatccaccacgcccgtcggttagctactgctctggccgcaggcagtatggcgaaccatgacgaactgattcatcgcgccgctcccctgatgggcgatattcggaaggcccggtggctgaaagcgcttgccagaaatctgtcacttgagttcgcagaggcgccaagaccgacgattaggaaaattacagaccgcatcctccacgatcctggattcacccgggcctggatcttagggaaggcccggatcggtattggtttcactcagcctgaaatggctcctgcaccaggaattgccgtggcatggggcgtgcccgcaatcacaacgctcgctgagctggcagatttgttacgtctccatcctgacgacctgggatggcttaccgccagaaattcatctgagcactataggtacaggtggcaaattaagccaaagtctggaagatacaggctgatcgaaagtccaaaggagttgctgaagggtgctcagcgcagggtactacggaaaatactgaacttaatcccgccccatgaagctgctcacggctttcgccctggcggatcaatccgaaactttgtcgaaccacactccggcaagcctatgctgctcaggtttgatctcgaagattttttccctagcataacctcgacacgaatctttcatattttcctgaccgctgggtatcccgagaacgtggctcaggcactgaccgcaatatgcactcatagcactccctcacagactatcggggagaaaccactcaatagccacgagagatctcgactaacaacccggcatctgccccagggcgcacctacatcccctgctctggccaacctgagcgcgtaccgcttggattgtcgattgcttggtctggcacagagtatcggggccacctacacaagatatgcggatgaccttcttttcagcggggaccagaagttcgctcgcaaatctaaaggactccaggccatgattgggggcataatcttggaggagcgattttccataaatcacagaaagacccgcgttctgaggcaggcccaaaagcagcacgccgcagggttgatccttaatcagaaaccgaacatcgaccgtagagagatcgatcaattgaaagccattctcactaactgcattaggtttggaccagagtcccaaaacagaaataatcatcccgactttgccgcccacctggctggcaaactcagctggatccgcttcattcagccccaaaaggccctcaagctggaaagtctattcgaacggatagactggcccgcctga

SEQ ID NO: 12539 - RNA, 1293 nt, synthetic construct
  source 1..1293: mol_type = other RNA
atgccttcacaagcccagcacgttcggcgactagccgcagcactcgctgctggacccatggatgaccgggaggctatgctggcacgtgtgaagcctctggtgggtgacctgcggaaggctagatggctggagccactggtgcggaacttaagtctggaattcggagaggcccccaggcccgctatccatcacgttgccgggaggattctagggcatccgccttttgtcaaggcctggatagccggacaaggacgcatcctgcctctccccgtcacgccacagatggctccggctatgggtgcccctagggattggcagatccccgccattactaacctcactgagctcgcagacgaattgcgccttcacggagatgacctggggtggttgatagcgcacgggcaggctgaccactacagacaccggtggcaggcaaaaccaaagagcggccgcttcagactcatcgagagccctaaaactctcctgaagtttgctcaacggcaggtgctcaggaggattcttgacgctattccaccccatgaagccgcccgaggcttcagacccggcaactcaatccgagatttcgttgaaccccacaccggaagagagctgctgctgcgctttgatctcgaggactttttcccttctttatgtgccgcgcgagtgctgcgtattttcctcaccgcagggtatccagaaaccgtagctcgtgccctgacccgccttacaacaagagcaaccccacattccaccctggaggagaaaacccttgcctgggccgagaggaggaggcttgcaacaccccatttgccgcagggagcaccaacgtccccagctctggccaatttaggcgcctttcggttggattgccgccttgcgggtttagctgaagcggcaggcgctcgctatacacgttacgccgacgacctgctatttagtggaggtgccgatttcgcacgccagtctagacggttcgagacagcagtgggcgccatcatattggaggaaggctttcgccccaatcatcacaagactagagtactgagacagggccaaaagcaacacgccgccggcctggtgctcaatgacaaaccaaacatcgaccggcgagactttgatagactgaaagccgtcttgactaattgcgtgcggcatggccctgcgagccagaacagggaccatcacgcggactttgccgctcacttgcaggggaaactggcatgggtcaggttcattcaccctggtaaagaagaaaagcttcaggggattttcgataagatcgattgggattga

SEQ ID NO: 12540 - RNA, 1356 nt, synthetic construct
  source 1..1356: mol_type = other RNA
atgacgcctaccgaggagcgctggatcgcatccctggccaaaatggctctcgctggagaatgggaagccgccgccttgcttgagcgaggacaagtatggctcgggtctaggcctaggtggtggctccggcttgtgcaccgcctattacgtcagttcggaccgggtacccgtcccaggctgtctagagtggaaagcttcctcaggcgggacccctggctacgtaaggttctgctcaagggagatttaaagggggatgcaaatcccccagaacctgttcagtgcgcggcaagagggcgccctgctacatggaagctgccttccttcactcgccccgtggagctggccagctggttacgtgtctccgtgggcgagttggagtggcttgctgatgcacagggttggcggtctggggaagcctgcgaaagactcgggcactatcactatcgctggctcagaaaacgggacggctcagcaagactgatagagtcccccaagcagcacctgaaactcattcagcgaggtctgcttgacgccgtcgtgagcgcaatacctgcgcacgaatcggcccatggattccagcctggaaggagtacactgacccacgtcgggccacatatcggtcgggaggtggtgctaaagtacgacttgcgggatttttttacacgagtaacgcgcccacgcgttcaggccgtctttcgaacagctggctacccagaggccgtggctgctttgttggcagccctgtgtacccacagaacccccgcgaggatctggaggcagttcccaggcttcgagactgatcctctgatccgagctcgggcccgtaattggcagtgtcctcatctgcctcagggcgctccgacctctccagctttagccaatcttgttgcgtacagactggactgcaggctagcagggcttgccaaagcagccggcgcgtcatacactcgctatgcagatgacctgttgtttagtggcggtagcgaacttgctagaggcgccgagcgctttgggatcatggttggcgccattgcactggaggagggcttcgaactgaacactagaaagacccgggtgctgagaaggggcgtagcacagagggctgtcggactggtgctgaatgataggatcaacgtgcccagggccgagtacgaccggctgaaagccattctccatcactgtgtccggcaagggccggcaggtcagaacagagaaggagtgcccgactttgctgcgcatctggccggacgagtggcttatgtcactcaaacaaacccacagagaggcgcccggctccaacagtggttggatcaaattgactggagtcgctcatccgaaagcgccgccgctacatga

SEQ ID NO: 12541 - RNA, 1338 nt, synthetic construct
  source 1..1338: mol_type = other RNA
atgcagactgcccgcgacgccgcgagaaccattgctcagctcctactctcaggcccgtttgatgagcctgcagtctgggaacgattgcgtcccttggctgggaggcgtcgctggttgagattttgtattcggcggatgctgacagcctggaaaggcactggacatccctcttcagcgtggatcatcgacttccttctaagtgatgcccgctttcaggctagttggccaacactccggacccctgaacccaggatgtcacccgctgcaggtgcaccattgcagtggccagttccatcgctcggcacacccgatgaggtagcgacctggctggcggtgagccacagagagctggaagctcgcgcagatacctggggcagggaagcaaggactcctgctgggccaatgcgcaacttcgattactcctggagagggaagcggtccggtgcagccagactcatcgaggcccctagaccccgtctcaggagcctgcagaggaaagtcctgcacggggtgctggatgcaattcccccacatgacgctgctcacggtttccggagggggaggtccgtggctaccttcacagccccgcatgtgggtaaacagattgtggtgcgcatggacctgcgcgactttttcgccagcattcacagagcgcagatccaagcgatttttgctacagccggctaccctccagccgtcgctaagctactggcggcactttgctggaacgctgcccctgacgatatttggttggatttccctggaacgttacccgacgaccttgggcggttaccggcagctagactgtatcgcaggcctcacttaccccagggagctccgacttctcccgccgtagccaacctgtgcgcctaccgtcttgattgcaggcttgccggtcttgccagatccgccggagctgcttataccaggtatgcagacgacctgctgttctcaggagacgcagattttgcccggacggctcggcgatttaccctgcatgtcgccgccatagcacgcgaagaggggttcgcagcccaccctaggaagaccaggctcatgcgacagggcgttcgacaattcgccgccggcgttgttctgaatgaacggcctaatgtgccacgacgggactacgagcggctcaaggccatcctgcaccgagcagccagaatcgggccaagtcccagcgccggagagacattgatgacttatcgtgcacgcctggctggaaaaatagcctgggtggcttctatctctccccggagaggcgagaagctgcaagcagtgtttgaacaaatcgattggggcagaccaaatgtcggccatagcctctgtgagtga

SEQ ID NO: 12542 - RNA, 1290 nt, synthetic construct
  source 1..1290: mol_type = other RNA
atgctgaaagcccgacacattgaatcactgacccggggagtggcagcagcgttactcgcaggaccgtgggaatgggaggccatgttggatagatctgctgacgctcttggcagacggtggcggtggaggagaggcctaataagggacatgctgttgcagcatccttcgcctgtagcctacgaagcactggtgcaggccatcgctgcgaacccccatttccgcggggctatcaacgatcggacgcgaccacatatcgtgcactggtttccatggccaacaggtatggcccccagatatccagcctggcatctccccgtcatcagttcagtcggtgctctagccgctctactcgacctgcctgaggagaagctgcactggctcgcagactgtgaacatcggcagggccggcccgacgaactgttacgtcgccattacagacactattggctgagaaaaccgtcaggcggatggcgcctggtggaggaaccacactaccttctcaaacaggcccagaggggcattttgcacggcgtcctggatcgtgtacccccccatcccgctgcctgtgcattcgtccataccagaagtgtcgtggactatgccgccccacatgttgggagggagttggttttgcacctcgacctgaaggagttcttcccttccattcctgcatctcgagtacacgccatgctgactaccctggggtaccccaccgaagtggctagactggtgacagggctgtgcacatccaccgttcccggctatatttgccgtcagaggccagggggtaaaatatacagcgctcctcacctccctcaaggcgcacctacaagtccagctttggccaatctcgccgcatatcggcttgacgggcgattagcgggtgccgcagcatccgttggagcatgctatactcgctacgctgatgatctcgctttttctggcgacgagccttttgcccgtagcgtgaatcgctttcaagccatggtctggaggatcgtagctgaggaggggtttgatatccatcatagaaagactagactgatgcacaagtccgtgcggcagcgcttatgcggactggtggtgaacgatcaccttagcatcgatcgcagggtgtacgatcggctcaaggcgattctgacgaattgtcttaggcacggtctggaatctcaaaaccgcgacggccacagcgatttccgagcgcacttgtgtggacgggtcgccttcgtggagcaggttaatccggccaggggagctaggcttcgcgaccttctgaagcaggtggcctga

SEQ ID NO: 12543 - RNA, 1440 nt, synthetic construct
  source 1..1440: mol_type = other RNA
atgaggcgcaaaagtgccggctgcgccctgaggaatgattgttcacgctccacctgtcacgtggattcaagtagccgtccgttcctggctatgcatgcctctcggttcgacacagcgagaatgatagctgaagctatgcttgccggacccccggaacggggtggaatgttagagagaatcaagaccgttttaggagcggccccatcctggagccatgaacttgtcgaccacgccattgcccactttgggactcactgggctgacgtggataccgacctgctcgcaagcgccctggccgataccagtgcttttatgatcgcctggtatgggcgcgataggcccgttgtgatgaggattgtcaggcgaccccccgtacagagactgctgccagcccgtcttgcaggagccgatgtgccacagtggcctacctgtggcgatcttgcacggtggctaggggttagcgcacccgagctggactggctgagcgagagatggagagtcgatgctcgtggtagcgggtcccctctgcatcactacacatatacaggctacgataagcgccggggcggatgtaggctcatcgaaattcctaagggtcggctccgggaggcccaaagacgcattcttcacggcttgctagatagaatccctccacatgatgcagcccatgggttccgcaaaggacggggcatcgtctccttcgctgctcctcacgccgacagggatgtggtcgtgcggttcgacttggccgacttcttcgtgtcggtgagagctgcaagggttcatgcgctgtttgtaacgctgggctacccagcagaggtggctaggacgctgacagcgctgtgcacaaaccgggttccatctgcacgcctgttggaggctgacctcagggatcggttcgactggaccggcagacagaggtatcgcaacaggcacctgcctcagggggcacctacttctccagctcttgccaacttgtgcgcctttagactcgacatgcgtttagcagcactcgctcgctctttggacgccacctatactcggtacgcggacgacctggccttttcaggaggcggtgccttggctcgagaagcaggtcgactgcaggtcagagtggccgccatcgctctcgaggaggggtttgcactgcagctccgtaaaactcgcgtgatgcgaagaggagtaagacaacagctagctggcgtcgtggtgaaccggcaccccaatctcgcgcgcgacgaattcgacgtgctgaaggcaattttgactaattgcatacgccacggacccgcgtcccaaaacagggcagctcatcccgactttcgagcatacctcgccggcagggtagctcatgctcgagcactgaatgccgctcgaggggccaagcttcacgccttatttgcccggatagcctgggatgggtgctcattcggcgcgtga

SEQ ID NO: 12544 - RNA, 1263 nt, synthetic construct
  source 1..1263: mol_type = other RNA
atgcacgctagtagatttgacactgctagaatgatcgctgaggcaatgttggctggaccgcccgagaggggaggtatgttagagcggatcacaactgtccttggggctgcacccagctggtcccacgagcttgccgagcatgccatagcccatttcgggactcactgggccgatgtcgacaccgacctgcttgccagtgccctcgccgatacttctgccttcatgatcgcctggtatggccgtgatagacccgttgtgatgagaattgtcagacgtccacctgtgcagcgaccacttccggcacgattggcaggggccgacgttcctcagtggcctacatgtggtgacctcgcacgatggttgggcgtgtcagcgcccgagctagactggctgtcggaaagatggcgggtagacgccagaggaagcgactctccactgcaccattacacatacaccgggtacgacaaacgccggggaggctgtcgcctgatcgaaaatcccaagggacgccttagagaggctcaacgtcgcatactgcatgggctgctggatcggattcctcctcacgatgcagcccacggcttccgcaaaggtcgtggcattgtgtctttcgccgctccacatgccgacagggacgtagtggtccggttcgacctggctgatttcttcgtgtccgtccgcgcagctagggttcacgcactgttcgtgactctcggttatccagccgaagttgcccggacactgaccgcgctgtgcacgaatcgagtgccctccgcccggcttctcgaagctgatctacgcgataggtttgattggaccggacggcagcggtatagaaaccggcatctgcctcaaggcgcacctacctccccagccttggcgaacctgtgtgcgtttcgcttggatatgaggctcgcaggcctcgcgcgctcattagatgcaacatacacgagatacgccgacgatctagcctttagcggcggcggggcattagctagggaagctggcaggcagcagctcgctggtgtagtggtgaacaggcatccaaacctggcccgagacgagttcgacgtcctcaaggccattctcaccaactgcatcagacacggacccgcaagtcagaatcgggctgcacaccccgactttcgcgcctatctggctgggagggtggcacatgcgagggctctgaataccgctaggggggccaagttgcacgcgctgtttgctcgaatcgcctgggatggatgcagctttggcgcctga

SEQ ID NO: 12545 - RNA, 1350 nt, synthetic construct
  source 1..1350: mol_type = other RNA
atgcatgctagcctcttcgatactgttcggaccatcgccgaggctatgttggcgggtgcaccagaaagaggtggagtcgtggaccggatcgcggcagttcttggagctgcacccccgtgggcacacgatgtatctgatgacgcactagcccgctttggggcgcaatgggcagacgtggacacagaccgccttgcaggcatgttagcagacgcccctgccttcctcaacgcttggtacggccctcaccggccagtcgtgatccgagtggtcaggcggccccctgtacagaggccacttcctccccgcttagccggttgcgacgttcccctgtggcccacatgtggcgacttggccgagtggctgggagtgtccactgccgaacttgattggttaagcgatcgttggagagtggacgcccgaagcgctgacacacctcttcaccattacacctacaccgggtatgataagcgtagtggaggctgcaggctgattgaaatgccgaaaggacggctccgggaggctcagaggcgtatcctgcacggcctgctggacagagtgccaccccatgacgccgcccatggtttcaggaaagcccgggggatagtttcctttgcggcgccacatgccgaccgcgatgtagtcgttcgattcgatctcgccgactttttcgtgtctgtgcgggcggcccgtgttcatgctttgtttgatacgttgggctaccctgtggacgtcgctcgcacactgactgcactgtgtacgaaccgggtgccgtctgcaaggctgctagctcccgatctccgggataggttcgactgggccgccaggcagcgctatagatatcggcacctgcctcaaggcgctcctacctcaccagccctggcaaatctctgtgcgtttcgctttgatatgagactcgctgccctcgctaggtcgttaggggctacatatactaggtacgccgatgatctcgctttctcaggaggcgacgtactggctcgtgacgccgagcgactggagagaagagtggcggctatagcactggacgaagggttcgcccttcagctgcgaaaaaccagagtgatgcgacggggaactcgccagcagctagctggggtcgtggtgaatcgccacccaaatttggctagagatgctttcgatctactcaaggccattctgaccaactgcatcaggcacggcccagccagtcaaaacagagccgcacacaccgactttcgcgcccacttggccggcagagtcgctcatgccgcagcactgaatcccgcaagaggggccaagctgcaggcactgtttgataggattacctgggacacatgctcccccggtgcctga

SEQ ID NO: 12546 - RNA, 1350 nt, synthetic construct
  source 1..1350: mol_type = other RNA
atgcactctagcctgagggacacaacacgcacgatagccgaggctatgctggccggcagtcctgagcgagacggagtggtggcacggatggctgcagttttgggcggagcacccgtgtgggctgacgaagtggccgatgcctccctcgctaggtttggagcccattgggccgacactgccatcgatgcccttgccgccgtcgtagctgaagcacccggatttgttcgggcttggtatggcgaccctcgtccggctgtgatcagggtagtcagacgccccccggtccaaagaccattacctgcccccttggccggttgtgaggtgccaccttgggcaaccccaggggatctcgcagattggctgggcgttagcgtgcccgcccttgattggttgtcggatcattggagggtcgatgctagatcaggggccaccccactccaccactatacctatgtggcagtcgataaacgaagcggaggctgtcgccttgtggaaattcctaaagggcgactgcgcgaagcccagaggcgtatcctccacgggctgctcgatagaatcgcaccccacggtgcggtccacggtttcagaaaaggccacggcattgtttctttcgcagctccccatgctgggcgcgatgtggtcgtgcgttttgacctggccgactttttcgtatctgtgcgggcggcacgcgtccatgctttgttcgctactctggggtacccggtggaggtagctcggactctgactgggttgtgcacaaacagggtgccctccgctagactgcttgccccagatctgcgggacagattcgactggattggccgacagaggtaccgcgaaagacaccttccccagggtgcccctacgtcaccagctctggcgaatctgtccgcctttagattcgatatgcgcttagcggcactggcccgaagtctggatgccacctacacccgttacgcagacgacctagccttctccggagggggagctctcgcacgtgacattgagcggctacagatccgggtggctgccatagccctagaggagggatttgccctccagctgcggaagacccgggttatgcggcgaggagccagacagcaattggccggcgtcgtggtgaacaggcacccaaatctcgctagggatgagtttgaccgcctgaaggctattctgacaaactgcatcagacacggccctgccagccagaatagggacgcgcatcctgacttccgggcacatcttgcaggtcgcgttgcccatgcggctgcgttaaacgctgccaggggcgcaaagctgagagcactcttcgaccggatcgcatgggacgcccatgatgcgggcaggtga

SEQ ID NO: 12547 - RNA, 1350 nt, synthetic construct
  source 1..1350: mol_type = other RNA
atgcacagctctctgagggacacaactaggaccatcgccgaggcaatgttggcgggacctcccgagcgtgatggtgtggtcgcccgaatggcagctgtcctcggagaggctcagccgtggactcccgagtgtgctggcactgccctggcaaggtttggcgcaaactgggccgacacggacacagacgctcttgcggctctgctggctgaagcaccagcctttgtgagagcttggagcggtgaaaggcggccagtggtgatccgcattgtccgccgccccttagttcagaggcccctaccagcacctcttgctgggtgcgatgtacctcagtggcccacccccggtgatctagcaggttggcttggagtgagcgctcctgagctcgactggttgagcgatcattggcgggtggacgcacgtagtggggctacacctctgcatcactatacatacgtggctgtagacaagcgcagtgggggctgccgactcgtcgagatccctaaagggcgtctgagggaggcgcagcgcagaatcctgcatgggctcctggaccgaatagctcctcacggggcggtacacggcttcaggaagggacatggcattgtgtcctttgccaccccacatgccgaccgcgatgtggtggtgcggttcgacctggctgacttcttcgtgtcggttagagcagcccgcgttcacgccctgttcgctaccctagggtacccggcagaagtcgctcggattctcactggattatgtaccaaccgggtgccgtcagctcggttattggccccagatctccgagatagatttgattggataggccgacagcgctatagggaaagacacctaccccaaggcgccccaacatccccagcccttgcaaacctgtgcgctttccgcctcgaccttagactggccgctctggccagatccgtcgatgcgacgtacacccggtatgccgatgacctcgcgttttcaggaggcggcgccttagcccgagatgttgcccgtttgcaggtgcgggtggcggcaattgcccttgaagagggcttcgccctgcagctcagaaaaactagggttatgagacggggcaccaggcaacaactggccggagtcgtggtcaataggcaccccaatctctctcgggatgcctttgaccgcctgaaggccatcctgaccaattgtatcagacgtggacccgcatctcagaaccgcgacgcccaccctgattttagagctcacttggccggcagagtcgcccatgccacagcgttgaatgccgcacggggggttaaactgagggcactgttcgatcgaattgtatgggacgcaggaggggccggtcggtga

SEQ ID NO: 12548 - RNA, 1350 nt, synthetic construct
  source 1..1350: mol_type = other RNA
atgagggcatcactcagcgacacagtcaggacaatcgccgaggccatgttagccgggttacctgaacggggcggagttgccagtagaatagccgctgtcctgggagacgcacctccatgggcgcatgagttagccgatgcagcgattgcacgttttggtcctaactgggcagacgccgacattgacgcactggccaggttcgtagccgacgcacctgggtttgttcgggcatggcacggagacagaagaccgggagtgatgagagttgtcagacgcgcgccagtacagcggccacttccagcaccactcgccgctagcgatgtgccccagtggcctacgtgcggagacttagcagcctggctgggcgttagcgcctcagagctcgagtggctctccgataggtggagagttgacgctcgctcatctgggtcgcctctccatcactacacatacgtggcctacgataaaaggcgtggcgggtgtcgcctgatcgaaatccccaaggggcgattgcgggaggctcaacgacgagtgcttcacggactcctggatagagtgcccccgcacgatgctgtacacggcttccgcaagggacggggtatcgtaagctttgccgcaccccatgcggacagggatgtggtggtgcggttcgatcttgccgacttcttcgtctctgtgcacgcggctcgtgtccatgctctgtttgacacgctgggctaccccgctgaagtggccaggaccttgactgctctgtgtactaaccgtgttccctctgcccgcctactggctcccgacttgcgagaaaggttggattgggccacccgccagcgctataggaatcggcatctcccccaaggggccccaacttcccctgctctggcaaatctttgcgcttttcggttcgatatgagattggccgcgcttgcccgcaccctagatgctacatatacccgttatgctgacgatcttgcattctccggcggcgctgcattggcaaggaatgcggagagactggaggtgaaagtggctgcaattgccctcgatgaaggttttgcactgcagctgcggaagaccagagtcatgagacgaggggtccgccaacaactagccggcgtggtggtgaacagacacccaaacgttgcccgcgacgagtttgaccggctgaaggccattctgacaaattgcatccggcacggtcctgctagtcagaacagggacgcccatccggattttcgggctcacctcgcaggaagggtcgcccatgccactgctctgaatgccgctagaggcgcgaaactgcacgccctgttcgggcgaatagcttgggacgccggtggcttcgatacctga

SEQ ID NO: 12549 - RNA, 1350 nt, synthetic construct
  source 1..1350: mol_type = other RNA
atgtatgcacctcttagcgacaccgtccacaccatcgccgaggcaatgcttgcggggtcacctgagccagatggtgtggcagcccgcatcgcagccgtcacaggtgatgccccgccatgggctagaccactggctgatgccgctacagtgaggttcggccctcgatgggcagacttggacattgatacgttggccagatttgtggtggattcacccggcttcgttagagcctggtacggggccgataggccagctgtgattaggatagtgagacgtcctcccgtccaaagacctctcccattgcccctggcagggtgcgatgtaccacactggcccacctgtggagatctcgctggatggctgggtctggacgccgcagaactggattggctcgccgacagatggagagtggatgccagggggagtgaaacaccactccaccactacacttacatggcgtgtgacaagcgcagaggcgggtcgaggctgattgagatcccaaaaggccggctgcgtgaagcccagcgaaggatcctgcacggactgttggaccgagtccctccccatgagtctgcgcatgggtttcgtaagggacgcgggatcgtctccttcgctgcacctcatgctgaccgcgatgtggtgattcggtttgacttggcagattttttcgtttccgttcgcgctgctcgagtgcacgcactttttgacacgcttggttatcccgcagaggtagcccgcatgctcacagccttgtgcaccaacagagtgcccagcgctcggttactggctcccgacttacgcgaccgcttcgattggacagggaggcagcggtataggaaccggcacctaccgcagggcgctcctacatcccctgcccttgctaatctgtgcgcgttccggttcgacatgaggctagctgctctcgcgaggagtctcgacgccacctatactcgctacgcagatgacctggccttttctggcggagccactctcgcaagggccatcgaccggctgcaagtgcgggtagcggctatcgcctttgatgagggctttgcgctgcagttgaggaaaaccagagtcatgcgccgaggcgcacggcaacaattagcgggcgttgttgtcaatcggcaccccaacctcgcccgtgacgagttcgaccttcttaaggctatactgactaattgtgtgcggcatggcccggccagccagaacagagatgcacacgccgacttccgtgcccatctggcaggacgagtagcccatgctgctgctctgaatgccgcaagaggtgccaaactgcgggccctattcgaacgcattgcctggggagatgctgaagccggaacctga

SEQ ID NO: 12550 - RNA, 1356 nt, synthetic construct
  source 1..1356: mol_type = other RNA
atgtacagcagcctgtatgacatcacccgtacccttgccgaggcaatgctcgccggacctccagaaacagatggtgtggctgccagaatggccgctgtcttaggggacgcacccccatgggtgcatgctgtcgcacgggacgccatcgagcggttcggtaatctcggaaagcagtgggctgcaatcgagcccaatgatctgtcactgcttgtggctagcgcccctggcttcgttgctgcctggcattctgatgcgaggccgaccatcgtcaggattgtactgaggcctccgcaacaacagcccccaccacctgcccttgatgcacccgacctgcctcgcctgcccactttaggagatttggccgattggctgggactgagcgttcctgaattggactggttggctgatcgttggcgcgtggccccgagatcagagacacccttacaccattacacgtatcgggcctttgacaagagaggagggtcctgtcgcctggtggagattcccaaaggccatctgcgggaggcccaacgcagaatcctgcacgggttactggacagagtgcccccacaccatgctgcacacgggtttcgaaaaggcagaggtatagtatcctttgccgcacctcacgcagaccgcgatgtggtgattcgctttgaccttgctgatttcttcgtcagtattcgggcagccagaatccacgctctctttcggacgctggggtaccctctggaggttgctagggcactgaccgcgctgtgcacaaacagggtgccttccgccaggctgttggctccagatctgcgagacaggctcgactggtcgggacgccagaggtatcggaacaggcatctccctcagggggccccaacatctccggctctggcaaacctctgtgccttccgattggacacccggctcgctgccctagctcactctttggatgccacatacactcgctatgcggatgaccttgcctttagtggtggcgccgtacttgccagagccgctgagaggcttccagcacgtgtcggcgcaatcgccctagaagaaggctttgcactccagtggagaaagaccagagtcatgcgcagaggcgttcggcagcgactagctggtgtggtggtgaatcggcaccccaacctcgcacgagacgaattcgatactctgaaggcgatgttgactaattgcgtaagacacggccccgcctcacagaatcgggtggctcacccagacttcaggggatacctcgctggacgcgtcgcccatgcgactatgctgaacgacgcgcgaggggccaaactacaggcgattttcgatcgtatagtttgggacgccggcgatggcgacgcatga

SEQ ID NO: 12551 - RNA, 1338 nt, synthetic construct
  source 1..1338: mol_type = other RNA
atgaacgcgagcctgtatgatctcactcacacactggccgaggctatgttggctggaccacctgagcccgacggcgttactgcacggatagcgtccgtgctcggagacagtcccccttgggctcgcgaggttgccgtgaatgccatcaattctttcgggcccagatgggcagacgctacaccacgggatttgtcttttgtgatagcggacacgtccggattcgtgaacgcatggcagtcagacaaccctccgaccatcgcaaggattgtgctgcgaccccccgaacaaagaccacctccccaagccctagccgccctagatcttcctcagtggtccaccaccagggatctggctgattggcttgggctggccatcccggagttcgaatggctggctgaccggtggcgagttgaaccccggtcatcggggacgcctttgcaccactatacttacaggacatttgacaaaagggacggcggatgccggctgatagagatcccaaagggacatctccgagaagcccagaggcgcatcctgagagggctgctggaccgcattccgcctcacgaggctgcccatgggtttcgaaaaggcagaggcattgtctcatttgccgaaccacatgtggactgcgatgtggtcatccggtttgacctcgcggacttcttcgtgagcatcgatgcaaagaaggtgcatgcattatttgccaccctgggctatcctctagaggtcgtgcgcgccctgacagccctctgtaccaaccgcgtcccaagcgccaggctgttagcagctgacctgcgggacaggttagattgggccggaaggcagcgttacagggagaggcacctcccccagggtgcttctactagccccgctctggctaatctctgcgcttttagacttgacaccagactggcggcccttgcccattctttagatgccacgtacaccagatacgcagatgatctcgcattctccggaggtccagttcttgcgcgtgtggccgaacggctacctgtacgcgtagcaagtattgccattgaagagggcttcacacttcagctcaggaagactcgtgttatgccacgcggtgttcgacaaagaatcgtcggggtcgtcgtgaatcgtcaccccaatctggctcgcgatcagttcgacgctttgaaggctactttgaccaattgtgtgcggcatggcccactgagccagaacagagacgcacacgctgattttcgcggctatttggccggtcgggtagcccacgccacaatgctcaacgccgcaagagggagtaaactgcaggcaattttcgatcgaattgtgtgggagggcgtatga

SEQ ID NO: 12552 - RNA, 1395 nt, synthetic construct
  source 1..1395: mol_type = other RNA
atgcactccagtctgtacgacactacaagaaccattgccgatgctatgcttgccggccctgctgaacccgatggtgtagccgcccggatagctgctgtcctcggagacagcccaccttgggtgagggacgttgccctggatgcgatcgcccgatttggcgagcggtgggcagacgtcgaaccagacgaacttagccggctggtggtgggagcacccggatttgtagaggcatggcggagaggaggccgaccaaccatcgtccggatcctccggcagccagcagtccaaaggcctctgccaccgcccttagcagccctagatctgccacccctgcctccattacctcagctccccacttctggggatctggcggattggctggatttgacagtgccggagctcgagtggcttgcggatagatggcgtgtagccgctagaggtagtgaaacaccgctgcatcactacacttatagagcatttgacaaacgagacggcgggtgcaggctgatagagattccaaagggaaggctgcgtgatgcccagtcaagagtgttgcatgggctccttgatcgagtgcccccccatgacgctgctcacggattcagacggggcagggggattgtcagctttgctgccccccacgcggatcgcgatgttgtgatcaggtttgatctcgccgacttcttcgtctccgtgcgagcagcccgtatccacgcccttttcggcacactgggctaccccgcagaggtagcccgaactctgaccgctctgtgtaccaaccgggtgccatcagcacgccttctggctcccgacctgagggatcgatttgactggtccgggcggcagcgttatagaaaccggcatctgccgcaaggcgctcctacaagccctgcactcgcaaacctttgcgccttcagactagacacgaggttagccgcactcgctcgctctctcgacgctacctatacgcgctacgcagacgacctggcttttagtggcggggctggcttggctagggccattgagcggttgcaagtccgtgtggccgccatcgctctcgaggaaggtttcgccttacacatgaggaagacccgcgttatgcgcagatcagttcgccaacgcctggccggagtggtggttaaccgccaccctaatttggcaagggatgccttcgacaccttgaaagccatgttgactaattcggtgaggcatgggccagcgtcccagaatcgcgacgcacaccctgacttcagaggatatctggccgggagggttgcgcatgcgactatgctaaacgccacaagaggtatcaagctgcgggccatattcgaccgcattgcctgggatgctggcgatgtggacaccattcccgacggaaatggttctcagccttga

SEQ ID NO: 12553 - RNA, 1350 nt, synthetic construct
  source 1..1350: mol_type = other RNA
atgaggtcctctgtctacgataccgctcggacaattgccgatgccatgctggctgggccacccgatcctggtggtgttgccgcaaggatggctgccgtactaggtgatgcccccccatggctccatgatgtggagcgcgacgcagtggccagattcggtgcacggtgggctgcagtggaagcagacgacttgacccgactggtcgccgaggctccaggttttgtagcggcatggcgttccgattctcccccggctattgtgcgtatccttcctcggccagccgtgcaaagaccccttccagcagcccttggagccctcgatctgccccagtggcctacacctggggaactcgcaggctggctgggaattgctgtccctgacctcgactggttagcggaccggtggagagttgccgctaggggaagcgagacaccactgcaccactacacctaccacgccttcgacaagcgagacggagggtgcagactgatcgagatccccaaaggccgcctgagggaagctcagcgcagcatactgcatggcctcctcgatagagtgccgcctcacgatgcagcgcacggctttagaaaagggcggggaatcgtttcattcgccgcccctcatgcggatagagctgtggtgatccgcttcgatctcgccgacttcttcgcaagcgtgagtgcggcaaaggtgcatgcactgttcgacaccctgggctatcctttagaagtcgtgcggacgctcacggcgttatgtactaaccgcgtcccctcagcaaggctatttgccccagacctgcgggataggcttgactggtctggcaggcagcgctaccgaaaccgccacttgcctcagggagctccgaccagtcccgccttggctaatctgtgcgcctttcggctggacactcggttggccgcactagctcgctccctcgatgccacttatacacgttatgccgatgacctggcgttttcggggggcgctgtgcttacacgcgcaactgagtggatgacagtgagggttgccgctattgcgctggaggagggctttgcccttcagctgagaaaaacccgggttatgcgaaggggggtccgacaaaggttggccggcgtagttgtgaacagacatcccaatctggcccgggacgaatttgacactttaaaggcaatcttgaccaattgtgtaaggcacggaccagccagccagaatagggccgcccatgctgacttcagaggatatctcgctgggcgagtcgctcacgccaccatgctgaacgctgctcgtgggatgaagctgcaggccattttcgacagaatcgtgtgggatgcaggcgatataggcgcttga

SEQ ID NO: 12554 - RNA, 1350 nt, synthetic construct
  source 1..1350: mol_type = other RNA
atgcagcccgggttccggaacaccctcgtgattgtctgcgatgcaatgttggctggtgccccggaagttgcgggagttgtcactcggcttacagcaactttcggcctatatggcgcttggatggaagaagtcgcacagcaggccgttgacgcatttgggtccagatgggacgccacgcgcgtggatgagctgacacctctcttggaaaatgcacccgctatagtcgccgccttttcgtcccaagcctcccccgaaatcatccggattattagaagggcacctgctcaaaggcctcccccaccacagctggcgcatatcggcttacctcatctgccgactctgcgcgatctggccgagtggctcgagcttaacgactctgacttggcttggcttgccacaaggtggcgcgtggatcctggcgaggccagttctccattgcatcactatagctaccacgcacgcgaaaagagggatgggagacatagactcatagagcggccaaagtcactgatgcgcttcgtccagcacaaattgctgcacgggctgctcgatcacgtgcctcctcatgacgctgcccatggtttcaggcagggacgcaacattgtgtcctttgccgctccacatgcagataaatcactggtcatcagactggacctcgcagatttcttcgccagtattacccaggcccgtgtgcacgctacctttcacgctctggggtacccccttgctgtgtcacgagccctcaccgcactaagcaccaatcgggtgcccgtgcgagttctcagttgcggcgctttaaaggataaatttgactggactgagcagcagagactacgcgcgcgtcacttgccgcaaggggcatctacatcccccgctctggctaatctgtgtgcattccggttagatacccgtctcgcggcccttgccagatctctcgacgccgattatactcggtacgctgatgaccttgcattttcaggagccgctcgtctggagcgagtagcagaccgccttcccctgtgggttgcagcgattgccctggaggagggcttcaccgtgcagcctcggaagacgcgagtgatggccaggggtgtcaggcagcaattagccggcgtggtagtaaatagacacccaaacttggctcgggacaggttcgacgcactgaaggccctgctgacaaactgtgtgcgccacggacccgtgagccagaacagggacggaagagccgactttcgagcgagcctagccggccatgtagctcacgccacaatgctgaatccagctcggggagccaaactgcgagccatctttgacaggatcgattggaatagactcgaaagcgcgagctga

SEQ ID NO: 12555 - RNA, 1338 nt, synthetic construct
  source 1..1338: mol_type = other RNA
atgcggctcaacttcagagatacactggtggctgcttgcgatgccttactggccgggcctcccgagttggctggtatggtcgcgcgcctagtgtctgtgttcggtacttatagagcttggatggatgacgtcgccagagaagccgctcacgggtttgcacccaggtgggacgccatccctgcacacgaactggctcgctccctggagcaactgcccgtctttgccacagtgtttgggaacgcttcccgacccgaagtggtgcgtatcgtacgcagggctccagtgcagcgaccccttccacctggcctcgagcaggtttctctgcccagactcgcgacccttcgagatcttgctgagtggctcgaggtcgccggtggagacttagcctggctggcaaccaggtggcgggttgaaccaggcgaagccgcatccccacttcaccattacagctatcatgcgcgcgagaagagggacggacggaatcggctgattgagcggccgaagcccctgttgagatttgttcagcacaaacttctacacgacctcttggaccgcgtccctcctcacgacgctgcacatggcttcagacgaggaaggtcaatagtgagcttcgccgcaccacatgctgaccagccactggtgattcggcttgacctcgccgacttcttcgcctctatcacccaggggagggtccacgcagtcttccatgctctgggctacccggttgccgtggctagagccctgacagcgctgtcaaccaatagagtgcctagccgaatgctcacctccggcgccctgaaagataagttcgattggacagagcagcgcagattacgcgcgcgtcacttgcctcaaggagcctccacttcaccagccctggccaacctgtgcgcatggaggcttgatacgcggttggcagccttggcccagagcctagacgccaattatactaggtacgctgacgatctcgctttcagtggggccgcacggtttcagagagtcgccgatagactcccgctgtgggttgccgcaatcgcgctggaagagggcttttctgtgcaaccccgaaagactcgggtaatggcccagggagtgaggcagcagttggctggagtggtagtgaaccgccaccctaatctcgcccgggatcgttttgacgcactgaaggctctgctcacgaactgtgtaaggcatggccccgctagtcagaatcgtgacggtcgggcagattttagggcagccctggcaggccatgttgcacacgccgctatgttaaacccatcgcgcggggcgaaactacaaggcattttcgatcgcatagactggagtcaaagctga

SEQ ID NO: 12556 - RNA, 1350 nt, synthetic construct
  source 1..1350: mol_type = other RNA
atgaggctcaactttcacgacactctggtaatcacatgcgaagcaatgctggccggacctccagaggtggcctctattgtggcacgcctgatgctgatctttggcgaacatagtccctggatggacgacgtggctagaaaggccgccgatctgtttacaccgcgatggaatgacaccccgatcgacgagctcataagagtcgtcgaggatactccaacattcgtcgcggcatttggcactcatattcgccctgaggcgattcggatcataagaaggcctccagttcaacgacttcctcccaggcggctcgcacacgtggatttaccacatctgcctaccctcagggacttggctgactggctggaactggatgggtcggatatgagctggttagccaccagatggagggtagagccaggtgaggcggtgtccccactgcaccattattcttaccacgcccgggaaaagcgcgatgggcgctatcgacttatcgagcggccaaaagccctgattcggtttgcgcagcacaaaatactgagggaacttctcgatagggtgcctccccatgacgctgtccacggctttcgaaggggcaggaacatcgtgagttttgccggaccccacgccgataaggcactggtgattcgattcgatctgaccgacttcttcgcaagcgtaacgcaggcccgtgtgcacggcatgttcagaactcttggttaccccatcgccgttgcaagcgctcttacagcgctggccactaaccgcgttccctcacgcctgttcacactcggggaactcaaaggaaaattcgactgggacgctcagcagcggttgagagccagacaccttcctcagggagcatctacctcccccgctctggcaaacttgtgtgcctttcgcctagacacgagattggccgccctggctcattcagttgacgcggtttatacaagatacgctgatgacctggcattctctggcgaggctagtttaaaacgcggagccgatcggtttagcgcccgtgtcgccgcaattgcaagggaggaaggtttcaacctccatttcgggaagaccagagtaatggggcggggagtccaacagcggttagcaggggtggtggtgaaccgacacccgaatttggccagagacaggtttgatatgctgaaggctatcctaaccaactgcgtccagcatggccccgcttcacagaatcgtgccgggagggctgatttccgggcttccttggctggacaggtggcccacgctatgatgctcaatagctcccgcggcgccaagctacgtgctatcttcgaccggattaattggtcccaaggtaatagtgccggctga

SEQ ID NO: 12557 - RNA, 1338 nt, synthetic construct
  source 1..1338: mol_type = other RNA
atgaggcctggaacacctaaaaccatagcccttctttgtgaggccatgctggcaggagaaccagaacccgcggcagttgctgcccgcttggttctggcctgtaatagacacgagaggtggatggaagcactggcgcagctcgcggtagagcggtttgccagggtgtggagagatacagaaccagatgagctcgcctctttatttgcccttgcagctccttttccacccggctggagtgccagggacttacctgcaattgcccggatcgtgaggagagcccctgagcaacagctgccaccgcctaggttggtgcacctggatctaccttccctgcctaccctgagagccttggctgattggctggaactttctgacgaggacttggcatggcttgccactcggtggagggtcgctccacatgaggctgctagccccctacaccactaccgataccatgtgcgggaaaaaccggacggccggcaccgactgatagagcaaccgaagccccttctgaggatggcccagcacaccctcctacatggccttctcgaccgcgtccctccacatgaagccgctcacggattccggcgggggagaaacatcgtgtcctttgccgctccccatgcaggtcagcccctcgtaatccggctggatttcgaggacttctttgggtcagtgacggaggcaagagtgcacggactgttccgtacactaggttacccagttgcagtagcccaggcgctcagcgctctggcaacacaccgcgtgccctcacgtctctttgacgtcggggatctgaagggcaagttcgattggcacgctcagcaaaggctgagagcccgacacttgccacagggcgctgctacttcccccgcactggcaaacctgtgcgccttcaggttggacgtccgcttagctgctctcgctcggggattcggcgctagttatacgcgatatgccgatgacttagccttctccgggggtgataagctgaagtcggtagctcgcgattggcccctctgggtcgctaggatcgcacgagaggaagggtttgccgtccggagccagaaaaccagagtgctgagaaacaatatgagacagcagctggccggtgtggtggtgaatcgtcatccaaacctgtctcgcgagcggttcgacctcttgaaagcaatgctcaccaactgcgttcgtcatggccccgcgagccaaaatcgcgatggccgagccgacttccgcgcatcacttgccggccatgttgcccacgcaactatgctgaatgcggcccgcggggccaagctgaaagcgatttttgacaggattgactggactagaggatga

SEQ ID NO: 12558 - RNA, 1368 nt, synthetic construct
  source 1..1368: mol_type = other RNA
atgcagctcagtctccaccagacagtgattgctatcgctgaagccatgctcgccggggagccctatagagacagtgtggctgccagggccgcatcaattctaggtgcccagttaccttggctgtccgaagccgccgacgacgcagttcacagatttgggcaccgctgggatgacacccagcctgacgaggtggctccgttcatcgcagacttgcccggcttcgtgtctagctggatgagcgaagaacgactctcagttatcagaatactgaggcgcgcccctgtacaaaggcggctaccaccacccctggctcagatagagattccccagctgccggcccttggcgatttagccgattggctggagttatcccccgccgacctgggatggttggcgaatcgctggagagtcggcgcaagagacgggccttcgccattgcatcattacagctacagggtttgcgaaaaacgtggcgggaggtatcggctaatcgagcgtccaaagtcactgttgcgggcagcacaacacaaacttcttcacgggttgctcgaccgagtgcccccccatgaagctgcgcatggatttcgcaagggtagaaacattgtttcattcgctgcacctcacgtcggacagccactggtgatacgacttgatctggccgattttttcgtcagcgtgacagaggcgcgcgtccactccgtatttcggactctcggctataccagcgctgtggctcgagcaatgaccgctatggtaaccaatagagtaccctccgcccagttgcttgcaccagacctgaaaggcaagtttgattggctcgaacagcagaggttccggactcggcacctgcctcaaggagctagtacctctccagccctggccaatttgtgcgcgtttcgtctggatactcggctggccgccctggcaagatctcttaacgcaaactacacgcgatacgcggacgatctcgccttctctggtggggcccagttaatgtccgtggccgatcgcctacctgtcaaggtggccgctattgccatcgaggagggcttttccgttcagccacggaaaacacgcgtcatgcctaggggtgtgaggcagcaactggcgggcattgtcgttaaccagcatccgaacttcagccgcgacaagtttgacacactgaaggctactctcaataattgtgtgaaacatggagtggcaagccaaaataggtcggcacaccgtgacttcagagcttctctggccgggcatatcgctcacgtgaccatgctcaactccgctcggggagcgaaactgaaggcaatcttcgattgtatcgattggtctgagcccgtgggagatgagcatggcacgagtgccctgtga

SEQ ID NO: 12559 - RNA, 1470 nt, synthetic construct
  source 1..1470: mol_type = other RNA
atgagccattgcactgctcgcgcgcctctcagaacagcacaggcccgatccaggcacacgggtaccctgattcgcggctctagtttcacgatgcagctggaccttagcgccgcagtgcagctgatagcagaggcagctcttgctggtccttctaagcatgctagtgtggtggagcgtatcgtagccgtagtaggcgccgatccgccctggtgtcacgatgttgcaactctggccgtccagcggttcgcttactgctggcgcgaggcatcgcccgaagacttagcgctgcttatcgtcgacgtcccagcatttgctgccgcctggagtggcgtggataggcctacattcgttcgcgtgcttaagcgggtgcctacccaagttgctccccccgtgagcctggcacacatatctattccactattgcccacactcgccgacctagctgattggctggagctgagatccaccgacctcgagtggctggcggatagatggcgggtcgaaggtcacgcacgacgtctgcaccactacgggtaccatgcttgtgaaaagcgcgacggcagatacaggctcatcgagaggcccaaaccgctgctgagaagtgcccagcacaagattctccaccagatcctcgaccatattccagtgcacgcagcagctcatgggttttgcaaaaggcggaatattgtgtcatttgcggctccgcatgcgggccaggctatggtattgtcctttgacttgcaagacttcttttcatccgtgaccgccgggagggttcatgccatcttccggaccctgggatatcctttcgctgtggcccgagccatcactgccctcaccacaaatagggtcccttccgcctattttgacgctccacccctgaggggtaagttcacttggcatgaacgggagagactccgagccaggcatttacctcaaggagccgccacctctcccgctcttgcaaatctgtgcgccttccgcctggacatgagactgagcgctctagcgagagctttgggcgcgcggtatacccgctatgcagacgatctcgcctttagcggcggatcagtgttagcccgggcttccgaaaggctctcaatccaggttgcggccattgccctggaggaagggttcgaggtgcacagcagaaagacacacgggatgccacgcggggtgagacaacagcttgccggagtcgttattaatcgtcaccctaacttagcccgggattgttacgatcggtgcaaagcagtgttgcacaactgtgccttgcacgggccagcctctcagaaccgagaggcacatggagacttccgcgcccaccttatgggcaaagtcgcccatgccactatgttgaacccacgtcgaggcgcaaaactgaaggtcctgtttgataggatcatatggccagaagatgctcccgcaagaccacccgatgatggaacagtgcacgctatgcctcagtga

SEQ ID NO: 12560 - RNA, 1473 nt, synthetic construct
  source 1..1473: mol_type = other RNA
atgatcagtgcagttaggagaatgagcccactgtgtgtgctgagaaagacggctcacgcagccctggacgcattgacaaggcgtccagcgagcttccacgcaatgagacttagcccccttcagcggatcacatacgccattgccgatgcaatgctggccgggcctgccgaacccgattctatggtagagaggatgagtgacagcttaggtgtaccttcagactggatgctgggactcgcaaggcgcgttgcaaagagatttggggcgcgatgggattccgtggattccaaagaggttgcgctggtggtggctaagactgccgggtttgtagcagcgtggcgttctgaggccaggcccttcgttgtaagagtcttaaggaggccaccagtccaacaactccctcccccccgtcttagggagatagccctgccgaagctggctactctcggggatctcgccgcttggcttgaggtcgaagtggcagaactggactggtttgctgaccggtggcgcgtcttgcctcagggagctgatacccccttgcaccattacacctataaggctatcgagaaacgggacggcaggtgtcgacttatagagattcccaagtctcgtctccgctcactgcagcgcaaaatcctccacggactgctggatagggttcccccgcatgattgcgtacatgggttcaggaagggacggaacaccgtgacttatgccgcccctcatgccggcaaagccgttgtcgtgaggttcgaccttgccgacttctttgcgtccgtgcatgctcctcgggtgcacgctgtgatgcgcacgctgggatacccgttggaagtggctcggatgctcaccgctctatgcacaaatagggttccatcagcccgcctgctggctgctgatgtgagaggaaagttcgattggctagagcggcagcgatatcggactcggcacttaccacagggggcacctacatccccagccttggcaaatctgtgcgcctaccgactcgacctgcggcttgagggtctagcacgtgccgtcggagctacctacaccagatatgccgatgatcttgcgttttcgggcgacgaagacctggctcgggtcgttgagagactcaaagtgcgagtcgccgcaatcgccctagaagagggtttctcaatccagctgcgcaaaacacgcgtgatgcgccgcggtgtgagacagcacttagccggcgtcgtggtgaaccaacaccctaacctcgcccgcagcgaattcgacgcactcaaggcaatcttgatgaattgtgtgagacacggggccgcctcccagaatagagagggccatgcggactttcgagcacatctgcaaggccgggtcgcccaggctgtgatgttgaacgctgctagaggcgccaagctgaaaggcatttttgaacgaattggctgggaggacattgccaacgatagtagactggactctgaagcttga

SEQ ID NO: 12561 - RNA, 1356 nt, synthetic construct
  source 1..1356: mol_type = other RNA
atgaggctgtcatctctccagcatgttacctttgctatcgccgatgccatgctagccggtcctccggaacctgacgcgctggtagctcgcatgacagccgctttgggagtccgcgctgattggatgaccggaatagccagaacaacctctagacgctttgctgcacgatgggagcacgtgaagagagacgaactgctgaggatgattgccgccactgagagtttccagctggcatggcacaatgagcaccaaagaccagttgtggtgcgggtcctgaaacgcgcacctcagcaagtagccccacctccccgactggctcatgtggctctcccccagttacccacattgggggacctcgccgcctggcttgaagtggacgacgcggacttgggctggttcgcagatcagtggcgagtgatgccacaggcttcgtccactccactgcatcactacagctataaagccattgaaaaacgagacggtcggtgccgacttatcgaaatgcccaagagcaggttgcgggatctccaacgtaaaatcctgaaggggctccttgagcacgtaccacctcatgagtgtgcccacggtttcaggaaggggcggaacacggcatcatatgccactcctcacctgggaaaggatgttgtggttcggttcgacctggccgatttttttgcgtccgtgcatgccggacgcgtgcatgcactgatgcgcacactgggctacccactagaggtggccagagccctgaccgctatctgcaccaatagggtgccctccgctcggctgctagcagatgatgtgcgggagaggttcgattggcaggagaagcagcgttataggactcgacacctcccccagggggcacctacatctccagctctcgccaatctctgtgcataccgcttagatctgcgtctggctggccttgcacggacgatgtgtacaagctatacccgctacgcagacgatctggccttcagtgggggacgggagttagcgagaggagtggaacgtttggcggtcagggttgcggccatcgcaatggaagaaggcttcagcattcaacttagaaaaactcgggtcatgaggcgcgccgccaggcaaagattagctggcgtggtcgtcaatcagaggcccaacctggccagagatgagtttgacgctttgaaggctacccttaccaactgcgtaagatacggtgtcgagggccagaacagagacggacatcgggacttccgcgcccaccttgagggcaaggtggctcaggtttgctttctgaacccggggagaggcgaaaaactcagggggatactccgtcagattcagtgggacgtctccggcgcacacgagtga

SEQ ID NO: 12562 - RNA, 1368 nt, synthetic construct
  source 1..1368: mol_type = other RNA
atgcccctttccagcttacagcatgtgacatacgccatcgccgacgcaatgcttgccggctccccagaacccgctagtatggtggagaggatgacgctggtgctgggcgaatctacgaggtggatggacggactggcgaggcacgtggctaagcgtttcgcagctcgttgggactctgtcggtcgccgtgaagtgtcagccgtggttgccgggatgcctggcttcgtctctgcctggcgttccgagcagcctcccaaggtcctcagagtgctaactcgacctccatttcaaagacctccgccaccttggctgcacgacgttgcgctcccccagttgccaactctgggggacttggccgcttggctcaatattgagcccggcgatctcgactggttcgcggataggtggagggtacccgcccatagcgcggctacaccactccatcactacgcatacaaagccatcgaaaagcgcgacggaagatgccgcattattgagattcctaaaccgcggctgcgcgctctgcaacggaaggtactgtcaggcctgctggatcgaatccctgcccacgaatcagtccatgggtttagacatggtaggaacatcgtgacatttgcagctccccatgttgggcgggcagtcgtgatgaggttcgatctgaccgatttttttgccagtgtgcacgctgggcgggtgtattcagctttctatgccttcggctatccactggcagtggctatggcgctcactgccctttgcaccaaccggataccgagcggccgcctattggccactgacgtacgcgagaggctgcagtggcaggagaggcagcgatacagaaacagacaccttccacagggagctcccacctctccaaccctcgctaacctctgcgcattccgactggatctaaggctggctggtctggcacggagcgttggagccacctacacacggtatgccgacgacttggccttttcgggagacgaagaattagcacggatggcagatcgcttgtgtatccgggttgccgccatagcactggaggagggcttcggcgttaatctccgcaaaacacgagtcatgagaagaggtgtgcggcagcacttagccggcgtcgtcgtcaattcccacgctaatgtggctagacctgagttcgatgcattaaaggccatgctgaccaactgtgtgaggcacgggcccagaagccaaaatagagatgaccatcctgagtttcgagcacacctggctgggcgcgtagcgcatgtgggaatggtgaacgccgctcggggagctaaacttcgcgcccttttggagtccatcgagtgggatgaagaaagtgaggccaaggcagaaagcaatgcctga

SEQ ID NO: 12563 - RNA, 1113 nt, synthetic construct
  source 1..1113: mol_type = other RNA
atggccgcattgccatcctttcggcctccctttcaaaggcccccccctctttggctcagagaagtcgccctgcctcagctgccaactttgggtgacctggcggctcgcttagggatcgagcctgacgaacttcattggtttgccgctcgctggcgagtgccagctcactctgcagccactcccctccaccactacagctataaggccatcgagaaacgagatggcagatgtaggatcattgaaattcccaagccgcggcagagggccctgcaactaaaggtgctttctgggctgctggatcgcatcccggcgcatgaatcggctcacggtttcagaaggggacgtaatattgtgacattcaccgtgccccatgttggcaaagccgtcgtaatgcgttttgacctgaccgatttcttcgcatccgtgcacgccgggcgcgtctatagtgatttccactcatttggcttctcacctgctgtggcccaggtcttcaccgccttatgtacaaaaagagtaccttctggccgattgctggccgcagatgtcagagagcgcctgccatggcaggagaggcagaggtaccggaacagacacctgccacaaggggctccaactagccccgcccttgccaacctgtgcgcctttagatttgaccgccgcttggcaggactagctcgcagcgtaggtgccacatatacacggtacgcggatgacctggccttcagcggagatgaaaacgttgcacggatggtggaacggctctccgtgagggtggctgcaatcgcaatagaggagggtttctcagtgaacctgagaaaaaccagggtcatgaggcgtggagcaagacagcatttggccggagtggttgttaactggcatgctaatgtggggcgtacggaattcgacgctctcaaggcagtgctctctaactgcgttcggcacggcttaagaagtcagaatcgagacgggcatcgggactttcgcgcccatcttgcaggcagggttgcccacgtggcgatggtcaatgctgctcggggcgctaaactccgggcactgctcgaacgaatagagtgggacgaggagagtgaggccaaggcgaagtccaatgtatga

SEQ ID NO: 12564 - RNA, 1362 nt, synthetic construct
  source 1..1362: mol_type = other RNA
atgccatcttcatacttacagtacgtggccaatgccattgctgacgcgatgctagcggggcctgcacaaccagcttccatcgtggagcgaatggtgctcgctttgggagcgccggctgactggatgagcggtctggctcggagagtgagccgcagatttggcaaacgttgggattccgtcggccgccacgaactttccagggtaatagcagaccacgctgccttcgtgagcgcctggcaaagcgacaacaggccccgtgttgttcgtctcctgacgcgtccaccagtacagaggcaggtccccccttggctgcacggtatcactctgccacagctgcccgccttagccgatctggccgactggctagaagtagaaccaaccgagctcgattggttcgccgatagatggcgggcccctgctcatgcagctgcaactccccttcatcattattcttacaaagccatagagaagcgcgatgggcggtgccgcatcatcgagattcccaagagtagactgaggacagtgcagagaaaggttctccacggcctgttggacaggatacccgtccacgacgcagcacatggcttccgaagggggcgaaatactctgagcttcgcaaccccccatgctgccaaggcagtggtggtaagatttgatctcacggatttcttcgcttctgttaacgccggccgggtgtactcaaccttccgagactttggctatcctttggcagtggccagatcccttacagccctgtgtaccaaccgcgtgcccagtggaagattattggaagctgacgtccgcgagcgaatcgactggctggaaaggcagaggtaccgtaatcgccacctgcctcagggcgcacctacctcacctgccctggcaaatctctgtgcctatcgcctcgatttacggcttgcagggctggccagatccgtgggagcgacttacacccggtatgcggatgacctggcgttctcgggagatgaggaccttgctcggatcgccgagcgcctgtcaatccgggttggtgcaattgctattgaagagggctttgccctgaactttagaaagaccagagtgatgaggcggggcgctaggcaacatctcgctggtgtcgtggtcaacagacacccgaatttggctcgccctatgtttgacacactgaaagctatcctgacaaactgcgtgaggcacggaccggagagtcagaaccgggaagcccacccagatttccgggcccatctagctgggcgagttgcccacctcgccatgttgaatgcccgccggggagccaaacttgaggcaatttttgaaaggattgggtgggagggaggggagggctctggaacaactgtctga

SEQ ID NO: 12565 - RNA, 1350 nt, synthetic construct
  source 1..1350: mol_type = other RNA
atgccccaaagctccctccaggtcgtgacatatgccatcgccgacgcaatgttggcaggacctgctgacccagcgacgatggtggaaaggatgacccgggtcctgggagaaagtgccgattggatgaccggactggcccggagggttgagagacggttcggagcgcgatgggacagtgtggaggccaagcacctgtctaaaattatcgctgagacagcaggatttgtcgcggcttggcgttctgagaaccggccaagaatcgtgcgcgtcctgacaagacccccagttcaacggccggcacctcgttggctaagagatgtcacattgccacagctgcctaccttgggtgacctggccgcctggctcgatgtcgaacccctggagctggactggttcgccgaccgttggagagtagcagcacacgatgcaactaccagactgcatcactactcctataaggccatagagaagagagatggccggtgccgcataatagagatccctaaatctcggcttcgagagcttcagagaaaagtgcttcatggcctgcttgacaggattcccgcccatgacgctgtgcatggcttcagacgcggccggaatactgtgacttttgctgcaccacatgccgggaaggccgtggtgttccgctttgatttaacggacttctttgcttcagttcacgccggcagagtgtattcagctattcatgctctgggctacccccttgaagttgcccgagccctgaccgccttatgcactaacagggtgccgagcggtaggctactcgctcctgacgtgcgcgaccgtattgattggcaggagcgccagcgatacaggaaccgacacttgccgcaaggcgcacctacaagtcccgcactggccaacctgtgtgcgtttcggttggacctcaggctcgctgggctcgctagatcagtgggagcaagctataccaggtacgccgatgacctcgccttttccggtgggaatgatctctcccgtatgactgagcggctctctatccgcgtagcagctatcgctatcgaagaagggttcgcagtgaacatgaggaaaaccagggtaatgcgccatgccgtccgccagcacttagcaggggttgtggtaaatagccaccccaatctggagcggcctgcttttgacgccctgaaagctctgctgaccaattgtgtgcgacacgggccacgctcgcagaatcgggatgcccacacagatttcagagcccatttggctggccgcgttgcgcacgtcactatgctaaacgccgcgaggggggagaagcttaagggtattttcgaacgaattggctgggatgaaagggaccagagctga

SEQ ID NO: 12566 - RNA, 1293 nt, synthetic construct
  source 1..1293: mol_type = other RNA
atgctcgctggaccaccagaggccgcagcgatggttgagaggatgactttggtgttaggcgaacgagctgattggatgaatgggctagccaggggcatcgctaagcggttcggggcaaggtgggactcagtcgacggcaaggagctttcgaaagttgtggccgaaaacacaggctttgtcgccgcatggcgcggagagtctagacctcgggttgttcgagtgctcccccgaccaccagtccaaagacctcctcccccctggttgcatggtgtggcactaccgcagcttccaaccctcggagatctggctatgtggctggaggtcgaacctgacgaactggactggttcgctgatagatggagagtcccggcacagtccgctgctacacccctgcaccactacagctataaggccatagaaaaacgtgacggccggtgcagaattatcgaagtgcctaaatctcgactgcgggcgctgcagcggaaagttttgcacgggttactggatcgagtgcccgcacacgatgcggtgcatgggttcagaaggggacgcaacaccgtcactttcgctgccccccatgccggtaaagccgttgtgatccgcttcgatctgatggactttttcgccagtgtacatgccggtcgagtttactctgtgattagggccttgggctatcccctgaatgtcgcccgcgcactgaccggactatgtaccaaccgtgtaccttccgggtggctggtggctcctgatgtaagagacaggatcgactggcaggagagacagcgctaccagaaccggcaccttccacagggagctccaacaagtcctgccctcgccaacttgtgcgcttttagactggatctgaggctcgccgggcttgccaggtcattaggcgccacttatacacggtacgcagacgatctggccttcagcggcggggaagatctggcaaggatggcccaacgggtggagatacgtgtcgccgcaattgcgattgaggagggatttgctgtcaatctgaggaagacccgggtgatgagacgcggtgggaggcaacaactcgctggcgtggtagtgaatagccaccccaatcttgcaagagccgaatttgacgctctcaaggccgtgctcacgaattgtgtgcggcacggcccgggatcccaaaaccgtgagggtcacgaggattttcgcgcacatcttgcggggcgcgtggctcatgcaggtatgctgaacgctgtacgcggcgcgaagctcaaggccatcttcggccggatcgtgtgggacgacggatga

SEQ ID NO: 12567 - RNA, 1344 nt, synthetic construct
  source 1..1344: mol_type = other RNA
atgtcactctctacattacagaccgtgacaaatgccattgccaatgccatgcttgctgggccccccgaaccagctgctatagtggagaggatgacttgtgcactgggtgagccggctgactggatgaagggcctggcatctagagtggcccagcgttttgcagctcgttgggactccgtggatccctcggccatcagcaaggtggtagcggaaacgacaggcttcgttagtgcatggagaagcgagacacctccccgggtggtacgaaccttaatcaggcctccatcccaacggcctgcacctccttggctgcaggatgccgtcctccctcagctcgcaacccttgccgaactggcggcttggctcgaggtggaacccgatgaactggactggtttgcagatcattggagagtccccgcccaacaagccgccactcccttgcatcactattcatatatggttgccgacaaaagggacgggcggtgcagaattatcgagatcccgaagagccgcttgcgaggcctgcagaggaaagtgctgaggggcctgctggataaaattcctccacatgacgcagtgcacggcttcaggcgcgggagatcaactgtgtctttcgctgcccctcacgtcggaaaagctgtggttatcagattcgatctgaccgatttcttcgcctccattcacgcaggacgagtctactctgtgtggcgcagcctaggatttccaaagggggtggcgcgcagtctcacaggcctttgtactaatagggtgcccagtggtcggttgctagcaccagacctgcgcgaaaaaaccgattggcaggagcgtcagcgatatagaaaccgtcatctgccgcagggagcaccaacatctcccgcgctggctaacctgtgcgcataccgaatggatatgcggctcgccggattggctcgaagcgttggtgcaagctacaccaggtacgcagacgacctagctttttcaggtggtgatgatctggccagaatggctactcgcctgagtatacgggtcgccgccattgccatcgaagagggctttgcggttaatcttcgcaagacccgggtaatgcagcggggggctagacaacagctcgcttccgtcgtcgttaaccagcacgttaacgtggcccgctctgagttcgacgccctgaaggcggtgcttacgaattgcgccaaactcggcgtggagtcccagaacagagacggacacccagactttcggagccacttggccggccgccttgctcatgtcgagatggtaaacgctgcccggggggccaagttaaggaggatcttcggcaggatagtctgggggagatccggatga

SEQ ID NO: 12568 - RNA, 1305 nt, synthetic construct
  source 1..1305: mol_type = other RNA
atgaattcagcatttgtggccgagaatctcgcagcagcccttctgctcggagagtggactggacgcggactcctagattccgctctgcgggtggtacgctatcgcgaaccctggctgcatcggttcctaagaaggcttaggcgagcatttcctgagccccctgcacgccaggaatttcgcgcgctagtggactggataagtaatgatcggggattcctcaaccgtagcctggacggcgtgtttgagttcgtcagcctgacacccgccatgtcacaatcacggtggcccgtccctcagcttgccacagtgggtacgcttgctcagtggttggaattgacccctcgcgagctcgattggttcgctgacgggcagggtagggaagcagtgcagcccagaggcccattgcggcactatgtttacaaggccataccaaagcgcggaggcagactgcgactcatcgagtctccaaagagccgactcaaggcgattcaacggagaattctggatcagatactctccgttattcctgcccatgacgctgcccacggcttttgtcgggggaggagtgtggtcacctacgctgctgcccacgccaacaaggatgtcgtgctgcgcttggacttagctgacttcttcccctctgtcccagcctcacgtgtccacgccattttctgcactgccggctatccaaaagatgtggcgagaatgctgacgggcatctgtacaaacgttacccccagggatgagctgcccgagagcttcggtgccgataatagaggctggaccctgctgcagagattactgagccctcatcttccgcagggagccccaactagtccggcactcgcaaacttgtccgcttaccgtctggacctcagactgagtgccctggcacaggcatctggcatcgcctttaccagatatgcggacgatttagcgttctccggggacgaggagtttgctaggggggtactgaggttctacgagaaagcttgccagatcgtgatcgaagaaggtttcgccgttcgaccagccaagactaggattatgaggaggggcgtacgtcagcaattagctggagtggtggtgaacgtccggcctaatgccccgcgaggtgaatacgacagactgaaagctattttgacaaactgctcgaggcacggcgttggatctcaaaaccgggagaagcacccttcctttagagaacatctgcttgggaggatcacctggctgacaagccttcatcccgaacgcgggaaaaaattgcgggcacggtttgatcgaatcgactggaatggggggtga

SEQ ID NO: 12569 - RNA, 1530 nt, synthetic construct
  source 1..1530: mol_type = other RNA
atggtgcgagagaatcgcgtgcgccacagatctggtgtgactccagagactttctatcacctggggcttcaagcccgcgattcacctggtgcctcgaccccaccgatgtcaagagggactggcctcgtggacccactagctgctcttaccttcaccgacgaaatgtctacccagcagaggttcgtcagaaatttggcggcggggatgcttgctggcgaatggacggccgcgggtcttagggaaagtgcctacagagctactggccacacatttgcctgggcacccgccctcgctaaacgagttctggaaacccacagcacagcccccccgtttcctacacttttggccgtgctgaccgccgatgctggcttccagagagctttcgccgccttagcatccgatcgtaatgccgacgaccgcttcccggtgtggcatctgttccctgtacccacccctcccccactaccacgtcccgaatgggcaaaagagctgcctgatctgcctaacgaacccgctctcgcagagtggctaggagtgcccctcgagaggctcctctggctggctgaccccaaagggcgcaataccggtcaccgacccggcagtgttaggacataccgggcccggtgggttccgaagacacatagcagggcacgcctcctggaggtcccaattccagcgctgatgcgggcacaacggaaggtcttggttggcctgctcaactccgtgcccagccacccagcagtgcatggatttcgggtcggcaggagcgccatcacaaacgccgctccacattgcggcagggccgtagttatacggtttgacctggcggatttcttcccatccattccagccggccgcgtcttccgcatgttcctcacgttgggctatccggagacagttgcacggcttttagggagcctctgtacaacccgactgcctacaaaggattggaatgctaggcctaaccccagaacggattctgccgaataccagacgagaatcaggctggcgactagacaccttcctcaaggagccccaacctcccccgcacttgcaaacctcgcggcacatagactggaccgtcggctggcaggactggcttcagcatgcggggctacttatagcagatacgcagacgacctgactttttctgggggagaggacgtcaggaggtctgcctcccggttagctcgaagagtagctctgatagcagccgaggaaggctttacattgaaccggggtaagacccgcatgcagggaagaagtgagcgacagaccgtcacaggagccgtagtgaacgtgcgacctaatatccctagggccgattttgatctgctgaaagcaattttgaccaactgtgtgcgccatggacccgccactcagaatcgggctagtcaccctgactttcgcgctcacttagccggccgtatcgctcatctggccagcgtgaatcccgtgcggggacgtaagttgtgggctacttttgacaggatcgcctgggatgccgattcaacccagtccgggcagtga

SEQ ID NO: 12570 - RNA, 1362 nt, synthetic construct
  source 1..1362: mol_type = other RNA
atgaccacccagcagaggttcgtccagaatctggcagcgggaatgcttgctggagagtggaccgcggccggcatacgtgaaagtgtgtatagggccacaggaaggcgttttgcttggggccccgcactggctaaaagactgctaaacgcccacgcaactgcccccacctttcccactcttctggccactctcactgctgatgcaggctttcaacgggggctcaccgttttagctagcgcccgcaacgccgacaaccgattcccagtttggcatctgttctccgcacctgcgcctcccccattgcctagaccccaatgggccgcggaactcccagatttgccaaacgagcctgcactggccgaatggctgggtgtgagtctcgagcggctgctatggctggccgacacgaagtcgagaaatacgggccacagacctggctctgtgcgtacctatagagcgcggtgggtcccaaaaacacacggtcgggcacggctccttgaagtgccgattcccgctctcatgcgcgcccagaggaagatcctggcagagctgttaaacttagtgccagcacatcccgccgtacatggcttccgacctggccactctgccatcacgaacgcagctcagcactgtggtcgcgcctgcgtgatccgcttcgacctgactgattttttcccatcaataccggtggggcgtatctttaggatgttcctgaccctcgggtatagcgaacccgtggcccgactgtttgggtgcctctgtactacgcgacttcctgccgaggattggaacagaaggcccaatccaaggaatgatagttctgaataccagacacagaccagactggcatcacggcatgttccacagggggcccctacttcaccggctttggcgaatttgacagcctacagactggattgcagattggctggactggcgagcgcttgtggcgctacctactcccgctacgccgacgacctgactttctccggggatgatacactaaggagatctgcagcacggcttgctcgccgcgttgctctcattgtcgtagaggagggattcgcactcaatcggggaaaaacccgcgtgcaaggtcgcggcgagaggcaattggtgaccggagtcgtcgttaacgtgcggccgaacattccccgagaggacttcgaccagttaaaggccattctgacaaactgcgtccggcacaatcccgccacccagaatcgaacaaatcatcctgactttagagctcaccttgctgggaggatcgcccacgtcgcctccgtaaaccctacaaggggccggaagctgtgggctacatttgaccgcatcgtgtgggacacaaatagcgcccagagctga

SEQ ID NO: 12571 - RNA, 1359 nt, synthetic construct
  source 1..1359: mol_type = other RNA
atgactgcaaatcggttcgtgtcaaacctcgcggctgctttgctagcaggggagtggtcagtagccggattgcggacatccgtctatcgcgcaacgggcaagcgctttggttggacaccccggtttgccaagcgggttcacacagcgcacgctaccccacccacttttaatgagctgttagcctttctcgggcgggaccctggatttgtgcgggctcttgctgcactggctactgcaaggtacccagccgaccgctttcccgtgtggcacattttcgctcctccagagcctccgccaagaccaagacccgattgggccagcggtctgcctgtgctcccaaacgaacctgctctagcagagtggctcggtgtccccgtcggacacctgctttggctagcggatcctgccgggcggaacgcaatatctaaaggcgtgcgcagctacagagtccgatgggtcccgaaacctaaggggagggctcgcctgctcgagattccagtgcctccactaaaaagagttcagcgtaagttactggcagacctgcttaatcacgtgcccccgcatcccgctgtacatggctttcggcccggcagatccatcgtcaccaacgcgaccccgcactgtggccatgcaatcgtgatcaggtttgatctcaccgacttcttcgcctccgtacccgttggtcgcgtgcttgctctgttccttgccctcgggtaccgtgagagtgtcgcccgtctcctgtccggcctgtgcacaacacgactggcctcaaatgattggaacgaacgacccaatcccctgaatgacggatctgaacacgccacgagagccaggctgacatctcgccacctccctcaaggggccccaacttcgcctgccttagccaacctggtcgcattgcgcttggatagaagacttgccgggttagccgccgcttgtggggctacttatacccgatatgctgacgatctgactttctctggcggggagctcttgcggaggaatgccgctaggtttgtgcgcagagtgacgctgatagcggccgaagaaggattcgccctgaaccgtggcaagaccagggtgatgggtggcggaggtcgacagactgttaccggagtggttgtgaaccagcggcccaatgtgccgagggcggagttcgatagattgaaggccatcctgaccaactgcgtcagacacggccccgcagaccagaataggagtggacatcctgacttccgcagccatctggccggacgagtggcatacgtggctggagtaaaccctgttaggggcaggaaattgtgggccctgttcgaccggattacctggccaggcgcacatacatatccagcaagctga

SEQ ID NO: 12572 - RNA, 1383 nt, synthetic construct
  source 1..1383: mol_type = other RNA
atggatccccagcagaggttcgttaggaacatagccgcaggcatgttggcaggagagtggagtcgcgctggccttcgggatgcaattcggagagctacagggagagagtatcgatgggcttcgcctctagtgacacggctgctcgcggcacatatcgaaccaccaagctcaatcgccctgctcgacgtgctggtcagagatactaccttcgccggggtattagctaggcttgccggtgcccgaacagccggtgacaggtatccacggcgcaccttgtttgccgtgcctggcgaagccattcctcctgcccccacatggaatgctgacctgcctcgttgggacaccgaacacgattgtgcggatgccctaggcgttgccctccctcagttgctctggttggccgatcccaccggccgaaatccctacagacgggacgaaaccctgcgcacttacagggcacgctgggtgttaaagccacgcggcggtgcccggttattagaggtgccgaaacccctgctccgcaggacccagagaaggctggtcgacctgctcctcaaccgagtcgctccccatcctgccgctcatggattccgagcagggcggagcgcagtgaccaatgcagccgaacattgcggacgtgctgcggtgctgaggttcgacctcactgacttcttttcttccatcgtggctgggagaacttttggcctgttcagaaacctgggatatccggaacctgtggtgcggcttctgggcgcactgtgcaccacaaggttgcctagggcggtctgggatgtgcgcccacacccaacggcggatgggagtgactacccagcctgggtgagagtcaatactagacacctgccacaaggggctcccactagcccagcgcttgccaacttgattgcttatcgcctggaccgtaggttggctcgcctggctgctgcctgtggagcaacatacacgcgttacgccgacgacctgactttcagtggaggtccgggccttctgagggcagctaggggtttagcacggcgggtggcccttattgcggcagaggagggctttcgcgtgaaccgtggaaagtctagagcctacggcagaggaacccgacagaccgtgacagggatcgtaactaatgtaagaccgaacgtcacgcgcgcagagtttgatctcctgaaagccatactaaccaactgcacaagacacgggcccgccggtcaaaatagggctcaggtacccgacttccgagctcacttagccggacgggttgcccacgttgctggggttaatagcgtccggggcagaaaactctgggagctgtttgaccggatcgtctggcccgttgatgagtcttcatccatgatcgatctgaaggattcctga

SEQ ID NO: 12573 - RNA, 1329 nt, synthetic construct
  source 1..1329: mol_type = other RNA
atgccgaccttcgacgccgagcgattcttatttagcctcgctggtgggttaagggctggcgcatgggccgatgcggatctgagggcagccttgcgaggagctgcctctgatcggccggtaagggccccaggactagtgccaagactccttagaagattccacggaactcccgggtatggcgagctgctgttgttcctcgtgaatgaccctgggctggcaagagctgtggaccggctgacctggtcaagaccacagcccggcccagctaaaccagccatgggacaacctccgcctaggctgggcactctggcgattccagcgcttgctacagaggccgcattggggacatggctaggagtgggacccgaccgtctgcgatggctagccgacctgacaggccggaatcggagacacccacctgggccacttcgcacgtaccgccacaggtgggtacccaaagccgatggtcgcgccaggctgctggaaatcccaaggcctggcctgaagctggtgcagcggaagatactggctgacttgcttgatgcagtccctgcccatcctgctgcacacggctttagacccggtcgtagtgctgtcaccaacgccgccgaacattgcggtagggcggtagtggtgcgcctcgacttggcagatttctttccctctgtcccggccgctagagtgagtcggatttttcgcaccctcggctatccggatcccgtagctcgcctgctgaccggtctgtgcactactcgggtgccagcggatgtgtgggatacgcgtcccaacccagggcctgctgaccatcctgcgagggttcgctttgcaggtcggcatcttccccagggagcacccacatcacccgccttagctaaccttgctgcacaccgtctcgatagacggctcgccagactcgcaacagccgttggggcaacatacacccgctacgccgacgatctggccttcagtggcggcaatgccgttaggcgcggagctgcacgtctcgctcgattggtcgccgtcgtcgctagagaggagggcttcgccgtgaaccctgggaagacccgggtcatgaccagagccggacggcaaacggttactggcgttgtggtgaatgctcgccccaatttgccaagggccgaattcgaccgactcaaagccacactgactaactgtgtcagacacggtcccggaggacagaacaggggagggcacgcagactttcgagcccaccttgccggtcgagtggcgcatctggctgccgttcatcctggtagggggcgcaaggtgtgggcgttatttgaccggatcgcatggcctgcaggctga

SEQ ID NO: 12574 - RNA, 1332 nt, synthetic construct
  source 1..1332: mol_type = other RNA
atgctggaccgcacacgcttcctgttcgctctggcgggtgcatgcctgcgtgaaccttggactgctaccgggctgagagctgccttggacagagccgctgcaggacatcgcgtgcacgtgcctgggcttgcagccagaatcctggggcacttccctgagccaccgggatacggtgccctccttgcgtttttggtagccgatgccaggctcatgcgtgcactgaacagacccactggcagagccatcccaaaacggggcagacccgctatggacagccctccaccgagtttagccgcagtccagttgcccccacttgccacggaggtggccttagccgctcacctcaaccttgatccagcccggttaaggtggtatgctgatctgacgggaaggaaccgacaccacccacccggtcccttgaggacgtatcgccatcggtgggttgcaaagcctgggggacgcgctcgactactcgaagtccccaccttctccctgaagcgcattcagcggactatccttaccgatattctgaatcacgtgcctccccatcccgctgcacatgggtttcgacccggacggtctgccgtcactaatgccattgagcattgtggccgaagcgtagtgatgaagtttgatcttgctgacttctttccatcagttgccgccgcacgggtggtgaggctgttcagaactctaggctaccccgaagccgtggctaggttgctggctggcctctgtaccacaaggacaccagcggacgtgtggaaagcccgtccaaatcccgccgcggatggttccgaccatgtaagccggttgagactggttgcccggcacttacctcaaggcgccccaacatcgcctgcactggccaacttggccgcccataggcttgatcgccggctagcagggctggctaccgcaataggggccacatatactcgctacgccgacgatctgactttctcaggcgatatcgacctagcacgccgcagtcacaggctcgcaggtctggttgctgaagttgcttccgaggaaggatttgccctcaacgctcggaagacccgagtcctcaggcgtggcggacgacagacagtgaccggagtcgtggtgaacgccaagcctaatctgcccagagcggcttacgacaggctcaaagcgacactgaccaattgcgtcaggaaaggcaccgcttctcagaatcgggagaatcgggccgactttagagctcacctcgcgggtagagtcgcacacgcagcagcgataaacccggcccgtggtagaaagctgtgggccctgttcgacgcaatcgcttgggctgagcctccgccttga

SEQ ID NO: 12575 - RNA, 1386 nt, synthetic construct
  source 1..1386: mol_type = other RNA
atggcccagagcgcacgtggcaggttcgttgctaacctggctgcagccttagtcgctgggcgctgggaccgacgagttatgcgtgccgctgctgctgctgcagttggagggaagcccgggtggttggccccattagtaaggcgggtgcacgctgcctaccccgaaaagcctcagttcgacccggtgagggcttttctagagcgggaccccaccttggggagggtgattgaccgcgatggaccacctgctgtggtgagggtcttcgttcctcccgccgagatgcttccgcctcccactgcagccggcttggtggaacttccccagctgcccacagaagctgcactggcggagtggctgggcattacaccagcacgcctgctgtggcttgcagacgcctctggccgcaatcgaaaacatccccccgggcctctacgaacctatcaccatagatgggtaccgaagccaggcgggagagctcgtctgctcgaagtccccgtgcatctgctaaaagaggtccagcgggatctgttagagcggctgctcgatagaatccccccacatccagccgctcacgggtttaggccaggtcggagcgtggtgacgaatgccaggcctcactgcggcagatctgtggtgataagattcgacctgcaggacttcttcccaagtgtgtccgcggctcgggttagagctatttttcgtacattcggttatccggaagccgtggctcggctcttgaccggactctgcacaactcgcctccctgctgatgtctgggatgcacggcctaaccctgccgcggatggtagcgatcacccagcctggcaacgcttggccgcaaggcatttgcctcaaggagctcccacctcaccagccctggccaatctggccgcctttaagcatgatcgacggctctcaaaactggcagctgccctgggtgcagactacactcgctacgccgacgatctgaccttttccggcagtgttgagctcgcgcgtggcgcaaagagactggcaacccttgtggccgtcatcgccggacaggagggttttgcggtgaaccacagaaagacacgcgttatgaggagggcgggccgacaagaagtggctggagtggtagtcaatgctagacccaatgtgagacgggccgagtatgatgagatcaaagccatactgactaactgtgttaggcacggacctgcggggcaaaaccgcgcaaaccacccagacttccgggcccatctcacgggcagagttgcccatcttgcagcagtccaccctgcgcacggtcgcaaactctgggcccttttagtccggatcgaatggagagccgccaaggtagcaggaggcgaacaggccgagactgccaccgacaataacaggtga

SEQ ID NO: 12576 - RNA, 1353 nt, synthetic construct
  source 1..1353: mol_type = other RNA
atggcgaagaccgcccgcgggaggttcttggataatctggccgccgcgcttgttgcgggtagatgggatcggcgagtgatgagggctgctgcagttgctgcagtgggggggaaaccgcgttggctggctcctcttattaggcgcgtccacgccgctttcatcgataagcctcattttggaagggttcgggctgccctcgagcaggacgaacagctaattagagcagtagccgcggacggacctccaccagtagtacgcgtgttcgtgcctccggcagaaatgctacctccacccgccgctgctggtccagttgaactgccgcaattgcccacggaggcagcagtggccgaatggttcagtacagaccccggcaaactcctgtggtacgccgacccagctggcaggaatcgccaacaccctcccgggtttctgagaacatatcggcacaagtgggccgctaaacctggcggccgatccagacttatcgagatgcctaccgagtcactgaagcggcaccagagatggctgttaatctccatcctcaacaggataccaccccatcctgctgcgcatggcttccgaacaggacgtagcgtcgctaccaatgctggaccccattgcggcaaggccgtagtgattcgcttcgatctagccgactttttcccatctgtaagcgccgccagggtgcgagcgatttttcggaccttcgggtaccccgaggtggttgctcggcttctgacaggtctgtgcaccacgaggctgcccgcagatgtctggaacgctcgccccaatccagctccagacgggtccgaccacgcaacctggcaacgcttgaatgcccgccacttaccacagggggcacccacttctcccgctctggcaaacttggtggcctttaaactcgactgtcgcctcagtaagctcgcggccgccttaggcgcagattacactcggtatgctgacgatttgacctttagcggaggcgatgagctggcccggggatcaaagcggctggcaactctggtggccgtcatcgcagccgaagagggctttgcccttaatcatagaaaaacacgggtgatgcgaagggcaggtcgtcaggaggtcgcaggagtggtggtcaataccagacctaacgtcaggagagcggaatatgatactattaaggccatcctcactaactgtgttaggcacggcccagccggtcagaaccgtggtaaccatcccgacttccgggcacacctcactgggcgagttgcccacgtcgcagccgtgaacccggctagaggaagaaaactgtgggccatactggacagagtgacatgggaggctcatgaacctgccgccaggtga

SEQ ID NO: 12577 - RNA, 1320 nt, synthetic construct
  source 1..1320: mol_type = other RNA
atgctggacacaacactggccaacctgcttgatgcctttctggcagggagctggaccgaggatcgcctcgtagccagagcgaaagctgcgttgggccggtcgcataggtttatccgtccctttgtgcggagagtgttagcagcgttcccagctcctacccattccgatcgactcagggtattcgccctggccgacgaggagttcagaaaggggtggcgaagagcggaaccccatacagcaaagagattcttccctgtccccgtcatggctccacaccaagctgctcgcggatggctgatcccggagatcaccaccgcagagaaggtgtgcgaggtgctcaggatcgataggcaccagttggattggctggcagactgtgccggccgaaaccaccgtgagagctctcctaaactccaccactatcgttaccgctggattccaaaaccctccggccggagtagggtacttgagattcctaagccaattctcaagcaggtgcaacgtaacgtgctgggtcagattctggatgcaattccaccccatgctgctgcacacggctttcggattgggagatccatcctcacaaatgccgtgccccatagtgggagagccgtggtcctaaggtttgaccttgcgatatttttctccagcattagcgccgatgctgtcacagctatctttcggactgctggttatcccccggacgttgcccggcaactaaccggactgtgtactacgaggctgcccaaagccgtgtgggatcagaggcctagaccggccgcagatggaagcgactcactggaggagagacacctcagaaatcgccatctccctcaaggtgcccccacgagtccagcactggccaacctggttgcctttaggttggaccggcggctggacggactggctaagtctttagatgtcacctacactcgctatgctgacgacttggcctttagcggcggcatcgaccttacaaggcgctctgaaaaattccgcaacgcagttgcgcggatagtaagtgaagaaggtttccggctgaatccactgaaaactcgcgtcatgccacagtctgttagacagactgtggctggagtggtggtgaacatccgaacctcaatacctcgcgccgaattcgaccgattaaaggccgtcctaaccaactgcctcaggcatgggcccgaatcccagaatcgcgaagcccaccctaatttcagagcatacctggccggcaagcttgctcacgttgccaggttgaatcctactcgagggcgtaagcttttggcattattcgatcagatccggtggcagtcagcctga

SEQ ID NO: 12578 - RNA, 1344 nt, synthetic construct
  source 1..1344: mol_type = other RNA
atgtccaccagacatagtattgcacggaacctggctgccgcctttctgacagggacttggtcactcgacggcctagtccagcaaggcgcaagggcctgtggcaaacgagaacgatggttgaggccgttagctaggtgtgtcctagcggctttccctgggccacctgcaggtattgaccccgaggcactggccagatggatggaggagaaccctgtgttcaggactgcatgggccaaatatggcagggagggtcgctttcctcttggacaggtgttctgggtccccccgcggatgactcctagaaccggtgcaccagcaacctggagggtgcctcccttgaccacatctggcgcgcttgctgagtggctggggctgaaacccaaggagctggattggtttgctgactgtcatggcggggaagagaaactgcccccaggcccactgagacactatacttaccgctggttggtcggtcggagccggaagctgcgcttgctggaaatgcctaagcagcgccttaaagcactccagcgacgagtgctccacgatctgctcgatcatctcccctgccacgaagcagcacacggataccggaggggaagatccgttgccacatacgtggggccccacactggacggagaattgttctgcatcttgacctcagagattttttcccatccatccggtcgtctcgcgtgcaggccctatttcggaccgttggctacccctttccagtggcgcgcttattgaccgggctgtgcaccaacgtagtcccgggagaggtatggcacagcagccccgtgcgtggagaaccaggcgaatggaatcgttctccccactaccaggtcccacatctgcctcaaggagcccctacgtcaccggctcttgccaatctgtgtgcctaccggctggactgccggttgacgggacttgccagggccgttggtgctgcgtatacacgttacgctgacgatctggccttctcagggggccgcgatttggaacggagtactagagggttccaggtgcaggtagctcgaatcgcgctggaagaaggttttgaggtgcatacaagaaagacaaggtttatgcgccaaggcgttcgtcagcagcttgccggagtggtcctgaatgagcacgccaacttaaggagggaggagtatgaccgcttaaaggccatactcttcaattgcgtgagacacggccccggcctccagaatcgagaaggacgcccagacttcagagagagcctggctgggcggatcgcttatgtgcaaatgctcaacccttccagagggcgacgtctccgcgagctgttcgataggatcgcctgggaaaagtga

SEQ ID NO: 12579 - RNA, 1269 nt, synthetic construct
  source 1..1269: mol_type = other RNA
atggcaacttttcacgtggatcctgacttcgtggagcagctcgccgctacgttacgagccggcaattgggtgcggctggctctcaaaagcagggtgtggttcacattccccgacgatcgtgccctgaccgcgaaagtggtcggccaggtctgggagcacttcggaggtagccgaccctcactgaaacagctcactaagttcctcaagaaggctatcagcgcgctgccacacgaacccgaacagagggcagtacccgttgagccagcccctatgacggccagatggcccgtacctgtgctggcaacaccggtccagctcgcccattggctgaatgtgcctttgacccgccttgagtggctcgcagatattaaggaatggactctccggcaagccgatgcaaagctgaggcactacgtgaatgtctgggtgcctagaagaagaggcaaacccaggcttcttgaggcccctaagccccatctgaaggctatccaacggagaattctgcacgaaattcttgaccacatccccccgcatgacacagcccacgggtttaggactgggcgaagtatcgtctcctacgcaagaccccatgtgggaaagcaaatggtcctgcattttgacctaagggatttctttgcttcagtgtcggccgcaagagttagagctatttttagaactgctggctatcctgcagatgtagcttctctgctgaccggcctgtgtacaacccgaaccccagacgatgtgacggttgccgggattcactggaggcgacgccatttaccgcagggagcccctacttccccagccttcgcgaacttagcggcgcgtcgcatggacgtcagattgtccgccctggccgagaaacttggtgccacctacacccgctatgctgacgacttggctatctctggcggacacgaccttgagcgggcagttcgccgggtgaacgtactggttggtataatagcaggcgaagagggttttgaactcaacttccggaaaacacgttttatgcgccagagtgtttgccagcaggtggccggagtggtcgtcaacgtgaaaaccaactgtcgtagggaggatttcgatcggttgaaggccatcctccataactgcgctcggcacgggccagcctgccaaaatcgcgagcggcacccagactttcgccggcatctattggggcgagtggcacacctgaggcatttgaatccagctaggggagcccgcctgcaggctctattcgaacacatcgattggacaaggtga

SEQ ID NO: 12580 - RNA, 1371 nt, synthetic construct
  source 1..1371: mol_type = other RNA
atgaccgaatggaccttcgacgctgatgatcttgacgaagacgaagaggacgcagaccctcctcctggacccgcagagctgagactggcaagagccctggccctcgcctttctgggcactgatggaagacggcgcgccatgatcgaggccgcactagctaccctgcatgtgcctgatgaggcacgcgctcgggcttggataggtgcactggtggctctagttcggaggactttcgaccccctcaggagggccagcctggatgagctgaccactactatcgctcacgggcgcgcattagctcggagggatcgtggggtgcatgttgtgcgctgggtagccacaccgggcgaaatgagagccccgaggtgggatgtgccacggatcgacaccgttggagacttagcacgctggctggacgtggagatcggcgagttggattggctcgccgatagacgagcgatgctcgtcagagccagggttgggcccttgcatcactacgtacggacctgggtacctaagccatccggcggcgccagactgattgaagctccaaaggcccgtctggccgccatccagagaagggttcttcgcgaggtcttggagcgcgtgcccatgcacgatgtcgctcacggtttcaggcgtggccgctctgtggccacatttgtcgcaccacacgtagggcgcgccgttgtcgtacgggtggacttggaggacttcttcgctagtgtgacccggggccgggtgataggaatctttaggtctgcgggttatcctgaagaaattgcccgcactcttgcggcactgtgcacaacacgaacacccgcctccgaaatgagaggaatcgagcatgcagtccgcgcccgattacgtgtgccccacttaccccagggagctccaacgtccccagcgttggcaagcctcgcagcgtttcggctagacgccaggattgaaggtctggctcgagccgtcggcgcacgatgtaccagatacgccgacgatgtcgcactgagttttgagagggaccgcagccatggcgctattgacagagtgattgcccggattgctgagatcgcccgagaagaagggttcggggtggccagccacaaaacgcgtgtgatgcgccgaggggcgcgtcaatcacttgctggcgttgtggtcaacgaaaggcctgccgtggcacgggaggaatatgagcggcttagagctatcctccaccgggcagctacacgaggaccatcacccgatgagctgggtgcccacagggatctcagggcccatctggctgggagaatcgcctggatagcgcagtggtctgagaggagaggagcgaaactggctgctatgctcgctagaattgactggtcggcttga

SEQ ID NO: 12581 - RNA, 1368 nt, synthetic construct
  source 1..1368: mol_type = other RNA
atgacggattccactttcgatgattgggaagatgacgacgacgacccagaggacttaccgcccggcagacgtgcatggcgcttgtctagagccctggccctggcattcctgggcacagatggctcacgacgagcaatgatcgatgccgctttggcggccctcagagtgccccatgaagcacgcgcccgtgcttggcttggcggacttgtcgctctagtcaggcgtacctttgaccctctgccaagggcctcgctggacgagctcacaaccactatcgcccactctcgagcactcgcccggtacgatcgcgacgcagaaattgtgcggtgggtcgtaaccccaggtgcgcctctcgaaacacggtgggatgttccccggattgatacagtgggggaccttgctcggtggctggaggtggagatcggcgaactggattggctggctgatagacgcgctatgcttgtacgcgcccccctgggaccactgcatcactatttgaggacctgggtcccaaagcctagtgggggggctagactgatcgaggcccctaaaagtcggttggcgtccatacagaggcgcgttctgcgcgagatcgtggagaggatcccaatgcacgacgtggctcacgggtttaggcggggcagaagcgtggctacattcgtcgctcctcacgtgggaagggccgtggtagtgcgggtggaccttgaggatttctttgcaagcgtgactagaggaagggtgattggcatttttcggtctgcggggtatcctgaggaagtggccaggacactggcagcctcatgtaccacccgaactccgtccagagagatgagaggaatcgaacatgctgttcgcgcacgcctccgagtccctcatctaccccaaggagctccaaccagccctgccttagcatctctcgctgctttccgcctcgacgccagggttgagggtcttgcaagagccattgatgctcggtgcacccgttacgccgacgacatcgccctgtcattcgaaaggccacagtcccacgtagccatcgaccgcgttatcgcgagaatagctgaaattgccagagaggagggctttagagtggcaccccataaaacgagggtcatgaggcatggtgcgcgacagagtttggccggggtggttgtcaacgagaagcccgcagttccgcgggaggaatacgagcggctgcgagctatcctacaccgtgcagccattgaaggacccagggccgaagacctcgccgctcatagggatctgcgggcccacttagagggtcgaattgcgtggataggccagtggagcgagcacagacgggcaaagctggccgcaatgttggcccgcatagaatggactccctga

SEQ ID NO: 12582 - RNA, 1293 nt, synthetic construct
  source 1..1293: mol_type = other RNA
atgactagagcagatttagctgcgcgcgccatcgctgacgccttactcgatggcgagtgggcactggagcccatggttcagcgccttgggacaacttttggcgccagacgagcatggatgactaaactcgcccgtcgggccttgtcactttttcccagggctcctgccgatgcccgagatctccttgccagaaccgctagaactctacccggatttcccgcggcctgtcgagccagagtgagacactgggcgatccctgaaccacgaatgggccgagtcaggtggccagtgcctacgatcgaaacagcggcggacctttccgcatggctaggcgttgatgcagcggccctggctgtcttggctgacaggagagggttggcaagggacgcagacccgaagatgagacactacacatacgagtggatcgctaagaggaccggcggacggcgcttactagaggctcctaaacaacgcctgaaggccgtccagaggcgtatactgcatggtgtgcttgatgcaatacctgcacacgatgctgcacatgggttccgcgctgggcggtctgtcgtaagcttcgcccgcgttcatgtgggggctgctttggtgctgagagtggacctggaagctttcttccacagtgtgttcgccggcagggtttatggtatttttcggggggccggataccccgaagatgtagcccgcaccctgacagccctttgcacccacagaagcccgcgggatgtgttggctggtgccccaagagatctggttggcgatcgcccccggtccttacagcgccttcggacacctcatctgccacagggagcaccaacctcacctgccctagccaatctggccgccttcgccctggatgtacggctggacgcactggctcgtagttggggtgcgaggtattctaggtatgccgacgacttggtgttctccgggcgagtagcacagccccagaggcttgtggctgccatcgaccacatcgtgagggatgagggattcctgattgctcggcacaagactaggctcctccgtgcctcgacgcgccaagaaattgcaggcgtggtcgtgaaccaaaagaccagcgtcagaagagacgaggttgacaggctccgggccattctccacaattgcgcccgtaccggaccagctgcgcagaacagggacggacatccagactttcgggcccacctgttgggcagagtcgcttgggtggagcaggtgtctcccgacaaagcacgacggctccgggcactctttgatcatctgcgctgggacacatga

SEQ ID NO: 12583 - RNA, 1323 nt, synthetic construct
  source 1..1323: mol_type = other RNA
atgacatggctggtgagggagtttgcaggagcattgctcgcgggcccttgggagagacgtcccatgatcgcccggctggcatacgtgacgaacctccctgaagctggttggattgtgaaactagtggctgccgttctcaggaagcacggggagccaccggatcacgaagccctgaccgattggctctacagccaccgacctcttcaacgggtactggtcgatcccgaaattaggatcaggcggtggctggagcctccgttggagatggccgactctccctgggatgtgcctcccctgggaagtcgcaaagaactcgccacctggttaggtctggacgtgcagcgactggaggctctggctgacgagagagggcgtgtcagagaagcacgggaacagcggatgagacactatagatatacgtggatagcaaagagagcaggggggcatcgtctcctagaagcccccaagccaagactcagggcggtccagcggttagtcctggacgatattgtcgcaaaggtccccccccatgatgctgcccacggattccgagccggccactcagtagtgggctttgccgctgtccacgtgggccgtgaggtcgttatccgcgtggacctgcatgccttcttcgcctcagtttccaggccgagggtggctgcaatattcagatctgccggatatccccgggaaatcgccggagtacttgcagcattatgcacccatcgaactccaagagacgtgctggcggcggctccatcaagggagtggtccgaactggctaagttgcgcggggctcaccttccacaaggagcacctacttctggcgcgctcgccaatctggctgcctatcgccttgacgtgagggtagctgcacttgctgccgctattggcgcatcgtacactcggtacgccgatgacttggttctctccgggccaagagctttggctcgcgctgccagttccatcgttggccgcattggcgccattgcccatgatgagggctttgcactgaactttcggaagacccgggtcatgactgccagcgatcggcagaggatcaccggtctggtggttaatgagaaattagcagtgacacgagatgaagttgaccgcctacgcgccatcttgttcaattgtgcccgtacagggccagccgcgcagaacagagagggtcatgccgattttcgagcacacctgctgggccgcataagctgggtgagcgccgtggaccggggaaaaggagacagacttagggctctgttcgacagaatcaggtgggacgaggcgcctgctgatgccacagacgaggacgtgcgctga

SEQ ID NO: 12584 - RNA, 1233 nt, synthetic construct
  source 1..1233: mol_type = other RNA
atgaagtggttggagcccgcgctagcgcgtacagttgctgaggcccttgcggacgctcttcctggtagccgcgaagatcgagaggccagatgcctggacgtgttgggagcctgtgacgaggaagctctcgcaagcttattggaacgggtaccaccagcactgggctggcgtgcattggtggcctggatccttggcgatgacgcatttgggagactgctggctggcggagtcgctgttgaaccaccacgggccatggcaccatcccgctttgaggtcccttcattagatacggagggtgacttagcagcttggctagcggtgaccccccgagctctggaagccttcaccgaccctaccgatgctaccagacgcgcccctaggggtccgatgagacactacacgcacaggtgggttggcgctagactcatagaggcccctaagccacgcttgagagccatccagagacggattctgcaaggagtgctcgacgcagtgcccccccatgatgcagcacacgggtttagacgcggccgaagtatcttcacttcggcagcgccgcatgtgggaaaacccgctgtcctccgagtggacctcaggcgtttctttcagacaattcaccttgccagagttgtagccgtcttctctgccctgggatatccccgggcggtgagtcgagcttttgcacgcgtgtgtacacacgcagtgcccgacgatgagctggttgggcagcctttcctgactagacagcgcctccgcactaggcatctcccgcaaggggcacccacatcccccactctggccaaccttgctgctcacggcctcgacgtccggctttcagccttggctcgggcagctggactggcttataccaggtacgccgatgacctcgtcttctctggcgatgtggcccctggctttccttctcgggtggccagcatatgcgccgaagaggggttcccagtggccacagaaaaaactaggctgagaagggcctccgaccagcaacgggttgtcggactggtggtcaatgatcacctgggggtcgcccgtgtagaacgagacaggctgcgggccatcctgcacaactgtgcccggtccggcgtaaacgctgagaatcgcgcggggcatgccgatttcagggctcatctggagggccgcgtgagctttgtggagcaagccgatccaaggcagggtgcccggctaaggagactgttctgcaccattccttggtga

SEQ ID NO: 12585 - RNA, 1278 nt, synthetic construct
  source 1..1278: mol_type = other RNA
atgaagcggagggatccatctcgggatatcgccctagccgcgttaggggaaacatggtcaccagcggcaatagagggcgcattggccgacctcttcgcctcagaacaacgatggatgcgagctatggcacgtcgcatgacccggaggttcggtgaagctcccccccttgatgtgctggaggcttttgtgagggccgacagggaccttagacaggccagacgcctgctcgtccggcatccttctctggccatgccccctatgcctccttccagattcggtgcaccccccattgcgagcatgggcgatctggcgaccttactggaggtgccagtggaggatctggattggctagccgaccgcaggggtaccactcgtgacgctgaggctcctgtcagacactatcgggcacgctggatccctaagagaagcgtcggatggaggctggttgaggcccccaaagcccgactacgccgagcacagaggtgtttgttggatcgcgttctggcaagtgtccccccacatgaagccgctcacggctttgtgcctgggaggagcgttctggaccacgccagagctcatgtacgccaggccgtggttgtgaggctcgacctcgaggacttcttcgcctctgtgccagcagctcaagtgcgtgccgtgttccgtactgctgggtacggagaagacgtggccgtcgccttgacggctttgtctaccaccagaactccccctgccctgttacggagtccctgggtttcccggttcgaaacaagacagcggcttgctcatcgccacctgccgcaaggcgcaccaacatcgccctggatagcaaatttagctgcgtacaggctcgatctccgggtgtccgcactggcaagaagcctgggcgctacttacacccggtatgctgacgatctcgtactgtccggcgacgagggatttgcgagaggtgttgagaggctcctgccacgcctgggtgccattgctatcgaagaggggtttgcgcttcagcatcgaaaaacgcgagtcacacgtgccggagcctcacagagagtgtgcggtctggtcgtgaacgagggcgcaagagtaagccgccgagagagggagagactggaggccattctctttaattgcgtaaagcacgggccagctagtcagaacagaggagatcacccgcgctttcgggaccacttgctgggaaggatcgcctgggtggaacaggcacatgaaccgcacgcagctaggcttcacgcccttttcgcccggatcgaatggccttga

SEQ ID NO: 12586 - RNA, 1599 nt, synthetic construct
  source 1..1599: mol_type = other RNA
atggccgctgctcctgaacatgtggcacgggcaattgctgatgcttttctgtgtggaccgtggaccgccctaggcttaagggcgtctggtgccgaactctttgcacgccgggcccgatggctggatcccttaataagagcaacgctccgcgcatttcctgacccacctcgcgcaagcagagacgctctggcaagattcctgggtccccacgtcgagaggttgacagcccggcttgaaccacctcgctggccacctgtgcgtcgacgtctggtacctgcccccgcaatggccgaaagacgcaggtggcctgtgcgggagttggcaactaccgcagagctcgctcgctggttgggcctgactccaggcgaactggattggtttgctgataggcatgggaccgctgccagggcagttgaccctcgtctggtgcactatagagagacgtggatccccaaacgctccggggtgggtgaacgcctactcgagatcccccgcccccgactaagagccatacaacgcgctatcctggacgaaattctggtggccatcccacctcatgcggccgcactaggattccggagaggacggagtgccttagatcacgcgtccagacacgcagggagggctgttctgattagactcgacctggaagacttctttgctgccacaccggctgggagggtatacgggacattcagagccgctgggtaccctgctgaagtggcccttaccctcacccggttgaccacccgtagagccagtcccgatgcgcggagaagagcgcgaagatggaccccagcgcatggggatggatctggaggcacactccagagcgaaggcggtcggacaagcggacgccttgctgctgctcacctgcctcaaggaagcccaagctcgcctgccctggccaatctggcggcttttcatctggacgtccgtttagccgcactggcagaggccataggtgcccgatactcccgctatgctgacgatttggccttctccggcgaagacacacttgagagggcggccgagaggcttctcccaaggatcgccgccattgtcatcgaggagggcttccggccgaggttccgcaagactaggattgagcgggccactgggcgtcagacccttatgggcttgacagtgaacgtgcggcctgccgtcccaagagcagaacgtgagcggctgcgagccatcctcactaactgtgtgaggcacggccccgcatcacagaatagggagcggcatgcagacttcagggcccaccctaggcgagcacgggatgttggtcgggctagggagagacgatcaagagctgccgctgctcacgccgctagaagggatcggctggacgcgctcagtcagaccgaagccactcagcaggagcctgccccagcttgcggagatccatcccgcggtgatggagcacccagagcgacgaagaccattggcgccacaggtgtcccatctcccgttgccgggtcttcagaccgagacaggtcagaccggaggtgcgacaccgagacttgccgatggagaggcactcgcagaccctatccagcaggtgggagggccggaacttgtccgacagagtga

SEQ ID NO: 12587 - RNA, 1329 nt, synthetic construct
  source 1..1329: mol_type = other RNA
atgtctcctaccatagtggccgacgccctagccgccgctttcttagatggcgcctggtctgctccagcgcttgccagacgaggggcacgtgctctagggcagagcacgaggtggctgccggcattagccaggagggtagtcgctgctttccccgatggcgcacccagggatcgatttgaagccctcgccacattgcttgcccgagacgcagcagtgaggaaagctggaaggcccgatgctccctggcggctagtcattacagctccaaccctggctatgcgagacgcccatccagaatggcgccttcctcgcctccatactgctggggacttggccacctggcttgggctggaaatcggcgacctcctgtggttcgcagatacacgtggtttgtcccgccgtcggagggctgtggcattggatcattatcaccgacggtggctgccaaaaaggtccggcggagccaggctagtagaggcacccaagcgctggctgaaggaggtgcagcggagaatcctgagggagctcgtggaaagaatacctcctcacgaagccgcacatgggttccgccgcagaagaggagttctgagccatgccgcccttcacgccggaagggatgtggtcctgcggatggacctggaggacttcttcgtgagtattccggcttcgcgggtgtttgcggtttttcacgctgctggctaccccttggaagtcgcgcgcctgcttaccggtctgtgcaccacaagagcccccagtgacccaggcgctccaatgcctgccacgcctaccagggcagagttagaggcacggcaccgcgcaagagagcgatacgccgagagacacctgccacaaggcgctccgacttcacccgctctggcaaacctctgtgcttggcggttagacgtgcgcctcagcgcagctgcaagaactgcgggtgcagtttacactagatatgccgatgatctcgtgttttccggagacgatcggttcgccagatggcctgcggccagatttgcctacgtggtgggcggaattgccatcgaagagggcttcaatgtccagcaccggaagaccaagctcatgagagcggggacacggcagcaggtcacaggtctggttgtcaataggtcagcggctatccctcgacgcgactttgagagatataaagcgattctccacaactgcgttctgactggacccgatcggcaaaaccgggatggccgaccagactttcgtgcccacctggaaggagtagtggcctgggtgacccatgtacagcctgcacgtggggccaagttggccaaactgctggacgccatccgctggtga

SEQ ID NO: 12588 - RNA, 1329 nt, synthetic construct
  source 1..1329: mol_type = other RNA
atggaccgtcgtatcgttggcgaagccctggccgctgcctttctcgacggaacgtggagcccccagccaatggctagacggggtgccagggccataggaagacctggccggtggttacctgccttagcgcgccgaactgttgaggcgtttcctgaaggtcccccggtagaccgctttgaggacctggccaggtccctggctgaggacaaggcagtcgtgcgcgcatgcgctactccagccccttggcatttggctttcgtggcccccgcactcgctatgagagatgcacatccctcttggggcttgccaaggctcgacacagccggagatgttgccgcttggctcgggctggatgttggcgacctgctgtggttcgccgatacgcacggtttagcccgacacagacgggatcctcgcctggaacactatgtccgccgctggctgcccaaaagaagtggcggcgcgaggctggttgaagcaccaaagaagtggctgaaggacctgcagcggcgaatcctgcacgaacttgtagaaaggattccaccacacgatgcggctcacggtttcaggcgggcccattccattctgacacacgcggcaagtcacgccggacgagaggtggtcttgaggatggacctggaggacttcttcgtcagcatcccagccgccaggattttcgctatctttcgggccgctggatatcccgcagaggtggcacgccttctgacaggcctctgcactacaagctcaccccctgatgccggagctcccgtttcggcagctcctaccgtggccgaactgcaagcgcgtcacagggcacgagctaggtacgcctcccggcatctccctcaaggtgctcccacctctccggcgctagctaatctctgtgcctatgggttggatgtgcgcttaggggctgtcgcccgatctgcacacgcagtgtacaccagatacgcagacgacctagtgttctcaggcgatgagagatttgtccgctggcccgcgaagagatttggcatacttgtggctgggattgcacttgagcaaggattcaccgtgcagcacagaaaaaccaaactcatgcgcgccgctactagacaggctgtgaccgggcttgtcgtgaatcgggcaccgagcatccctcgtcgggatttcgagagatacaaagccacactacataactgtgtaaggtttgggccagagagtcagaacagagagggccatgccgattttcgtgcccatctggaaggggtagtggcctgggtgcggcatgtgcagccagagaggggagcacggttggcacagttgctcgacgccgtctcctggtga

SEQ ID NO: 12589 - RNA, 1332 nt, synthetic construct
  source 1..1332: mol_type = other RNA
atgcgccatgaaaccctggtcgtccaggctgtagcgtccgccatgttagccgatggcgcgtggtccagtgctgacctggttacacgaggggcaatggtattcgacaagcgaccacggtggatggtagccgccgtgagcgcagtgatggctacccaccctaccagggagggcgtcacagtggccgaactcgtggccctcctgtcttctcgtcccggcgtgatgcgcgccatcagacgagcacacgctgtagtcaggagatgggctatcccgctcgtcacacttgttcccccgagatggcctgtgcccgcgtttgcatcagccaatgcccttgcgtcgtggttggagctgtctcccgccgagctcgcctggtttgcagatgtgaaagggctagggagggatccagagcttgacgagcctcttcggcactaccgcgttcattgggttccgaagcgacgcggtggagttcggctcttggaggcccctaaaccacggttgcgcgatatgcagaggaggatgttacgcgagatactcgacgccatcccacctcacgatgctgctcatgggttcagacgcggtagggatgcacggtcacacgccgcactccacgagggacaagctgtggttctgcgagtggacttagaagattttttcctgagcattagcctggctcgcacggtggcaactttcagaagtgccggctatactgacgacgtggcacatctgctgggcaggttgtgcacacacagaactaacgcctcatgtcccttgccagtgctcggagcctacccaaccgaggcagacctgagagcccgtagaaatgcggaacggctggcgagggcactgcatctccctcagggagctcccaccagtcccgcagtggcaaatctgtgtgcatatagactagacgtcaggctggaagcagccgccgccagtgtaggtgccacctactccaggtatgctgacgacctggtgttctctggcggagaagacttcgctgctagagctcacagatttgccgccctggtgggcggcgtggtcttagatgaagggttccgggtgaaccaccgtaagactcgcattatggggcgaggtgccagacaactggtcggaggtttggtggttaacgctcatgcccaggtgccccgcgctagcttcgatacggtgaaagccatcgtccggaattgcatacagtacgggcctgcgtctcagaaccgtgactcccatcctgattttcgggctcacctgaggggccttgttggctgggctggaggagctgcagatagcccacggagggcgaagctagatgccctttttcggcagattgtctggtga

SEQ ID NO: 12590 - RNA, 1335 nt, synthetic construct
  source 1..1335: mol_type = other RNA
atgaagacaaaggttcccgaacgagtggccgaggctctcgcctcagcgtttttggcgcacggagcatggactcgcgacgccttagctgaacgcggcagagtgaccctcgccgaagatgcccgctggatgcgaggagtcgtggatcgcgttttggctacattccctgagcctcccagggcacgtttttctgccctggcacggtttattgcatccgtctccattgctgcacccagagagcgtcgagcccccagatggaggcctaaagtcgctcgctggctggagccagagatagcgatgggcgtgagaagatgggacgttccagctattgctactcctggagatcttgccaggtggctgggacttagcccggctgagtgcgattggtttgctgacggcagaggtctagaacgactgcgtcgccccgaggccctcgatcattatcggaggcggtgggttgcaaaacggcggggaggctttcggcttcttgaggcgcctaaggcgcggacaaaagccgtccaacagcggatacttcgggaaatcctagacagagtgccggctcatgacgccgcacacgggttcgtcagagggaggtcagtccggacccatgccgccttgcatgtggggagagcagtggtcgttcgcctggatctggaagacttctttctcagcatcagtgccgctagggtagccggcgtattcagagccgccggttacccggacgacgtagcatggtctttaacgctcctctgcacaaatgtggctccacctagcggcttggtgctgggacgggatgctacccacgacgatgtcgcacgactgcgcagggccgaaatgagggctcgaacacgccacctgccccaaggtgctcccaccagtccagccctcgccaatctgtgtgcacgtggtcttgatgtccgcctgacggccttggccaccaaattgggggcagtgtacacaaggtacgcagacgacatgactttctcgggcgacaggcgtctggcaaggtccagctctcgactggaggcttgggcgtctgctatcgccagtgatgaaggcttcaccgtaaatcacaggaagtcccgggtgatgagagctggcgtgcgccagttagtgactggggttgtggtaaacactaggctgaacgtggcacgagatgcttatgaccgcctcgaggcaaccctgcacaactgtcggaggctgggccctgggtcacagaacagggatgggcatccagacttcagagcccacctagttggtagagtggcccacgtgaagagcctccatccagccagaggagagaagttagcggccctgctggagcagatcgcctggtga

SEQ ID NO: 12591 - RNA, 1335 nt, synthetic construct
  source 1..1335: mol_type = other RNA
atggccagctacttggagcacgtgtccagagccctggggagtgcctttatgatgggtccatggactcggttggcattaatgggcttgggggagcgcgtactaggagagcgacctccttggttaggaggcctcgtctctcgcacactgagcgcactgccggaacctccacccactgttgaggccgtagccgccgtgttacgggaacaccgcgccttcaggaatgcctttgcggaccaggctagtcgcccccgtgttaggcggtggttacacgctccaccgagcgctcctgcagaagcaccttggccggtccctccactgaggacatttgacgacctcgcgcgtcatctcgaattgcctgatgagcagctgtcttggcttgcggatcctcggggggtactgcgtagagcaccttccgagcgcctgcaccactaccaccgagactttctgcctaagcgggccggaggacatcggctggtggaaacccccaaacctcgcctgaaggcagtccaacgacgtctccttagaaccatattcgatcacatccccccccacccctcagctcatggctttgtcaaggggcgaagccccattacacatgctggccagcacgcaggacgtgccgtggttctgaggctcgatctggaggacttcttcacgtccgtgacctacgcccgcgtataccgcgtgtgccgattcgcagcgtaccccgacgaggtggcaaggcttctcgctggcctgtgtaccacaagcctgccacccccaatctggagaagggcacctcggcctgatcatccggccgatcttcccgcctatcagaggcaacgggagcgcgctcttaggcggcatttgccacaaggggcccccacatccccatctctggccaaccattgcgcttcaaggcttgacaggagactccatgccgctgcggaaagggctggtgcccattattcgcggtatgccgatgacctggtgttctcaggcgatgacggctttgcccgaagtgtgactagattcattccattcgcagccgctattgcaatggacgagggtttcgtggtcaacttcagaaaaacgagagttatgccccgcaacaggaggcagcaggttgctggcctggtggtgaacgctcacccaaatgtctcccgccagacctatgaccgactaaaagcgatcctgactaattgtgctcggcacgggccagcaagccagaatagagacggtcaccccgattttagatctcacctaagagggttgatcgcctggatagatagtgtggcaccaaagagaggagctgaactccgggccctctttgaggccatcgaatggaagggctga

SEQ ID NO: 12592 - RNA, 1329 nt, synthetic construct
  source 1..1329: mol_type = other RNA
atgactctggatgacgtggttcgcgccttcgctggagctctcctggctggagaatggaccgagtccacagtccgggaaagagcggtagaggccctcggtgccaagcctagatggctctggcccctcgttagacgggtggtccgattagggagcccccctcgtagaaggcaggttgaactagccatccgagcctcatctgccttcgtgggagcatggaagcgggggctggtacagcccaccagagcacttgaagtccgtgctgtcctgtcctcgccacgaatgggtccagttcgctgggccgtgccatctctgggaacagagggggaactagcgaggtggttgggactcggcgtcagcgacctattttggcttgcggatcccctcgctggggaacgaagggctcgagtcgagcgcatcaggaattacgtgtatacctgggtgcccaagaggtcaggaggggtgcggttgattgagtctccgaagcctctgcttaaaacgctgcagaggcgtatcctgcgcgaaataattagtctggttcctgtgagtgacagtgcccacggctttgtgctgggaaggagcacgctgacccatgcctcatcccacatttcacagcgggtggtgttgcgcttagacctgcgcgacttcttcagtactgtgtccgcatggcgggtagccgccgtatttaggaccgccgggtatcctgagaatgttgcacgcttgctcgcaggcttgtgtaccaattccgctcccgaagcagtattacagctcgctggcccgagcctgtcacgctttcagaaacaacggctcagatccgcccatgtgcctcaaggcgctcccactagcccagctgtggcaaacctctgcgcttatcggcttgatcggcgcttggccggccttgcaagagttagcggcacaatctacactagatacgccgatgatctggtcttttccggcgatttcactagaagtaaggattttgaccgcccaaggcctagcattgataggttcgtggcgagggcccacgctatcgtcctggaggaaggcttcacaccacattttgagaaaacacgtgtgatgggttgcggccgtagacaggaggtcacgggaatagtcgtgaacaggcagcccaatgtgagccgggcagacctggaagtttttgaggccaccctgtacaactgtcggagatctgggccgtctacacaaaaccgaactgggcacccagacttccgcgcacaactggcgggcagattaggttatgtggagatggtgttgggtgagcgggcccgatggctgagaacccttttcgagcagatcgactggtctaggtga

SEQ ID NO: 12593 - RNA, 1182 nt, synthetic construct
  source 1..1182: mol_type = other RNA
atggcaagaacgctgtcacgcaggccgccacccatggaagcggacagagatttcactgagcggctcgcaagatttccaggagcgaaagaggctgtcctgaagagactgccgatacgccggtggttcgtggtgactcctgttcaaagacccggccgatggcccgtacctctcctaccaacaccctccgatctggccaccgcactaaggctcgacgtcgatgccctggattggttcgccgacaacagaggcttagaggctcacacccggagcagagctctgcggcattatcattacagatggttggcgaaaccaaccggtggggccagactggtcgaagcacccaagggacgcaccgtggatatacaaaggtggatcctgcgtaaccttcttgactctgtaccaccccacccggccgcagtagggtttcgaaggggattctccacactcgacgctgccgctcctcatgtgggcagggaggtggtgctcagtctggatctggaggacttttttgctagcgtctctgccgcacgagttgccgctacattcgccgccttaggttatcctcggcccgtggcgtattgcctttcaggcttgtgtaccacaagagtgcccgccgccattttagcggaacagcctcgaggtggcgacctgcctgctgcttggaggcagaggcggaggctgagagatgcccacctccctactggcgcccctacttcgccagcccttgccaatctcgctgcctttgccctggacacgcgattggctgctgcagccgcagctgtgggtgcaacctacacacggtacgccgacgatttgagctttagcggagacgcagaattctcccggcgggctaggcgcttctctgtcttggtgggggcaatcgctattgaggagggatacagggttaatctgaggaaaactcgtcttgccggaaagggcgctcgccaggaagttgtgggggtcgtggttaacgtcaggccagccctcgctcgtgaccgttgggatcggctacgggccatcctgcacaattgccaggttcatgggcccagtacccagaaccgcgacggtcacgaagacttccgcgcatggattaccgggacagtggcggcagccagagctatcgatgcaaagcgagggggccgcttgcttgagatgctggccggagtggattggggccgctga

SEQ ID NO: 12594 - RNA, 1326 nt, synthetic construct
  source 1..1326: mol_type = other RNA
atgaatagatcggaccggacaagtttagcccgagacttggcagcgacattcctcgccgggccatgggagcgaagggaaatggcaagaagagccgccgcaagcttcggcctccctagatcccctagatggctcagcactctagccagggaggtggtcagggtgtttggtcccgatcccccacacggacgggatggtaggatcgctgcactgatagccccccgcctaagacccttgagacgcgcaggaatcgctcgcaggccagcactggtgcatccttgtctcgtaccagcacgcatggggactgcagctgctcccgtgctgcgtgaacggggattgcccgaagttgccacgcccggtgaattggcggcatggcttgggctcgaccgagatcggcttgcttggctcgccgatgtccggggtctgagtaggcggactcatgatgggccactggtgcactaccgttacaggtgggtgcccaaaagatctggcggggcgcggttactggagatccctaagccagatctggccgcggcccaacgcaaaattttacgcgagctgctggaccgagtgccaccgcatgcatctgccgtaggcttcagaaagggccgcaatgtccttgatcacgccagcgcccacgcaggtgcagctgttgtgctgcgcatggacctgggggactttttcgcctcagtcgccgcaactcgtgttcacgccatctttgttgccctcggataccccgccgccgtctcttcactgctgacaggcctgtgtacccatagaacatccatgtttgtgcgtcatgcgtccaccgaccacgctgcttggtcccgtcttagggagagacatttacctcagggcgccccgacgagtcctgctctagcaaacctggctgctttcggcttggacgttaggctggctgctttggctagcaaggccggagccgcttataccaggtatgccgacgaccttgcattctcaggcggtaccggatttgcccggtctgcggcagccttccatgtccttgcttgcgctattgtgatagaagagagctttgcgccaaaccctcggaaaacccgcattatgcgggcctcaagccggcagcagattacaggcctcgtcgtgaatgcgaagcctagtctgccccgcgacgagctggataggctgaaggccaccctgcacaactgcgtagcccacggacctgcatcccagaaccgcgatggccgggctgatttccgagcatggctcgctgggaaagtggcctgggtggcctctgtacacccggctaggggagctcgattgcgagccatgctcgagagaatcaggtggtga

SEQ ID NO: 12595 - RNA, 1329 nt, synthetic construct
  source 1..1329: mol_type = other RNA
atgagcgaaagaaacgttgtggctaaagccctggcctcggcttttttggctgccccatggactcgcgctggactgatcgctaacggcgccgaagtcgtaggggggagatttccatggcttgcaagcttagcacgcagtactttacgattcttccctagaccccctcacgaccgcctcgaattgctggcggaaatccttgccacacgaccagccctgaaacaggcttgcgccaaccctaccgctcctgtgaggcttctgaggtggctaacagccgaacctcagatgggcagggccccatggccagtacctgctctgccaacgcaagctgatctcgcggcatggcttggagtgacagacgcccagttggactggctggcggacggaaaaggattggagcataggacctccccgggtaggtggaggcggtatggctacacctggattcccaagcggtcaggtgggcaacggctgttagagcagccgggggaagagctggccagacttcagagaaaggtcctgcattgtatactcgatcggatacccccccacgaagcagctcacggcttcgtgaagggaaggggcattcggggtttcgtggagccacacaccaggcaggcggtcgttgtgcgtttggatctggaggactttttcctgtcagttcgtccgccccgactgtggggcgttttccgtgcagcgggatatcccgatggcgtagctggcgcgcttgttggcctctgtacaaaccggacccctggagccgttgtagcccaagcacgcaaacccactcacgcccaggaggtcgagagcagatggttgctggggcggcgtctcgagagcagacatctcccacagggggcccctacttctccggcactggctaatctggccgcctatcgactagacgtccgcctgtctgctcttgccggtgtgctcggcatgcgatacacccggtatgccgacgacctggccttttccgcagacgcagcaagacccggatccattcggcggctcctgagatccgtgcgcaggatcgtgcgtgatgaggggtttacggtgagagaggataagacacgggtgatgagtaagggacatcagcaatggctggctggggtggtggtcaatgagcatcccaatctacgcagggaagattacgaccggctgaaggccgtgctgcatctctgcaggaccagaggccctgcctctcagaatactggcggtcacccagacttcagggctcacctactcgggcgcatcgcatgggtcacatacctccaccccgccagaggtgcacgcttacgagctttgtttgatcgcatcgcatgggattga

SEQ ID NO: 12596 - RNA, 1329 nt, synthetic construct
  source 1..1329: mol_type = other RNA
atgagtggacgtacagtggtcgccagagctctcgcatctgccttcttagccgccccctggactgtctctggcctagtggccaaaggaagcgaggtggtaggcgggcgcttttcttggcttaggagcctggcaaggtccgtgttacgcttcttcccccgccccccacacggaagactcgaactgctcgccgaggtattggctacacgggccgctctgaaacaggcctgcgcaaatcctgaagcgcccgttagggtcgtgcggtggctaactagcgagccggagatgggtcgacaaccatggccgatccctgcactgagtactcaggccgacctggctgactggcttaaggtcacatccgcgcaactggattggctcgccgacggcatgggcagagagcacaccagttcaccggggcgctggagaagatacagatacacctggattcccaagcgttccgggggcgaaagactgctggaacagcctggtgaggaacttgctaggctccagaggcaggtactgcacggcatattagatcggataccacctcatgaagccgcttatggctttgtgaaggggcggggcatccggggttttgtggaacctcacaccgggcaggcagttgtgatgcggctcgatcttgaggactttttcctgtctgttaggcccccacgagtttggggggtcttcagggcagctggttacccagacggagttgctggtgctctggctggattgtgtaccaaccgaacacctggcgccgtcgtggcaaaagcccgcagagctgatgacgccagaaaggtcgacgccaggtggctgcttgcaaggcgattggaaagtaggcacttgccccaaggtgcgcctacgtccccagccttggccaacttagcggcctacaaacttgacgttcggctgtccgccttggctgcagctctcggaatgcattatactcgctatgccgatgatctcgcgttttcagggtcagatgcaagggcaggaagcgcacaccgcttactccggtgcgttcggagcattgtgcgggacgaggggttcaccgtcagggaggataagacgcgggtgatgcatcagggccatcagcaatggttggcaggggtggtggtgaatcagcacccctcactgcgtcgcgccgactatgatagactgaaggcgctgctacatctgagccgcacccgaggacccaactcgcagaatactggaggccaccctgactttcgcgctcatctgctgggcagaatcgcttgggtaacacacctgcatccagctcgtggcgccagactccgagccattttcgagcagatcgtgtgggattga

SEQ ID NO: 12597 - RNA, 1329 nt, synthetic construct
  source 1..1329: mol_type = other RNA
atgagtaaacgcatagccgtggccaatgcactggccagcgctttccttagtgggccctggaccaccgcgggattagtcgagagaggcgctgaagtgatcggagggcgcaccccatggctgcttagcgtcgtccggagcacacggcgatttttcccccgtccccctcatgcccggtttgaactgctggcggagatcctggcgaccagaccagccttgcagagggcttgcgggaatccccatgcccccgtgaagattttgcactgggtagccactgaacctgagatgggcagacagccctggccggtaccttccttgccgacccaggcagagctgactgactggctgggcatgactgatgctcagctcggctggttagctgatgctcgcgggctcgaacgtatgacacccccagggcagtggaggcggtataggtacacttggatccctaagagatcaggcggtgagaggctgttggagcagcccggtctggatctgtctcggttacaaagaaaagtgcttcatgggattctcgacgtgatcccccctcatgaggccgcctacggattcgttgcgggacgaggcgttcgcggctttgccgaaccacacgtgggccaagccgtggtggtgagggtggacctggaggactttttcctctcagtcaagccggctcgtgtctggggaatgtttcgggcagccggatatccagacgatgtggctaccactctggccggtctatgcacaacacgtacgccatcaggagttttggaacaggcccgcagagcagctgatggggaggctctgacagcacgatggaggctggcacgtcgacttgaaagccgccacctggctcagggtgctcctacatcccccgcgctcgcaaaccttgctgcctacagactcgacgtcaggttgagcgccctcgccagtgctcttggtgccaggtatactaggtacgctgacgacctagccttctccggcggcgatgccctagcaagatccacagggaggctgctcaggtgtgtcgcccgaatagttcgggaggaaggattcacggtgcggaccgagaagacgcgcgttatgagacggggtagacaacaacgcctggccggcgtggtggtaaacgaacacccatctgttccacgagcagactatgatcgcctgaaagcgattctgcacctctgtcggaccaggggccctgcatctcagaacactggatctcaccctgagttcagagcccatctactcgggcgggtggcttgggtatcgcagttaaatcctacccggggcgcaagactgcgcgcaatctttgagcagattgcatgggaatga

SEQ ID NO: 12598 - RNA, 1350 nt, synthetic construct
  source 1..1350: mol_type = other RNA
atggcgttaggggattccgcggtgagcaaccggcagtcagtcgcttcagccctggccagtgcttttctggctggcccatggacctatgagggtatggtagaaagaggagctcacgtggttggaggacgggccccttggctattggccgtggtgaggggtatcaggcgcttcttcccccaccccccagttgctcgcatggagctcctgacagaactcttagcgacacgcccagcactgattaaggcctgccgcaatcctgctgtcccagtccacctgcacaggtggctcattcccgagcccagcatgggacagaggccatggcctgtgcccgaactgtctactcaggccgaggtcgctcgctggcttggagtgactgatgcccagcttggctggcttgctgacgggtctggatttgaacggactagtcggccagggcaatggcggaggtaccgttacgtgtggatcccaaaaagagcaggcggtaagcgcctcctggaacagcctggcgttgacctcggtcgcctgcagagacaggtgctgcacgggctgcttgacctgataccgccccatgatgccgctaggggattcgttcgtggccgaggcgtgagagattttgccgaacctcacgtgggacaagcggtagtcgtacacatggacctggaagacttctttcattcagttcggccctctaaggtgtggggagtattccgagcagcgggctatcctgactcggtgacagaggtcctggcaggcctgtgcacaaatagaactcccggtaccgttgtagaggaggcaccccgagccacccatttaggggagcagaaagccagatggcggatgaccagaaggctcacggctagacatttgccgcagggtgcccctacttctccggccttggccaacctggccgcatatcgcctggacgtgaggctgtccgctcttgccgctgccttgggagctcggtatacgcgttacgccgatgaccttgccttttccgggggcgcatccttgttacaacgacctctccggctcgtccgatgtgtggcagcaattgtcagggaggagggcttcgccatcagagccgataaaacacgggttatgcatcaggggcagcaacagagactggccggcgtggtggtgaatgcacaccctactgtgccaagagaggactacgaaaggctgaaggcagtcctacatctgtgtcgtacccgcggccccacaagccaaaacaccgaggggcatcacgatttcagagctcacctactcggccgcatcgcgtgggtcagtcacctccatccaagcaggggggcaaggttgcgggctacctttgaccgaataacctgggattga

SEQ ID NO: 12599 - RNA, 1335 nt, synthetic construct
  source 1..1335: mol_type = other RNA
atgtcaactcgccacccggtcgctgcagctttggctagcgccttcctcgcagggccatggacaagggctggccttcgagaacggggcgcacatgtggtcggtggaagacccaggtggctggtgcctgtagtccgtggcatattgcggtactttcccaggccccctcacgctaggttcgagctgctgactgagctgctcgctaccaggccagcgctgattaaagcttgtggcaacagcgctgagccaattagaattcggcattggctggacgtggaaccgcagatgagcaggaggccgtggcctgtacccgagttgaccacccaggccgctttagcccaatggcttggcgttaccgatgcccagctcggatggcttgcagatggctccggtttcgaacgaacaagtcggccaggacagtggcgccgttaccggtatgtatggataccaaagaggactggagggaaacgcctgttggagcaacccggtctggacctggcgagactccagaggaaggttctccatgatatcctggatgttatccctcctcacgcggcggctcggggatttgttagggggctgggcgtgaaggacttcgctgaacctcacgtggggcgggcagtggtagtccgagtagatctggaagacttctttcacgcagtgcgacccgcacaggtctggggagtgttccgcacggccggatatcctgatggtgtcgtgaacgcgcttgccgggctgtgcacgaatcggacaccaggagccgtcgtggaacaggctagacgggccgagagtgcacaggaacttgacgcctgctggcgtctgtcccgcaggttatctgccagacacctcccccaaggcgccccaacttcaccagccttggccaacctggctgcatatagactggacgttcgcctgtcggctctggcagctacactgggggcacgctatactcggtacgcagatgacctagccttctccggcgacgaggtgctagccagaagggtccgcagactgttaacttgcgtgacacgcatcattcgcgatgagggctttaccgtgcggcaggggaagacaagagtgatgcaccaaggccagcaacagcgtctcgcgggcgttgtggtgaatgcccatccgacggtcccccgagaggactacgaaagactcaaagctgttctccacttatgtagaaccaggggacctgagtctcagaataccgagcagcatcccgactttagagcccacctattggggcgcatcgcctgggtggaacatctccatccagccagaggtgcccgtcttcgagccacctttgagcggatcccttgggcccccgagtga

SEQ ID NO: 12600 - RNA, 1332 nt, synthetic construct
  source 1..1332: mol_type = other RNA
atgtctgagcggcgcgtagttgcccagggtttggccagtgcctttctggctggcccttggactctgaagggactcgtcgagcggggtacagaagcagtcggcggtcgagcgccttgggttcgatctatggccagaagtgcgatgatattcttccccagaccccctcatgcacgtctggagctgcttgccgaggtgttggcgagcaggcccgtgtttcccaaaggattcgccgactcctcgggacgggctaggatcgtgcgatggctgacatcagaaccgcgaatggataggcagccctggccagtcccatccctccctactcaggccgatctggctgactggctaggcgtcacgggcgcacaactcgattggctcgccgacgcccctggcattgaaagaaccagcaaacccgggcggtggagacggtatagatatacttggatccctaagagaagcgggggagagaggctgttggagcagccagggctggatctgatgcaggttcagcggaaggtgctgcacgggattttggaccgcgttccaccacatgacgctgcgcacggctttgtcgccggtaggtctgtgagaagctttgtagaacctcacgccgggcaagccgtggtcgtacgtgtggacctggaagatttttttttctcagtgcgaccagcccggatttgggccgtcttccgaaccgcagggtacccagacggcgtgactaacgcacttgccgggctgtgcaccaatcgcacaccgcaagccgtgttggcacaggccagacagcccgagagtgtaagcgaggtggatgcacggtggagactggctaggcgcttggaatcacgccatcttcctcagggagcccccaccagtcccgctttagccaacctggctgcttaccgcctcgatgttcggcttagcgctttagcgacagccatgggagcacgctatacgaggtatgccgacgacctcgcattttccggtggcgacgcactgtctcgtagaacccacaaactattaagatacgtgtctcagatcctcagggaagagggattcatgacccgggcaggaaagacccgcgtgatgaggcaaggtgcccaacagcgtctggctggcgtcgtggtgaacgcacatccgtccgtctcccgggccgattacgagagactgaaggcaatcctccacctgtgtaggacaagggggcctgcttcacagaatacagaaggccaccccgatttcagggcttaccttctcggccgtatagcttgggttgctcaccttcatccagcgcgcggcgctaaactacgcgccactttcgagcaggtggtgtgggctggatga

SEQ ID NO: 12601 - RNA, 1329 nt, synthetic construct
  source 1..1329: mol_type = other RNA
atgtctgagcaacgagtggtcgcccaggcgcttgcgagtgcattccttgcgggcccttggactttgaaaggcctggtggagcgcgggacagaagtggtgggagggagagccccctgggtatcctctctcgcacggtccgctatgatcttctttcctagacccccccacgcacgcatggagcttctgggtgatctgctggcttcaagaccggcgttcatgagaggctgtaccgatcccagcgcacgagcacgtatcgtccgctggattactagcgagccccgaatggctagacagccctggccagtgccttccctctctacgcaggctgaactggctgcttggttgggcgttactggagcccagctggactggctggctgatgtgccaggtatcgaaagaacgagctcacctggcaggtggcgcagataccggtatacctggatcccaaagcggtcgggtggggaacgactcctcgaacgacccgggctggaccttctgctcgtgcagagaaagctcttacatgggatattagaccatatccctccgcacgatgcggcccacggtttcgttgctggcaggagcgttctcggctttgcagagcctcatgcccgccaggccgtggtagtaagagttgacattgaggattttttcttcgccgtgaggccagcacggatttgggcagtgttccgcaccgccgggtatccagatggagttgtgagtgcccttgcgggactctgcactaaccgtaccccatccgccgtcgtctcacaagctaggcgtcccgactctttggccgatgcttccgcacgttggcggttggcaagaaggctggagtctcggcaccttccacaaggagctcctaccagccctgccctggccaatctggccgcttaccgcttggatgtgcggctgagtgcactagccgaggccatgggagcccgctatacacgctacgctgatgacatggcatttagcggaggcgatgccttggccaggagaacccataaactcctgaggtacgtctcccagattgtcagggaagagggcttcaccccccggacaggaaagacaagggttatgcaccggagtactcaacagaggctagctggggtcgtggtgaacgaccacccttcaatacggagggtagactatgaacggctgaaagccatcttacacttatgcaggacccggggcccggcctctcagaatacagagggccatccagactttcgtgcacacctactggggcgcattgcctgggtggctcacctgcatcccgccagaggtgccaagctgcgagctacatttgaccagatcgcatgggactga

SEQ ID NO: 12602 - RNA, 1350 nt, synthetic construct
  source 1..1350: mol_type = other RNA
atggcctgcgagtcagcaatgagtgagcggcgcgtggttgctactgcccttgcgtctgcttttctggccggtccttggacaattcagggattgacagagcgtggactggaggtagtaggcgccccgtccccatgggttgcatcgctagcacgctcagcagtgcgctttttcccaagagcacctcgcgctcggatggagctgctggctgatctcttggccacaagagccgccttccagcgagggttcgaagaccccgaagccagggccagaattgtccgctggcgcgtatccgaaccgcgaatggctcggcaaccgtggccagtgccttccttgccagcacaggccgatctggccgattggctgggagtgaccagtgcccagctggattggctcgccgacgttcctggaatagaacgcacgagtccccctggcaggtggaggagataccgctatacctggatccccaaacggagcggcgggcaaaggcttttagagcgacccggattggacttggcatgcgtgcagaggaaggtgctccacggcattctggacagaatccccgcccatgacgcggcgcatggattcgtctctggacgtggcgtgcgctccttcactgcaccccacgtcggacaggccgtagtcgtgagacttgacctggaggacttctttcttgcagtgcggcctgccaggatctggggcgtatttcgggcggctggttatcccgatggtgtcgtgcgggctcttgctgggttatgtacaaatcgtaccccaggcgccgttatggctcgtgctcccacgccaaccagcttggctactgtggcagcccgctggcgatggaccagaagactggaaagccggcatctaccacaaggcgcccccacatcacctgccctggctaatctggccgcgtaccgtctcgatgttaggctaagcgctctggcagcagccatgggggcacgatacactagatacgctgacgatctggcattctctggtgatgcgtctctcgcacggaggactcggcgcttactgcacctcgtgggtctgattgtcagagaggagggcttcaccccaagggcgggcaaaacgagggtgatgagccaagggactcagcagcgactcgctggcgtggtcgttaacgccaggccttccatcccacgggctgactatgatagactcaaggctctgctgcacctgtgtcgaaccaggggtccggacagccagaacaacacagggcaccctgactttagggcccacctgttggggagaatcgcatgggtgtcacatctccatcccaccagaggggctaggcttcgggccttatttgaacagatagcctggacagcctga

SEQ ID NO: 12603 - RNA, 1260 nt, synthetic construct
  source 1..1260: mol_type = other RNA
atgcatgaacgggccgtcacagcccttgggcagcactttcagtggctgaccggagtggtcagaaacgttcgtcgtggctttcacaggcctcctgttgatgccccagatacacttgccaggtatatagcccacctgccttctttccgccaagcaatggcccatcccgacacacggcctcggatacggcactggctcgttgccccaaccgacatgggtagaatgcgatggcctgtgcccgcactgcctactactggcgagcttgctgcctggctgggcctaagtgacgaggatcttgattggctggcagataggaagggctacagccacagcgctcgcgacactcgcttactgcattatcagtggcgatgggtcccaaagcgcacaggcggagtgagactcctggaatccccgaaagcgaggctgaaagccctgcagcgccaggtactgcacgcgatccttgacgccatccccccccatgagtcagcacatgctttccagcaggggaggagcgtgctgacttttgcagcacctcatgtgggacagcacgttttgttgcggatggacctggaagacttcttcacctctatctctgccggtagggtcttcggcgtgtttcgaacggcggggtaccccgaagcagtgtcttccaccttagcctccctgtgtacccacgccctcccactgctcgttttgcgggatatgccccgtcctgcatcagtggaagacattgatgctcattggagagctcgcgcaaggctgtcgagcccacatcttccgcaaggtgccccaacgtcccccgctctagctaatctctgcgcttggggattggacgttcggctctcaaccctcgcggccagtatgggggtgaggtactctagatatgctgacgaccttgtatttagtggcggggaggatctgtcccacgcgttagagcggttccgtcacctagtcgagacagtgattagagacgagggatttgtccctaatgtgaggaagacccgcgtactgagacaaagtgtccgacagcaggtagccggcgtggtggtgaatgcacgcccaaacgtgccccgggctgacttcgatactctcaaagctacactcactaactgcattagacagggtccctcaacccagaaccacacagggcatccagatttccgcgcccacttggtgggaagagtggcctgggtcgctagcgtccaccctcaacgaggcgcaagactgcatgccctgttggatgctatcgattggagcaggtga

SEQ ID NO: 12604 - RNA, 1344 nt, synthetic construct
  source 1..1344: mol_type = other RNA
atgatcgaaccacaggctgctcgcgcgatactcgccgaggcatttctcgggggtgactggtctgccgacggtttactgcagcgggccctcgaagttgtcgctgaacccgcacctaggcaatcactccgcgcgctgatcaagttggtgctaggaaggttccccgcaaccccccccttaaggcgcagagatctcgaagaggtcatcgccagctccaggagcttttcaaaggccactcgcgcccaacgcctcagagtatggcggccttggctgaggtcccctgttatgacccccctggctggcgctccaacaagttggcccgtccctgccctcccaaccacaacagagcttgcggcttggctgggcctggatgtggacgctttggagtggtttgcgggcacgcatggcagagcaagaagggctccaccgggcccacttgggcactatacctattcatgggcaggcaaagccagcgggggataccgactcatcgaggccccaaaagcgcggctgaaggcccttcagaggcgagtgctggacgggattctggctgaagtgccagtgcaccctgccgctcacggattttgtcggggacgcggagttctgtctcacgcagcgccgcatgccggccaaaggttggtgatggccctcgatctgcgggactttttcgcaagtgttcgcgcctcccgggtccttgccattttccggactctgggttaccctgaggccaccgctcgactactgactggactggcgactcacaccgtgagcgcactcgtctgggcgagtgcaccacctcctagggatgccgccgaagctagcgcaaggtttcacgccgggcggttcttccagtcgccccatttaccccagggcgctcccacgtctccggctttagctaatttggccgctttcagattggatcttcggctgaccgccttagctagagccgccgacgccacatatacacgctacgcagatgacctggccttctctggcggagagagatttgcacgcggcgctgagagacttttttccctggccgcccagattatatttgaagaggggttccggctgaacgcagggaagactcgacttctggggcagggaatgcgccaaaggctcgctggcgtggtagtgaacgcccatcctaacctggcacgtcgagacttcgatcagctgaaggctaccttgcataattgccgtcgtgatggggctcaggcacacgacagagatgggcttggtgccggtttccgggcacacctgctaggcagagtagcctgggcagagcaagtgaatcccgcccgaggcggtaaattgcgtacaatcttcgacggaattagatggtga

SEQ ID NO: 12605 - RNA, 1920 nt, synthetic construct
  source 1..1920: mol_type = other RNA
atggctggcgaggtgtcgcctggactcgggaaactgagcggaggggattacgaaggcctggaactggtgcgggcccgagtggaattcgcctctggtgtgcgctggtttcacccgggcgagttagaccgggtgcatccccatgtcgaggctgcattggtgcggcatgccatcacacgagacttgattgcggccggcaacgctacgaggctcgaacagtcgctcgaggctttctgggagggacgccaagaattctaccggactccgggactgttagatgagctttggctccttcacaggggacccgcccctacagagctgggtgaactgttcgacgctcctcgtgctgaactgctcgcaatcgtcccccagctggcaccaccattaccccagttacccagagaaacgcggttgcttgaagcggaggagctgcatgccgaggcatggaagcaggtgacccccataggcgagctagaggaggacgaagattggtcatctgagtgggagagagcggccccactcggtgctcttgttcctccacggacaagggcggattatttggcggatgaccaagacgacgatgacccagatgatgacgaagaatgggagctcaggcgccggagaaagcagctagcagaggctgctagtgccctgtgtcaggcctttctatctgccgaatggtccgccgacgacctgttggaccgaggacagcggaccttaggcacctcagagccctggctggaggaattggttgacagagtcctggcagcctttcctgccagaccccatcctgaagacgaagatctagtcctgtttctcgctgaggacgaggccctgcatgaacagttgctcgagggcagccttgtcgtttggacacgcttctttgtgcccccccagatgcgtgctgacaggagattccccgtgatgcctctcgagggggcaccagacgtagagaggtggttgagaattggcactggggatctgcagtggctagccgatcaggaacgttggctttacagacacccaagtggaccgctgcagcattatcactaccactggctgccgaaaaggtctggtggcagacggcttgttgaggcacccaaggagctcctgaagtccgtccagcgccaaatcctgcgcgacgtgctgggtcctgttccacctcacgaagcggcgcacggattttgtcggggccgctctgtgaggtcatatgcagagcctcacgccgggcaggagttggtacttgggttcgatttgcgggaatttttccccacaatcagggcacccagggtgtccgccctgtttagagcactggggtatccatccggtgtcgcccagctgctgtcagatctgcgaaccaccgtgacccctagcgatgtgctggaggaaggaccactctccggaggagcaagggggaggctggaacaacgccatcttcctcaaggtagccctacgtctccggctctggcaaacctttgcgcttacggcctgccagtaagactctccgctgctgccgctgccgttagtgctcgctacactcgctacgccgatgaccttgccttctccggcggagctgattttctgcggcaagccagccgattccggtatttggtgatgcgaattgctgccgaggaggggtttgagatcaatccaaccaagaaccgttggatgcgcccccagaggcagcaaaggctcacagggctggtcgtaaacgtccggccccgaccaagccgagccgaattcgacagactaaaagcaaccctccacaattgcggcagacacggccctgccagtcagaatagagcaggcctgccagacttccgcgcccacttagcagggcgtgtgagctggttcgaacagactgatccggtgagaggcgagaggctccgtgagctctttcaccagataacttgggaaacttga

SEQ ID NO: 12606 - RNA, 1323 nt, synthetic construct
  source 1..1323: mol_type = other RNA
atgaacgtggacgaggtggcaagaggactggcagccgcctttttggccggagactggttacaggaagggatggtggctagaggtcgagaggcactgggaggcaggttcggctggctacctggactggcacggagagctcgcgaagcgttccttgacccacctctgcacgacccagaagcgctggaggacttgctcgctgcggatgctaggctgcaggcagccctgaggcgacgagctagacaaggccacccgcctttggtcgttaggagactgttcctccatcacacggcgatgaggagcgagcgccgctttgctgttccctctttcgacactgaggccgatttggccaggtggctcgggcttgctctcactgatctggattggtttgccgatcgaaaggcctggttaatccacgccccccaagggcctttacagcactatcatcggacctggatccggaagagaggagggggccttcggctgcttgaggcaccaaaagccacattaaaggcaatgcagaggagagtgctccatggcttgctggcacacgtaccgccacacgatgcggcccatggtttcaggcctggacgctccgttgtcactcatgctgccccccacgcgggcaaagctcttgtactccggctggacctgcgcgatttttttccctccgtacctgcaggtagagtggccgccctgttccgttccctgggttacccccgctcagttgctggtctgctcaccggccttgtcactaccagaacacccctggcgacccttgagggggtggatctagatcgggaagctgaggacgccctcaggcggtcacatttgccacagggcgctccaacgagcccttggttagccaacctctgtgccctaggcttggacgtgcgcctcagtgctgcagcagccaaggtgggcgccgattacacccggtatgctgatgacctcgccttcagtggggacgaggcctttcgtcgagtcgcagccaggtttcggacactggtgcatgctatagttctgggcgagggatttgacttgaggccagagaaaacaaggtggatgaccccttctgtgagacagcgacttacagggctggtggtcaatcagcgtccccgcccaagcagggccgaattcgatcggctgaaggcaactctgtttaactgcgcccgacgcgggcccacagcagaaaatcgggagggacaccctgacctgcgtgctcacctccgcggtagagtcgcttggttcgaacataccgacccggctcgtggagcacggctaagagccctgttcgaacgcattgcttgggcccccgccagatga

SEQ ID NO: 12607 - RNA, 1302 nt, synthetic construct
  source 1..1302: mol_type = other RNA
atgatgctagctactgtagcctcgccggcgagtttgatcgctgcctgccaacgagtcttcggaacaacccctgcgtgggtgccaagggtctgctttgcattgatcgatcggacgggcgacaacttccactgtttttcacgccaggagctggccgacatcctgctacagctgctgttccatggcccgcaaaccgagagaatagcactccccccagtgaggagatactgtacagaacctgcccgacaagcgccaaggcctgcttggcttgccgcccttgctctccccgacttgccctctgtgggtgctctggccggttggctaggagaacccgttggcgctttggcttggctcgctgaccagtggagatccgaggacggcaaccggtccaggttacagcactatcactatcgctgggtgccaaagcggagcggaggagtccgattgattgaaattcctaaggcgagactgcgtcgtattcaacacaaaatcctgcggcagattctggatagagtgccccctcatccggccgctcacggatttctgagaggccatagctgtctcacccatgccgcccttcacgctggtcaggaggtcgttatacgcatggacctgaaggacttcttccctagcatccagtatgcccgcatccacgcactgtttgagaaactcggctatacgacaaacgtcgccggcactctggcaagggtgtgcgtgaatcgcactcctccatccgccatcagggatcaggccgcaggatccctttcatggccagagcggcacgcactcaaaagtccacacctgccccagggatcaccctgctctccagcactggcaaacctgtgcgcctaccgtcttgatcttcgcctcgcatctctcgctcgacctctgggggctagctatagcaggtacgccgacgatctggtcttctctgggggtcccgatttcgctcgctccgcagaaagatttcgtgttagggccgctgcaattgcgctggaggaagggttccaggtaaacactcggaagagccgggtgatgaggaagggcgcaagacagcaagtgaccgggatagtagtcaatgcccatcccaatttagcacggagtgagtacgatcggcttaaagccacactgaccaactgtgtgagacatgggccagacagtcagaataggcagaatcatccggattaccaggcctacttagcggggcgagtttcctacgttaaaatggtgaatgcctctagatctgccaagttgcagcgcctctttgatgctgtggcctggccccaagacgccccttcagcttga

SEQ ID NO: 12608 - RNA, 1188 nt, synthetic construct
  source 1..1188: mol_type = other RNA
ttgttgtggcaatgcctcggaaggggcgacggaaacgaggacgacaacgacggggatggggatggcgacggagatggcgacgcatgggtggttggcgccgatctgccacccctgagacggtactgtgtcgatccaccagtgaggccagttcctccggcatggttagccgcactagcgttgcctgccctggcttcagtcggtgcgctagccgcttggtttgacgagcccgtgggtgcccttggttggttggccgatcagtggagactgggaggcgaagggcaggagcggttacagcactatcactataggtgggtcccgaagcgctccggtggagtgagactcatcgaaatccctaaagcccggcttcggcgactccaacagaaaatcctccgcgaaatccttgaccgtgtaccaccccaccctgctgcccatggctttcgcaggggccattcgtgcgtgacgcatgcagccctacacgcgggacagaccgtggtcattagaatggatctcaaagatttctttccttctattcagctgtctcgcatacatgctctctttgccaaactcggatattgcgccagcgttgctggtacactcgctcgcctgtgtgtgaatcgaactcccccttcagccttcaacgatagacagctgggggccgcactgaattggacggagaggcaggccctgaagagccctcaccttccccagggctccccatgtagcccagcattggcgaatctgtgcgcatacaggctggatctcaggctgagttccctggcccagtctcagggggccacatatagcagatacgcggatgacctggcattcagtggaggtgctgcttttgctcgacgggccgagagattccacctgcaagtggctgcaattgcactggaggaagggttccaggtgcaccaccggaagacccgtttgatgcgagcagccacccggcaacaggttacaggcgtcgtggtaaatagacatcccaacattgcccgctccgactacgacgctctgaaggctaccttaactaactgtgtaagacatggccccgccactcaaaacagggatcgtcatacagactttcgagcgtacctggcagggaggatagctcacgtgaagatggtcaatgcagaccgcgccaccaagcttcagcggcttttcgaagctatcgcctggcccgcttga

SEQ ID NO: 12609 - RNA, 1371 nt, synthetic construct
  source 1..1371: mol_type = other RNA
atgaatacaaagcagttcacagtgctggcgttagctgacatggtcctggcaaccgatggctccctcgcatctctcatcggcgcctgtaaccgcgtcttcgacgctgaaccgccctgggttcctgcagcatgcgcagctttaattgaacgtacaggggattacttccattactactctaggagagaactggccgccctgctgcttgagtgcatcgggcacggatctgctggggccagagatgaggatgcagagccaggccacgagcggggtctggaatgccttgtgatgcctgacgtgagaaggctctgtgtggagccagccctcagaccccctaaacctgcttggcttgcggccctggctttgcccgatctacccaccgcaggtgcccttgctgcatggctcaacgaacccgttggcgccctggattggttcgccgaccaatggcgcctagctcgggatgctcagtcaccgcttcagcactatcattatcgatgggtccccaagaggagcggaggtcagcgactcattgagattcctaaagctcgcctgcgacggatccagcagaagatcttgcgggaaattctcgacatggtgcctccacatccagccgcccatggctttcgccggggacattcctgcgtcacccatgcggctttgcacgctggacggcacgcagtcatcaggatggacctgaaggacttcttccctagcatacagctaagcagggtgcacgcgttatttgagaaactggggtacccacacaggactgccggcaccctcgcaagaatctgcgtgaatagaaccccacagggtgccttgcgcgacaagctggctggtggcgcacttccgtggctggagaggcaagcgcttaaatcccctcacttacctcaaggctctccctgtagtcccgctttggctaacttgtgtgcctatcgcctggacataagactgagcgccctagcacagtccctgggcggaagttattcacgttatgccgatgacctggccttcagtggtggaccagcctttgctcgggctgccgatcgatttcacgtaagagtggcagccattgcgctggaagagggctttcgagtgaacaccaggaagactaggctgatgcgtgaagggacacggcagcaagtaactggaatagtagtcaacgcccatactaatgtggcacgcgatgagtacgacaaactcaaggccacgctcacgaattgtgttcgccatgggcccgctagccagaatcgtgacaggcacccagactttaaagcgtacctggccgggagagtgtcgtacgttcggatggttaacgccggaagagcctcacgcctgcagggcttgctcgatgcaatcgcatgggccgcctga

SEQ ID NO: 12610 - RNA, 1380 nt, synthetic construct
  source 1..1380: mol_type = other RNA
atgaatatcaaacagcataccgtccttgctctggcggacatggccctggccactgacggatccctagcctcgctgaccgcggcatgtcacagggtcttcgacgcagagccgccatgggttccagcggtctgtgaggcactgattgcgcgtacaggtgaacacttccactattatagtagacacgagctggctgggctgctgctggagtgcatcggacacggtcgaggaggaccaggagcggacggacaagacggtgacgacgccgaggactttgcccttcctgaacctatcgcgctcccagccgtcaggagatactgcgtggatcctcctgtcaggcctcccaaacccgagtggttggctgccctcgctctcccagaactcgctaatgccgccgccctagcagcctggcttaacgagccagtgggggccttggattggtttgccgatcagtggcgcctagctagagacgggcagtctcccctgcagcattaccattacagatgggtgccaaaaagaagcggcggcgtgcggttaatcgagattcccaaggcacggctgagacgtattcagcagaaaattctgcgtgagatcctcgatcttgtgcctccgcatcccgcagctcacggatttcggcgcggtcacagctgtgtgactcatgccgcccaacacgccggccaacatgccgtagttaggatggatctgaaggatttctttccgagtatccagctgtcccgcgtgcatgccctcttcgaaaagctcgggtacccttataagacagctggcacattggccagaatatgcgtaaaccgaactccattgggcgcgttccgctcaaccccggatggagatagcctgtcctggtcagagcgacaggctcttaagtccccccatctgccacaaggctccccctgtagccccgctttggcaaatctctgcgcctacaggctggacattcggcttgctgcactcgcagaatcattaggcggggcctatagtagatacgctgatgatttagcttttagcggcggacctgcttttgcacgcgcagctgaccggttccacatccaggtggcagcaatagcactggaagaagggttccgcgtgaacacacgaaagactcggttgatgagggccggtgcacggcaacaggttaccggagtagtggttaacgcccaccccaacatagcccgcgacgaatacgacaagctgaaagcgaccctgacgaattgcgtcagacacggccccgcttcacagaatcgggatcgaaggcctgatttccacgcttatctggccgggcgcatctcttatgtgaaaatggtgaacgccgcaagggcctctaggctccagtctttaatggacgctattgcctgggccgcttga

SEQ ID NO: 12611 - RNA, 1383 nt, synthetic construct
  source 1..1383: mol_type = other RNA
atgactacggataagctgactgcactggcacttgctgacacaatgttggcgaccgatggcagcatggagtctcttattgctgcctgcaacagagtgtttggaagtcggcagccctgggctacagggatctgtgtcgctctgatcgagcgaacaggtgaatcatttcactatttctctaggcacgagttggccgatatcttgcttcagctgctgggccaccaatttgacgacgacgagtacggcgagtataacgacgacgaatttggtgaagaggactccagcccaccttatatagaactgccgcaggtgcgacggtactgcctggatcagcccattcgaccgccaaaaccggaatggcttgccgccctagccctccctgagttacccacaatcggagatttagcgcactggctcaacgaacctgtaggggcactggagtggttcgcggaccaatggcgtcttgccggcgatgcacagagtcggctccaaaattaccattaccgctgggttgccaagaggtccggtggcctcagacttatcgagatacctaaagcccggctgcgcagggtgcagcagaaaatactccgacagatcctcgacctagcacctcctcacccctcggtgcacggattcagacgcggacgttcaagtgtgactcatgcagctttgcacgcaggcaagcgggtggttattcggatggatctgaaggatttctttcccagcatacaggtatctcgtattcatgctcttttcgagaaactgggctactctcagtctgtggcaggtaccctcgcgcgtatttgcgtcaatcgcgctccttatggactgttccgcgataaacaaacaggaggctccttgccatgggtggagaggcaggccctaaaaaccccccacctgccacagggaagtccatgtagccctgccctggccaatctctgtgcttaccgcttggatatcagactggagactctggcccaatcactgggcgcctcctatagccgctacgctgacgacttagcattctcagggggggctgactttgctagagccgcccataggttccacattcaggtcgcggcaatcgcattagaggaagggtttagggtgaatactcgaaagactagagttatgagagaagggacccggcagcaggtgacaggtgtcgtggtgaatacccatccaaacctggctaggagcgaatacgatacgttgaaggccatgctgaccaactgcgtcaggcatgggcccacctcccagaatcgccacaacagaccagactttagagcccatctggccggcaggatttcttatgtcaagatgctgaatgtaaaccgggctgttaagctccaacggctcttcgaatccatcgcctggaccccctga

SEQ ID NO: 12612 - RNA, 1359 nt, synthetic construct
  source 1..1359: mol_type = other RNA
atgaatacagaaaagctgactgctttggcactcgctgatatgatgctcgccaccgatggatccatggcctctctggttgccgcctgccatcgggtattcgacagtccccagccttggagcgcgaccatttgcgctgcccttatcgagcgtaccggcgataatttccactatttctctcgccatgagcttgcccatatactcctgctgctgaccggacgccgcttcgatgacttcgaagacggtgacgacgagcccagtcctcccctaattgaactgcccgcagtcagaagatactgtctcaatcagccaatccgaccccccaagccggcttggttagcctctctggcactaccagaactgaagactgttggggatttagccgggtggcttaacgagcctgtgggagctctcgcatggttggccgatcagtggcgcttggctggcgacgaacagagcagacttcaacactaccactaccgatgggtccctaaacggggcgggggactgaggttgattgaaatccctaaagcacggctgcgtcgaatacaacacaagattctcaggcagatccttgacctggctccgccccatccatgtgcacatgggttccggcacgggcatagcagcgtaacacacgccgcgttgcatgcgggcaaaaacgtgattatccggatggacctcaaggactttttcccatccatccaagcttcaaggatccacgccctgtttgagaaactgggctacccaccatcggtagccgggacccttgccagaatgtgcgttaacagggctccacgaggtatatttcgtgacaagcaaacgggcgggtcattgccctggtctgagaggcaggcactccagtccccccacttgcctcagggaagcccttgctctccagccctggccaacctgtccgcttatcggctggacataagattagccagtctggcccagtccctcggagcttcatattccagatacgcagatgatctagcatttagcggaggccctgatttagctcgggcagccgataggttccacattcaggtggctgccattgcgctagaggaaggctttcggatcaatacacggaaaacgcgcgtgatgagaaaaggtacacgccaggaggtggccggagtcgtggtcaacagccatcccaatctggcgagaggcgaatatgatctgctgaaggctatcctgactaactgtgtgaggcatggcccggccagtcaaaatcgccaccgccacccttcgtttagagcccacctcgcaggtaggatctcatacgtgaagatgcttaatgctaacagggcggtgaagctccagcgactgtttgagactattgagtgggcagactga

SEQ ID NO: 12613 - RNA, 1377 nt, synthetic construct
  source 1..1377: mol_type = other RNA
atggataacgaaaagttaacagccttggccctggcagatacaatgcttgccactgacgggagccctgagaacctcatagctgcttgcgaccgggtgtttgatgccacccaaccatgggcgccaggggtttgcatggccctggtcatgcgcaccggcgagaacttccattatttttctcgacatgagctggccgacattctgctccagcttctcggcaggggtcacgtggactacgacgacgaagacgaggatgaagaggagggtggtgccgatgccccccctttcataaagctgcaggacgtcagaaggtattgtctggaacaacctattcggcctcctaagcccgcttggctcgccgaattagcactgcccgacttacccacggtcggcgatctggccgtttggcttaacgaacccgtaggcgctctgcggtggtttgcagaccaatggaggatcgctcgggatgagcagagccgcctgcaacattaccattatagatgggtgccaaagagatcaggcggcttgcgtctgattgagatccccaaagagaggctgcgccggatacaacagaagattttgaggcagattcttgatcttgtgccgccccatgcctccgcacacggttttcggcgagggcattcttgtgtgactcacgctgcacgtcacgcagggcaacacgccgtggtgagaatggacctcaaggatttcttcccatccatccagcatgcccgggttcaggctctgtttgagaaactgggataccctgagagtgtggccggaacattagctagaatttgtgttaatcgcgccccccacgacctatttagggacaaacagagtggaggcagccttgcgtggtccgaacgacaggcactcaagagccctcatcttccacagggctcaccgtgttcaccggcgctcgcaaatctgtgcgcttatcgcctggatatcagactggagtccctggctcggtcactaggggcaagttacagccgctacgctgatgacctggccttctctgggggagatgaattcgcacgctgcgccgagaggttccacatccaggtagctgcaatcgccctggaggagggatttagagttaatacgcgaaaaactcgtttgatgagggaagggactcgacagcaggtgaccggaatcgtggtcaatgcgcaccccaatattgccagggacgagtacgataagttgaaagccaccctcacaaactgcgtccggcacggaccagaatcccagaaccgcgaatctcacccaaacttccaggcatacctcgctggcagaatctcgtatgtagcgatggtcaatagcgacagagccgctaaactacagcgtttgctcgacgatatcgtgtggcctacctga

SEQ ID NO: 12614 - RNA, 927 nt, synthetic construct
  source 1..927: mol_type = other RNA
atggctggtgcggccagacgagctgattctgccagtgctctgcccctgccccttggagcacaagctcaaaggaggcccgccccggatagaaatagtcaaggcgccgcggctgcacacccagcaaataatcctgccccagacccaagaccaggagccgcagcatgtggacgccccagaattccagcacgcccggtcgaaagacacgctcggaggcttgcttgcagacctcccaaccgtaggccacatggcccggagggattctttccttcaattcagtacgcacgcatcgtggcattatttgagaaactcgggtatcctgataaggtcgccagccttctggcacggctgtgtgttaataggactcctaacggcgcatggcgcgacagaaaggtggcagaggccgttacctggtctgagagacaggccttgaaatccccccatctacctcaggggagtccctgttcacctgctctcgctaacttatgcgcgtaccgactggacatacggctgactgctctcgctcagtcgctgggggccagctactctcggtatgccgacgacctcgtgtttagcggagatcatgacttcgcccgcgctgccgaacgatttcacattcaggtcgccgccatagccctggaagagggcttcagggtcaacacaagaaaaactcgcctaatgcgtgagggtacccgacagcaggtgaccggcgtagtaatcaatcgacacccaaacatcgcccgcgacgaatatgacaagttgaaggccacactgacaaactgcgtgcgtcacggtcccgccagccagaatagggaagggcggaccgatttccgggcctacctcgctggccggatctcctatgttaacatggtgaacgctaatagggcaacgcggttgcagaggctggcggatgcgattgtgtggtcctga

SEQ ID NO: 12615 - RNA, 1380 nt, synthetic construct
  source 1..1380: mol_type = other RNA
atggccattgagaagctgacgctattggcgctggcagatacattactggctaccgaggctcacctggcctcccagatagccgcttgcacccgggtctttgacgcaccacaaccctgggcccctcctgtttgtgccgctttactcgctcgcacgggagataacttccattatttctcacgctacgaaattgccgacctgctcaggcagcttctggcaagagcgcaagaggaacgagagggagccgccgctgaagacgcagacacagccgctgctgacagtgcacccctggtcacagaactgcccccagtgaggagatattgcattgatcctcctctcagacccccccaggcagattggttggttgctttgggactgcctcagctgcatagcgtgggggcactagccgcttggctagacgaacctgttggggctctgggttggctggcagaccagtggagacttccccataacgcgcctgcccggctccagcattaccactacaggtgggttccgaaacggtcaggcgggctgcgacttattgagataccaaaggcaagactccgccgtatccagcagcaaatcctgagacagctccttgacttgactcccccacatgccgctgctcacggtttccgtaggggtcgctcttcggtgactcacgctgccttacacgcaggccggcacactgtgatccgaatggatttgaaggattttttccccagcatccagtacgcaagaattgtggctctgtttgagaaactgggctaccccgagaaagtcgccgggcttttggctaggctgtgtgtgaatcgcacccctaacggcgcccttcatggacgccaggtagccgacgcagtcacttggtctgagaggcaggcgctcaagtccccacacctcccacagggtagcccgtgttctccggcccttgccaatctctgcgcctataggctggatatccggttggacgccctggcccagagtttaggggccgtgtactccaggtatgccgacgacctggtctttagtggggacagagatttcgctcgtgccgccgaccgtttccatattcaggtggctgccatcgctctggaagagggctttcgcgtaaatacacggaaaaccagactgatgagggagggcactcggcagcaggtgacaggagtggtgattaaccgacacccaaacatcgccagggatgaatatgaccagctcaaggccaccctaaccaattgcgtgaggcacggaccagcgagccaaaatcgcgatggccgcgcggattttcgggcatacctcgcgggcagaatctcctatgttcggatggtaaacgcacaacgggcagcccgactgcaacgactcgcagatgcgatagtctggagatga

SEQ ID NO: 12616 - RNA, 1434 nt, synthetic construct
  source 1..1434: mol_type = other RNA
atgagtcgtgtcgctttccctcggaaaacagcccacgcgtctagagactccctcaaggccttgcgttcttttagcttgaggatgaccataaaaaaactcacagtgctggcactcgctgatacaatgcttgccagtgaacgtaatctggattcactcatcgccgcttgtggcagagtatttggggcaccaccaccatgggcttccgaagtctgcgcggcattgatcgagcgtaccggcgagaacttttactatttctctaggcacgagattgcggggatcctcttgcagctactgagccatgataacgctgatgacgacgatggcgacgatgaagcacccgagccgatggagcttccccctgtacggcgatactgtattgaccccccaattcgcccgccgagagatgcatggttggccgcactcgccctacctgagctgaggaccgtgggcgacttagctgcctggctcgacgagccagtgggagctctagagtggttcgccgaccaatggagactggccggcgataaggaaagcaggctgcagcattatcactacagatgggtgcccaagcgctcaggaggactgcggttgatcgaaattcctaaggaaaggctgcgctccatccaacagaaaatactgcgccagattctggatcctctgcccccacatccagctgcccacggttttcggagggggcattcctgcctgacccacgctacgctccatgctggacggcacgtcgttatccgaatggacctgaaggatttttttccctcagtgcagctgtccagaatccatgccttattcgagaagcttggctaccccgataaagtggccggagccctcgcacgagtttgtgtgaatagggctcctcacggcgttttccgggacacgcacgatggcgccagcgttacatgggccgaacgccaagccttgaagtccccccacttacctcagggttcaccctgcagccccgcacttgccaacctgtgcgcctacagactggacgtacggctggaggccttagcgcaggccatgggagctagttacagtaggtatgccgacgatctggctttctctggcgacagagacttcgcaagggcggctgagcgcttccacatccaagtcgcagcaatagccctggaagagggttttcgaatcaacactcgcaagaccaggctgatgcgggagggtactcgacagcaggtgacaggggtggtggtcaatgctcatcctaatattgcgcgagacgaatatgaccgccttaaggctactctgaccaattgtgtccggcatgggccagctactcagaacagagactctcaccctgatttccgcgcctaccttgcagggagaattagctatgttaaaatggtgaacgcgtcgcgggccgtgaaacttcagaggctactcgccaccgtcgcatgggcatga

SEQ ID NO: 12617 - RNA, 1341 nt, synthetic construct
  source 1..1341: mol_type = other RNA
atgactattgctaaactaacagctctcgccctcgcggatacgatgctggcctccgacggtagcgtggaaaaactgatcgcggcttgtggccgcgtatttggggcaccacaaccctgggcgccgaaactttgtgccgccctgtccgaacgtactggcgacaactttcattacttctcacgccacgaaattgcagacatcctcctccacctcctgggccatgactataatgatgatgaggagcgccctgtaattgcactgccggcagtccgcagatactgcatcgacccacccatccgacccccacaggatgagtggtttgctgccttggctctgcccgagcttcccacggttggtgccctagccgcttggttagacgaaccggtcgacgccctggattggtttgcggacctgtggcgtgtggagtccggccaacagagtcggctccagcactaccggtataggtgggtaccaaagcgcagtggaggcctacgcctgattgagatccctaaggcccgattgcgccgcatacagcagaagatcttaaggcagctgcttgacaggctgcccccccatcctgctgcacatggattcagaagagggagatcatgtgttacccatgccgccctgcatgcaggcagacgaatcgtcattcgaatggatttaaaggacttcttccccagcattcaatactccagaatccacgcgcttttcgagaaacttgggtattctcctactgtggcaggtaccctggcaaggatatgcgttaatcgggccccttgtggcgtgttcagcgatccaatggaggggggatctctgccatgggcagaaaggcaggcgctcaaaagccaccatctgcctcaagggtcgccctgctctcctgctctggctaatctttgcgcttatcgactcgacatgagactccaggcactggcccagagtttgggcgcctcttattccaggtacgcagatgatttagccttcagtggtgaccaggatttcgcccggaccgcagaaaggttccacattcaggttgccgccatcgccctggaggaaggatttaggattcaccacagaaagacaaggctcatgagggaaggcactcggcagcaggtcacaggggtggtggtgaacacccacccaaatatagcccgggacgagtacgatcggctgaaggccaccctgaccaactgcgccagacacggacaagctacacagaatcgggactcacatccaaactttagagcatatttggctgggcgtataagctacgtgggaatggtgaacgctaaccgggccttgaagttgcgccgtctttttgatgctatcgcttggcctgcttga

SEQ ID NO: 12618 - RNA, 1371 nt, synthetic construct
  source 1..1371: mol_type = other RNA
atgaatatcgaaaagctgactgtcctggcattggctgatacaatgctcgctagcgacagaagtctcggcagtctgatttccgcctgtggaagtgtgttcggaatgagccccctttgggcacctagcatctgcgccgccctgatcgaaaggaccggggagaacttttatcacttctcccgccatgagctggccgacatcttactccacctgctgggaaggggctccgacgacgtacatgacgatgaagatgaagacaatccagaagaatataccgaggtcgctgaaagacttgaacttccggaggttaggcggtactgtatcgagcctcccattcgacccccacagactgcatgggttgccgcactcgcactgcctcagctcccttcagtcggtgccctcgctgcctggctagatgagcctgtgggtgctctcgcctggttcgcggaccaatggaggctggcctctgatgcccaatctcggctgcaacactaccactacagatgggttcccaagagaaacggaggccagaggctgattgaaatccccaaagcacgcctccgcgtcctccagcagaagatacttcgccacctgttggatagactgccacctcatcccgctgcccatgggttcagaagaggacattcttgcgtgacccacgcagcgctgcatgctggtaggcctgtggtagtgcggatggacttgaaagatttctttccctccatacaattagcgcgaattcacgcactgtttgagaagctggattatccacccgccgtcgctggcacattggctcgtatctgcgtaaaccgggccccacagggggtgtttaaagaagctgggtcgctgccctgggctgagaggcaagtgttacgaagcccacacttgccccagggctccccatgttcaccggctcttgccaatctatgtgcataccgactggacatgcggctggaggccttagctcagagcctcggcgcgacatattcacgctacgccgatgacctcgccttttctggcgatcgggactttgcaagggccgcggagagattcaatattcaggtcgcggctattgcactagaggagggcttccgcataaatactcgtaagacacgtcttatgcgtgagggtacccgccagcgactaaccggagtggtggtgaacgcccatccgaacatcgccagagatgaatacgaccggttgaaggctacgctgactaactgcgtccggcatgggccagcaagccagaacagagacaggcaccctgatttccacgcacacctggccgggaggatttcacacgttaaaatggtgaatgccaatcgggctgttaaattgcagcgcctgcttgaggccatcgcctggacggtgtga

SEQ ID NO: 12619 - RNA, 1374 nt, synthetic construct
  source 1..1374: mol_type = other RNA
atggatatcgacaaattggcggtcctggccctggctgatacaatgttggcctccgacggctcaatggccgccttagtagcagcctgccatcgcgtattcgcagctccacagccgtgggcgccaagaatatgtgctgcccttattgagcacactggcgagaactttcattacttttctaggcacgaactcgccgataggttgtggcagctattgggaagggccacctcggacgccgacgttgatgtggatgactttgtcgcgttagccgcgcccccctttatcgctcttcctccggtgaggagatattgtattgacttgccgcagcgaccacctgctccagggtggttggcagcactagcacttcccgagctggcaaccgttggggatctggcagcctggctaggtgagccagttgccgcgctcgattggttcgctgaccagtggcggctcgatggacctgcccaaacacccctgcagcactatcattacaggtgggtccccaaaagaagtggcggctggcggcttattgagattcctaaggaaagactgcgacggctccagcagcgtatccttaggcagctgctggatcgcgtgcctccacatcctgctgcccacggattcagacgaggccacagctgcctgacccacgctactctacatgcagggcagcgtgcagtgattcggatggatctcaaagacttcttcacaagcgtgcagcctgctcgcatacacgccctcttcgctaaactggggtaccccccaagtgttgctggtaccctggcccggctgtgtgtgaatcgcgctccacatggggtgctccgtgacaggcagggagacgtcgctctcccttggagcgagagacaggcactgaagactccccacctgccccaaggcgcaccttcatccccagccttagccaatctgtgcgcataccgcctggatctgagactcgctgcattggctcgcaccctgggagcctcttattctcgctacgccgacgacctggccttctccggtggagaagagtttgcgagagctgctgcgcgtcttcatatccaagtggccgcaatcgctctggaagagggctttcgggtcaacacccgcaagacacggctgatgcgggctggagcacggcaacaggtaacgggggttgtggtgaatgcccatcccaaccttgctagggacgaatatgatcgactcaaggccatgttaactaactgcgtcaggcacggtcctgccacgcagaatagggcaggtcatgccgactttcgggcccacctcgccggaaagatcagccacgtgagaatgttaaacccccagagagcaggccgactgcaagccgtgttcgatgcgatccgctgggacctgcactga

SEQ ID NO: 12620 - RNA, 1377 nt, synthetic construct
  source 1..1377: mol_type = other RNA
atgatacctgctcccagtgtggcactcgctctggctgatacactgcttgccggtgaagccagcccagatggactggctgcttctgccgcaagcgccctaggtactgcctatgcctggggacccgccatgtgcggtttcattctgcagcgtaccggcgataagttccgctacttttcgaggcacgagctggcggcaataatcttggattccgatgcttttcatgccgcctttgagcccggaaaagaggccccccaaattaaaagatattgcttacagctccctgttaggcctgagccagacgcttggctgagcgctctgtccttgccagccatccccacgttaggggaactggcgctgctcctgaatgtcgagcttcaggatctgggctggttcgccgaccaatggagaagagggtcagctgaagcagcacccttgcagcattaccactaccgctgggtagcaaaacggagtgggggctggagactgattgaaatcccaaaacagcggctgcggcgtatgcagcagacaatccttagaaagattctggaggacgtccccgtgcatggagcagctcacgggttcagaagagggcactcatgtgtcacccacgctgcattgcatgccgggcaacgcgttgtgattagaatggacctgaaggatttcttcccttccatccaggcgtctcggatacatgcactcttttccaaattggggtattctgattcagtggcgggcaccctggccaggctatgtacttcacgcgcaccagctagtgccttcgcagacccgcacacaggaggaagccttccctgggcagctcgtcgagcgcttaggagcccacatctcccacagggctccccctgttctcctgccttagccaacctgtgtgcatggcgcctcgacctcaggctcgacgcattatgcggttccattggcgcaacctactcaaggtatgctgacgatctcgtttttagtggcggccgggagttcgagcgctctgttgaacggtttcatgtgcaggtggcggcaatcgccattgaggaagcctttggggtcaacacacggaagacgcgcgtgatgcgagcgggagtgaggcaacaggtcactggcgtagtaatcaaccagcaccctaatctgagacgagacgagttcgacaggctgaaagccgtgctcaccaattgcgctcggcacggaccggtggctcaaaaccgagaaggccgagagaactactggcactaccttgccgggaaggtggcctgggtcaagatgttgaatcctgccaggggagccaagctagaaaaggtgtttgccggcatcgactggcctgaagccggtagtggctctgttgctgccccggcttccgagagcagcagctga

SEQ ID NO: 12621 - RNA, 1479 nt, synthetic construct
  source 1..1479: mol_type = other RNA
atgccactgcgcggatatcccgtggggacaattctcctatgcaactcgccccatgaaccaccatgtgccgccgctcacctgtcttcatcctttacccggttggtagagggatcccctcctccccagagctaccctagcatgattcccaaggacgcggtggcacttgcgctggcagatacgatgctggcaagggacgctactctagccggcctgatcgcaagcgctacttgggctttcgaccatccgtggccctggattccggccctttgcgaggagatccacgcacgcacagctgcacatttctactacttctccagagatgaactcgccaggataatatttgagctggatgtctttcacgcagcatgggatggcgaaggtccagcgccacagttgcagcggtactgcctcgacctgcctgtggttcctccagccccagactggttagccgctctggctctgcctgcattgccctctgtcggtgaactggccaggtggctcggactccgacccgatgagctgggctggtttgccggccaatggcgcaaagacccaatgcccgcagcccagcttgagcattatcattatcgctgggtgccgaaacggagtggcggagttcgattgatcgagatccccaagcctcgccttagagccatgcaggccatcatcctgagagagttactggatcgagtaccagctcatcccgcagcgcacggcttcaggaggggacattcttgtgtgacacatgctgccctccacactgggcaacgggtggttatccgcatggatctcaaagacttttttccctcaattcccgcaagtaggatccacgcgctgttcgctaaactgggttacagtcagacagtcgccggtgtcctggcccgtctttgcgttaatagggtgcctgctggcgtattgcgtgaaccggccggaggaaacgctctaacctggacccagcgacaagccttaagggccccccacctgcctcagggttcaccatgctctccggctctcgccaacgcttgtgcctggagactggacgtgcggttagagacattagcccagctcctcggggctagatacagcaggtatgccgatgatttggtgctgtccggcggtagagagcttgagagagcaatggaccgggtgcacgcacaggtgggagctattgccctagaagaagggttcgccattaacactagaaagacgcgagtaatgcgtgctggcgtgcgccagcaggttactggcattgtggtcaatcggcaccctaacatagcgagagacgagttcgacgtcctgaaggccaccctgaccaattgtgtgagacacggccctcaggggcaagaccgcgaaaatcgtcccgattttcgggcttggctcgccgggaaggtcgcgtatgtgaccatggttaatccacaacgaggggggaggcttcagcggctgttcgatgcaatcgcctggcctcacccacctttgtga

SEQ ID NO: 12622 - RNA, 1380 nt, synthetic construct
  source 1..1380: mol_type = other RNA
atgattcccaaagatgccgtggcccaggcactggcggatactatgttggctcgggatgctactctggctggcctcattgccagcgcaacctgggcgttcggtcacccatggccatggatacccgacctgtgcgagcagatccactcacgcacggccgagcacttctaccatttcagcagacacgaacttgcccagatcatctttgaactggatgtattccatgacgcatgggatggggatggtcccgccccagagttggagagatactgtcttgacttaccgctagtgcccccgccccctgactggttagctgctctggccctgccagcccttccttctgtgggtggcttagctaggtggctgcgcctccgagtggacgacatagcttggttcgctgatcaatggcgcgttgacgctgccccagccgcacaaatggagcattatcactacaggtgggtacctaagcggagtggaggcgtccggctgatcgagatccccaagcagcggctgcgtgctatgcaggccacaatcctccgcgaattgctggacagggttccagctcatcccgccgcacacggatttaggagaggacactcgtgcgtcacacacgccgccctacacacagggcagagagtagtcattaggatggatctgaaggacttctttccatccattccagcatcccggatccatgcactgtttgcaaaactgggctattctcagagtgtcgccggggtcctggcacgactctgtgtgaatagagttcctgcaggcgtgctacgcgcacccgtggatgacaacgccctgacttggatgcaacgtcaggctctgcggacacctcaccttccccaagggagcccttgcagccctgcactggcgaacgcttgcgcctggaggctcgatgtacgacttgacaccttggcccagtcattgggggcgcggtactctaggtatgccgacgacctcgttttttccggaggaagagccctcgagcgagcgatggaccggtttcacgcccaagtgggggctattgcgattgaagagggcttcgccgtgaatgccaggaagaccagaatgatgagagcaggcgtgcgccaacaggtgactggaatcgtcgttaatcggcatccaaatatagctcgtgatgaattcgaccttctcaaagctacgctcaccaattgtgcacgccatggcccgcaggctcagaatagagatcaccatccggacttccgcgcgtacctagccggaaaagtcgcatacgtgaccatggtgaaccctcagcgaggtcagaggctgcagggcctgtttgaaaccattgcctggttgtccgccccagggcagcctgataacaactcaggcaagcagtataactttccctga

SEQ ID NO: 12623 - RNA, 1317 nt, synthetic construct
  source 1..1317: mol_type = other RNA
atgataccggcccacagcgtagcacttgccttggccgataccatgttggcgggcgctgctggcgttgctgctctcatcggaagcgcggccagagcttttgaggtcgagcataaatgggtgccgcccctgtgtgaagccattcacgtgaggacaggggaacactttcactccttctctcgcatggagctggcagccattatcttggacgacgagcacttcctaggcgcgtgggaaaacgggaaagcacccccacagatacgtcggtattgcatctctcttcctgtagtgccagaacagccagcatggttagtggccctggctttgccggccatccccactgttggcgaccttgcacgttggctcaccgtccgcccagatgaactcggctggttcgctgaccagttccgcctcacacacgatgccaccagccggctacagcactaccattatcggtggctcccaaagcgctcaggaggatggcgactaatcgaaatccccaaacagaggctcagggctatgcagcaaaagatcctgcgagaaatcttggatttagtgcctgcccatagcgcagcccacgggtttcggaggggtcattcatgcgtgacccatgccgcactccacgtcaaccaaagagtggtgattcgcatggatctgaaggacttctttccctctatccctgcctcgagggttcatgcaatgttcgtcaagctcgggtattcccagtctgtcgcaggcgccctggctagactgtgtgttaatagaacacctgcgggtgccgctgcagctgttgacatttcctgggcagagaggcaagccctgcggagtccacatctgcctcagggcagtccttgttcccctgcactggcaaacgcgtgcgcttttcgactggatatacgcctgcaagccttggccgccagcatgggagccgtgtactccaggtacgctgatgatctggtgttctcaggagacgcccagttagcgcgggctcttgacaggttccacgtcagagttgcagctattgcactgggagagggttttcgggtgaacactcgcaagactcggatgatgggagccggtgtgcgacagcaggtgacaggcatagtagtgaactgcagacccaatattgccagagacgagtacgacgctctgaaagccacccttacgaactgcgtcagacatgggcccgccagtcagaataggatcgggcacgataattttcgtgcatatctggagggccgggtagcgcatgtgcacatggtcaatccagcccgagctgagagactccgcaatctgtgtgccgctattgtgtggccctga

SEQ ID NO: 12624 - RNA, 1326 nt, synthetic construct
  source 1..1326: mol_type = other RNA
atgaaccccaagacttttgtggccctggccctggctgatactttcttggccagagaggcttctctggatgcaatgctgcagggggccaggtgggcgttaggcaaaaagtggcgctggattccgagcctgtgccgagccattcataagcaaaccggcgaacaactgcactcccatggaaggacagaactggcggcgctcattctcgcccatgaagggtttgccgacgcttggttggacagcgagccccctcaggtacggcatttctgtctcgacccacctgtagccgctgaaccaccagcctggttaagtgcgttggctctccctgttttggctacagccgctgacctggcccagtggctgaaagtgacaccgtcggaactcgattggtttgctgaccagtggagaaactctcaggcaactaccaccgcactgcagcactatcaccatcggtggatcgccaagcgatcagggggattaagactaattgagatccctaagccacatctcagaaccatgcagacgcaagttttgcgcggacttctggacagaatccccttgcaccaggcagcccacggctttaggaggggccacagctgtgtgacccacgcagctctgcacgcgggtaaacgcgttgttatccggatggatctgaaggacttctttcctagtattcccgcagccagagtccacgcactcttcataaagttgggctacccgcccaaagtggctggcctgctctcaaggctttgcacataccggacccctggcaacgtccttaatcagcctgggcaaaaaatcccctggcaggagcgtcaggccctacgtactcggcacctaccccagggatccccttgttctccagcactggctaacctgtgcgcctataggttagacatgcggctgcaggcgcttgcaaccgctcttgatgccagatactcccgctacgcagatgacctcgtgtttagcggggaatcaggactggaaagagcaatggatcgattccacgtccaggtagctgcaattgcactggaggagggctttgccgtgaatgctcgaaagactcgcatgatgcgatccggtgtgaggcaacaagtcacgggtatcgtggtcaatcgccatccaaacataccacggcaggagttcgataaacttaaagctgccctgacaaattgcatacgccatgggcccgcctctcaaaatagagagggccgggacaactatcgtcagttcctcgccggacgcgtgtcctatgcccagatggtgaatccccagaggggtaagcggcttcacaggctgttcgagcagatcagttggccagggagctga

SEQ ID NO: 12625 - RNA, 1338 nt, synthetic construct
  source 1..1338: mol_type = other RNA
atgactcctcagaccttcgtggctctggccctggccgatacatttctcgccagggaggcgagcgtggaagcaatgcaacaaggcgccagaagggcactcggcaaaaaatggcgctggatacctagcctctgcagagctgtctacaagcagtttggagatcgcttgcatcgccatgggaggacagagttagcggccctgatattggctcaccagggctttgcagacgcctggttagactccgaacccccacagatccggcacttttgcctcgacctgccactgcccgcaggcaaacctgcttgggtcagtgccctgccccttcctgctctggcgacaaccgccgaccttgcccagtggctgaaagctggtcctagcgagctggattggtttgcagacaagtggagaacttctcctcctcccgctgccgccttacagcattatcatcatagatggattgcgaagcggtcagggggacttcggcttctcgaaattccaaaaccacgcctccgaaccatgcaagggcagatcctgagaggtctgttggatctgcttccgctgcaccctgctgctcaggggtttaggcgcggccactcttgtgttactcatgcagccaggcacgcaggtaagcgagtggtcatcagaatggacctgaagaacttcttcacatctatcccagccgccaggatccacgcattgttcaccggacttggctacccttcccgtgtggctggtattctttcgcgcctgtgtacccacagaacgccaggctccgtgttgaatcatcaagacccagcttcagcaggggcactgtcttggcaggagaggcaggtgttccgccagcgacatctgccgcaaggatcaccctgcagccccgcactagcgaacctctgtgcctatcgtttggacctaagattgcaagccctcgctgccagtttaaacgccgggtactcacgttacgccgacgatctggctttctccggagacggagaactagagcgggccatggatcggttccacgtccaggtggccgccatagctctcgaagaggggttcagcgtgaatacgcggaaaaccagaatgatgcggagtggcgcccgacagcaggtaacaggtatcgttgtcaatcggcacccaaacattccccgccaggagtttgataatctgaaggcggcactgactaattgcattaggcacgggcccgcttcccagaacagagatggaagggataatcaccggcagttcctcgcaggacgtatcgcttatgtaaggatggttaacccccagcgaggcaagcgcctgcaacagctatttgacaagattgcctggccgaagggctga

SEQ ID NO: 12626 - RNA, 1344 nt, synthetic construct
  source 1..1344: mol_type = other RNA
atgactccgaagacgttcgttgcccttgcgctggccgacaccttcctggcacacgacgcctccacaaatgccttgatcgccggcgcaaggagagcattgggaaagaagtggcgatggatcccaagcctctttcggaccatcttgaaacagcacggagaacaactgcattgtttgggacgctcagaactcgctgccttaattctagcccatgacggcttctcagacgcttggcaggagtcttctcctccccagatacggcactactgtctggacgcacctttggctgtcgaacagccgggttggcttgcggcccttggattgcctagactggcctcagtagccgagctggctcagtggttacaggtcgcacctctcgagctggattggttcgccgataagtggcgaaataacatgccagccccatcagctctgcagcattatcattataggtggttacagaaacgttccgggggcctgaggttactcgaaattcccaaactgagactgcgcgcgatgcagtcccaaatccttcggcatttgctggacctggtgcctccacatccagccgcacatggctttcgcagggcccacagttgtgctacacacgcagcacttcatgccggcaagcgggtggtgatgagaatggacctgtccaattttttccccagcatacccgccgctcgcattcacgggctcttcgttaagcttgggtaccccgctaacgttgctggggtattctctcggctgtgcacacataggaccccagcaagcgtcctggctaaccccgataaaggcctaagatccgctcacgtgatgtcttggcaggaaaggttagcactccgcacaagacacctgcctcaaggatccccttgcagtcctgctctcgcgaacctgtgcgcatatcgtttggatatgagactgcaggccctggccgtgagtctgaacgcctcgtactcgcgatatgctgatgatctagtgtttagcggtgaccaggaactcgagcgagccatgcaccgctttcacgtgcaggtagccgcaattgccctcgaggaggggttcagcgtcaatactcgaaaaactcgtatgatgcggagcgctgtgcggcaacagatcaccggaatagttgtgaatagtcacccaaacatcgctagacccgattttgataatctcaaagctgccctcaccaattgcattcgccacggcccggccagccaaaatagggaggggagggacaactacagacagttccttgcgggcaaggtggcatacctacacatggtgaacccccagcggggtaagaggctgcagcagctgtttgagcaaatcgtctggtctgcggactga

SEQ ID NO: 12627 - RNA, 1323 nt, synthetic construct
  source 1..1323: mol_type = other RNA
atgacctcaaaaacactcgtggccctggctctggccgatactttcctgtccagagaagccggtctagcgtcaatggttcacagtgcagcctgggcgcttgggaagaagtggaagtggattccctccctttgtcgtgccatcgtggagcaggctggcgagcatttttatgattactcacgagacgaactggctgcattgatcctggcacatgctggattctccgatgcatggcaggacaacgcccctcccaggatcaaacattattgcctcgacctccctatcgctcccgagaaaccagcctggctgtcttctctggcactgcccgagctggctactatagcggatcttacacaatggttaaagctgtctgccgctgaattagactggtttgccgataagtggagggagcaatcaccaaccgcaagagcactgcagcactatcgatataggtggctggtaaaaaagtccggaggactgcggctgattgagatccccaaacagcgcctgagatcaatccagacccacatcttaagaaagctcctggatctagtgccgccacacagcgccgcacatggtttcagaagggctcacagctgcgtcactcacgctagcctacacgctggcaagcgggtagtggtccgcatggacctcaaaaattttttcacgagtatctcgtacgctagaatacatgctatgttcgggaagcttggctacagctctagtgttgccgccgcgttggctcggctttgtacacataggaccccgctaggcgtctttagcgagcgggagattacaaaaacaattccttggcaggaacgtcacgccttgaggacccctcatctcccccagggatccccttcttctccagcacttgccaacttgtgtgctcaccgactcgatatcaggctggacgccctggccaatagtctcaacgcccgctacagccgctacgccgacgatctgaccttctccggagaatacgaactcgaacaggctatggaacggttttccattcaggtggcagcaattgcccttgaagagggtttcagtgtgaatacccggaagactagattgatgagagccggcgtccgccaacaagtgacgggcttgttagtgaatcggcatccaaatacacctcgcgaagagtttgacatcttgaaagccactctcaccaactgcattcgacacgacccagccagccagaatcgagaggggcgtgagaactacaggcagtatctggcggggaggatagcgttcgtgcacatggtcaacgcaaaacgcggggttcggctgaagcagctctttgagaagataaagtggtga

SEQ ID NO: 12628 - RNA, 1341 nt, synthetic construct
  source 1..1341: mol_type = other RNA
atggacattcccaagcaggtcgctctggcgatcgctgacgctttgctggctggcgagtgtagccacattgcacttatgaagaatatgtcttgggtgctggggaaaaagtggccttggataccttccctctgccccaagatctaccttcatgccggaccgcatttctaccactacagcagacatgaaattgcagccatcatcctggatgaccacggctactacgacgcttggcgcggtaaagacaagccgcagattaaacagtattgcctgttaccagccatagccccagagaagccagcttggctgcaagctctggctttacccgagttcaataactcggccgatctggcacggcatctgaacctcacagttaatgagcttgcttggttcgctgatcagtggaggcaagatgcccaggccgcccctcagttaagacactatcactacagatggctggaaaaagccacaggcggctggcggctcctggagattcctaagtcaagactgcgcaatatccagcggaagattctccagcgaatcctgaatcaagttcctccccatgccgctgcccaggcctttcagcagggacgaagttcaatcagccatgccgcacagcacaccgggaagctggtggtagtgaggctcgatttgaaggactttttcacatctatacccggtagtaggcttcacgcgctatttgcgaaactcgggtatcccgaaaaagtagccggtaccttggcaaggctgtgttccaatcgtactcctaccgtgattgctaaggagaaaacccgatacctagcccctctctcaagcgcacacttgctgaggagtccacacctgccgcagggagctcctacatccccagcattggccaacctgtgcgcttatcggctagatatgcgcctccaggcattggccgactctatgcaggcctcttattcccgctatgcagatgatcttactttctccggcgacgagcagtttgaccaatcactgagaagggttatcccacaggtggcagccatcgtcctcgaggaagggttcgtccttaactacaagaaaactcgcatcatgcgagctagcacacggcaacaggtgacgggaatagtggtgaacagacattgtaacatcaaaagggccgactatgacacgcttaaagcgatactgaccaactgcctccgtagtaatcccgcctctcaaaaccgtgaaggacacgctaattttcgggcgcatctggccggcaagctagcctacatgcgcatgatcaaccccgcaagaactgcaaagttacaggcgttgtttgaacaaattaaatggccagatagcgcagtcatgatttga

SEQ ID NO: 12629 - RNA, 1341 nt, synthetic construct
  source 1..1341: mol_type = other RNA
atggataaaccggagcaggtcgcacttgctctggcggacgcgttgttggctggaccatgcgacccggtcattatgatgaagaatatgagatgggtgatgggaagaaaatggccttggatccccgcactctgtaaaaagattcacagacataccggggaccacttttaccattactctcgacatgaggtggccgatatgatcctcgcagacaacggcttcgataacgcttggtttcggagtgaaagcccacctgtgattcgccattattgcttactgccgccagtagcccccgatagacctgtgtggttagaaatgctcaatctgcccagtctcgccaatagcgatgaattggctaactacctaaacctgccacacggtgagctggcctggttcgcggatcagtggagggattcggccccagaatccactgggttgaggcactatcggtacaggtggctggacaaacctaccgggggcgttaggctgctagaaatgcccaagcagagacttcgtaacatccagcgaaagatcctccgacagatcttggacagagtgccccctcacgcagctgcacaggcctttcggaaacggcattcttgtctctcccacgccagcttgcatacggggaaacaagtagttctgcggctggatctcaaggacttcttttcctctatccctggatcacgcattcattccctctttgctaagcttgggtaccctcagagcgtcgccgcaatcctggctcgcctttgcacccaccgaactcctaacacagtcctggacgagattatggcacggcagggagctccctggcaagtacgccacatgctcaggtctagacacttaccccaaggcgctccaacatccccagcccttgccaatctgtgtgccttccggcttgatatgcggctgcataccctggctgccagtatgcaggcaacatattcacgttatgctgacgacctgacattctcaggtgacgaagagctagcaagggccctccagcggttcataatccaggcgggcgccattgcgatagaggagggattctcactgaatcacaaaaagactagaatcatgcgcgctaccggtcgccaacaggtgactggcatcgtgattaaccgccactgtaatataaggcgtagcgaatttgacaggatgaaagccatattaactaattgcgtgcgcaatggcccagccacgcaaaacagagatcatcacgccgatttccgagttcacctggcaggcaagctggcacacctgcatatgatcaacgccgccagggccaccaagctgcagacaatttttgagcagattaactggcccgctaagcccgagtga

SEQ ID NO: 12630 - RNA, 1359 nt, synthetic construct
  source 1..1359: mol_type = other RNA
atggacgccaaggacttcgtagcactggcactagctgacgcttggttggctgagccagctgggcaggacttcacaggaagggctaccgtgttgttcggccaacctcacccctggattccacgcctagctcgtcggattaaaaggcagttcggcaccaccgagcattatgatcggaggacagcgctggcacaatttatacgggctgacgatggttataccactgcttggtcctcctacgctaaaccgcgactgagacaatacgtctttgccacacctcagatgcgcctccagagcgcatggctgagcacagccaagctgccacccctggcgacatgtggagcactggcagagtggttgggtcttacaacagaggagcttgcatggtttgccgatacccgagggatgaaccgaactgctacgggaaagctgaaccactaccaataccagtggagaaaaaagagatctggacagtaccggctgatcgaaagcccaaaagaacgcctgcgggccattcagaggaagatcttgactggcatcctcaatcaggttcccccccacgatgccgcacatggcttccgacgccagcgatcttgtctctcttttgtggccccacatatcggaaaagactgcgtgttgaggatggacctgtgtaattttttcggcaccattaccgccgcccggattcacgccctctttagagcactgggctatcccatggctcccgcccgtctcttaacgggcctctgcacccacagtcttcctcagcagttcatcgatcaattacataccgccggcatcgaattatcctgggcggaaagacgtgcgtaccaggcacctcaccttcctcaaggagcccctacttcaccggctctggccaacttgtgcgcctatggattagatgtgaggctaagtgcccttgttgcgaaacatggtgcagattacacgcgctatgcagatgatatagccttctcagggggtggggcctttaaaagccaggcggccgacatctccacattcgtggccgtagtggcccaggaggaagggttcgccgttaactttagaaagacgagaaggatgcccacttctcagcgccaacagctgaccgggataattctgaacaagaagcctaatgtcaggcggaccgactatgatgccctcaaggctattctccataactgccaacagggggaccccgctagtcagaataggagccggcacccagactttcgcgctcacctgctgggcaagatcaattatgtcaaacagatcaacccgcagagaggcacaaagctcctgactctttactcggaaataacttggcctgagaatccctcacagactgcaccagagcagccatga

SEQ ID NO: 12631 - RNA, 1347 nt, synthetic construct
  source 1..1347: mol_type = other RNA
atgactcccagagatcaggtggccgagggacttgccgatgccctactcgcaggtccctcttccgtggatgatcttgccgcacgggctgctgaggcacttgggagaaaacacaggtggatcagaccattcgcccgtcgcgtcttcaaacggtttggagcagcccttgctcatgcccagcgaggcgagctgatcggattcattcagacggaccctggctactgcaaagcctggaaagcggctgggaagctccgcatccggagatacttctttggggtacctagcatgggcccacgtccaggggcattggctaggtgtgtgctgccagaactgcctacttcagctgatctggccgcctggctcggaatcaccatacccgagttagaatggtacgccgacttgaggggcatgattggtagctcggacggcgccctctgtcattaccattataagtggattccaaaacgccacggtgactacagactgatagagagccctaaaccgaggttaagcgccatccagactcgcatcttgagagagatacttgaccttattcccacccacgaggctgcccacggctttcgaagaggccggtcttgtttaacctatgtcgcccctcacgtgggaaagctggtagtgttgaggatggaccttcacaacttctttggtagtatccccttcgctagaatcaatgcgctctttaagactctgggataccccgaagagacagcgaagtatttagctggtctgtgcacgaaccggctgcctgcacgagttgcgctgaagatcccaggagctgatccggggttcgtcctgccctggcctgaatgcaagaagctcaatgagaggcatttgccacaaggcgccccgacctcccctgctttggctaatctgtgtgctctgcatctggacttccgcctcgccgccctagcttcaaaagtcaatgccgactacacacgatatgcagacgatctggcattcagtggcaacgaaggggtgcggagaaaaattggggacctatctacaaccatagccgcgattgctctggcggaagggttcgaggtcaactttcgcaagacaagggccatgcataagtccgatcggcagattctgaccgggatcgtggtgaacgaacgtgttaatatgcagcggaacgagtatgaccgtctcaaagcaacactctataattgcctgcggtttgatcccgattcccaaaatagggaaggccacagggactttcaggcacacctgctgggacgcgtgaaccacttgaagaatctcaaccagaggcgaggcgcaaagctgcaggccttgctcgaacgcgttgagtggcaagcaggcgctggatga

SEQ ID NO: 12632 - RNA, 1338 nt, synthetic construct
  source 1..1338: mol_type = other RNA
atgacctccaaatcacgcaaacacttcgtcgcctgcggcttggcagatgcactcttagctgggccacccgggatcactgaatttgaggccagggccaagcaggctctggggagaaagcctaggtgggttctgcccctgtgtaagagaatttttgcgcggttcggatctgggttgggcacacaacagcgggcgaaactgattgaattcatagagacagaccagggctatctcgatgcctggctagctgatacaaagcccagaatccgccattattttctggctactaacagcatggcaccaagagtgggagcgctggccctgtgtcccctaccaaacatcccgacatcagtggatttggccgcctggcttgatatcagtatagaggacctcgagtggttcgccgatgtgcgccacatggtgaaagcccccggccctctgtgtcactatcatttccgatggctgcctaagaggtccggtggttggcgtctggtcgagatacccaaacagcgccttcgggacctgcaaaggaaaattctccgcgaggtcctggacccagtcatgccacacgatgcagctcatggctttcggcgcggccgttcctgtttgaccaatgcagctcctcattgcggaaaggacgtggtgcttcgaatggaccttctgaactttttcacgagcatccccgcctctaggattcacgcactcttcacaacgctgggataccctgaccctgtagccaagcgcctcaccgggttatgcacttgcgaggtcactacccgcatgcttccagcacttccggccggagcagaacccttaccatgggcaatgaggaagcggtacgctgagcgacatctgcctcagggcgctcctacaagccctgcgctggctaacctctgtgccttgcacctcgactttcgtttggcagggctggctgagtcgttaggtggagcatacacccggtacgccgatgatctggccatcagtggcggtgaaccgctgaggagaagggttggggccatcaccagtctcctcagcgctattgccagagagcagaagtttgacattaaccacagaaaaactcgggtgatgcacaggtcagacaggcagcggttgaccggggtggtggtgaatgaaaagccaaatgtctctagagctgagtttgaccaactaaaagccgtgctgcataactgcgtagtacacggtccccagtctcagaataggatgggacatcccaatttccgtgaacacttgagaggccgggtttcctatgttgccggccttaatggcgctagaggagaacgcctgcgactcgcgttcgaggaaatcgattgggcccgatga

SEQ ID NO: 12633 - RNA, 1332 nt, synthetic construct
  source 1..1332: mol_type = other RNA
atgggaaatgggctgagtagccttgcaacaaacctgcggcttctcgccctgagcgtcctagctggagcctgggataaaccagggctcatcgagcggttggagcaggctcttgagtacagcccaactgacgccgcacaactggcctcccgattattgttccactacgaggctggccagccgccgagtagacagagactgatggcctttctcgctaacgaggtcagtctgcagcagcggtttgcatcgcccgacgccaagcctcccagattagttctcgaccccccccggatgggtagacctccagaaagactcataacactgccactgccacctctggagacacgtaaggacctggccgagtggcttggactctttgaccacgagttggcctggtttgcggatctcgaacggcgccaatgtaaagtgaaggagtccaaacttcatcattaccgttaccagtggatcgaaaagcggtcagggaaactgaggctgattgaaatccccaagcctaggataaaagcgatccagcgaaggatcctgagggagattctcaaccgcgtaccaccgcatcccgctgctcatggcttctgcaggggcaggtcctgccgctctttcgttgcttctcacctcggcaagccagtgctgttgaggatggacctgaaggactttttccatagcgtgccaatcgctcgtattggggccctgttccggagggtgggataccctgcccatgtggcctggttgcttcagggattgaccactcactcaacctcccccgctctggctggcgaagctttcgaacgcctgccatggcagcgacgcaagcacctgattgacaaacacctacctcaaggcgcaccctccttcccggcattagccaatttgtgcgcatggcgtttcgattgtagactccaaggagtggccgagcgcttcgggctagactatacgagatatgcagacgatcttgcgtttagcggcgataggaatctcctgcgcctagccccttttctgaagggtcttattggcgccattgccattgaagaaggcttcgagatcaatcacaggaagactagattgaggacccaggcacagtctcaacgcctggcaggaatggttataaaccagcagcccaatctccctcgcgaggagtttgatcgactcaaggcaatcctgtataactgtacccgatggggtcccgaatcacagaaccgggaaggggtagaggattttcgggcgcacctggaaggtcgagtcgcctacgcgttatggctgaatcctgagaaagggcggagactgaaagatttatggagatatatccagtggtctgaatga

SEQ ID NO: 12634 - RNA, 1044 nt, synthetic construct
  source 1..1044: mol_type = other RNA
atgggcagaccgcctgataagctcctgaccttccccctaccaagcttgagtacagtcaaggacctccagcagtggcttgggctgtttgatcacgagcttgcatggtttgccgacagggaaaggcggcagtgcaaagtcaccgaatcgagactgcaccactaccgctatcagtggattgagaaacgaagtggcccacctcgccttatcgaaattccaaagactcgcctcaagatgttgcagcgtcaaatactgagggagatcctgaatcgcgtaccaccgcacccttgcgcaaagggttttgtgcgcgggcgatctattaaacatttcgtcgagccccatctcggtaaggaagtggtgcttagaatggacctgaaggacttcttccatactgttcccgtgtatcggattggcgcaatgtttcataggttagggtatccctggtctgtggcctatctgctccagggcctgtgtacacacacgtcctcagcattgttggccggagacacattcaatgcgttaccctgggctatgcagaagaggctgagggacaaacaccttcctcaaggagcgccaacctcccccacactggccaacctggctgcttttcgcttcgattgtagactgcagggagttgctaaccgattctccttggactacacgcggtacgccgacgatttagcctttagcggggctagggaattgctcagactcgcgccatttctacagggcctgatcggagccatcaccatcgaggagggattcgagatcaaccacagaaaaactcgggtacagacccaagcccagagccagcgactaggcggcatggtgattaaccaacgtcccaaccttccgagagaagagttcgatcggctgaaagcaatcctgcacaattgcgtgcgttgggggcctgagtcacagaatcgcgagggagttgatgactttaaggcccatctcggtgggagggtggcttacgccgtctggctgaatcctgaaaagggcaaaagactgcggcaactctggaaacggatacagtggctggattga

SEQ ID NO: 12635 - RNA, 1302 nt, synthetic construct
  source 1..1302: mol_type = other RNA
atgagaaggctgatgctgagcatccagttcggtcgatgggatcgggagagtctgggggatcggttacgtcgcgcactggacggcggacctcctgatcctgacaggctagccgcgcgccttcttttccagttcccgcccggtcatccaccttcgcggtcacaactcgccggtttgctggccgctgacagagaactggcagctgccagccaatccggaggcaagggcttcgaggcccggattgtgttagacacgtctgtgatgcaggcccccaccgggcacttctcaacccttcccctgcccacactcgatcatgcacgggacttaggcttgtggctcgggctgaaccagcgcgagcttgcttggttcgccgactgcgaatcccggcagaccagcgtgcgcaatcctaaactgcatcactaccgatatagatggctcgcaagacggagcgcaccacccagactcctggagattcccaaggccaggctgaagctgatgcagaggcaggtgcttcaccatctgctcgattgtgtacccccccatccggctgcccacggatttcgtcgacacaggtcttgtctgtcttttgctacaccccatctgcagaagcctgccgttcttcatatggaccttgaggactttttccccagcataccagccccaagagtcggggctttgtttaggcggttgggctatccgccaggggttgcacgcgtgttacaagggttgtgtactcacgccgtggccccagctttggtaggcgcagagttcgacgccctcccttgggagacaagaagacgcctccaagcaccccacctggctcaaggcgctccatcatctccagccatcgctaatctgtgcgcgtggaggctggattgccgactgcagggactggccgatcgcttcgaactcgattacaccaggtatgcagacgacttggctttttccggtcctgctagtctgctgcgcaggggtccatttgtccaggctctaataggcgcgattgcggccgaggaaggatttcgcatcaatcatcggaaaactaggctcaacactcaggcgcagagtcagcggctagctggggttgtggtcaaccagaggccgaacctccaaaggagagactacgatcgacttaaggcgacactacacaattgcgcccggttcgggcctgaaggccagaatcacgaaggacgacaggattttcgtgcccacttagccggacgcatcgcacacgtcgcatggctcaaccctgacagaggcgcacgtctgaaagccctgtgggccagaatctcctggccagattga

SEQ ID NO: 12636 - RNA, 1356 nt, synthetic construct
  source 1..1356: mol_type = other RNA
atgcctacgcaccgcactaaaatcaggcgactcacgcaggccttatccacggggttgtggcagaaagacacaatcgccgatagagccagtagggcgcttcatggggggccacctgatcccaggagattaaccgcgcggctgctgttgcagttcggagatgctcagcatccacctcccgctgaactggaagcatttttaagacacgaccacgaggtggcctccgcattgcgctcgattacagacaataacacccccgccctgttgcttgaccccagcactatgcaaccgcagcggcataggattagtttacctctgcccgtccttgataccgtgcgagacttgcaacagtggctgggtgtgtcagcaggagagctggcgtggttcgctgattgcgacggacgccaggctaaatctactacccagcggctccaccactaccgctacagatgggcagaaaagcgccggggaggttggaggctgatcgagcagccaaagagcaggctgaaggccattcagcgacaggtgctccgcgaaatccttgaccgagttccaccccacccagccgctcatggcttcagaaggggacgcagctgcctgtcttttgttgcaccccactgtggccgtccactgctgctcagattagacctgagggattacttcacacgggtgccggtggcccgaattggtgcaacatttcggcgtctgggctacccagctgccgtagctcatactttgcaggggctgtgcacccacgccatgagtgcgtcactagcagacccacccgcaggggctgttgactggcaacaacggcagtacctccgatcaaaacaccttcctcaaggagctcccacatcacccgccctagcgaatctatgttcttggcatctcgacgccaggctaagtggcttggctcatcggtacggcctggcctatacccgttatgcagacgacctggctttctctggcaccgatgcgctgagacacgacgcaccgtttctccgggatctgatcgctgccattgcactcgaggagggctttcggatcaaccaccgtaagaccagactggtaactgccgcccagagacagcgcctgacaggcatagtcatcaatgcccaccctaatcctcctcgctccgaattcgacaggctccgggctaccctgtttaactgtgtgaggtacggacctcagagccaaaacagagacgctagaaccgatttcgccgcctatctggcagggaagcttgcctatgtcactcaacttaatccaaacaaggccgtcagactccatcgcctctggaggcagatagattggcaggagtatgatggtacttccacaatgcatgatgatggcagctga

SEQ ID NO: 12637 - RNA, 1149 nt, synthetic construct
  source 1..1149: mol_type = other RNA
atggaggccatgctggccggtgatgctgaggtccgagctgccctggatcgatccgatgatcctgacttgcctgcgattctgctggatcccccagttatgcatccccccgcggaccgacgcatttctttaccgcttcccagaatcgagacttggagggatctcaggcagtggctgggcgtcttcgacggcgaactggcctggttcgcagacagagaaggacggcaagcagatgtcgtggagccacgtctgcaccactaccggtacagatggcttgccaaacctgccggagggtggcgtctaatcgagcagccgaagacccggttaaaggctatacagaggcagatcctcaggggagtcctggatcgtgttccccctcatcccgctgctcacggctttaggagagggcacagttgccgatctcacgccgcagtgcatacaggtcgcgccgttgtactccggatggatctgcagcacttttttacctcagtgcccgtggcacgcattggggccatgttccgacggctgggatatccggcaggagtggcacacctgctccagagcttgtgcactcactgtctgtcccctcctttagccgcagctcccgatggagccctcaactgggaacaacggcagagactgcgggccaaacatctcccacaaggtgctccaaccagcccagccctggctaatctttgtgcttggcgtctagactgcagactagacgggcttgccaggagattcgggcttgattatagtagatacgcggacgatctcgcgttttcagggccacatggcctggtggccaacgtggactttattgaaggcatggtgggcgcaatagctttggaagaggggttccgcgtcaatcataggaaaacacacctcgccaccaggtcccagtgtcaaaggctgacaggcatcgtagtgaatgccagacctaacctcgaccggcgggcttttgacaggctgcgagcaacgttgcataactgcgcacggtacggtcctgccggccagaacagagacggcgttgctgacttccgcgcacacttggctggccgcctagcatatgcccgctggctgaatcccgacaaggcgagacgccttgagcgcttgtggaggcagatcgactggccaagcgatggagactga

SEQ ID NO: 12638 - RNA, 1308 nt, synthetic construct
  source 1..1308: mol_type = other RNA
atgcccagaaagttcaaacaggcggagtggctggctagctcggtgtgcacaggtgcctgggagcgtgctgcagtggctgagagattggcccgggctttaccagccgacggtcctgatccggtcgcacttgctgccagtattaggaaccgcttctatgaggacggccctccaaacctgaaagccctcaccctatttctgatcgaccaccctcttcttcagcccgtgttccagaagggggggattcggggactgttgctggacccacctgttatgggacggcggcaggataacctggcccctcttcaactgccagaactaccaaccttaagggacgttggtctttggctttgcctgtccgatgcagaaatatcttggttcgcggatactaggctgcgccagggtcgcgttacggaggaaaagctccatcattacagatatctctggatccccaaacgttctggagggatacggctgatcgaaacgcccaaagtcaggctcaaggagatccagcgcatgatagtatcacggattctgagacacgttccacctcatgattcagcccacggctttactcgcggcagaagcattaaaactttcgcagcgcctcatctcaggcagcaggtggtactccggctggacctcaaggacttcttccactccgtgcccgtagcaaggatcgccgcactgttccgtagattaggctatccacccaatgccgcgagagtgctgcaggggttttgcaccaacagtgtgtctcccagcctggccggcaagccttttactcggctgagctggcacgataggaaacgattgcaaggccgtcatctaccgcagggagctcccacaagtgcacaattggcaaacctgtgtgcttgggggttggactgccgactgaaggggttggccgatcactacggctaccagtatacaaggtacgccgacgacctcgcctttagcggtccatcctctcttgcaggaagagctcgatttatcgaggcccttaccggggctattgcacaggaagaaggcttttcactcaatcacagaaaaaccaggttacgcctggctagtcaacgacagcgactcgcgggggtggtggtcaatgagcgcgtgaattgttcccgcgccgactgggatcggctaaaggctaccctgcataattgtgtgaagcatggcccggagtcccaaaaccacgataagcaccccgatttcaaagctcacctgaagggcagggtcacacatgccgcctggctgaaccctagcagaggaggaaaattgcagttcctctttaatcagatcgtctggtga

SEQ ID NO: 12639 - RNA, 1266 nt, synthetic construct
  source 1..1266: mol_type = other RNA
atgcatgccggagcatgggatagggctgctctggctgagagactagctaaagtgttgcctgccggagcccctgatcctgcacgactcgctgctcgtatttacaggcggtttggggagggtccaccaccaagcgtgacagcgctggcggctttcatgcgggaggaaaagttactggagcctctcttcgaaggaaaagggatccgcggcccatcactggagccttatgcaatgggccgacggcctgaccttctcgctgctgtgccgttacccgacctccctactctcagggatgtcggtaggtggctgggtctgtctgatgaggaggtcagctggtttgcggacgtgaggttccgccaggacaagctgaccgagccaaagctgcatcactaccattactcgtggattccgaagagatccggcggcttgcgcctaatcgagatgcccaagttccgcctcaaagagatccaacgtcgcatagtgcgggagatcctcgggcgaattcccccacacgattgcgcccacggcttcactagaggcagaagcatcagaacctttgctgaaccccataccgggcaatacgccgtgctgaggctggacttgaaagatttcttccacagtgtccccattgccaggattgcagccttattccggtccctggggtatccacccaaaatagcccgagtgctgcagggcttgtgcaccaatgccatctcaccaccgctggctgggaagccctttgaaaagctcccttggcatgaaagaaaagcccttcaggacaaacacttaccccagggagcaccctcttccgcacctctagccaatctgtgtgcatggcgccttgactgtagactggagggattagcaatcaggtacggctatagatatacaagatacgcggacgacctcgcccttagtggtccgagtagcctggcacgcagagccgaattcatagaagccctggtcggcgcgattgcaacggaagaaggattttgccttaattatcggaagacacggttgaggttgtcatctcagcggcagcgactggccggcgttgtagtaaacgaaaaggctaactgcggtcgggctgagtgggatcgtttgaaggccactcttcacaactgtgccaagcacgggccagagggccagaaccgtggaaatcatcctgcctttaagtcccacctggaagggagggttgcccactttgcatggcttaaccccgcccgcggtgagaaactgaaaagcctgctcggacgcatcgtttggtga

SEQ ID NO: 12640 - RNA, 1317 nt, synthetic construct
  source 1..1317: mol_type = other RNA
atgactaactcggtgagggccagaaggttagcactgagtattatagatggcgaatggactcagcctgctgtaaccgaccgcctcaggcgagtactggaactgcacccacaggatattaagcagttggcggctcggttgtgtttcttgtatgagcagccgccagcctctttcaaaagattggctacactcctcctcaacgaaccgctactggagtacttctggcagcatgccgcgcagcaggacattcccggtattctgctcgataccccacagatgcagcccccacccgctaacctgcggtgctttcccctgccccgactggacaccctgaaagacgtcgctctttggttggcagttcagcccagagagctggactggcttgcagacatcaacggtcgccaggcacaagtggtggagccacgtttacatcactatagatatcgctgggtcaacaagcgctccggaggccagaggttaattgagatccctaagtcccagctcaagcgcatacagcggctcatccttcacgacatccttgatcgcatcctccctcacgatgctgcgcatgggttcgtgcgtaatcgctcatgcgcctcctacgtggcagctcatgttgggcaaccggtgattttgcacctggacctgaaggatttctttcattccgtccccattaccaaagttctggcattttttaggaccctgggttaccctgccgcagtagccaggacattaatgggattgtgttctcatggcgtgtcacctagtcttgccggaaaaccatttgcagatcaaagctggcagcggcgtcggcaattacggcaccctcacctgcctcaaggtgccccaacaagcggcgcccttgccaatttcagtgcctataggctggattgcagactcgccggactggctaggagatacgggctgagatactcaagatatgctgacgacctcgtcttttccggacccgagacgctgcgaccacaagcagcctggatagagtctgtgactggcgccatcgcactggaagagggcttctgcctgaaccacagaaagacccgggttcgttctcaaagccagagccagaggatcacaggactagtgatcaatgagaaaatcaatatctcacgaacggactacgatcagctgaaggctacactccacaattgtgtccggcacgggagcgaaagccagaaccgatgtgcccatcctgatttccgcgcccatctagccgggagaattgctcacgtgactcacataaatccccaacggggcaaaaagcttcagcagctatttaatgcggtgcattgggaagactga

SEQ ID NO: 12641 - RNA, 1371 nt, synthetic construct
  source 1..1371: mol_type = other RNA
atgaatacccttaggcgagatatccaaacactcgctgcctctctgctagctggacgctgggccctgccagacttaaccgatagactgcagagggccttacattggccgcaccctcccgcatcactcttagcagctaggctactgcgggatctcggagagcaccacgcccctgaagcgagaaccttggcttcgtggctcctgcaggacgctctcctcctcgcacatttggagagggggagtgatgcccggcctcacatagagtggcttctggatgcccacgtaatggaggcacaaccacccgctatggcagccgacgttccgcagcttcctaccacgggcgatttggctgactggcttagaattagccccggggagttgggatggttcagtgacctatggtgcagtcaggcgagggcctctagagaacccctgaggcactaccgataccagtggcggcacagggaagacagacccagactcatcgaaattcccaaacccagactgaagcggcttcagcggagagtgctgcacgagattttggacccaccccagcctcatccagctgcccatggcttccgagccggtaggtcctgtttgacatatgcgcgcccacatactggacagcctgtggtggcacgcatggacctccgagattttttccagagcgtcccgatccgccgcgttacagcgtttttccggtgtttggggtatcctgcacctgtagctcgggtgctgcgcggtctgtgtacccatggggtgtccagggatgtgctgacaagagccggcctggatctgccctgggagcgaagacagcgactggccagccctcatctgccacaaggcgcaccaacttcccccgcactggcaaatctgtgctgttatcggttagattgccgcctgacgggcctcgctgataagctgggtctaagatacacccggtacgccgacgacttggctttctctggcgcagaatcactccgtcacggctttgagcgttttcacatcctcgtcgccaggatcgctctggaggagggatttgagctgaatacacggaagacaaggttgatgaccgccgcacaacgtcagtcactgaccggcatactggtcaacgcccaccccaacctcccacgtagagaatatgacagccttaaagccattcttcacaactgcatacgcactggaccggcagctcagaatcgcgctgggctgcctgacttccggggacatcttcgaggcaggatcgcttacctggcccaaatcaacccagacagaggggcccgtctgcttcggttatgggaggccattgaatggccagacaggagggctactgactccgccgatgcggaaactgcgggtagacgcgcccgctga

SEQ ID NO: 12642 - RNA, 1344 nt, synthetic construct
  source 1..1344: mol_type = other RNA
atgtcccgcctgcggcgggatctccgaactctttctgccagccttctggccggaagatgggccaggcctgacctgagtgaccggattcagagagcgctggaatggactcacgctccggccagccaactggcagcaaggctcacccgcgacctcggagatcaccatccaccacaggcccagcggttggaggattggcttaggcaggattccacacttgtggcgcggttagagcggggcagcgaccatcatccgcaggttcgctggctgctggacgctcctgtcatggaggcacagccagcagctctagctgcccgggtgcctcagcttcccaccatcggagacttggctgcctggctcagactatcgcccggggaactagaatggttatccgaccgatggtgtcagcagtctagagagacaagggaacccctgaggcactatcggtatcaatggcgaccacgagccggacgtgcgccaagattaattgaaatgcctaaaccgcgcttgaagcgcatacagcggcggattctcagacacatcctcgacccactgcaaccccatccggcagctgagggcttccgcagagggagatcatgccttacacacgctgaggctcacacagggcaggccgtggttgtgagaatggacctcgaggatttctttcagagcgtcccagtcagacgtgtgaccgctctcttccgatgtctggggtatcccgctcctgttgcccgggtactgcgtggattgtgtactcactgcgtcagcggtgacgcatggacccgcagtggcttggatatcccatgggagaggagacagcgtctgtccagtccccatctcccacaaggtgcacccacgtcacccgcactggccaatctctgttgctaccgtctggattgccggctgacaggtctggcagctaggctcgggttaagatacacctcttacgccgacgatctggcatttagcggcgccgagacactgcgacacggctttcaaaggttccatgtattggtggccaggatagctctggaagagggctttgccctgaacactcgcaagacgcgcctcatgacttcagcgcaacgacagatcttgaccggcattcttgtgaacgccaggcctaatctgcccaggcctgaatatgatctgcttaaagccaccctccacaattgcatcagatacggacctaaggagcagaaccgcgagggccttcctgacttcaggggtcatctactggggcgcatcgcgcacctgtctcaggtgaatcccgaacggggcgccaggttaagaaggttgtgggaggagattgattggagtaacgaagcttccgaagatcgcctgtga

SEQ ID NO: 12643 - RNA, 1311 nt, synthetic construct
  source 1..1311: mol_type = other RNA
atgagccagctgacccgaaatgccaggttggttgccctttgcattgtcgacactgcctggaacttgcccgcactgacagaacgcctgactattgtcctagctggaggccctcctgatccacagcgattggtggccaggctgctcttccattgcgaagccggccgaagccccagttttcagagaatcgtggacgtgctcgaggctgatgttgacttcgtaagacaccatgctgacgcagcttaccacttgcagcctggggctgcaacaatgcaaccgttgcccgattcacttgtgaccttcccattacctactattcccacactgaggcatctggccacttggctgggactctcagacagagagctcgcctggttttgcgggggccacagacgttatacgactgatcctaaccctgtatttcaccattatagatatcactggcaggatcggtgctccgggattccacgcctcatcgagcaaccgaaacccaagctcaaagccctgcagcgcgaagtgctgcggaatattctggatagggttcctccccatgacgcagcccacggctttcggcgtcataggtcgtgcctgaccggtgctacaccccatacgggccaagcgacccttctgcgcatggatctgcaggactttttcaccagcataaatcgcgcccgcgtggctggagtattcaggatcctcggctacccagcggctgttgcaactgcactggccggcctctgtaccaacagatctgtgctgaaactttctgacaacccaatcgctaatatcccctggcagaccaggaaaaagctagaggcctggcacctgccacaaggagccccaacatccccggcgttagccaacctgtgtgcctggaggttggactctcggcttacaggtttagccgcgcactgggatgctaacttcacaagatatgcggacgatctggcattatcagggggacggcagctacggaagcacaaatcccacaaggaagccctgatcgcagcaattgtgctcgaagaaggctttcgcataaaccatcggaaaaccagatggagcacgtccgcccaacgtcagcgctactgtggggtcgtggtgaaccgacatgctaacgtcgagcgggcagagtacgatcgattgaaggctatcctgaataactgtgtgcggcacgggcctgtcgagcagaatagagccgagcaccctgacttccgcaggcacctgcagggaagaatcagtcatgtcgctcagcttaatccagcacgtggtaataagctcagtaagcttttcgacaggatacactggccccagtga

SEQ ID NO: 12644 - RNA, 1557 nt, synthetic construct
  source 1..1557: mol_type = other RNA
atgagtgcacccatccgcgcattagcccgggcactggctctagcgcttcttgccgacgctgattctccggagagaagatcgcttcgtgctctagctgccagagcgggtcattgcttaggccacgccgccccagaacctgggaatccacctttgcctgaggtgctctttgagcagctgagacgactgtctactgtctcaaccgcagagtgggttcgcctcgagcctgaagacctcgccacctggctctgtcgtggcttctggtggcgaaaggcgggagtccggaatggtacggcgccatggccgcttcaagacgacggagagctgatcaccgaagatgacgacggtgacggggatgatcccagcgccactccctggcatcttcggacggatgcgcagctcgcgcaaagcttccggacatgggcagcatcacccaggactaggggaccactgcactggctgcttagaccgggaacagcaggtccagcacctgcctggatgggacgggcacctcagtgctccgcacctgtgctggctactgctcaggacctggtgcagctcctgggggtgcctctcgaggatttactgtggctggccccagaccacgcacactggagagaaccacaaggcggctgtgccttgccggcctctcactaccggtatcggctgctgcctaaaccaagcggaggactgagactgctagaagcccccaggcccagactagccacagcccaaaggcgcatactggataggctcctggcagacatcccggtacatgaagctgcccatgggtttgtccggggcaggagtgtgggatcccacgctcaggcccacacaaggcaagccgtggttgtccgctttgatctggctgatttcttcacacacataaacgctaccagggttcgtaccttatggagggctcttggccatggaaggcctgccgctgagttgctgaccagactcacaaccactagaactcctgccccagttcgagagcggttgtgggaaggctctgcacccacctcagcccagacaattgtccagaggcgcacaactcatgcccgattggcgcagttgcacctaccacagggcgctcccaccagtcctgcccttgctaacctttgcgctttcgggctggacctcagactccacgccttggcacagcgctttggtgccaggtacacaagatatgccgatgatctggtgttttccggcccccagaacctgcaaggccagtttggggctctccgcgcatgggtgggagctatcgcccaagacgaaggcttcgcgctgcgaggtgacaaaacccggctgatgcccgcccatagacgacaaagcgtgacgggcctggtggtgaaccagcgtcccaattactcccgggagcagtttgacattctcaaagcccgcctgcatcgtttagcccgcttgcccggcgtagacgtagcagagcgagctcggttggagggggaaatccactgggctgggcagtggctggcaccaaccaggaaggagaagctgcagcgcctcttcggggctattcgcttcactgatgccccctga

SEQ ID NO: 12645 - RNA, 1599 nt, synthetic construct
  source 1..1599: mol_type = other RNA
atgacgttgtccgcacccattcgcgctctggcaagagcattagcactggctctgctagctgatgctgattccccagaccggcgatcacttcgggcactcgtagcaagagctggccattgtctcgggcatgccgccccagaaccaggaccttccccactgccggaagtgctactggaacagctcagacgcctgagtacagtcagtgcggctgaatgggccaggttagaacccgaggatcttgctaattggttgtgccgaggtttctggtggagaaaagccggagtgcgcaatggcactgcgccatggcagcttcaggacggaggcgacctggtcactgagggcgacgatatcggattttgggaccctgaggataatgatggcgacgcacccagtgccaccccttggcatctgcgaaccgatgcccaattagctcagagcttccgaacttgggctgcatctccacgcactggcaggcctcttcactggctgctgaggcctggaacagcgggtcctcctccagcatggatgggctctgctccccagtgttctgtgccgatgctcgcgacagcgcaggacctgttccagctgctgggtgtccctttggaggatctgctgtggttagcgcccgatcacggccactggagggaacctcaaggcgggtatgctctccccgccagccactatcgctatagattgttgccaaaaacctcaggtgggcttcggctgctagaggccccaagacccaggctcgctaccgcacagaggcgaattctggaccgtctgctggcgggcatccctgttcatgaggccgcccatgggttcgttagggggaggagcgtcgggtcacacgtgcaagtgcacacacgtcaggctgtagtggtgaggtttgacctcgccgacttttttacccacataaacgccacccgcgttagagcactctggcgagccttgggtcatggacgtcctgccgccgagctgctgactaggctgaccacaacacgcactccggctcccgttcgggagagactctgggaggataacgctccgacgtccgctcagaccatagcacagcggcggtcgacacacgcgagactcgcacagctacacctccctcagggagccccaacttctcccgctctcgcaaacctgtgcgccttcggactggatctccgccttcatgccctggcccagcggtttggggctcgttacacccgctacgccgacgacttggtgttttccggtccccaggacttgcaagggcagttcggggcattgagggcctgggtgggtgccatcgtgcaggatgaagggttcgccctgcgcggcgataaaacaaggcttatgcccgctcaccaaagacagagcgtgaccggactagtcgtaaatcaacgacccaactacagccgcgagcagttcgacatcctgaaggcccgtctccatcggctggcacggttaccaggagttgatgtcggcgagagggcccggcttgagggagaaatccactgggcaggccaatggcttgcccccacgagacgggaaaagctcttacggctgttcggcgccattagatttaccgacgccgcccaggacaaggggtga

SEQ ID NO: 12646 - RNA, 1590 nt, synthetic construct
  source 1..1590: mol_type = other RNA
atgaccaagactcccgcaaggactcgtgcactggccaaggccctggctatggccgtgcttgcagacgctcgggagccagaacgacggactctgcaggccttagccgctagagccggagcttgcctggggaacaacaccactctggccgactcccctgtccctttgcctcctccactcctagagcagctgaggcgcttatcacatgcctcaggcgctgaatgggcccgactggagcctgaagacgtagcaacatggctgtgctggggcgtgtggtggagaaaagctggcttaaggaatggtagcaccctccaaagcctcaccacaacctttagtcagcaggaagagaaggatcaggacgcctgggacgagctagtcggcgacgacgatgagaatgccgagccagcgttacccctccaccagtggccagatccccagcttgctcgtgccttccggacatgggccgcaagccctagaacaggagagcccttgcactggctactgcgatctgctacagcaggggctcatcctgcttggatgggtcgggaaaggactacacctgtgctgctgaccgcaacagatgtgactgaaaccctggcaatcagcctggatgatctgctgtggctcgcccccgagcatgctcattggagggaaaggcaagacggcggtcacgctttgcccctttctcactaccgctatcggctgcttccgaagccatccggaggcctgaggttgctcgaggctccaaggccccggcttgcttccacccagaggagaatcctggattctctgctggcaggggttccggttcacgaagccgcccatgggttcgtgcggggtcatggagttgggacgcacgcccaggtacacactcagcaggccgtagtcattcgttttgatctcgcagattttttcatgtgtattacagcgacccgggtgagagccttgtggagggcattgggtcatgggaggccagcggcagaactcctgacaagattgaccaccacacgcacgccccaagccattagagagcgtctacttgaagcagcccctctcccccgcgaggcaatagctcaccggagagccatcaacactagactgaaacagccacacttaccccaaggcgcccccacgtctcctgccttagccaatctttgtgcgttcggcttggatctgcgactcaatgctctggctgagagattcggagctcggtatacccgctacgcggacgacctggtcttttcaggctcgaaggccctccatcagcaatgggtggacctccgtgcgtgggtgactgcaatcgctcaagacgaaggcttcaccttgcgcgccgataaaacgcgggttatgccggcacaccagcggcagtatgtcacgggactcgtggtgaacgagcgagcgaactacagtcgcacacaatttgatattcttaaggcgaggcttcacagactggggcaacagccgcaggtggacatatccgaaagagcccgcctcactggagagatccagtgggccagtcagtggctggcaccaacccgacgcgccaaactacagcgcttgctgcacgctatcagatttagcaatgagctgtga

SEQ ID NO: 12647 - RNA, 1590 nt, synthetic construct
  source 1..1590: mol_type = other RNA
atgaagaagatttccgcacgcacccgggccttagccaaagcacttgccatggcggtactggctgatgcacgggagcctgagagacacacattacaggccctcagtgctcgcgcaggtgcttgtctgggaggaaggactacacctgccgactcccccgatccattgcctgaacctctgtctgaacagctccgcaggctcagcaatatgagcgatccagagtgggcccgcctggaacctgaggacgttgccacatggctctgttgggggatatggtggagaaaagctggtgtgaggaacggctctgccctgcaggccctaactgcaaaccgggggcaagacgccgaagagcaggatgcctgggaccacctggccgatgagggcgatgaggatgccgaaccggcccttcccgttcaccagtggcctgatccccaactggcccgtgcctttagaacttgggccgccaatgtcagggcgggagaaaccctccactggctgttgcgtccagctgcagctggtccacaacccgcttggatgggcagggactccactacccccgttctgctcaccgccacggatgtgacagaggccttagctatctcattggacgacctactgtggctcgcccctgagcatgcccattggagggaaaggcagaacggcggccatgctctgccgctgagccactatcgctacagactgttacccaaaccatcaggggggctacgtctgttggaggctccaagaccctgcctcgctagtacgcagcgacgcattcttgacagtttgctggcaggcgtgccggtacacgaagctgcgcatggcttcgtgcgtggacggtcggtaggaagccacgcccaggttcatacccaccaagccgtcgtgattaggtttgatctggctgacttcttcaccagcatcacggctaccagagtccgggcactctggcgagctctcggtcatggccatcctgcagcagaactacttacacgactcacgactacccggaccccacaggcagtgctcgatcgacttctggaggcaacatccattccaccagaagcaatcgcacagagacacacaattggtgcgcggcctaagcaaccacacttgccccagggagcacctacatcacccgctctagccaatctctgcgccttcgggctggaccttagactgcacgccttggctgagcattttggggcccggtatactaggtatgctgacgacttggtgttcagcggcccgaaagcccttcttcaccgccagtgggtggattttcgggcctgggtcaccgcgatagcacaggacgaagggtttactttaagagctgacaagacccgagtgatgcccgcgcatcagcgccaatacgtgaccggcctggtcgtcaaccagagaacaaattactctcggacacagtttgacactctgaaggctcgactgcatcggctggcccagcaacctcccgtgaacatctcagagagggcacgcctggctggagagatccagtgggcctcccagtggctggctccaactcgcagtgcgaagctgcagagacttccccacgcaatcaggttctctaatgaggcgtga

SEQ ID NO: 12648 - RNA, 1521 nt, synthetic construct
  source 1..1521: mol_type = other RNA
atggccgttctgacagacgcacagggcggtccagagagacggactccacatgctctcgctgctcgtgccatggcatgcttaggcactcccgctgcccaggatgccattttacccgacagtctcacagagcagatcaggcggctatctctcgtgtcagcccttgaatgggctcgccttgagctggacgatgtggctacatggctgtgctggggcagatggtggaggaaagccggcgtgcgcaatcctcacgccgttcacagcgagcccgagatagacgatgacgccactttcctgtttgacatgagcgaggatgaagaggcgcacgagcaggggtccgcagatgtacccctggccctttgggccccacaagatctggctagggccttccgggaatgggcagcatcccctagatccggagcgcacctgcgatggctcttgcgaccggcaacaactggtccccagcctgcatggatggatcatgcccctgggtttgctctactggctacggccgctgacgtcacccaggcattaacactgtcgcgcgaggatctgcagtggcttgctcctgagcacgcccactggagagagcatcacaattcagggctggcactaccgccctcacactaccggtatagacttctcgctaagcccagtggagggctgcggctgttggaagctccaaggccacggttggcccaagcccaacgacgaatactggacaagcttctggcctccgtgccagttcacgaagcagctcacggctttgttaggggccgtggtgtgggtagccatgctgtggcccatgcccatcaggccgtggtcatcaggttcgacctggctgacttctttacgtctattaatgcgactcgtgtgcaggccctctggaaagcactcggacatggacgatctgctgcccagcttttgacccgtctcacgactgccaggaccccttccgctgtcagggaacggcttctcgaggcactgggaagtagctcagcccacttagcgcagcgcagagcgctcaatcagcggctcagccgcgcacatttgccacagggcgcacccacctctcctgccttggcaaacttgtgtgctttccgcctggatgtcagactgcaagcattggcccagaggttcggggctaactacacaagatatgcggacgatatggtattcagcggaccccgggcccttagaggccagtttgctgcactgcagtcatgggtgtctgccatcgcgcaagacgagggattcaccctgagagccgataagacacgcgtcatgccagcccatcagcggcagtacgtaaccgggttagtggtgaacgaacgggtgaactattcccgcgcccaatttgataaactgaaagcccagctacaccgcctctctcaacagccgcgagttgcagccagcgaaagaagtagggtcgctggcgaaattcagtgggcgagtcaatggctggcgaccaccagggctgcaaagctgaagcgcctgttcgacaccatcaggttttccccttga

SEQ ID NO: 12649 - RNA, 1605 nt, synthetic construct
  source 1..1605: mol_type = other RNA
atgaaaacacccgtgaggtctagagtgctcgccaaggctatctctatggccgtgctcgctgatgcgcagacaccagagcaccgcaccccacaggcactggttgctcgcgtccaagccagcctgggcctagaaccagctgccggttctccactgcccgctttcctcttggagcaactccagcgcttaagtgcaatgtcaagtccagagtgggctagatgggagccggaggatgtcgccgcatggctctgctgggggagatggtggaggtctgctggccttcgttggggcaccgaacacagcggtgccggtgtagaggacggagccagtgcatgggacggggacgatgaagacatcgccgagcccgatggcgatggagaaggcgatgatatcttaccaggccttcctccgactgactggactgcaccacgcctagggcaggcctttcggatttggacagctaccgccagaagcgctgtcccccgaagatggttactacgacctgcaggggcaggacctcttccggcatggatggaccgcgggaccacagtgcccgtattggccactgcgaccgacgtcgcgcaggttttggctgtaagtgtcgaggatctcctgtggctggccccccaaggagcattttggcgggaaagacatagcgaggggcactctcttcccgcttcccactacaggtacagactgctgccaaaacccagcgggggattgcgcctgctggaatcccctagaccgcgactcgtgcatgcccaaaggcggatcctctatacactgctggctaacatacccacacacgaggccgcccacggtttcgttcgtggacggtccgttggctcgcatgcacggattcacactggccaggctgtcgtgattaggttcgaccttgccgacttcttcacgcagatacacgcaacccgagtgcgtgctttgtggcgcgccttaggacatggaagggctgcggccgagctgctgacccaactcactacggctcggactccagctggagtcagggaccgccttctcgaatcaatgcctgagctgcccacaagcattgcacagcggcgtgctaccgcccagagacttgcacggccacacttacctcaaggtgcacctacctcccctgccctcgcgaatctgtgtgctttcggcctggatgtacggttgcaggcactggcgcagaggtttggggccaactatacaaggtacgcggatgatctggttttctcaggccctgacatgctgcgacggcagtttatcgcgctgagagcctgggtggcagccattgcccaggacgaggggtttgcactaagggctgacaagacccgtgtgatgcctgcccatcagagacagtttgtgacgggactcgtggtgaatcagcgggccaactattcacgcgtgcagttcgacactttgaaggctcgcctgcatcggttggcccaacaggctcaggtggatgccggcgaacgagcgaggctggaaggcgaaatcagatgggcctcccagtggcttgcacccgcaaggaccgccaaactgcaacgcctcctggccgctatcaggtttgggagcatggactccggtctggccgccaagggctga

SEQ ID NO: 12650 - RNA, 1602 nt, synthetic construct
  source 1..1602: mol_type = other RNA
atgaaaacacctgtacgatcccgggtgctggccaaagccatcgctatggcagtcctggccgatgctcagacacctggtcaccgcaccccacaagccctcgttgctcgggtgcaggcatgtctggggcttgaagccacagctgggcccacacttccggcgtgtgtgcttgagcagttgcggcggcttagcgccatgccctcccttgaatggagccgttgggagcctgaggatgtggctacctggctgtgctggggccattggtggagatccgctgggctcaggcaagggggcttaccatgggcagcaggccatggtgacgccccaacttgggagggcgacggagatgactttgccgagccggaaggcgaaggcgatggaggaggcaccttgccgggtctgccacctacagactggaccgctccccgcttagctcaagcgttccgaatctgggcggcaaccgccaggactgcagtacctcgcagatggctgctcaggcccgctgaagctggaccacctccagcatggatggagcgctcaacggctccccctctcttggctaccgctgcagacgtggcccagatgttagcagtcagtctggatgacctgtcatggctcgcctctcagggggctttctggcgagaaaggcacgccaccggccatgcactgccaccatcccattatcgttacaggctgctgcccaagccgagtggcggtcttcgcctgctagagagccctcggcctaggttgatgcacgcccagcgcagaatactggacacattgctggcagccattcccctgcatgaagcggctcacgggtttgtacgtggtagatctgtgggatctcacgcccaagttcacaccggccaggccgtcgtgatcaggttcgatctggccgatttctttacccagattcacgcgactagagtccgcgccctgtggagagcactaggacatggacgagccgccgccgagctactaacacggctgagcacgactccaactccagcaggcgttcgcgagagactccttgagtgcatgcctgaagtgcccgcctttgtcgcccaacggagggcaatggcccagcgtctggcacgacctcacttaccccagggagcccctacttcaccagcgcttgcaaatctctgcgccttcgggctggacgtgagactacaggcgctggcacagcgctttggcgccaactatacaagatacgccgacgacctcgtgttttcgggacccgaaaccttgcgccggcagttcatagcgttgcgtgcttgggtggctgcgatcgcgcaagacgaggggtttgctctgcgggccgataagactcgggtcatgcccgctcaccaaagacagacggtgaccggcctggttgtcaatcagcgggctaactactctaggactcagttcgatacactcaaggctagattacatcggctggcacagcaggcctgggtggaagcaggggatagggcacagctcgagggagagatcaggtgggccagtcagtggttggctcccgctcgagctgccagactccaaaggctcttcgacgccattcgcttcgctcccgttgatggtgaggccgccgctaaagactga

SEQ ID NO: 12651 - RNA, 1575 nt, synthetic construct
  source 1..1575: mol_type = other RNA
atgcatgtacatgtgcatgcacgcgttctggccaaagccatcgctttggcagtgcttgctgacgcccaggcccctcaaaggcgcactgtcgaagcgctgagggcaagggttcaggcatgtctgggacacgcccccggggaagaacaaaggccccttccggcacccctgcaggaacaactccgacggctcgccactctccctacaagggagtgggcgcggttaggagccgaggatatcgggacctggctccgggagggattttggagacgcatggccggtgtgcggacaggagctccatcagccagaggcgccagagttcccgatgattcctttgacgaggaggacaacgacaccgacgatgacggtatgcccgcagctccaccgtctcagtggactgctagagccttggccgaggccttcagacagtgggcctcccacgtgactcccaagaggtggttgctgcgaagcgcaacaacgggacccttgcctgcttggcgtgattctgatggagctagagccggcccattgttagccacagctgctgacctggcaggcgccttagcagtgagtctggaagacctgctctggctggcgcccgaacacgttcactggagggagaggcagccagacggcggtcatgctatggcccctagtcactaccgttaccggctcctgccaaagccttcaggtgggctcagactgctggaggctccgcgacctcgacttgcccaagctcaacggcgaattctggatctgctgcttgccccaatacccgtccacgaggcagcacatgggttcgttcgcggctgtggcgttggatcccacgctcaagtgcatgccggccaagccgtggtgatccgctttgacctggctgattttttcacccacattcacgcgaccagagtaagggccctgtggcaggccttagggcatggtcacgccgctagcgacctcctcactcgcctgaccactgcccggactcctgctgcagtgcgagaacggctgagggatgcctgcacaccactcggccatcctagctccgagcattggcatgcgaccggaagacacctcgctagcgcccatctgcctcaaggcgcacccacatcgccagcactggcgaacttatgcgctttcggcctagatcttcggcttgaagctctagcccgccggttcggcgcaagatatacgcgctacgctgacgaccttgtcttttcagggcctcagacccttttgcacgccttcgtacggttgagggcgtgggtgagtgcaattgcacaggacgagggttttgcactgcgggctagtaaaacccgtgtgatgcccgcgcaccagaggcagtatgtcaccgggctagtcgtgaatcaccgcgtcaattggtccagagcccagtttgatacattgaaggctagactgcacaggctggcccgacaagcctgcgtggatccaggcgaacgtgcacgcctggctggagagatccaatgggcgaggcaatggcttgccccgacgcgttctgctaaactacagcgcctcttcgaggcaatacggttcgccgattctgggagcagagacgggtga

SEQ ID NO: 12652 - RNA, 1584 nt, synthetic construct
  source 1..1584: mol_type = other RNA
atggccaccccatctcgcatactgagtaaagccgtcgcaatggccctgctggctgatgcacagacaggtgcagctgccaggcggccatcagcactggcagctcgtgccagccactgtctcgcgtcaaatgccggcgctccctcaggagcacagcctcttccagcaaccttcctggagcagttaaggcggctcagccagttgcctgcccgcgaatggcagaggctggaggtggaggacttagccacgtggctacggcatggacggtggtggagacaggcaggactcgtggccagtagtgggcctggcgaagaactggacgagcctgtgggcgattttgcagatgaggatctcttctttgatgacgacgatgagtctattccagatccccccgccccagcactacagagtaatgctcaactcgctcaggcttttagggtgtgggccgctcaacccagcgtacaggtgcgcagatggctccttcgtccagctcagcctggaccccaaccgccttggttggacgagcgtacacacggtagccgagctgctccaaggtgggcgacagcgaccggacttgcacaggccttgaatttggagttggacgaactcctttggctggctccggctcatgctcactggcgagaacgggccggcttagccatgccaccaagccattaccgacatcggctgctgcctaagagatcaggagggctccgcctattggaagcccccctccctaggctggctcaggtgcaacggtccctgctcgatcaggccctgaaccccatccccactcacgaagccgcccatggttttgtgcgcgggaggggtgttgcttcccacgtagctatgcatgctgggcaagccgttgttgcaagattcgacctgcgcgacttctttactcaggttcacactacaagggtgcgtgccttatggcgtgctctggggcactccagagccatggccgagttactgaccggcctaaccacgacaagaaccccgtctgcggtccgagagagactgctggatgccgttcccacggtcccctctgctgcagtagccggtgcgttggcacagagacgggccagagctcaggcccttgcaaggggacatctgccacagggcgcacctactagcccagctatcgccaacctgtgcgccttcggactggatgtgcgcttggcggcccttgcccaacgctttggagcgaggtactcccggtatgcagacgatctggtgatttcgggcaacgaggaccttcggcgccaatggcccaatctccgagcgtgggtgtctgcaattgtcagggacgagggcttcgccctgaacgccgataaaacccgcctgatgacagcctcccagcgacagcacgtcaccgggttggtgctgaatactcggcctaacctgcccagggcccagttcgacgtgctgaaggcgcagcttcacagattggctaagcaggcaggggtcccgctccaagaaagacctaggctgcttggccagctacagtgggcacggcagtggctggttcccactagagccgccaaactccaagcgctcttcgacgctatccgctttgcagactga

SEQ ID NO: 12653 - RNA, 1533 nt, synthetic construct
  source 1..1533: mol_type = other RNA
atgaaggcagctaatcacgtgcgacacgccgctttagccgttgcccatgcatggctggccgacagtgacgctgaaggaggaagactgggccacgcactgatggctagagcccagagctctctcggtcttgctccccaggaccaaccagattggctgcgcgcttggagtctccggctgcagaacctgcccgacccaatgtgggccagacttgatgtgtggagactggccagcaccctatgcggcgaaactagcttgggcgcggcctgttaccctgagcgcaggatggccggccttaccgacgagaatgccacactgcctgacccagcagcttcctggaactggggcgaagagggcgaggaagacgtcgtggattggttggacgacgagcatcctgcccgagccgagactgactttgagatctgggtcgaaaggagtcacaggcgggtgcgtcgctggcttttgcgaccagcgcgaatgcaagtggctaccatggccctccacgatctggagctgcccacctggccggattctgcgctactggctgaagccctggctatctcggtcgacgatctagcgtggctagctcgcccggcatggcaattagccccccgtgaccagcctcacaaggccctttctgcctcacattatcgccatcggctcataccaaaggcccgtggggggctgagattactcgaggtcccgaaacagaggctcgcagctgcacagcagcaaattagagtccagctgctggagcgcattcccgtgcatgaggctgcacacggttttgcccgtggcaggagcgtactcacacacgcagccacccatgcaggacagcctttcgtttgcgccttcgatctgcaagacttttttcactccattactgcggcacaaataagggccctttggagaactttggggtatcccgcagggatcgctaccgaactgaccgcactcactaccactgtgacacccgcccccgttcgcgagagactcttggaagacgcctcagttacgcggacgcaggctagacggttggccttacctcatctggctcagggcgcttcatcatcccctgccctcgccaacctgtgtgcattccagttggacctgaggttgagcgctcttgccgagagattcggcgctcggtattctcggtacgcggatgatctggtattctccggacccgcatcccttcagaggcacttcgccgccctacacggatgggtgcgagggatcgcggaagatgaaggatttgcgctgcaccctgagaaaacacggcgcatgccacgacatgccaggcagaggatcacaggtgtcgtggtaaacgaccagccaaatctggctaggcacgattacgatctgctccgggctgaacttcatcagctgagcctccagaaggaggctgtgtccgatgaggtgctggcaagtttacgcggtcgggttgcgtgggcctgccagttagtgacgccagcaagacaggaaaagctcaaagcactgttgattcggtgttctgcagggagccaaacaccttga

SEQ ID NO: 12654 - RNA, 1536 nt, synthetic construct
  source 1..1536: mol_type = other RNA
atggctctggcagtagcccacgcatggcttgctgactccgacgcagacgggggacgacatcagcggagccttatcgctcgagctcagaattgtctagggctcgccagtagtgatcaacctgattggttggtgacctggtctttgaggctccaccacatgcccgacccaatgtgggccaggttggatgtccagcgcctcgcttcagccctcgtggagcaacagtctctcggcgccgcttgctatccccaatggagggtaataacacaggccgccgccgaaaagggaattcctgacgacgaagagcctgacccacacggactgggcattggctgggccgaaggttacggcgaggaggatgacgacacagagagtactaacgcagcccctaattttagtcagtgggttcagcaggagcgaccagcggttcggcgttggttgcttagacctgctcgcatgcagatcgccgccatggcactccatgatctgggtctgcccaactgggctgatagccagcaactggcacaagccctaggcattggagtttcagacttggactggctggcaaggccagcctggcagtttgcgcctcgtgaccagcacggtaaaagcctcgctgcatcccattatcggcacaggctcaccccgaaggctagaggtggattacgtcttctggaggtgcccaaacagcagctggccgctgtgcagaagaagattcacgtgcagctgctgtctaggatccccgtccatgaggccgctcatggcttcgtcacgggaagaagcgtgctgacccatgccgcacttcatgctggccagcccgtggtgtgcaccttcgatctgagggattttttccatagtataactgcagctcaaatccgcgccctttggcgctctctgggttacccagctgggatcgcggcacagctgacagccctgacgactaccgttactcccgcaggggtccgggaaagactgctggaggatgcctccgcgacaaggtcccagatcaaaaggctggcgacaccccatctgactcaaggagccgcctcttctcccgctctggcaaatctgtgtgcattccacttggacatgcggttatcggctttggccgagcggtttgacgcccggtacagcagatatgcggacgatttggtgttctccgggcccgatagcctcagaagacactttgcgtcactcagaggctgggttcgcgggattgcccaggacgaaggctttgctctacacccagataagacccgacgtatgcctgaccacacccggcaaagaattaccggcgtcgtggtcaacgaaaagccaaacctttcaagggccgactatgatctcctacgggctcagctgtaccgactggccgcacagcaggatcctgcgtcagatgaattattagcaactcttcgcgggagagtagcatgggcctgccagttagtgtccccaagccgccaggaaaaactgaaaacactgctctcccgcatacctcgcgacgatgccccgcacaaaatggtgaagccgatcttccaatga

SEQ ID NO: 12655 - RNA, 1332 nt, synthetic construct
  source 1..1332: mol_type = other RNA
atgaatgataggcactggatcgcacggggaattgctcgcgccctccttgctcgattcagggagaacggcgacttctctgctgaggggctgcttgcgcaggcgagcatggcactcaacggtaaccctccctggctcaaacgccttattcgcccattggccaagctgtccctacccacatggcagaattttacggtggataccctcagcgaaaggttaatgaaagacgcccgcttcgacgaggcttttaggcaggtcgaaagccccaggatccggcagctttttatgcatcgtgctacaatggggctgcggccctttgcactgcaggattgtgagttaccagccattaccgacgacgtcatgctggccgagttcttaaaggtgtcaaccgaacagctgcattggctcgcccccgaattgccgctcgaacgtctgcctggtgctggccactacagatatcgcttaatacctaaggctagcggaggcctgcggttattggagatgccaaaagcgagaatgaaggccgcccaacgacagctgctcgataagctgttgaatcgcatcccactgcacgaagctgcccacggtttctgcgcaggtcggtcggtgatctcccatgctctgatgcattccggccaagatgtggtgatcagatttgacctgaaagactttttcacgagtatcaccgccgcgcgcgtccatgccattttcaggactcttgggtaccccgagggcgttagcaaggccctgactacaatctgcacaaacagaacttcacggatgattgtcgaaaggttgcttgatgagcggggggttcatgccggcgcagcacaaaggctgaggattccgcatctggcccagggagcaccatcatctccaactctggctaacctagcagcattttccctggatttgcgtctaagtggcctagcggacaagtttggggctcgatatagcagatatgctgacgatctggttttttcaggagagaaacacctgagagctgatttcagagtctttgccgtatgggtgaaagccatcatcgaatccgagggcttcatactccaccctgacaagacccgatgtatgcctgcccaccagcaacaacgcatcaccggagtggtggtaaatactaagaccaacctctctcgtgaggagttcgaccacctgaaagcacggctccaccagtgcgtggtgaatggagttgccagtcagaattctatggggcaccctgacttcaaagcataccttcagggccgaatagcatgggccagacaactgaacgccagtaaggctcagcggctccagagattgttcgatcagattacatggtga

SEQ ID NO: 12656 - RNA, 1413 nt, synthetic construct
  source 1..1413: mol_type = other RNA
atgccaccagctcatcacaggcggtggctcgcgacagggttggctcatgccttcttagccgaccacgaacaacccggagcacggacaccagaagcactcctggccagggctaaggtgtgcttggggtgtgagggagcagcccctggatggctagcctctctggctcaagctgttgccatccggtgggcccgacagggtctgatcgacactgtcgattcgttggcccagatgctcttgcagcgtcccgagtgggccctggacaaacaggcgttcgacgagggggacgaggagccaagtgacgattcagcaaaccgtccggagccggtacctgtcggacagtgggctgtgagacactggctgttgcggcctgccagaatggctgcaccaccatgggggctacagcacatcgatacccccgatttgccaaccgctgctgactgggtgcaatggcttggcattgaacccgacagacttctgtggctgacccacccttcacagcactggagagaaggcagcgaacgaccccacgccacagtagcccaccattatcaccacagactgctcccaaaacggtccggcggccttcgcctgattgaggcacctaaaagcgagcttaagcaggtgcagcgccttctgttagataggctcctcgcccagctgcctacccatgaagctgcacacggattcgtccgcgggcgtggagttcacacacacgcgcaagtgcatgccgcccagccctgtgttatctcttttgatctgcgcgattttttcccgtccatcggtgctgccaggattcgggccttctggaggtcctggggatatcccgaagccgcggcaaggatgctcactcagctctgtacgactcgaacgcccgtcgcagtaagagagcgactgcgcgaggcacaggcactggatttcaacgctgcgaagcggctggccacccctcatctgcctcaaggcgcacccaccagtccagctctcgctaatctgtgcgcatttgggttagatctcagactggagggtctggcccatcgctttggcgctaggtactcacgatacgctgacgacctcgtttttagtggtcccgcacccttagcccagcgctttcgtcagcttcatgcctgggtcggcgccatagccgcagacgaaggcttcgcacttcatcctgggaagttgaggagggccttaagccaccagcagcagagaatcactggcctggtggtgaacgctcagccgaatattgctcgggcagattacgatctacttcgcgcagagctgcatcatgctgtgcggtccgccagcgttgacgcgcaacaaagggcccacctccagggcagagtagcttgggcgtgccaggccctagccccttctagagtggcgaagctgcaagctctgctggcccgcatagcctga

SEQ ID NO: 12657 - RNA, 1413 nt, synthetic construct
  source 1..1413: mol_type = other RNA
atgactacgacccagcatcggagatggttggccacagggctggcccacgcctttcttgccgaccacgaacagccaggtgctcgcacgccagatgcgctattggcgcgggctagagcctgcctgggatgtgagggagccgcaccagagtggctggtgagcatggctcaggcagtcgcaacccgttgggcgagacaggggctgatagacacagtcgatagcctggctcagactctcgtacaacgtcccgagtggagtgcaggcgagaacgctctggacgatgatgatgaaacagtggacgatacagcaacccaccctgaaccggtcagtgtgggggagtggacagtgcgccattggctgcttagacccgccaggatggccgctttaccttggggcctccagcatatcgacagaccggacctccctaccactgaggactgggcccagtggctcggaattaccaccgatcggctgctgtggcttactcatcctagtcagcactggagggagggaaacgagcgccctcacgctacagtcgcacaccattaccaccataggctgcttcccaagcggtcagggggtctgaggttgctggaggcaccaaaaaccgaactcaagcaggttcagaggctcctcctgcacagagtcttagcgcaccagcccgcccacgaagctgctcatggctttgtgaggggccgtagcgtgcacacacatgcccaggtgcacgctgcccaaccttgcgtaatctcctttgacttgagagatttcttcccctcaataggagccgcccggatccgagctttttggcgcagctgcggctatcccgagggcgtttcacagatgcttactcaactctgtactaccaggacgcccgctgctgtgagggaacgcttgcgagaagccaaggcccttgattttcaagcagccaaacggctggcctccccccatttacctcaaggggcccccacttccccagccctagcaaacctttgcgcattcggcttagacctgcgccttgagggtctggcccaccgattcggcgcacgatattcaaggtatgctgacgacctggtgtttagcggcccggcttcgctggcatcccgtttcagacagctgcacgcttgggtggacgccattgcggcggatgaaggattcgtgttgcaccctgggaagttgtctagacggctatcccatcagcagcaaaggattaccggtctggttgtcaatgcccaaccaaatatcgcccggcaggactacgatcagctcagagcagagctccattgtgctgcgcgcatggggccagttggagcacagcaaaaggcctacctacagggccgggttgcatgggcttctcaggccctggctccagcacgagtaaccaaattgcgctctctcctggcccaggtgcagtcttga

SEQ ID NO: 12658 - RNA, 1419 nt, synthetic construct
  source 1..1419: mol_type = other RNA
atgacaactagtcacagacacgggctggcgatcggcttagcccacgcactgctagcagaccatgagaggcctggcgggcttacagcatctgcactgctagggagggcgagtgcatgtttggggtgcgaaggcgctgctccctcttggcttaggcggctgacccagtcaatcgccactcgatggcagagacacggcgctatcgataccctcgacacccttgcccaggctctgttggatctgcccgattggggagccctgttccatgacgatgacgacgctgaaggcgatgatacacccgccgtaaaccccgacgaggataagctgcctctcagcgcctggagagtccgcagatggctgttacgccccgctcgtaccgttcctcctgtgtggggcctcccagccatagatagaccagactggccctctgccagcgattgggcagacggtctgagcttgaccccggagcggcttgcgtggctcacacatccgtctcttcattggcgcgaatcgtcagaacggcctcaccagagagtggcaagccactaccgccacgctctgcttcccaaacggtcaggtggactgagattgctggaggcaccgaagcctgagctcaagcaggcccaacggcgcttactggatacatgcttaactcaattgccctgtcatgaggccgcccatgggttcgtgcgaggtagggacgtgcatagccatgctgcggttcatgcagggcagccatgcgtgatcgctttcgaccttagggacttttttcccagtatcggagctgcccgaattcgggctctctggcggtccctcggctatcctgaaccaactgccgacctgctgactcggttgtgcacaacgcgaactccagccgccgttagggagcgcttgcgtgaagacggcggtctgcactttctggccgcgaagcgcctagcaagacctcacctgcctcagggtgctcctacctccccgagtctcgctaacctctgtgcctttggactggacttgaggctggatggcttggctcaccgattcggagctcgctacagccgttacgccgacgatctcgtcttctccggcccagtctcactgcaacaacagtttaggtccctgcaggcatgggtgaaggcaattgccgccgacgagggattcgtcctgcatcccgggaaacagaggcagatgagagcccaccaacagcagagaataaccgggctcgtggtgaatcagcacgctaatttgccaagagaggattatgatcggctccgggccgaattacaccaagcggcacgttccggaccagtagacgcgtccaagcaggcaaggctccagggacgagtggcttgggcctctcagcacctggccccaaccaggattacgaaactgaaagcacttctagctcgggttgaggcccgcgcctga

SEQ ID NO: 12659 - RNA, 1536 nt, synthetic construct
  source 1..1536: mol_type = other RNA
atggcaacctctgacggatggcatacccggagagctattagagcagcaccgctcgcacaggacagatcccatccaacaggctggttagcacatcaggtgcactatccacaccatactcctaggatgacagcgttgcaccgccgcctaggcctatccatagggctggcccatgccatgctcgcagatcatcgtaggcctggaggaagtgcagcgccggctttactcgcccgcgcatgtgtgtgtttagggtgtgaggatgcccctccaccctggctggcatcattggcccaggccgttgctctgcggtggcaaaggcacggccccatcgacacgttggacagcctcgcccagttccttgctggccagctggagtgcgacgacactgagccagatgaggatgacgatcttgccgcccccgctattaatgacctgtggtcagatcgaccaccttctacttggcgagtgcggcactggttgttacgtccagcacagaccgcacagccagctgcaggactgcctgctgtggaacggcctgatctcccaactgaggatgcctgggctgcttggctgggactggatcctcaacgcctccggtggctgagccacccttcagttgactggagagaagaccaccaccgaccccaccgcaggatagcagctcattatcgccacgtcctgctgccaaaacggtccggtggcctccgtctgcttgaagtccctagaccagacctaaggcaggcccagcggaggcttctggatggctggctgtctttggtgcccgctcatgaagccgcccatggcttcgtaagaggccgtaacgtgcactcatttgcccaagtgcacgctgggcaagcctgcgtcattcgatttgacctccaggatttctttcccagcctgggtgctgctcgtatccaggccttctggtcggcctggggttaccccgaacctgtagcgcggatgctgacccgcttgtgcaccacaaccacgcccgcgatggttcgcgaacgcttgcaggaggcgccctccatggatgctatgtccctgaagagacttgccagaccgcatctccctcaaggggctcccactagcccagcactcgcaaatctgtgcgccttcgggctggatttgaggcttgacgggcttgcccggaggtttggtgccgtctacgctcgatatgcagacgacctggtgtttagtgggcctcagagcttataccgggaggccagagccctccaagcttgggtgcaagccatcgcggaggacgagggcttcgccctaaacgccgcgaagcagcgacagatgagggcgcaccagcagcagagagtcaccggtctggtgatcaacgaacgccccaatctccccagggaggactacgataggcttcgggcaacactgcacagagcagccctgagtggacctgctgatcccgctgccagggccagacttcagggacaggtagcgtgggcctgtcaatctctcgcaccgagccgcgttgctaaactacaggccctgctggctcggatcgccccaacatga

SEQ ID NO: 12660 - RNA, 1362 nt, synthetic construct
  source 1..1362: mol_type = other RNA
atggccgcagatcgcacacctcgatccaatgcaatcgcactggcacatgcactgctcgccgatgcggaagtacctggggctcgctcgttgacagccttgcacgatcgggtcgccgcatgccttggtctaactgcccccctgccacctgggctgttccagatttgtaccgagctcgcggcctggcctgaaccgatgtggagacagcatggattagactcactcgcggacgtgctcctgcaacgtcctgagtggccagctccccctcatgcatggcaggccagacactggttgctgcgacctgctcgcatgcagttagccccaatggccctggctggtgtggctctgcccgaactgcctactcacgccgccttggcagcgtggcttgggactactcccgatgacctacagtggcttgcacatccctctcagcggtggcgtgaatcccaacccacagaccggccgcatcgctctgtagctccccactatagataccagcttctcacgaagcctgggggaggactgagactgctagagatgccactcccaagactgaaaacccttcaacggaggctgctgcacggcctgttagcgagagtgcctgtccatgaggctgcccgaggatttgttgctgggcgcggagtacggggtcacgctaacctacacgccgggcagccctgcgtcctttgtttcgatcttcgggatttcttcggcagtgtcggtggaggccggatacacgccttgtggcgcagcctgggttatcccgagggtgtggcaaggactctcattcagctgtgtacgacacggaccccgccagctgttcgggagaggatggctgatgcaggttctctggaccgccctgcagccaggagactggcaagtgcacatctccctcagggagcgccaacatcaccggctctggccaacctcagcgcctttggcctggacctcagactggatggcttggcctggaggtttggagcgaggtatagcaggtacgctgacgatctcgttttctccggccccgccgccttacgaagagactttagagtgctccacgcctgggtcgaagccatcgccttggacgagggcttcgcactaaatcccgctaagacccgttgcctcccagcgcaccgccaacaacgggttaccggggtggtggtgaatgagcgtcccaaccttccaagagccgactacgataggctgagggccgaactgcatgccttgggccaccagaccagggtacccgctgctttgaagccaaggcttcaggggcgaattgcttgggcccgacagtggttagctccagagcgcgcagccaaactgcagcggctgctggaacgcatcgcttttgacggcgcctga

SEQ ID NO: 12661 - RNA, 1392 nt, synthetic construct
  source 1..1392: mol_type = other RNA
atgactgtggcggccccactcacttatcctcgatggatagccctggccctggccagagcattacaggccgatgacgagtctccacgagcacgggaggctgatgccctgcaagccagagccgaacagtgcctgggggtggagtctcggccttggctgaaacccctgtgtgtcgcgctggctcggtggacaaccccagtttggagagcccacagcattcgtagcttcgccgacgctttgctggaaatggacgccttccacgagggcttcgacctggaaaggttttctaggccaaccgttaggcgcttgctgctccggccttcccgtatgaggcccctaccttttgcattagagcatttggtcctccccgacttagccactgaggccgacctggctgcttggctcggtctgaccctggatgagcttgaccatttcgcggggcccgcaagacgttatcgagaagcagtagccacacctgagaggcctcatgtggccccaaccccacactaccgctgccttttggtaccgaaaaggaggggaggccttcggttggtcgaagcccccttaccgcggttaaaagcggtccagcgcagactcttggacgggctgctgaataccctaccctgccacgaagccgcccacggtttcgttccagggcgtaacgtggctaccaacgctgcagtccatacgggccaggattttgttatccgcttcgacctccgcgattttttcccaagtattggccgcgcgcgaatcgcagcaacattcaggacactcggtttttccgatgctgtggtggagcgcctcactacgctttgtactgcaaggacaccggctcctgtcagggagcgactacgggaggacggaagtattgatttcgatggcgccaagagactggcctcaccgcatcttcctcagggcgctcccacttcgcctgcccttgctaatttgtgtgcttttccactggatatgaggttggatggactcgctcacagatttggcgcccgctacacgcgctacgctgatgacctggtattttccggccccgcaaccctccggagagatcaacgagagtttcgggcatgggtacaagccatagtggaagacgaaggatttaggctccgaagagataaaaccagagccatgcccgccggaggtagacagcaagttacaggcgtggtggtgaacgaaaagcccaatctggctcgcgaagattttgaccgtctgaaggcggagctgcacagactggtggggtcaacagacgtggaccctgcgcagaggagcgtcctacttgggcggctggcttgggcacggcagttccttgcacccatgcgggtggagaagctgcagcgcatgttcgacgctatcgccttcggagcagcaaagaacctctga

SEQ ID NO: 12662 - RNA, 1392 nt, synthetic construct
  source 1..1392: mol_type = other RNA
atgtcattagccgcacccctcacctacccccggtggatagcccttgcactggccagggctctgcagacagacgatgatgcccctaggggtcgcgaggctcatgcattgcaggcgcgggctgaacagtgtcttggcgctgaggctcgaccctggttaactcccctctgcgcggaattagctagatgggcccggcccgtttggcttgcccattccatggccagcctggccgatgccctccaagccttggaggcctttcacgccggcttcgatccagagcggccaagaccaaccgtccgtcgcctgctgttgaggccttcacggctgcggcctcctcctcttgcactggcaagtctggtgctaccggattggagcacagaagccgacctcgctgcttggctcgggcttaccctagacgagcttgatcacttcgcaggacccgcccgccagtatagggaacggactgcaacccctagaagaccacacgctcacccgacaccgcactaccgtggcctgttggtgccaaagcgtaggggcgggctcaggcttattgaagcacccatgccgaggctcaaggccgtgcaaagaaggttgctggatgatttcctgcagcccctgccatgtcatgaggcggcccatggcttcgtgagagggaggaacgtggcgactcatgccgctggtcatgcgggccaggacttcgtcattcgctttgaccttcgggacttctttccatcgatcggccgcgccagagtatctgccacgttgcgcacgctggggcttccagacgcagttgtcgaaagactcgtcctgctgtgtctgacccggacccctgcaccactgagagaaagattacgtgaggatggaagtatcgacgcagacggtgcaaggcgcctggctagctttcatctgcctcagggggcccctacatccccagctttagccaatctgtgcgctttccccatggacctcagactggacggattggcccagaggttcggcgccagatatacccgctatgcagatgacctcgtgtttagcgggcccgcttctctccgacgcgatcaacgagcactgcgcgcctgggtgacagccatcgtggaggatgagggatttcgcctgcgaagggacaaaacacgggctatgcctgcaggtggacggcagtccgtaaccggggtggttgtcaacactcgtccaaacctggctcgcgaacgatacgacggactgaaagctgagctccaccagctaggcctacggtcccggtctgctcctgttgatcccgctctacgaggacccctcttgggtagactggcctgggcgcgacaatttctggcgccctcaagggtggagaagctcactaggatgttggcagccattcagttcaatgccgacagatga

SEQ ID NO: 12663 - RNA, 1383 nt, synthetic construct
  source 1..1383: mol_type = other RNA
atgagccacgcaaccccgctcacttatactcgctggatcgctctggccttagcacgggccctgcagaccgatgatgaaacacccggtggaaggggtgctcgagctctccaagctcgagccgagcagtgcctcggagttgaggctcgactgtggctgcgccctctgtgtgttgtgctcgcgcgatggccagacccggtttggagagcacacagtgtgcggtcactggcggatgaactgcaggacacatctgcctttttagacggctttgatgccgccttgcatcccaggcctcgggtccatagggtactactccgtccctcccggagaaggccccttccattcgcactggaacacctgtccctccccgattggcaaaccgaagcagagctggcagcctggctgggactgtcaggggaagagctcgatcactttgccggcccttcgcagcgctacagggagacagtagccacccctcggaggcctcacatagcagcgactaggcactaccgctgtcttttgatcccaaagagacggggtgggctgcgcctgatagaggcaccaatgcccagactgcgggcacttcagagacgcctgctggatggcctgctccatgcgcttccatgtcacgaggctgcccacggatttgtgccagggagagacgtcgctagccataccgcttgccacgccggccaggacttcgtcatccggttcgacctccaagatttttttgcatccgtggggagggcaagagtggctgccatttttaggaccctcggttacagcgacggggtcgtggagcgactggctactctttgcacaactcggacccctgcaatggttagagaacggcttagggaggacggggcgctggatttagacggtgctaggcgactagccgccccccatctatctcagggagcccctacaagccccgagctcgctaatctgtcattgttcggcttggacttaagattagccgggttggcagagaggttcggagcgagttactctagatatgccgacgatctcgtaatctccggacccgcaacgctgcgtagggatcaggggcgacttcgcgcctgggtgagagctgtcattgaagacgagggcttccggctgaggccggataaaacaagagcaatgccagcgggaggcagacaacaggtgaccggtgtggtggtcaaccagcgccctaacctcgctagagaagactatgaccggctgcgcgctgaactgcatcgccttgccggcatgccaagagttgacgccgccttgcgcgatcctttgcgtggtcggctggcctgggctcgtcagttcctagctgccacgcgcgtggccaagttggaccgtatgttcgatgccattgtgttcggcgaggcctga

SEQ ID NO: 12664 - RNA, 1377 nt, synthetic construct
  source 1..1377: mol_type = other RNA
atgacctcaagcgctagcctgacatatccccggtggatcgctctggcactggccagagccttccagacagacgacgatgccccaggaggacgatcccctcaggccttattgggccgtggcatggcttgcgtgggggaagagcatcggcggtggcttttgccactgtgtcagcacctggccagtttatctgcaccagtttggttagggatgaccccccgcaccttggccgaacacttagatcaacgccctgagtttttcgacgcctgggatccggctggtccgagacttcaggttcgccggcttctcctccgccctgctaggatgactcctccacctttcgcactggaagacctgcccctgcctgcatggcacactgtcgctgacctggcagcaggattgggcattgacctctctatgctcgacgtgctggcgggtccagctcagagataccgcgaggctgaagctcggcctcataggccacatgtgcaagccatccggcattacagggccgtccttgtgcccaaacgacgtggcggcttgcgactcattgaggcacccatgccggctctgaaggcggtccaaaggaggctactgcgctccctgcttgacttggttccggtgcacgaggccgcacacggctttgtagccggacgcaatgtggcttcacacgcgggactccacgctggacaagactgggtcttcaggttcgacctgcaggatttttttcccgggattggggccgccagaatacgagcactcttccgtaccctaggcatggaggaagcagtcgccgaatatctgactacactctgcactgtgcggacccctagagctgtgcgcgagcgactacaggatgacgggggcctaacatggatagacacgcggagactggccgcccctcatctaccacaaggggctccaaccagcccccagcttgctaacctgtgtgcatttaggctggatttacggctggatggcctggcggcaaggtttggggcccagtattctcgctacgccgacgatctggtgttctcgggtgcaggtacgcccgccttggatgctgtcaccctgcacgcatgggtgaaagccatcgttgaggaggaaggatttagactgaggcccgataagaccagactcatgagagccgggggcagacagacagtaacaggcctcgtcgtgaacgagactccccacatcgccagggcggattacgaccggctgagagccgaaatgcatagactcggacgcgagccagcagttgatctgtccctccgtgcgccccttcttggtaggctcgcctgggctcggcagttcgtagctcctactcgagccgccaagttgcagaggctgtttgacgcgatcagtttcgtgcagtga

SEQ ID NO: 12665 - RNA, 1377 nt, synthetic construct
  source 1..1377: mol_type = other RNA
atgacgccaccagctcccctgacctactcacggtggattgccctgtctctggcccgggcatgtcagactgatgacgacgctcctggaggtcgaactgcgtccgctttgctaggccgtgccacagcctgtcttggcgcggaacatcgcgcttggctgctgccattgtgcgaacaactggcacgcttaagtttgccagtctggcaacagatgacacctaggctgttagccgaccacctcgaactcatgccagcatttgtggcgggattcgaccctgagcggcctccagtgcatgttcggcgcctgttactgaggcccagcaggatgcgacctccaccctttgccctcgagcaccttccgctgcctccatggcatacgcttgccgacctggctgccggcttaggactggagttgtctatgctagaggtgctcgcaggacccgcacagcggtttcgagaggccgatcccaccccgcatagacctagagtccaggccactgcacactacagaagcctcctggttgacaagaggagtggtggcctgaggctcatcgaggcaccgttgcccgcgctgaaagctgtgcagagacggcttctgcggacactgcttgaccgcgttccggtacacgaagccgctcagggcttcgtcgcagggaggaacgtagcaggccacgctagaatgcatgccgggcaggcatgggtctttcggtttgacttgaaggatttctttccatccattggggcggcaagaatcagagctctattccgcaccctcggctttactgaagctgtcgcagataccctgactacactgtgcaccgtgcgtactcccagagctgtgagggagaggttgcgggacgagggcggactttcgtggcttgaagctcggcgtctcgctagtgcccaccttccacaaggagcccccacctctcctgtcctcgccaatctctgcgccttcgcgctggatctcagactggatggcttggctgtgcgcttcaacgcccagtattcccgatacgctgatgacctggtatttagcggtcccaccacagagggactcgatgccgtgtccctgcatgcttgggttcgcgcaatcgtggaggacgaagggttcgtgctgagggccgataaaacgcgcctgatgcgcgccggtggtagacagacagtgaccgggctagtggtcaatgagacaccccacctgagccgacccgactatgataggttacgggcccagttgcacagactcgggcacgaggcacaagtacctatgtcactgagggcgccacttctcgggagactagcctgggcccgacagttcgttgctccttcacgcgccgaaaagctgcagcgtcttttcaacgccatagcattcgtgcaatga

SEQ ID NO: 12666 - RNA, 1428 nt, synthetic construct
  source 1..1428: mol_type = other RNA
atgaccctggccgccccactcacctatcatagatggatcgcgctggcacttgcaagagcaatacaggcagacgacgatcaaccccaggggcgcgaggctcatgccctattgggtaggacgtcagaatgtttgggcaaggagcatgtcccctggctgagagccctctgccaagcactggctcggatgactaaaccacagtgggaccgtttcaccacccacacccttgctgatcacctggaatcaatgcacgaattttttgggtgggcccatgtacgtggagacggggatcccgacgacgagagtgaggaggatccggatggcgagccattcccaaccccccgagtccgacgattactcttgcgacctgctagaatgaccgctcgcccctacgccctggaagcacttgagttgccggtgtggcacactttgccagatctggccaacgggctcggaattgacctcgacatgctggaagtccttgccggcagggcgcaccactacagagacgctgtggcgacacctctcaggccacatgtcagggccacgcaccactatcggtccctgctggtgcccaaaaggagagagggcatgaggctgattgaggctccgatgcctgctctgaaggccgtgcaacgtcgcctgcttgacgtgctcctcgctcgggtacccgtacacgaggctgctcacggttttgtaactggaaggaatgtggcctctcacgccgccgcacatacagggcaacattgggttctgcggttagatctgcaggatttctttccttcgataggaagagcccgcatcgcggcacttttccgcaccttaggatacgccgaaggggtggctgataggcttactacgctgtgtaccgtccgcactcccgtcaatgttcgcgagcgcctaagggacgccggtgcaatcgactttcacggagcgaagagactagcatcccctcacctgccacagggcgctccaacatcccctcatctggccaatctttgcactttcagcctcgatctgagattggaagggcttgcctaccggttcggcgcgcactatagccgatacgccgatgacctggtgttttctggctcccgggacactaggctggcccctacagctctccatgcctgggtgcggacaattgttgaggaagaaggcttccgtctgcggcgcgataagaccagactgatgagggcaggcggacgacagacagtgacaggagtggttgtgaacctcaagcccaacctcagccgccccgactatgaccggttacgggctgagctgcatagactaagtcatcaggccgcagtggatggcgcattacggagccctttgttgggtcggctggcctgggcacagcagttcgtagctgcctctagggccgcgaaactgagacgtctcttcggtgctatccgctttgttccttga

SEQ ID NO: 12667 - RNA, 1350 nt, synthetic construct
  source 1..1350: mol_type = other RNA
atgactaggagctctagttatagaaactggattgccacggccctggcgcacgctttcttggcagatgcggctcaagccggcggtcgaagtgccgaagctctgcacgcacgcgctgtgcagtgcatgggcgaagatgctccatggctaagagcccttgcagcctcaatcgcaacagagtttagtcggaggcgagacgcacatactgtgcctactctgagcgcctggctgtgtgagctgccccaattggacgacgccttcgatccagagcgggagcacccacgggtgaggagacttctgctccggcccgcacgcatggttagagctccgtgtgccttagagggactgagactgcctcgatgggacactcctgccgacctcgcagcatggctgggtgtgccattggaaagactggaatggttagttggcagggcccaggatttccgagagacacaggccgggcgcaccagatcagctcactaccaccccctcctgaaggctaaaagatccggcgggctgaggctgattgagatacccaagcctgcactgaaacaggtgcagcagaagctgctctccgggctgcttgatgccataccaacccacgaaagcgttcacggatttgtccggggccggtcagccatttctcatgctcgggagcatgctggacgcgcggtagtgatcgcctttgaccttagagatttttttaacagcatcggagtcgcacgcgttcgagctctctggcggaccttgggctatgcagaaggagttgcggaagccctagcccgtctcacaaccactagaacacctctggccgtccgagagcggttggtcgaagctggtggcatcgacttcatggctgcgaagcgtctggcctcgaggcatctaccccaaggtgcccccacgtcccctgcacttgcgaatctctgcgcattcggactcgacttgagactagacgggctcgcttggcgtttcggggcccattattctaggtacgctgatgacatcgtgttctccggccccagagagcttgctgccaggagcaggaacctgcaggcttgggtcgaggcaattgtgcgcgccgaagggtttaccctccatccgggaaagaccaggcgtatgagggcacaccatcggcagcaggtaaccggcgtggtggtgaatgagcgcccgaatgtggctagggacgcctacgatcggttacgcgcgcgcttacactcttgcgcagcctccggctgcgatgccgagacatggatgcagctgcaagggcaggtcggttgggcctgtcaactggtcgccgcaagtagagctgaaaaacttcagcgcatgttggcggccgtaccagtgcgtcggtga

SEQ ID NO: 12668 - RNA, 1353 nt, synthetic construct
  source 1..1353: mol_type = other RNA
atgacccattcctatcgccattggatcgcgactggactggcccacgctcttatggccgatgccgatcaacccgggggtcagtccgcccaagcacttcaggcacgagcccagcagtgtatggggactcgcggtacctggctcaagcccctagccgaagcagtggccagggagttcgcgaggaatccacgccaccatactgtagcgaccctggccgaccacatatttgaactgccccaattcgatgctgctttcgctcctggccagcctaggcccagagtgagaagactgctcctgcgcacagctcgtatggccgctcctccattcgaactggcaggtttggagctcccgagccttcccactctcacggatctggcggcgtggctagacgtgagcctggaacggctgcagtggcttatcgcacccagccagaatttcagagagacagagcctgctcccggacgagctaatgtgcccccaggattacactatcacgccctcctgaaacctaaaaggtctgatgggctccgcctgatcgagattccaaagccagatttgaagcgagtgcaacggagattactgagcggcctgctggacaggattccggtgcatgaatgcgtccatggcttttcaaaagggcgatccgtgctcactcatgctgcagaacacaccggccaggccgtcgtgatatgccacgatttgagggattttttcaactcgattggcatcgctcgcattcgcgccttgtggcggacgcttggatacccggagggagtatcagctgcgcttgcagccctgtgtacagcgcgtacacctagggcagttcgggagcgcttactggaatgcggcagtatcgacaggagaggagcagccaggctcgcctctccacaccttccacaaggcgcccctaccagcccagccctagcaaacctgtgtggcttcgctctggacctgcgattagacggtttggcatggcggtttggggcccggtacagtagatacgccgacgacctggctttttccggacccgctgacttgatgccacggaggcgaaacctccaggcctgggtccaggcaattgcccacgctgagggttttgccctgcatcctgataagacccgggccatgccctcacaccgtcgtcagagactgacaggggtcgtggtcaacgagcggcctaatctcgagcgctgcgcttatgacaggttgcgggctcagcttcatgccctggccgctctgggctgtgatgaagccaccagaatgagactccaggggcaggtttcttgggcctcacagttagtttgcggctcccgggcacgcaagttggacagactcctagcagcaatcagttcttga

SEQ ID NO: 12669 - RNA, 1401 nt, synthetic construct
  source 1..1401: mol_type = other RNA
atgccgaagcccaaccactcctatagaaggtgggttgccacgggacttgcacacgccctgttggccgatgcacacaaacctggcggcgcgacttcgcaggctttacacgccagagcgatccagtgtctgggcgccgatcacccctggctactgccactgatagccgccatgggccctcattcagtagggcagtggcgccgtcattccgtggctagcctggctgagtacatcgatcagttgcccgccttcgacgccgcctttctcggacaggacagccacccccatattagacggctgttacttcgtcccgacaggatgctggccccgccatttgagctcgctcagctgggtctgcctcgtctggcctcacatgccgaccttgcccagtggctcgggatttcccctgagcgactgcagtggctgatcgaaccggcacagaacttccgcgagagcgaagcagctccagggcaaccacattgtcaccctggaaggcactaccgccagctgctgaaacagaagaactcaggtggcctacggctcgtagaggccccaaagtccgaattgaagcgggttcagaaacggctgttgagcgggttactgaataagattccagtgcatgaaaaggtccatggtttcgtgcgcggacgcggtgtgctgacacatgccagtgaacacgctgggcggcacaccgtcctggcatttgacctcagtgacttcttctctagcattggcgtggccaggataaaagccctatggcagacacttggataccccgaagcagtcgcacgagcattagccgctctctgcaccactcgcacacctctggcggtgagacaaaggctcatggacgccggcgggatcaacttttttcagcagcggcgccttgctagtgcgcatctccctcaaggagcccccacctctcctgcactggcaaacttgtgtgctttcatgctcgatttgaggcttgatggactcgcatggcgttttggtgcgaattacagcagatacgcagacgatctggtgttttctggttcagagttgttagctcgcgatcaacggaagttgacgggatgggttgccgcaatcgtagaggctgagggcttccgagttcacccccgcaaaacacgagtcctcctgaaatatggcaggcaacgggttaccggggtggtcgtgaatactaggcccaatctgggcagagatgattatgacagactgcgggcggaactgcacaggctagctggagcggacagattagacaagggggtgaagcaaagaatgtggggccgaatcagttgggcttgccagaccgtgtgcgcttccagagcagccaaactctacaggcttttcgaggctcttccaaatgaccaccagggcgctgggtatgatgcctctacttcttga

SEQ ID NO: 12670 - RNA, 1368 nt, synthetic construct
  source 1..1368: mol_type = other RNA
atgcctgccagttcgacctataggcagtggctcgctagagccttggcgcatgccctgcttgccgatgcccttctcccaggcggctgtttgagagatgcactgctggcgagggcagcctctactcttggaaagcgccccgcatggcttgcaggtttagtcgacgccctgctcccattcgacccactcagggaggacgtgcaagccctgggacgacggatcgcagttcttcccgcctttgatcctgccttcgacgctgagcatcccccccgaattcggcacctaatccttcggcctgccaccatgttaagaagaccgctgggcctgcacgagttggaactgccagcattggctacacacgctgacctggcgtcctggttaggcctcgactccgaacagctggcttggcttgcagcaccagctagagcttggcgaccacctggtgctggtggaagggctgccgctacccactaccgctgcctcttgatgccgaaaagaagtgggggcctgcggctcattgaggcacccatggccacactgaaggccgtgcaacgccacctgctggatgggcttctggatcacgtgcctgctcacgaggcggctatgggctatgtttccggccgatctgtcattgaccatgcagccgctcatgctgggcgggcagttgtcttgaggttcgatctcagagatttctttaacagcataccggcttctagggtacacgccctgtggcacacgcttggttacccagacggagctgctcggactctgaccgccctcactactgcccgcacacctgttgctctgcgcgaacgcctgcaggatgatggcgggttagatgtgctgggcgccaagaggctcgcctcagcacacttgccccaaggtgctcccacttcacccgccctggcaaacctgtgttgttttaggctggacctgaggctgaatggactggcaaaacgcttcgacgcgagctacacccgctatgccgacgatctcgtaatcagcggaccagcggcttgcgctaaaagacgacgtgagttgcaggcatgggtggaggcaatagtgcgggacgaagggtttgccctacagcctaggaagacactgacgatgcccgctcatcagagacagcaggtcgccgggatcgtcgtgaacgcgcatcccaatttggaccgtgccagcttcgacagactaaaagcccggttacatcgctgcacccgtgatggaccaagtcctgcagatgacccccaacaactccgagggcagctcgcctgggtgacacagcttaaccctgcccggggcgccaagctgcaaaagctctttgaagggatccggtggctaaatgtggccccgtcctcaacccctgtgcgttga

SEQ ID NO: 12671 - RNA, 1425 nt, synthetic construct
  source 1..1425: mol_type = other RNA
atgcctcccccaccttcatcgataggattgattaccttcatgacgcgggagctgtcctatcgggaatggctgagccgtagtctggcacgcgccttgcttgcagatgcacgacaacccggagggacagctcccgatgcattacacgcgagagctgccgccacattgggcacagacgccgcttggttgaagcctctagccgaagttctcgggaagcggagccaggccacctggcaaagaacagacttacccgcactggccaaggcaatccatgatatgccggagcttgaccttgcctttgcccaagacgagctaccacatgtgcgccgcatcattctccgaccagcccaaatgctgccccgccctctcggacttgaccacttcgcactgccagaagtgccgactctcgcagaccttgcgcgttggctggaactcgagcctgacagactggcatggttgacctccgccactcaggtgtttagagaaccagatgcttcctctccctgcccagctagccactatcgctaccagctgcagccaaaaagactgggcggtctgagactcctggagattcctaaggccgacctgaaacgtgcccagcggaggattctggacgatctgttgcagcatgtgccagtgcatgaggccgcacatgggtttgtgcagggcagaagtgttgcttctcacgccgctgctcacgccggcaaagatgtggttatcggattcgacttaagggacttctttccatccgttagggcgtctcgcgtgcacgccatgtggcgaactcttggttatcccgaaggcgtagcgcgagccttgaccgctctgtgcacacaccgtaccgattctgcggtgatcgagcggctacgggatgacggcggtctagactggctcggcgctaaaaggcttgcggcacctcatctgccgcaaggcagcccatgttcacccgccctcgccaatctctgcgcattcaggttagatctgcgcctggagggccttgcttgggtgtttggggctacctacaccagatacgccgatgatttggtcttttccgggcctgcgactttacgggcacagttcacggcactgcgggcttgggtcagtggtatcgctgctgacgaaggatttgccctgcacccccgcaaagtacgctgtatgcctcagcaccgacagcagcgggtgacaggcgtcgtcgtaaacgataaggctaacgcccctagggaggacttcgacagactcaaagcagtcctgcatcggtgtgttatgcacgggcccgcagcccagaatcacgctaagctggatgacttcaggggacacctcctgggacatatagcctggatcgggcagtttagcccgactaggaaggtcagactgatgaggctcttcgataggattgactggcccgatgccgctcagcctccctcatga

SEQ ID NO: 12672 - RNA, 1389 nt, synthetic construct
  source 1..1389: mol_type = other RNA
atgactactagagaaccaagctatcgcgagtggatcgctagaggtctggcgcacgccctgttagcagatgccaggcagccaggtggaactactccggatgcgctccgtgcgagggctgaagctgctttgggggccaatccaccttggttaacattgttggcagaagatctgggcaagcgcagtctagctacctgggagcggaccgatctccctggcctgacacaggcgatcttggagacacctgcactggagctcgcctttgagcaagacgaaccgccgcggattcgcaggctgatcctaagacccgccgacatgtttcccagacccatggggctcgaccacttcgccctgccacgtctgcccacctttgcaaaccttgcccaatggttagagatagaaccggatagactcgcttggctgaccgccgcctctcaagccttccgagcaccagatgcatccagcccaagacccgcctcgcattacagatatcagctgcagcctaagcggctgggcggacttcggctgctggagatacccaaagctgacctcaagaggctccagcgacggattctcgacgatctgttgcagcgcgtcccagctcacgaagcggctcatggattcgtgcaggaacgctctgtggcatcccacgctgccgcccatgtagggcaagaggttgtgattggattcgacttgcgagacttcttccctagcgtccgtgccagccgggttcatgcactgtggaggaccttgggctaccccgatggagttgctcgtgctctaacagcactctgcacgcatcgcacatccgcggccgtcatcgaaaggcttcgggatgacggtgggctcgattggatgggcgcaaagaggcttgccgagccacatctgccccagggatccccttgtagtcctgcactggcgaatctatgcgcctttagacttgaccttagactggagggactggcttgggcattcggcgctacgtatacccggtacgccgacgatcttgtgttttcaggccccgccacactcagggagcagtttaacgccttacgagcttgggtggacgggattgctgcagatgagggttttgccttacacccaagaaaagtgaggtgcatgccacggcaccatcagcagcgcgtgactggcgttattgtcaacgaaaaggcaaataccccccgcgtggacttcgacaggctgaaggctgtgcttcaccagtgtgtgctgcacgggcccgcctctcaaaatagagccaaagtcaccgacttccgaggtcacctcctgggccacatcgcctggatcggccagtttaaccctgccaggaaagcacggctgatgcgcctgttcgaacgaatcgagtggcctgccgtatcacagcctcccgggtga

SEQ ID NO: 12673 - RNA, 1509 nt, synthetic construct
  source 1..1509: mol_type = other RNA
atggcctcacacagcggcgctcaggctgctcttaggatccgcgcagaccagcttgcgcatcaccggcttgttgaaggtcccggcgcaactaccttcatcggattcgctgcaagtggcttcatgacccgggagctgagctaccgggagtggattgcgcgctctttagctagagccctgctggccgacgccaagcaacctggtggcactgatcctggagctttgcgtgcaagagccgcagctacattgggtgccgacgcaccatggctgaagccactcgcccaggccttagggaatcggtcccaggctacatggcgaaggaccgatctacctgcccttgcccgcgccatacatgatatgcctgaatttgacgcagccttcgagcagaatgaacctcctagagtgcgccgcattattctgcggcccgcccagatgctgccaagaccaatgggactggatcactttgcactcccccacatcccgacgcttgccgagttagctcagtggctagagctggatgccgacaggctggcatggctgacgtcggctgcgcaagcgtttcgagcccctacagaccccgacactaggcagcccgcatcccactaccggtaccagctgcaacccaaaaggctgggcggcatgcggttgctggagattccgaaggccgacctcaaacgtgcacagcgcagaatcctggatgatctactgagacatgttcccgcccatgaggcggtacatggattcgtcctgggtagatctgtagcaagccatgccgctgctcacgctggcaaggaagtggtgattgggttcgacctgcgtgacttctttcccgggataagggcatctcgcgtccacgcaacctggagaaccctgggttatcccgaaggggtggcacgggcccttacagcactgtgtacacatcgcaccgacgatgccgtgatcgaacggctcagggatgacggcgggctggattggatcggcgctcgaagacttgccgctccacaccttccacagggctccccttgcagccctgccttagccaacctctgcgctttccgactcgacctccgattggagggactggcctgggtgtttggggcctcctatacccgctatgcagatgatctcgttttttcaggaccagcctctttgcgtgcgcagtttaacgctctaagggcctgggtgagcgggatcgctgctgatgagggcttcgaactgcacccaaggaaaattagatgcatgccgcgacacaggcaacaacgggtcaccggcgtggtcgtcaatgacaaagctaacactccaagggaggactttgaccggctgaaagccgtgctccacagatgtgcaacacaggggcccgcgtcccagaacagagcgaaggttgatgatttccggggacatttgttgggatcaatagcctggattggacagttcagtgctacccgcaagactcgtctcatgagactctttgacaggatcgactggacagatgccactcaaacgccgagttga

SEQ ID NO: 12674 - RNA, 1365 nt, synthetic construct
  source 1..1365: mol_type = other RNA
atgtccagatccttggccagagcactgctcgctgatgccaggcaacccgggggtacagcaccaggagcattgcgagctagagcagcggctactctgggggccgatgctccttggctcaaggctttcgccgaggctttaggacagaggagccaggcaacgtggcagcgcactgacttgccagccttagcccgcgctatcgacgatatgcctgcgttcgatgcggcattcgcacaggacgaagccccccgagttcggaggataatcctcagatctgcagaaatgttccctcgcccactgggtctggaccactttgctctgccacgaattcccaccctagctgagctggcccagtggctcgagctggatgcggaaagactggcctggctcacaagcccggcccaagcattaagaacttcgcacgagcatgatgcgcctgggactgctcccgccagtcactaccgatatcagctgcagccgaaacggctcggtggccttcggctgctggaaatccccaaggccgatttgaagcgcgcccgtagacggattttggacgacctcctgcaacacgtgcccgtgcacgaggcagcacatgggttcgtgcaggggcgttcagttgccagtcacgctgctgcacacgcggccaaagaggtggttattggctttgaccttagggatttcttccccgccgtccgcgcatcaagagttcacgcgacctggcgaaccttgggttatccagatggcgtcgcgagggccttaactgccctctgtacccaccgtacgggcgctgcagtgatcgagcggctgagagacgacggcggacttgactggatgggcgccaaaaggctggctgctccccatctacctcaggggtccccatgcagccctgctctggctaacctgtgtgccttccggcttgacctgagactggagggtctggcctgggtctttggcgccacctacacaaggtacgctgacgatctcgtgttttcaggacctgccagcctaagggcgaggttcacagccctacgcacatgggtgggagggatagccgccgacgaaggctttgaactgcatccgagaaaggtcaggtgcatgccgcagcatcggcagcaacgggtaaccggagtcgtggtgaacgataaagcaaatgcccctcgtgaagagttcgaccgcctcaaggctacccttcatcgctgcgctcttcatggacccgccggccaaaaccgcgctcaggtaccagattttcgagcacatttgctcggacggatggcatgggtgggccagtttaatccagcccggcacgcaaggcttctgcggatttttgagcgcatcgcctggccctctgcctctcctacaccatcctga

SEQ ID NO: 12675 - RNA, 1383 nt, synthetic construct
  source 1..1383: mol_type = other RNA
atgacacgggaacccaactatagggaatggatcgctaggagccttgcaagggccttacttgcagatgcgcggcaacccggtggtacagctccaggagctttaagagctcgagcggccgctactttaggttccgatgcaccctggcttgcaccgctgattgaggcactagctcgccgctctcctgccacctggagacgaactgacttgccagcgttggcgcaggccatccacgacctcccagagtttgacgccgcattcgagcaggatgagccacccagggttcgtcggataattctccgacccgcccaaatgtttccgcgccctctcggccttgatcacttggcccttccggcactgcccacccaagctgagctcgcaagatggttggacctggatccacagagactggaatggctggcaagcccagcgcaagccttcaggacgccccaaggaacctcccctgctcctgccagacactacagataccagctacagccaaaacgcttagggggtctgcgattgctagagatccccaggccagagctgaagagagcgcagagggggatcctcgacgcactgttggccagggtaccggtgcacgaagctgcccacgggtttgtgcctggccggagtgttgctagccatgcggctgcccacgcaggaaaggctgtcgtaatcggcttcgacctgcgtgacttcttcgccggggtacgcgccagcagagttcatgccacttggagaacactgggctaccctgacggagtggcacggactctgactgccctgtgtacccatcggacagatgccgcagtgatagagcgcctgcgtgacgacggcggcttggatctcatggggggtaagagattggctgaagcacacctccctcaggggtcgccttgttccccagctctcgctaacctgtgcgctttccggctcgatcttcggctggaagggctggcttgggtgtttggcgccacctatacgagatatgctgacgacctggtcttttcaggcgacgagtctcttaggctgaggttcgacgcccttcgagcctgggtgggaggcattgctgccgatgaaggatttgagctgcacccccgcaaactgcgttgcatgccccggcatcgacagcagagagtcaccggggtcgtggtgaacgatcggcccaatgcacctagagcagatttcgatcggctgcgcgcactgctccatcagtgcaccctccatggccccgccagtcaaaatgccgctggtctggccgatttccgcggacacctcttaggccgcatcgcctggttcggccagttttcaccaacacgtcaggcccggctgaggaggctatttgacaggattgaatggcctgcgggagccgccccagcctaa

SEQ ID NO: 12676 - RNA, 1425 nt, synthetic construct
  source 1..1425: mol_type = other RNA
atgcgtgaaacccggtttcggcacctgatcgcaaggggactggcccgagctctccttgctgacgccggtaagcctggcgggacagcattgcctgccttgcaagccagagcagctgcagcactgggccaaaggcctgcctggttgcgagaacttctgcagcccctgactctgctctcccccatcacttggcagaagttcgatatcacgagtctggctcgccgcctggaggattcaccggctttcggactcgcctttggggatgaggacgatgacgaagatgaggacggtgaagccgatagttcagagccacaggcgtcccaagcaatcgatgaccgcgatgatcccgaacctgaaaggcccccccgaatccggcggcttattctaaggccccccgctatgaggccaagaccacttggactacaggcctgtaccctcccagatattaccaccgacgccgacctggcgagatggctacagctgtcccgagagcagcttaggtggttagcacccgccaccaggcctgtggtcgaacattataggtacagccttcaggcaaaacaggctgggggtctgcgcctgttggagacaccaaaggtcgagctcaaaagagtgcagcgccatatccttcacgccttattgtccgaggtgcctgttcacgaggctgcccatggctttactgcggggagatctgtgaagacacatgcagccgcccacgtaggtcaagccgtggtgattagattcgacctgcgggacttttttggttctattggagcggctcaggtcaacgcggtttggcgaacactggggtatccagaaggggtggcacgcagtctcacagccctgtgcacacaccacactgccggcatggtgatcgaacggttgcgggacgacggcggattagactggatgggagctaagagactcgcaagcgcccatttaccacagggggccccgacttcacccgcacttgctaacctttgcgcgttcaacctggacctgcgtctcgagggattggcctgggtgttcggcgcttcttacacccgatacgcagacgacctggtgtttagcggacctgcttcgctccggttgcagtttagggctctccacgcttgggtagccgagatagtccgggatgagggcttcgcactccacccggataagaccaggtgtctgcctcggcatcagcgccaacgggttacgggggtggtggtaaatgtccgcccaaatgttcctagggatgacttcgacagattaaaagcctgcctgcatcaaagcgcgctgcacggccaggcctctcagaataaagagagactggccgattttagatcccacctcctaggccgcattggctgggtcggccagttcagcatgacccgtcaggcccgtctgatgagactgttcgacaaaatagattgggctaactga

SEQ ID NO: 12677 - RNA, 1389 nt, synthetic construct
  source 1..1389: mol_type = other RNA
atgcgcgatatctcatatcgcacatggattgctaggagcttggctcgcgccatgctggcggactcagatcaacctggcgggacttcggctgccgcattgcaagctagagcggcggctaccctcggcgataacccagcttggctgcacacagtcgtggcacccttagcccagcttcccgccgtatcttggcagaagatggatctcgactctctaacccaacgaatattggcacctgcccctcggcagccaaccgtagttgacgacgagaatgatgacgaagagatccaagccgagagtccttttgacgccgcgtttgccaatggcgcacgtccacacattcggcggctcatcttgcgccccgcatccatgcaacccaggcccttgggtctggaaggctgtgaactgccagacctgccaacggtacatgacctggctgagtggctcaagatgccgctggatagactggcatggctgggacctgaaaccccattgggagcagagcactatcggtacaaacttctccccaaaaggaccggcggcttacgactgttagaaatcccgaaagtcgacctaaagcaggtgcagagggccgtttatagcggactgctccagcatgtgccagtccacgaagccgcacatggctttgtgcccggcagatctgtggctactcatgctgccatgcacgccgggcaagccgttgtgatcaggttcgacctgagggattttttcggaggtataggggccgctcgagtcatggctctgtggcgtactcttggctaccccatcggggtggctagatgcctgaccgcactgtgtactcacagaactgccagaatggttgtggatcggctgcgggacgatggaggtctggactggcttggcgccaaaaggctgaggtccgcccatcttcctcagggtgcaccgacaagcccaacacttgcaaacttgtgcgcgtttggacttgacctcagattggatgggctagcgtgggcgttcggagctcgctacacgagatacgccgatgacctggtgttctccggaccggctgcactacgcccccagttcagagctctccaggcttgggtcgccgctattgcagaggatgaggggttcgccctgcaccctgccaagaaccgatgtctgcctcagcaccggcagcagcgcattaccggggtcgtggttaatgcccagcctaacacaccacgccaggactttgacaggctcaaggcatgcctgcaccagtgcgtgcatcagggtcccgctagtcagaaccacgccaatctcgtggatttccgagggcatctccagggccgtattggctgggtcgggcagtttaatgccgcacgggccgccaagctgatgggattattcgagcaaatcaggtggtga

SEQ ID NO: 12678 - RNA, 1359 nt, synthetic construct
  source 1..1359: mol_type = other RNA
atgccaccctccacccacagactgtggattgcccgcggtcttgcacacgctcttcaggcggattgtcaacagccgggtgggacggaagctcacgcgttactcgcaagagccaccagggcattgggacacaggccaccctggcttccaccagtgatcgaagccttaggagccgctgccgtgcggaggttggacttacagggcctcagcgaacggatcgctggactgcccgcatttgacgcagcctttgctccaggccaacctgcgccacgcattaggcggctaatgctaagaccgccacacatggccggtgcccccttaggactccatgaggcccccctgcccgcgttaactacacacgaggctctgggcgattggctagggcttgcccccgagagactggcatggctcgtgagtgaggcccagcactaccgcgaacctcctggtggaagacctggtgcagcccggcattatcacgcgcttctcagacccaagagacttggcgggctgagactcatcgaagccccaaaggccgagctcaaactggcccagaggcgattgctggacgggttgctcaatgccgttccggtgcacgaagccgctcagggatttgtgccgggtcgcagcgttcgagcccatgcacaggctcatgctggggcgccagttgtactgcggttcgatctgcaggatttcttccctagtgtgcctgcttcccgcgtccatgccatctggcgcaccttggggtaccctgctggagttgcacgcgccctgacagccttgtgtaccacaaggactcccgctgctgtgagagctaggctgcgggaggcaggcgctatagacggaggtggggcacaaaggctagcggctgcacacctgccccaaggagctcctacgtctcctgcgcttgccaacctgtgttgttttcgcctggatctccgtttagccggactggcagctcattggggagcccgatataccaggtacgcagacgacctggtcttctctggacccgccgtcttacgggagcggagactggctctgacatcatgggtaggcggcatttgcgcagacgaaggcttcaccctccatgccagaaaaactcgctgcatgcctcaacaccgtcagcagtgcatcactggcgtcgtcgtgaaccagcatcccaacctgccacgggatgagtttgaccgactcaaggcgtgcttgcatcgacggctcttgcacggcgccacagatgccgctgaaagggaggcactccgtggccgtattgcatgggccgcccagttgaatcctgcaaggggggagaaacttctggctctgttcgcccagatacgatggccacagcctggatcagtgcccgggtga

SEQ ID NO: 12679 - RNA, 1341 nt, synthetic construct
  source 1..1341: mol_type = other RNA
atgagatcgtggacttatagggagtggatcgctcgcgggatcgccagagccttacttgcgggcgatgaccgaagtatgcctgcactccgctcacgtgctgctcaagctctcggaggcagccccccttggctaggacactttctggggcgactcaaatccatggatgcgggaatctgggcccgcacagacttggatgcactgacatggcggctgctccgcggagaaacactgtcacgggccgtgggcgctgaagatcgaccaaggattcggaggctgatgcttgccagccccgtcatgttgcctccacccatgggcctggatgtgctgggcttacctgcactccccaccaccggcgacttggcagactggctgggacttactgtagaccggctcgattggttagccggcgagcagctagattggagggaagacgcgcgccgcgccagacattatgtactccacgcatcacctaagtccgctgggggtctgcgactgatcgagagccctaaaccagagctgaagcgtgcacagagacggctactggcgggtttgctcgaccgggtccctgtccatgaggggtgtcacggcttcgtgagaggccgtggagttcggtcccacgcccaagtacatgctggacaggcactcgtgctgcgactcgaccttcaggacttcttcccgtgtgtgagggccgctcaggttagggccgtgtggagaaccctgggataccccagggaggttgcggaggtgctgactagactttgcacgacaagagcgtgcgcagccgaccttaggcccctaagagctgccggcagactggaatggaccgccgctaaacgctacgcagccaggcatttgcctcagggggctccaaccagccccatgctggctaacttgtgtgcgtttgatctggatctcaggctggatgggttggctcaagctttcggaggtgaatacagtcgttacgccgacgacctcgcattctctttcgctcaaccacttggtggtcgccaggccgcctttcatgcatgggtggcagccattgccaaggacgagggttggtctttacacccacagaagtctcgagcaatgccggccggcgcacaacagagagtgactggcctggttgtcaacgaaaagccgcgcccagctagggtggattatgaccggctgaaggccgtgctacaccagtgcaccctgcatgggcccgccagtcagaatcacgcccaggtcgaagattttcgggcccacttgcttgggcgcattgcctggattgctcagggctccgaggcacgggctaggaaactgcaggccctgtttgagcggatagcctggacggggtga

SEQ ID NO: 12680 - RNA, 1206 nt, synthetic construct
  source 1..1206: mol_type = other RNA
atggcccagcggtgcgctgatatgcccggtgagagatggcgtcggctgaccgttagaagccttgcgacctggattgagcaggacggccactacgacgatgggtggcgtgctcacgagaaaccgcatgcccgccgttatattcttcgggaagcggccgtaatgcagcctcttccagtcggcttggagcagtgtcaggtcccatattggcctcacgtcggagcattagcagactggctaggagtgcccgcagccggtttatggagactcactcgagcacctcagtggcagaggcaagcccccctaggggagcaacattatcacgcccaacttctggccaagaggaccgggggctggagactgctcgaagttcccgctccccacctgatgccgctgcagagaagagtactcgatgacctgctggatagaatcccaccacatgaagccgcacacggatacacccgggaaaggtctgctcgtagtcacgctgccgcacataccggtcaggccgtggtgctcaaattcgatcttcaggattttttcaccaccgttcggccaagcagggtgtctgctctgtttgccaagctgggctacagtgaggaagtggctcgggcactcacagcactgtgcacgacagccacccccgagcctgtgttgcggaggatgcatgaggcggggcagctgacatgggaacagctacagagactccgcgaatcccacctgccccaaggagctccaacatcccctgccctggcaaatttgtgtgcgttccggctcgatctgcgattggacggcttagcttttgctctgggggcccgctatactcgctacgccgacgatttggtattctcaggacccactcatctcgccactgcacgcgagcgaataacggccaggataactcgaattgtcgtggaggagggattttccctgaacacacgcaaaacaaggtgtcagaaggccggtggccggcaaagcgtctgccacatcgttgtcaatgaacgacctaatctgccacgagacgagtttgataggttgaaggcaatcttacacctctgcgtgcgggacggagcctcaagacagaacagggatgctcatcctgactggcaagcgcatcttcgcgggagagtggcctgggctactcagctgaacccggctaaaggcctccgcctgaagagggtgttcgaccgcatcgactggggcgtgtga

SEQ ID NO: 12681 - RNA, 1335 nt, synthetic construct
  source 1..1335: mol_type = other RNA
atggcctccctagtgcgtctcacagcgctagctctggcccgagcgctccaagtaggacagcggactcctgacggaatggcagctaggatccgagcctgtctgggggctgaagcaagctggtgtggcccgctggtcgaaaggtgcgcagctatggccggggagaggtggagacggctgagtgtgcggagcttggccgatcttatagagcgcgaccagggcttccacttcgcctggattgcccacgagccgccctgtgtccgtaggtacctgctgcgggaagccgacagaatgaacccattacctctcggcctcgacagatgccaggtgccattttggccccatgcaggagctctcgcagcctggttgggaataggcacaggcggactgtggcgtctgactagaccctctgactggcaacggaggacccctatggtggagcagcattacaggtcacacctgcgaccgaaacggacgggtggttggcgccttctggaggtgcctgaaccttacctaatgcctctccagcgccgagtgctggatgatctgctcgatcgcattcccccacatgaagcggctcacgggtatacccgggaacggtcggtgatcgatcacgctcggcgccattgtggacaggccgtcgtactgcgctttgacctcaaggatttttttacagccgttaaggcctccagagtgcacgccttgttcacaacccttggctaccctgaagaagttgcgcgagccctgaccgccttgtgcaccgttgctactccagagccagctctgcgcagacttagagctgaggggggtatggattgggagcaggttcagcggttgagggatccccaccttccccaaggcgctcctaccagtccagccctcgcaaatctgtgcgcttttgggctggacgtgaggttagcccatctcgccacctcactcggagccaggtattcccgctatgcagacgacttggtcttaagcggccccgcccgcttgagaactgcattcgctaggattgagcgtcacgtgtctcggatcgtcatcgaggaaggatttgcactgaaccctaggaagacacgctgtactggggcaggcagaagacagacggtctgccatgttgtggtcaacgatcgacccaacctgccacgcgacgagttcgacaggctaaaagcaattttacaccagtgcgtacgagatggcccagcgacccaaaatcgggagaatcggcccgattggagggcccatcttcgtgggagagtggcttgggcaacacagctgaatgctgcaaaaggtgccagactggcgagacttttcgagaggatcgactgggccgcttga

SEQ ID NO: 12682 - RNA, 1305 nt, synthetic construct
  source 1..1305: mol_type = other RNA
atggccagggctatgcaagccggtccgagaacccctcagggcttagctgctaggatgcgggcatgtctgggctgtgcagagcacccttggatcaccgctctgagtgcccggtgcgctcgaatggcagccgaaagatggcagaggctctctgcacgggcacttgccgggctgattgaaagggacgcaggcttcgagcatgcgtggcaacaggaccccaggcctttcgtgcggagatatatcctgaggcctgggggacatttgcgcacagctccgctgggcctggataccgtggaaagacccgcctggacggacgaagctgctcttgcacagggattaggtctgagcgacgctgctttgtggcgtctgactctgccaacaccctggcagagagcggctcccctctctcagcagcactacgcttggaggtggcaactgaagcgccacggcggatggaggccgttagaggtgccagctgcctatctccgagccgctcagcgcaagttgctcaagcatctgctggatggcatcccaccccatgagaaagtgtatggttttgttagaggacgctcagtcatagatcacgcccaggtacacactggccagccagtggtcatcaagtttgatctccaggacttcttcacctccatcaaggcgtcaagagtgcatgcgttgtggaccacacttgggtatcccgagactgtggccacactgcttacccgcctgtgcactgtggcaacccccgaacctgtcctacaacggtggagacaagaaggtggggcgacgtggcaccaagtgctcagggctcgggagcctcacctacctcagggagccccaaccagtccagcactggcgaatctgtccgcctttcggttggaccttcgactggatggcctggcacaagcctacggagcccggtacagtcgctacgccgatgacgtcgtcattagcgggccaagggccttgttagcagccagaggcagactggaggctgctgttcaggggattgttgaagcagaggggttcgccctcaaccagcggaaaacacggtgcgaaactcaggcctcccgtcagacagtctgccatatcgtggtgaaccagcgccccaacgtagcccgcagcgagtttgaccgcctcaaggccatactacacggctgtcttagggaggggccctctgcccacaatcgagcaggattggccgactggcgtgcacatctccatggtcgagtagcatgggttgcccagctcaatcctgccaaagcgaaacgtctgcaggccatgcttcagcacattgattgggctctgtga

SEQ ID NO: 12683 - RNA, 1251 nt, synthetic construct
  source 1..1251: mol_type = other RNA
atgcatgcatgccttgataataaaccctcgtggtgtaagccgctcgcagaacggtgcgcacagatgcctagggaaagatggcgccgactctccgtacggaccttggcctctctcatcgaggaggacataggatttgctcatgcctggctggcccatcagaaacctggcgttaggaggtacatcctgagagtgaggcaggggatggggtcactccccttaggtctacaccgttgtcagctgccctactggccaaataccggcattcttggcccttggctgggcgtctctgctggaagcatgtggcggttgactagaccatctgcctggcaacggcgcatgcctctgggagaacagcattatcggtgtctgcttctgcccaagcgtacaggtggttggcgattgctggaagtgccccatccgtacctcatgcggctgcagagacagctcctggaccacttgctcgacaggattccagcccacgaagctgcgcatggatatgtcagagagcgctcagtggtgcaccatgcccaagctcacgcggggcaagcagtgattctgaagttcgatctgcaggacttcttcacaagtgttcgcgccagccgggtgcacgccttattccacacccttggctatcccgacagcgtcgccagagagctcacagcactgtgtaccactgctacacctgagccggtcttgaggcgcctgcaccaagagggacagctaccttggcaccgactgcagcagctccgagaaccccatttaccacagggcgcaccaagctcacccgcgttagctaacctctgtgcctttagacttgatctgcgcctagacggcctggcacacgctctggatgctcggtacacgagatacgctgatgatattgttataagcggtggaaccgggctgcgcgccagttatcagcggatcgcccaatgggtggccagaatcgcctccgaagagggctttgcattaaatttccgcaaatctaggtgccagacgatcgggagtagacagactgtatgcaatatcgtggtcaatcaacaccctaacctacttcgggaggagtttgacaggctcaaggctatccttcataactgcgtgaggcacggaccagcgtcccagaaccgtgatgcccaccctcagtggcagatgcatctgaaagggcgcttggactgggcctcccaattgaacccaggcaaggcagagaggctgcagcgactgtacgctcgtattgactggaagcagccctga

SEQ ID NO: 12684 - RNA, 1344 nt, synthetic construct
  source 1..1344: mol_type = other RNA
atgacaagcgtgagaaggttcaccgccctggccatggcaagggcgatgatggcgggtcccccaagagtcgatggactcgccgctagattgcaggcctgcctcggtcggaaggcagcttggtacagaagcctggccgagagggttgcccaacttcccggggagcattggagggcagccacaccacaagccctcaatcgactcgccgacctcgtggaggccgacgattcctttgaggcagcttggttagcccatgaacgcccccaggtgcggcactatttcctcgagttacccggtggtatgcagccccggccattgggacttgacgaactcgagctgccagattggcccgacgtccctgcactgtctagatggttggggatacctgccgcgggtttatggcgcctgactctcgcccgggagagacaaaggaaacagcctctgggacagcaacactatcgctcgcagttgctacctaagcgctccgggggattccgactgctggaagtgcctgaaccgtaccttatggcgctgcagaggaagcttctggacgctgtgctaaaccgagtcccaccgcacgaggcagcatgtgggtatactcccggccgtagtgtgctcgaccacgcaagagctcacgccggccaagctgtggtgctgaagttcgacctgcaggacttttttgctagtgtacgtcatagccgcgtccacgcgctgttcgcaacgcttggctatcccgctgccgtggcaagggctcttgctgctctttgtacagtcgccaccccagagcctgttctgcatagacggcaccaggccgggtcactgtcttggccacagttgcaacgtctgcgcgacgcccatttgccacagggtgctcctacctctgctgccctggcaaacctgtgcgcttttagactcgacctccgcctcgatggcctggcatttgccttgggagcaaggtacactcgatacgcggatgatctcgtcatttccggtggggccgaactagggggtcttgctgagagggtggaacgatgggtgggacgcatcgccttagaggagggcctggccttaaaccatcggaaaacccgatgtcaaacagccgggcgtcgccagtcagtttgcagcatcgttgtgaaccagaggccgaatctgccccgggatgaattcgatagattgaaggccgtactgcatcagtgcgtaaccgctggccctgcagcccagaatagggaaggccacgctgattggcggggccacttgcagggacgggttgcttgggctgcacagctgaatcctgccaaagcggccaaactgcagggactgctagcacagattgactgggcgcggtga

SEQ ID NO: 12685 - RNA, 1338 nt, synthetic construct
  source 1..1338: mol_type = other RNA
atgcctagcatccagcgagttactgctctggcgatcgcccgcgcgttattagccggtccacaggaaccaggagggctggcagccagggtcagactctgcctagggacaggggcctgcgactggcatggcgaactggctgccaggattgccaagttgtcggccctccattggcagtacctgaccccgcgggccttggcaagactggtggagatcgacccaggatatcagcacgcctggattagcgatgaacgccccactgctcaccggtggattctaagggaagctcaaggacctaggcccgcaccactcggacttgagaggatacaacgccccgcctggcctcatgctggtgctcttgcagcttttctcggaatgcctatcgaggggctgtggagattgacgcttcccgccgatcgccagaggagacgacccctagccgagcagcactatcggtgcaggttactggcaaaaagatccggcggcatgcggctgcttgaagttccggagccgcacttgatggcagtccagcggcgcctgttggacgcgttgctggattttgtgccaccccacgaagccgctttcggtcacgcccgtgggaggagtgtagtggaccatgctgccgcacatgctggccaggccgtagtcctgaaattcgacctgcgcgacttttactcaagtgtgcgggcctccagagtgcatgcactttttgcaaccctcggctattctgatgaagttgcccgagcactgaccgcgctcacaacagtggccaccccagaagcagttctccgacgcttacgggaggcgggttcactcacgtgggaacaactgcagcgtcttagggatccccacctgccacaaggggcgcctacttctgccgctttagctaacctctgcgccttcggcctggatctcaggctggacggactcgcctacgctctgggagccagatacaccagatatgccgacgatctcgtgcttagcggcggtcctgagcttgcccgatggagagatcggattgagagatgggtgggcagaatagctcgtgaggagggattcgcgctaaaccaccggaagactcgttgtcaaagaagcggcgctcgccagacagtgtgttctatcgtagtgaatgccaagcccaatctgcctcgtgctgaatttgatcgcttgaaggcaatcctgcacaggtgtgtcgtcgacgggcctgcagcacagaatcgcgacggcattgagaggtggcgggagcatctggcaggtcggatagcttgggccgctcagctgaacgctgccaaagcggcaaggctgcagtccctgttcgcccgaatcgactgggagcgatga

SEQ ID NO: 12686 - RNA, 1314 nt, synthetic construct
  source 1..1314: mol_type = other RNA
atgtcccacaggaccaccgctattgcaattgctcgcgccgtcctagccactcctgtctcacggtcccagatccttgagagaatggcacgctgtacaggcttttctgaggcaaccgaccgagccctcgtggacggtcttctcgaggctgggctggccagccattggactattgctcaggtggcagacgcccttggggcggatcctttcttccaggccacctgccaagagactcgccatcgcccactgatccgcggttggttcatgacacgcgcctctaccttggcagcaccgccagtgccgttaagggccgtagaacggcctgcatggccaggagttggacatctggccgatgacctgggcgtatccgccgaaggcttgtggcgcttgacaagatcggccagctggcaaagacaggctccattggccctgcagcactacaggtatgaactcctgcccaaaaggacagggggttggcgtctcctggaggtgcctgagccttacttgcgaacgctacagcggagagtgctggacaggctactggcacatgtcccccctcacgaggctgcatgcgcctatgtccgtggacggtctgtggccgaccatgccagagcccacgtcggtcaggcagtgctgcttaagtttgaccttcaagactttttcgctaccgttcgggcgagccgtgttcaggctaccttcgccaccttaggctactcacagccggtggccagagccctcgcaagactgtgcacgactgccacacctgagcccgtcttagaacgactgcggatcgaagggggactggcctggacacaagcaatgcgcctcagagatgcccacctaccccagggagcgcccactagtgctgcgttagccaacctgtgtgccttccggctcgacgtgaggatagcagctttggctcggactcttggggcccgctataccaggtacgctgacgatatagtcctcagtggggatgcaggccttttgcgggctgcggatcacgttgaagcccggctgggcgcttttgccctggatgagggctttgcactgaatcacagaaagactaggcgagtgacccgagcgaggagacagcaggtatgtaacatcgtggtgaatgctagacccaatctgccccgcgatgaattcgacaggctcaaagcccagctgcatctgtgcgcaacaagaggagctgccgctcagaaccgtgccggactgccagattgggagcaacacctcaggggcagggttgcatgggctgaaaccgtgcgagcggcatgtcgggagttttggacggcggatgctggcacaccatga

SEQ ID NO: 12687 - RNA, 1311 nt, synthetic construct
  source 1..1311: mol_type = other RNA
atggggcatgcaaggatgatgacagctagggcgttagcgcatgcaatgctggccggcgccccaagagaagaagcccttgcggcccgtatggcagcatgccttgacgccagaccaccctggctagcggacttagcacgtgccatggctcgcgttccgggggaagtttggcagcgcctcgacgtagcagctctaggagagcgcgtggaggctcacgcagggtttgccgatgcatgggtgagcgatgctcgccctgatgcgcgacggtggttgctgagaagtccggaagatctccctcccgctccagccggtttagcacgtcctcactggcctacggtgggcaccttggctagggggttgggactgactcctgccgggctgtggcgactcacattgccagctgactggcaacgaagacgccccctggcacaccagcattataggcagcaactggtgcctaagcgctctgaaggttggcggctactcgaggtcccagcccctcatctgagggctatccagcggcggcttctcgcgcagttattatccggcttgcccccgcatgacgccgcttttggatacacccctggccgatccgtggtagagcacgccatgcgtcacgccggacaagccagagtgctgcgcctcgacctgtcagatttcttcagcactgtcagggccgctagggtgcatgccctgttcagaacactcgggtattctgctgccgtcgccagggctttgactgcactttgtacaaccgctacgcccgaggcttggttaagggccgagcccagactggcctttctccagagacagcggttgcgcgacccacacttgccccaaggtgcacccacaagccctgcagttgccaatctgtgcgctttcgccctggacgcccgacttaccggcttagctgaggcctttggtgccagatactcgcgatacgctgatgatctcgtcttttcaggccccgcatccctaccagtccgcactctggtggcctgggtaaccgccatcgccgaagacgaaggcttcgccgtgaacccgaacaaaaccagggcacagggagtggcgcagagacagagtgtgtgcgggatagtagttaatgagcggccaaacctgccccgcgacgcatttgatcggctgaaggccactctgcaccggtgtgtggttgatggcccagccggacaaaatcgggagggccacgcagatttcagagcgcaccttcagggaagggtcgcatgggccgctcagctcaaccctgcgaaagctcggaagctgcaggctcttttcgaccggattgactggagggcttga

SEQ ID NO: 12688 - RNA, 1317 nt, synthetic construct
  source 1..1317: mol_type = other RNA
atggacgctgcacgaactacgaccgccagggccttggcaagagcaatgctggcgggacctcacgaagccggtggactagcagccaggatggccgcttgcttggacgccagaccaccatggttggctgctcttgccgaggccatggcaagggtgcctggcgaagtttggcgcaggcttgacgtggcaactttagcaagacgggtcgatgcccacgacggctttgcggaggcctggttctcggctgcacgtccagaggccagacgatggctgttaagagcaccagatgcacctgcaccagcccctgctggactggaaagaccagattggcctacggtaggagcgttggccagagggcttggaatgacccccgcaggcctttggcgactgactctgcccaccgattggcagagatgccggccgctcgcacaacaacactaccgccaggccctgattcctaaacgtggggaaggcgcggggtggagactccttgaggtgcctgagccccatctccgcgctgtccagaggagactgctggcacagctcctcaatggcttgcccccacatgacgccgccttcggatacgccaggggtaggtcagtggtccagcacgctgccaggcatgtcggtcagggacgggtgttacggtttgatctgggggatttcttctcaaccgttagggcggcccgcgtacacgctttgtttaaaactctgggctattccacagctgttgctagggccctgaccgcgctctgtaccactgccacacccgaggcttggctgagagctgaaccccgcctgggttggctccaacgccaacgtctacgggacccccatctcccccaaggtgcaccaacatctccggctgtggcaaacctctgcgcttttgccctggatgcacggctgacaggactggctgaacgcttcggggcccgctattctcgatacgctgacgatttagtgattagcggacctgcggccctcccagtacgtagtgtgggtgcctgggtcgctgctatcgccgaggacgaagggttcgtcgtgaacccgcgaaagacacgcagccttggcatagcccagcggcagtccgtgtgtgggattgtggtgaacgaccggcccaacctgcctcgcgatgagtttgatcggctgaaagccgtcttgcatcggtgtgttgtggacggccctgctgggcagaatcgggatggccacgctgactttcgaaggcacctgcagggcagagttgcctgggccacccagcttaatccgggcaaggccgagaagctgaaggcgctgctagacaggatcacatggcccggctga

SEQ ID NO: 12689 - RNA, 1317 nt, synthetic construct
  source 1..1317: mol_type = other RNA
atggatcacgctcgccgtatgacagctcgtgcactggcgcgggccatgttagcaggtgcgagacgcgaagacgcgcttgcagcccgtatggcagcttgtctggatgagtccccgccttggttggcgggattagccgcagccatggcacggatgcccggagaagtatggaggcgcctggacgtggatgcccttgctgctcgcgtggaagcgcatgaaggcttccttgaggcttggtgcggcgatggaagaccggaggcacgtaggtggctgttacgccctccacaggagcctggtgcagcaccagccggtctggaaagacctcactggccgaccgttggggcactagccagagggttggggatgactcccgcgggactgtggaggctgactctgccagctgattggcagagaaggaggcccctggcccgacaacactacacccagaggctgtgccctaaacgaggtgacggggcaggctggcgacttctcgaggtacccgctccccatttgcgcgccgtgcagagacgcctgttgacccagctactggacgggttaccccctcacgaggctgcgttcggctttacaagaggccggtccgtcgttcaacacgcagccagacacgtcgggcaaggtcgtgtgctccggtttgacctcgcagatttcttcagtaccgtgagagccgccagagtccacgctctgttcgccacactgggattttcaacggctgtagcccgagcactctccgccctgtgcacaacttctgcccccgaggcctggcttcgccaagaagctcggcttccatggctgcagcggcaaaggctgagggatccccatttgccacagggtgctcccacctcaccagctctggccaacctctgtgcattcgccctcgacgctaggttgagcggactggctgctgcgtttggcgccagatatagccgctacgctgatgacctcgtcatctctgggcccgccgcacttccagttagggctgtttcggcctgggtggccgccattgctgaagacgagggcttcgtggtgaacaggaggaaaactcggagtctaggtgccgcgggacgacaaagcgtttgcggcatcgtggtgaatgagcatccaaacctccctcgggacgcctttgaccgcctcaaggccatactgcaccgctgtgtcgtggatggccctgcagggcagaatagagagggtcgggccgactggcgagctcatctgcagggacgagtcgcttgggccgcccaattgaatcctgcccggggtgcaaggctcaaggccctatttgaccggattgattggcatcggtga

SEQ ID NO: 12690 - RNA, 1299 nt, synthetic construct
  source 1..1299: mol_type = other RNA
atgaccgctagggcactggctcgggcaatgctcgcaggaccacgggatgccgctgggttagctgcccgtatggcggtgtgcctgggggaaagacctccctggctagccgcgttagcccaggcaatggcgagagttcccgccgaggtttggaggcgtctggaggtcgccacacttgcggagagggtggaggcccacgaaggctttgccgctgcttgggccggagaagctcgtcctcgggctagacactggttgctgcgccctcccgatgagcttgctccagcacctgcaggcctcgagaggcctcactggccaactgtaggcgcactcgcacgcggattggggcttactccggcaggtctttggcgactcacactgcctgttgactggcaacgacggcgaccgctcgttcagcagcattacagacaagccctggtggccaaaaggggtgatggagccggctggcgactgttggaagtgcccgcaccccatcttcgcgctgtccaacgccggctgcttgctcagttgctcgacggactacccccccacgaagcagccttcggttatgccgctggccggtcggtcgtacagcatgctgcacagcatgcaggccaggcgagagtgttacggctggacctgagcgacttcttttccactgtgagggccgcccgcgttcatgctctgttcaagactctggggtactcaaccgctacagccagagcccttacagccctgtgtaccacggcagtcccggaagcatggctcaggggtgagcccagattatcctggccacagcgccaaagactgcgcgatcctcacctgccacaaggcgctcccacctcaccagcgctggctaacctgtgcgcctttggactggacgcccgtttggcaggactagcggcacggctgggtgctaggtacagccgatatgccgatgacctcgtgtttagtggcccagcctctctgccggtgcgacagatcgctgcctgggttagcgctatagcggccgatgaggggttcaccgtcaatcctagaaagaccaggagtctcggggtagcccagagacaggccgtgtgtggcattgtggtgaacgctcaccctaacctacccagggcggagttcgaccggttgaaagccacgctgcacagatgcgtcgtgaacggcccagccggggaaaatagggatgggcacgctgactggcgggcccatttgcagggaagagtggcatgggcagcccagctcaatccagctaaggccggcaaactgtcccgcttactcgcccgcatcgactggtctaggtga

SEQ ID NO: 12691 - RNA, 1293 nt, synthetic construct
  source 1..1293: mol_type = other RNA
atgacagccagagctttggcccacgcaatgctcgccggacccaggtttgaagctgctctggccgctcggatggcagtgtgcttggacgagcagccgccctggttagccggtctagctagggcaatggcccgggtacctggcgaagtttggcgacggttggacgtccagaccctgggagagagagtggaggcccacgagggtttcgcagaggcgtggttcggggaacatcgtcccgaagcccgacactggctccttcgctcccccgatgagttaccacctgcccccgcaggactcgaaagacctcactggcctactgtgggcgcgttggcaagaggccttgggatgaccccagccgggttatggcggttgacccttccacctgactggcaaagacgcagaccactggcccagcagcactacaggcagcagctgattccaaaaagaagcgctgggtggaggcttcttgaggttcctgcgccgcatctgctcgctgtgcagaggaggctgctgggccagctactgaatggattgccgccccacgccggggcttttggttatgccagaggccgctctgtggtgcaacatgccgccctccacgctggacaaggtcgcgtactgaggttcgacctgtcggatttcttctcaactgtacgcgccagtcgcgttcacgctctctttaagacgctggggtacagtgccgcagtcgctcgtgcactcacggcgttgtgtacaactagcacacccgaagcgtggctacgcgctcaagggcgactcgactggcagcagtgtcagagacttagggatgcacatctcccccagggtgcccctacatccccagctctggcaaacctgtgcgcatttgccttagatgcccggctggccggcttagccgagcaattcggcgctagatactctcgttatgctgacgatctggtcatctcaggtcctgccgctcttcccgtccaggccatcagcgcatgggtggctgcgattgcggccgatgaggggtttgtggtcaatcctcggaaaacccggtccctgggtgtggcacaacgccagagcgtttgtggcatagtcgtgaacacccatccaaacctgccacgggatgaatttgaccgcctcaaggcaactctgcatcggtgcgttgtggatggaccagcctctcagaatagggacggacatgccgactggcgagcacacctgcagggaagggtggcttgggctgcacagctgaaccccgctaaggccgagcgtctcaggaaactgctgggccggatcgactgggcgcgatga

SEQ ID NO: 12692 - RNA, 1344 nt, synthetic construct
  source 1..1344: mol_type = other RNA
atggcaaggctgtccagattgacagcccttgccctagccagggccctgttagcaggtccccatcaggcacaaggccttgcagcccggatgactaattgtctgggcttagggctcgagccacgcccatggttggaaactctggccctgcgattggctaggatgcccggcgaaagatgggcacgtctggagcccagatctctggccaccctgatagagaaagagcaagcgtttcgggatgcttgcgctagtgcggcacctccccgtccacaacggtatttgctcagaccacgcgaacacaaggctggcgcacccctaggcttagaggcctgtgatctcccggaccttccccacgttggagcactcgcggactggttagggcttcccttgggtggcttgtggcggctcagcaaaccgcgagactggcagaggcgtgagcctctctcagcccagcattacaggttccagctgatggctaaacgctcgggcgggtggagactgttagaggtgcctgaacctcaccttatgggagtccagagaaagatcctcaggggcctgctgcaacagctgcctctgcacgaggccgccatggcttatgctccgggaaggggtgtgcgagaacacgccgcactccatgctggacaggccgtgctgctgcgctacgatctctgcgacttctttgccgccgtgcaggccgcacgacttagagctctttttctcaccctgggatatccccacgaagtagcagtttccctcgccgcactctgcagcgtagctacgccagaacctgtcctgcgccgcatgcatgaggcaggacagttgacatggacccagctgcagaagctgagaggcgctcatctaccccagggtgccccaagctccgctaccctagccaacctgtgtgccttcaggctggatctgcggcttgacgggctggctcaagcgctaggggctaggtactcccgctacgcggacgacctggtgttctctggacctcagcatttgcggcaagctcaggcccgaatcagcgcatgggtcgggcgtattgccctggaggaggggttcgccctgaaccacaggaagtcacggtgtctcagtgccggaggtcgacagatggtctgcggcgtcgtggtgaatgccctccccaatctgccacgcgccgaatttgatagattgaaagctctgctgcaccaatgcgtgttgcacgggcctgcatctcagaaccggcagcagcatgctgattggccagcacaccttcggggtcgggttgcttgggctgcccagttaaaccctgccaaggcgcaacgcctccaggcactgcttgcgagggtggactggacaagatga

SEQ ID NO: 12693 - RNA, 1341 nt, synthetic construct
  source 1..1341: mol_type = other RNA
atgtatgcttctcgcctgcgtcacctggacgcccttgctctggcaagggcgctatgggcaggccctcaaacacccgcgtccctcaaggcacgcgctgaacaggctctgggagctagccctcactggctcgctgacttcattgacgagcttcccaccgtctcaggggccacttggcagaggcaggaggtagatgatctcgccgctcgaattgaacagactcgagcgtttgtgaatgcaccgcgggttccgggcttaccgtttgtccggcgctggatccttagggcatctcgcatgcgccccgcaccacttggactggatgatctggatctgccacccttgcctcattctgccgccatcgctgactggcttggaattacgctggacgacttagactggttcacccatgacagacggcccgcgttgccgcttcatgctcagcactatgccttcacactgcagcccaagagaagcggtgggggtagactcatcgagagcccacgttcacgactgaaagcgttgcagggtcgggcactgcacgagctgctcgacaaagtgcccgtacatgaggcgtgtcacggatttgtcgccggaaggagcgtgttgactcatgcccggctgcacgtaggacagcctgtggtcctacattttgacctaaagaacttcttcggccacatcctgtcgtcccaagtggccgccgttttccacacgctcggatatccacccggcgtcgcaaggcaacttgccgctctctgtaccgtgagtacacccgagcccgtgattgaacggttgagagatgacgggtgggttgattggcaggatgctagagccttacgtagagcccacttgcctcagggcgccccttcatcaccaatgctggctaatctgtctgccttccagttagatctgagattggatgggctggcacacgtcttgggggccacatacagccggtacgccgacgatctcgttctgtccggccctccatccctgaggaacagtttcgacagaatcgcagcttgggtggggaggatagccctcgaagaaggctacgctctgaatcatcgcaagacccggatggctacccaagcttccgcccaacgtgtgtgcggggtggtcgtgaacgcccacccaaatctcccaaggcgggagtttgacagactgagggcagtgctccatcgctgcgccttacacggcccagctagccagaacagggatggccacgccgactttcgagcacatctgtggggtcgcgttcagtgggctactcagctcaacgccgcaaaagcgcctcgactacatgcactgtggagtagaatcgagtggatagccagtcctgcctga

SEQ ID NO: 12694 - RNA, 1332 nt, synthetic construct
  source 1..1332: mol_type = other RNA
atgcacgcccacaggcaccgccaccttaacgcactcgcgttggcacgcgcattgtgggctggtccacaagctagaacctcacttagagctagggccacccacgccttagggcacgaacctgcttggctgacacttctgctggacgagctccagcctgtctccgaggctacatggcagcggcaatctgtcgaagatctggccgataggctcgagcggaccgatacttttgctgacgcagtgcggacaacgcccagacccttcgtgagacggtggattctgcgcgcaagtcgcatgcatccagcccccttaggactggaggggcttgggcttccgcctctccctcattccgccgcaatcgccgcatggttgggaatcaccctcgacgacctggattggtttactcatgatagacgtcatctgctccctctgcaatcccaacattacggctttactcttcagccaaaacgaagtgggggcggccgtgtgatagagtctccccgatcgaggctcaaagccctgcaggggagagttctgcatgatctgctggacaaggtcccggtgcacgaggcgtgtcacggcttcgttaccgggagatcagttctgacacatgctcggttgcataccggtcaacccgttgtcatgcacttcgacctcaaaaacttctttggcaggatcctgtcctctcaggtggccgcggtattccacactctgggttatcccagaggagtggcgcggcagcttgcagctctgtgcaccgtaagcacgcctgaaccggtgattgagcgcctgagggacgatggttgggtggattggcaagacgcccgcgccctaagacgagcacatgttccacagggcgctccttctagcccaatgttagcgaatctctgcgccttccagctggacctgcgcctcgatggactcgctcacgtgctgggagccacatatagtcggtacgctgacgacctagtcctatcaggacccgccagccttcggagtgcatttgagcgaatcgccacctgggtgggccggattgctttagaagaagggtacgccctcaatcacaggaagactcggttggctactcaggccagcgcacagagggtgtgtggcgtcgtggtcaatgagcacctgaatctgccacgtgccgaatttgatcgactaagggccgtactgcaccagtgcgcattgcacggacctgccagccagaaccgagacggccatgccgatttcagggcccatttatggggccgcgtgcagtgggcgacacagttgaaccccgcaaaggctgaacgcttgcaggcccgttggcagagaatagactgggctccatga

SEQ ID NO: 12695 - RNA, 1065 nt, synthetic construct
  source 1..1065: mol_type = other RNA
ccactcggcctgcacgatctgcttttaccagagctggatcacacagaggcactcgcccagtggctcggggtgtctctggaaacactcagatggttcacggcctgccctccgagacgaaggcatgctgatctgcagagacaacattatgcctttcgactattacccaagcgctccggagggggacgtctaattgaggctccccgctcacgccttaaggccctccaaagaagaatcctggacggcttgctcgacgccgtacctgttcatgaggcctgtcacggcttcaccagggacaggagcgtgttgacacatgcgcgagtccacgtgggtcagcctgttgtgatccggttcgatctgatgaactttttcgcctccatcacggcggcacaggttagggctacttttcagacattgggttacccagcaggtgtggcccaggacctgacagcgctgtgcactttgctgacccccgaacccgtcatagctcgtttacaggacgatggctggcttgattggcaccaagcccgctgtctgcggagtcctcacttagctcagggggctccgtcctctccaatactggcaaatttgtgcgccttccagctggatctgcgactggccggacttgccgatactatgggtgcccggtacagtcggtatgccgatgacctggtcttcagcggaccagcgtcagtaggcagttcctttgacagactggctgcatgggtcggccgtattgcactcgaagaaggctacaccgtgaaccatcggaaaacctggttggcatctcaggccacccagcaaagggtctgcggagtggtggttaatcagcatcctaacctgcctagggaggcgtttgaccgcctgagggccctactacaccagtgtgcaactcacgggcccgcaagccaatcggacagagctctcgatgaatttcgcctgcacgtgcttgggcggatgacctgggccgagcagatcaatccctcaaaagctcgccggcttagaaagctcttcgacaggattgtgtgggacgctgctccagcacaagagctcccccagagcggatga

SEQ ID NO: 12696 - RNA, 1317 nt, synthetic construct
  source 1..1317: mol_type = other RNA
atgaccagggaccgcagaactggcagcagactcgaactgctggctctggcctgcctggaactgtggcaggatgttgtgtcagcaggctggccccccagtgatactctgctgacagccctggaacgcgtctttgatgacgtgcctgccccccttagaactgctgctagagccgtgacgcccgcagatctaggtctgccaccgactgcaggcgtcgcagatgcagaggccgtagcagcccggttaggtgccctcttggacccagaggcccaggagctcttggcacgattacctgtgcggcgggtgcctctgcctcctcttagcaacgacgctcgcgtgttagcccccgctgatgtggcccaaagactggggttgaggtgggacgagctcatgtggctggctgacccacaggagagattacgcaggggtgcccccgagcaagggcattaccgctacgtgagagtgccaaaacgtcgggggggggagagacttctggaatgcccccggccacgtctcctatctgtccagagggccgtgttgaggagatttctggagcccttggtgccgcatgacgcagcaatggggttccgccctggcgttgggtttgttgatcatgctgcgttgcacgctggccaggctgtggtcctgcgactcgacctcgcgtcgtttttccaaacagtacggagggccctcgtcgtacgcgcattgatgcacggcgggctagcccgacctacagctcagctgctgggagcgattgcaacccatgttacccacccatccgctctgcgcggagttagcgagtctgaacgcgcgcgtcttcggagtccccatctcccacagggtgctcctacatccccggccctagctaatctcgtctgccggcggcttgacgccagactgacaggacttgcggcctcagtaggagcccggtatagcaggtatgctgacgaccttgtgctgtctggcggcggccaccttgctagagatgccgaacgcctggtgaccaccgtgggagctattgccatcgagtgtggcttcaccctcaacatgaggaagacgcgcgtcatgagggcatcccagcgtcagcagttggggggtgtcgtcatcaatgcaggcccaagtcttcctcgtcacgaactggagcggttagaagccactctcaccaactgtgtgcgacacggagtggccggacaaaatcgggcgggcgttcccgatttcagggctcacctgcaggggagagtagcctgggctcgagcactgcgaccatcaaggggagatgccctggccaggatattcgagcagatcgactggtccacatga

SEQ ID NO: 12697 - RNA, 1290 nt, synthetic construct
  source 1..1290: mol_type = other RNA
atggctctccgcctggaagccctggctctctcagctgttgagcagcacgcctcccgggaagacggcagtacactggccgatgcccttgatcacattgcgactgatgcatctccccgcttaaggcgtgcgtgccgcagagttcccctctctgcactgtcagctgagctggcccatcctcctgttgatcttgaccggctgatgcgggccattggtgcccgattgagcacacgggctcgcagcgaacttgccaccctgcgagtcagaaggtttcccttagtgagtttgggggacccagcccagcctttcccgtccttcggtccaagcggcctggacacccggttaggcttgagctctactgagttacattggctcgcagatcctcaatgtcggagagacagactgactgtgaccgaatcccactaccggtatgtggttgtgcccaagaggcggcacggggtgagacttcttgaatgccccttgcctcgcctgaggagagcgcagagggcactcttggatgaggttctggcccctctgccagtacacccctgtgctgccggattcaggcgaggaatggggtttgtcgagcacgcagcaaggcacgccggtcaggacgtagtgctccgtgtcgatctccgggatttctttccgagtatccatagaggcatggtggtccgagcccttgtggatggcggcactccactcgctaccgctcatctagctgcagccctggcaacgcatactacacatcgggacgtcgcaaggcggtttgacggaagcacaagggctaggctgcgatctgcccacctaccccagggtgctccatctagtcccgccctcgccaatttggtgtgccgacgtctggatgcaagactgcacggactagcggagtccctgggagcaacctatagccgctacgctgacgacctcgttttctccgggccgagacaccttctggatgacgccgcccgcatcgtctcactagtagggcgcattgctagctcttgtggcttcgctctgaggccagagaagaccagagtcatgtcagcggctcagaggcaatcgttgggcggggtggtagtgaatacccgacccacgctggccagacctgaactcgagcgcctggaagcaatactgacaaactgcgtgcgccatgggccagccggtcaaaaccgtgctgacgtggcagactttgcgtcccacttacgtggcagagtggcctgggtggagcagctgcatcctgcacggggagccaaacttcgcaacctctacgctcagatcgcctggggatga

SEQ ID NO: 12698 - RNA, 1338 nt, synthetic construct
  source 1..1338: mol_type = other RNA
atgaacgcgagcagacccctctggcggcatcgactcgctcgagcactagccgccgcatttctgtgcggtccgtggaggcacgctgaactcgtggctaggggagcggcctgcttaggtgaaaaaccgccttggctgcctattgcagcgcgctggacaagacacgcattcccctccccccccgcttctattgagccagtcgtagagcgactgctccgccttccctcctttcagcttgccactacaggccgtcccccaacccctaaatggcggaaggcattcctttatgttccccctgatcccgttgcccgcttcgccgtacctcctttgccgtctgacggggcattggctcgatggcttgcaatcccagaaccccttctggcttggctggcggatgttagggggctgaatcggaggactgctgaagccagactgcacaattaccatcccagatggctccctaaggctcacggcggggtcagactcctggaggaaccaaaacccctgttgaaacaggcccagcgccgtatcttggccggcctactggctcatctcccgccacacgcggctgcacaggctttctgctccggaagaagcgtgcacagtcacgccgccttacacgccggacaagctgtggtgatacggatcgacctggccgactttttcggaagcatcggccgtgccagagtacgggccctgtttgaggcagctggctatccacgacctgtggcgcgatctctagccggcctttgtacaactgccacgccaccactagtggttgcccgcttaccccggccagttgatgccgcagaggtgccttacgcagcctcgcagcgacggcatcttctggcacctcaccttccacaaggagccccaacaagtcccgctattgccaatttgtgtgcctgggaactggacgtcagactcactgcactggcaaccaccttcggcgctcgctactcacgttatgccgatgatctgacgttttcaggaggtcctgaggtggcgaggagggctggtcacctggttgaactggccatgttcgcggcttacgcttgtggctttgccgtccggcacggcaagaccagagtggtgaggagcggagccagacaggtcgtgaccgggttggtggtcaacgagaggccgcatgtcgcaagggccgagagggatcagctcaaggccatactgcacaactgcgtgagacatgggcccgccgggcaaaatcgcgagaaccatccagactttcgcgctcatctgttgggacgcttaggctgggtggctgcaggggaccctaggcatggtgcaaagctgcgggctctcttcgaccggatcgcctggtga

SEQ ID NO: 12699 - RNA, 1005 nt, synthetic construct
  source 1..1005: mol_type = other RNA
gacgctggtgtcccacctctgccaacccctggagatctggccgcttggctcggactgaccacagatcgggtcgactggctggccgataggcttcggccagaggaacgtcctgcagcaggggcagtgcactatcaccaccggtggaaaggcagacgactgattgaggcgcccaagaggactttgcgatctgtgcagagaaggatcctggacggcattctcgccgatgtcccacctcatccagcggcagtggcgttcaggccaggagtctccgtcgtagacggcgcagctcgtcacgtcggacagccaatggtggtgcgatttgatttgagagattttttcgcctcagttcggcgcgctagagtacgcgctatcttcgctcgcctaggttaccccgacccggttgccgatctgctggccaaccttacaacccatgccacccctgccgctgtgttcgatgccgtcgctccccgtgacgcagaagcccatagggctcacgtggaaaggcgccgcaggtttgccgaacgtcatcttcctcaaggggcgccgagtagccccgctttggctaatctcagcgtgtacggtctggactgccggttagcagcactggcccgcacgttgggggcaacttacacacggtatgccgatgaccttgtgctgtccggcgactttgctcccaaccccgtcgtgcgcctcgtagaccgaatcgtgcggtctgaggggtttgcgctgaacgccgccaaaacccgagtgatggccgcgtcccagcggcaaagagtgactggagtggttgttaatgctcgccctaacgtggccagggccgatttcgacaggctcaaggctgtattaacaaattgtgccagacacggcgcagccagccagaatagagatgctcaccccgcctggcaggcacatttggaggggagggtggcctgggttgcctcagttcaccccgagagaggcgctcggctaagagcactcctggcccagatagactggagtgcatga

SEQ ID NO: 12700 - RNA, 1254 nt, synthetic construct
  source 1..1254: mol_type = other RNA
atggacgcagacaccctcgctgacgcctggctaagtggcgactggactttggccggcatgcgatctagaacccagcgtcttatccatcccgacaggctttccaagagcctggcctctatgattttaggcttttggctggagctaagggatcggccgcacgaacggcgaagggcaactctggccgctgctattaccgctcatagagccttctttcgcatcgcccgaaccaacacgtatgggacagttctggacgcacctaaaatggtgcccccaccgagagcttgggatgtactgccactggatacacctgccacagcaggagcgtggttggggctcacggcaacagatgcgacctggctgactgatccaaggggaatcgccagacattacgacagatactggagtgggacaaggcttatcgaagccccccgacgtcgcttaaaggctgcccaacggcgcatcgctgccgaactcctggctgcaattcctccccacgaggctgcacacggatttcgcagaggaagatcagtcttgagcgcggtacacccacatgctggcagagaggtgttagttgtggccgacctcaccgccttttttccctccgtgcgggtgtctcgagttcacgcaatgttccagcgcgtcggctatcctgaagaggtcgcccggttcctgacccggatgtgcactacaagatgccggactctgcccaaagccgaacacgaggttacgcctggccaggctcagctgtatcgggcgagacatctgcctcaaggggcccctacatcccctgcacttgccaatctctgcgcttttcacctcgacgctcggctggctggattcgcctcgtcactagggggcacctacacccgctacgctgatgatctcattttctcaggtcccgcggtgcttggtaggggtggattcctggcaactgtgtccactatagccgtggagcagggcttccgcttgaacacagcgaagagccgggtcatgcgccgttctcagtgtcagctggtcttaggcatggtcgtgaacgaggcaccaaccctcccaagggcccagctggaactcctggaagccgagctgttccgttgtgcaaggcgcggtcccccggtacatcaccagcatggggttgcctggcttcgagatcatttggcgggaagggtggcctgggctaaacacgtgaatccaaggagagcacaaaggctggtggagttgctcgccgccatagactggagtggggcacacagctga

SEQ ID NO: 12701 - RNA, 1293 nt, synthetic construct
  source 1..1293: mol_type = other RNA
atgccaccagtcaacaaattgaatttcttctcaaagcaccttgccatgtggctgagccaggccgactggcatttcgtaactcttctgtctactgctattgaatgtgtcgatgaactgccggacgactgtgattcactcatcaacgagttactcctgcgatatcctgaaaagccgtctgagccggccttagccggtcaccttcagtcgtcataccggctgagttcctggttcaaaaggggccagtccgcacccaagatcatgagatttaaccttgatagccccacctttatagaaagggacaaccgggagtatcctagaattgacacaccaggagatctggctgactggctgaaaatcactccctcacaactcgagtggttcagtaattgctggaggttcgacagcaacactcctcggtacctacaacactaccagtaccagctaatggaaaagagagatggtaggatgaggctcatcgagaaacccaaaacaaccctgaaacgactacagcggaagatatatcaggagatactctctacgttagaaacacatcctgccgtgcacggctttcgcaaggacagaaactgcattagccatgcgtccgttcataccggcaagaagtaccttctgatgtttgacattacagattgttttcagtccattcactggcccatggtcaaagtggtgtttaaacggatggggtacccagatgccgtgtccatcctgctgacagccttatgcacccacagtgttagattgaagcctgcacagttgaaactgttcgataccgcgcagaggaaccgacttagacagagacacctaccacaaggagcccctacgtctcccgcgttgacgaatgctgccctgcataggctggatatccgactgaccggcctggcccatcactttggtctggactactcccgctacgctgatgatctcgctatgagcggcaatacacatcgggactggcggttccttgagccactgatcgggggaatttgcctcgacgaaggggttaccttgaattataagaagactcgcattaagaagagccaccagaagcagcgtgtggtcgggatagtggtgaacagtaagactaacatcgatcgtaattactttgacaccctcaaagcaatcctgacaaattgtaccaaatacgggctcgacagccaaaatcgttatcgccacccccacttcagagcacatttgctgggacgcatccaatatgtaaaatctttgaatgagaggcgcggcgctaagctcgagaagctgtatcaggcaattaactga

SEQ ID NO: 12702 - RNA, 1284 nt, synthetic construct
  source 1..1284: mol_type = other RNA
atgaacaccaaaggatttttctgtcggcatttggctatctggttctacgaagaaacctggcacttcaccaccctccttgccatctttatagacgtggtggagaacctcccgagtgatgctgatctgctggtgcacgagactctgctagaattccccgacaagacaagtgccgaaaacatcgctgcctttctctctcgttcccagcgggttttgcattggttttcagacggcgccgataaacccgccattataaggatcaacttacagcagtctcctgtagttaagctcgtgaacagcaagctccccgaactgaattctataggcgacctcgccgggtggctgggaatctctatcggccaactggactggctggccgacctcaagcgatatgattccagccgtccagaaagatttaaccactatcactaccgaacaactgagaagcgggatggtaggttacgcctgatcgagagcccaaaacgcctgctgaagtccattcagcgccaaatttccgatgatatcctgatttacgcgcctgtgcacaatgctgctcatgggttctgcaaaggtaggaactgccaatcacatgcctccaaccacattggaaagaattacctgtttctgttcgacttggcgcattgcttccagagcgtgcactggctgcaggtttttcgcgtatttacgcaactggggtatacgcggactattgcaagatatctgacatccctggcaacacacagggcatacagtaatcacgttttactagaccgtcttgatgtggaccagcgaatccgccttcgacagagacatctcccacagggcgcacctagttcgccagcccttagcaatgctgtcctctctagattggataaacggctaaacgggctggccaaaagccttcggctggactattctagatacgcggacgatctcgccttttcaggaaacgagcacagggactggcggttccttgagtccctggtcggcgctatatgtaacgaagagggcttcgcattgaattacaggaagacaagacttgtgcgccctggtcagaggcagaagattactggcgtggtcgtcaatcaaaagaccaatattgaccgccgatattacgattcattgaaagcagtcctgactaattgtctaagaaacgacttagacagccagaatagattcaatcattcagatttcagggctcacctgagggggcggatccagcatgtgaagagtctcaacgagagcaaaggaaccaaattggagaagatcttcgagcagtttccctga

SEQ ID NO: 12703 - RNA, 1293 nt, synthetic construct
  source 1..1293: mol_type = other RNA
atgaacaagaaaattcggttctgtcgccaacttgcagagtggttcctggtgtccgattggcactacagtacattactggccgtgtttattgatgtggccgatgaactgcccggagacgcagacgaccttgtctctgaattgctggctgaatttgacacgaaaccagagctgaaccctatcgtggactatctgatgcagtccctgaggcttggctgctggttctacgacgatcacggccccagggtggttccagtctgcttaattaacagtcagctcagcagactgtctaatgatgcactacccgtgctcaataccgagtctgacgtcgccaattggcttaacgttagtattcaggagctgacctggctggcggaactgtatcgtctggaccccacgagccctagctacttcaagcactaccactattccatcgctaagaagaggaacggttcgcccagactcatcgagtctccaaagtcaaggcttcgggctatccagaggaaggtgtactccgagattttggaccatgcagtgatccatgattccgctcatggattcctgaagggcaaaggatgcaagacccacgccagccagcacagtgggaaggatatcctctttactttcgatttgtcacattacttccattctatacgttggccgaatgtatatgccatcttctccggactagggtatactaattcggtgtcaaagattctcaccgcccttactactcatcgctgttacatgaaggatcggtgcttgggtgagctcgatacagatcacagaagtctcctccgagaacgacacctacctcagggagcccctacaagcccgagcctttcaaacgcagtactctattttttggactgtcgcttatccggactggccgcctccctgaacatgaaatactcacggtatgctgacgatctcgctttttcaggcgataccgggcgcgactggagatttttagagcctttggtcgggtctatctgtctggaacaagggtttaggctgaaccaccggaaaacacgcattatgaagagccaccagaagcagcggctgaccggcgtagttgtcaatacaaaaccaaatgttgacagaaaacactacgaccgactgaaagcaaccctcactaactgcctgagacatggcctagagtctcagaacagagacaatcatccagacttctttgcctatctggaaggcagcatagcgcatgtgggccacttgaatagcgctcgcgggaaaaccctgaaagccatgtacgatagggtgatagcgacacaaggttga

SEQ ID NO: 12704 - RNA, 1275 nt, synthetic construct
  source 1..1275: mol_type = other RNA
atgattcagacgtttaccagagagcttgcccagtgcctgtatcactccgagtggcactttaccaccctcctggctgcatgcattcagaggatagacaatcttcccgacgatattgacggcttcatctctcagctgcttaacgtgtacaatgaaaagcctgccctggagctcctggctggatttttggagcagtctcgctgggttcgaagctggtttgtggtgccagccagagcaccgcgattccgtatctataacctggaacccgtctcgggcactacaagagccgaactccctcctttagattcaccagccggtcttagcctctggcttgggttaagtccaggccacttggattggatcgcaggcctcaagagggtggatgcgtctaggccacgccgtctggataattaccactactccctcctgcggaagcgccatacaggcagccggctgatcgaatcccctaaaactatcctgaaggctgtgcagcggagaatcctaaacagaattctgtgtcacgctcccgtacacagggccgctatggggttcagaaaaggatgctcaagtctcgaccatgccaggttgcattgtcggaaacgctacgtgttttgttttgacctcgagaattatttccagtcaattcagtggctacctgtgtggcgcgtttttcgcacgctcggctatcccaagaagacagcaaattacctttccgccctgtgtactcatgcctgcccccctggagccctggctagatttggtttgggggaccattataaccgactgctgagggagcgccacttaccccaaggggcaccaaccagcccagcattgagcaacgcgatcatgctcggcctagacagacggctgagtggtttggcccggcgacttgagttggattattcaaggtacgcggacgatctcgtgctttctgggaacggaaaaaggaattgggacttcctggcccccttagtcggctctatttgcctggatgagggattcagcctgaaccacaggaagaccagacgtctcacaaggtcgcaatcccaaaaggtggtcggggtcgtcgtgaacgaaaaaattaacatagaccgccggtactatgatgatctgaaggcaaccctattcaattgtgttcgattcggaccggacagccaaaatcggggccagcacaaagatttttgcgctcatctgctggggaaaatccattacgtagcttccgttaacactagtaaaggtcagaagctgctgcagttattcgaccggatagcgttctga

SEQ ID NO: 12705 - RNA, 1335 nt, synthetic construct
  source 1..1335: mol_type = other RNA
atgcggtatgatcggtggctggccgctagactggcagatgcctaccagagcggggcacccatagccagagagatgcaacagcgagccgccatggcattaggcgagcagccagcttggcttgcaccactcaccaggaggatgtggcggagattccagcaggtgtgggaaaccacgtctgcacatactctgacagaagctatcctagccgacaggggattccaaaggggcctggccttatcatctaggcccattcaggtacggcgaatctttcttcctccacctcaggagttggctccagactccctggccgcacgttatagactgcccgcacttcgatgcgccggagacttaatgcactggttgcggctcactccggaagacctggattggttgacacaagccagaggcgcacccagtggtgccagttccgctttgggccactacatttaccgatggcttgataagccaagaggcggagctcgtttgctggaggcccccaagccttggctcaagaccatccaacgacggatccatcaggagattctggcccctctgccactgcatgaggctgtgcacgggtttcgcgcccagcgaagcagcttaacacacgcaaggattcacattggccaaaccctcctcctgaaatttgatctgaaagatttctttccctctgtgtcctatgcccagatttatcgtgccttccgcaggctggggtacgggcatcaagtggcccggttgctaagcaagctgtgttcccacgtaactcctgacgagatcctgcgccagccgcttgcaggctacctggagagggggaatgaactcttcagaagggcgcatctgccacagggtgctcccacctctcccgctttggctaacctagctgcggcgcacctcgatcggagactcagtgctcttgcagactcaatgggcagacggtactcgaggtacgccgacgatgtggtcctttcagggccccgcatgtcaccaggagcgatcgctcgcctccaggctctagttggcgccatcgcactggaagagggatttgtcttaaatacaagaaagtccgcagtgatcggtcagggagcccgccaacaggttggtgggctggtcgtgaatgccaaggccaacattcctaggaaagactacgacgaattgaaagccgtgctgcataactgcctccgcttcggacctgacggccagaatcgccagggacacggtgattgggctgctcacctccgcgggaaaatagcgtatatggccggaataaacccggagaagggccggaaactgctggcgctctatcagcgtatcgtctggcctcaggaaagcgtttga

SEQ ID NO: 12706 - RNA, 1335 nt, synthetic construct
  source 1..1335: mol_type = other RNA
atgagatatgataggtggcttgccgcccgccttgccgatgcttaccagtccggagccccgaccgttcgagaaatgcaacagcgcgccgtggtaactctcggtgaacagcccacatggttagcgtccctcacgaggcgcatgtggcggagatttcagcagggttgggaaggtgcaagcgcctacgcactgagtgaggctatactggcagaccgtggcttccagcagggacttgctgtcagcgccaggcccgttcaggtacggcatatctttctccctccaccgcgagctctccctcctgacagtctcgcctcccagtacggactccctgcgttgagatgcgcaggtgatttgatgcattggctaaggctgacacccgaggacctggactggttaacccaggcaaggggagcaccccggaaagctgcaagtgccctgggacattatacctatcggtggctggacaagcctagaggtggggcacgcctgcttgaagctccaaaagtgtggctgaagggaatccagcggagaatctatcaggagattctggcgcccttgccactgcacgaggccgttcatggcttccgcgctcagcgttcatccttgactcacgcccgggtgcacgttggacaagcgctgctgctcaaattcgacctgaaagacttttttccctccgtggggtatccccaggtctatcgcgtattgaggagactgggctacggtcacgaggtcactagactgctcagccgcctgtgtacccaagtgacaccaaatgaaatattacgatcgccagcagctcggcacctagaaagaggcgaggagctattccgtagggcccatttgcctcagggcgctccaacaagcccagccttggccaatctcgtggctgcgcacttagataggagactgtcagccctggccgattctatgggccgccggtattcaaggtacgctgacgactttgtgttatctggggctctgatgagcccgggcgctattgagcgactccaggcactagtcggagctattgcccttgaagaagggttcgtgcttaacacccgaaaatctgcggtcatcggccagggcgcacgacaacaagttgggggggtcgtggtgaatgctaaggccaacatctctcgcaaggactacgatgagctgaaggcagtgctccacaactgcctgcgtttcggccccgatggccaaaatagacaaggccacggggattgggcagcccatctgagggggaagatcgcctacgtggccgggattaaccctcagaaaggacggaagcttctggccctctaccagcggattatctggcctcaggagtcagcctga

SEQ ID NO: 12707 - RNA, 1338 nt, synthetic construct
  source 1..1338: mol_type = other RNA
atgaactatcagagatgggtcgctacgtcactggcagaaactctcctctcaggtcctagggacgtcgccagccagagacaacggctgaccaaagtgctgggagaagagcccgagtggctctccccattagtggccttgggtcggtccccagatttcgttaagggcgaggactctgagactctgaagcggcaactgaccgaggcaatcttggattgcgaagacttccttctcgctttcgtcgaagaagatactacaccccgcatacgccacatcaagtgtcagacattacccccaacatttccgagtaactgcccggtcgaagtttgtaatttacctaaactggccaccgaaggagacttgctggcttggttgcacttatcgcaccatgaccttctgtggttgatcaacgagtacagggaagagtttggccaggacagccgactccagcattaccattacagatggctggagaagccacgaggaggcgcacgacttctggagagcccaaaacctcttctgaagtctctccagagaaggattcacagggaaattctgagtcccctgccactccattcaggcgtacagggctataggcagggacactcctgtctcactcacgctcggctccatcagggccagagcctgctgctgaaattcgatctgaaggatttctttctgagtatcgggtaccagcaggtttacaggatctttaggagactgggatataaccaccgggtcacccagatcctgtccagattgtctactaataaaacaccccgagccaagcttagaccaccacccggcattatgacagaacgcgatatccaattgttcagacggcctcatttacctcagggggctccgacctcccccattctgtcgaaccttgctgcggcgatgctagacaatcgcctcagtggacttgccaaaaagatgggctatcgttacagccgttacgcagacgacttcgtgctctcagggcctgggatgtctcaacacgccgccgagaaattgcagcacctagtgggggccatcgctgaggaggaggggttcagcctgaatacccggaagtccgcggtggtgggacaaggtcaacgccagcaagtggcaggcatagtagtgaatgagaagacgaacctctctcgcaaacagtttgattctctcaaggcaatgctgaataactgcgccaggcatggtcccatttcccaaaatcatcagcaacttcccaactttcaggctcacctgaaggggaaaattgcctatctacgtagcctgaatcctcagaagggcgataaactgatgaccctatatcagaagatacagtggcctgaccagtga

SEQ ID NO: 12708 - RNA, 1323 nt, synthetic construct
  source 1..1323: mol_type = other RNA
atgaattataagcggtgggtggcatcatgtctcgctgacgctttcataataggcccccgggattctagtgctatcctgcttcggtggtcaaaagtgttgggggagcagcctgagtggctcaggagattgtctaaagagattctcagtccagaaactgcacaccacgaaaacctgaatttcagcatggtcctggagagaatccaggcttccgaggactttgacgaagcgtttagtgagagcgaccagcctccacgcgttcgatacgtatacctgccagaggccgagtatagcttctctgctgaacagcatgagctgccgaagctggcggggatctccgatgttctaaattggctcaacttgactgttaatgaccttgaatggttgtgtgggaattacagaaatgcacccggcgcttccagtaagctggcccattaccattataggtggctggaaaaaagaagaggcgggagccgccttttggagtctccgaagcctctgctgaaaagcatccagcagaagattctgcacgacattttaagtgccgtgcctcagcatcccgctgtccacggtttccgagccggccattcctgcgtgtcgcatgccagacaacacctggaacaacctttattgctgaaattcgatctcaaggatttcttcgcctccatccactatcccatggtcttccaggtatacagaaagctcggttaccctccaacggtgtgccgaatacttacaaagttatctactaacgtctcaccagtgaaaatcctcaaatccaggcccgacacctgcattgacaaggacgacaactattttaggcgtccccaccttcctcaaggtgccccgacctcaccagccctaagcaatctggccgcgtcgaaactggataaaaggctgacagggctggcagataccatgggatttaggtactccaggtatgcagatgaccttgtgtttagcggacctcggctcaaacgcggaagcattgataaacttcaatctctagtgggcgccatagtcctcgaagagggctttttattgaatacacgcaagtccgctgttgtgggacaggcgcagcgccaacaagtgaccgggattgtcgtaaaccggaaggccaacatttctcggcagcagtttgatcagatgaaggcaattctgcaccactgtatccaccagggtccacaccatcagaaccgtgaccaggtgcccgattttcaggcacatctcaagggcaaaatcagctacatgcagtcaatcaacccccagcgcggaaacaagctgatgaagctgttccaacaaatccagtggcagaacgccgattga

SEQ ID NO: 12709 - RNA, 1284 nt, synthetic construct
  source 1..1284: mol_type = other RNA
atgaatgcacatcgctactttgcttatactttagcccggatctgtctgcagagcagctgggagcgagaaccaatggccgaggccgtggagctgtcactacagggtcagggcccgtgggtcaatagcctgattaggcaggttttgcatcgtttccccagaaggcctgggctgccggcactgttcgattttttgcggcagtccgagggcctagccgcaatcaggctccggtaccagccgaggatctgcaggtatcctcttaccctccctcacgtggtgctcccatcttcattgccccctttagacagcgtgggcgcactgtgtgaatggctccggttggcacccgctgacctggattggttcgcggataggtcaaacagagcggccgggcacgcagctcctaaagtgcgacactaccacgtgactacgataccaaagcggcaaggtggcatgagactgctcgaggtacccaagtcaagattgaagcagatccagcggcgcattcatgacgatatccttctgcaactccccctgcacccagcagctcaagggttcgtccgaggacgatctccagttgcgcacgcgggccttcacgttggacaagccgtggtgcttcgctttgatctgcgggattgcttcctacatgtccacggcggacgagtgtttcaggccttccgcgccttagggtttcccgaggacgtctcccgccttctcatgggcctgtgtacacatcgcctcccacagtggctatccacacagcttcccttagacgaagttcagcgccagaaagctaggcagaaccacctgcctcaaggagcccctagttcccccctgctgagccattttgccctcagaggggtcgacgtgcgactcagcgcttacgctagtgcactgggtgccaattattccagatacgccgacgatctggtcctgtcgggcggtgagcatctcagacacagtttcagggccattgaagcgagggtgggcgccatcgtggcagaagagggattcgccttgaattttcgtaagagtcgctgcgtctctgctgcacagcgccagcaagtaaccggggtagtggtaaatcgtcagctgaacgtgccaagagtgcagtttgatgccttgaaggctgagcttcataactgcgtgcaacagggctgggtttctcagaggcctacccacgtcgccgactatcgggctcacctgcttggacggattggttgggttatgcaggtcaacccccaaagaggggctaaactgagaggactgttcgaacgtatagactggtga

SEQ ID NO: 12710 - RNA, 1395 nt, synthetic construct
  source 1..1395: mol_type = other RNA
atgtatggcggcgctcgctgtgcacggaaatacacacaaaaccaaaggctggtgctggaaccactgattctgaatgacatggacgcacactataagaagctgcttatcaggcaactcgctagggcagttcttataggcgagcattcccctgccggtattacgagaagcatcactcattgtctaggtataggtacagagcaggcacgcgctttggccgtggagatttccgccgaacatctgtttagagcctacccgcaccatgctgaattattccttcgtacaacactgcaggaaagcaccactttaaccgcaatttttgcgggacgggatctgagggttatcaactggccccttgccgctctgcagagtcagcagaatccacccgctaagtacctgtggcaactaccagtgataaagagtgcagagcaactggctgacttcttggacgtgcagctgaatgatctttattggttcgcacaacggttcgccaagcccaattcctcttttaagcagcagcactactactatcgctttatcactaagtctgacacctcactccgtttactggaaataccgaaatcacgcctccggtgcttgcagcgaactattctcaaaaaagtcctgcagccaatgcccgttcacgaggccgcccatgggtttgtgaaaaacaagaactgtgcatcttttgcggagccacatgtagccaagtccctgatcgtcagcatggatctcgagaattacttcctccacattcctgtcgcccggattacccgtctgttccaagtcgctggatacccagttgacgtagctagcttgctggctgggctctgcactcaccgaacacctaatcaaataatcgcaaacacccccggatctcacagtaaatatctgcacattaggcatttgcctcagggcgctcctaccagcccaatgttggccaacttagccagcttctggctggacgtgcgcctcaacgcgttggcgaaaacgatgggatatcactatacaagatacgcagatgacctggcattctcgtgcgattccgataaccataaccccaaaaggctgatccgctccgtgagtgatatcattcaggccgaagggtttcggctcaatcaccagaagacccgagtgcagaaacctggccagcgacagtgtctggcggggctagtagtcaatgagaagctcaccatccccagaaacatcgtgaagaggttgcaggccgaactttacaactgcgtgcagcacggccccgaaagccagaatagacttaacaaggccgattacaaatcacacctggctggaagaatcgcccaggtggccggggtgtcaaatgtcaaagccgagaagctattcgccctctttgaccagatctcttggcctcaggagagatga

SEQ ID NO: 12711 - RNA, 1299 nt, synthetic construct
  source 1..1299: mol_type = other RNA
atgaactaccgcaagctgctgatccgacagctggccctgtccctgttggaaggcgcccatcaccccgtcggattggctaactccatcgccggttgcgtaaacctcactcttcgcgatgccctccccctagccgaagaactggctcggaacttagattggggcagtctcactgttatgcagctggagcagtggcttgaagcatccgagaggctcgccgtgctgtatcgcagccagagactcagggtcgttaaatggcctttgacagcgatacctgcaccacagagagcagccttaggttccgcctggggccttcctccattccataatacagaccatctggcgcagtggtgcggattaagcccaggcgatctcaactggtactctcagcgataccctaatcagaggcccgacgcccggaaactgcagcactaccactaccaaccccggcacaagtctgatggtagtcaacgaattctggagacacctaaatcacgcttgaaatcactgcagagaaagttgaatcacgacttactcaacaaggtaccggtgcacgacgccgcacatggtttcgtggcgggacggtccgtcaaaagcttctctcggctgcacgtggaccgaccagtcgtgctggcaatggacctcaagcatttttttctttcgatagcacctggccggcttgtgaggctattccaacgtctgggatacgacctcgctgtgagtaaggcccttattggcttgtgcctaaaccagaccccagaggctgtgttaagcccaattcattgtctcgccacaaggcagaggtatagacaaccccatctcccccagggggcacctacctcaccggttcttgccaatctgatggcatttaggctcgacctgagactggaggctgccgctcatgggcagggattctgttatacgagatatgctgacgatctggcctttagtagccatcgccacgatcgcgccgctactcgcatcctgcaaagacaggtcagatctatcgcggcagatgaaggattcgcgattaaagaggaaaaaacccgggttatgaccagggcagggaggcagcaacttgctggggtggtggtgaacaagaaacagagcttgcccaaggcagagattaagcaactggaggccatcctgaataattgtgtacgatacggcccgcactcacaaaatcgcgctcgtcacccacagttccgtgcctggatggaggggaagctagcttatgtccagcatttggctccccaccactttgaacggctgcagagacactttgagctgatccagtggtga

SEQ ID NO: 12712 - RNA, 1338 nt, synthetic construct
  source 1..1338: mol_type = other RNA
atgtcaaatcagaaccagatcattggatttatctcacacgccattcttgccggcgagtggcagaccgacgctatcaaggaaaggattgggcgaagcattggctaccagtttaacgcaagactcctcataaaagaactgatgtctgagttcgaacttacacaggcccagacccagcataccgccatacagcagttcttgaagaacaatgtgacttttcagcagtgctggggggagcagaggcagctgatccagctcgataaaatctatatccccaagcaggatcgttgtcggcccccaagacaactcaaccacatcgagttgcctgccttaaatacggaacagcaactgggagactggttcaagattagtgtgaatgatcttatttggctgtcgggcatctgggagaagccatatgatgctaagagctgcaaattgtatcactaccactaccagtggctgaagaagcacaatggcaagaagcggttggttgagatcccaaaaagccggattaaatctcttcagaagaagatctccattcagtgccttgattccattccgatccaccagaacgcacatggttattgtaaaaacaaaagctgccaaacactggtgcaacaacacatcgcgaaacccactatcctgaagatggacctccagaatttcttcgcctctattgactaccggaagatatttaacttgttctttagcctagggtacaataaggatatctcgcgcctcttcgctcatctgtgtactacagctacaccattgtctgtcctgagtgctgaactcattgcgggacaacaaaaggactactggcaccaacgcaaactctatagagagagacatttaccgactggagcaccttccagtcccgtcatctcaaatctgtgcttttttaacctggactgtcgactgaccgcgtttgctgaaaaaatgggcctgaattatagtcgttatgtcgacgatatggttttctctggcggacgcgaattttacaataaatccgactacctgatcaaaaccatatcaaagatctgtcagagcgagtacttcttcataaaccataaaaagacgcagttactgaaacctcatcagagccagcaggtatgcggtctggtggtgaatcagaagcctaacttaacccgcaagaactacgaccagctgaaggccattctatataattgcgtgaggacatcccctaagcagcaaaataggcttaaccacgcaaacttcaaagagcatctcgcaggtaagattgcctacctgtcccagataaacccccaaaaagggcaaaaactggccgacctatttgatcagatctgttggatggagtga

SEQ ID NO: 12713 - RNA, 1296 nt, synthetic construct
  source 1..1296: mol_type = other RNA
atgcagaatttagcaagaactagccgactgctggcagcttccataatcgatggaccatgggagactgggcctctggcaaggcggatcgcacatgcgatttccctaaggggttttaatcctgagcgcctagccctggccttggtgagacggttcggcaagggaaaaacccccgtgctgcgggatctaaccgcagccattgctgccaacgaacacttcgccgtctgctttgagagtactggccggcctgcatggttccgtatgggagtcgagcccccgcaaatgacaagacctccaagcaatctcgtcactttccctctccccgtcattgaaacggccaaggagctgagcgcttggctgaatgtggatctgtctactctggaatggctggcggacacaaggcgaagacagaagaatgcaaaggacttccgcttcgtgaactattcctatatatggaaaaagcgaccaggcaagccaccgaggcttatcgaatcccctaagagcaagttaaaggccactcagcggaaaattttgaccgagatccttaacaaaatcccaccgcatgaggctgcccacggcttttgtagaaatcgttctatcattacgcacgccctgctccataccgagaaggacgcggtggcttgctttgacttgaaagacttcttccatagcatcccacccgctaggattatggctatgtttcggaccattggatatccccaagaagtctctaggagactcacaaatttgtgcatacacacccctaaccctgagtttctcgggaaaacgcttgaaaccctgccctgggccgtgcggaagaaaattctcattccccacttaccccagggggcacctacctcaccagctttggccaacctgtgtagctttcacctcgatacccgcctgcaggcccttgctgaaagtatgaacctgacatactcgcgctacgccgacgatttaacattcagtgggggtaaagaactcaagagtcgcttctcttatctgcggggtacagtacagggcatcgcccaagacgagggatttaccatcaatccagaaaagacaaggttgatgacacaggcgcagagacaggtagtgaccggggttgttgttaacaagcgaccaaacatatcacgtactgaatacgacagacttaaagccacgctttacacatactcaaaatcaactggcctggatggcctgatcaaggctcagctccgcgggaaagtggagtttgtgagggcactgtccccccaacgcggtgagaagctgttcgagctctggaaaaagatcccctga

SEQ ID NO: 12714 - RNA, 1299 nt, synthetic construct
  source 1..1299: mol_type = other RNA
atgcccggatataaacagaccactaggctgttggctgcctccattatcggaggcccttgggagtccgggccattaagcagaaggattcatcacgcgatatctctgaagggcctcaattcagagaggttagcccttgacctggtgcaccgattcggagaaggccgcacaccctctgtcaaggagctcgcctcagcaatcgcagctaacaaacacttcgaaaagtgcttcatggccagcgaaggtcaggcggagtggttgagaatgggcgtagaacctgcccaaatgaacccaccgaaaggggacctggccacattaccgttgcccgccttggcaacaagccgcgacgtgtgtgaatggctagagatcgatcagcccgccctcgaatggtttgctgacactaggaagcggcaaccgcatgttagggacgagcgccttctgcactacacctacctgtggaaaaggcggagggggaaaagtcccagactgattgagagcccaaaggggaaactgaagaagttccagcgtaagatcctctcggagatccttaataagataccacctcacgaagcagcgcatggttttgccagaaacagatcgatcattacgcacgccctgctgcataccgagaaagaatgtgtcgctagctttgatttgaaggacttcttccacgctgtgccacctgcacggatagcctccttatttcgagccctcggttaccctcacgaggtgtcaaggatcctatccggcttatgtcttcacgcgcctgatgcccattatctcggaagcccattgacaaaccttccttttcccgttcagaagaagattctgtctccccatctcccacaaggcgctcctacctctcccgcactggcaaatctttgcgcctttcgtttggatgtccgcctgcagtcactggctcaatccatggacctgacctatagtagatacgctgatgacctaaccttctccggtggaaaggatctaaagaaacaattcagttacctccgcgggactctcagcgagattgctgcccagcaggggtttaaactcaaccctgagaagacacgactgatgactcaggcccagcgtcaggtggtaaccggcgttgtggtgaataagcggccaaatattagtcgggcagagtacgaccggctgaaggctacactctatcagtgcgctgaaggagaggaaaaagatgcactgctgaaacagtctctgcggggcaaggtggaattcgtccgcactctgaacccccagagaggcgagaaacttctgcgactgtgggagaaaatcacgtga

SEQ ID NO: 12715 - RNA, 1053 nt, synthetic construct
  source 1..1053: mol_type = other RNA
atgggacctagtaaatggaacgtgcccgagctacacgtggttggggacgtcgcagcgtggctcagtgtcagccccgaggagttgcgttggttctcagacacatctggggtagaaagagcaaggcgccggcagtctgctcgcaactacgtgcatcagtgggtggcccgcggagagaagcttcccagattactggaggcacctaaagctaagttgaaggcactgcaaagggccgtcttgcacgggctcctcggtaagatcccagtgcatgatgccgcccacggctttgtcgctggacggtcagctctgacgcatgctcgattgcacgtaggcaaaaaggtggtagtgagatttgacctgaggcactttttcacatctattgataccgcaagagcctttggcgtgctgcgctggctcgggtatacacatgaagtgtcggccgtcctcattgggttatgcaccactcggactcccaaccacgtgctgggtagggccccgattccagatttggcggaaggcgaggtgctcaaccagagattcatgatgctgaggcagcttgaggcgtggcactttcctcagggcgcccctacttctccagcctgggctaatctctgtgcttggtggctggacgtcaggctgtcagcttacgccaaaaaattcggtctgacctacagccggtatgcagacgaccttgtgttttccggcgatcagctgtcctccataagccgcctacgtgatgttgtggatggcgtcgtgagagcagaaggtttcgtcatcaacagggctaagaccaaggttatgcatgcccatgctcgccaattcgtgaccggagttgtcgtaaatgagcgaccgaatgtgacacgtgttgaattcgatcaactgaaagcactgctacaccggtgcgaaatgaagggagccctttcccagagcaaaggaccagttgaccagttccgggcagagctggaaggcaaggttgcctgggtggcccaacttaatgcggctagaggggccaaactgaaggcccagttaagtcgaatcgactggacggagggctga

SEQ ID NO: 12716 - RNA, 1353 nt, synthetic construct
  source 1..1353: mol_type = other RNA
atgaatgagagggagcggagtccatggcccactcccactagtctaagaagaaacgatgccaggtttattgccaggcagccatggaataggaccgacctgctgcgcgccttatctgtggcattcggtagcagcggcatccctctgagagacttagtggaccgccttctcagggctgtcacggcaccccaacgggagcttatcgccatccagagggttctggagggctcaccattcggggtcgaacggtatcgtgcgttcgaacggcgtccaaacgctgtcgaccggttcgatctcccgcgtataagctccgcgcctgctctccacgattggctgggattgcctaccgagtgggctagttggtttaccgacttcagagagttggaacgcaaacggcagcccccgaaaaccaaacattaccctcgatggtggacggcgagaaggtggtctattccaagacttatcgaggcccccaagtcacaactgcgacggatgcagcgcaagctgctacacgaactgctcgagcgggtgccatttcacccagccgctcatggaggagtgcggggtaggtctgccgttacacatgccagcctccatactggccgacgcgtagttgctcagttcgacttggccgatttctttccttcaattacattcaaacgcgtgtccggattttttgtggcactcgggtaccccaagcctgtagcccgcgaggtagctgcactgacaacaaccaccacaccagctgagctgctggacctgcagcagctccactctggaggggatcgcgtggtgttccaccaacttgttatgcgattacgagaacggcatctgcctcaaggggccccaacctcgcctgctcttgcaaaccacctcacttttatgctggaccagcgactgtccgaagcggccaagagcatgggcttgacctattcccgctacgtcgatgatttggccttttccggggacgtccccgtgtcacttgaacgtctggagagaatagtcgagtctaatgtgatcagcgagggcttcactctgcggcatagaaaatctcgtctgcacacttcctcaaccaggcagcgcgtgacaggccttgtcgtgaacgttaagccccagcctggcagaagagaatttgaccggtttagggccctgttgcaccagcaggccaaaacgcccaccttaccgctggccgaactcgaagggaaggcagaatggttctccactggccgacccgcaaggagagctaagcttagaaggctactcgatgccattaatagcgcagctgcaagcgctgctgcaggagctgctgccagtacagcggccgagagtagagcaggtgcagatagggcccgctga

SEQ ID NO: 12717 - RNA, 1338 nt, synthetic construct
  source 1..1338: mol_type = other RNA
atggtgttcgataaacttgcagagttgctgctggattctgattggactcacgaggctattgtacgcttactaacagcgtgttaccggcccccacttagcctcaggaaaactcgccctccaaagcatgaactcttggctaccagtatccttacggctttcccaagtcctcccagccaggctaggctcatagagcatctgcgactgagtccaggcgccaggaggggattccggtatggaaaagtgcagcaggtaaaacttgatgcacagatggctggcggccaaatgcgacacacccccaccctgcaaagcggctgggattatccaaggatctcaaacctccgggagctagccgaatgtctggggatactcgatcagactctgaattggctggcgcggggccctcgtggtaatcatgcatgcgcagcgcattaccggatacaggcggtagagaagcgggctggtggctgcaggctgatcgaagcacccaaagccactcttaagagaacccagcgggaaatcctgaggcacgtgctaaatcgcctccctgtccacgttgccgcacatggatttgttccgcaacggtctacattatctcacgcccgcctgcatgttggacagaagtggatgctgagaatggacctcgaggacttcttcccctccatcgacggctctagggtgtttgggctctttcgctctctggggtatccgtacgaagtggtgcaggcattgaccaaccttacaactcacgtgctgtccattgatgccattcgcgagtcggtgcgccacttagcccgtaatgcccgtaatgaaagaacgatcacagacctggctaggctgtactttagacggcacctcccccaaggtgcccctacaagcccaatgctcgccaatttgattgcttaccggttcgactgccgtttgactggtctggctaagacctgccacgtgacctacagtagatatggagatgaccttctgttttcagggtcatccacctgtcactcatccctttccaaaatagaggaccacgtgggagccatcgccattgaagaaggattcagagtgcgacacagaaagacagcatttattcctaacagccagagacaggccgccgtcgggatcgtcttgaacgagaagcccaacgttgccagacatgagtatgaccagctgaaagccattctccataactgcgtcaggtacgggcctgaaagccaaaaccgcgtcggccacgacaattttgcagctcatctgctgggccgaatccagtggttgagatccttacacccgcagcgcggcgagaagctgttcgagtgttttaagcgaatccatttcgggtga

SEQ ID NO: 12718 - RNA, 1437 nt, synthetic construct
  source 1..1437: mol_type = other RNA
atggatgagttgagtgacagaagctcatatgcaagcgccgcccaacggagagttgccactgcgttagcccgggcatgtatggcaggggaggcatctcctcctgctatgcgagcccgggccgaaagagtcttaggccacccaaccccatggcttgtccccctggccctacaccttcacttcgagtgcgcgcctcctgccggtgaagtgtggcatcctagacagcatgaccaggtggtggccgccattcttgcatttcccgccttcctggccgctttcgagcagcctgaaggcgcacctggcgttagggcctactacccatttcaccaacccatgggacacccgcccgagccactagctggcttgcttctcccctctctggctacgatcggcgacctggccgactggctcgagatgacaccgtctctgctggactggtacgccgatgcggctgcatggtccgttagaagtagagtcgagaagagagatcattatcactcccgctgggtcgctaaagcagctggtggtgcgcgcctgatcgaagcccctaaagagaatcttcgctttatccagcgccgtattttgcgcgaaatactcaatcgcgtacccgtgcatgaagcggctcagggatgcgtgcggggaagaagtgtggtggataatgcacgaaggcatctgggcagcgctcttctgctcaagctggacctgcgggatttctttgttggcatcagcggcgcccgggttcacgctttatttaggacactcgggtacccacgtgagactgcaagatacctgaccggtctgaccacacgctgttctccggcctggcttctgaggcaagtgccgcaggaggcctacccaagccccgaagagagatgccgacgacgagattgggctcgccagtttatgggcagacacttaccacaaggggcccccactagcccagccttagccaacctgtgcgcatatcggttggatttgaggctggcgggagcagctagggaatgccaagcgggctattcacggtatgtggacgaccttgtgttctcctgtgccgacggagatctcgctcgtggacgccgtatcgtgtcaatggtacaggagattatcttggaagaggggttctccccaaactggaggaagacccggctggcccctgcttgtgcttcacagcggattacggggctagtcgtcaacgaacggctcaatttgcctcgaacagaatacgaccggctcaaagccatactgaccaactgtcgcaggcatgggcctgcaagtcagaaccacaggggagtgccagacttcggggctcatctgcagggacgcctctcgtggttcaggcaggtgaatcccgagagaggtgccaggctccaggcactgtttgatgctgtcccctgggagcacgaccgtcccgatgattccgtacccgggctggcaaggtga

SEQ ID NO: 12719 - RNA, 1398 nt, synthetic construct
  source 1..1398: mol_type = other RNA
atggacgaaatccctgacttgccaaactatcccctaaacgccacacgcaaagtggctatagccctggctcgagcgttcttggctggcgaaggttcaccggccgccatgagagttaggggcgagagggtcctgggacgctcctattcctggctggtgggcctgacccttcacatccattttgcgttagggccggctctcggacgtggatggcaacctgagttgcatgaccaaatcgtgacccacatcctcgcctttcctgacttcttggccgcctttgaaatacccgacgaggttcctcaggtccgaggctactttcccttccacgcatcgatgaggagtccccccgtacccttagccggccttgcacttccctcactggctactccgggggaccttgccgactggctagacgtttccccttctatgctggactggtatgccaacacggctgcttgggtatacgcacccggggcaagtaaactggaccattaccactatcggtgggttgctaaggccagggggggtgtgagattgattgaggccccaaaggaaaatctacgcttcattcagaggtgcatcttgcgcgaaattctcgatcgggtgcctgtgcacgaagcagcttacggatgtgtgcgcggtcggtctgcagtgtccaatgcgcgtcttcatagcgcctcaccactgctcctaaagctcgatttgagggactttttcgtctccattcctggcgccagagtacatgccatgttccgtactctggggtacccccaggagacagcacggtacctctctggcctctctacacacaataccccagcaagggtcctcagggaggtaccacaggaggagtatccaagccccgaggaacatagacaccggaaagagtgggccaggcagtttaccgggcgccatctgccacaaggagcaccaaccagtcctgcactggcaaacctctgcgcttaccgactggatctgcgcctgagcggagtcgcgcgagaatgccaagctcggtactcccgctatgtcgatgatctcgttttctcttgtgccgatgatgatcccgctcgaggccggcgtatcctgactatggtgcagggcataatccttgaagagggtttcgtgcccaattggaggaaaactcgaatggctccggcgagcacatcacagagagtgaccggactggtggtgaacgatcggccaaatcttcctagacgggagttcgacattttaaaggccatcctgacgaactgtagaaggcacggacctgccagccagaatcgcctcggtctgccagattttagagcacacattctgggcagactgagctggtttcagcaggtgaacgccgagagaggggaacggctgaagttactgttcgatcaggtcagttgggactga

SEQ ID NO: 12720 - RNA, 1380 nt, synthetic construct
  source 1..1380: mol_type = other RNA
atggacgagccctggtttcccccccctatcactccgcacatacgtcaggtggccgaggccctgactagagctttcctgtatggtgacgatcggcctggccctatgagggaacgcggaacacgcctactcggaagcccctggccttggcttacagatctgtgtctgagactgcatttcgaacttggtcagggcaggccctggcagcccgaacaacacgatgaaattctcgccctgattctggcgtatccacctttcttaggggccacacctccccgcgttcgtggcttttttcctcttcagcccagaatggcacctaggcccggagcactagccggagtagcccttcccgcgttggcctcaacaggagagctggccgactggctggagttgagccccacccagctggattggtttgcgaatcccgggggccgaagaccgcaagctccagaattggggcactaccattaccggtggatgcagaaacggcaaggtggcgcgcgactgatcgaagctccgaaggcccgtctcagggccttacagaggaggatcctggccgaaatcctgaaccgcgttcctgtgcatcccgctgctcagggctgtgttcgcggaaggtccgtcctgtccaatggggccctgcatacgggcgcaccgttactgctcaagctcgacctacgtgacttctttgtctctataccaggagcccgggtccacgctctctttagaacactcggctacccacgggagacggccagatacctgactggcttgaccacccacggtactccaccaggggtgttgcgccaggtccctcaggaggagtacccctccccagaggagcggagacagagacaggcatgggcccggcagtttatggaacgccatctccctcaaggagcccctacatcaccagcacttgctaatctctgcgcctatcgcctcgaccttagattagcaggggcagctagggaagccggggcagtatactctagatatgtggacgatctggtgttcagtcttcccagtcacgatccaggtcgagggcgccgaatcttgaccatggtgcaagagattatcttggaggaaggattcacccctcactggcggaagaccaggattctgccggcgagcacccgtcaatctgtgaccggcctcgtggtgaatcagcagctcaaccttccaaggcaggagtatgaccggctgaaagctatcctgactaactgccgacggcacggccctgctagccagaacagggaggggaggccagatttcagagctcatctacagggtcgcattgcctggttcgcacaagtccacccaccaagaggcgctcgactgatggcattattcgcaggcatagattgggacggactgcggtcgtga

SEQ ID NO: 12721 - RNA, 1497 nt, synthetic construct
  source 1..1497: mol_type = other RNA
atgagttcttcatccgcgacaaggcaggccggagagggtactgccttccaccggatcgccaaagcgccaatggacgagttttctgagtcgcccgaaccacctgacctgccagaaaaagctatgcggcaagttgccgtcgcccttgcacgcagtttcctagctggcgagagatccccagccggcatgaggcaacgaggaacggctgcactgggtcatgcttggccctggctcgtacagttgtccttgcatctgcattttgagcttgggcaggatttacaggctagaaagcacgatcagatcgtggccttcattctggcatttccgagattccgcgccgcatttgatactccgggccagcaccctcgggtacggtcttacttccccttccatccagtgatgggcacccccccacctcccttagcagggttagcgtttccagccctggccacacccggcgatctagctgattggctggggataactcctagggaactggattggttcgccaatgactggaactctaccgccgcacagcctaaatttaagcactaccactatagatggcttgcgaaaaggagcggcggggcaaggctgattgaagctcctaaggaaaatctcagggcgatccaacgccatatcctacatggaattctggaccacgtgccagtgcacgaggccgcacatggatgcgtgaagggcagatccacactcgataatgcccgtcgacatgccggcgctcctttgctgcttaagatggacttgcgggacttcttcgtttccatccccgcgagaaggatccatgcactctttcggtccttagggtaccccgtcgctaccgcatcatatttgacccgcctgaccacacacgcaacaccggcctacttgctccagcaggtgcctcaagctgagtaccccagccccgaggaacgtagacagaggcagatttgggcccgccaatttatggaacgccacctgccacaaggtgctccgacgagtcccgcccttgctaatctgtgttcatatcgtctagatcttcggctcgctggcgccgcacgagaatgcaatgctcgctatagccggtacgttgatgacctcgcattcagctgcgacgataaccaggcccacggaagacgaatactggccatgctgcaggatataatactggaagagggctttaccccaaattggaggaaaaccagactcgctagcgccgccacaactcagaggttgacagggcttgtgattaacgcacaccccaacctgcctcgcaaggagtttgacacgctgaaggctattctgaccaactgtcgccgattcggagctgcttcacagaaccgggacggtcggcctgacttcaggagccacctccaggggaggattgcctggtttcgtcaggtcaaccctgagcgaggagagaaactcagacgcctgttcgaacagatcgactgggcctctgcggagactatccggaatagagccagaatcagtctgacttga

SEQ ID NO: 12722 - RNA, 1389 nt, synthetic construct
  source 1..1389: mol_type = other RNA
atggatgagttctccgatgaccctgagctgcccgaacttcctacaaaggcgatgaggcaaatggccgtggccctcacacgggcctttttggctggagagcccaaccccgccggtatgagagagaggggagggatcgcactggggcaagcatggccatggttggttcctctctccctgcacttgcattttgagctcggcagcgagttacaggccagagagcacgaccggattgtggctctgatcctggcctatccccgcttcagggctgcatttgctgtccccggagagcgccctaaggttagggggtactttccgtttcatcccccaatggggaggccaccacctgccttggcagacctagctctgcctgctctggctacccctggcgatttggccggttggttgggcctgacaccgggtgaacttgactggttcgcgaatgcatggcaccagcccgcggcaaccggtaagcttgatcattaccactaccggtggctcgcaaaaaggtctggcggagcgcggttaatcgaagcccctaaggagaacctgcgtgccattcagagacgtatcctgcacggcatactggaccgggttcctgtccatgaagcggctatgggatgcgtaaaagggcgaagcgtgttggataatgctagacgccatgccggctcacccttactactcaaaatggaccttcgcgactttttcgtatcaattccagcgcgacgcgtgcacgcgttgttcagaagcctcgggtacccaagcgccacagcaaggtgtctcactggcctgacgactcacgctacccccgcagctcttctaagacaggcaccgcagaccaaatatccttctccagaagagcggcgccagcggcaacaatgggctcgacagttcatggaacaccaccttccgcaaggagctccaacttcgcccgccctggccaacctgtgtgcctatcgcctggacctgagactcgctggggctgctagagccggacaagccaggtactcccggtatgtggacgatctggccttcagttgcgccaatggcgatccccgacatggcaggagactcctgaacatgctgcaggatatcgtgctcgaagagggtttcaccccaaattggcgcaaaacccggctggcacctgccagtacggcacagaggcttacaggtctgctagtcaatgcccatccaaacctgccaagaggagagtacgaccgcttaaaggccatccttactaactgccgtcgacacggccccgcctctcagaatcgtgatgggctgcctgacttcagagcccacctcttagggaggattggctggtttggacaggtgaaccccgcacgaggcgaaaagctgcatcggctctttgaacagatagattgggcatga

SEQ ID NO: 12723 - RNA, 1401 nt, synthetic construct
  source 1..1401: mol_type = other RNA
atgaacgatcccgacgactttgacgatgacttcgacccagatgaccttctaccggcaagggcaatgcgcagtgtggccattggcctggtaagggcctttctggccggctcgtcagatcctgccagccttcgggagcggggacgtagagcattgggagagtcacctcggtggctgccctccttagtgctgcacctgcacctcgagctgggtagtcagtttaccactcgacagcatgacgcactccttgatgccgttctggcgtacaggcaattcagaaatgccttcctgcctggctctaccagacccaggatcctgtgtcacttcaccttccatccccctatggatgaacctcccgccgtattggccggagtggcagttccgactctgcctaccagtggggatcttgctgactggctggggctactgcccaacgaattggcctggttttgtggaaactggcgagaacagccatcacagccaaagctgggccattatcggtataggtggctcaacaaagctaatggtggacgacgcttaatcgaggccccaaaggagacactcagatctatccagagacgaattctgcacggcatccttgacaaattgccggctcataccgctgcaacggggtgcgtgagagggctgagcgttgtcgacaatgcccggagacacgctgactcccctctgctgcttaaaatggatttacgcgacttctttgcaagcattccagccggtcgggtgttcgcactcttcaggactcttggatacccccccgcgtccgctcactgccttacacaactctgcacacacgccacgcctatgcgagtgctccgcgaactgccacaggatggtcacgggagctgggagtggagacgccagcagcaggaatgggctcgtcggtttaatacccgccatctgccgcagggggcaccaacaagccctgctttggctaacctgtgtgcgtacaggctcgacttgagactggcagggctagcaagagaatgcagggccacctattctcgttacgtcgacgacctagctttctctctgccaagacacgattccgcccgcgcccataggatacagttactcgccgaggaaattatcctgcaggagggatttgcgcccaatcggaggaaaacacggttgtgcccagcgggccaaactcagactctcaccggcctggtcgtgaataggcatcccaatctccccagagctgagtatgatcggcttaaggccatattgactaactgtcgtaggcatgggcctacaggacagaaccacgatcagcaccccgattttcgcgcccacctgcaaggccgcttagcttggctccgacaagttaaccctccaaagggcgaaaagctactggtcctcttcggtgagatcgactggggctga

SEQ ID NO: 12724 - RNA, 1398 nt, synthetic construct
  source 1..1398: mol_type = other RNA
atggacgatgaggaggcacacccaccctttggaccggagcatgccggcagggataaggcccgagtggctctggggcttgctagtgcctttttagcaggctcacccgagcccgccagtttgcgagagaggggaaggcgcgcgcttggtagagattggccgtggcttcctgctctcgctttgcggctgcaccacacattcggcaaagccttcccaccacaccgactcgatgatctgcaaagactgatcgtgcgcgaccctgatttcatagcatcattcgctgattctgaaggcggtcctagaatccgggcctggtttccactgcaccccagaatggctccccccacaatcccaggtttgcccgccctcccacagcttgctaccctggacgcactcgcagactggctggaagtgaggttagaagacctggatcggctcgctgaacctcaggcgtggcgtcctcccagatcagcatcgcctctggaacattaccggtatcactggaggcagaagcgtgatgggggccttcggctgattgaggcccctaaacctcggctgcgacgcttgcagcggcgcattctgcacggtctgctagacctggtgccagtgcaccctgccgcaatggggtgtgtcagaggccgcagcgtgatcgaccatgctggtcagcatgccgggcagcccagacttgtcaagctcgaccttcgtgatttcttccccgggaacagagcctcccggattcacgcgctgtttagatctctcggataccctaccatggttgctaggcacttaaccggccttacaacgcactgctccccaccgcgcatactcagaaccctgccccacggagagtatgatagccccgagcagcggctgaggactagaaggcgtgccatggccttatgcgaccggcatctcccacaaggcgcaccatcttccccggcgctggctaatctgtgtgccttccgcctagacctgcgattagccggggctgctttggcatgtggagctcggtattcccgttacgtcgacgatctgtcttttagcggagcgttcgacgctgcccggggtcataggatgctggccatgattgacgacatcgtgcgagatgaaggctttgacccaaattggcgcaaggcggcagtagtgggagcaggagctgcccagagactcaccggcctcacagttaacaggcaccccaacctgccgagggcagagtacgacaggctcaaagccatcttgactaactgccgccgccatgggcctactagccaaaataaagccgggcatcgcgatttcagggcacatctattgggccgagttgcctgggcctgcgccgtaaatccagccagaggcgaaaagctacggagtatctttgacaggattgtctggcctgagggatga

SEQ ID NO: 12725 - RNA, 1398 nt, synthetic construct
  source 1..1398: mol_type = other RNA
atggatgaggaagaggccgatctgccctttgggcctgcgcatgcaggtagagggctagcccgcgtagccttggggttagccgcagcttttctcgcgggctctagtgaggcagcggggttacgggaaaggggtcggcaagccttgggtcgcgattggccttggctgccctcccttgcgcttcggatacacttcgccttcggcagcgaattctctcctgatcgcctagaagatctgcagtccctgattctgggagatccaggctttgccaaggcattggctgaccccgatggcgggcctagaatccgcgcttggttcccattacacccacagatggccagccctgttgtgcccggcttgcaagctctgcctcagctcgccactctggatcagttagccgatctcctggagttgagcgtcgacgacctggactggtttgctgacccacaggcctggagagcaccgaaaccagactctcccatcgccaggtatagataccactggcgacgtaaacgtgacggcggcctaaggcttatcgaggcacctaagccccgccttaggaggctccagcggaggatactgcacggactcctggatcccgtacccgtacaacccgccgctatgggatgtgtgcggggtaggggagtgatcgatcatgctggcctccacgccgggcaaccaagactggttaaactggatctgcgggatttctacccagggattcgggcctcaagaatacacgccctgttcagatccctgggctatcctaccaaggtcgcccgctatctcactggactcacaacgcattgtagcccccctcgcattcttcgggctctgccttacggcgagtacgacagtccggagcagaggatgcgtacccgacgacgagccgtctccctttgcgaccggcatctcccacaaggcgcacccagtagcccagcactggcaaacttgtgcgcgtacagactggaccttcgacttgctggagctgcgcgggcatgtggtgcacgatattcgcgctacgtggacgatctgtgcttttccggcgcttttgacgcagcccagggacacaggattctcgccatgatcgacgatatcgtgcgggaagagggattcgaaccgaactggcggaaggctgcagtggttggtgcgggagctgctcagcgtctaacaggactgaccgtcaatcgccacccaaatctgcctagagctgaatatgacaggctgaaagccattttgacaaattgccagcgccatgggccgtcatcacagaacaaggggaaccatcgcgactttagagctcacctccagggcagagtggcctgggcatgtgccgttaatcccgcccgtggggagaagctcaggtctttattcgacagaatcgactggaggcagggctga

SEQ ID NO: 12726 - RNA, 1383 nt, synthetic construct
  source 1..1383: mol_type = other RNA
atgtcaaggcttccaaagccccctatcgatccggctattctgcatgtggcacgcggactcgcacgggcttttctacacgaagctggcggcatcaccgatctccaacagcggggcaaggccgcgttaggcactgcacatgactggcttccacgcatggtgcgccgtctggatcagcatttcggcctgccgctcagaccagcccaatttgaggatatcgtgacctgtattgctacactccctagcttcatcggtgcctttgaacggcggcccgtgcccaaaattcggagatatttttcctttcagcctcaaatggctgcgcttcctagaaccctggcaggcctggatttaccagcccttccaaccgttggagacttagccgcctggttagccctgagtatggacgagctggagtggctggccgacgtacactctattagcagcaaaacagggagcgaggccctgcgccactaccattatcagtggaaggcaaaggcgtccggtgggcatagactgatagagagtccaaaacccctcctgtgtgcaatccaacggaagatcctgcacggactccttgacaaaatacctgtacacgatgcggctcacggatgcgttccccatcggtccatactttcaaacgcccaagtgcacgctggatctcctctgatcctgaagatggatttgcaggatttcttcacatctattcgtgccagccgcgtccacgccttgttcaggacactgggttaccccgaggaagtcacaaggtaccttaccgccttgacaacgcacgtgacaccgtcgtttatcttccacactcagcctagacctgagggcctgactagtaaagcactccagaccagacgaaagcaggccgagtcctaccgagcccgacacttgcctcaaggagcacccacctccgctgctctcgctaatctctgcgcctggaggttggacctacggttggctgcagcggctcaggaaagtggggtgcgctatactcgatacgtggatgacctgattgtctctttcccatcacatactcgcgcacatgcctggagaatttcactcatgattgacaccatcatactggaagaagggttcactccgcaccccagaaaaacgaggctaacctctcagagccaggcgcagtgggttactggtgtcttggtgaacgagaagcccaatatcgctcgctccgattatgacaggctgaaggccaccttgacaaactgcatgaggcatggcccccacggacagaatagggaagccctgccagacttccgagcaagactgcagggccgtatcgcccatgtcaaacacataaacccagcaaggggggagaagctccagacgctgtttgacgccatcgggtggcaggctatttga

SEQ ID NO: 12727 - RNA, 1524 nt, synthetic construct
  source 1..1524: mol_type = other RNA
atggaggggcggactgcttttggcgccaaagctgccgagggcggaagagtcgaggacagttacgatgacgaggaagcagccgccgcttggttagctgcccgagctagggccacacaggcagttgcaacggccttggcccgagcctttctcgctgcctgtgcttctcaggcgcaaacagcggcagatgcaggaggtcccgttgctgctcctcacacagctactggcgccagagctgctgcagcagccatgcaggcatgcggccgacgagtgctgcgtaggaagtacccctggctcgcgcggcttgttagacacgtccaggccgcagcaggagactgtccaaggcctgcgcagcatgatgaagtccgggccctcatcctggagtttcccccgtttcggtctgccttcgaagacgatgaaccccctagggtgcacgcctggttcccatggcacgagtgcatgcgtgcacccccacggagacttgctggcctgaatcttcctcagctcgacacccccggcgacttggcagcatggttgcacgtgagcgtgggggaactggcctggtttgcggaccctggtggatgggctgaggcaagcggagtagaggccctgagacactatcggtatcgctggaatgccaaagccggcggcggatggaggctgttagaaatcccgaagcctagactagccgcactgcagcggaagatcctcagagagattctggaccgtgtccctccccatgctgcggctcaaggcgctgtccgaggaagatccgcactgggcaacgcagcgatgcatgccgattgtgggctggtacttcgcctggatattgaagatttcttcccaaggctggccggcgcacgtatagctgccttgttccgcactctgggttatgctcctgcggttgcccgtttgctcgccggtctatgttcccacgctacccccgccgcggtgtcaagtactgcaccatgcgccggcctaccaggcatcgatggacttcgcgccaggagggacttggccgacatgtacggtagcccacatctgcctcaaggggccccgacatcaccagccctggcaaacctggccgcctacagactggatctccgacttgacggagcagctagggcctgcggttggaggtacaccagatatgtggatgatctgtttttctccggccctggaggaagcccagcacatgctctgcgcaccgcccaaatgctccaggggatcgtgctggacgaagggtaccggccgaactttaggaaaacccgcgtgatgccccgggggaggagacaattagtgaccgggctcgttgtgaatcggagagcagccataccccgcgaccagttcgatcgcttcaaggctatgttgacgaattgcctccgccatggggctgcctctcagaaccgcgatggggtagctgacttcagagcttcggtggcgggtcggttagcttggttcgagcaggtcaatgtggccagggccgccaagctgcgagctctttttgacgcaattaactgggcgtga

SEQ ID NO: 12728 - RNA, 1464 nt, synthetic construct
  source 1..1464: mol_type = other RNA
atgcgaatagctcagcagggggaaggggaagagccctatgcacacagatttgcagcccctactgctgcgatggatgccgttgctattgcgctggccagagcttttcttgcagcggtcacacagaccgccgattccgctgctggtgctgctgaggccatggaacccagccaacgtgccttggctgccgctatgcaggcatgtggcaggcgggtgttggcgaggaaatggccttggctggcaaggcttgtgcgccacatcctcagcgaaaccggaccccaattacgcccagcccagcacgatgaagtcagagcgctgattctcggctttcctcccttccggcttgcttttgccgcagatcagccacccgccgttcatgcctggttcccctggcatgatgccatgcgctctgcgccaagggcactggcacagcttgctttgccgcagatcgacacacctggcgatctagctgcctggctcggactaacggtgggcgagctcgcatggtttgccgactcgggaggatgggccgcacgttctgacaccgagaggcttcgccactaccgctaccggtggcttgcaaagccttccgggggttggcggctgctggaaatcccgaagcctagactggctgcgctgcagcggaaactcttgagagaaatcctcgacagagtgcctccacatggtgccgcacagggagcggtcagagggtgtagtgccgctaccaatgccgccgcacatacaggcagagggctggtgttgcggctggacatcgagaacttctttcccactttaggggctgggcgcatcgctgctctgtttagaaccctggggtatcctggggcagtcgccagtctcttagccgccctcacaacccacggaactccagccgctatagccggcgctgcacccttgggagagtatgctggagccgccgatctgcgagcaaggcgagatatagcccagctgtatcggagagcacacctgccccaaggtgcaccatcttcccccgccctcgccaatttggccgcgtacagactcgatgtaaggcttgctggagcagcccgagcatgcggctggatttacaccaggtacgtcgacgacctttttttctccggcccagcgactactccggctcaagcacgccggaacgcccaaatgttcctgtcaattctgtgtgacgagggctacacgcctaattgccggaaaacaaggatcatgccacggggcaggaggcagtgcgtaacaggactggtggtgaacgagcgtccaggcattgcccgggacgaattcgaccgtttcaaggccctcctgaccaattgcctacgccatggcgcagctagccagaacagggccggtgtggccgatttccgcgcttcagttgccggtcgactggcctggttcgagcagattgacagcgccagagcagcgaagctgcgccgattattcgaggctatcgagttttga

SEQ ID NO: 12729 - RNA, 1434 nt, synthetic construct
  source 1..1434: mol_type = other RNA
atgcgcgccgcaccaatgcacgatgaaagtcatccccgcttcgactcgcaatacatcgagcctgatctgctggccctcgccacccaactagcaaatgccctccttgcgggcgagcagcgaagtccagcattacggaaaagacttcaaacagtgcttggacggaattggccgtggttggcgcagctcatcagacaggtccggctggattttggcgacgggatctccagcgccgagcacgatgaacttgtcaggagcatcctggccttcgctccacttcgccgagcctttgagtccgatggtgaggtgcctcgcgttcgcggatggttcccttttcaaccaccgatgggggctcccccagcacgattaggtgccattgacctgccagccttggcaacgcccggagacttggctgactggctcgggttgcgaatcggcgaactggactggtttgccggctcactaaggccccaggttgcggctaacgggcccctttggcactacagctattgctggctggcaaaacgtaggggaggatacaggctcatcgaaattcccaagccccggctgcggaatttgcagcggaggattctgagagacattcttgaaagggtgccagtacatccagcagctcatggctgtgtccgtggacggtccgttgtgtcagccgccttgcctcacaccgggaccgatgtagttctgcagatcgatctgcgcgagttcttttctacggtgacagccgcccgggtgcatgctgtctttaggactttaggctacccaccggccgtagcccgtctgctaacaggtctagcgactcacagtactccccacagcgtgttacgggcagcgcctgtagctgagcatgcggacgcccaggctaaaagatctcagatgcaaagacaggtgctgctgacagtgccgcacctgcctcagggagcaccatcatctcccgcgttgaccaacctgtgcgcataccgactcgacctccggctctcaggtgctgctgcagcttgcggcgtggggtatacccgttatgtcgacgacctcatattctccggggatgtggccttcgcccgcaaaattgaacggtttaagagcatggtttatagcattatagtcgatgaaggtttcgagccccacttccagaagactagagccaggacccaggccactcctcagcacgttgtgggcctggtggtcaacagaagactgaatgtgcctagatgcgagttcgatgctctgaaggcactgctccacaactgcaggtgccatggaccagccggccagaacagacatgcccatcccatgtttaggcaacacctgcttgggtgtatcgctagggtggcccaggtcaatcctgctcgagccgcacgcggctgttgtggtatatctgcaccctccacaggccctgaccgcgctaagcctagatgtgcttga

SEQ ID NO: 12730 - RNA, 1107 nt, synthetic construct
  source 1..1107: mol_type = other RNA
atgggtgagccaccagcctcacttagggccaaggccaaggagttaccccggcttgccactcctggagacttggctgactggctgggcctccctattggcgaactggactggttcgccgcgtccttgaggtcggacctaacagcagatggccccctctgccattatcgctacaggtataggtacagatggctggccaaacggcgagggggttaccgactgattgaaattcccaaacctcgcatgcggggcttacaacgccgggtgctccatcggatcctggagcaggtgccggcacacgatgctgcgcatgggtgcgtgtcagggcgcagtaccattagcgcggccttgccccattccggcaaaaatctggtactgcagatctacctgcaggacttctttactggggttaccgccggtcgacttcacgctatgttcaggacactgggctaccctccagctgccgctagaacactgacgggccttgtgacgcattctaccccctatagcatactgagagcatctccttcaccagaactcggtcagaacgatgatgcgggaaccaagagcagaaggcacgctatgctccgaatcgcacacctaccacagggagccccctccagtcctgctcttgccaatctgtgcgcttatcgactggatctgcgtctctctggggccgcagcagcttgtggaattggatatactcgctacgtggatgacctgatattctccggggacgacgcatttgccaggaagatggaacgtgtcaaaagcatgctctactccattatcgtggacgagggctttgagccgcactatcggaaaactagagcacaacgtcaggcaacctctcagagaatagtcggcatggttgtcaaccagaagccaaacgtacctcggagagagtttgatacactgaaggccatcctgcacaactgtcgcaggcacggaccacaagggcaaaaccatttgtgtcatccccactttcgccagcacctcctaggccggatcagtcgcgttgcccagctcaatgctaatagaggtgagcggttattgagagaattcaggcagatcgattggagccccgctgtgttgccgaaggccggatga

SEQ ID NO: 12731 - RNA, 1509 nt, synthetic construct
  source 1..1509: mol_type = other RNA
atggccttcgcactaccacaccccatgggcctcaatccgcacgacgacgtcgcactaagagccttcgcacagcatctggcacgtgcactcctggctggcccttggactccgatggctatgcgagcccgactcaggagggccttaggccttgctcggggaggagcttctcctgattggctgcgtcagctcgtgagacagttacacgcacaaccaccattcgccctcccagcacagccacaacgcagaaaagctgcaggtgctgccacagggcctgtcccaggttcagcccatttgcaggctgtggctgacgcagttgcccagtgtcccgcgctccagcaagcatggagcgccactcccgctcatgctccatggcggattaaaggattctttttgccccctcctcctcctaagccggcagccatcgccaaactgcagcctttcgtgagagagctgccccccttagcgcaggtgggagatatcgcggcctggctggagctggaaccaggtcagctggactggcttgcaaattgccaggataggcccacccccagccctaagctagcccactatagggcccactggctccctaaaggccaaggcgggttaccccgcttgatcgaggctcccaaagcccgcctgaagcagattcagcggcggatccttcaggagcttctggcccccattccactccataacgctgcccatggaggggttaggggaaggtcggccctgtcccatgcccaagcccatgctgggatgcccgtcctgttgaagttcgatctgcgcgatttttttcccagtatacgggctgcccggatccacgccatctttgcatgcctgggacacaccccagccgtctgtcgagttctgaccgcgctcgtcacaacgcgcactgctcatggggtgcttcggacagccccgctaaccgctccaccacagagtgctccgtgtggcgcgggaacaggtccttctctcgcagtgcaacaggcgcagctgagacagctgtatggccagcgccatctccctcaaggcgcacctagctccactctcctggcaaaccttgcaacggcccggttggatatgaggcttgcggcagcagctgccgccttacagggtaggtacacaagatacgtggatgatctcgccatttcacttccacagctgcctcgcgcgcaattgttgcgcatgcagcgcctggtacggaggatcgtgcatgaggaagggtttgtgctgaatgaagccaagtgtgggctgtacaccgcctcccaggcgcactacttgaccggcatttgcataaacgctcaccccaatctgcctcgagccgcctatgaccaactgaaggccatattgcaccagtgcgtactacacggcccctctagccagaacagggacgggcaccgtgacttccgagctcaccttcagggcagaattgcctggtgcagatccctgaacccagctcgtgctgctaagctgcagagactgtttgaaagaatcgactggcaagactga

SEQ ID NO: 12732 - RNA, 1296 nt, synthetic construct
  source 1..1296: mol_type = other RNA
atggacaagagactgtttagtcacaatttggccgtccacctttcgctctgcccctggagcctagatcagatctctgcttgtttgcgcagaaatctgcctaagggcgctcataaatataccaccgaaattgctaacgagctccatatcgggttacccacaatctttacaccatcagtttcggcgatagaaattgtgctccgtagggcgatacggctggaaagtacttaccagttttgccggaaacaagggaaatggccggctctcaacctgagctccccaactatgtgtcctacccccgcatttgaaggccttgacattcctcagctgcctacaactgcctctgtcgcggactggctgtcaataagcgagagaaggctagattacctggccgatgagcagaatcggcatgaggagcacggcgaggccagcattaaccactaccactacattttcaaaaacaagaatggagggggtattagggtgatagaggcccccaaggaaaacctcaaatcaatccagagggccatcctgaagaatatcattggaatcgtgcctcctcatgatgccgcctttgggttcgtgaaagggcgaaattgcctcaaagcggcaaacagacatgtcggcgaaaaggtggtgctgtgcttcgacctgaagaatttttttccctccattggcgcaggtcgggtgttcggcttattccgctgtttggggtatccagatgccgttgctcgggtgcttacgagcctgtgcacctccttgaccccaagaaggatactggaacgctttcccttggaggaaaggtcaatttataacaaacgtcatctcccacaaggagctccgacatccccagccctggcaaatcaaatctgtttcggactcgacaagcgccttaatgccctggcaaagtgtctcggcgcacagtattctcgatacgctgacgacctgacattcagcggcgataagcatatcgctaggcccctgcagtacttcctgccagtaatcgcccaggacgaggggttttctctgaatcgcgccaaaacgcgcgtgatgcctcgagcatctcggcagaccgtcactggcgtgctggttaacgagcacttaaacatcgaccgccgttccttcgataaactcaaggctatcattcacgcatgcggtaagcctggagatcgaagacttttggaccccagtttccggaaatccttaatgggaaagatcgattgggtagagagcgtcaacccgcacaggggtcaaagactgagacagctacttagtaaggccgttgagaaccacatctga

SEQ ID NO: 12733 - RNA, 1293 nt, synthetic construct
  source 1..1293: mol_type = other RNA
atgaaccggaatgaagtatctcttaatctcgcccgaagcataactagaggtgaatggtccaaggagttcattaactctaatctcctcagaaggctgcctagcactgtccacaagctggtaccagctatctcagaggatctggtgaccgagctgtcagcacggtatgccccgacagagaaatacgttgctgagcatctgctatatgaccgtaacttcgagaggatctatcgctactgcgcccgaaaaggtatatggcccacccccgatttgtcaccccccgtcatggcacccatcccagcctttcaaaagatcgacctgcctcaaatccccacactttctgctctcgccgaatttctgtttctgactccagagcagctcgagtacctggcggacaggaatgggcgccatgaagaacatggggacatggccgtgaatcattatcattacgtgctgaaacctaagaggaccagtgggcatcggctcattgaagcacctaaagagcggttaaaagccattcagcgccacattttgcgtagtatactggataaactccctacccaccccgacactttcgggttcgtgagatccagaaactgcctgcagggagctaatcggcacgccggtgaacaggtggtactcagatttgacctcaagaatttctttccaagcattagcgcaggcaggatctttggactgttccggtgtctgggatacccccacaacgttgctgttgatctgacggcactgtcaacaaccaagacgccagcccgtgtcttggagagattgttctaccccgacagagggctatacaagaccacccatctgccacaaggagccccactttcccctgccctcgcgaaccacgctgcctttggcttagataggaggttggccggactcgcaaagagattggacgctaactatagtcgctatgctgatgatttgactgtgtctggcgatcacactattacgtccaaccttctaaggctagttccgcagatcattaaggatgaaggcttcgccttaaacacctccaagacacgggtcctgcctcagacaacacgccagactgtgacaggcattgtggtgaatgaccacctgaacatagaccgcaaaaccttcgatcaccttaaagcagtcatccatgcttttcagaaggaaggcgatcaccgactgagtgacccagcgttccgggcaagccttgagggcaaaatcgcttgggtggaggccatcaatcctagccgaggtcagaagctttggcgcttactggacaacgcggagaagccgtcgtga

SEQ ID NO: 12734 - RNA, 1275 nt, synthetic construct
  source 1..1275: mol_type = other RNA
atggccgcctcattatccgcaacacagtggcaagctcatgccctggaaagggttttcaggagccgcttaccaactccactggcccagtacgcagccgagtttagcgctggtcttatcgccgccctgccgtctgcttatgctccggaacctgccgcagtggctgccgttctcgtccatttgacctcctttgagcaggtcacagcctgggctgtgaagaacggccactggcctgtgcctgacctcagagaaactcagtttctgcccatcgccgctttcgctgacctcagtgtccccaagctcgccacaatggcacagctaggcgactggctggggctgagccaggagagactcgcctacctcgccgatactcaggcccgacacgaagagcacggcgagacagcaattaaccactaccattacgtactgcagcgcaagaaggggcccggacttcggttgatcgaagcgcctaaacaaaggctgaaggcagctcaacaccagatccttagacaaatgctggatccactgccagtgcacgacgatgcatacggattcgtgcgcggccgtagttgccaggcacatgcagctcgccatgcaggaacacaaatggttgtgtccttcgacatgagacagttttttcccagcatttccgccggaagggtgttcggcctgttccggtgtcttggttatccctctgctgtggcccaccacctgaccggactctgtacttctgccacgcctcccaggattttgcagagattaccatacgctgatcgagtcgtctatagagccgctcatcttccccagggagctccgagctcaccagcgcttgcataccatgttgcgttccggctagacaggcgactcagcgccttggcggacagtttagacgccacctatggcagatatgctgacgatctaagtttttcaggggaccggcgcataaccgaaccactgatgagactggtacctcagattttgcgtgaggagggcttctgcctcaacccctccaaaacccgcgcaatgcctcagactgctcggcagtcagtgacggggatagtggtgaatcagcacctcaatatcgcgcggggccagtatgatcggctgaaagcagttgtgcacgcctgcggaaagcctgacgattctaggttggccgatcccgtcttccgagggaggctggagggccaaatcgggtgggtagcatcgctgaaccgtgcgcgcggtgctaaactgcaagccctgtttaataccgcgcttgatggggccctgggtggctga

SEQ ID NO: 12735 - RNA, 1368 nt, synthetic construct
  source 1..1368: mol_type = other RNA
atgtcttgcactttgagattgacaatggaacgccacgagcgtcacatgaatgatcagcatttggccttgcttctggctacgagactgaccggaccgtggagcgtgcaggatatcactcagtccctgtgtagacatctacccgccccactgcacacacaagctgaagcaatttcccagaagctgctgagaatccacccagggccctatgctcctcccatcaaacagatcgcaagaacactcagaaacgcggacgaatttccccgcattaaggcccattgtgttcgatacaatgtctggccagcggccaaccttacgcctcctcagatgatgccaatcggggcccttgcttctctcgatctacctcagattcccaccctggaggatctcgccgactggctcctgatccctactgatcagctgaactacctggccgacccgcaaaagaggcacgaggcccacaacgagatggctgttaaccattaccactatcatattcaccccaagagtaatggagcatcccgattaatcgaggcccccaaacagcgcttaaaggctgcacaggctcagatcctgaggggcattctggcacacgtccctgatcacgacgaagcatttgggttcaccaagggccgtaactgcatgtcaggggccaccagacatgtgggcgagcaggtagtagtcggattcgacgtgaagaatttcttcccaagtataggagctggccgaatttttggcttatttcgctgcctaggatatccggagagcgtcgcaaggtttctcaccgctatttgtacaaatgtgactcccagccggatcctgaatcgactgcaggcgcctgagaggcaacaatttaggcatcctcatctgccacagggtgccccaacttcaccagctctctccaacaaggtcgccttcacgctggacaggcggctttctgggttagcaactcggcttggggccaattactcgcgctatgcggatgacatatctttcagtggggacgtgggtataacacatcctctactgcaacaggtgccaaggatcctccggaatgaaggcttcgcccccaatccggccaaaacccgcgtgatgcctaggggaggtagacagagcgtgacaggcattgttgtgaaccagcaccttaacatatcacgagagaaattcgaccacttgaaggcggttattcacgcttgtcggctgcccacagatctgcggcttgatgacctcgcatttaggatgaaattggaaggccaaatcacctggatcgagtgcattaaccccgtgagaggttgcaagttgcggcggctcctcaaaaagagcctgaaagcccgcatcgccgaaaccaccaaaactggccgtgcactgtga

SEQ ID NO: 12736 - RNA, 1332 nt, synthetic construct
  source 1..1332: mol_type = other RNA
atggacaaacgcgatctggccagtaatatcgccatctcccttactaacgggacctggtcgaaagatcaggtgaccgcgcagttaatgcgtcggtttcctaaatccctgcaccgatttagtaaccagctgtctgcagaactgcttgctgcgtgccccacaatttatgctccgagtgccaatgctgtgcaaaacgtgcttcagatgtctgcaatttttgaacgaatattccgatactgccagagacgcaatatctggccaaacccggtcttggtcgagcctataatggcccctacagccacattctccgaactcgagattccccagcttccaacagtggaggccctggcagattggctcctcgtgccgatcgacagaatagattacctagccgaccccattggccggcacgaaaaccacgaggtcgcagccgtgaaccattatcactatctgttgcacccaaagaagtccggggggttaaggctgattgaggcccccaagcatgccctgaagagcattcaacgccaaattctgcgaggtattctcgataaggtccccacccatgatgatgcttttgggtttgtgcgtggaaggtgctgtgtgggggcagcagctagacatgcaggagagcaggtcgtggtaaattttgaccttaaggacttcttccccagcgtaggtaccggccgcgtttttggactgttcaggtgcctcggttacccaaacactgttgcaggcctgctcacgggcctttgtacaactagaaccccccatcgcttgttaaagcgcttgaaccccgcggacagggcccaatatcgtgaacgccatctccctcagggtgctcctacttccccagctctggctaaccacgtggcattcgctctggatcggcggctagccggcttagctcgatctataggagccaactactctaggtacgccgatgatctcagtttctctggcgacctacagatatcagcaacactcctgggcattgtgccacagatcgtccacgaagagggcctgagcctcaatcctcacaaaacccacatcatgagcgctggatcaagacaattggtgactaatatcgttgtaaaccggcatgtgaatgttaccagagaaaagttcgacaaaatcaaggccaccatccacgcgtgtgccaagcccgacgacgagagactgtcagacccagtcttcagggccaaattgctgggacagatcgggtgggttgagacagtaaatcctaagaggggcctgaaactgagaaaacgggcgatcgaggctattcggaaagccacgatcaggtcacctagccggaatacgagcactcagatctga

SEQ ID NO: 12737 - RNA, 1299 nt, synthetic construct
  source 1..1299: mol_type = other RNA
atggattccaagagccttgctagaaatctggcccaatccctggccatggggccatggtctaggcagttcataagagccactttagttcgacggctgccgcgtcaactgcacaggatgattgctgggctcagtgaggaactgattaaatccctgccatgcgcctacgcgccctctgtgaaaacagtggcaggcgctctgggacgaagcgacagatttgaaaagattcttaggcattgcatcagacatgacgtttggcctgatcccgacctgtcaagtcctgcaatggcccctgtggctgcgttcgcgactctggatctccctcagctcgctaccctcgacgcacttgcggagtggcttttcttacctccagaccgccttgagtacttggctgacaaagattcacggtatgaggagcatcgggacgccgccgtccaccattaccactatatcgagaaagtgaaggcgtcgggcggagtgcgcatcatagaagccccaaagcctcatcttaaggcagctcagcgacggatcttgcgaggcatcctcgacaaagttcccgtgcacgccgacgcttttggtttcgtgtcgggcaggaattgtttgaatggtgccaataggcacgtcggcgaagatgtagtggtctgcttcgatctccgcaacttctttcccagtattgggctggcccgcatttttggcctctttcgatgtataggctacccgcacgaggtagcaaggctgttgaccggcctgtgcgttacgaccacacctatgcacgtggctaatacactgacaaccgtcgacaggcagacctatagacgcccccatctgccacagggatctcccgcttctccagccctggcaaacctggcagccttcccgctggatcggagattaagcggattggcaaagtcactggacacgaactactcccgctatgccgacgatctctcctttagcggggaccgggaaagtgtgggggcactactaagagctgtacccggaatcgtcgccgatgaaggattcgagctgaatcagacaaagacacggattatgagcgctacttctaggcagatggtgactggaatcgtggtcaacgatcacctcaacatcgatagacgtgagtttgacaggctaaaagccatcatccatgcttgtggtcggcccggggacactagattggccgatccagttttccgctctgccctgctcggtaagattgcctgggtggaagcagtcaacagccagcgtggccaaaagctacttaccctgttatcattgagcataacctcccgccacgcatga

SEQ ID NO: 12738 - RNA, 945 nt, synthetic construct
  source 1..945: mol_type = other RNA
atgagtcctgtggcggtcttcgccgcactcgacatcccacaacttgccaccttagacgctttgtccgattggctcctcttacccatagaaagattggactatctggcggaccttcatagtcggtacgagaaccacggcgacacacaggtaaatcactaccactatgtcctccaccgaaagaagtcgggggggatgcgagtaatcgaggccccgaaggcaaccctgaagactgttcagaggcagattcttcatgggatcctagataaggtgcctgctcaccccgatgctttcgggtttgctaagggaaggaactgtctggatgccgcaaaccgtcacgcgggagaacaggtagtgatctgtttcgacctgaaagacttctttccctccattggcgccggaaggatctttggtctgttccgctgtctcgggtatcctcatcaagtggcaagctgcttggccgctctgtgcacgtccgtgactccgagtcgcgttgtcgagcacatgtctggtccagatcgggatacatatcgcaaaccacacctgcctcagggttctccagcctcaccaggcttggcaaatcttgcagtgttcacactggacaaacggctgagcgccctggccaagtcagtcgacgccaattactctagatacgctgatgacctctctttttcaggcgattcccacgttgcaggcattctgctgcgtgccgtgccccagattattgaagatgagggctttcagcctaatagcgccaaaacccggataatgagcaagactagcagacaagtggtgacaggcgtcgtggtgaaccatcatctaaatgtcacccgcaaagctttcgaccagctgaaagctataatccatgcctgcgggaaggctggagatttgaggttaaacgaccccgtgtttagaacctccctgctcggtaaaatcggatgggtttga

SEQ ID NO: 12739 - RNA, 960 nt, synthetic construct
  source 1..960: mol_type = other RNA
atggacagaggtgccctggcagttaacctggctcagggcctgtgtagcgggggatggtcagctcctgaggtgggagctatactggcacgtcgtctccctggagcagcgaggagattggcccctcggatcgcgtccgaattagtcactgcagcccccggcccgtatgcaccaactgctcgaattacacgcgccgttctgcaacggtgcgagagcttcgagcgcctctaccgctggtgtaatagaaatgatatctggcctgctcccgacttgagcaggccctctatggctccagtcgccgcctttgcccgactggatctgcctggccttgcgacacagaaagccctcgccgactggcttctgctaccaccagagcgccttgactacctcagtgatcctgcgtctagacatgaaagacacggtgactttgcagtgaaccactatgcttatgttctccaccggaagacacatggcggactgcggcttgtcgaggcacccaaaccgaccctcaagtcactgcagaggcagattctgcggggcatactcaatcgagtgcctccccacgatgacgccttcggtttcgtgagaggtcgcaattgtagaggcgctgcccggagacatgcaggcgaacaggtggtaatctgctttgatctgaaggacttcttccccagcattggagctgggcgggtatttgggttgtttaggtgcttaggctacccccagccagtggcccgacatttaaccggactgtgcaccaacaccagtccttccaggatcacggatcggctaccaccccccgataggcccatgtatcgccgcccacacttaccgcaaggagccccttgttctccagccatggccaacttggcagctttcgggttggatcgttcactgtccgggcttgctaggagtctcggggctgggttttcgaggtacgccgacgacctggccttctccggctga

SEQ ID NO: 12740 - RNA, 1305 nt, synthetic construct
  source 1..1305: mol_type = other RNA
atgaaaccccgtgcactggcctatcgcctggctgtcagtgccacccagggtgcttggagcctgccagaagtccaggctgttctcgcacggcgacttcctcccgcacacagacatctcgccaaggatatcgcggcagcgatgctgtcatgcggcgaaggctccgaccttactccaccaccccaggtggttgctcgcgctttacctggcacccccgccttcgaaaacctctacctgcactgtaggaacacaaacgtgtggcctgctccagaaaccgagcctccagtgatgaggccactgcctccgtttgacgggctggatctgccccaactgccaacggaaggagagctagccgcttggctcatgctgagcccagagaggctggctcaatttgccgacttggctggcagagctgaggcctctcccgaaacagcgattaaccattacttctacagggtcgtacctaagcgggctggaggcgtgcggcttattgaggccccgaaaccggccctgaagggccttcagagacaggtgctgcgcggcatcctggatcctgtgcctgtgcatcgcgacgccttcgggtttgtgaggggacgcggtgtcactgcaggagcagcacgtcatgccggggaagcagttgttctgcgcttcgacctggccgattttttccactcagtggggcgggggagagtctttggcattttcagagccatggggtaccctcacaatgctgccagatgcttggccgggttgactaccacagctgcacctccgtggataatggagaggcttggagcgggtgaccgcccctatttgcggatcccccacttgccccaaggagcacccacctccccagcactcgccaacctcagcgccttcggactcgacagacgactcgccggtttagcgaggcggcttggagctgcatggagtcggtatgccgatgacatctgcttttctggcgacccagacattgttgcgcctttaatggccgccgtccccggaatcgtggctgaagaggggttccgcctcaatgctgccaaaacacgggtaatgcgcgcccaggcaagacagtgtgtcacgggcctagtggtgaatcgacatctcaatctgcccagagaggagttcgataggttgaaggcgatcatacacagggcggcctccccaggcgatgctagactagctgatccccgttttcgagccgccttagccggccgtattgcatgggcagaggccgtaaatcctgctcgaggtgcaaagctgcgggctaggctggaggccgcattagctcagaaagtggccctgtga

SEQ ID NO: 12741 - RNA, 1275 nt, synthetic construct
  source 1..1275: mol_type = other RNA
atgaccccgcaatcccctaaacgccttgcccaaaacttagcggagtctttaagtctgtccgtgtgggataaaagagggattgctgactgcctgtgtaggcgctttcccccagcgctgcaacggttcacccagctgcaaactcaaggtctgctcgaccattttccaacacagattgcccccggacgaaccgcagtggcttcagcactcgctcagtcatctgtgtttgcccgcattcatcgctactgcgtcctgaactcggtgtggccagctccagaccttagggccccaaagatgcagcctctgcaggcctttgcccacctcgagatacctcagctggccactctaggggacttggctgattggatgctgctaacaccccagcagctggattattatgctgaccagaccggccggcatgaggagcacggagacatggctgttaatcattatcactaccaccttagcccaaaaatcggcggaggacatcggctgatcgaagcgcctaagccccgattaaaaagcctccagcgactgattctcagagccatcctagaccacatcctgccgcaccccaacgcatacgggtttgtgcagggcaggaattgcatagaagccgcagcccggcacgtgggagaaaaggcagtagttgctcacgacctgagggattttttctcaagcatccagggaggccgaatctacggcattttccgcgctttgggctatccgccaaatgtggcccatgccctcactgggttatgtacagtcaccactcctgccagaattcggaacaggatgggtttccatcagcgccaggcattgagagtggcacacctcccccagggtgctccaaccagtcctgcactcggtaatcttgcggcccatggacttgatcgaaggctgaccgggcttgctagatccctcggggctacatacacaagatacgccgatgacctgaccttcagtggggatgagcacataatccgtgcaatttgtgtcgcagtgcctgacatagtctccgaggaaggcttcgccttgaaccccgctaagactagactgatgcccagccaccgtcggcaggtagttacgggcattgtagtgaataacgccacgaacgttgacaggagggagttcgatcaaatcaaggccgctatccacgccagagcatggcagacagatcccgcgctccaagcgcgtttgtctggccagatcgcctgggtccggcagctgaatcctgctaggggcgcaaagttggaacgcctgatggcccgggcctga

SEQ ID NO: 12742 - RNA, 1161 nt, synthetic construct
  source 1..1161: mol_type = other RNA
atgatcgtcgagtttccccagcgctacgctcccgatgccaatcggatagcagaaatgctctctaagcaactggtggtgagacggctgtttaaacattgtaataaggccgacgtgtggccatctttgcctcttgaaccccccaggatgctgccagtggccccattcgatgcgcttgtactgcccactttgcataccgccatcgacctggctgactggttgctgcttacgcctgagcagttggacgccttcgttgataggaatggttggagggagacacaccccatgcctggcgtgaataactacttctacagaatgagccccaagagctcaggaggtctgcgtctcatcgaggcaccgaagccgcgacttaagtcactgcagcggctcattaaccaccgcatcctcgcaaaagtgccaacccatccagactcctttggcttcgtccgcggtcgcaactgtataggagccgcgcaacgccatgccggagaagaggtcgtaatcgggctggacctaaagaactacttctctagccttcggtatggaagagtgtacgccttctttcgtcacctgggctatccagtttcagtggcccatggcctgagcggcatctgcacaattgttaccccttccaggatcagacagcgaatgccatatgagcagcggcagacactgatggagcctcacttacctcagggcgctccgagttcccctgctttagccaacttacttacatacagactcgataggaggctggcgggtctggcacgtagtttgggcgcaaattatacaaggtacgccgatgacctcaccttcagcggagatagtggcgtgcgggatgccgtgctaaccaccgtccccgaaatcgtcgaagaagaggggttcagaatccgaactgggaaaactcggattatgccttgctataggagacagatggtactggggatagtggtcaacgagacgattaatatttcccgaaaggaatttgacagactgaaggctatcatacaccagaaggcatggaaaaacgaccccgctgagtttgagaaaattctggggcaaattgggtgggttgagcaggttaacccatcgaaagcgcaaaagctctatgcaaaactcgaactagctaatgctcgcgaacacgtgcagggatcctctacttga

SEQ ID NO: 12743 - RNA, 1311 nt, synthetic construct
  source 1..1311: mol_type = other RNA
atgcaccccgaccagcggaattcgctcaagattttcgccagattggtggccccatcccttgccaaaggtcggtgggccgtttcagacgtaacgggggcgctgaaaagacggctaccagcccagttccagagagaagcacagctcatcgcagaggacctcgtggccttcctacccgcaatgactgcaccaaacgccggggctatcagtaaggctctttgcgcgtgtgacgcatttgtgcgactgcacggtgagtgtctgcgccgagggttgtggcctgacccagatctgaattctgggaagatgctccctttgttcccctttgccaggctggatctccctaacatcccgactttcgccgcgctggcagactggctcgttatagacggaggaagattgatgtacatggctgatatagccaaccggcacaatgagcatcctgatgcacccgtgcatcactacctgtatggcctgcggcctaaacctaccgggggttatagggttatcgaagcacccaaaagtggtctgaaggcccttcagcgccagatcctgagggggattttggataaggtgcccgtgcactctgacgctttcggcttcgtacggggcaaatcctgtgcccaggctgccaatcgacattgcggagctcagaccgttgtgggctttgatttacgagactttttcccaaatttggctgccgccagagtatttggtttatttaggagactaggataccctgacgccgtcgcacgcactctgactggactatgcacaacaaccacaccccagagagtccgtgcccggcttccacatcttcagggccaacttatgagaacaccccacctgccgcaaggagcaccttcctcacccgctttggcaaacctcatcgcgttcactctggataggcgcctcgctggcttagctagagccctggatgctcagtatagccgctacgcggatgatctgacctttagcggagacgcgggaattgcacccgtgctgaccagggccgtgccacatatactccaggaagagggctttgtcctgaatccacgcaagacaagggtcaggaacgctgcccagcgccaagtcgtgaccggcatcgtggttaaccagcatatcaatgtcccgcgagctcggtatgacctgattaaggctaagattaacgctctgcgccacaccgatgaccttggccgtctgggccacgcacactgcctctctctcgagggccaaattgattgggtgtgtacgctgaaccctagccgggggcagaaattaaggcaactgtacgcccgtgccattaatggtgggtga

SEQ ID NO: 12744 - RNA, 1236 nt, synthetic construct
  source 1..1236: mol_type = other RNA
atgccagaactgactggggctttgcagaggcggctacctccccagttccaccgcgaagcccagctcattgctgctgacctgatccctttattgcccgtcatggttgcaccaaccgacggcgcaatcacaaagggactgctgaactgcggcgcattcgctcggctgcatcgggaatgccttaggttaggtatttggcccgccgcagatctgcagtctgaccaaatgaggccttacgcgccattcgcccaattggacttgcctgatctgcgcactgaagccaatctggccgactggctcatgctcgattattctagagtagcctatttcacggatattagtaatcgtcagaatgaccaccccgatgcgcctgttcatcactacctctacggactgcgacggaaaagctccggtggcctgagagtgatagaggccccaaaatcaaacctgaaaagtatccagaggaggatcctgcacggaatattagaccaggtccccgtacataccgacgcatttggttttgttcggggaagaagctgcgtccaaggagctgcgagacactgcggagaggagtgtgtggtgcgtttcgacttgagagattttttcccctcaatccagagcaagcgagttcttggcctgtttagaaggcttgggtacccgaggtgggtcgcacagagccttacaggcctgtgtactacagctactcctggtcgcgtactggtcggcctacccccacagcaacgccagcagatgagggtgccacacttacctcaaggcgccgcaacctcgccagctcttgccaatcttatagcctttacactcgaccggcggttgtccggtctagctcgctctgtgggggcagggtactcacgatatgccgatgatctgacattcagtggagacattggcatcaccggcgtgctcgaggatgccattccccagatcatcgctgatgaggggtttgtcattaacccgaacaagactagggtgacccacagatccgagcgccagaccgtgacggggatcgttgtgaatcagcatctcaatatctctagaaagcagtatgatcagattaaggccattatccacgctttgcgacgacctgacgacccgcggagactcgatcaagcgttttgtctgtccctggaagggaagatagactgggtgtgtgccgtgaacccccatcgcggaaacaaactccgtcgcctgtaccaggtgaccattgaggacttcggctga

SEQ ID NO: 12745 - RNA, 1302 nt, synthetic construct
  source 1..1302: mol_type = other RNA
atgaaccgcacccagttcgcatcgagcctcgctcctagtctgctggcccctagatggtccgagactgagctatctcagtgtttgttgcagagactccccgggcagcaaaaagctctgtccgctcgacttacagccgaattattgcagaccttccccggcccagtagctcctcccgaaaggcagctggtcgcaggacttagaggcaggcccacattcgaacggctgtaccggcattgtgctaagcaggctatttggcctgcccccgtcctcactcagacgagaatgcaaccggcgtcaggattagggcggccagaagtgccacacctcgatactcccggcgattttgccgattggttgcctctgcctgaagatcgcttgaactatctggccgatgtggacggccgctacgcttgccacgcttaccgcacaataagacactaccacgccgtcgctgaagctaagaagagcgggggccatcgtctgattgaagcgcccaaatcccaactgaaagcagttcagcgacagatcctgcagggcatcctacgtcagattccagtgcatgaggccgcctacggatttgcacccggtaagggttgcgccgacgcagcaagacttcactgcggaagggacgaggtggtgtgtttcgatctcgcggacttcttcccttcagtgtcctttgcgtgggtctttggagtcttccgtcacctcggttatccggaggcagtgacaaggcttctggccggcttatgcaccacggagactgccccggacgtgcttgtgcagtttccttttgccatgcgacaattgtataggatcccacatctcccacagggtgcaccaaccagccctgctctggcggacattctgctctttaatctcgactgtcggctgaatgctcttgccacaaaactcggggcctcttatacccggtacgttgacgatttgacattctctggccccgccggcttaggcagaggactactgaagctggtaccggagataatccgagacgaggggtttcgcagcaacccaggaaaggtgagggttatgcccagtggggggcgccaagttgtaaccggtatcgtcgtgaatgcacatcttaacatgcgaagagcagagttcgatcagctaaaagccgagattcatgcctgcggcagacctggggatctgaggttgtcagacccacactatcgggcaaggctgatcggacggatacaatggctgcggcacctgaatcccatcaggggcgagaagctgctgactctcctgggacgcgccgaagctcagaaaattaccgcctga

SEQ ID NO: 12746 - RNA, 1314 nt, synthetic construct
  source 1..1314: mol_type = other RNA
atggccaggtataccaaacaggacctgttgtttgggcccttgagccagggcctttcccagctggaatggacgttctgggatatcagacaccacctggagcagcgtctaccctctcggctcaggtctgtctctcacagattagcgcgcgaactcaagcagacatttcctgccactgcagcccccgacgacaggcaaatcctgctttacctgaagcagtcaccagctacagacccgttgttcagacacttcacgctgacaggtgccattccagatccattgatcgaccctcctcagttccgccctgtacccgccttggatggccttggcttacctgtgctgactacatccgacgacctggctgcatggctggctctgcctcccctacagctgactaggtttgcggacttattgggactcagtgccaatgcagatagcgcctttgctcctcactaccggcatcacctgatcgccaaacgaaatggaaccctccgacttatcgaggagccccgccccttcctgaaaaagttgcagcggcgcatactccgggacatgatcgctcatattcccacccaccctgccgcctttggcttttgcagaggtaagaattgtgctcaagcagccgcacgccatgcgggagaagagatggtagtgagttttgatctcagcggcttctttccgtccattcatcaccaccggatttatgggctgtttcgttccttcggataccctgcagcagttgcccgacatctggccggactgaccacagccctcacacccagagacgtcctggctacagcccatctagctgatagggatcaccttaccgggaggcatctgccacaaggggcgccaactagcccggcacttgccaacctggccgctttcaccctggatacccgattggcgggcctcgcaagatcgctgggtgctaactacacgagatatgccgacgaccttaccttctcaggagatgctccaattgcaaacccactccagcgcatggtccctcaaatagttcgggattgcggctttgtgctgaacgccgcaaagactagaatacagccagctcatcgccggcagacagtgactgggttagttgtgaacaggcacctcaatctgccaagggcggactatgaccatctcaaagctgtcatccaccacctcagagatcccgtggatccgcgccgagcagaccgtatcttcatcgatcaacttgccggtcggattgcttggttcgaacaggtgaatcccaccaagggcgctaaactaagggagtggctggccaacgccttacagactgggaccattggctga

SEQ ID NO: 12747 - RNA, 1326 nt, synthetic construct
  source 1..1326: mol_type = other RNA
atgtccggtcgtagcgtgtctgaccgggtgtttggccccctggcagctagccttgtacgtcaggcttggactgccctgacactgaggcaacacttacaggcccggttgccacaggctctaagtgctgaggcgcccgggcttgctagagatctgaaagcagctttccctgggacagcagctcccgaccggaaacgggtggccttgtggctgtcgatgtgcccgctagccggcgatctcgtgactatcgccagggcatctggagccccaatcccacctcccttagaccccgaccgatttcagcccccacctgcgttcgctggactcgacctcccacctctgggtacccttgccgacctggccgactggttagccctgaccctgccccagctcagtcgcttctctgatctccacggtattagcgccgctcaggataacccatttgcacctcattatcaccaccacctgctcgagaagcgcgatggaactcagcggctcttggaggaacccaagcccgttctgaagcatctccagaggagagtactgaggcagatcctggccagaatcccacctcatcctgccgccttcgggttttgtgcgggacggagctgtctgcaagcagcccaacgtcacgccggcgaagcccttgtagtgtgctttgacctgaaagccttcttcccctcaattggctggcaccgcgtctacggcctgtttcgcgcattcgggtacccccctgccgttgcaagacatcttgcgggtctgtgcactgccataacaccgccaagggtcctagctgctccacggctcgcagccagggaccttctgacgaatagacacttgccgcaaggagcccccacatcccctgcactggcaaatcttacggcctatgcgctcgatgccagattagcgggccttgccagatccctaggcctgacatacacccgctatgccgacgatctgaccttctcaggggatacacgaccggctgcagctttgcaccgggctgttgcagacatagtgcgcgattgtggctttaccttaaaccgagacaagaccagggtccagccacgacatcggaggcaggtcgtgactggagtggtggtcaatcggcatctcaaccttcctagagcagattacgaccgcctgaaagcagttattcaccatttgcgtaacccagacgatccccgaagggctgatagggtgttcctggatagattggccggcagaatcgcgtggctcgaacagattaatcctgccaagggggctaagctgcgcgacagactggctgcagctttggccaccacaagggctacccgccaccatggatga

SEQ ID NO: 12748 - RNA, 1302 nt, synthetic construct
  source 1..1302: mol_type = other RNA
atgtccgtgctagtggaccccgtcttcgctgcccttgccagtggcctcgtgcacgtggattggactgcggatcaaatcgctgcccacttgcgcagacgcctcccaaggaggttccagtcaagagcgggggacatagccagacatctgcatgatcggtttccaggcgcggctagccccgacgaagaacgtatcgcagccgcactgtcagatgggcctgctgcaagggccttggtgcggttctccgacaagactggggaactacctgcatacatttggacgcccgctagattccaacccattccagctttcgccacatgtggattgcccgcccttaccactcctgaggagctggccgactggttggggctgaccactgcgcaactgacaaggtttgctgatctgaaaggtctgtcagcgcagacggataatgcttttgctcctcattataggcaccatctgcgacccaagcgcgacggaactctccgcctcatcgaggagccgaagccgctattgaaaacacttcagcggaggattctgcgcgggattctggcacgagtcccacctcacgatgccgccttcgggtttcgggctggacgtaactgtaccatggcagcagctagacacgcgggagaaggtggtgtggtccggttcgacctggctgcattctttccctccattgcccagcaccgggtctacggcctctttagagggtttgggtatcctgccccagtggcccgtcatctgaccggactttgcactgcccacacacccgccagggttctgacaacgcctggcctggcagcagctggtcacctgtctagccggcacctaccacagggagcaccgacctcgcctgctctcgctaatctggtggcctttaccctggacaccagactcgcaggccttgccaggcgcttagacgcaacctacacacgctatgccgacgatctttgcttctctggcgatgctcgtatagccccagtactgcgggctgcattacccggcatcgttgccgattgcggctttcacctcaacccggctaagaccagagttcagccagcccatcatagacagacagtaactggaatcgtggtcaaccaacatttgaatctgagcaggcgggactacgataggctcaaggcccagatccaccacctgagtgaccctgccgaccctagacggggtgatcgagcgttcctcacccgcctggagggacgaatcgcctggttagagcagcttaacccccataaaggcgcaaaactccgagctcgcttagcagccgccttgtctccaggcccctga

SEQ ID NO: 12749 - RNA, 1317 nt, synthetic construct
  source 1..1317: mol_type = other RNA
atgctctccctacatgtacttctccctttggcccaccggctggcaaaccagccttgggaccagccattactggcggcctgtctgcggagttatttacctccccccctgaatcggcaggctaatcgcctggcgaaccggctgattaaagatttccccggaacaactgctcccgatgcgcagcagattgccaaggctttgggccagacgaccaccgcagccagacttgccactctcgcgcgtcaacaaactcggcctcctagccctgatctaaatcccccacacttccgcccaaatcccgctctccacatcccagccatccctgttatggaaaccatccccgacctggcattttggctcgggctgaccgaggaccaactaacacgctttgccgacctcagggggctctcagcccgtagtcatccggagttcgggtcgcattacaggcagcacctgatccctaaaagcgacgggactctgaggctgatagaagagcctcgcccgttcctgaagagacttcagagacgaatcttgaccggactgcttaatcatgtcccacctcatcctgccgcccacggattcagacctggccacagcgtccttacagcagctagggcgcacgccggcgaacaaattgtgctcaggttcgacttgaggcacttttttgcttctatcacaatcgctagagtctacggactgttcagaacaatgggctatcccgcaaccattgctcggcccttagccgggctcacaactgccattaccccaacagaggtgcataaaacccctcacttggccggagcagagctctttgcagctcgacatctgccacagggtgcgccgacttctccagcattggccaacctggccgcttggtttctggatctgcgtctggctggtctagcccgctctgttaacgcccagtacacacgctacgccgatgacctcaccttctccggggataggcgaatagctccagtgctgttggatgcacttccccacattattacggaaaccggctttcgactgaacctctcaaagacccggataatgcccgctcatcagcgacagactgtgactggcttgacggtgaacaggcatcttaacctgccccgcgaccagtatgatcggctcaaggccacaatccaccacttaacgtgcccagatgaccccagacgccaggacccagcattcctggcccagttaagcggcagaatcacctgggcagagcaagccaatccccacaggggtgcaaagctgcgggaggcacttgctgctgccctggaaagactgccgccaccgccaatatcccccatctga

SEQ ID NO: 12750 - RNA, 1326 nt, synthetic construct
  source 1..1326: mol_type = other RNA
atgactcgtcctctccggcctccgtttccagacagggctgctcttgcccctttagccgcctccttggctcagcaagactggacagaggcagccttggtgctgcacctgcggcaacgtctaccaggggaccagcctgccagagccgcaagactggccaggagcctcttgcagtcgttccccgcaaggtcagcccccgatgcagctcagatcttgcgccacctccagcaatcaccacagggaagagccgtacttgcccacgcacgccgttatcagcttctccccgcccatagtttaacccctcccgcacataggcccattccaccacttcatcacttggccctgccaccactcgcaacggaggcagagctggccgactggcttgctatcacccctgaccagctgacccggttcgccgatctacggggccttagcgctcgaactgactcaccgtgggctccccactatcaccaccacctgatcgcaaaatctaatgggcaactccgtctgatcgaggaacctaagccattcctcaaaaggctacagagacgaattctcgccggtctgctgaatcacattccgccacaccccgctgcgtatggtttcgtccccggtcgcaattgtatacaggctgcggcacggcacgctggcgaacaaattgtgctgtgcttcgacctggcccagttttttcccagcataaccgatcgccgcatctacgcgctgttccgcgcactcggatatccagcacattgcgcaagaagtctcgccgggttgacaactgcactcacgccggctcatgtgctccataccgccaacttggccgctagggaccagcttagcaaccgacatttacctcagggagcgcccacttcccccgccttagctaatctgagcgccctgcagctggatagaaggctggccggactggctcattctctgggcgcgtcctacactaggtacgccgacgatctgacctttagtggcgatgcgcggattgctccgattctgcagagggcggttccacaaatcgttgcagaacaggggtttagactgaatcccgccaaaacaagagctcagcctgcccatcaccgccagactgtgaccggcataacagtgaacgagacattgaacccagctcggggctcctacgatcttcttaaggcaaccatccaccacttatctcgacctacggatcctagacggcacgatcgggcgtttttggccaacctacacgggcgaatcgcttgggtcgcccaaattaaccctgccaagggagccaagctccatgaccgcctgcatgctgcactgctgacaccccaggactcttga

SEQ ID NO: 12751 - RNA, 1188 nt, synthetic construct
  source 1..1188: mol_type = other RNA
atgccagcctccttcgttcgggcccccgaaacgctagccgaagcactcatcagggcttttcccggacccgtagcccccgatcctgcacttattttaggcctgctggcccaccaacctgaaatcgcacgcctgctcagtcacgccaggaggcacgatgtggcgccagctgtatggttacagccgcccccatttagacctgctccggctctcgctgacctacctctccccaggctcgccacgtgcgatgcattggccgactggttagcactccccccagaccgcctgaccctttacgcagacctccgcggactaagtgcccgcacagactctccctttgccccccactatcaccaccaccttcttcctaaagcggatgggtccttgcggcttctggaggaaccaaagccaatactgaaacgacagcagcgacaggtcttgcatggcctgcttagccgtgtgccaccacatgatgcggcgttcggcttctgccctggacggaattgcatcggggcagctgctagacatgcgggtgaggccgttgtgctggggttcgatctggtcgatttcttcccgtcgatcgggatacagagagtttacgccgtgtaccgaaccctggggtaccccagagctgttgcttgggcactcgccggcttgtgtaccgcgttaactccgcctaagatcctcgctaccccagctctggctgccagagaggccctgtccaccaggcacctgccacaaggtgcccctacaagccctgccctagccaacttgtgtgcacatgccttggacagaaggctggccggactggccaggtcacttggtgcaagctatactcgatatgccgacgacctggccttctctggcgacacaaggatcgctcccattctgcggactgcagtccctcggattgtggcggaggagggatttagactgaatcctgccaaaacccggcagatgccggctcatcaccgccaatgtgtgactggcctggtcgtgaacgccggggtgaacacacctcgtgcagccttcgaccagctcaaggcaactttgcatcgccttgcacgggctggcgatcccaggagaacagatcccggctttctggctcgtctgtcaggtcagattgcttgggtggagcaggtcaatccagctcggggagctagactccgcacccgatttgacgcactgtga

SEQ ID NO: 12752 - RNA, 1338 nt, synthetic construct
  source 1..1338: mol_type = other RNA
atgcccccagccttcaaccgaccagtggtttccctagcggtactgggccctattgcctcaagcctcgtgcaggccgaatggaaagaagccagcttgaagcaggtgctcctgcaacggctgcccgtgaggatgcgtaaccaggcgggtcgagtggctggtcgcctgatccaggcctttcctggaggatccgcacccgatgttgggcgcctgagacgaatgctgcaggatctgtcaatatcagccaggctgcgggaccatgcgaggcgaacagacagtctgcccgcacccgtactcgaccctcctcgatttcggcccgtcagtgctctcgacagacttgatctgcctaagctcgcgactccgggggacctagctgacttcctggccattactcccgagcagctgatccggttcgcagacttaagaggcctatcggcacattccacggacccgttcggccctcattacttatgccaccttaggccaaaaagaaatggtggccaccgcctcatcgaggctccaaggccttttttaaagacacttcagaggaggatcctacgtggcatactggaccacgtcccaccacaccacgctgcttttggcttcaggaggggacgcaattgtgtccaggcagcagctcgacacgctggagaacgggtggtcttagggtttgacctgacagatttctttcccggcttggacgtggcaagagtatacggactgttccggtctttggggtaccctgctgcaactgcccgggatcttgccgggctctgctctgctctgacccctcgtagatatctgctcggtcacgatcccacgctcaccggcagacttcatgccaggcacctgccacaaggcgcaccaaccagccctgctttggccaatctcctggccttccggctggactgtagactcgcagccttggctagaagccttgatgcccagtatagtagatatgccgatgatttaagtttctcaggcgacgcgagaattgcgcctatcctgttgcgcgccgttcccgaaatctgcgcagaggaggggtttcgccccaaccatcggaagacacgcgtgatgccatcccatcagcagcagaaagtgaccggaattcttgtgaatcaccacaccaacctgccgcgggtcgagtacgatagactgaaggccattctccatcgcctgcagcaacccgatgacccaaggcgccaagatatggcctttttggggcatctcagcggacggatcgcctggcttgcccaactaaacccgcaccgcgcagctaggttgtctcagtctctgcagctggtgagcgcctccgctcgtactgttcccccagctcggtga

SEQ ID NO: 12753 - RNA, 1323 nt, synthetic construct
  source 1..1323: mol_type = other RNA
atggcacccttgcaccctgacgatccacccccactaccccctgttgccgctgtgttcggacctctggccgctagcctcagccagtctccctggcaggaggacgcccttcatcgcttgctgttgacccggcttcctggccccctgagagctcaagctcgccgaatagctcagggcctgatcggcgcctttccaggaagtgttgcccccgatgccgcacgcctctgcaaggttctgagggatctcccaggcgcgagaggactgagagctcacgcagctcggacaggtttacgcccggcacccgaactgacccctccaacatttctgccagcccccggtttagccgggttagccctcccagtgctcacatctccggcagacgtcgcggacttcctggccatttcaccagaccagctgatccggtttgccgatctccgggggttaagtgctaggtcaccagatcctttcggcccacattacctatgtcagctgcgtcctaaacggcgggggggatggagattgatcgaggcccctcgcccgtttcttaagaccctgcagaggagggtgctctccagccttctggcccacgtaccgcctcatcccgcagcatatggctttcgcagaggtcgtaattgcataatggctgcagcacgccatgctggagagccccttgtagccggctttgacattgcagacttctttcctagactcacagtagcccgcgtgtacggcctcttccgagcgttgggatatcccgccgccgtagcgagagacttagcaggtctgtgtactgccataaccccagccgccactctagcagcgctacctgcccgagacgctcctatttggaggacgcgccacttgcctcaaggcgctcccacttcccctgcactggctaacctgcttgcttggaggcttgactgccggttggctgggttggcccggattctgggggcaacatacactaggtatgccgacgatctgaccttctcggggccagctaggattggcccaatccttagggatgctgtgccagcgatcctccgaggagaaggcttcgcgcccaacctggccaagacgaggctgatgaccgcccagggtgcgcaaattgtcaccggggtgatggtgaaccggcatgtgaatctgccccgagcagagttcgaccgtctgaaagctgtcctgcaccacctcgccagacccgatgatccgaggcgacaggatgccgggttcctcgcagctctgtccgggagaatcggatgggtggaacagatcaatcccgcccgtggcgctaaactgcgggcaagactcgtcgccctgactggatga

SEQ ID NO: 12754 - RNA, 1284 nt, synthetic construct
  source 1..1284: mol_type = other RNA
atgcatctccagcaggccataaggtccttggcagcgagcctctctcaagctcagtggacttactttgataccaagctcattctgcagcagagactccccccacgccttcgaaacttggcccccagcttagcacgccgactggttagcgcacttccccaaccctacgccccttctgccagaactattgcccagaccctagcctccttcccggagacagggcagatcgctcgatataccgaaccaaggaagctggtggctcccttcccgattgccccacagaagtttgcccctattgatatcttcaggtcgctaaacctcccagatctgagttcctgtgacgagttggctgagtggctggccatccctcccattcagctcgtcagatttgccgatctcaatgggctcagcaacaggaccaagaatgcattcgcaccgcactatcgctttcacatcatcccgaaaagagacggaacaagccggttgatagaggagccaaagcccgccttgaaacggctgcagagacgcatccttaggtcaatccttaatcaagtacctaccagtcctcacgctttcggattcgtccaggaccggacatgcatccaagctgccgcacgccactgtggagaaccagtggtggtgtcttttgacctaaagaactacttcactagtattacttaccccaggatctttggcgtcttcaggtgcctgggttacccagcggatgttgctcggcatctgaccgggctggtgacgctggtgattccagctcatgtgcgggcccagttgggccgtattggccaccacgacctgcgaaggcgccacttaccccaaggggctcctacaagtcccgctctggcgaacttatgttcatataacctggaccgacgtttagctggactggcgcagagcctggacgcaacttatacccgttacgcagatgacttgacgttttccggtgagacacatattgccagaacactgtgctccgtggttcctgatatcataagagacgaaagattcactaccaatcctgataagacgcgcgtgatgccatctcatacctctcaggtcgtaactggtatcgttgtgaaccaccatgtgaatatcaccaggaaagactttgacagacttaaagcacgcattcatcggctgcggtcacagggcaaggacgatctggaaacactgcagcaccttgatggccaaatagcctgggtcgaacaggtaaatcctctgaaaggcgccaaacttcggcagcggttcgagcacgcgctctcactcacatga

SEQ ID NO: 12755 - RNA, 1188 nt, synthetic construct
  source 1..1188: mol_type = other RNA
atggcgttcgcctctcacctggccagcgagatactgctgtggtacccgaaaacttatagcccctgtcagtctgacctggctacgacccttagtagacttcccgagatcgccgacgtgtggaattatgcacgtcagaaaaatgtgtggcctaggagtagaattgacactcctgagttcctgcccgctccggccttagagggcctagacatcccacacctggctacatgcgcagatttagccgattggctactcatctcccaggaccagctgactcgatttgccgatttgaagagcctgtctgcttccactgataatgcatttgcaccccactacaggtaccacacaatctctaaagccagcggccaggcgcgactcatagaagagcctaaaccctttctgaagaccctccaaaagagaatccttaaaggcattctcaaccatgtgccaacaagcgaaatctcgttcgggttcacccgaggaagagactgcctgcaagcagcttcaaagcactgcggagaagacgtcgtggtgacatttgatctcaggtcattctttccatcagtgcggcagagtagggtgatcgggttgtttcgttgtctgggatatcctgatgcagttgctcgtcatctggcaggcctgactaccgtcattacgcctgccttcgtcttaaagcgcttacggctcgaaaatgataggtttctcccaaaccgccatcttcctcaaggcgcctccacctcccctgctatcgctaacctttctgcatacgcgttggaccgcagactgatgggcttggccaggagactggacgcccaggttacccggtacgcggacgacatcactttctcaggaccccgagagattactacccccctgaagcatgccgttccagaaataattgccgacagcggttttgtcgtaaacccgcagaaaacacatattatgccccgcacacagtgtcaggtgacgacagggcttgttgtcaacgatcacattaacatactgcggcgggactatgataacctccgggctgaattgcaccatctgcttaccctggatgacccaaggagacgcgatgccagttacctattcgctctcgatgggcgcatcacctgggtggagagggtacacccagtaagaggtcagaagctccgcgagtccttcaatcaagtgttgctgcggggtaattga

SEQ ID NO: 12756 - RNA, 1290 nt, synthetic construct
  source 1..1290: mol_type = other RNA
atgaatcgggcaaatcttgctcagagtttagccggctcactggtgtgctgcgactggactctctgggccgtggagcaccaccttactagccggctgccctctgggtggtctaagaccgcctcaaacttggcctccgaactcattgcagcgtttcccgcaccgtatgtgccatcccaagcagccctggttcagagacttatctccagcgactatctcacccggattctggatcacgctatgaaacatgacctccggttcagcccgatactggattcggctcgttttgcgcctatccctgccttcgagggcctggacatccctcagatgacaaccctgtctgacttggctgactatctagcactaaacaccgatcagttagtgaggttcacggacttgatgggcctgtcaaatggtacagataacgtgttcgctccacattaccgctttcacctgattgccaagcggaacggtagacagagattaatcgaggaacctaagccggttctgaaatccctccagaggcgcgttttccagactatcctgaacaaagtccccgtacatgacgaggcttatggatttgtccctggacgatcctgtcgcgacgcagctgcaaggcataccggcgaacaggtagtcatcggcttcgatctgagaaattttttcccttcagtgagctatggaaggatttacggtctgttccgagcccttgggtacccagacggggttgcgcaccatctgtgtggactctgcaccattaggacgccaccccacataagagcacgtatgtcttacgatgatggacgggggctagaagccaggcatctcccacaaggcgcccctacctctcccgcattggctaacttagtgtgccacaggctcgactgtagactgagcggcctggctcacagtctagatgcgcgatttactcgatacgccgatgaccttactttctccggcgaccggcgcatggccaatgctatactcaaagtggtgcctcaaattgtcacaagcgaaggcttcgccttgaatcccaccaaaacacgctgtcaaggacagcatgggagacaggtcactacaggaatcgtggtcaattctcacattaacctgcccagggagacatacgactacctgaaagccgtactgcatcacctgatccagccaaaggatccccgcagaggcgatccagcctttctcaagagtttgagtggtcagatcggttgggtggagcaaattaaccccgggaagggggccaagcttcgtgagaagtttgatcagatcatacagcactga

SEQ ID NO: 12757 - RNA, 1332 nt, synthetic construct
  source 1..1332: mol_type = other RNA
atgcaggaggagagaactcctcccataggccgtactgcactagcatctgctctggtccatgcactgagtaccaccgcagcatggactgaaacggcactggtggacaccttcactcatgtcttgcaaggggctgcacccggttccgtggcttccttagctaggctgctggccgcggatgctagtgttgcctgcggtcccgaaaggcggttgggacagattatcgaggacgctccgtcattcgtcaggatcctccaaaccgtccaaaggcgacgcttggttctcgctcctcccctaaccccacccctgtttcggcctgcctctagatttgcagggctaccccttccttgcctcgcgacctccggggaacttgcagcgtggttggggttaacaccaactgagctcgattggtttgcagccaccctgccccaacgtggagagacacagccgccactgcagcactacagcctgagggccgtggctaaggcttcgggcaggttacggctgatcgaggcgccgaaaacgagactgaaagccattcagcgccagattctggccgggatcctcgcacatgtaccagcacatcccgcggcccacggcttcattgctggacgatcagtgctgacagccgtgaatcctcacgcaggagaaggcctggtggtggcggtagacctcgcagacttctttccctctactcctataggacgagtttggcgcctctttaggcaccttggatatcccgacgccgtggctcacctgttaacgggcctggtaaccactaggaccccgagccctgctcttgacggtctgttgctgcctccagagacacgtagacgccttcgagtccggcatctcccacaaggggctcctacaagtcccgcccttgccaatctggctgcctacggtctggatgtgagactctcatccctagccagcagactggatgccagctactctcggtatgccgatgacctcgttttctccggcagcggccctcagttgagacagagccagcgatttctccggctcgtctctgagattgctgccgccgagggatatgcgctccacccagacaaaaccaggataatgccatcaagcgggcggcagcaggttctgggtgtgacagtgaacgcccatctgaacttgccacgcccatcctacgatcttcttaaggctatccttacaaatgcctgtagacacggcctggccagtcagaaccgggaaggactgccccacttcagagatcacctaaatggccgcatcgcctggttcgaacaggtgaaccctgcccgcggcttaaagttgcgggccctgttcgaccgcatcgccgaatga

SEQ ID NO: 12758 - RNA, 1323 nt, synthetic construct
  source 1..1323: mol_type = other RNA
atgaccgctagagccgcacagtacctgggcaaaagggccccacgttccctccagcgtctgatcgagcatgtgatagcctccgccagaacgccctatccccctagttcggaacacgtggctagggcactgctgaactccacatattttgatgctgctgcccgcgctgttcttcaggcagactcccccccaaaagccgtccttcattcacccgcctttgcccctgcccgggcttttgctggactgccaattccccgaatcgagacagccggcgaactagcagcgtggttcaagctaagcgtggacgagttggattggcttgcggacactcggaggggacacggtagagcgtctcaggcccagctccagcactacagctacgccctggctgcgaaacgggttggagctcccagacttattgaatctcccaagcctcgtctcaaggccgcacagcgccgcatcctccatgaaattctggatcacgccccatcacattctaacgcacatggcttcgtgcgaggacgatcctgcatcagcggagcacaaattcacgccggtgaaccggtggtgctgcggttggatttgcagagattctttaccgggattcgagcaagtcgcgtccacggccttttccgggccttaggctacccaagcgagacagcccgcctcttgactggcctgtgcactacctgcactccccagatagctactgcagccatcgaggattggaggatcagacaggaatatggtgcccctcacctacctcagggcgctcctacaagtccttccctggcgaatctctgtgcgtggcgcctggaccaaaggttaggggggttggctcggaggctggcaatcaactacagcaggtatgctgacgatctctgtttttcaggcgatcgggcccttgctgctagagcaccgtctttcgtttctctcgtggagacaatcgccagcgaggaggggttcgtagtgaactcggataaaaccaaagtcatgcgcgcctcctcaagtcaacgggttaccggggtggtcgtgaatcagcacgtcaatgcacagcgtcatgactacgacgctctgaaggcaaccttgcataattgtcggacctctggggaccctgaaacgcaaaacaggaagggactcccagacttccgagcccacctggagggcagaataaactgggtagaacaactgaatccccaccgcggcatgaagctgcgcctgatgtttgacgccattcattggccagctggggccagagacgctggtgatagaagggccgatgcgagcaggaggccgcctttaccattcgcaggagaggcagactga

SEQ ID NO: 12759 - RNA, 1329 nt, synthetic construct
  source 1..1329: mol_type = other RNA
atggccgacagggctctcatcgcgagggagctagctgcgtttctgttagcaggggcttggacaaagggccgcttgctggctcgaaccaggcagtacataggcaattcagccccaaaggccctgcagagactcatcgaacacgtgtttgccctggtcgaaacaccttatccccccgcacctgacgaactggcacgcatgctcatggcctctcgggactttgatgttgccgctagacgcatgctgcgcgctgatagacccctgcagctggcactccacagtccgaagtttgccccatgtcggagcctggctggattgcccgtgcctaaattggaaaccccgggagacttagccgcctggctgggattacccatggaactggtcgactggcttgcggatactagacggggacacgcccatgccgctactacccagctccaacattattcctatacttttgtcccaaagcggatcggcgcaccccgattaattgaggcgcccaaggctcgactcaaagccgtacaacgtaggatcctacacgagatactagaccatcttcccccacatagtagcgcccacggcttcgtgcgcggacgttcatgcatatccggtgcccagctgcacgtgggtgagtacattgtggtacgactggaccttcgcaggttcttctcctcaatcggctcggcccgcgttcatggtttattccgtagtattggctacccttgggcagccgctaggttgctgaccgggctctgtacaacctgcacaccagcgaaaactctcgcagctctgaccgattggcgtgaaaggcaggagtacactgcacctcaccttccgcaaggagcccctactagccccacgctcgccaacctttgcgcttggcggctggataacagattgacaggcctgggcagaaggctcgggatcaattattctcgctacgctgacgacctctgtttctctggggggcgggccttcgctaaacacatgcctagatttctttccctggttggcacaattgtgggcgaggagggatttgcgctgaacggtagaaagaccagcttgctgagggcaaacgcagcacagagggtgacgggaatcgtggtaaatcagcacgtgaatgtcgcccgggagcagtacgatgcccttaaatccatcctgcataactgccgcgtttcatctgatccaaccacgcagaaccgggacagccacccagacttcaaagcacatctagatgggcggattggttgggtcgagcaagtgaatcctcatagagggagaaagttgcgactgatgttcgatcagattaagtgggctagcgctcgggcctga

SEQ ID NO: 12760 - RNA, 1317 nt, synthetic construct
  source 1..1317: mol_type = other RNA
atggcctcttccacgaccatagctaagggactcgccgccgcacttgtcgctggagtgtggaccgagagagccctgctcgcacgatgtgagggcttcctgggtgcggctacacgagccagtcagaaaaaacttatatccgcccttttggtaagggcctacgaccgatatccacactccccagcaagcttggtgcggtggctcctgagaagccctgcttttgagcgagccgcagcccccttattacgtgccggacccaagcctcccgtcgttctcaagccaccactcttctggccagctcctcccctggcaggcctagatgtaccgaagctggccacacctagagacttagccgattggctggagatctcagtggaacaactggactggtttgcctgtgcgaagcggcaggccatagctctgtcgttcccaaagttgcgccactacgagtgtgcactggtgaggaaacggtccgggggaagcagactcatcgaagctcctaggcggaggctgaaagcgattcagcgtaggctacttcgggaggttctggaccacgttcccaccagcgatcgcgcctacggttttgtgcgggggcgctcatgcattgacggggctcaggtgcatgcggcggaggaagtggtggtcaccctggaccttcaacgcttttttcagtctatcgcagcaagaagagtgcatgccactttcagaggcatcggctatccttgggccgttgcacggctcttgaccgggctgtgcacaactagggctcccagttggggtttcgcagatgtcccctatacagagtttgactggcgcgcccgcaagatgttggaagcaccgcatctgcctcagggggcaccgacttctccaactctggccaatctggcggcctggaggttagatcggaggttggccggcctcgcaaggaggctagatgctaactacactcgttatgctgacgatctcgccttctcaggccggcggaatatcgctagtccaacatttctgcgcgctgtgggagagattgtagtcgatgaggggttcgtgcttaatcgtcctaaaacgcacattatgagacgaggagccagacaggaagtcaccggcattgtagtgaacgaacacgtcaacctccccagagatgcctacgatgctctgaaagcgaccttgcacaactgcattcgcaacggtgctgcagtggagaatcgcgacggacacacagacttcagagcccatctggacggcaggatcggctgggctgaaaccgttaatccccatagaggggctcggctgcgcgcaatgttcgaacgaatcacttggtga

SEQ ID NO: 12761 - RNA, 1302 nt, synthetic construct
  source 1..1302: mol_type = other RNA
atgcccactagacattgggcggcgaataatctagcggccaggcttctggcaggtccctggactcaggaggcaatcgcaattgtcatcgacgccgtgcttgggccggttgaccttagagcccgcgctgatctgataactgacgtggccgcgctggccgaagctacgtatcctcccacacctcaagcattgactacgtatttagtcagaagcagaagctttaaacctcaccccgagcgtccgataccagccgttcttgcccctcctcgattcgcccccacaccaccatttgccggtctgcctattcccgctctggcgacgcagggcgatttggctgcctggcttgggcagagcccagaacagctggactggctggctgatgaaaggcgaaggcattcgagggttacccgccctcctctccgccactatcattatacatttgcctctaagcggaccggtgcccccaggttaatcgaagcacccaagccacgcctgaaagcaatccagcggcgcattctacgggagatcctgtcacccgtacccacacacccgagaatccacggctttgtggccggacggtcatgtctcaccggggcacaaattcacgctggggaagctattgtcgctaccttcgacctcactcaatttttccccagtatcggcctgccgcggattcatggcctcttcaggtccctgggatacccctgggccgtagcacgacgattgactggattgtgtactaccacaaccccatctggcgtgttccccgatccacagcacccggaccatgcactgtaccgcgttcctcatctccctcaaggtgctcccacctccccagccctcgctaacctgctggcctggacactggaccgccgcttggatggcttagccagatccgcagaggctaattacaccagatacgccgatgatctcgctttcagtggggacgaggcgttcgtcgctagaatcgatagatttcgtcggacagtcgagactattttggaagaggaaggctttgcccttaatacagccaaaacccgcataatgcctcgatctacgaggcagagggtgaccgggatcgtggtgaacgagcactgcaacataggacgtgctgagttcgacaccctgaaggcaatcctccacaactgcacccggacaggcccagcagcccagaacagagaagccatccctgattttaggacacacctggacggaaggattgcttgggtggagcaggtgaatttcccacggggactcaagctgcggcgtctattcgatcagattgactggactcctccaccatga

SEQ ID NO: 12762 - RNA, 1257 nt, synthetic construct
  source 1..1257: mol_type = other RNA
atggaggctcgcgcagcagcctacttgggcaagtcaacaaaacgctggcagaaaaggcttatcgctgagattgtatccgctaatggggcaggttatccaccctctcctgccgccttagcagatcgcctcctggcttcatcgcattttgacagagctgtggctatagtgcttcgccaaaagactccccctcctatggtgctggatcctcccgccttcgcacctgcaccagcgtttgccgcaatgcaccccccacgcatagagactattggagatctggccacctggctagaaatccccatagcaaggctggactggctggctgacgagaagagacagcattcacgggcaaatctcccaattctccaacactatcactaccggttcgtgcctaagtctagcggtgcgcccagactcatagaggctccaaaggcccagctcaaagccctccagagacgtattttggttgaaattctcgatttggcgcccgtgcatcccagggctcatgggtttgtcagaggtaggagttgtctgacgggcgcccaagttcacgctggggaacagcttgtggtctgcgctgatctgcgagactttttcccctctatccgagcggcacggatccacgggctgtttagaagctttggatacccgaccgccgtcgctagagcacttaccggactgtgtacgaccagcacaccccggagcatcttccagcgaattgacgagggacagcagttcgactggttcacacgacggcgctactccgcacctcacttgccacagggtgcccctacatccccggccttagctaatctgtgtgcctggcgttttgaccaacggtgcgatggcttggccagggccctaggaggcagctatacccgctacgccgatgatctgaccttctccggggacgcagccttcgctgccagaactagtaggctgattgctgccctcggcaaaatcatcggcgaagaaggcttcgcgatcaacgagtctaaaaccaggcttatgcgtagggcccgcccacagcgtgttacaggcatcgtggttaacgaccatgtgaacgtaccacggagagggtatgatgagttaaaagccctgctgcacaactgctgcaagcacggacctgcctcccagaatcgcgaccggaggactgacttcagggctcatctggatggcagagtggggtgggtcgaacaggtcaatccgaaccggggagcgaagctacgaactgcctttgacgccatcagttggagttga

SEQ ID NO: 12763 - RNA, 1332 nt, synthetic construct
  source 1..1332: mol_type = other RNA
atgtcatttgagaactggactgcctggcacctggccgagatcctgattgctaccgactggaccccgcaggcgatggaagatgccgctcggaaagcactcggaggcaacagacagaggaaatggttgccacggctgatagcagacatcatggggtccagccccaccgcatacgctccaagtcctagaaccgtggccggcttgatcctggacagcagggcgtttcgaggactgcgccttaatgacagagagcggccactgtttgataggtattttctacctgcccccattttctcccccacacccgctttccgtgatcttgcagtgcccgagttggccaacgctctcgattctgctcggtggttgaacctgtcccccaggcacctggattggttcgccgacatcgaaggctatcgatcttcagctgccgccgagtccacacgccattacgtacaggcttggattcctaagcgaacaggcccaccccgattaatcgaggccccgaaacagattctgaaagatctgcaacgcaagattctgcgcgagattttagaccctgtcgctgttcacgacagtgcacatggatttcggcgcggtcgttcttgcatcactgcagctcagctccatgccggggaggatatggtgataaccatggatctgaaggacttcttcccatcagtgcctatcagaagcgtacacgggatctttaggtcacttggttacccctgggcggtggcacgtcttctcacaggcttatgcagcaccactgccccggcaagcctattcgacaatccaccaggcgactctggtcatgacgaagagacgaggcggctctttcaccagcgacaccttcctcagggcgcgccaacttcccctgccttggctaatctgtgcgcgagacgcctcgacggtagactcaacggcctcgctcattgcatggaggcccggtacactaggtatggagacgatctggcattcagcggggatcgtgattttgccgctcgctcgggcgcctttctgagaatggcgagtgcaatatgtgcagctgaaggattcgccgtcaatcaccgaaagacccggataatgaggcaaggggattgtcaacgcatcacagggttgacggtgaatagtcacatcaatgtgcctaggggcgcatatgacagactgaaggccattcttcataactgtaccaggcatgggcctgccaatcagaacagagaaaaccacccagacttccgcgcccacctagatggacggattacatgggttgaaaacgttaatcccccccggggtctgagactcaggctgatgttcatggccgtcgaatggggatga

SEQ ID NO: 12764 - RNA, 1203 nt, synthetic construct
  source 1..1203: mol_type = other RNA
atgttacggagactggcagcctttgccgatcactctggccaaccaccctcccccgactggttgaccgacttttttctcgcagctccagagttcgctggagcagtggcccgtatcctaaaggagccacagattcttcattgtgtgctcaagcccgcaaaattcgcgcctgctaaaaaattcgccggacttaatgtccccaaaatcaactcctcaggagacttggccgcatggctgggcctctccaatgagcacctggagtggctgagtgatactagaaggcagcatagtcggactgccatcccagttctccagaactaccagtacacattcgtgttgaagaaacatgggccgcctcggctgatagaagagcctaagccccgacttaagaccatccagcgacgaatcctgcgagagattctcgatagagttcccgtgcacgcctgtgcccacggcttcgttgctaagagaagctgtgtcacgagtgcccaggctcactgcggagaattcatcgtgctggccgcagatttaaaggactattttgcaagcatcccagctgcgagaatccagggcatctttcgtgctattgggtatccatcttctgtagcccgcttactgacaggcttgtgcacctccggtacccctactagcgtgttcgcttctaggagcggtgggcgcatgtgcgattggcagaccaggaaactgtatgaacagccgcacctaccccaaggggcacctacaagccccgctctggctaatctggtcagttttagcttggaccgcaggatttcaggccttgccgcccggttcggagccaagtacactagatacgccgatgacctggctttttccggcgatgaaatatttgataggcgggtcgacactttcctggagcatgtggcgatgattgccgtcgacgaaggcttcatgcttaatgcggccaaaaccaggattatgcgccgctcgcaatcacagaggataataggagtgacagtgaacgaccacattaacctccctcgcgggacgtttgacgaactaaaggctatcctccataattgccgtaagttcggccctaatacccaaaacctgctcggtgtagcaaactttgaggagcacctgagaggtcggatcgcctgggctgcctcactgaacccagcaaggggggcgaaacttcatgcaatgttcaatctgattcggtggacatga

SEQ ID NO: 12765 - RNA, 1326 nt, synthetic construct
  source 1..1326: mol_type = other RNA
atgaatacccctccatggattgcacgaaatctggccgccagctttctgggctccgcttggaacaagaacgatttacgccttgccgcaactaagacactgggactagccacgagggctgcacagcgagcgctcataaatcgcctgttcgacgcacacaatgcccccacaccaccctcagaggactggctaaccagttactttctcatgtccgaatggtttgagatagcttccctccgggcccgtgaacatcctagaggggtgaatgccgtcctaactccaccacgtttcgcgccaagccagcgatttgccgattttggtgctcctaagctgacagctccgggggaactcgccaaatggctggcagtctcaatcgagtatctggactggtttgccgatcggaagaggatgcaagctaagaccgatattcccttgctgcagcactattcttataaattcgcgccgaaaaagagtggccctcctaggctgatcgaatcccctaagccgcagctgaaagccatgcaccggttgattctgcgggaaatgcttaattgtgcccccgtgcacgagtgcgctcaaggtttcgtacgccgccggagctgcttaactgccgccaagatccatgctggagaacatgtattgattaccgcagatctcaaagatttcttcctgaacactaggctcagcagagtgcatggcgttttccgcaacctgggttacgcccagccagttgctagactgctcacagccctctgcagtaccagcaccccccagtcgctgttcgccagacttcccgtgtctcagaggcatgactgggaaacccgtaagcggttcgaagcccctcacttgccccaaggggctcccacatccccagccttggctaacctgtgtgcatggagactggattgccgattattcggcttggccaaatctttcggagccaattatacccggtacgctgacgacatggcattctcaggggataaggcctttgccgacagagtggctgggtttgtcgcggcactggagacgattgcagcggacgagggttttgcactcaacagacgcaaaacaagggtgatgagaggccacacttctcagcgcgtgacgggcgttgtcgtgaatgagcacgtgaacatcgctagaaaggactacgatcgcttaaaagcgatccttcataactgtaggagaaatggacccgaggcagagaaccgagcacagatacggacatttagggctcaccttgacggccgggtgaactgggtcgagactgttaaccctaacaggggaaccaaacttaggcgtatctttaatgagatctcatggtga

SEQ ID NO: 12766 - RNA, 1131 nt, synthetic construct
  source 1..1131: mol_type = other RNA
atgaaaaaggatgacccagccaaggcactagccgctgctcttcttgcaggggaatggagccgatcagcactggagaaaagagccataacagccctgggcgctaggtctaaacgccgcgcttcccgtattgtggacgatatctggactaaccacaaggccccatacgtgccccatcgcaacgaactgaggaggctgatatatgcatcgaacgcgttcgccggcttgggtgagactgccattaccaggctgaatgagcttaaacccaaggaacagccgcctcggtttgcacccctgcctaggtttcagaatgctaacctccctccactcgccaccgctggagacttggcccagtggctcgggttaagtccgtcacaattagattggtttgcggacgagcgcaggacactagcgagagcttcagacacactccagcactattcccagacgtggctgcctaaacgttctagcggctggcgcctgatcgaagctcccaaaccgaggctgaaggacatccagcgacgaatcctccgggggatcctggatcccattcctacccatgatgcagcattcggcttcgtgccaggtcggagttgcactacagcagccgctaagcacgccggtgaaggcgtggtagttaccctcgatctgcgagatttctttgtgtccgtgcctgcccacagagtgcacgcacttttccggtgcttaggatacctgtggagtgttgcgcgtctcctgactggactttgtaccgccgccactccacacgcaaccttggcttccgaccagctggaccatgagactcggcaaaggctcagggctagacatctgccacagggggcaccaacaagccccactttggctaattttgccgcccgcagactagatgcccggctcgatggactggcgcggagatttgaggcccgatatacacgctacgcggacgatctgaccttcagcggggacgagagattccacacctctgtcccccgcttcttgattgccgtagcccaaatcgccagggacgagggctttgcacttaatgctgccaagacaagaattatgcctcggcacacgagacagaccgtcacgggaatagtcgttaacgaccatatcaatgtcgctcggccctga

SEQ ID NO: 12767 - RNA, 1326 nt, synthetic construct
  source 1..1326: mol_type = other RNA
atgaaaagcaacaggcacttggttccaattcttgcattcatgctgttggatgggccttggacccccatggccttgaaacggcgcgctgtcagaatcctgggtaggcgatcaaggacccgggccatcgagctcgtggaagagatcctggcatccataaaaacaccttacgctccacagtttaaacagctggaacgcgcgatcgtgagctgttccagcctgcacaagattggcgaagcgacagccgacaggctaggcaaactgtctgtgacagtgccccctccacgctttgctcccttagcccccttcagaggagccggacttcctggcttcacaaccactgcagccctggctcattggctggccgtaccactcggccaaatcgagtggctcgctgacagcaaacatactctttcccacgccacttcagacgttctacatcactatgcctgtcattggatccctaagcaaaccggatcgtggcgcctgattgaaagccccaagccgcggctcaaggcaatccagcgccgcatcctgcacgacatactcgaccacatgccagtgcacgacagtgcgtttgctttcatcaagggcaggtcatgcgccacagctgccgctaggcatgcaggagaggatgtggtgattaccgtggatctcaaggattttttcttaaccactcctcctcgtcgaattcatgctatcttccgttgcctggggtacccgacgtctgtcactagggtcctgaccgggatttgcacgacagccacccccgcagcagtgcttgaaaccaatgccgacatagctgctcgtaaccatgagactcggaagagatatgcctctccccacttaccacagggtgcccccacgtctcccaccctagctaatctggcagccagaggactggattgccggcttacgggcctggcttcaaggttcaatgcaaggtacaccagatatgccgatgacctcaccttcagtggggacaaggcgttgcttgcaagaagcaatcggtttattcgggccattcaggagattgttcaggatgagggctttgctctcaatgccagtaaaactcggatcatgccgcgaagtactagacaatccgtaacaggattggttgtgaaccagcatatcaacatagcccgccctgattacgataacctcaaagcgacactgacaaactgtgcacgacacggggccccatcccagaatagagagggccacgcggacttcagggcacacatggacggtcgcgtagcctgggtcgaaaacgtcaatcgtagacgaggggagaagctgcggagaatttttgaaaagatctcttggtga

SEQ ID NO: 12768 - RNA, 1311 nt, synthetic construct
  source 1..1311: mol_type = other RNA
atgtcccgccggacagaccatttcccggtattggcactggcgttgttacagggccgctggacacgaaacgccctgagaaaaagagcaagagatctgctggggccccgttctaagactcgggcgaacaggcttgtcgatgagatcttagctgtgcacaggttaccgtacactcctggttggcgtacgctcacgaagattgtggcaggagcgagcgccctgcatgggttaagtgatgctaccatcgagcgagtagcttcaacccctggccggcagcaccctcctcgatttgagccgattgcgccccttcaacctgccagcgctccaacactggctactaccgccgatctggctacctggctagaaatcccaatcgatcacctcgactggttcgccgacgaacgcagaacactggaccgagagcaggacaaggccctgtcccactatgcctaccattggaggctgaaacggagcggtgcatggagattgatagaggcccccaaaccacgcatgatggcggtgcagcggaggattctgaaggacattctgaatcggcttgccccacatgaggccgcacacggttttgttgccggacggtcctgtgttactgcagccgccaagcatgcaggtgagcacgtggtggttacagtcgatctcagagacttttttctaagtgcccccgtgggaagagtgcacgcaatattcaggtgcctgggctacccccatgcagtagcacgcgcactcaccggactgtgttcaacctccacaccacggcatgtcgctgcggaacacttcgaccacgaagctcagaggaggcatgctacgaggcacttgcctcagggagcacccacttctccagcattgtcaaaccttgctgccttgggcctggatagaaggctggctggcctagccaatcgctttggggctcggtatactagatacgctgatgatctcactttcagtggggactctccattctgcgcccgtgtgcctggcctccttaaagcggtggctgacattgcccgtgatgaaggcttcgcccttaacgccgcaaaaacccgcatcatgccccgccaccaacggcaaagcgttaccgggattgtggtcaacgatcacatcaactttgccagagatgacttctataggctcaaggccgctctgaccaattgcgtgaggcatggacccgcctcgcagaatcgcgacgctcatcctgactttcgcgcccaccttgacgggcggatcacatgggtcgaaagactcaatctccgacgaggcgagaagctgagaaggctgttcgacgctatagcctggtga

SEQ ID NO: 12769 - RNA, 1344 nt, synthetic construct
  source 1..1344: mol_type = other RNA
atgccctcccagaaccaaatagctggcgaccttgccgccgctctcctaggaggagcatggacccgtagggccctgctgaggagactgtctgggtatttgcggaataaagctgcccgctcaaatgcccgactggtggacgagattctggaacgtaccgaaggctcctacccacccagtccattcgccttaaagaggttcattcttgactcccgggcctttccacgcgcagcagcagtacttcttcgcacaacggtccccgtggcagctgtgttgacaccgccaaggttctggcctgctgccggtaatgcagctccaggagttcccgagatcgaaactcctggggacctggccatttggctgggcgtgcctatctctcgactgcaatggctagccgacgagcagcgaagacaccacactactgcaatcccgatgttccagaactataggtaccgtttcatgcccaaggctagtggcggttggcggctcatcgagtggcctaaaccccacctgcgggctatccaggtcaagatactgcgagagatattagatcggttgagcgtccatgaggccgctcacggctttgtacgcggccgatcctgtaaaacggcagccgccatgcatgcaggtgaggctgtggtggcatgcatggacatcagagattttttcggaagcgtgcggctccagcgtattcatgccattttcagaagaattgggtatccctgggccgtggcgcgcttactgagctgtctgtgcgtgacctctactccagcgtccgtttttgcgcgcgcccctgatgacgcaggcttggattgggagacaaggaaaagattctcagaacgccaccttcctcagggagcaccgacaagtcctgctctggctaacctcgtcgttggggaaatggacagacggctggaaggcctagcccggcattgcgatgccaggtacactcgctatgccgatgatctgtcattttcaggtgacgagacattcgccaggaggatagggggttttctggggtcggccaccgatattgtacgagacgagggctttagcatccacaccgcgaaaaccagaatcatgaggcggggagcgagacaagtggtcactggactcgtagtcaacgagcacgtgaacattctcaggcacgattacgacacactcaaggcgatcctgcacaactgtgccaagcatggggctgaatctcagaatcggagcggggttcctaactttccagctcatttggccggccgcatcgcctgggtcgaacatgttaatcccgtgagaggagctagacttcgcaccctctacaataaggtggcatggaccccccgggctgagatctga

SEQ ID NO: 12770 - RNA, 957 nt, synthetic construct
  source 1..957: mol_type = other RNA
cttccacctgagctagactggtttgccgacacccgacggcagcatggggtgactgagaagcgcccgctccagcactacagctacgcctgggtccctaaaaggcggggagcaccccggttaatcgaagcaccaaagcccagacttaaagccctgcagaggcagattctccgcgatattctggacagaattcccgtacacgaagctgcccacgggttcgtcaagggcaggagttgtttgggaggagcagcaaggcacggtggtgaggcagtggttgccacgcttgatctggccgacttttttccttcagtaccactcgagcgcgtccacggcatatttcgctgcctgggctatcctacagccgtggcccggttattgaccggcctgtgctccacaactactcctagaggagtcctggcagccgcccctggagttaaaagaccccccggcgcgttcgttcctgaagctgctccgcatcttccccagggggcacctacaagcccagccttggcgaatctgtctgccaatcgtctggatgcccgtctggaccagttagcagagtacgctggtgccaggtataccagatacgctgacgatctcgctttctccggggatgacgagtttgccgcgggtatcggctctttcctggctaccgtggaggaaattatccgggctgaaagattcgccccaaatcggcggaaaacccgcatcatgaggcgagcaggaaggcaacaagtcacggggttggtggtgaaccagcacctcaatgtgcccagaccggactatgatcgactcaaggcgatactgcataactgtgctaggcacggcccagcaggccaaaacagagacgggcacccagatttccgcgctcatctggatggccgagtgggatgggttcagacagtgaacccccatcgcgggctcaagctgcgtctgctatttgaggccatcgcttggtga

SEQ ID NO: 12771 - RNA, 1338 nt, synthetic construct
  source 1..1338: mol_type = other RNA
atgcactggcccaattcttcccgtcaccggctcatagccagaaatattgccgtgactcttctggccggcgcatggactgagagagcgatggccgatcgcctggagactctattggggagcaccacaagaagtactcagcggggactgatcggcgctatctttgataagtctgggggtccatatcctccatcacttgctgagctgaccgcctccatactggaagcgcctcaatttccagcagcggcccgactcgcattagaatatactaccagattagatatcgcaaccagacagcctaggtttgcacccattgcccgctttgcagacctagagatcccacggctgacaactcctggcgatgtggctgcctgggctggcttgagtattcccgaactggaatggttcgcagacgagcgtcgccagcacggcagaacagccattcccatttttcagcattatacctacgccttcaggaaaaagtcaagcgggcccccacgactgatcgaggcaccaaagccacgtctcaaaactatccagaggaagattctgcgagatatcctcgaccacattcccgttcaccccgccgcgcatggcttcgtagaaggaaggtcaccacgcaccggcgccgctcaacatgttggtgctcccgtggtgattgccgtcgatcttgagaacttctttctgtcagttcctgtgggaaggatccatgctttgttccggtctgttgggtatcctgacgaagccgctagagctctcacccggctgtgcacgaccatgacaccacgctccgtaattgacagggtcccgaatcctgcacgacatacgcgtgccgctttggccccgtacctcgatccccaccttcctcaaggcgcacccacatccccggctcttgccaatctggtcgcttggcgcctcgacgtgagactcgctggtctagctaattcctttggagccaaactgaccaggtacgccgacgacatagtgttctctggagacttaacggcccctggtaagacccagtctctgatcgccgccatcgcggagatcgtcgaggacgaggggttcggactgaacgataaaaagacacggataatgaccgcaagccagcgacagagtgtcacagggatcgtggtgaactcgcgcctgaacgcacggagagacagctacgacagccttaaagccatcctccacaattgtcgcctgaacggtttcgaagcggaaaaccgggagggacatgcagatttccgggctcacttggagggccggattgggtggatcgaaagtctgaacccgacaaggggcaggcgcttgagagatatttttagcaggataccttga

SEQ ID NO: 12772 - RNA, 1305 nt, synthetic construct
  source 1..1305: mol_type = other RNA
atggctcggaacattgcaaatgtgctgctgagcggcctgtgggctgaaagggctatgctgctgaggttgcagaccgccctgggcaaggccacagccaagagtcagcgcgccctgatcgcggaggtactcaaagccaacccagcgtcttatccccctcctgccgccgaactggtacgcactattttctcagcaccgagctttgagaaggccgccgctagtgccctgctaagcaaggctccattacacatggccttacgcccccctaaattcgcccctaccgcagacctgagcgactgcgatgtgccggcacttcccaccagcggagacgttgctcggtggctgggtttacctctcgagcacttagattggtttactgacgagcggagacagcacggtcgtactgccataccagacctccagcattacgtctacgcctttcgagccaagccacacggacccccgaggcttattgaagcccctaaacctcggctgaaaactatgcagaaacggattctacacggaatcctggatagtgtccctgtgcacgaggcagcacatgggttcgtgaaaggccgaagctgcaagtcaggagctgagcaacatgcagaggcagccatcgtcatatgtttcgatatcgcagacttctttctgacgtcccccctgggccgagttcatgctctgttcagagggctcggatacccacatgcggctgctcgagttctcacacgcctttgttctacctcaacgcccgagacagtctttgacagaatctcttctccaaggaagcacacccgggcggcccttcaagcttactgtgaaccccacttgccacaaggcgcacctacatctcccgcactcgcgaatctcgtggccagaagacttgatatacggctgacagggctcgctttgagtttgggtgggaggtattcaagatatgcagatgacctgaccttctccggcgatgccgcattcgctaaaaagacaaactcgttgatggctgctgtggcgggtatcgtggaagatgaggggtatgccctcaacgaaaggaagacccgggttatgacgtcctcccgtagacagcagattactggaatcgtggtgaatgctaggaccaacgcacccagagacgcctacgatcagctgaaggctactctgcataattgcaggaaaaccgggctagccgctgaaaaccgagacggccacgccgattttcgcgcgcatttggccggccgcattggatgggtcgcatcccttaatccagcccgcggcgacaggctacgtgcaatgctcacagagatcgcctga

SEQ ID NO: 12773 - RNA, 1350 nt, synthetic construct
  source 1..1350: mol_type = other RNA
atgaggttcgaggagctaattgccaggaacctggctgctgcctggctagcaggcccttggaccgaagccggactctttgagcgagggcaggaggtgattgggaaggcgggcaggagaagattcctgcaattagtaagggccgccattcaggctgcaccatctgattaccctccctctcccggttggatcacagcctttcttcgagaacgtgacggtctgcctgattacacagagaggttcctgaacagcagacggtccatcagcctagccctggaacctgcccacttcagtagcagtctcagcttggcacctctggacgtccccagactggaaacaccacacgatttagctgtctggatcggtgtaccgatcgagcatcttgattggttggcggatagtcgcaggcaggcctactcaacggacatccccatgcttcagaattatcgctacgcattcgtgcccaaacgtactggcccaccacgcctgctcgagtgtccgaagcctctcttgatggcggctcagcggaagatcctttccggcatcctggacaagatacgcgcccacgacgccgctcatgggtttgttgctggccgaagctgccttagcggagctagtagacatgctggagaggatattgtgattgccttagatctcaaggatttcttcctgactaccccagtcagacgggtgcacgggatctttcgcgcactgggctatccttgggccgttgcgcgcctgttaaccgggttgtgtacttcagctgtgcccctgtccgtgttcagacgtctccctccagcagagcggcacgactggaagactaggcagctctttaactcacgacacttgccccagggtgccccgacatctccagcacttgccaatctggcagcttaccgcctggatgtccgtttgaccggacttgcccgatctctcgacgcaacatacacgaggtatgccgatgacctcgccgtgtccggttctctgacagaccgaaatgctcagaagatactggccaccgttagatcgattgctagggaagaaggatatgaggtgcatccttccaaacaacgggtaatgcgctccgacgcgcggcaatgcattactggagtggttgtgaaccggcacgtgaatgtgccccgcgaagactttgacaggctcaaagccaccctgcacaatgcagcacggcatgggccaaggagccagaacagagacgggcacgccgatttccgggcacatctggatggccgggtcacctgggttgagaatgtcaaccccaacagaggagccaaactgagacggttgtttgacgcgatagtctggaaagaaggctcaggcgacgctatcggctga

SEQ ID NO: 12774 - RNA, 1065 nt, synthetic construct
  source 1..1065: mol_type = other RNA
atgcttgatgcactggacctgcctccacttccccacgccgaagccttggcttcctggttaggaatagatgccgacgagttggtggtgctcgccgactgtgagggcagagagcgaagacgtgcagccagagcccaacactaccattatcggagggttgctaaacccgggggcggggaacgacttattgaggcgccaaagccacggctgaaggcagtgcagaggcacatcctccacgggatactggatcgtgtcccacctcatgacgccgctcacggattcgtgcccggtaggtccgtgtggacaggagctgggcgacatacaggccgcgaaatggtaatcagggtggatctccgggacttctttgcctccgtgcgtggcgctcgggtatttgccttgttcgaaactatcgggtaccctaggagtgtatgcagcctgctgactggattgtgcaccaatgccacacccgcgacagtttggggtaccccctctcatgccattagcaccgctgcactgagagaacgctggcaccgcatccaacgatatgctgcacctcacctgcccgctggtgcaccttcatcccctgcattagcaaatttagcggcacacaggcttgaccgccgcctagcaggactcgctcatgccgttgacggctcttacaccagatatgctgatgacctgaccttcagtggcgatgcactcaggcgaggaacgctcgcattctttagctcggtgtgccggattgtggtcgaggagggctttgaagtccacgcgagaaagacgcggttccatcaccgcagccagcgtcagctagtgactggcgttgtcgtcaacgagcatccggccgcccggagatcagcctacgatagactcagagccatcctgtttaactgtgtgaggcacggtgcgcggagtcaggctgatagggacctggccgctttccgcgctcatctgagaggccgcatcgagtggtttgcccattcaccggctagggccgccaaacttcacgcgctgtttgaccggattgacttctctgagccagatgatgacccacccgccgatgggtga

SEQ ID NO: 12775 - RNA, 1002 nt, synthetic construct
  source 1..1002: mol_type = other RNA
gcactggccgatgtgttggcgcttgacgacgcggctcttcgtggactggcggacctcgaagggcacgaacgaaggaggaggcccaccgcacgccattatcactatgcctgtgcccgtaaggccgacggaggggaaagactgatcgaggctcccaaacctcgactgaaggctgcccagaggcgcgttctgagacggctcctggatcgagtcccccctcacgacgcagcacatggctttgtgcgccgccgaagtgcagtgactagcgccgagctgcatgctggacaagcgatggtgatcagggttgacctgagagactttttcgcctcgatcccagctagcagggtccacgctattttcggtgcactgggatacccggtcgctgtccgccgactactcacagggttgtgcacaaacgctacgcctttagccgtttggggtcccgcctccccctcactttctagtgtggcactccgcgaaagacggagacgcctggcacagtacgctggaccacacttgccagccggtgctcccacttctcctagcctcgcaaatctggcagccctcgggctggataggcggttagccgcactggccagatcaatggactgtagatatacgcggtacgcggacgatctcactataagcggaggtgatgcccttaggcgtggtgcccatgcttgcgtttccactatatgccggatcgccgtagaggagggcttcgtgattcacccacggaaaacccgtttgcagccgagaggcgtgcggcagaccgttacaggcttggtggtgaacgctagaccaaacgtgcctcgcgacacctacgatcggcttagggccacactgtttaattgcgtaaggttaggcccacgcacccagtctgatctacctctggctgagctcgaagcccaactaagaggccgggtagagtggtgtgccgtcaatcccgggagagcagccaagctgagggctctgttcgatgctattgattggtccgcggcctga

SEQ ID NO: 12776 - RNA, 1059 nt, synthetic construct
  source 1..1059: mol_type = other RNA
atgaccgagcccctcaggtttgaatccgaagtggagctggccagatggctggccctaactccagccgagctttggtggtttgccgacgtcgagggcatagggaggaccagagttaacggccctctggctcactatcgatacaggtttcatgcaaaacctgatggctccacgaggctcattgagattccaaagttgagattgaaactgatccagcgccgcatagctcgacgcctgctagctccgctccagctccacgactctgtccatggcttcgtgcggggccgtagtgcaatcactggagcccgagtgcacgttggacgcgcacttgtgctgagagtagacctgagagaattctttgcatccgtttccgccggtcaggtacgggctgtgctacggaggctcggacatgctgatgcagtcgcgagggccctgactgggctctgtacaaattgcaccccgagagcagcttggacaggcagcagtacccccgctaatgcagaggccgtccgtcagctgtggcataggcggcaacgctacgcatcaccacaccttccaacaggggcccctactagtcctgccctggcgaacttggtggcgggcacacttgacctcaggttagcagctttggctaggagcttcggggccgcgtacaccagatatgccgacgaccttactttctcgggcgatgctccctttagaagggatgcagaacggttcttcgaactggtttgtggggccgtcgccgagcacggatttgctgttcacggccggaagaccaggtttcagggggctgaaacgcgtcaacaggtgacaggagtggtggtgaacgtgcacacctcattggtacggcgggagctggagcggttagaggcgatcgttcataactgcgtgcgcttcggtcccgccggtcagaatcgcagcggacatcctgatttcagatctcatttagccggacgtatcgcccacgtggcctctgtccacggtcgacacggtgctcgcctgagagagcgcttcgctgcaattgactggagccccctggatgaacgatcagaagcctga

SEQ ID NO: 12777 - RNA, 1272 nt, synthetic construct
  source 1..1272: mol_type = other RNA
atgaccgatccgtttctgagggcccatgaagcagctgaggttgccgcagacttctcacgaacctacacatcatggacttggcccgaggtgttgaccgcccttcgagtactgctgcctgccgaagtgactgcagacgtcgcagatagaatcttcgagttgtcccctcatgagccccggcatccagccactgtggtgctggaggccctcgcaccatggacacacccagaaccccaacccagaaggccgctggtcctgcacgaacctgagagctccggcacagtgctagacgatctccctgacctgtacgatgtcgaacaggtggcccactggctggatttcacggtccctgagctggagtggtttgccgaccgagggcagtggctcaggactgctaggcccccactccgacattatcgtatatggcggagagataagcgggaaggcgtgcgcgttatcgaggctccaaaaccgcgtatgagagaaacccaacggcggttactccgccgcttggtggagagaatccctgctcactctgctgcacgcggatttgtacccgggtcgagtcctgccgctttcgcttggccacacacagacagacctgccgtggttagggtggacctgcggcactgttttgagagcattactgtacagcgtgtccgcgctgtcttccgcgatgctggctttcagccccatattgcccggctcttagcggagctttgcaccacggcaacgcctgtggatgaacttagagggctggatcacatgcacgcggcactacttcgggaacgacacctgccccagggtgctccaaccagtccacacctggctaaccttgtgatgagaagcctcgacaggcggctggacggatacgcgagacgcaacggcttaagatatacacgctatggtgacgacctagccatcagcggcgatgcaatagatgcagaccgggtcctgtggaccgttctgcgcattgtggatgcggagcgtttcactgtacaccccgacaaggtccgaatcatgcattcccatcagagacagaggctggccggactcgtggtgaatgataggccacaggtggctaggtctgagtatgacaatcttcgcgccctcttgcacaacgcccgtcgccatggcgcagcatctcaaaatcgggccgatcatcccgactttagagcccacgtttacgggttgattgcctgggtcggtgcgaccggagaagctaggaggcggaggttattggacctggccgccacagttgactgggaaacatga

SEQ ID NO: 12778 - RNA, 1272 nt, synthetic construct
  source 1..1272: mol_type = other RNA
atgactgagccatttctgcagcctcatgaggctgcagaagtcgccgcggccttctcgagaacatataccgcctggacttggcccgagatacttgccgctgtaacagccgtcttgcccgctgaggtcaccagcgaagtggcagctgggatcattgaactctctcctcacgaaccacgccaccccgcaacagtcatgatccaagcactcgccccatggacccaccctgcaccagttgctgctcagccggtggtggtgcacgaacctcggagtgctggcaccgtgtccgatgcccttccggacttatacgacgttgagcagttcgcccactggctggatttcactgtgccagaactggagtggtttgcggacagaggacaatggttgaggacggctcgtccccccttaaggcattatagaatttggcgccgagagaagcgggatggagtgagggttatcgaggctcccaagccaagaatgcgagaaacccaacggcggctattgcgccgactcattgagaggatacctgcacatcccgctgcacggggattcattcccggctccagcccagcagcctttgcttggcctcacaccgatagaccggtggtgcttagggtagatctgagacattgctttgagacaattaccgtgcccagagtgcgggccgttttcagacaggcgggttacccaccccacatcgccagactcctcgccgaactttgtaccactgccacgcccgtcgacgaactgcgtgggatcgaccacacccatgctgcgttactccgcgaacgacacttgcctcagggagccccaacgagccctcatctcgccaatctggtaatgcgtccgctggaccgaaggttggatggctacgcccgccggcatggactacgttacactaggtatggcgacgatctggccatatccggcgatgcaatgaacgctgacagagccctgtggacagtcctgcggatcgtggaggatgaaaggttcacagtgcatcctgagaaagtccggattatgcactctcaccagcgacagcacctggccgggttagttgttaatgataggcctcaggtcgcccggtctgactacgacaacctgcgcgcactgctccataacgcgaggcgccacggggctagttcacagaaccacgacgagcatccagactttagggcacatgtgtatggtctgatcgcgtgggtaggcgcaacaggtgagactcgcaggcgcagacttctgaatatggcccggactgtggattgggactcatga

SEQ ID NO: 12779 - RNA, 1272 nt, synthetic construct
  source 1..1272: mol_type = other RNA
atgacggaccccttccttacagccgcagatgcggctgagacagctgccgctttcgcacgaacatatgccgcctggacttggcccgaggtggtagctgctttacgggctgttattcccgcccactttgtcgacgacgtggctgagcgggtgtttgagttgtctccacatgaaccaagacacgcggccgaactgatgacagaagccttggccccatggacccaccctcctgaaccggttcgcgaaccactcatactcagagagcccatcagccctggcactgtcccggatgaacttcccgacttgtacgatatcacccagctcgctcactggctggatttcacagtgcccgaacttgagtggttcgcagaccggggaggttggctcaggactgcacacccccctttaagacactaccgcatatggcaaaggccgaaacgcgacggagtcagactattagaggccccaaagcctaggctgcgcgaaacccagaggcgtctcctgagacggctggtggagaagatccctgctcatcgcgccgctcgcggctttgtccctggaagttcagccgcagcctttgcctggcctcatacggacagacccgtggtcttgcgggtggatctacgacactgcttcgaatccattaccgataggcgcgtgagggcagtgtttcgcgatgcggggtacccaccacacatcgcgcgggttctggccgagctgtgtactaccaccacccccgtagatgagctgcgcgacatcgagacaggtcatgcggctctgctgagggagcggcacctacctcaaggggcacccactagtccacacctcgcgaatctggtcatgcgccctcttgacagacggctcgacggttatgcaaggcgtcacgggctgagatacacccgatatggggatgacctcgcactctcaggcgattctatggatgcagacagggctctgtggactgtgctgcgggttgccgaagccgaggactttacagcacatgacgataaagttagaattatgagacgacaccaacagcagaggctggccggcttggtggtaaacgaccgtccgcaggtggcccgtagcgattacgataaccttcgagctctgctgcataacgcacgacagcatggcgccagctcccagaatcacgatgatcatccagacttcagggcccatgtatatggccttattgcttgggtgggagccacgcgggatgagagaaggcggagattgctgaccatggctgacgcagtcgactgggacgcctga

SEQ ID NO: 12780 - RNA, 1269 nt, synthetic construct
  source 1..1269: mol_type = other RNA
atgaccccatcactgtcagcagatgaaatcgctgaggtggcggcagcattctcaaggacatacgcagcttggacctggcccgaagtgttagaagcagtacatgctgtcctgcctagcagtatcgctgacgacgtgtctgtgcgactctttgaattatctcctcaagagccccggcatcctgctgctgccctgacagacgctttgacaccctggacagcccctgcacccaccgttcgacctcagattagcttacaggaacctacatcgaccggtaccgttatcgacgggctacccgacctctatgatgtggaacagctcgcccactggctagacttcactgtaccggaactggagtggttcgccgaccgtggcggatggttgagacaagcccgaccgcccctgagacactacaggatctggcggcgggcaaaaagagagggagtccgcgtgatcgaagcccctaagccacgaatgcgagagacgcaaaggcgtctcctccgccgccttgtggagcagatcccagctcatcccgctgccaggggctttgtcagaggtagtagcgcggctgcttttgcctggccgcatactgacaggcccgtggtactgcgcgtggacttgcgacactgcttcgaatccatttccgtgcgcagagtgagaggggtgttccgggaggcggggtatccacagcacattgccagggtactggcagagctctgtactactgctaccccagtcgacgagcttcacgacatagaggccggacatgccgcgttgctacgtgagcgtcatctgccacaaggcgcccccaccagtccacacctggctaaccttgttatgaggagcctggatcggaggctgacgggatacgcgcagcacaacggcctgaggtatacgagatacggagatgaccttgccctttccggggacgaaatgaatgcggatcgggcactctggactaccttgcgcgtggtgagggccgaggggtttactgtccaccctggcaaggtccggatcatgcatcggcaccagcaacagcgccttgccggtctggtggttaacgataggcctcgggttgcacgggccgacgtcgataatctgcgggccctgctgcacaacgccattcattatggtgcctcttcccagaatgtcgatgatcatccagactttcgcgcacacgttcacggcctcatagcctggattggagcaacaggcgaggctagaagacgcagactgctcgagatggccgatcaggtggattgggatagatga

SEQ ID NO: 12781 - RNA, 1272 nt, synthetic construct
  source 1..1272: mol_type = other RNA
atgatcgaacccagcctgcctgcagttgaggtcagtgaagcggccgcggtgttctcccggatttataccgcctggacctggccagaagtactgcgcgccttagattcagtcctccctggggagatcgcacctgacgtggctcacaggctctttcgcctgactagggctgaacccaggcatccagcagccgctctggtggatgcactggctccttggactattccgcggcctgccgtcccacgacatatagaattacacgagcccacttctacgggttccgtgctcgacggactgcccgatctatacagtgtggaacagtgcgctcactggctcggcctgaccgttcctgaactggagtggtttgccgaccgggggaactggcttaggactgcaggccccccccttaggcattaccgcatctggcatcgaacaaaacgggacggggtgcgggtgatagaagcaccaaagcccagaatgagggagacacagagacgattactgcataggttagtcggtaaaattccagcccaccccgctgctcgcggctttgttccagggagcagtcctgctgcgttcgcgtggcctcacaccgacagatgtaccgtgttgcgtatcgatctgcggagatgcttcgagactatcactctcagacgagtaaggggggtctttgatagggcaggctatccaccacggatagcccgcctgttggccgagctgtgtactacgacaaccccggtcgacgtgctccatggagtgacaagcgctcacgccgccctgcttagggataggcaccttccccaaggagccccgacctcaccgcacttggctaacctggtattgagatctctcgaccgtagacttgacggctacgcccggcgaaatgacctgcgttatacccgctacggcgacgatcttgcactctctggcgacacattggacgtggaccggacactctggatggtggtgcgcgttgtgtctgcggagggattcgtcgttcacccagacaagctgcgaatcatgcacagacatcagaggcagagactggccggtctggtggtgaacgatcgcccccaagtcgcccgttccgattacgataccctgcgggcactcctgcataatgcaatccgcgagggagccgcctcccagaatagatcgggccaccgtgatttccgggcccacgtatatgggctaattgcctggattggagctacaagccctgctcgcagacagagactattggagatggctgccgcagttgattggcagtcatga

SEQ ID NO: 12782 - RNA, 1275 nt, synthetic construct
  source 1..1275: mol_type = other RNA
atggccgctcccgtgctgactgtagccgaagcagctgaggcggccgctgactttagccggggttatgggggatggacttggccagaggttctcagggctgcaggtgccgtgttgccagagggaatcgccgaggatgccgtggagcggcttttcgccgcaaacccgagggaaccaagacatcccgcccaagcttttaccgaagcgttgcagccctggactctgccaacacccgcaccacctagagtcatcgaactatccgatccagttcctgtgggaccgatgccctacggcctccctgacctgtacgacgtggagctgcttgctcagtggttcgggctgaccgtgggcgaattagagtggtttgcggacagaggccgttggttgcggaacgctcgaccaccactgaggcattacaggatctggagacggcacaagcgggatggagtccgagttattgaagcacccaaaccgtggatgagggagactcagcggcgtttactccgaagggtggtggagaggatgcctgcacatcctgctgccaggggattcgttgccggcagctctaccgctgccttcgcttggccgcacacggatcgcccaaccgtggtacgcgtagaccttcggcattgtttcgaatccatcacagtgggccgggtgcggagagtctttgcagatattggcggctatcgggcccccatagctagggtcctcgctgacctctgcaccacagcgacccctgtcgacgagctgaccggtgtcgaatatggtcacgccgccttgctacgcgacaggcacctacctcagggcgcacctacgagtcctcacctggccaacttagtgatgagatctctggaccgtcgactggccggatacgcaagaaggaacgggctcagatacacacgctatggcgacgatctggccgtttcgggggatgggatcgacgcagacagagtgctgtgggtcgtgatgagaatcgtggccgcggaaggattcgtggtccaccccgagaaggtgaggattatgcaccgccatcagcggcagcagttggctggtctggtcgtgaatgatcgcccccaagttgcccgagacgattatgacaatcttcgtgcactccttcataatgctattagagatggggcagcgacacaaaatcgcgatgggcacgacgattttcgcgcccacgtatacggcctcatagcttgggtaggagccacttcacccgccagacgccagcgactgctggagatggcccgtcaggttgattgggcacgctga

SEQ ID NO: 12783 - RNA, 1269 nt, synthetic construct
  source 1..1269: mol_type = other RNA
atgtctgagccctcattgccagctggagaagtggccgcagctgcagccgagtttagccggatattgacggcctggaccagaagcgagattgtgagagctgttatcgcggtgctcccatacgacgtggctgccgaagcgggaaaccggctctttgaacgcaccccccacgaacccagacatcctgccgcagcattcgttgccgcactccagccttggacgctaccgacacctgtgaccagaacatgggatctgacagagccagtcagagcagatgggttaccagctggcctgcccgatctgcacgacgtcgagcagttcgcctactggctggacttcaccgtgcctgagctggagtggtttgcagatagaggcgggtggctgagaactgctcggccaccattgcgccactaccgcatttggcggcgagccaagagagacggagtccgagtgatcgaggctcctaaacccaggatgagggagactcagcgtcggctgctcaggcgactggtggaaagaattcctgcacaccccgctgccagaggcttcgtacctggtgggtccactgccgcttttgcgtggccccatacagaccgcccaagtgttctccgagtggacctcaggcattgtttcgagacagtgaccacagcaagggttcggcgcgtctttgctgatgtgggatacccacccgcaattgcccggttgctggctgaaatctgcaccactgccacaccggtcgacgagctcactgacatcgaccacacccacgcttccctgctacgctatagacatcttcctcaaggcgccccaactagcccccacttggccaacctggtgatgcgcagtttggatcgtagacttgatggttacgcccgccataatggtcttaggtatacccgctatggagatgacctggctctgtccggcgacgatttcgacgcagacagggccctctgggtcgtgctgcaggtcgtaggggatgaaggctttttagtccaccccggcaaggttaggataatgcataggcatcagcagcaacgactggccggcctggttgtaaacgatcgaccgcaggtggccagggccgattacgacaacctgcgtgctcttctacacaatgcaatccgggacggggcgcaggcccaaaatcgtgatgcgcatcctgatttccgggcgcacgtgtatgggttaatcgcttggattggatctacgggtacccttcggcgcgacaggcttctcgaaatggccgcccgggtagactgggattcatga

SEQ ID NO: 12784 - RNA, 1290 nt, synthetic construct
  source 1..1290: mol_type = other RNA
atgctgctggaccattcaatgacagacgcgaccctggctttcgaccaggtgcgtgagctggccgccgaattcagccgtatttacacagggtggacctggccagaggtcctgagggcactcagggctgtgttggccagagatctggctgatgccgtggcccctcgcgtgtttgaattagcccctacggaacccaggcaccctgaggcagttcttgtggaggctctctctccatggactctgctcccacccgatccacagctggtgctgcgaccgcaagaaccacgatcttcagggaccgtacccgaaggcctccccgatctttatgacgttactcaattagcccattggctggattttactgtccccgagctggaatggtttgccgatcgcgggggatggctaaggacttcacgccctcccttgaggcactaccgcatttggagacgctccaaacgcgacggcttccgtgtgatcgaagctcctaagcctcgaatgagagagacacaacgcagattactgcgacggctggtggagcatgtacccgcacacccttgcgccaggggatttgtcgccggatccagcaccacggcgttcgcatggccacacagtgatcggccggtcgtactccgcgcggatcttaggcactgttttgaaacaataacaactaccagagtcagaagggtcttccacgacgttggctatcccgcccacatagcaagaattctagctgagctgtgcactaccgccacccctatcgacgagctcggtggcatcgatttggctcatcgagccctgttgcgggatagacacttgcctcagggtgccccgacaagcccacatctcgcaaatctggtgatgaggggactggacagacggcttgacggctatgcccgagcaaatggtttaagatacacgcgctacggagacgatctcgcactctccggagattcgatggacgccgaccggaccctttgggtggtcctgaagatcattgagactgagggtttcaccgctcatcccgataaagtacgggttatgtaccggcatcagcagcagcggctagcgggcttggttgttaacgatcggccccaagtgagccgggcaagttacgacaatcttagggcactcttgtataacgccgccgctcatggcgcccagagtcagaaccacgctgaccacccagactttcgtgcgcacgtgctggggcttatctcttgggtgggggctaccaacccaacaagaaggcagcggctgctgcagatggctgacgcagtggactgggattcctga

SEQ ID NO: 12785 - RNA, 1278 nt, synthetic construct
  source 1..1278: mol_type = other RNA
atgactaggccacaaccgcccttcactacggatcaggtgcgcgtgcttgccgcagcaatcgctgaccgcatcgtggattggacttggcctgcagtcgtgagagcagtgggcattgaacttccagccgagatctgcgtcgacgtggctcaggaagccttcgcactggcaccagacgagcctacacatactgccgaaatatttagactggctttagtgccctggacagttccggatcctcccgctacgagggtcgtcgagcttcctggcccaccacctgcaacagcactcgcgcatgatctgccgctgctgagcgacgttgaacagttcgctgtgtggttagacttcaccgtgccagagctcgaatggtttgccgacagaggaacctggctacgcaccgcgaacccaagactgcgccattacagggtctttcgtagggagaaacgatccggagtgcgcgtgattgaggctccaaagcccaggatgagagaaactcagcgcagactgcttcggagactcgttgttcgcatacccgcacatcccgctgcccgaggtttcgagcctggctcttctcccgccgctttcgcatggcctcatagtgacaggacgacagtcctcagggtcgatctgctgcactgttttgagtcgatcggcgtggggagagtacggcgcatattcgatgaggtgggctatcccccgcatatcgcccgtctgctcgctgaactgtgcaccacttcaacacccgctgatcagttgtccggcattgattacgcccacgccagtctgctcagacggcgacacttgcctcagggctcccctacatcaccccatctcgccaatctggccctagcccaggttgaccggcgaatcgcggggtatgccaatgcgaatgggctgcgttatacaaggtatggtgacgatcttgcggtgagcggggacgacttggacttgccaagggcgctatggaccgtaacccggatcgttgatgattgtggatttgccgtgaacaccaagaaaacccgtgtgatgcataggcaccagcaacagcgactcgccggattggtcgtgaacgataggcctcgggtaagccggcacgactacgacgccctcagagccttgttacacaacgccgccctgaccggagcacaggctcaaaaccaccacggtcacaatgattttcgcgcccacgtatacgggctgattgcttggattggagcaaccggtgaggtccggcgacaacggctgcttgacatggctgaccgggttgattggactgcttga

SEQ ID NO: 12786 - RNA, 1278 nt, synthetic construct
  source 1..1278: mol_type = other RNA
atgacacgaccggaaccaccatttaccgccgcacaggcacgggcaatttccgcagccatagcggatgccatggcggactggacatggccagaagccttaagagccgtgggagcgcaactacccgccgagatctctgccgacatagcccagtccgcttttgctatggctcccgcagaacccgctcataccgccgaagttttccgactcgcactgcttccctggaccgcagctgattcgccctccggtcgtatcgtggagctgaccggacctacgccagtcgctggtttgccacacgggctcccccctttagccgatgttagcgagttcgcatcttggctcgacttcacagtgccggagctggagtggttcgctgacaggggagggtggctacggacagctaatccacgtctacgccattatagggtcagtcgtcgcgagaagagaagcggcgttcgggtcatcgaagcccccaagcccagaatgagagagacacagcgtcgactcctgcaccgcttgattgccaggattcctgcccatagagcagcccggggcttcgaacctgggtcatcaccggctgcctttggctggccccacagtgatcgaccaactgtgctgagagtggacctgcagcattgctttgaaagcattggagcagggcgggttaggcgggtggtagaggacgtgggctaccctcctcacattgcaagactcatcgctgagctgtgcactaccagcactcctgccgatcagcttacgggcattgatcacgcccatgctagtttgctgaggaggcgccatcttccccaaggtgccccaacttctcctcacctggctaacttggcattggcccagctggaccggcgccttgaaggatatgcgaacgccaacggcctgagatacacacgatacggggacgatctggcgatctccggggatgagttcgatgcaggtcgcgcactctggactgtcctgcgcatcgtcgacgactgtggactccacttaaatgcggccaaaaccagagtaatgcatcggcaccaacagcaacgcctcgccgggcttgtggtaaacgacaggcctcaggtttcaaggcgggagtatgacgccgtgcgcgctcttctgcataatgccgccatcaccggcgctaacgctcagaatcggcacggccacaacgattttagggctcacgtgtacggcctgatcgcttggataggcgcgaccggagaagtgaggagacagagactgctggagatggcagatagggtcgactggaatcgatga

SEQ ID NO: 12787 - RNA, 1278 nt, synthetic construct
  source 1..1278: mol_type = other RNA
atgaccagacctgatccgggcttcactaccgaccaggtgaggactgtcgcagctgccctcgctgataggatcatcgattggacatggcccactgtcatgagggccgttgctgcggagcttcccgaggaaatatgtgtggacgtcgcacaagaggcattcgcagtggccccacatgagccaccccatttggccgaggtgtttcggttggctctgtcccgctggacactgccggaaccacctattcctcgcgctgtggagctccctggtcccactccagtaaccgacctcccgtatggcctgcctccactgcacgatgtggcccagttcgcggcctggttagacttcacccctgccgagcttgagtggtttgcagacagagggacttggctgcggactgctaacccccgtctccgacactatcgagttttccgtagagagaagcggcagggcgtgagagtgattgaagccccaaagcctcgcatgcgggaaacacagagacgactgctgcgccggctggtatcacggattccagcacacccagcggctaggggatttgaaccgggatcatctaccgcagcattcgcgtggcctcatagtgacagacctacagttctgcgattggacctggagcattgctttgaatccatcggggccggacgcgttcgcagaatctttgatgacgttggctaccccgctcatatagcaaggctgctggcagaactgtgcacaaccagcacacccgccgatcagcttggggggattgacctgacgcacgctgccctgttgagacgaaggcaccttccccaaggcgctcctacctctccccacctcgccaacttggctctagcgcgcttagaccgccggatcgacggttatgctagagccaaccggctgaattacacccggtacggagatgatctagcactctcgggtgacgacttcgatcacggccgtgccttatggatcgtgcgccggatcgtgtccgattgtggctttgtcgtgcaccccgataaagttcgtgtcatgcataggcaccagcaacagaggttggccgggctggtggtgaacgaccgtccacaggtcagtcgcgaggactatgacaaccttagggccctccttcacaatgccgcaaggagcggcgcccgatctcaaaatctccaggggcataataatttcagagatcatgtctacggcctcattgcctgggtaggagccacgggacacgaacggcggagaagactactggatatggctgacagggtggattggagcaggtga

SEQ ID NO: 12788 - RNA, 1329 nt, synthetic construct
  source 1..1329: mol_type = other RNA
atgactgaacctagtcgatcagccccccagccatttttatcagtcgccgatgccgcagtggtcggtgctctgttcgcacgccaccatactgcatggacgtggcctgaaacgctgcgggctgtagattccgccctgattgacgctctgcaggccggtgttaccgctctggccgatgtacccgatggtctggctcgcgccatctccttgagaattctggatggcggcccccttagagatcccgtagcggtgtttgtccacgccgctgcaagatggaccctccctgctgacgctgcgccaaggagcattgagacaccaggacccaccccatccgtgggactgccagatgagttgcctgaactgcacgacgtcgaacagttcgcccactggctcgacttcacagtgcctgagctggagtggttcgccgatagagagggtaggctccgtactgctcgcccgaccctcagacattatagggtgtggaggagggataagcggagcggggttcgagtgatcgaggcacccaaacccagaatgcgggagacacaaaggcggcttctgcgccggttagtggagcgaatacccgcacatcaggccgcccgaggtttcgagccgggttctagcaccgccgcttttgcttggccccacaccgaccgtcctacagtgctccgagtcgatcttagacactgtttcgaatccgtacctgcagcacgggtgcgcagggtctttgcagacgtggggtatccagcctcagtggctcggctccttgccgaactgtgcaccactactacgccgatagatgaactgacaggcatcgacagtgaacatgccatgctgttgcgcggtagacatctcccacagggggctcctacctcgcctcatctggcgaatcttgccatgcggtctttggacaggcggatcactggatttgccgagttaaacggcttgcgctacaccagatacggggatgacctagcaatctctggggacgagatggacgcagggagggctctatggacagtcgccaggattatcagagcggaaggctttactgtgcacccagaaaaggtccggataatgggacggcaccaacagcaacgtctcgccggcctagtggtgaatgacaggccccgcgttagtcgggtggactacgacaatctgcgtgcactcctgcataacgccatccgagatggagcgacagcccagaaccgtgagggccacccagagttcagaagccacgtttatggattgattgcctgggttggagctaccgatccggctaggcgccgcagacttctggcaatggccgctgacgttgactgggacgcgtga

SEQ ID NO: 12789 - RNA, 1272 nt, synthetic construct
  source 1..1272: mol_type = other RNA
atgacaacgcccgttctaacagctgatgaagtcaacgacgctgccgcctggttctcccggacctatacaggctggacctggcctgagctgctcagagccttagagagtgtgctccctgcggccattgctcgtgatgccctgccagccctgttgaccctgtcacccgctgagccgagacatcctgctgaaagcctcagaagagctttgaaaaaatggactcaaccccccgcacggcatccaactgtgcccatgcctgagccacctccacgtgacaccatcgccgacggactcccacagttgtactctgtccctgaggttgcccagtggctggatctcaccaccggggagctggaatggtttactgatcacggtgggtggctccgcactgcaccaacacggctgaggcactaccgcgtgtggacacgcgaaaagcgggatggcgtgagggtcattgaagccccgaagcctaggctgagggaggctcagcggcgactgcttaggctgcttgtaagtcggatccctgctcacccagctgctactggttttattccaggaagctctaccgccgactttgcacgaccccattctggcaaagctacggttttaagggccgatcttaggcactgcttcgagtcgatcactgcaccccggatagcagaggtgttccgcagagccggatacccgcctgagatcgctcgcctgcttgcggacctttcaacgaccgccacaccagcagaccaactggctggagtgcccgccgaacatgccacatacctgaggggacgtcatctaccccaaggggcccctacaagcccacatctcagtaacctagtgatgcgcagccttgatcgaagactgaacggctatgcacgggcaaacggtctggcgtatacccgttacggggatgacctggccttgtctggagacgccatggacgcagatagagccctgtgggtcgttctcaaggtgatagcttcagagggcttcactgtgcacgccggtaaggtaaggattatgagacaccaccagagacagaatttagcgggcttagtcgtgaatgacaggcccagggtgtcccggagcgattatgacaacttgcgcgcactgctgcacaatgcccaacgccacggggcctcctcccagaatcattccgggcacccggaatttcgagcgcatgtcctcggcctgatcgcatggatcggcgctaatgaccccgcacgacgcgagagactcttgcacatggcgaacgaagtagattggacccggtcatga

SEQ ID NO: 12790 - RNA, 1266 nt, synthetic construct
  source 1..1266: mol_type = other RNA
atgactacccccgtcctcactacagatgaggtcaacgatgctgccgcatggtttagcaggacttacaccggctggacctggccagagcttctcagggcactggagtccgttctgccagctgccatcgcccgggatgccttacccgcactgctcacactctcgcctgtggagccccgacatccagccgaagcactcaggcgcgccttgaagaagtggacccgacccccagccaaaccaacgattgtgcccccaagcgtcccccctccacacgatactatcgccgaagggctgcctgagctgtactcggtgtctgaggtagctcagtggctggacctgacaaccggcgaattggagtggtttgccgaccatggaggctggctgaggacagcgccaagtaggcttcggcactatagggtctggacccgcgaaaaaagggacggggtcagagtgatagaggcccctaaaccgcgcctttgtgaagcccagcgtagattgctgcgccttttggtaagccggattcctgcccatccggccgctacagggttcatccctggtagctctacagctgattttgcccagccccactccggcaaggcaaccgttttgagagtggatctacgccattgtttcgaatctataacggctcctagaatcgcagaagttttccgacgcgctggatacccgccggcaattgctagggtgctcgctgacttatgcactacggctactcccgcggatcagctagctggcgtgccagctgagcacgccacctacttgcgtgggcggcaccttcctcaaggtgctcccacttcaccccacttatccaatcttgtcatgcggtcactcgaccggcgtctggatggttatgcccgcgcgaataggctcgcctataccagatatggggacgatctggcactatccggaaacgcgatggacgcagatcgggcgctctgggttgtgctcaaggtgatcgccagtgaagggtttacagtgcatgcaggcaaggttagaattatgcgtcagcaccaacgccaaagcctggccggactggtcatcaacgaccgacctcgcgtgtcccggagtgactacgacaatctgagggccctgctgcacaaccggagcgtgagcaatcagatgagaagagaggtactgggatgggcatggctggtgtcaggcgaccgggcttccggttcactgatggtggcattctctgggagtagaggcggacgaggacgaagagtaaacaggtctggctgcttagcctga

SEQ ID NO: 12791 - RNA, 1269 nt, synthetic construct
  source 1..1269: mol_type = other RNA
atgacatcccccgtgctcactgtggaggaagtaggcgaggctgcggcacgcttttcacggacatatactggttggacctggccggaacttcggagagcccttgattctgtgctgccggaagcaataacaagagacgccttgccgattctgctcgcgtggtatccagacgagcctagacatcctgctgcagccctaaggcaggttctaaccgagtggactcgtcccgctggagcaccaaccaccgtaccactgcctgaacctccgccccgaacgacaattgtcgatggccttccccaattgtacagcgaggcagaggtggctcgttggctggggtttactgccggggaactggattggtttgccgatccaggaaattggctccggaccgctcccccaaggttaaggcactacagggtgtggacgcgcgaaaagagggacggagtgaggctgattgaagcccccaaacctcggttgcgggaggcacagcggagaatactgcgactgctcgtaagccgaatacccgcccacccagccgctactgggttcattcctggatcttccacatcagcttttgccagaccccattctggttctgcaacagtgttacgcgtcgacttgcgccattgtttcgaaagcatcaccacccctagaattgctgaggtgttccggagggctggctaccctagttcgatcgcccgactgttagcacacctctgcaccactgctaccccagccgaccagttagccgatgtgcctgcctcccacgcagcctatctcaggggccgtcatcttccacagggcgcacccaccagtcctcatctgagcaacctcgtcatgagatcattggatagacgtctgcaggggttcgccgacgctaatgaccttgcctacacccgctatggagatgatctggcgctctcaggcgatgctatggatgccgaccgggccctatgggtcgtactgagggtgatcgcctccgagggctttacagttcatgccggtaaggttagaatcatgcgacggcaccagcgccagaatctggctggcctggttgtcaacgaccgaccacgcgtgagtagggccgagtacgacacactgcgggcactgcttcacaacgctaggctgcacggggcgagcagccaaaaccactccggtcaccccgacttcagagcgcatgtcctcggactgatcgcctggatcggggcaactgatcccactcggagagagcgcttgacgaggatggctgaccgcgtggactgggcgatgtga

SEQ ID NO: 12792 - RNA, 1119 nt, synthetic construct
  source 1..1119: mol_type = other RNA
atgacctcccctgttctgacagtggaggaggtgggtgacgtggctgcctggtttagccgcacgtatactggatggacctggcccgaacttaggcgcgctctggattcggtgttacctgaggcgattgctcgggatgcactgcccacgctgctggcaggatttcccgatgaacctcggcatcctgcagccgccctgaggcaagaatggtttgccgaccccggcaattggctccggactgctacaccacgacttcgccattaccgggtctggaccagagagaaaagggacggggtgcgtgtcattgaggccccgaaaccacgcctaagggaagcgcagcggagactgttgcgtctgctagtttcaagaatcccagctcaccccgcagcagccggctttataccgggctcatcaacctccgccttcgctcagcctcactctggaagtgccaccgtactccgtgttgacttaaggcactgctttgaaagcatcactactccacgaatcgcggaggttttcagaagggccggttacccaccaacaatagctcgcctcctggctcatctctgcacaactgccacacctgccgatcaacttactggagtccccgccgcgcatgccgcatatttgaggggccgacaccttccacagggtgctcctacctctccccacctgagcaatctggtaatgagatgtctcgaccgccgtttgcagggcttcgctgtggcaaacggcttggcatacacaagatacggcgacgacattgctctcagcggcgatgcgatggatgccgatcgcaccctgtgggtggtactcaaggtgatcgcctccgaggggttcactgtccacgcagggaaggtgagaatcatgcgccggcaccaaagacagagtctggccgggcttgtggtcaacgacagaccgagggttagtcgggtggagtttgataacctgcgggccttgctgcacaacgccaggcagcatggagcttcttcccagaattattctgggcaccctgacttccgagctcatgtcttcgggttaattgcatggatcggagcaacggaccccacccgcagagaaaggctaacacggatggccgaccaggtggattggacccgatga

SEQ ID NO: 12793 - RNA, 1266 nt, synthetic construct
  source 1..1266: mol_type = other RNA
atgacagagcgcagacttaccgctgacgaagccggggatgctgccgcatggttctcccgtacgtacactggttggacctggcccgaattaaggagagcactcgactctgttctgccgagtgacattgcgcgagaggcactgcctgcactgttccagtggcatagggtcgaaccccgacacccagccgctgctttgaggagggtgcttgcccgctggactgtacctcctgccccacgaccactgtcagttgcggagcccgtcgatcccgggaccatcactgagggtttgcctgctctctacgcggttgccgacctagccaggtggctggatctgaccgttggagaactggagtggttcgcagaccatggcggctggttgagaacagctgcccccaggctcagacattaccgggtgtgggcgcgcgctaaaagggatggagtccgcgtgattgaagctcctaagcctcgcatgagggaggtccagcgtcagttgctgaggctgttagtgagccgtatccctgcacacccagcggctaccggatttctgcccgggtcctccacagttgacttcgcccgaccgcatgccgggaaggcaacagtgctccgggcggatctccggcattgctttgagagcatcaccgcccccagagtaaccgacgtgtttcgaagagagggctacccacccgcgatagctcggctgctagccgaggtttgtacaacggcaaccccggtggaccatctgacaggtgtgcccgcagaacatgcagcttatctccgcggacggcacttaccacagggagcaccaacttcaccccacctgtccaatctggtgatgcggagtttggatcggcggctgcacggttatgccgctgcaaacgggctcacttacactcggtatggcgatgaccttgctcttagcggagatagaatggacgctgggagagccctatgggtggtgctcaaggtcatcgcttctgaggggttcacggtgcacgcaggcaaagtaagagtgatgcgcgcccaccaacgtcagacattggccggcctggtcgtaaacgagcgaccacgagtctcgcgggccgaatatgatgcccttcgggccctcctgcacaatgccagaaggcgcggcgcttcaagccaaaaccacgccggccaccctgattttagggcccatgtgcttggacttattgcatgggtgggcgctagtgaccctgacaggagagagcgcttgctgagaaccgccgatgaagtcgactgggcctcttga

SEQ ID NO: 12794 - RNA, 1272 nt, synthetic construct
  source 1..1272: mol_type = other RNA
atgacagaacctcgacctcctgcccggttgtcacccgctgaggtaggcgacgcagcagcatggttttcccgcacttatactggctggacctggcctgaactgttgcgggcccttgatgcggtcttgcctggggacgttgctcgcgaggtacttcccagcctcctgatgctcccgagagagcctagacatccggcagccgcgctacgtcgagttcttcggccctggacagctcccgcaccgcaactagccacaatgcccgttcctgcccggcgtgatactgtggctgaggacttgccagcattatattctgtgagagaggtggctgactggctggatctcacggtcggggaacttgaatggtttgccgatcacggaggctggctgaggacagcaagccctagcctgagacattaccgcgtgtggacccgggaaaagagggatggggtgagggtaatcgaagctcccaagcctaggctgagggagatgcagcggaggattttacgtcaactggtcagtcatatcccagcacaccgcgccgcgaagggtttcgtaccctggtcctcaaccgccgactttgcttggccccacagtgctaaagccatagttctccgggccgacctcagacattgttttgagtccattacagcgcccaggatcgcagatgtgttcagacgcgctgggtacccaccaacggtcgctaggctgctcgccgatctctgcacaaccgcgtccccagcagacaagctgcgaggagtcccatctgaacatgccgcttacctgcgtggaagacacctaccccagggagcaccgacctctccacatcttagtaatctggttatgcggtctttagaccgcagactgtacggctacgctgctgccaacggactgacctatactcgctacggcgacgatctcgctctctcaggccacgagatgaatgctgaccgcgccctttgggttgtcctgaaagtgatagccagcgaagagttcactgtgcacgccggtaaagtgagagtgatgagggcccatcagagacagaccctggccggtttggtggtgaacgatcgacctagagtgaggcgggccgattatgacaacctgcgggcgctgttacacaatgccaggcggtccggtgcctcaagccagaaccacgccgagcacccagatttccgagcccacattctcggcctgatcgcatgggtgggggcatcggatccagtcagacgagagaggttgctgcgcatggccgacgaagtggactgggaggcttga

SEQ ID NO: 12795 - RNA, 1281 nt, synthetic construct
  source 1..1281: mol_type = other RNA
atgtcagagacacaccccccgacacagttgtccgctgctgaggcccatgacgctgctgcgtggtttagccgctcttataccggatggacttggccagagctgctgcgggctcttgaaagcgtgctgccccccgacattgctagggatgccctccctgggctgcttgccagtcacagaagagaaccacggcacccggccgaagctctgttgagggctttgcggccctggataatcagaacacctaaacctcccacaacggttacagacgttcctcctgccagagatacaattgcagagggactgcctactctctactccgtgcgagaggtcgccgaatggctggacttgactattggggagcttgactggtttgcggatcatggagggtggctcagaactgcagcaccaaggctccgccactatcgcgtttggacccgggaaaaacgggacggcgtgcgtgttatagaagccccgaagcctagactgagggaggcccaacgccaaatcctacggcagcttgtagcgcgaatcccggcacaccgggcagctacaggattcatccccggctctagcaccgcagattttgtgcgaccccacagtggcaagccaacagtccttcgcaccgacctgcgacacgcctttgagagcataaccgcctcccgtgtggctgacgtattcaggcgtgtgggttacccacccgccatctcaaggttgctcgctgacctttgcaccactgccacccccccagatcggctaagaggcgtgccatctgcccatgcagccagattaagagtcagacacttgcctcagggtgcacccacctccccacatctatcaaatctggttatgcgctctctcgatcgacggattcaggggtacgcccgcgcgaatgacttaacgtatacccggtatggcgacgatctggcgctctcgggggaagctatgaacgctgatcgtgcattatgggtggccctgaaagtgatcgcgtcagaaggcttcactgtgcatgcaggcaaggtgcgggtgatgaggaggcatcagcgccagaccctggcaggactggtcgtgaacgatcgaccacgtgtcagtagagccgattacgacaatctgcgcgctctgctgcacaatgcaaggcgccatggtgccgcctcccagaaccacacgaaccatcctgacttccgcgcccacgtactcggtctgattgcctggatcggagccagcgatgacgtcaggagggagagattactcaggatggctgacgaggtcgattggactcggtga

SEQ ID NO: 12796 - RNA, 1302 nt, synthetic construct
  source 1..1302: mol_type = other RNA
atgactgactccgatccagcccccaggctgtcattagctgaagcacacgaagctgctgcctggttcagcaggacctttaccggatggacgtggcctgagttgctccgggccttggaaagcgtgctcccagctgagattgcaagagaggtccttcctgcactcctgatgcgccacagggacgaaccaagacaccctgcgcaggcattgctgcgagtcttacggccctggattatcgccagtccacccgcccagctgtcagtgactgtgcctgacccacatgaccccacaactccgccggagcgggacacaatcactgaggggctgcctacactgtacaccgctggcgaggtttctgaatggctcgacctgacaatcggggagctggagtggtttgccgaccatggcaattggctgagaactgccgctcctcggttacggcattaccgggtgtggagtcgggagaagcgagatggagtgagggtcatagaagcccccaaaccccgccttcgtgaggtccagaggcgaatactgcgccagctggtgtctaaaattccagctcatcgagctgccacaggattcttgcccgggagttctaccgcggatttcgctcgtcctcacgctggccagcccacagtgcttcgcgcagatctgcggcattgcttcgaatccattaccgccccacgggtcagggatgtgtttagacacgccggttatccgccaccgatcgcgaggcttctggctgatctgtgtacaaccgccacccctgctgatcagctgagaggcatgcctgccgaacacgccgcccttcttaggggccgacaccttccacagggagcacctacttcgccccatctcagcaacctggttatgcgctccctcgatagacggttgcatggctttgccgcggccaatgatttacattataccagatatggtgacgacctggccctgtccggtcacgagatgaacgcagatagagcactatgggttgtactccgcgtcatcacggacgaggggtttacggtccacgcaggaaaggtgcgcatcatgcgtgagcaccaacggcaaaggttggcgggattggtggttaacgcgcgacccagagtatcaagggctgaatacgacaatctgcgcgctctgctccataatgccagacaccacggggccgctagccaaaaccatgccgggaatgaagacttccgcgcccacgtgctaggccgtattgcatgggtgggcgccggtgatgaggtaagaagggagcgcctcctcgcaatggcagcagaggttgactgggaaaactga

SEQ ID NO: 12797 - RNA, 1059 nt, synthetic construct
  source 1..1059: mol_type = other RNA
atgcggcggtggcaacaaccagagcatcggggacaccccattgaccttccgggaccagccccgatcgactctttaccctatgagctgccagtgctcaccggtgttgatgatgtagccgcctggctggctttaacccctgccgaagtcgattggtttgccgatcgcggctcatggttgacaactgcccgcccagccctgcgacattacagagtttctcacagggagaagcgcaccgggacccggatcattgaggctccaaagcctatgctgcgagaaacgcagcgcagaatcttgagacgcctcgtgcagagaattccagcccaccccgctgcgaggggattcgtacctggtggctccacagccgcattcgcctgggcacactcagatcgaccagtcgttctgcgcgccgaccttcggcactgctttgagagcatcaccgtgtcccgtgtgcgtcacgtgttcgcgcaggctggataccctgcaggcgttgcacgcgtgctggcagagctctgtactactacaactccacccgaccagctaatagatgtggaccctgcgcacgctgggctgttgaggaggagacacctgcctcagggagctcctacaagcccccacctcgctaaccttgctctactgcgcctcgatcagcgattagacggctatgcgaggagaaaccagctgagatacacgaggtatggtgacgatctagctgtctctggggatgccatggacgccgaccgtgctctttggaccctgctgcggattgtcgaggactgcgggttcgtggtgcaccccgagaaagtgagaatcatgcccgcacatcagagacagcgtctcgcaggcctggtggtaaatgatcggccgcaagtcagtcgggaagactacgataggttgagagccctgttgcataacgcagcacgccacggccctgaaagtcaaaatcattccgcacaccccgactttagggcccatgtctatgggctcatagcctgggtgggcgctactagcgaaacacggcgaaggaggctgcttgacatggccgatcatgttcattggtga

SEQ ID NO: 12798 - RNA, 1323 nt, synthetic construct
  source 1..1323: mol_type = other RNA
atgaccccgaacgaactgtccggggatgagcttcgcgcagtcgctacgcacgctgcagatgccattacagactggacatatcctaggattagaggggccgtgcatgcggctctagcagccactaccccacggaggtttgcccttccacatgtcgtcgccgatagagtagccacggatgccctggctctgtcaccagatcggcctgacaacgtggcggccttcatcggtgaggcgctgcaaccgtggagaagacctgatccaccaccccctccccccgataccagactcaggcttcaacccgcggaacctcagccccctaccggaatgcggcacggattaccccccatcgcggggtatgaggagctcgcattctggttgaatttgactgtgggcgaactggattggctggctgacaggggacgatggctggaacacgcacggtaccccctccagcattaccggattactcggcgggagaaacgaggcgggcacagaattattgaagccccaaaacccttgctccgcgaaacacagcgtcggctgcttcgccgagtggtggagcatattccggcacaccctgctgctagaggatttgtccgcggctccagcactgccgcctttgcttggcctcacgcagaccgtgcagctgtagtgcgagtcgatctacgacattgtttcgagagcatcggcatctcagccgtgcgcgcagttttcacaagtgccggctaccctccgcatatcgcacgcgtgctggccgacttatgcacaaccactacccctgctgaccagctacacggtatagactgggaacacagggatctcttgaggcgttctcacctgccccagggagctccaacctctccccacctggctaatcttgttctgaggcggctggacagaagaattgatggctacgccaagcggaatgacctccagtacacccgctatggggacgatatcgcagtcagcggtgactccatagatgcccacaagactctccgcgttgtactggcgatagttgaggattgcggcttcacggctcatccaggaaaggtgcgtatcatgtacgcccaccaacaacagcggctcgcagggttggtggtgaatgataggccacaggtgtcgagggctgactatgacgccctgagggccctcttacataacgcagttcaccacggccccgacagtcagaaccatcatggtcacccagactttcgagctcatgtccacggactgatctcttgggtgggcgccacaaaccctacaagaagaaggcgcctgttggaccttgccgcccagatcgactggaataccgagcagtga

SEQ ID NO: 12799 - RNA, 1293 nt, synthetic construct
  source 1..1293: mol_type = other RNA
atgtccgaccccttatttagccctgatgaggctgccgaaattgccgcacatgtggaggcccacttgactgcatggacttggcctgagatgcagcgagccctgatcgcagcagggctgagtccggagttcgccgacgttgtgggcctgagactgttcgacccctctgacgacgttgtcgcaggtgcatctgatattgaaagccgcatccttggggcgctgcgagacaggacagcacccttgccagagacggatgacaggtctgccccagctgtgtgggagctgaccgagccttccagcactgggagagttcgtgacgacctgcctgatatatacgacgtggagcagctggctcactggcttaacttcactgtcccagaactggaatggttcgctgaccggggcagatggttaaggaatgctcgagagcctctccggcattaccgggtgttcagggtcgaaaagcgtgatggctttcgcgtgattgaagcccccaagccccgcatgagagagactcaacgccgccttctccggaggctggtggaaaggatacccccacacccggcagcacggggatttgtacggggcagtagtaccgccgcttttgcatggccacacacagaccgcccggtcgtgctacgggttgacctaaggcactgcttcgagtcaatcgatgcccgaagagtaagacatgtgttttcagcggctggatgttccccagctatcgcccgcatcctgaccgaactttgcacaaccgcgaccccacccgatgctattcatggcctggaccctgtgcatgccgggctgctaagggaacgtcacctcccccagggtgcaccaacgagccctcacttggcgaatctcgttctgcgtggaatggatcgccggttggccggttttgcggcccacaatgatcttagatatacaagatatggcgacgacttagctctctcgggagatagaatggacgcagaccgggtcctctggaccgtactccgcgtcgtcgccgatgagggcttcacagtgcaccctgccaaaaccagaatcatgcacgcccaccagcaacagaggctggctgggctcgtggtaaacgatcggcctcaggtttccagagcggatcacgatgccctccgagctctgctgcataacgctatacggacaggcggtgccgcccagaaccatgacggacaccccgatttcagggctcatgtgtacgggaagattgcctggatcggagccacctcacccgctcgaagggacaaacttttggatatggcctctcatgtggattggtga

SEQ ID NO: 12800 - RNA, 1314 nt, synthetic construct
  source 1..1314: mol_type = other RNA
atgaccactgacagtacacatccgggagactcaaccgacagcgcccatccagacgacttaggcgggctgggtcctgagatccgcatacccgcacggtccctcgacctgctcatcaataggctcgaggtggatcctcggtggtccgttcatgctctgggagatatgcttgccgctacgacagctcctgcgaccgctactgcactgctgggcttgttgttggaaaagttcccagaacggcccgagcctgaagctgtacgacgagccctgtggtcaatggtaatagagaatagatcgcacgtcttcggcgagctgcctacgccagagatgacctttgccctgacaccattggccgatgccactgacgttgcccgatggctgggcttgacagtgggggagcttgaatggttcgcagaccggggactttggctccgcagtaagaaaaccgcactcgcccactatcggtacgtgacaatcccgaagagagatggggtgagagtgatagaggcgcctaaaccccatctgcgtgaaattcagaggaggatcctgcgcgagattcttgaccggattcccccccatagggcagcccaaggctttgtagccggacgttctaccgcctctttcgcctggccgcattcagatagaaatgtagtgctcagggtggatcttaggaattgttttcccactattacatccgcaagagtccgcgctgtctttgccgccgtgggctatcgacgaacatctcggctgctcagcgagatctgcactaccgctactccaccagatgtgcttcgcggcctagatttcgcacatgcttctttactgcgcgctagacaccttcctcaaggtgcccccactagccccgccttagccaacctagttatgcgcaccatggaccggaggatctggggttacgcacggcataacaacctccactattcccgatatggggatgacctagctatctccggcgacgttatggacgcaggacaggtcctgtggaccgttctgcggattatagctgatgaagggtttacggtccacccagacaaaaccaagattatgtacagccaccagcgccaacagctggcggggttagtggtcaatgaccgtccacgcgtgggcagagtcgactacgataatctgagggctctgttgcacaacgcgatcagaactggagcacacgcccagaacagggacgatcaccctagattcagggaacacgtgtacggtaagattgcctggatcgctgcgacaagtcccagcagaagaaacaccctgctcgccatggcagaaagggtggattgggatcgttga

SEQ ID NO: 12801 - RNA, 1278 nt, synthetic construct
  source 1..1278: mol_type = other RNA
atgaatgattcctattcacttggaggcttggggccgcgcatgagactgactgcagatagtgtcgaacatctgctcacgcgcctcgaggtagaccctaggtggactgtttccgccttggtggaaatgctcgttgccacggtcgagcagcccgtggtcaccgaactgctgggcatgctcctggacaggtttcccgagcggccaaccgatttgggcgacgtacgcactttcctagctcccctaataggtgagccaagaagcagggagttcgatgaccccgcggatccggtgatgcgtttcgatctgccccgccttcctgactactctgacgttgcaaggtggctcaacctgactgtcggggagctggaatggttcgcggacagagggcactggttaaggactaaggatggccctctgcagcactatcggtattggcaggtacccaaaagggacggggtgcgcatgattgaggcccctaagccacatctgagggaaatccagagacgggtgttgcgcacaatactggatcatattcctccacatagggcagcccagggctttgtcccaggaaccagcaccgcatcatttgcctggcctcacactgacagaccagtggtcgttcgtctcgaccttagggactgtttctcctcgattggtacagcacgggttaaggccatcttcgccgcagtgggatacgagcgaacagctcgggtgctcgccgaactctgcaccacaaccaccccgatcgcccatttacgggacattgaccatcgacaggccgctctgctgcgacagagacacctgccccaaggtgctcccaccagtccagcccttgccaatttggtgatgcgtgcaatggaccgaagaatctggggatacgctcagagaaaccggttacactattcccggtacggggatgatcttgctatttctggcgatcacatgaatcccgaggcagtgttatgggtggtgcttaggatcgtggcagatgaaggatttaccgtgcaccctgataagacaaaaacaatgcgagcccaccagagacagcaactagctgggctggtcgtaaatgaccagccacgggtcgccagaagggactacgataacctgcgcgctttgctgcataacgccatacgcacaggcgcgcaagctcagaaccgtagcgcccaccctaactttcgggctcacgttcatggcaaaatcgcttggatcggagcgagctctcctcgccggagaaatacgctcctggccctggcagagcaagtggactgggatcgatga

SEQ ID NO: 12802 - RNA, 1311 nt, synthetic construct
  source 1..1311: mol_type = other RNA
atgggtgacctattcggaggtcctcagggcgtttcccatccccgcagatacgattctgcccaagttcggttggcggtgcacgctatcgacaggttacgccgccctgtgacacctgacagatcagccgaggtatggaccagccgcgagattaatggagccctggttactgtgctcgacccagtagtggctgatgacgtcactcgactgttagtgacggcattcgctgcacccccccatcgcgatgacttggccgcttttctggccgcaatccccgcagacagaaccgtgcgagtggccgagcccgtagtttctcaccccgtgttcgccgtccggcctatcgacgatgtcaccgcactggcccactggctcgctatgtccgttactgaacttgattggtttgccgcccgtggcaggtggtcaagacgtgcaaaaccacagcttcggcattatagagtgcaacggctgcccaagagggatgggggcttcaggattattgaagccccgaaggagaggctggccacagctcagaggcgaatcctggacgagattctgagcgccgtgcctccacatccagcggcacatggatttgtgaggggccgcagtgtgcagagctacgcgagcacacacgctctgcatgataccgttgtgagagtagacttgcggagatgttttgaacacgtcacatacccgagagtccgggccgtgttcgctgcaatagggtacgcccccgcagtggcagcctaccttgctagtctgtgcaccacgacaattgcgattgatgatgaaaaactcgtcgatccaatacacgctgccttactgcgggagagacatttaccacagggcgcccctacctctccagctctgctcaacctcgtgctcaggcgcatcgactttcggatcgcaggctacgcggccaagcaccgtatcgcctatacaaggtatggagatgatctcgctttctctggggatgacctggacgccggaaaacttgtctggtttgttactagggtcgcggcagccgaaggctttgtcgtgcacccttccaaaacccgcatcatgcacgaccaccagagacagcaattgggggggcttgttgtgaaccgaggggtccgcagttccagagccgacttcgatgctctgaaggccttgctgcataacgcaataaggcacggtgctcagtcacagaatcgagacggtcacccggatttccgggctcatgtatatggcaggattggctgggtgtcgactggatcccctgcacggcgtaagcggctacgagacatggctgcgcgcgtggactgggagagctga

SEQ ID NO: 12803 - RNA, 1308 nt, synthetic construct
  source 1..1308: mol_type = other RNA
atgagcgacgatcggacatctccgggcataggggcacggaggagattcgacagtgtgcaagtcgatcggatcgtgatcgctatcgatgagttacttcgatccgtggaggctccccgagtggctgacgtgtggacctctcgtgagattgacggagctcttgtggacgtgctggatcccgtagatgctgatgacctgactcgtgccctactggccgccttccctgcacctcctcgatctggaccagtggctgctttcgtggcggatctgccagcagcccctcgagtcgtcgtgccagagctgagagtctcagctcccgtcttcgaggtgcgccaggttgaggacatcgccgcccttgccggctggctaaatatgagcctggaagaactggaatggttcaccgccagcggtcgacggagtcggagactgaagccagccctgcgccattatagggtgtctcgcattccgaagagggacggtgggtacaggataatcgaagcacctaaagagaggctggctacagctcagaggaagattttagaccagattctgactggattgccaccccatcccgcagcccatgggtttgtgagggggcgtagcatcacatcattcgctgctaagcatgcactccacgacaccgttgtgcgcgttgacttgcgcagatgctttgaacatgttacgtacccccgcgtccgtgcagtgtttgctgccattggatacgcaccagccgtagccgcatatctgggctccctttgtacgacaaccattgccgtggatgatgaagccttggttgacccgcatcatgcagccctactcagggaacgccacctcccccaaggcagtcccacttccccagccttgctcaacctcgttttaagacggctggattttcgggtagccgggtacgccgataaacaccacatcacttataccagatacggcgacgatctggcgttttccggcgatcagatcgagattggtagattgctttggtttgtcgagcgggtggcagctgcagagggcttcgtcgtacacaggaggaagacccggatcatgcacgaccaccagagacagcaactcgccggcctggtcgtaaatcggggagtcagggctggtcgcgcggagtttgacgctctcaaagccctcctgcataacgcgatacgagatggagcgcacagccagaaccgggaacgtcaccctgacttcagggcccacgtttatgggagaatagactggctgtcgacaggctcacctcagagacgcgagagacttcgcactatggccgcacaggtggcgtgggatagatga

SEQ ID NO: 12804 - RNA, 2592 nt, synthetic construct
  source 1..2592: mol_type = other RNA
atggaacagtggatcacgacttccgaagctgccgccagactaggcgtgaaacggggcaccttgtactcctacgtatctcgaggggtgctcacttcaaggcgcatgcccgggcagaacgaatccttgtttgaccgaacacagatagattcactggccgctgccaagcacgacggaagacgttcgggggataggctgcttcggttccgggctgtggctagcggagtgtccgcaattagggacgaccggttgtacctccgcggtagggacatcgaggagctgtgcgccgatatggatttcgccgatgtcgcccagctggttctcgacagcagtgaggcgaggcctgtccccgacgttgacacgaccgtggttcacggcgtgtccatcgagaggcggatcccccttacagtcgcactagtggcagccgctgaccctctcagggccgatcttagcgacgtgggcgccagagtcctgggtctactcccacatctggcagcggccgtgcctgaaattgattttgcccatagatgggtggatctgctagccaccgttctgatcgataacggcctcgctgcgtctaccactgcagcacgcgtagccgcttctgcaagggcgggaatcttcgacgcactactggccggttacgccgcacttgctggtcccctccatggaggagctcctgcgacagcacgcgcccttctggatgctgttgtagggggtgctgctgttgaccgtgccctggcagatgcagtggtgggaggcctcgtgcccggatttggccacgtgatatattcagggcccgaccctagggctcagattgttcttgatagagtgcgcgcggagcgtccaaggagttcagccttagccgcggcagaagcagtcgaacagcgggtcggcagaccaatgaatatcgacttcgccggcgccgtcgtcactcacgaattagggctgccggctaggtctggggaagtactttttgtgggcagccgacgggcttttagagagcctccgccagctgcttcgtctctctgtggaggaggagtacgcagagggccggcagctctcgctcgtcaaagcgacggcctgtcttgtagcgctgctgccgtgaggacactgtcgtctcgcagatcacctcggaccaccacccgccatctgatcgggggagcttccggagcgttcaccgttggccccagaagtcgcgctcaggctgcccattctgtttgttgggtgagagcggacgacgataagagcggtcggactgtcttacccgccgcggagagggaggatgtcatcgaaccagggatgagatccccattccgcttcgaccaacaccgagtgcaccgagcagtcggcgctgtagtcgggttgttgggggcagcagccggtgatgatgccggtgatgatgccggctcacttcgcacagcccccgaattggacggcgccttagttgcagtcatcgaccccgtcgatgccgacgaccttgcacaggccctgattcgagaattcgcctcccccccgagttccgagagactgacggcctttatagcggccattcccgcagccccgcgagtaagatggcctgagccaaggactagtgcccctagattcgacgtcaggcaagtggctgacgtcgaggccttagcccactggctcaatctggatttgggtgagctggaatggttcgcggcacgcggacgttggtctagacgcacagccgagccactcaggcactatagagtgaaacggattgttaagagggacggcggatttcggatcattgaggctccaaaagagaggctggctactgtgcaacggaaagtgctagatgaaattctggtacatgttcccccacacccttccgctcatggctttatgcgaggacgtagcgtggaatctttcggctcacggcatgcacttcacgacgtagtcgtgcgagttgacctgagaagatgtttcgagcacgtgacataccctcgagtcaaggccgtattcagtgcaatcgggtatgcaccagctgtcgccagctatctggcctgcctgtgcaccacgtccagagctattgaagaccggcaccgcgtggactttgaccacgccgtgctcttgcgcgagcgtcatctgccacagggagcacccacatccccagcattgctgaacttggtcctgagaaggctcgattacagagtggctggctatgccgcgaggcatggcgtgacctacacccgttatggggatgatctggcgtttagcggagacgatgtggacgtgggggggctcttatggttcatagagcgggtggtgaaggccgagggctttgctgtccatcgggacaaagttcgcgtgatgcgagatcaccaacggcagcagctgggcggtcttgtggtgaatcgcgggcctaggagctgccgcagtgactacgatgcactgaaggccctgctgcacaatgccatccgggacggcgcagagagtcagaaccgcgatgataggcctgattttcggtcatacgtttatgggcggattggatgggtgagcactggtagcgccagacgaggcgagaagctccggacaatggccgctcaggtggactggcacaggtga

SEQ ID NO: 12805 - RNA, 1299 nt, synthetic construct
  source 1..1299: mol_type = other RNA
atgggggcagggttgagcagaccacgccgctttactgcaagggagactgccatgatggcaggcgctgtggcacagcgccttatgcgcgttagaggttccgacttgggcccagagtggactcggcctgaattaacagacctgctgatgcgggtggtgagtcccgcagacgcggaagaagtggctcgcgctatcctggaggccttccctgcacctccagccgatcccagagaggcgatcagagagctgatcgatgccatgtgcgacggaccattccgattcgtggctgatcccgatgtgtcgacccccgtgttcgatgtcaagcggattgctgacgtagaagccctggccgcctggcaaaacatgtccctccccgaactagactggttcgctgccaggggaagaagaagcaaacggctgcccgaaagactccgacattatcgggtctggcggataccaaaagcacacgggggcttcaggattattgaggcgccgaaagagaggcttgccacagcccagaggcgcattctggacgatgtcttagctgctgttcccccccatccagctgcccacggatttgttaggggtcgatctgcagtcagctttgccggcccgcattccctccacgacaccgtagtgcgtatcgatctgaagcattgtttcgagcacgcaaactacagacgcgtcaaggccgtgtttactgctatcggctatacccctggcgtgtgtgaatacctggccgcgctttgcaccacaacgtgcgctatagatgacgcagcccagctcgatcctttccacgctgcactcctgcgagaacggcacctcccacaaggagccccaacgtcacctgccttgctaaacctgattttgagacgcatggacatcaggatagccggctttgccgagaaaaatcgactcacatatactcggtatggagacgaccttgctttatctggtgatgacatcgaccctaaactggtcacctgggtggtcagtagcattgtgcacgatgagggcttcagggttcatcccgataagcttagggtcatgggtgatcaccaacggcagcagctggccgggttggttgtaaatgctgggcctagagcacggaggaccgactttgacgccctgaaggccctgctgcataatgctgtgcgagatggcggggagtctcagaaccgtgagggaaggggggactttcggggatacgtttacggtcgtatcgggtgggtgtcaacaggctcaccgacccgtagacgcaagctaatggcgctcgcagcgcaggtagattggtccgtgtga

SEQ ID NO: 12806 - RNA, 1302 nt, synthetic construct
  source 1..1302: mol_type = other RNA
atgacaggacagggcctcgagcccccacaaaggtttaccggacatgacgccaacgccatggggtttgcggtcagcagaaggatgatgaggctgaggcctgctgaacgcgcggatgcctggacatggctaaccctgcaggagatgttcgcagacacagtgtggcctgacgatgccgatgagatcgctcaggctgtattggccgtgtatcccgaaccgcctagccggattcaggaagcgctgactgccgtgattgtcgccatgcccggaaggagagagccctttgcagccgacccaggcagtagttctcccgtcttcgatgtgcggcagatcgcagacgtggaagaactcgcagcctggcagaatttatcaatgcccgagctagactggttcgccgccagaggcagaggatcacggagagcccctacaaggcttcggcactatcgcgtgtggcagataccgaagagacacggggggctgagaataattgaggcccctaaggagcgtcttgcgacgattcagcggcggatcctggatgatgtgctcgcccatgtgcccccacatcctgctgcccatggctttgttcgcggccggtccgtcacttctttcgccggtcctcacgctctgcatgacgtcgtgctgcgtattgacctgaggcactgctttgaacacgtaacctatccacgcgttaaagctgttttcaccgctatcggctatcagccgggtgtcgcggcctaccttaccgctctatgtactactacgattgctgtggatgaccagagattgaccgattccctccacgccgcattgttacgagaacgacacctgccacaaggcgcacctacttcaccagcattgcttaacttagtgctcaggcgaacagacatccgaattgcaggtttcgctgcagctaataggctgacgtacacacgctacggggatgatctcgcactttcgggagatgacgtagacgtgggacgtgtcctctgggccgttagctccatcatacgcgacgaaggctttaccgtacacccagacaaagtgcgggtgatgggggagcatcagcgacaacagctgaccggtctggtggttaatgccggcccccgtgcagcaagagcggattacgatgccctgaaagccttgctgcacaacgctatcagggacgggggccaatctcaaaaccgcgctgggcgggatgacttccgggcttacgtttacggaaggatcggttgggtgtccacagggagccaggcacgcagaagaaagctgactgagatggctgcccgagtcgactgggagcgctga

SEQ ID NO: 12807 - RNA, 1302 nt, synthetic construct
  source 1..1302: mol_type = other RNA
atggtcgggaagcaaaccgcagcccaacccgaccggtttagtcgcaacgatatccacaggatgagtgcggtcataagaaggttgctgggacctcctctcgatgatggctacgctgaacgggtttggactcgcagagagctgaacggcgccctggtcactgctgttgaccctgttgacgcggaagaggtggccagggagctgctgatgcgatacccaacaccaccaccgttgcccggcattgccgatgccgttcggagagtggtcgccgtcttgactgctcctgtgatccgcgaaccagtgggccccccaagattcggactccctgaaataggtgatgtcggcgcccttgcctcctggctgaatgtctcggttgacgagctcgactggttcgccgatcatgggctgtggcttcagagggctactccgaggttgagacattatcgcgtaacacgaattccaaagcgtcactctggatttcgcgtgattgaggcccccaaggagagacttgcaacattacagcgcaggattctggacgctatcctcgctgacgtgcctgcccatccagcagcccatgggtttgtgcgcggacgttccccgtactcattcgccgctccccacagcttgcacgacaccgtcattcgggtggacttaaaacactgcttcgagcacatcaccgcggctcaagtgcgggctgtgtttacggctgttggctacagatctgcaacagcacggtgcctggcagagatatgtaccacagcaacagcgttcgatgatctgcccggtgacgaccctttccacgctggattgctcaggggccgacacgtccctcaaggagcacccacctcacccgccctggtgaatctcgcccttcgtaggctcgactttcggatcgcgggctatgctgcaaagaatggactggcctacaccagatatggtgatgacctcgcgctatccggggatgagatgaatgtggggcagctgctgtgggtagtgcggaacgtcatcgtagacgaagggttcactctgcatccagagaaagtgagagtaatgggagatcaccagcggcaacagctggccggcttagtggtgaatgtgggtccccgaagcaggaggagcgatttcgatgaactaaaagccctgctacataacgctacctgtacgggtgcccgggcacaaaacagaggcgctcatgccgattttcgagcccacgtgtatggccgcatcggttgggttgcaaccgggtctgcagcacgtcgacgcaagcttctcgcccttgctgccgaagtagactgggacgggtga

SEQ ID NO: 12808 - RNA, 1272 nt, synthetic construct
  source 1..1272: mol_type = other RNA
atgacggcaggcctccggagcgaacagaggtttagtgccgacagagccgcatcgttggctaactggatcctggaagatagggacttgctgtgggatagctgggctgtgtctgccagactatcttggcagctgcctcctgagattgcggacgaggtggccgatgccattctagtggcgctgccagaacaacccagcgcaccggaagtgctcgccgaattcctggcagccattccgtctgagcctgtgattatcatccccagtgagcctaacccacctgtggttgccgccgggttgcctgtgatcactgacgtaggcgagcttgccgcgtccctaaatctggacattggcgaactggaatggtttgctgaccgcggcacctggttacgtacagctagagtccccttgaggcattacaggataactcggataccaaaacgcgatggagtacggatcattgaggctccaaagccgcggctggccgagatccagagaaaaatcctgaggaggatccttgaccatagagatccccaccccgctgcttgtggtttcagaagggggaaatccgtggcacacttcgcatggccccacactgaccgacctgtcgttcttagactcgatctgcgacactgctttacaaccatcggtaccgctcgcgtaaggcgggtcttcgccgattgcggctactccccagccgtctcacgcgtactcgccgaactcagcacaaccacgacctcatccgacgccttgggagatttagacccatggctggccgcaatgctgagagcccgtcacttgccccagggagcacccacaagtccagcacttgctaatctggtgatgattcgcctggaccgtaggctggcaggatacgcccgaaggcacgctctccgctatactcggtatggtgatgatttagcgttctccggcgatgccatggatgccgatcgggtcctttgggctgttctgcgcatagtggcagcagagcggtttgtggtgcatcctgacaagactagaataatgggtcggcaccagcgccaacaactggctgggctcgtggtcaatgaccatccccaggttcctcgagcggagttcgacgccctcaaggctctgctgcacaacgccatcaccaccggggcttctacacagaatcatgcaggccatccagactttagagcacacatctatgggcgtattgcttgggttggagcgacaaacgcttcacgacgcgagcggctccttgccttagccgatcaggtcgactggagcgcgtga

SEQ ID NO: 12809 - RNA, 1254 nt, synthetic construct
  source 1..1254: mol_type = other RNA
atgcgccggtaccccagatccaccgctgaaatgctcgccgccattgtcgacgccgctgatcccgaatggacacgcgagggcctagccgacgccttatcagcacacaggcgggggctggatgatgcccaagccgatgcagtcgcgggccatctcctcgttgccttccctcgacaacccccagacagaagggacgccatcgccggacgtatagtggagctggccatgccacctatgcgggagcgacctgcgttgcgcgagttgtgggatggattaccccgctatacagactactatgcgctggccgccgcgtacgatatgactgtaccagagctggactggctcgcagaccgcggtacatggctgaggtctaggacgggtccgcttcagcactaccgggtgactccaatccctaaaaggagaggggcccgtgttctggagatccccaagccccggctgagagagacacagagacgaattttgagaagggttctggaccggcttccccctcacccagctgctcaaggcttcgtggctggaacaagcccagccacctttagctcaccacacgcaggccgtcccgtagtgatacgcatcgatttgaggagatgcttcgagactattactgttgctagagttcgtgcggtgtttgccgcagtcggttatccaccggctgtagcacgggccctagctgacctctgcactactaccacccctgcagagagacttgtcggcgtggaccctgtgcacgccgcaatccttcggtccagacatttaccccagggcgccccgacatctcctgcactagctaaccttgtcatgcggaccctcgataggcgtattaccgggtacgctcaccgacacggcctggtctacacgaggtatggggacgatatggcactgtccggaaccattgatgatccttctgcagtggtgtgggtggtgaggcagatcgtggccgacgaagggtttacggtgcatggtgataagactagaatcatgtatgcgcatcagcagcagcggctcaccggcttggtgataaacgacaggccccgcgtctgtcggagcgaatacgacgatctgcgcgccctgctgcacaatgctatcagaacaggagctcgagctcagaatcgcgacgatgtaggagacttcgaagctcatgtgcgggggcgcattgcatgggttggcgctaccagtccagccaggaggcagaaactgctggaaatggcaagtcgagtcgactggagctcggattga

SEQ ID NO: 12810 - RNA, 1284 nt, synthetic construct
  source 1..1284: mol_type = other RNA
atgacaggcgattacctttacagtcccgattgggcgagactgcttgcagacctggtggtggctgctcgggcacgatggaggaggagtgaccttgctgctgccatggcagaagtgttggacgacgcagaagcagatgggaccgcgcacaggatcctgcaggccttcccaagagagcccgtggacgttcgggccacattagctggctacctggtggagctgcgcagtgtgtcagaaccgctcagcgagccccaaaccggcgcattgctggctgctagtgcgcgtaccccagtgctgtgggcaggtctacccgtgctgaacactcctgccgagctggccagcttcctggacctcactattggggaactagactggtttgcagatcatgggaactggttgcgttcacatcgcggtccgctgcagcactatcgtcaacgacgaatcgccaaaaggtctgggctccgactcctggaaattcccaagcctcggttaagggaaatccagcggaaacttctgcgaacgctcgtttcggtcattgaaccacatcctgccgcgcatggatttcgccctggacgcgatgcaagatcattcgccgctccacacgcaggtgggcctatagtgttgagagttgatttgcgggatttctttgcctctgttcccggagctaggatccgggcggtgtttgtcgcagtgggatacccacccccaatcgccgccttactggctgatctgtgcaccacagctactcccatagccgccctgtgtgggctggatcccgccattgccggccttctacggggaaggcacctaccacaaggagcctcaacttccccagcgctcagcaacctcgtcctccgcaatacggatagaagaattgccggctatgtagcaagacacggcttgcgttatacaaggtatgccgacgacctcgctgtgagcggctctggatttgatcctgccgccgtaagatgggtcatcgagaagattgtcactgacgagggattccgcttgcatccggacaagacctctgtcatgcgcagccaccagagacagcggctggcttccctggtaatcaacacccggcctcaggtaaatcggagcgagtacgacgcccttcgggcccttctgcacaacgctgcttccacaggtgcagcggctcagaatagggggggccatgagcacttcagggagcacgtttttggcagaatagggtgggccggtgcctccaatcctgacaggcgcagagtcctgttaggcctcgcagagcgagtggattggtcccgctga

SEQ ID NO: 12811 - RNA, 1266 nt, synthetic construct
  source 1..1266: mol_type = other RNA
atggcggattgggcctttgactccggaacagccgccagacttgcgcgcgttgtagtggagtcgcgaacttcttggcgcgctgctgatgtggctgaagccctcactcagctgctgcccccagaacaggccgaagagctggcagcgcgcatgttggcagccatgcctagtccgccagtcgatgtcggtcccgccgttactggctacttggccggacttcgtcggcaagatgcccctgccaccattgcctttgaggtccggaccgctgagctttgggcagggcttactcccctggctgatcccgctgctctcgctcgtttgttggacataacagtcggtgagttggagtttttcgcagaccggcgaggctggctgcggacaaaaccgaccgcactgcagcattacaggtatcgaaccctgcccaagcagtctggactgagagtgctcgaaatcccgaagcctaggctacgggagctccaacggcgggtactgcgtcattgcgtagcccctattccaccacacccagcggctcacggtttcgttcctgggcgcagcgtgcataccttcgccgaaccccatacagggagccgcgttgtgatcagggtggatctgcgggacttttttttaactgtggctcgcccacagatcgaggccaccttccataccgtaggctatccccctgcagtgggtgaagtcctggctgccttatgcacaaccgcgacggctcccgctgcgtttgcaggaattgatagtgctaccgccgctcgactgaggaggcctcacctacctcaaggggcccctacaagtcccgccctcagcaatctggcaatgtttgaagtggataggcgccttgccgccttcgcaggaagacacgggctgtcctacacgagatatgccgacgacctggccttctccacagggttaggcgagccggcaatcgcagtgagcgctgtcctggctgtgactagaaaggtggttgcggctgccggccacagactacacccaaggaaagtgcttgtgagacgagcccagcagcgacagcagttgactggcctggtcgtgaaccggacgccacaacctcccagggccgagtttgataccctccgggcaatcctgtacaactgtgcccgtttcggcccagagtcacagaatagagacgacttagctgacttcaggggccacctcctcggcagaatgcagtgggttgcatcaggatctgcaacaaggcgccgcgccctcgcagaactgttcgacagaatagcatggtga

SEQ ID NO: 12812 - RNA, 1278 nt, synthetic construct
  source 1..1278: mol_type = other RNA
atgactgtggtggaggtggctcggcgagttccgagaagctggcgccatgcagtggccgacagggttgtgctcctcacagaggagatgtggacggccgaaaccattgcgtcactggtgagaggcaccgttcccgatgaactcgtcggtcctgtcgtggaagcattgctgtctggccacccacaacctccagtccaggtcgtggatggacacgttcgtcggccaaggaccgcaccccttgtagcagcccttgacgccgtaaggatcgtggagactctagactctggaggccccgtagacgttcctgggttggctctgcctgacgtggcatccatagctagaatgctcgatctgactgttccggaactggagtggtttgctgaccatggcaggtggttgcgacatgcacgcccccctctacgccattatagggttgccaggatggtgaagccagccggcggctttcgggtgattgaggcacctaagcctagactggctgaggctcagagacggatcctccttcgggttctggatcctgccggtgctcatcctgctgctagagggttccgaccagggggatcggtgttggcctatgcctccccacacgtgggctccctttctgtcgtccgcctggacctaagggattgtttcagtaccgtggctgtcccacgtgtgcggagcgtgttccggagacttggatacccagcccccgtagccacagtgttggccgatctctgcactgtagccacacccgctgacgagttgcgcggattagatccctggcgggccgctacgttacgttccaggcacttaccgcagggagccccctcatcacccgccttagtgaatctggccctccaccgcctggatgcgagactgacaggccttgcgcacgcacagggggctaggtataccagatacggtgacgaccttgcctttagcggcgcacgagatcctgcactgatcgcgggcgtagcgccgaaaatagtcgctgccgaaggactgagcgtgaacccccggaaaacacgcattatgcgtgctggtgcacgacaggaactggccggtgtggtcgtcaatgcacgggctcaagtcccacgggcagaatacgacgatctcagagccctgctgcacaatgcggcaaggagtgggggggagagtcagaaccgagatgggcaccccgactttagggccttcgtttacgggaggatcgcctgggtggcccagggaaacgagcaaagaagactccgattgctggcgatggccgctcgtgtccgttggtga

SEQ ID NO: 12813 - RNA, 1278 nt, synthetic construct
  source 1..1278: mol_type = other RNA
atgactgccgttgagatcgtgaggggcctgccaagagcacagcgctatgccgtggctggtcgcgtggtgtccctaacagaagatctgtgggccgccgatgtgattgcccccctgattagaggcgccgtgccagatgagttggttgatgccgctgtgcaggccctgttagctggccatcccgagcctccggtgcgttttgtggacggcgatgtcctgcagtcaggacctggaccactggttgcggccctcgacggtgttagaatagtagttgccttagagcccgctggtcctggcgacgtaccaggactcgccctgcctgatgtggctgcggtgacgagacttctggacctcaccgtgcctgagctcgaatggttcgcagatcacggaatgtggcttcggcatgcccgaccccccttaaggcactatcgggtgtctcgaatggacaaaccggccggaggcattcgtatgatcgaggctccaaagcccaggttggccgaagcacagcgacggatcttgcggcgcgtcttagaccccgctggagctcatcctgctgctagggggttcagaccggggggatcggtacttgcctacgctgccccccacgtcggagctagaagtgtcgtcaggctggacctgcgcgattgcttctccaccgtgacagtcccacgggtacgcaatgtgttcagacgacttgggtattccgcacctgtggcaggcgtcctagcagacctgtgtactgtgtctacaccagccgatgaactgcacgggctagacccatggcaagccgcgacaatgaggagccggcatctgccccaaggagcacctacctctcccgccctggtaaaccttgctctccaccggcttgatgcccgtctcaccggcttggcacgcgcacaaggggctagatacactcggtacggggatgacctggccttttcaggcgccctggaccctgctctcattgcagccgtggtgccgaaaatcgttgcagctgagggcctcagtgttaaccctagaaagacccgaatcatgcgagctggtgccaggcaggaattggcgggtttggttgtcaacgcccgggcccagatcccaaggagcgagtacgacgcgctgagggcactgctccataatgcagcgcgcagcgggggggaaattcagaatcgcgacgggcacgacgactttcgcgcacacgtctatggcagaatagcatgggtggcccagggcaacgatgctagacgtgagcggctgctcgctatggcggcaagggtcaggtggtga

SEQ ID NO: 12814 - RNA, 1278 nt, synthetic construct
  source 1..1278: mol_type = other RNA
atgtcggccgtcgagattagccgcaggttaccccgggcatggcgctatgcaatcgccgaccgtgtagaaatgttcactgaggagatgtggaccgcagatagagtggctgtagcaattagaggcatcgttcctggcgaactggtgcccacagtggcgagagaactattggctgcccatcccgcaccccctcttgctattatagatggaacacctgttgcgccagacagggacgcaattgtagtggccctcgatacagtgagaaccgtcgagcgcttgggggctagagcacctctcgaagtacccggagtcgctctcccggatgttgccgctgtcgcaaggatgctggacgtcaccgcgcctgagttggagtggttcgtggatcacgggcagtggctgaggcacgctactggaccactaaggcattatcgggtgcgacggatggctaagccatctgggggcgtccgtgtgatcgaggccccaaaaccaagacttgccgaagcccagcggcggatccttcaccgagtgcttgatcctgccggagcccatccagccgcatgtggatttagacccggtggttccgtccttgcctatgccgccccacatgttggggccagatccgttgtgcggctggacctgcgcgattgcttctcaacggtgaccgtggatcgcgtgcggggagcttttcgtcgtctcggttaccccgtcccagtcgctgggctcttagccgacttgtgcaccacctctactgcggtagacgaactgcgcggcttggacccttggcaggctgcagtcctgcggtcaaggcatttaccgcagggcgcccccacgtctcctgctttagtgaacctggtgctgaggggactagacgctcggctgactggcctcgctagagctcaaggcgcgaggtactcccgatacggcgatgacctggcctttagtaatgcccgcgatgcagccctcatcgcgggtgttgtgccgaagatcgttgccgccgagaagctgagtgtaaacccccgcaaaacacgaattatgcgaagcggtgatcggcaggaactcgcaggggtggtggtcaatgctcgtgcgcaggttcctcgagcagagtacgacgcactgagggccctgctgcacaatgctgcacggtttggacccgagagccagaacagagacggccacgaagatttcagggcccacgtgtatggcaggatagcctgggtggcccaagggaacgacgcaagacgggagcgcctgagagctatggccgagagggtgcgctggtga

SEQ ID NO: 12815 - RNA, 1278 nt, synthetic construct
  source 1..1278: mol_type = other RNA
atgactggcgtcgaattgagccgtagactgcctagggcctggcgatacgccatcgcggatagagtggagttcttcaccgctgcccagtggactgaggaatttgtcgctgcggctgtggccgacctagtgccagtggaccacgccgttcctgttgcgcgcacgttattggccgaacatcccgccccccccctctctattgtcgacgacctgcctgtcgctgctgaccgcaatgccttattgtctgcattggaggctcaccggactgtgcagctgctggaatccaaggggtccggcacacctcctggcatagccctaccggatgtgggatcgatcgctcgcatgctcgatctgaccatcccagagctggaatggttcgccgatcacggacagtggctcaggcatgctgggaggcccttgaggcattaccgggtccggaggattgcaaaaccagccggcggagttcgggtcatcgaggctccaaagcccagacttgccgaagcacagaggcgtatcctgaggagagtgcttgacgatgccggtgcacaccctgctgctaggggctttcggccaggaggcagtgtcctcgcctatgcggcccctcatgtgggtacgcgttccgttgtgagacttgatctgcgcgattgttttcccaccgtcacagctccgagagtacgcgccgcctttcggaggctagggcatcctgcaccagtggccgctgtgctggcagacctgtgcaccgtagctacacccggtgacgagcttagagggctggatccctggcaggctgcagccttacgcggtcgacatcttccacagggagctcccactagccctgcactggtgaacctggtactgcggcgccttgacgcccgattaaccggactcgcgcggtcacaaggcgccagatacacacggtacggcgatgacctggcctttagtggagccctggactccagtctcattgcgggggtggttccaaagatcgtggctagcgaggggttgtctgttaaccccaggaaaacccggataatgcgtgcaggcgctcgacaagagctggcaggcgtcgtggtgaatgcaagagcacagacaccgaggggggagtatgacgatctcagagccctgctccacaacgcagcccgattcggagccgcaagccaaaaccgcgacggccacccagatttccgggctcacgtatatggtagaattgcatgggttgcccaggggaatgagcaccgcagggaacgcctcctgtcaatggcggcacgagtgcactggtga

SEQ ID NO: 12816 - RNA, 1281 nt, synthetic construct
  source 1..1281: mol_type = other RNA
atgacaagcgtggaggtcactcggagactccagagagcccaacgctacacaatcgccgcacgggtggaatggtttactcctactcagtggaccgtggatcgagtcgcaggggccatctcaggagtagtccccgcagatgaagccagtgcggttgcagctgccctcatcgccgcacatccaagagccccactggacccacaggatgacggaccaccagtcctagccaaccccgctgccctggttgcagcattggacgggtataggacggtggagctgctcgaacctgacggccctctcgacgtaccagggcttgccctacccgatctgagcgctgtggcacgcatgctagatctgaccgctcccgagttggagtggtgcgctgacccaggcggatggctgagacactcatcgaaacccttgcgccactatcgcgtgaggcgtattcctaaacctgcgggcggcgtgagggttattgaggcaccaaagccccggttagcagaggcccagcaccgtgtgctgagaagggttctggacccagccggtgctcatcctgctgccagaggattcagacccggcgggagcgtgctggcatatgctagcccccatgtgggggccagtagcgtcgtgaggctggatctgcgcgactgcttttccaccgttaccgtctcccgggtacgggacgtgttccggaggatgggttaccctgcccctgtcgcaagagtgctcgctgatctttgtacagtcgccacgcctggtgacgaactgagggggcttgatccgtggcaagcggcggtgttacgatctaggcatcttcctcagggagcccccagctccccagcacttgttaacctggtcctgcggaggcttgattccaggctcactggcctggctcaatctcagggtgcccggtacacacgatacggcgacgacttagccttctctaaaccgagagatccctccctcattgccggagtggtgccgaagatcgtggctgccgagggtttcagtgtgaactctacaaagaccagagtaatgcgcgccggaagtcggcaagaattggcgggcgtcgttgtaaacgctcgcgcacaggtgccccgtgccgaatatgatgctctccgagcgctgctccacaatgccgctcgatttggagctgagtcacagaatcgggacggccactctgattttagggctcacgtgtacgggcgtatagcttgggtcgggcagggcaatgaatcacggagagagcgcttgctgaccatggccgctcgcgttcgatggtga

SEQ ID NO: 12817 - RNA, 1278 nt, synthetic construct
  source 1..1278: mol_type = other RNA
atgaccgcggtggaagtaagccgcagattaccccgcggtacgctgtatgcgatcgccgctcggctcgagtggttcaccgctagccagtggactggagagtttgtcgctgccgctatcggcgatctggtatccactgatctggcgggacctgtcgctcgcttcctcatcgccgcacatcccgacgcaccgttacggattgtggacgaccgccctgtacgggcagatttgggcgctctgagagccgctctggatggcttccgcactgttgacctgctggacgcacccggcgtgttagatgtcccaggcagggcacttcccgatagtgccgcggttgcccgtatgcttgacctgacagcgccggagttggagtggtttgccgaccatggccagtggctgcggcattctgcagctccactgaggcactacagggtgaggcgaatggataaaccagccgggggcgtccgagttatagaagcccccaaaccacgtcttgccgaggcccaacggaggatcctgcgtcacgtgctcgaccctgctggtgctcaccctgctgccagagggttcagaccaggagggtctgtactagcttatgcaacccctcatgttggggcccgctcagtcgtccggttggatctcagggattgtttttccaccgtgacagcccctagagtgcgggcagttttcagaaggctagggtacccagcaccggtcgccagagtgcttgccgacgtgtgcacaacggccacaccaggtgacgaactccgggatctcgatccttggcaggcagcagtgctgcgcgctaggcacttgcctcaaggagcccccacctcacccgcactcatgaacctggtgctgcatcgcctagacgcccggttgacaggactggctagggcgcacggtgccatgtacactcggtatggcgacgatttggcctttagcggggctcctgaccccatgctcattgcaggcatagtgcccaagatcgtggtggctgaggggttttccgtgaacccagcaaagaccagagtgatgcgcgccggcactcgtcaagaacttgccggcgttgtggtgaataccagggcccaggtcagtagggacgagtatgatgacctccgagctcttctgcacaatgcggcgcgattcggtgccgagtcgcagaaccgggaaggaagagcagactttagagcatacgtatacgggagaattgcttgggtcggacagggatctgagcgacgcagagaaaggctgctggccatggccgccgctgttcgatggtga

SEQ ID NO: 12818 - RNA, 1248 nt, synthetic construct
  source 1..1248: mol_type = other RNA
atgcctgcggtggaaattgcgcgcgcattggccagagcccaactgaggcaggcaatccgcatagctgtgcagttgcatcccgaagagtggaatcgggtcgagctagctgctgacctgggcgctgtgttacccgccgagctagccgaagaggttgctcgcttcgtcatagcgtcggcacctaccaaacctcgaggtgccatcctggccaatctgctgcaagacttcagggtcgaaagtttgctggagccggaaccagcacgggagacacctgaccggccacttgtcgatctcgccgctgtcgcagcaatgctcgacgtaactgtcccagagctggagtggttcgctgacacaggctcttggctgaggcactctagtcgtccactcagacactatcgggtgcgaagaatgtctaagcctgctgggggcgtaagggtaatcgaggcaccaaaaccgcgactgtgcgaggcccagcgcagaattttgagacacgtactggacgctgcagctcctcatccagccgctaggggctttctccccggtggtagcgttctgcggtatgccgaaccccatgttggagcggggagcgtgattcggctggacctcaaagactgttttaccaccgttggcgcatcacgggtcagggcagtgttccacagattagggtatcccaacgctgtggcgcgagtcctcgcagcactctgcaccactgaaacgcccgccgatgaacttcacggcctggatgcctggcaggccgctacactcaggtttcgccacctgcctcagggagctcctacgtccccgacattgatgaacctctcactgaggcagctggattcccggcttaccggacttgcccgcgctcaaggagcaaggtacactcggtacggggacgatctggcatttagcggcgccccagatgcttcccttattgccggcgtggttcccaagatcgtggcggcagaaggcttcgccgtgaacccacgcaagactcggatcatgcgtcgcgggtcccgacaagagttagctggattagtggtgaacgacagagcccaggtgcctcggcacgagtacgatgccctaagggcgctgctgcataacgccgccagatttgggcccgccagccagaatcgtgatggacatgacgatttcagagggcacgtgtacggcaggatcgcctgggtgggacagggtaatagagaacgtagagagcgccttctcgccttggccgaacgagttccctgggagtga

SEQ ID NO: 12819 - RNA, 1245 nt, synthetic construct
  source 1..1245: mol_type = other RNA
atgccttcggtggacctgtcccgcccactgacaagggcgcagcaagctcagtctgccctgctggtaggacggattgacccggccgagtggaatcgcattgagctggccgctgaccttggcgctgcactacctgctgagttggcggaggaggtggccctatttgttacggaagccgcacctaccaaacctcacccggctgtcatcaggcgattactgcagacttatcgggtcgattcagcccttgaacctgaagcagggggcgctgtgcccggaagagtactggctgatctcgatgggctcgcagcaatgctcgacctcacagttccggagctcgattggtttgccgacacgggccgctggcttagacattctgccgccccactgaggcactaccgcgtcagaagaatgcctaagaccgctggcggggtgagagttatcgaagccccaaaaccaagattgagggaggctcagcgccggatactgcgacatgtgctggaccccgcagcaccacatcctgcagctcgaggtttcgtgcggggagggagcgtgctacactacgccgaagcccatgtcggcagtgcggctgttgtacgtctggatctgaaggattgcttcacaaccgtgggagagaatagggttagggccgtcttccgccaactgggataccccgcgccagtagcccggattttggcagccctctgtactaccgctactgccggtgacgagttgaggggattgggggcctggcaagctgccacactgagagcccgtcacctgcctcaaggtgcacccaccagcccagcgctgatgaacttagcgttgcgacgtcttgattccagggttgccgggttagctcgggcacagggtgctcactatacccgctacggcgacgacctcgcactgtctggagccagggacccctccgtcatagcagccgtggtccccaaaatcgtgagaagcgaggggttttcagtgaaccctaggaagactcgtatcatgcggagcggcacaagacaggaactcgctggggtcgtggtgaacgccagagctcagccacccagacgcgcatatgatgatctccgcgcgcttcttcacaatgcagcacgatttggccccgatagtcagaaccatgatggccacgacgacttccgggcccacgtgtatggtcggattgcctgggtggctcagggcaatcccactaggcgggaacggttactggccatggccgctcgagtgccctggtga

SEQ ID NO: 12820 - RNA, 1245 nt, synthetic construct
  source 1..1245: mol_type = other RNA
atgaccgaacgcccagcgcttccccccgagtttgctcgaagactggccgcagctgccattgacggcacttggacacgggccggcctagtgcttcgctttgaggagtcaggggttccagacgctgctaggatcgccgcgcgtctgcatgatctgatgcccacacctcctatcgatggcatcgattctgtcttccgtctcctctcggacttaccactgatagagcgcgccgaacccatagtggacgaggtttctggaaacgattggcgcttcgacgtgccacagtggtctagaacagcagcagtggccgaagccgtagggctgaccagcgctgaactagactggttcgcagacccgggtggttggctgagaacaaaggcgcctccactccagcactatcgctacagaattaggcccgataatcgcctgttggaggcccccaaagagcgtctcagggaggtgcagcggaggatcctgaggactgtgctggatagggtccctccacacgctgcagcgcacggattcgtgcggggaagaagcgtgcacaccttcgctggtccccatgccggccatgaagttgtcctccgaattgacttgagagcgttctttcctagtgtgtctaggacgagagtccgggcagtttttgacgcgcttggctatcctacccgagtgagtcgggtgctggccggtttgtgtaccacttccacacccccgggagtcctggcagagcttccttttgatgcagcctcccggctgagaggggctcatcttccgcaaggagccccaactagccctgccttagccaatctcgtggcacacagactcgatcgccgactagccggactggctagagctcaccgggtagcttatacaaggtacgctgacgacctggctttctcaggctcagatctggccgtggataggttaattcatgcagtcggcaggatcgtgactgacgaagggttcgccgtccatcccgggaagaccagagtgatgcgagcacatcgctgccagcacttggccggcctggtagtgaatacgcgcccacaggcttcccgggctgagtatgacgatgtcaaggccttgctctttaactgcgtacggcacgggcccgacagtcaaaaccgggatgggcgacctcactttagggaatacgtctacggccgcatcgcctgggttggagaaagcaacgagtccaggaaacggagcctgcacgcccttgccgcacgtgttgactggaccggctga

SEQ ID NO: 12821 - RNA, 1218 nt, synthetic construct
  source 1..1218: mol_type = other RNA
atggcaagcacgaacgctacacaagcccgagattccggtgagactcctgccagggccgggttaattttaagatttgaagagactggtgcgcccgatgctggaaggttggccactcggctgtatgatttgatgcctacccccccaatcgacggcgtggactctgtgtaccggttgctgagcgagctgccacaaatcgagcagcccgaacctgtagtcgaagtgtccggcaatggttggaagtttgatgtgccccggtggagtcgcacatcatctgttgcggaagctgtgggcctcactcctgccgagctggactggtttgcagatcccggaggatggctgaggatgaaagcgccacccctccagcactaccgctatagaatacgatcagacaatcgcctgctcgaggccccaaaggagaggctcagggaagtgcagcggaggattctcagatccgtcctggatggagtacctccgcatgcggccgcacatggattcgttcgcggacgcagcgtccatacattcgccgcgcctcatgcagggcacgactgtgtgctgcggatcgacctgcgggcattcttcccgtctatttcccagacccgtgtgcgtgcaatcttcgatgcccttggctaccctgcccccgttgctcgagttttggccgggctttgcaccacctccacaccacccggtgtactggctcagataccttttgacgcagccagtagacttcgaggtgcccatctaccccagggggctccaacctcacctgctctggctaatctagttgcccaccgccttgataggcggctgacaggccttgcaagggctcaccactctgggtatacgcgttacgctgacgacctggcattcagcggcagcgatctggctgtggaccgtctcattcaagccgtcggaaggatcgtggcagacgaggggttcagcgtgcacccaggaaagaccagagtcatgcgcgagcatagaagacagcacctggccggcctagtcgtgaacactagaccacagaccgcccgggccgattttgatgacttgaaagctctcctgtttaactgcgtcagatatgggccggagtcacagaaccgcgatggccgaccccacttccgggaatacgtgtacggcagaatcgcctgggtagccgaaagtaacgaaagtcgcaaacggtcgttacacgcactcgcagacagggtgaattgggctggctga

SEQ ID NO: 12822 - RNA, 1251 nt, synthetic construct
  source 1..1251: mol_type = other RNA
atgaccgccggaagagcactgcagcctgagattgcacgcaggctggctgttgaagccactgtcggcgcatggactcgtgccggtctgatcctcagattcgaagaagccggcgagcctgatgccggaaggatagccacccggttgtatgatctcatgccaacaccccctattgatggcgtagatggtgtgtatcggctgctttctgagttaccccagatagagcagccagagacggtggtggaaagcagtgggtcagactggaagtttgacgtcccccggtggagtcatactgccgctgtcgcggaagcagtgggtctgacacctgccgagttggactggttcgccgatccgggaggctggcttcgcaccaaagccactcccctccagcactacaggtacaggatcagaagcgataatcggctgttggaagcccctaaggagcggctccgcgaggtacaacgccgcatcctgcgctctgtgcttgatagggtaccccctcatgctgccgctcatggtttcgtgagaggtcgtagcgtgcatacctttgcggctccccataccgggcacgatgtcgttctccgaattgatctgagagccttctttccatcagtgagccagacccgcgtgagggccgtttttgacgccctggggtacccaacaagagtgtcccgagtactggccggcctttgtaccacatccagcccatccggcgtgttggcacaactgcccttcgacgctgcctcccgactaaggggcgcacacttaccacaaggggctcccacatctccggcccttgcgaatctggttgcgtatcgactcgacagaaggctaactggactggcccggacccacagagctggctacacacggtatgcagacgacctggctttcagtggaacggaacttgctgtggatcggctcattcacgctgtgggcagaatcgtcgcacatgagggcttttcagttcacacagggaaaactcgtatcatgagggcacacagacgacagcatttagcagggctggtcgtgaacacgaggccacaagcggcccgtaccgaatacgatgacctgagggctttgctctttaactgcgcacgctacggacctgactctcagaatcgggacgggcggccgcacttcagagagtatgtctacggacgcatcgcttgggtgggagagtgcaacgcctcccggaagcaatcgctgcacgccctagcggcaagggttgactgggctgaccagcgacgctga

SEQ ID NO: 12823 - RNA, 1242 nt, synthetic construct
  source 1..1242: mol_type = other RNA
atgactggcagaagagccctgtcctcggctgtagctcgccgtttagccgccgtggccacttctgggagttggacgagggcggccattgcacagaggtttgaggagattggcaccccagacgccgatcgaatcgctacaaggctgtttgatctgctacccacccccccagtcgaaggtgtggatagtgtgtaccgcttgctgtccgagctccctcacattgatgaaccggcccccgtggttgagcaaccagaccacgagtggagattcgacgttcctaagtggacgcataccgtcgctgtcgcacaagcggtggggctcacacctgccgagcttgactggttcgccgacccaggcgagtggctacggaataaggccccgaccctgcagcactaccgttataggatccgaagcgatcaccgcctcttggaggctcccaaggagcgtctgcgcgaagttcagcgcagaatcctccggggattgttagatcgggtgccacctcacgctgctgcccatggattcgtgcgcggacggagcgtccacactttcgcagcccctcatgctggtagggacgtggtcgtcaggattgacctgcgggccttctttcccagtatatcccaggccagagtaagagcggtgtttgactcactggggtaccctccacgggttagcagggtgatgacgggactgtgcacaacttccactccccctgacgtactggcaaggcttcccttcgacaccgcatcacggcttagaggcagccatctgcctcaaggcgccccaacctctccagccctggctaatttggttgcataccgattagaccggagactgacaggattggctaggagctctcgggctgaatacacacgctatgcagatgatctggcattctctggcgtggatcttgctgcagaccgcctcataagtgctgtggggcgcatcgccgcagacgaaggattttcagtacacccccgtaaaaccaggataatgagagcccataggcgtcagcatctggcggggcttgtgatcaactcccacgcgcaggctgcccgaaccgaatatgaccagctccgagcactcctatttaatagcctccgcactggcccggatctgcagaacagggatggtagaccctacttccgagaacacgtctatggtagaatcgcctggattggggagtcaaaccctaaccggaaaagagcactgcttgccctcgcggatcggatcgaatggacaggctga

SEQ ID NO: 12824 - RNA, 1230 nt, synthetic construct
  source 1..1230: mol_type = other RNA
atgacagaccaacgagcactcccgcccgttatggcccgtcacttagctgaggttgcagacgccgggccctggactaaatacgccctgacgcagcgattcgaggaagctggggccagggatgctgtgtccattgcccatagattgttcgacctcatgccgtctccgcccatagagggggcggaatcagtctatcggctcctggtagagctccctcgtatagaccgccccgcaccaattgcccctagggtgctgtggaagttcggcgtgcctcaatggagtcagaccgctgctgtagccgaagcagtgggactgacacccacggagctggactggttcgccgaccgtggaggctggctacgcactaaggccccaccactccagcactatcggtatagaacccggggggatcgactgctggaagcaccaaaggagcggttaagagaagtgcagcggaagatcctgagagccgtcctggattccgtgcccactcatccagctgcgcacggattcgtggtgggtagaagcgtgcacacttttgctgccccacacgcgggacgagaagctgtggtgaggattgatctgcgcgcttttttttcaaccatcacacaggctcgcgttcgcgccgtttttggcgctttgggttatcctgaccatgtcgctcgcgtcttggcaggcctgtgtacaacagctacccctgccaaagtgctggcgcctcttcccttcgaatctgccacacgattacgtaccccacacttgccccagggtgcacccactagccctgcattggccaacctcgtttgccataggctggatagaaggcttaccggattggccaggagtcatagagccgcctacagcagatacgcagatgaccttgctttcagtggctctgagctggccgtagaccggcttgtccacgctgttggcctgatcgtcgcagacgagggcttcactgtgcatcctcggaaaaccagaattatgagggcccaccggcagcaacaccttgcaggactcgtagtcaatgaccggcctcaggccgcacggtccgattacgatgatctacgagccctgctatttaactgcgtgagatacggtagccattcgcagaatcgcgacgatcttccacattttagggaacacgtctacggcaggatcgggtggatcggggagtccaacgagacgaggaagcgcaccctcctctcactggcggatcgcgtggactgggcgtga

SEQ ID NO: 12825 - RNA, 1239 nt, synthetic construct
  source 1..1239: mol_type = other RNA
atgccgtctagaccccccagggcctttacccgattggaggccgatttattagccgccgcagctgttgctggaccgtggacaaggagcggactcgaagagaggctcggtgaagctggtgctgccgaccctgtgctgctagccaggcgagtcttggaccttatgcccggggagcctatcgaaggcgagtcaactgtgcggaacgtgctcgctgagctccctgagctgccagcaagacccgtcgaggtgacagtcgaaagctctctgtggaagtttgatgtaccacggtggcagacaccccacgcactttgccaggcgtttgacctgaccatgcctgagctggaatggtttgccgatgttcagggcagactgagaggtaagccggggcggctccaccactataggtaccacaacggggctcgcttgattgaggcacctaaggtgcgccttagagaggtgcagcgcaggatccttaggaaagttctggatcggctgcctgtacacgcagccgctcatggattccgacgcggtcgtagcgtacatactttcggctcaggccacgccggcgcagatttagtggtccggattgatctgcgctggtttttctctaccattacagcagccagggtaagagccgtgttcctcgctgtcggctatcctccatccgtggccagcttgctggctggactgtgcaccactgcaacccccgtccccatcctacgcggtatgccattcgagcaggccactctgttgcggaccagacatcttccccaaggggctcctacgtctccagccctcgccaatatggtggcgcggaatcttgacagacgactcgctgggctggcgcagagtcaaggcctctattatacacggtacgcggacgacttggcattctccggagatgtggtgaatgtggaacagctactgtggactgtcggagccatagtcagagatgagggctttttcgtgcatccatccaaaaccaaggttatgagagcccatcatcgccagcggctggctggactggttgtgaacgcccacccacaggcatcccgtgacgactacgaagctctgaaagcgctgctgtacaattgtgtcaggtacgggcccgcatcacaaaaccgggacgggaggacgcacttccgagaacatgtgtcgggccacatcgcctgggtgggcgaaagtaacagccgccgacgtgaaaagttacgtaggctcgagcaacgcatagtttggagttga

SEQ ID NO: 12826 - RNA, 954 nt, synthetic construct
  source 1..954: mol_type = other RNA
atgagcagagcactggacgcaggctgggctgctcgtcttgcagctgctgccatgtccgggccatggacaaagaatgccctggcccagcgttttagcgagattggctttgaccgggccgaggaaatcgccaggcggctacacgatttagcgcccactccgccggtagacggggttgatgccgtggatcgcttattggcggagctgcctcgcctagagggccctataccagtgcgcgcgcaacgacctcaatggcttttcggagtgccccggtggaacacgttacctgccttggcctcaagtctgaatctgacaccaggtgaactcgattggttcgccgacccacgcggatggcttcggacaaagcctgacaggctccagcactatcgggtcaaaaccctccccagcgggagggtcgttgagatccctaaggaacggctgagggaagtgcagagaaaagttagggtgagcgtgctggatgccgttcctccccatcctgctgcccacggatttagagccggacgtggcgtcgtcggatttgccgcagcacattctaattcggaggtggtgattcgcgtggacctgcgcgccttcttcactacaattaccgccaccagggtgagagccgttttcgcagctcttgggtacccaccctgggtcgcgggtagattggcaggcctgtgcactaccagtaccccaccagcagctctggctggtgtaccctttgaaatcgccagtctgatgagagctccccacttgccgcagggtgcaccaacatctcctgctctctccaacctcgttgccggcaacctcgatcgaaggctatccggcgtggctcggcgacatgctctgacttataccagatacgcagacgatctcgcgttctctgggtcagacgtagacgtgtcaagactgctggccatggtgcccccctgtgtccgaacgagggcatcctga

SEQ ID NO: 12827 - RNA, 1308 nt, synthetic construct
  source 1..1308: mol_type = other RNA
atgcagcggtctaccgtggacgagggcttttggagcctgcatcataggagaatttttatgagccggatgatctccgtggaattggcagcagaacttgcaagagcgttcgagttactggatgatgagtgggcccaagctcgcctagctgaggcgttcggcgcagtcatcgaacccggattagcggaggagatagcccgtcgggtcgtggacctgatgccagtagtgccagtggaccccgtggccaccttatgccgactgctggccgagctgccaaaacttccaacaattgtggttcccttggacccaccagaggttcggatgagatttggggcggtcgagattcctgacctggcaacgctcgcaatgctacttaatgttactccttctgaattggagtggttcgcggaccggggaggatggctaaggcgatcaacacagcccctctctcactaccgatataggcgcctccctaaggcgaacgggactagattggtcgaggcccccaaggtccgattgagagaaatccagagacgcatcctgcacaaggtccttacagggatccctgctgacccggcttgccatggctttgaaaagggaagatccgccgccacatttggcgcaccgcatgctggcgcacctgtggttgttaggatggatctcagggacttcttccctactatcggtctggcacgggtgcgcaccgtattcaccgcctgcggttacagtccagctgtcgcccgagtgctggctgaactctgtaccaccgccagtcctgtcgccgaactgagagggcttgatcacgcccagaggactctgctcgctgtaccccatcttcctcaaggtgcccccacctcacccagacttgctaatttggtggccagggggctggatcgtaggctgactggttacgcaaaccggcatggcctcacctatacacgctacgccgacgatctcgctctctcgggaaacgccaatacagctcacctggtgtggacagtgacgcgaatagccgaagatgagggctttactgtgcacccggccaaaacacgcatccggagggctcatcagagacagattttagccggactggtagtgaatgctcatcccactgctccaagggatcggtatgatgccgttcgggccctgctgcacaactgtctccgcactggagctaccgcccagaacctgcacggccacaatgacttccgtgcacacgtctatgggttgattagctggataggcgagacgtcccctcaccgtcgcgacaaactgctgaccatggcagatcgcgtggactggaccaggtga

SEQ ID NO: 12828 - RNA, 1257 nt, synthetic construct
  source 1..1257: mol_type = other RNA
atgtcccgggccattggcctggagttggcggtgagactcgctcggtcattcgaacttctcgacgacgactggggcctgtcaccactggctgaagccttcgcggaggtaatagaaccgggaagcgctcaggagatagcaggtcgggtcatcgatttgattcccatcgagcccgtggatccggtgaacacactgaggagggtgctggttgacctccccaagctgcccacaactgtggttgcgctcgatcctgtggtcgtaccaatgcggttcggtgctgtggagatacctgacctcgccgctctcgcgttgctgctcaatgtcactcccgctgaactggactggttcgccgatagaggagggtggctacggagagcctctcagcccctctcccattatagataccgaaggctgccaaaggcgaccggagtgcgtctggttgaagcaccaaaagtccggctacgtgagattcagaggagaatcctccaccgtgtgctggcaggaattccagccgaccccgcttgccatggctttgagaaagggtgcaacgctgctacattcgcaacccctcacgcaggagctgcagtcgtgatccggcaggatctgagggacttttttccaacagtcgcagttgcccgagtacgagccgtgtttgccgcatgtggctacagcactgtagtcgccagagtattggcagagttgtgcaccaccacgagccccgtcgcggaattacggggactggactactctcagcgcacattactcggtgcaagacatcttccgcagggcgccccaacttcgcctagactagccaatctggtggctcgcggcttggatagacgactgaccggatatgccaatcgacacgggcttacttatactcgctatgccgacgatctggccctgagtggggacgcagatcttgacaccgcccgcctgatttggaccgtgaccaggatcgctagggatgaaggcttcaccgtgcatactgggaaaacactgatccgccgcgcccaccaaaggcaggttcttgctgggttagtggttaacgatcgccctgccgcccctagggacaggtacgatgcagtgcgtgctctgcttcataactgtcttagaacaggcgttagtgcccaaaatcgcgacgagcacaacgattttcgggcccacgtgtacggcttaatctcctggattggggagacgtctcctcaccgccgagacaagttgctggccatggctgaacgggtcgattggacgggttga

SEQ ID NO: 12829 - RNA, 1293 nt, synthetic construct
  source 1..1293: mol_type = other RNA
atgtcaggggcagtgcctcccgatctagccagggaactggcttactcctttgagttcttgggtgcggaatggtcccgaagcaatttagccgaggcatttgctgaaatagtagaacctggcagagcggaagagttagctcgtcgggtgaccgatttgatgccctcggagccactggacccagtgggaaccctccagcggttgctcgccgaacttcctaagcttgctactattgttgtgagccttccaccagccgccgacgaactggctgacgagttacctcgcactcaacctgcgcggacaagattcggagctgtcgacatcccggatttggccgccctttgtgcgctgctgaacgttacaccggcagagctggagtggttcgctgaccacggaaactggctacgccgagccgcacagcctctctctcactatcgatacaggcagctgcccaagacatctggggtacgcctcgtggaggcaccaaaagtccgcctgcgtgagattcagcggagaatcctgcatcgtgttctgagcgagatcccagcccatccagcctgccacgggttcgagaaaggccgctctgcaacgacctttgctgccccccatgccggtgctgaagtggtggtcagagtggacctgagggattttttcacgagcatcggtgtggcccgggtaagagccgtcttcgccgcttgcggatacagtcccacggtggcacaagtcctggcagatctgtgcaccactgccaccccggtcgcagaactacgcacccttgattttaatcagagaaatctcctcagggcgagacacctgccccaaggagctccaacatcccctaggttagccaatctgatcgctcatgggcttgaccgacgactggccggatacgccacccagcacggtttggtgtacaccaggtatgcagacgacctcgcaatttccggcaagtcagacctggatcccggccgcacaatttggctcgcaactaaaattgcgaaatcagaggggttcagcatcagacctggcaagactcgtatcaggcgcccccatcagaggcaaatactggcaggcctggtgattaatacacacccagccgtgccccgggacagatatgacgccctgagagctctcctgcataactgtctccggacaggccctgctacccagaaccgggatggccacaacgattttcgcgcccacgtctatggcttgatatcttgggttggggagactagtcccgctaggcgggataggcttttggccatggctgatcaggttgactggagtaagtga

SEQ ID NO: 12830 - RNA, 1257 nt, synthetic construct
  source 1..1257: mol_type = other RNA
atgaccggagcagtgccagctgagcttgctcgcgagttggcatacgcttttgagttcctcgacgcagagtggacacggtccaacctggccgaagcctttgcagaaatcgtggaaccggagagggccgaggatcttgccagacgagtgactgatctgatgcccagtgagccccttgacccagtcgggacattgtgcaggctgctggcggagcttcctaagatggccaccgtcgtagtccccctggaacctttatctgcccctgttctgttcggcgcagctgagctccctgatagagcaggactttgcgccctcctgaatgtgactccagatgaactggattggtttgccgaccatggcggttggttaaggcgcgcaagcaagcccctcacccactaccgctacaggcggctgagaaaaagcgacggcgtccgactggttgaagcccccaaggtaagattacgcgaaatacagcgacggatcctgagacacgttttgtccggcatcccggctcaccctgcttgccatggcttcgagaaagggcggtcggcctctacatttgcggagccacacgcgggtgccgaagttgtggtgcatctcgacctgcgcgactttttcaccagcatcacagtggcccgtgtacgcgcaattttcgccgcgtgtgggtatgccccagctatcgcccagattcttgccgatctgtgtaccaccgcaactcccgtggctgaattgcggggcctggactatgatcaacggaacttgctgagagctaggcacctgccccagggtgctccaacatccccacggctggctaacttaatagctcatggcttggacagaagactcactgggtacgcgatccggaggggcctggagtatacccgttacgcggatgatctagccatatcagggaaatctgatctcgacgcagccgagattctgtggctggtgacgaagattgcaaagtcagagggatttgccattcatccgggtaaaacgcgcattcgcaggccccatcagcggcaaatcctcgctggcctcgttgtgaactcccaccccgcagtccctagagacaggtacgatgccctgcgtgccctattgcacaattgtcttaggacaggacctaccgcccagaatcgtgatgggcaccatgacttcagagctcacgtgtatggactcattgcatggatcggagaaactagccctagtcgacgggaccgcctaagggccatggctgaccgagtcgactggagtaagtga

SEQ ID NO: 12831 - RNA, 1251 nt, synthetic construct
  source 1..1251: mol_type = other RNA
atgtcccacgccgtctcgggtggattagccgcagaattggccgcccactacgccgacgccgaaataggctgggagagggccgcgttggcagaagtcttcgcagaagtgattgagcccggcagagccgaggagttagcgggaagggtggtaggcctgatgcccagcgagccactagatggcgccgcaacattacgccggttgctggccgaactgcccgtgcttaccgtttctaccgttgccctggagcctgctcggcgacgaatgcgatttggagccacacctattgatgacctcgccgccctcgccgccctacttaatctgacacagcccgagcttgaatggtttgccgatagagggggctggttgagacgctctgccagacccctgacccactatcggtatcgccgccttccaaagagcaccggcgtgagactggtcgaggcaccaaaagtccgtctccgcgagattcagaggaggatcctgaggcatgctctggcgggtgtgcctgcgcatcctgcttgccatggattcgagaaaggccgaaacactgctacctttggagctcctcacgctggggcggcagtggtagtgcgtatcgacctcagggatttcttctccagtattgaagccgcacgggttagggccgtttttgccgcctgcggttacgctccagcagtggctcgcgtgttgggcgaactgtgtaccacagcagcgcccgttgctgaactgagaggtctggatcacacgcagcggactctgcttggagctcgacaccttccacaaggggcccctacttcaccccggctagccaatctcgtcgcaagagctctggacaggaggcttgatgggtacgcgcgcgctcatggactggcatacactcgctatgccgacgaccttgctttcagtgggccagctgacgcggatgctctcgcttgggccgtgacagcgatcgcacgagacgaggggttcgcagtgcatcccgggaagatcagggtacggagagcccaccagcggcaagtgctggcaggtctggtggtcaacgctggccctgctgtaccgcgggatcggtacgatgccgttcgggcactgctccataactgtctgagaaacggagctgctgcccagaatcgtgacgggaggccggactttcgcgctcacgtctatggcttgatcgcatggataggcgagacgaatccacacagaagagcaaagctcctcgcaatggccgcccgtgtggattgggacgcctga

SEQ ID NO: 12832 - RNA, 1323 nt, synthetic construct
  source 1..1323: mol_type = other RNA
atgaacaggcccgcgttgccggcactagttgctgccaggctggctgacgagttcggaagatgcgggggccgctggcatagagacgatctggctgaagcctttgccgctgttcttgacagggaaagggctgaagtattcgccgtgagagtaataggcctgatgcccacagagccaatcgactccgtggtcaccttacgggctctgctcaccgaactgcccgcacttccaattgtgatcgcccagctcgaacccgttccggacgagctgcggtttggagcccctgaactccctgacacttctgccgtggcacggatgctgaacttaacgcccgatgagctagattggtttgccgaccacggaggatggttgcggcgtacacgcgagccccttgctcactaccggtatcgccggatccccaaaaaagacggagtcagactggtcgaggctccaaagcctcgactgcgcgagatgcagcgcaccatcgctcgtcgcatactcgctggtattccagcccatcctgcgtgtcacggcttcgaaaagggggcgagtgccgcaacttttgctgcaccgcatgccagagctgccgtggtggtaagactggacctgcggcacttcttccctagcattggtgtggccagagtgcgtggcgtctttagagcctgcgggtacagggagaatgtcgcaaccgtgctggccgacctgtgcactaccgcaaccgcaattagggctttgactggtttagaccacgagcaagctagtctactgcgcacgcctcatttggcccaaggggcaccaacatcacccaggcttgcgaatctgattgccaggaatctcgatcgacgcgtttccggatatgcccggagacacgggcttacctacactagatacgccgatgacctggcactcagcgatcctgccgacaccgatgttgacgctatgatctgggcgctgacacggatcatcgaggatgaggggtttgaagtgcatcgggataagacatcggttcgacgtccccaccagcgccaagtattggccggccttgtggtgaacgatcgacctgcggtcgctagggcccagtatgatgccgtgagggcactcctccacaactgtttacggacgggcgcagccgcccagaatcacaacgctcatccaaatttccgagcccacgtgtatggctccatagcatggattggcgcaacatcaccaacaaggagacagaaattgctcgacatggccaagcgagtggattggactcagagcgacgctgcaggctctggactggcagctgatgcggtcgaggatttccatgaaggtgggggctga

SEQ ID NO: 12833 - RNA, 1260 nt, synthetic construct
  source 1..1260: mol_type = other RNA
atgactagacgggcagtgcctccccaacttgccgacttgcttgctgacgagttcgacgccgcagatagaacttggcagcgctccgatctggcagaagtttttgggagctttgtaaacgctgtacgggccgaagaactggcccagcgagtcatcgcgctcgtcccaacagagcccgttgaccgccggaattcactgaggtctatcctagctgagctgccggttttgcaacgcgttgtcaatttagtggaacctgcccaacatgaattgcgtttcggtgtgcccgaactcaccgacctccgttctgtagccagcatgctgaacgtgacgcctgcagagttggactggttcgcggatagaggcggctggctccggaactccactgaaccactgacccattacaggtaccttcgccgccccaaagcgagcggagtcaggttaattgaggcccccaagccacggctcagggagatgcagcgaaccatagctagaaaagtgctggccagcgttccagctcaccctgcttgtcacggcttcgagaaagagtgctctgccgcctcatttgctgacccgcacaccggatccgatgtggtggtgcgcgtggatctgaggaattttttcagttctatcggggtcggcagagtgcgcgctgtgtatagagctattggttacgattacgcaatagctaatgtgttagcgcatatctgtactacagcaacagccgtttccgccctgcgcggaattgacaaccagcacgctagcctcctgcgaatgcctcatttggcacagggcgcccctacttccccaagactggcaaatctgattgcccggaatctggaccgtagggtggctggatacgccacaaagcacgacctgacgtatactcggtacgcagatgaccttgccttctcagggcccgctaccaccgatgttgacgcgttgctatgggccgtcagtcacatggtggatgacgaggggtttaccgtcaatcggcggaagacgagtgtgagacggcgacaccagcgacaactcctagccggcctcgtcgtgaactcgcagccacgtgcacccagagaggcctatgatgcacttcgcgctctgctgcataactgcgcgagaacaggggcccatgaacagaacacagacggccacaccgattttagagctcacatctatggtaggattgcatggatcggagagacagatccgcgacggaggcagaggctcctggatatggccgccagggtagactggaacaggtga

SEQ ID NO: 12834 - RNA, 1356 nt, synthetic construct
  source 1..1356: mol_type = other RNA
atgcgacggatctcatggcagcaacgccctaagcctcttgggacactgcgcgtgcgaccaggagataaggacaagtcacggtctagtgcaactgtggcacggcccctgatgcaggggagattttctctgcctcatgctcaggccattgctcgcgcttttggacggagggagcttagttggaggagagaaaatttggccgaggtattcgctggattcgtggaggccggactggccgaaagccttgctagccaggttattgataatgtgcccctcgaacccattgagccgtatcccacgctggtagcacagcttcggagcctgcgttgggagattgaccttaaccctccactcgcgaaacctctgagatttggcgtgcctgagctcccagatgtgagcgcccttgcccagtttctaaatctcacaccctcggagctggactggttcgctgattgcggaggctggttgcgtacagccagcggacccctgtcccactataggtatcggcagctccccaggaggtccggtagacgtttggtggaggcgccaaaacctcgattacgagaaatccaacgcaccattaacagacgtatcctggcttgtctccccgtccacagcgcttgccacggcttcgagtctggccgcaatccggcgactttttcagcgccacattcttctgccgggttgcttatcaggatggacttgaaaaactacttctccagtatcggggagccaagagtacgggcaattttcgaggccatgggttacagcgaggtcgtgagtaggtccctcgctggcctgtcgacaaacgcgtccagtatcgccgccctccgagggttggaccacgaacagagaaccttcctgagagttccccatctgcctcaaggcgctcccacctcacctaagctgggaaacttagcagcccgcggcctagatcgcagactctctgggtttgctctgcgcgtcggcatgacctacaccaggtacgcagacgacctcgcattttccggggctgacgggataaatgccggctccatcgtgtccgccgttgaacggatcatcgccgctgaaggcctattcgtgaacaggcagaaaacgttaataaggcgcagccatcagcgacaaatcctggccggattagtcgtcaacgatcacccgcaggtgccacgggactcttatgacaaggtcagagccatactgcacaacgcagcacgcaccggtgcagcagcccagaataggggtggtcacgccgacttcagagcccatgttctgggactgatatcatggattggcgaaacaaatccagatagacgggaacggctgctggatttggcagctgaggtggattggactacttga

SEQ ID NO: 12835 - RNA, 1251 nt, synthetic construct
  source 1..1251: mol_type = other RNA
atgacaccaagagcggtatctccagcagtggcccatgcactcgctgacgaatttgcgaggggcgggttccgctggaggcatagtgagctcgcagaggcctttgccgcaatcatcgacccggttgaggcagagtccctggcgttacgtgtggtaggcttgatccccagggagcctatagatccacaaaccacccttcaggcagttcttgcagacctacccgaactgcccgagacagtggtggcacccgaaggtgaacccggtgggttgcggttcggagttcctgaaatattggattgcggcgcactggccactatgttaaatctgaccacagccgagctggagtggtttgccgatcacgggggatggctccgtactgcaagggaacccttgagtcactatcgttaccgaagactgcctaaatcaaccggcgttcgcctggtggaagccccaaaacctcggctccgggagatccagaggacaattaaccgccgcattctctcaggcataccggcccatccgagctgtcacggatttgagaagggccggagcgccgaaactttcgcaatgccccacgcccaagccgacgtagtggttcgggtggacctgagagacttcttttcatctatcaccgtggctcgcgtccgggcggtgtttagagcctgcggttatccagactccgtcgccactgcgctagcagacctgtgcactcacgcctcggctattgcccccctgcgaggacttgatcacagacaacggacactgctgcgcgtcccacatttgccacagggggcacctactagccccaggctcgctaatctcgtcgccaggaatctggacagacgcattagcggctacgcccgacggtctggactggcttatacccggtacgccgacgatttggctctttccggaaccatggatgctgatagtgctgtgtgggcagtgacgagaattgccgaagccgagggcttcctcgtgaaccctgctaagacctccgtcagacgacagcaccagaggcagatcctagctgggctcgtcgtgaataaccgccctgccgctccaagatacgcttatgatcaggtccgagccctgcttcataattgtcagaggacgggcgctgccgctcagaacagacaagggcacaacgatttccggagccatgtgtacgggctgattgcgtggatcggtgagacatctcctgcccgccgtcagaggcttttagctatggctgagctggtagattgggactga

SEQ ID NO: 12836 - RNA, 1263 nt, synthetic construct
  source 1..1263: mol_type = other RNA
atgtccgagacattctggcaccaccatactgcacgcatggtcgctgcccggcttgtggacatcgagtggaattcaactgaacttggggaggtcttagccagatttgaacacgtggccgacgtggaaacactcatcaccagactgctggagcgacggattcatgccccagactctacggaggttgcagccgaattgctcgaggtgattgggtacccaggagatcccttcgtactgcccgctccaccggttaggcccacacctacggtgaggttcggggtgccagcctttgcaaccactgctgagctggccgcctcgctcgatgttacagtaagcgaactggactggtttgccgacgtgggaggttggctgcgacgtgcagctcctcctcttcgccactacagggccagggaggtcgctaaatccaggggcggcacccgcatccttgaaataccaaagccgagactcagagagatgcagagacgcgttcttcaccgggtgctggaccatgtcgtgcctcatcctgccgcccatggttttcgcgcgggcagaagtgccgtaaccttcgcccgcccccatgaaggtcgggatgtcgtggtgcgagtggacttagcagacttcttcccgacggtaacaagaccacgagctcgcgcagtgttcgaggcttgtggctatccctacagggttgcctccgtgttagcgggcatttgcactaccgccatgccagtggacgaagtcgccggtttgccaaggagccaggctgccctgctaggagtccctcacctgcctcaaggcgctcctacctctcccgcgttggcgaacctagtcgcacgcggactcgataggcgtgttgcgggcctagcaagggctagggggctggtatatactcggtacgccgacgatttggccctgtctggcccctcagataccgacgtgtctaccctgttgtgggcactcgataggatcgtccgggacgaggggtttgtcgtgaatggagataagacacacgtcgccagagcacaccggcgtcagacactggcagggctggtggttaacgaaagcgcagccgctcccagagatcgctatgatgcgctgcgggctctgctgcacaattccgtgagaactggggccgctgcacaaaaccgagcaggagtgcccgactttcgagcttccgtttatggacagatagcctggatcggcgagagtagcccttcacggagaagccggctcctcgctatggctgatcgtgtggattgggagagttga

SEQ ID NO: 12837 - RNA, 1227 nt, synthetic construct
  source 1..1227: mol_type = other RNA
atgccatggactggagctgaactgggggaggttctcgggcccttcgatcggtggttcgatgtcgaaaccttgatcacccggctcagcgacgcagtcagggatgctccggactcggttgaggctgccgtggagctcctggagggagttgggtacccgggccttccatttatccccacccccccccctcggattagaccatatcggttcggggtgccagagatcagcacaccagcggacttggcaacctccctcggggtcaccgttcccgaattagattggttcgccgatctgggtggctggttaagaagggcagcgcctccacttcgacactaccgcgcagtggaggtgcctaagaaagccggaggcaaagctggcggacgctcagacctaggtaacatacggatcctggaagtccccaagccacgaatgcgagaaatgcagaggagagtgcttcataggattgtcgatcacgtagacccccaccctgccgctcacggttttcgtacaggccgaagtgccgtaactttcgccagacctcatgagcagcaagatgtcgtggtgcgcgtcgacttggctgacttttttgcaacagtaacagcacccagggtccgggccgtgtttgaggcatgcgggtacccgtcaaaggtggcagcactactggcaggaatatgtactacggccatgcccgtagatgaggccagccgtctgacaactagaagggccgcggttatgagaacccctcacttgcctcagggcgcccctacatctcctgctctggccaacctcgtggctcggaggctggacagacgtgtagcgggtttagccagagccaggggactgacctatacacgttacgctgacgatctggccttgagtggtccatcctccacggatgtcgggaccttgctgtgggccctggaacatattgcacttgacgagggctttgaagtgaacgctgctaaaacccacgtgcgcagaagccacacgcgccagactcttgcaggcctcgtggtgaatcgctctgccgctgtgccaagggaccgatatgatgatctgagggctctcctgcataatgctgcccggactggagccgccgctcaaaatcgcgatgagcttcccgacttccgcgcacatgtgtatggcctgatcgcgtgggtgggcgaatcttcccctattcgccgggttagactgctcgacatggccgcgtcagttgactgggacgcctga

SEQ ID NO: 12838 - RNA, 1353 nt, synthetic construct
  source 1..1353: mol_type = other RNA
atgcatgctccacgggctgccctgaggcgaagacgtgagtctatggtggctccagtcccccttccactagccaccgtgaccccacctcccgagaaccctcattgggcccggcatcacgttccagcaatcgccccgctgcttgtggataccgcctggaccagggccgccctagacgaaatgctcgtcccctttggtggcttcctggatgtcgacacattgaggagaagactgatggacgctattacaggtgctccctatactgtggacatcgcggtgcgggtcctgctggaagctggctttcctggcccaccgccaaggataagtattccccgcgctccactcgttgttcgcccttggcgattcgacgtaccccgatacgcatcagccgctgagctggctgcatctctcgacgtgactctcgatgagttggactggttcgccgacttgcaggggagactgtgcagagctccaaccccgctgaggcactaccgtgcactgaccatccctaagagcgccggcgcacacagactgcttgagatccccaaacctaggctgagagagatgcagcgtcgcgtgctacggcgcatagtggaacggattgaacctcacgatgcggcccatggattcaggcggggaagaggggtccataccttcgcggccccccacagacaacaggacgtcgtgattcggatggacgtgcggaatttctttcccacgatcacatttgccaggatccggggggtgtttgcggcctgtggctatcccgatgcagtggcagcagtgcttgccgggatttgtacaaccagcctgcctgtagacgaagcaagaccgctcccatggcgcgaagccactgatttaaggggccgccacttaccccaaggtgctcctacatctcccgcactcgctaacctcgtagcgcgcggagtggatcgcagactcgctggtttggcccgggccagaggacttgcatatactaggtatgctgatgacctggctttgagtgggcctagcagcactgatgtgcggacggtgatagggacagtcgatcggatcttaaggcaggagggctttacacccaatgaggcaaagactcgcgtcaggcgatcccaccgcagacagtccatgactggcctggtagttaacgtctcgccacaggttcctcgtgaagagtacgacgccttgcgcgctctgctgcacaattgccgcaggacgggagcagccgcacagaatcatgacggggttcctgatttccgagcctacgtactgggcagggtggcctgggtgggagaatcaaacgatacccgacgtcggcgattactcgcccttgccgatgaggttgactgggcgtcctga

SEQ ID NO: 12839 - RNA, 1200 nt, synthetic construct
  source 1..1200: mol_type = other RNA
atgcttgtggacgcgagatggacccgctcgggactggaggaagctcttgagagtttttcccatcggcacgacgtcgacgccctagttaccagattactggacctcatgccgtctgcaccattagatgttgaatctgggctgtccctgcttaggggcatgcctgtcctccctatgtacttgcctcctcgtcctaaaccacccagttggcatttcgacgtaccccgatatagcagcaacatcgacctggcgcgctccttagatgtgactccatgggaacttgagtggttcgcagatctcggcggctggttgcgcacaaagccctacccattgcagcactataggactcgaacaattgacaagcgcgatggtcacaggctgctcgaggtgcccaagcccaggttgcgggagatgcagcggaggctcttgacccgaatactggacagaatccccccccatgatgcggctcacggcttcgtcaggggacgctctgccgtgaccttcgcacgtccgcacgagtacgctgatgtcgtgatccggatggatctggcggattttttcacctctatcagaagaccacgggtggccgcaatttttgctagcgccggatacccaagaactgtagcccggactctggctggtatttgcaccacggagacacccgctgaacggttatccggcctgccacacgatagagccgttgccttgcgagcaccgcatctacctcaaggtgctcccacaagccctgccctggcaaatctggtcgcccgtcgactggacaggagacttgccggctttgcccgcaaaaatgggctcacttacactcgctatgccgatgacctcgcgttctcaggaagtgctgatgtgcgcgttgacaaactcataacagtggtgacaacgatcgtgcgtgccgagggctttagcgttaatgttcgcaagacccggattagaagggcccatcggaggcaggtcctagctggactggtggtgaacgaaagtgcagccgtgccacgagctcggtatgacgccctgagggcactcctgcataactgttcaatcaccggggcttcagagcagaaccgggacggtctgcctgactttaggtcacacgtatacggggtaatcgcatggattggggaatccaatgaagtgagaagagcagtccttcacgacctggccgctcgcgtggattgggatagctga

SEQ ID NO: 12840 - RNA, 1248 nt, synthetic construct
  source 1..1248: mol_type = other RNA
atgtctcgccagtttagtccacagatggccgcttggctagcctccctggctgctgaagctccctggactaggggcggcctggaggaagctttcatgcctcttctgggtgacaaggccgcgcggctcgcttatcgtctaattgatttactgccttccgcgccctacgacactgagtcactcagagggctgataactggactccccctactgccggagccccgatcagttgaaccgtcccgtcgcagagatggggtaaagccctggctcttcgaagtcccaagatacgtcaccacgggcgacttagccgagagtctgaatctgaccattccagagatcgaatggtttgccgacgcccacagtagactgaccgtggctcctgagccacttaggcactacagagttacccccatcccaaaacgagtgggcgcgaggttactggaaatacctaagccaaggttgagggaaatccagcgcaaaatccttcggaggatcctcgataacgtaccagcacatgcagccgcacacggattcgtcaaggggcggtcgcctcgaacattcggcattcctcacgcaggccgagaagtagttatgagcgtggacttgaaggacttttttcccacagtcggcattaatagagtcgttgctgtcttcgacgcactcgggtatccccgtaacgtcgcctggaatctggcctacctctgcacaacctccacacccgccggtcagctgggtggaatgccttatgctaccgcctcacttctcagaagccgccatcttccgcaaggagcgcctacaagccccgccttggcaaatttggtggcaaggcggttagatatccgcttgacgggactcgcccggtctatggggttgcggtatacaagatacgcagacgatctggcgttctctgggtctgccgatgtagacgcagttctgtgggtggctagacaggtgatcgtggatgaaggttttgtggtgaacccagtgaaaactcgggtgagaagggcccacaagcgccagatactgaccggcctggtggtcaatgactggcctgccgtgccacgtaaagagtacgacgagcttcgggcaattctccacaactgtgccgtgaccggacctgagccgcaaaaccggcatggggttcccgatttcagggcccatctgtttggacgaattgcacgcatcggcgagactaacagcgctcgccgaagaaggctgctggagatggccgagcaggtggattgggcttga

SEQ ID NO: 12841 - RNA, 1224 nt, synthetic construct
  source 1..1224: mol_type = other RNA
atggccgcttggcttgcctctcttgccgccgatgcactatggacaagatcggggctcgaagaggcctttctccccatcctgggcgagaaagcacccagactcgccgatcgccttatagacttgtcaccggtagccccatacgatcccgagtccttgaggggcttgattactggtctacctctactccctgaaccggccacagttgagccttcacgccgcacagatggattcaagccctggctgttcgaagtgccccggtacgcatcaaccggtgacctggccgaatccctggatctcacaatcagcgagatagaatggttcattgacgctcagtccaggctgagaactgctgccactccattacgacactatagagtcacgcctgtcccaaaaagggtggggttccgcatcttagagatacccaagcctagactgcgtgagattcagcggaagatcctccgacgaattcttcataatgttcccgcgcatagtgcagcgcacggattcgtcacgggccggtcacctagaacttttggtatcccccatgctgggcacactgtggtggtgtctgtcgatctgaaggattactttccttccatcggaatcgaacgagtggttgccgtatttgatgccttgggctacccaaaaagcgtggcttggtctttagcatatctgtgcaccacagccacccctgctgaacaactgggaggattcccctacgcaacagccagtctgctgcgcactaggcatctcccacagggggctccaaccagcccagctttggccaatctcgtaagcagacgcctggacatcaggttaacggctctggcgaagagtcttggggcaagatataccagatacgctgacgaccttgcatttagcggcgatatcgatgctgacaaaattatttggagcgcctccaagattatcgcggacgagggatttgcagttcacccttacaagacacgcgtccggagggcacacaaacgacagcagctcaccgggctggtggtgaacgattggccgagtgtcccccggaaagagtatgacgccttgcgtgccatcctgcataactgtgccgtgaccggcccggacccacaaaacctctctgcaattccagacttccgtgcgcacctgtatggccggatcgctaggattggcgctacctctgcagtgaggaggcggaagctgctggagctggccgaacggatagactgggagtga

SEQ ID NO: 12842 - RNA, 1419 nt, synthetic construct
  source 1..1419: mol_type = other RNA
atggcccatggacgggtgtctgtccgggctacagaccttaggggaaacccgtgggttgggaaaaagaactgggcccttcgtcccacccccgtacgtactctcagggtgcatgatggggcagaacacgaacgtttccggagccctgtagccgcagctccgtggatagcgatgacagaacggcagtttaacgctcagttagccgcctacttggcccagctcgctgctgacgctcaatggacgagagaacgactggaggaagccttcatgccaattttgggcgaaagggcacccagactggctgaccgactgatcgacctgtatccatcacagccgtttgaccaagcctccgtccataggctgatcgcagagcttccaagaatccctgaggctatctcccacgagcctgtgcggcgatctaatagccctaagccatggcggttcgacgtgccccgctacttcaccacaggcgacctcgccgagtcattaaatctaaccatccctgagatcgagtggtttgccgatgcccactccagactgactaccgcatcacctccactccgccactatcgcacaactgcaattccaaagcgcgtaggcgcacgactgctagagatacccaagccacgcctcagagagattcagaggaagattctgcggcgcatactggatcatgtccccgcccatggtgctgcacacgggtttgttaagggtcgtagccccagaacttttggcattccccatgccggcaaagaggtcgttatatccgtggatctgaaaaacttcttccccagtatcggtataagcagggtcattgctatcttcgatgcactcgggtattctaggagcgtggcttggaatctggcatacctgtgtaccaccagcactcccgctggccagctgaacggactgccttatgccacagccagtttattgcggacacgccaccttcctcaaggcgcacctacgagtccagctctcgccaatctggcggcccgcatgttggacatccggttgaccggatttgcaaggtcaatggggctgcgctactccaggtatgccgacgaccttgctctgagtggcgacgcggatgtcgataaagtgctgtgggttgccaggaggatcatcactgacgagggatttattctgaatccgctaaaaacccgcgtgcggcgagctcacgaaagacagcagctgactggtttagtggtgaatgattggcccgcggttcaaagacgagaatacgatgagttgagagccattctccacaactgcactcgcaccgggccaacgtcgcagaacagatctgatatggaggatttccgtgcgcacctctacggcagaatcgcgagaattggagaaacctctcctacacgacggcggaccctccttgagatggccgaaagggtggactggacatga

SEQ ID NO: 12843 - RNA, 1251 nt, synthetic construct
  source 1..1251: mol_type = other RNA
atgtccgagagacagtacatccctccaatggccgctgctttggctcggcttgcggctgacgcaccttggacaagggagcggttggaagaggcctttatgcccctcctgggagcccgagctagtaggctggccgatcgcttggtcgagctccaccctgcacctcccttcgacgaagcctccgtacaccggctgatagccgatctgcccctgttacctgagacggcttcgataactccagagaggcggacctcaagcttcgctgagtggcgtttcgaggtccccagatatgtcactaccggggatctggcagagagtctcaatcttaccattcccgagattgaatggtttgctgacgcccagtctcggcttcgaacagcccctgaacccctgcgccattaccgtacaacgccgattcccaaacgggttggcgccaggctgctggaaatcccgaagccaaggctaagggaaatacagcggaagattctcagaagaatactggaccgcgttccaccacactctgccgcccatggctttgtgaaagggcgctcacctagaacttttgggatcccgcatgccggccacgaggttctcgtgtctgtggatttgaaagatttctttccaagcatcggtattgaccgtattgtggcaatcttcggagctctcggctacccccgcacagtagcttggaacttagcctacctatgtactacctctacgcccgctgagcagctaagcggcttcgcctatccatccgcgagcctccttcgaaccaggcaccttccacagggtgccccaacaagtcctgcgctggccaacctggccgcaagaaagctggacatccgactgaccggactggcgggctcaatgggcttgcgctatacccgctacgcagacgacttagcattctccggcagttgcgatgccgacgtgctcctctggactatcaggcagattgtgcgagatgaaggattcggactgaaccccggcaagaccagagtacgcagggcccacaagaggcagcaattagctggtctggtggtcaatgaatggccggcagtgcccaggcgagaatacgatgggttgcgtgcaatccttcataattgcatcctcacaggacctgcggcacaaaaccgggcaggggtccctgactttcgggctcatctgtatgggcgcatcgcccacattggtgagactagcgccgcaagaagacggagactgctggaaatggctgagcaagtggattggtcctga

SEQ ID NO: 12844 - RNA, 1224 nt, synthetic construct
  source 1..1224: mol_type = other RNA
atggccgctttcctcgccgaactggcatccgatgtcccgtggactagggacagattggaggaagctttcatgcctgtgctgggagtgaaggcactgcgcctggccgataggctcatcgacctctatccctcccctccgttcgatgaggaatcactgtaccgcctgatcgcggatctgccccgactacccgacaagaaaagtgaggagcccgagagacggacaagcgggcctaaaccctggagattcgatgtgccaagatactttagtactggagatctcgctgagagcctcaacttgacaatcgacgaaattgagtggtttgcggatgcccaacagagattgaagacggcctcgtcaaccctcaggcactaccgggcgaccagcatcagcaaaagaagtggcgccagagtgttggagatcccgaaacctaggcttagggagattcagcgcaaggttctgcgccgtatactggaccaggttcccgcccatggtgcagctcatggattcgtgaccggtcggtccccacgtaccttcggcataccccacgcaggccgagacgtagtcttggcagccgacctaaaggatttttttcccagcattggaatcgggcgcgtagtggccattttcgatgctctgggttatccacggacagtcgcttggaatctggcatatttatgtaccacctccgctcctgctggagagttagctggcgtcccctatgagacagcgtccttgctgcgaacgaggcaccttccacagggagcccctacttctccagcccttgcgaaccttgccgcacgaatgctggacattcgtctgactggcctggcacggtcaatgggcttaaggtacacacggtacgctgacgacctggccttctcagggacctgcgacgttgatcgggtgctgtgggtagtgcgccatattgtcagggacgaaggctttatgctgcacccaaataagacaagagtgcgcagatctcataagaggcagcagcttactgggctggtggttaatgaatggcctgccgtgcctcggtctgaatatgacgaattaagggcaatcctacacaactgcgctcgtaccggcccagaggcccaaaacagaagtgggcatggcgattttcgagcccacctctacggtcgcatagctcggatcggggagactagcgccacgaggcgacggaaactccttgaactcgcagaacgcgtcaattggtcttga

SEQ ID NO: 12845 - RNA, 1257 nt, synthetic construct
  source 1..1257: mol_type = other RNA
atgaccgagcgtgagctaactccccaggctgcagctacattggctagactggccgccgatgcagagtggaccagatccggcctcgcggaagcttttgagccgttagtgcccgcaaaagctacttggctggcggaccgcgtgattaacctgtatcctagccccccctttgacgaggcatctatcttcgtcctgctcagagatctaccattcatcccggaaccttccgtgagctcacagcgaccgacgcggaacagtgataaaccatggaggttcgaggtgcctcggtacgagacaactgggcagttggcccgtagcctggatctaacaatctccgaaattgaatggttcgcagacctgcagggccggctcagaactgccccattcccccttcaacactatcggagcgctcgactggacaagcggcaaggcattcgtctgttagaagtgcctaagccgaggctgagggaaatacaacgcaagatcttgcgccgcattctggacagaataccctcccatccagccgctcacgggtttgcgaaagccaggtcaccccgcacattcgcgatgcctcattcagagcgagacgtggttatatctgtggaccttaggagattttttcctagcatcggcttcgatagggtagtagccatcttcgaagctgtcgggtaccctaggacagttgcaaaaaccctggcagctctgtgtactactgtgaccccagccagtgagttgacaggaatggatcgacctaccgctgcccgtcttagggctacccatttaccacagggagccccaactagccctgcccttgccaatttggcagcccggcagctggacattcgcgctaccggattggcacgaagtggtggcgctcgctacagtcggtacgccgacgacctcgcattttctgggggaccagacctggatgttgatcgcctgctctggcttatcacgcaaatcgcacacgatgaaggcttcacaattcatcccgataagacgcgagtcagaagagcccatcagagacagcagcttaccggactcgtcgtcaactcatggcccgccgttccaagggaggagtatgataccctccgcgcgctcctgcacaactgcatagcatcgggtcccgctgagcagaatcggcaccaccacaatgactttagggcccacgtgtatgggcggatcgccagaattggtgagacaaacgaaaccagaagggccaagctcctgtctatggcctcccgggtgaattgggactga

SEQ ID NO: 12846 - RNA, 1326 nt, synthetic construct
  source 1..1326: mol_type = other RNA
atgaccgaaagggagctgactccaagagctgccgccatcctcgctaggttggccgttgacgcggactggaccagatccggcctggatgaggcatttgcccggctgatcccagcaaaggccaccaggctggcagatagggtgatgaatctctatccaagcccgcccttcgatgaagcaagcatctttgtactgctgcgggatctgccattcctcgccgagccatccattagcagcgagatccctactcattttggaggaaaaccttggcgcttcgaagtgcctaggtacgagacaacaggcgacctggcccggtcattagatctcacgataagcgagatcgagtggttcgcggacctgcatggccgactgcgatcagccccttaccctctccaacactaccgctccgcccgccttgataagcgacagggcatacggctactggaagtccccaagccgcggttgagggagattcagagaaagattctgagaaggattctggatcgtatcccccctcatcccgctgcccatggattccgtaaggcccggagtccacgcacctttgcgcttcctcactcggggagagcagtggtggtgtctatggacctacgccggttctttccctctatcggcttcgatagggtcgttgcgatctttgaagccgtgggttatcccgggacagtcgcagcacacctggctgctttgtgcaccacagtgacacccgcagttgagctcattgggatggatcgccccacagcttcaagattacgcgccacccacttaccgcagggtgctcctactagtcctgccctggcaaacctcgttgctaggcagctcgacattcgtgcttctgggcttgcacggtccgtcggagcacactacactaggtatgcagacgacctagccttctctgccgctgccgacctcgatgtggaccgacttttgtgggtcatgagccagatcgcgtacgatgagggcttcgccgtccacccaggaaaaacgcgggtgggccgagctcaccaaagacagcagctgaccgggttggtggttaacagttccccggccgcccctagagaggaatatgacaacctgcgagctctgcttaataactgtatcagagcgggggtgtcaggtcaaaatcggcgcggcgccgatgactttagagctcacgtatacggacgcatagctagaattggcgagacaaatgaagcccgccggactaaacttttgaacatggctgctagagtggactggccaacgccagtatttgaaccccgtaattctggtagtaggaccgcccatacccccgcaactgaggaagacaggtga

SEQ ID NO: 12847 - RNA, 1269 nt, synthetic construct
  source 1..1269: mol_type = other RNA
atgaacgatagggagttatccccacgagccgccgctactctggctagattggccgccgatgccgaatggacccagtctgggcttgaggaggcctttagccggtttatgcccgccaaagcatcacggcttgcggaccgaatcattgatctgtacccctctccccctttcgacgaggcctcaatcttcgtcctgctgagagatctcccgctcatagcacagagttccaagtccagccagaggtcccccatacgtggccgagtcgttccatggaggttcgaagttccccgctacgaaactacaggccagctagcgcaaagccttgatctgacgatttctgaaatcgagtggtttgcagatctgcaggggaggttgcgcaccgccccttttcctctccagcactatcggtcagcacggctggacaaacggcacggggtgaggctgctggaggtaccaaagcctaggctaagggagattcagcgaaagatcttgcataggattctggacaggattcccccccatcctgccgctcacggattcagaaaaggtcggagcccgaggacgtttgcaaccccacatgctgagagagaggtggtggtgagcgtggacttgcggcggttcttcccttccattggcttcgatagggtggtggctatctttgaggccgtcggatatcgccgcagagtggctgctaacctggccgcattatgtacaacagtgaccccagcgggagaactgactggaatggacagagccacagccgcccgcttgagaaccactcacctgccccaaggagctccgaccagtccagctcttgcaaatctggctgctcggcagcttgacatacgcgccgcaggtcttgcacggaccatgggtgctcgatatacacgatacgcagacgacctggcattctctgggcctgccgatctggatgtcgataagctgctctgggtgctcagtcaaatcgtccgtgacgagggctttacaatccatccagacaagactagggtgagacgcgctcatcagcgtcaacagctgacggggctagtagttaatgcgtggcctgcggtacccagagaggaatatgataacctccgtgctctcttacacaactgcctcggctcggtcgccgcacagcagaatagaaatggcttaactgacttctgcgcccacgtttacggaagaattgcccgcatcggcgaaacatcagaaacccggcgccgcaaattgctcgagatggccgcgagagtggactgggaagggagtggctga

SEQ ID NO: 12848 - RNA, 1251 nt, synthetic construct
  source 1..1251: mol_type = other RNA
atggccgatagggaactcacaccaagatctgcagcggtcttggctgcactagccgcggatgttcagtggacacggtccggcctccaggaagcattcgcagctctggtgcccgcaagagcctcttggctcgccgatagggtgatcaacctctttcccatgccacccttcgatgaaagcagcatcttcaggcttctccgtgacctccctttcataccagagcccctggtcagtagccatactccgcctcctggaggcaacgttaagccctggcgatttgaggtgcctagacatgaaacaacggggcagctcgctcagtctctggatcttactattgacgagatggactggtttgcagacctgcaaggcagactaacacgtgccccattccccatgcagcattaccggtccgctcgcatcgacaaacgggtagggagccgcttacttgaggtcccgaagcctcgcctgagagaaatccagcggaaagtgttgaggcgcattttggaccgtgtgccagcccacccagctagtcatggtttccgaaggggcagaagtgcgagaacattcgctattcctcatgcaggtcgggaggtggtcgtgtccgttgatctaaaaaatttctttcccagcatcggctttgatcgggtggtagccatttttgaggctgtggggtatccgcccaccgttgccagcaatctggccggagtgtgcaccaccgttactcctgccgccgagttggttgggatcgatcgcccgacagcttctagactcaggtcgactcacctgccccaaggtgctcctacctcaccagcattggccaacttagccgcccgccaggtcgacatacggttaaccgggctggcccgatcaatgggtctgcgctacacccgatatgccgatgacctggcgttctccggctcaccagaggtggacacactgctttgggtcgtggggcaggtggcccaagacgaaggatttgcacttcaccccgataagactagggtcagaagggctcaccagcgacaacagctgacgggcctggtagtcaacgactggccagcagtacctcgggccgagtatgatgccctgcgggctctgctgcacaattgtatgacgactggcgctgacgtgcagaacctcaatggatcagcggactttagggcccacgtgtacggacgtatcgcacggattggagaaaccagttccacccgcagggagcgccttctggctatggctgcaagagtggattggtga

SEQ ID NO: 12849 - RNA, 1251 nt, synthetic construct
  source 1..1251: mol_type = other RNA
atgcgcgactttgagctggatcctgaattggcaagaagattggcagtagccgctgccgatgccccatggactctctctggccttgaagaagcattcggcacagtgtttggagtgagtcctacgctgttagctgttcgcgtacttgatctgatgccagcccctcccttcgagccccagacactttatcggctgcttcgagagttacctcgtctacggccggtgccgctgtcactggataccaatgaaagctccgtttggagatttgacgtcccccgctacaacacatccgtcgatctggcccgtgccctggacctcacaattagcgagttggaatggtttgctgatcgtggggaatggctgcggaccaaacctctgccgctcagacactaccgacctatgcagatctcaaagaaaaccggtgcaagattgcttgaggtgcccaagcccagactgcgggagatacaacgaaagatcctcagaaggattctggatttggtgccacctcatgatgcagcccatggctttgtgagaggacggtcgcccctaacattcgcggcaccacacgctcagtccgagattgtgatcggggtcgatctggcccagttcttcccctccatcagcgggtctagggtccatgctgtcttcaccgccctaggctatccgccagcagttgcaggcgtgcttaccggactctgcacagtggctactcctgctgacactctcaggggcctaccctacgctcaagccagccaactgcggaccgcacatttgccacagggagctcctacatccccagccttggcgaacctcgttgctcgcaagctcgacataaggctgtcaggtttagcccaagccaactggctgacttacacgcgctacgccgacgatctcgcgttcagtgggatcgaggtggctgacgtgggaaccctgctgtggagtgtggaacagattgccagggatgaaggctttgcgatccacccacggaagaccaaagtaatgcgaccacaccggcgccagcacttaaccgggctggtcatcaatgaccagcccagctatcccagggatgactatgacaggctgcgagcgctcctctacaatgccgcatcaacctctgcacaggagcagaacagagacgggattgagaatttccgtgcccacgtctatggaaggattgctcacataggcgagacttctacgactcggcgccatactctgcttcgcctggccgagagggttgactgggacggttga

SEQ ID NO: 12850 - RNA, 1335 nt, synthetic construct
  source 1..1335: mol_type = other RNA
atgagcctggatagggtgccacttgtgcagcaactggtgaggagagcccttgacggacggtgggaaagccacgccatcctggcacgatggcatacgctcggcgctaggccatgtatcactcttcgcgctctcgcccacttagccgttcattgcgccgggaggggtatccggccgacagaaaagcgcctgattaggactctgctaagttccccactcttatcccgctggctgagacagcagcacagaacgctgctgccactacctccccctgccccaaagttcgagcccgtcgagaaattggcacacctcgccctccctccactcaccaccgagacagatttggcccagttctttcatatggaactcgccgagctgtcttggcatgctgaccctcagcttcgcctgcggcatcagcccgatggaaggctccaacactatacctaccgctggttacctaggcgcaatgggtcaccgccccctagactcctggagattcccaaaccctggaccagacaattgcagcggcggatctgggatcagttgctgaggccagtcccagtccatgcagcctgtcatgggttcgtgccggggcgatcacggttgactgctgcagcacctcactgcggtaaagaagccctactccgaatagacttgaaggacttctttgtgagcataccccgatggcaggttcgggccctgtggatgacactgggatatcccgaagctgtggcccgactgctggctggtctatgcaccacagtaacccctgctgccgtactggacgcatgtcccgcgcctccacaggatccctctcaacgctggtggtggaggaagcgagcgagcactccacacctgccacaaggctcgccttgctctccggcacttgcaaacctgtgcgcttggagactggacacaagactgacagcatacgcgaccgctgcaggcctggactacactcgctatgcggatgacctgttgttttctggctcagctcggactcttcggcgtcctcaaagacggcacgcactgatggagatcattagatccgaggggttttgtgtccatcccgacaaggtgcggctcatgacccagagtcagtcccagcaggccctgggattggttttaaaccagcgcttaaatcttcccagggcttccttcgaccagttgaaagccgagctccaccacgccctccaccatcagggccttcctagtgaggcttcagcccgcagccagaagctggcccaactccgtggcaggattcaggaaatgatcgatattcacccccgtagaggacaaaaactgctggcgctttggcagagactacttcgtgattga

SEQ ID NO: 12851 - RNA, 1005 nt, synthetic construct
  source 1..1005: mol_type = other RNA
atgcctccaacaaggagtgctcgggcaccagctctcgatagcttagatcagctgagacgctggctgagactatcaaccggggagttgctgtggttttgtgatgtctacggaaacggacggcgagcctgcgcaactgcccttaggcactatcgacacagatggatcgctaaacgctcaggtggtctgcgacttcttgagatccccaaggcacgcctcaaaaggatgcagcggcgcatactggacgagctcctgtctcacgccgcaatccatcctgcagccactggcttcgtgcgcggacgtagctgccttgaccacgctaggacccatgttggtgcgcggtgggtggtgacgagtgacctgagggactggttcgggagtattcccagagcccgcatcgcggcccagttcagacgtagcggcgctagcaaacatgtggctgacgcgttggctcggttgtgcaccgcctgtaccccctctgctatagtggacctggccgcggtgcccgatagagctcacttgcgagttcctcatcttcctcaaggggctcccacgtcccctgccttagcaaatctggtcgcatcaaggctggaccgccgcctagcaggatacgccaggcatgccggcctcaactactcgaggtatgcggatgacattgccctgtccccacagccaggcgtagaaacccctccacaaagagccctggaagcactgcagagaattgcccgttcagagggatttagagtgaatccccggaagatccggatcaagcggcacggctcccgtatgacagtctgtgggattgttattaacgagcggctgaacttggctagggatgcctatgaccggctgagagccgcagtacaccgactcgcatctagcactgatgtggatccgctcgaaatcgcccgggtccgagggagattatcttggctagagtccctcaatccgaggcgcgctgccaagttacgcaggctgctcgaaagcaggggcacaccatccacatga

SEQ ID NO: 12852 - RNA, 1377 nt, synthetic construct
  source 1..1377: mol_type = other RNA
atgactgacgccgcaacccctgcttctcgcgtgttggctaggactcctcatcctctgccacgtgatgttgcagctgcgctgggcgacgcctttttggccgctgaggcctgggaaagggctgctctgattgatgctggtgccgacgttcttggtgccagacggcgctggttaggcccgctagtgagagacgtgttaacggaactggccaggccaccaagcgatgcccccagactccttgtatccgtcatcgtacggagcagtgccttcttggaggcggtgcggaaggccgaagagagaggttcccccctccgcatacggcaccgtgtaatcgctccctccgtctcacgcgaacctaccggtgccttgcccgctattggagatgtcaccgacctggcagcactgctggagatcgatctcggccggcttcagtggctggcagacgtcaagcactggaataggcgggccagatcgccagccctgcagcattacaggtatgaatggaggagacgcccagggcgagttcctaggctgttagagatacccgagcaacggctcagacgtgcacagagacgcctgctacacgccgtgctcgccctgatccctgttaacgatgcagcgcacggctttctccccggacgttctgccgctacaggtgctgccagacacattggagcggagacagtgatctctttggacctgactacctttttcgcccgggtcaccgcaccccgcatttatggagtcctgcgacagagcggcttctcagaacccgtggctcacaccatgactgggctgtgcacaactgcggtgccacccgctgttcttgccgcaatgccgcccggaggatctccagatgagagatttgcactccggcgagcgttagcgagcacccatctccctcaaggcgcccctagcagcccgatgctggctaacctggcaatcaggcgactagacagtcggctcacgggctgggctgacgcattggatgccacttatacacgctacgcagacgacctggccttttcagggggaccagcacttgcacggagggctgatgccttcattcggggggcaaggaggattattgctgatgaaggccatgaggctaacgcccggaaaacaagagtgcgagggagaggcgtgaggcagtccgttaccgggatcgtggtcaacgagcgactcaacgtgtcccgcgatgactacgatcgactgaaagctatcgtacacaattgtgtggtgcacgggcctgccacacagaatcgaggtggggtggccgacttccgtgcgcatctgcttggaagaataagttgggtcgagtcacttaatgctaggcgcggtgaacgcttgagggccgagttcgccagaatccgctggtga

SEQ ID NO: 12853 - RNA, 1371 nt, synthetic construct
  source 1..1371: mol_type = other RNA
atggccgccaccacagcttcccgagtgctagcaaggacgcctcgcccactgccctcttcagtcgcagcgtcgctcgccgatgcctttctggccagcgaagtgtgggcgcccaaggagttgattcgcactggagcattcgtgatgggtgctagacggaggtggctgacaccccttgtcggcgatgtgatgtctgctttcgtgcgagcaccagttgatgccccacggctgctcacttcagtgatcctccgggctcccgacttcattgaggccgtccgaaaggccgatgagagacggtcgccgcttaggatccatcaccatgtagtgggccctagtacatcccagccccccagtggcccgttacctcgaattgactccatacccgacttggctgtgttgctggatctggacgtgggccgcttgcaatggcttgccgacacaaaacagtggaaccgcagagcccggcctggtcctttgcatcactatcaatatgaatggagagcacgcccaggtaggattcctcggctgctcgaaatccccgagcaaaggatgcggcgggtacagcgaacactgctagaacgggttctcgggttaatccccgtcaacggagccgcccacgggtttgtgcctggaagatcagctgtgactggcgcagcacaccacacaggaagcgacatcgtgatcagcctggacctgacgacattttttgctagggtgaccgcaggcagaatattcggaaccctcagacagagtgggctctctgagcccgtttctcatgtcataaccggcctttgcaccaatgcagtccccccgagagtacttgcagccatgccaccagggggatccccagaggagcgctttgctctcagacaggcgctcgccactagccatttacctcagggcgctccgtcttccccaatgttggccaatcttgctatcagaaggctagatagccgtctgactgggtgggcagacgctgtggacgccacctacactaggtacgccgatgacctggccttcagcggcggaagtaccctggccaaaagacctgatgcattcatcaggggtgtccagagaatcatagaggatgaggggcacctggctaatccaaggaaaactcgcgtccgtaggcagggtgttcggcagaccgttaccgggattgtggtgaaccaacgcgctaatgtcagccgtgccgacttcgaccgcctgaaggcgacgattcacaattgtgtactgcacggccctcatacccagaaccataggtccctggatgatttccgggctcacctgctggggcgtatttcatgggttgaatctctcaaccccccacgtggagcgcgattacgccaggaatttctgcggatccgctggtga

SEQ ID NO: 12854 - RNA, 1380 nt, synthetic construct
  source 1..1380: mol_type = other RNA
atgactgaagcgctcacaccggccaccagagtgctggcacgaactccaagagccggtgcatcagcaatcgccacagcccttgccgatgccttccttgcagcagacgcatggactgcaccccacctggtggatgctggctctttcgtgctgggagctcgcagacgctggcttcctcgcgtggtggacgacgttatggtggactttgtgcgagcccctgtggatagcccccggctactcatagccgtaatcagggatagtccagcgttccgggcggctattgagaaagctgacgcggcccggacccccattaggatccaccaccacgtggtcgccaccaccaggtctagagaacccgccgccgggttacccagaatcgacgatatcgctgctctggctgtgctactggagctgaccgatgggcagctggcgtggtttgccgacaccaaaaggtggaacagaagggctcggcccgggcctttgcatcattacagatatgaatggcgcagcaggccaggaagggtacccagattgctggaagtcccagaggagaggctccgacgggtccaaaggcgtctgctcgagcgggtacttgggctaatcccagccaatgacgcagcccatggttttatgccaggtagaagtgccgttacgggagccgcaagacacgttggcgctggaatagtcgtgtctgtggatctgacaacgtttttcgctcgcgtgtcagccgggagagtctatggaactctgcggcagtctggctactccgaaagcgtggcccatacaattgcaggggtatgtaccagtgctgtccccccccgtgtcttagctgcaatgccgcctgggggcactccggaagaaagattcgcactccgccgggcccttgccgcaaatcacttgcctcaaggtgctccaagctcacctatgattgctaacctcgcagtccgacgtctggattccaggctgactgggtgggctgcggctgttgatgccgcgtacacacgatatgctgacgacctgacattttccggcggaccaagtttagccgctcggcctgatgcgtttatccgcggcgttaggaggattgtggaggatgagggccattcgctgaacgagcgcaagacgagaatacgtaggcaggccacacggcaggctgtaaccggcattatcgttaacgagcggctcaacttggtgcggggcgactacgaccgtttgaaggccatcatccacaattgcattctccacggtcctagctcccagaatcgcgccggagttgccgacttccgagcacatctgagaggccggattagctgggtggagtccctgaatgcccagaggggagcacgccttcgcgctgaattcgcccgaatagtctgggcatga

SEQ ID NO: 12855 - RNA, 1398 nt, synthetic construct
  source 1..1398: mol_type = other RNA
atgaccagtactgccgccgcgagggctttaggtcactctccccaacctgctgcctccgccattgcaagagcactcgcagacgccttcctcgaaactccgtcttggacgaggcccgaattgatggccgcaggagctcgtgtcctaggcgcaagaagacgctggttgggccccgtcgtcgatgagatccttggagacttggttcgtgcccctcacgattccccacggctgcttgccacgctgatagaagattcgccagctttcagagagggcgtgtccaaagctgcagcccggagagcccctcagcagatccactacagacccctggccccacaacaccctccagctctgagccatcccctcgaccccgaaccgccacttcctaggctgcgtacgctgcccgagcttgctgccttgctcgatctgagcctcggccacctggagtggttagccgataccaaaaactggaacaggcgggcccgaccggggagtttacaccattaccggtacgaatggagaactcggccaggacgcgttcctcgcctgttggaggtgccagaggacaggatgagaaggacacagcgggctctgcttgatcagctgctgtctaggatccccgcgaatgacgcggcccacggatttctacccggaaggtctgccgtcacaggcgctgcaagacacgtagcctctgacatagttatttctctggatctgaccaccttttttgcacgcgtgacagctaccagaatctatggcactctgaggcaggcgggttacgacgagcagattgctcacgcaatcaccggactgtgtacaaacgctgtgcctcctcgggtgttagccgcaatgcctcccggcggaagcccagaagagcgattcgcccttaggcgcgccctagcagcctcacatctgccacagggcgctccgagtagtccaatgctggcaaatctggctgtgcggcgcctggactcaaggctcactgggtgggctgagaaggccgaggcttcctatactcggtatgccgacgatcttacctttagcgggtcaggagtgatcgcccgacgacctgatgcatttgtcagaggcgtacggcgaatcattgcggacgagggtcatattgctaatcccgctaaaacacgcgtgcggaggcaaggtacccgacaagccgtgacagggattgtcgtgaatcagcatccaaacttgagcagagttgaattcgataggctcaaggcgatactccataattgcgcagtacacgggcccgctgcgcaaaaccgctcagatgccagcgacttccgtgcccatctcctcgggcgcatttcctgggtggaaagcctgaaccctggtcgcggggcaaagttgcgtcgggagttctcccgcatcgactggggctcgccttga

SEQ ID NO: 12856 - RNA, 1410 nt, synthetic construct
  source 1..1410: mol_type = other RNA
atgagcgggtcgtttggaaagcgggcagtcccgaacactgccgtggttatcatggcagcgcataggagctatcgggctccccacccttctccatccgctatctcccacgccctggcttacgcctttttagctagcgacgtttgggaaacaaaacagctggtggatgccgggtggagcgttcttggtgctcatcgccgttggttacgcgccgtagtagcagatgtcgtcgcggcttatcaccggccaccaactgactcaagccgggagctagccgcatttattcgcaacagccctgcattcgtagacgcgatcgcaaaggcacgtcaacagagaaggcccatccggatacaccacctggtggtggctccctcccaagccagggatgttggcggcctcgtgcctcgaattaacaccgtggccgagcttgccgagctattgggccttaccataggccagctggactggtacgcagacaccaaaaattggaatcgcagagcacccgtgggacctctgcaacactaccgctatgagtggaggactaggcctggccgcactccacggttgctcgaagtgcccgaggaacggatcagaagggttcagcgcttgcttttagatgccgtcattgcgcttattccagtcaatgacgccgcccatggtttcattgctaaccgcagtgccgtgaccggtgctgcgttgcataccggccgggagatagtcgtctcactggatctgacaacgttcttcaccagagtcaccgcttcaagaatctacggggtgttccggcagtccggctttcccgaaaccgtggcacatatcctgactggcctctgcacgaattccgtgccccctcgagttattgcagccatgcctcctggcggggatgctgatgaaagattcgctctccgtcatgcgctcgctgccaaccacctgccacagggagcaccatcaagtcccatgctggccaatctggctattcgaaggctggattctaggctaacaggatgggcccacagtgtgggggccatctacacacgttatgccgacgaccttgcctttagtggggaccgagatttggcacgacggccggatgctttcataagaggagtccaaggtgtggtgcgggaggagggccagacaattaaccccaggaagacgcgcgtacgaaggtctggagtgaggcagaccgttactggaatcgtggtaaacgatcatacaaacatctctagacacgactacgacctgctgaaggccactctccataattgtgccaccctcggtgtggagcgtcagaatagaggggggcacaatgacttcagagctcacctcctgggaagaattgcctgggtcgaaacactgaacccgttgcgcggcgaagccctcagacagaaatttgcactgatcaggtggtga

SEQ ID NO: 12857 - RNA, 1398 nt, synthetic construct
  source 1..1398: mol_type = other RNA
atgactgatgccccaccgcagacaaccgggtcacccatcagtggggtgccaagggtgagaagagtgccccaccctacaccagccgccattgcaggcgctctgagctatgcgttcctagctgctgaccaatgggccaccaattccttgattgatgctggcgctcgcgttttaggcgcccgtcgtcgttggctacgcacagtcgtcgcagatgtggtggccgtgtatcatagaccccctgcagacagtagccgggagcttgcctcctttgtcgtgcagctgcccgcctttgtggaagccatcgcaaaggccaaacaacagcgccgtccaataggactccaccactttccagctgctccctctcaggccagggataggggggatccagtaccagtagtggacaccgtcggtgaactggccacactgctcggagtgaccgttggccacctggagtggtgcgccgacaccaaaaattggaatagacgagctcctgccggcagactacagcactatcgatacgaatggcgacagaggccaggaagaacgcccaggcttctggaggtgcccgaggagaggattcgcagggtccagcggactctgctcgataccgttatcggactcatacccactaatgtggccgcccatggctttgtagcgtcacgatctgcagcaaccggcgcggcattgcacacagcgcgagagatcgtcgtgactctggatctgactaccttcttcactcgggtgacggcagctcggatctacggggtttttagacagagcggcttcccggaatccgtcgctcatattctgacgggtctgtgcaccaactctgtgccgcctcgggttatagctgccatgcctcctggagggagtgcggacgaaagattcgccttgagacaggcgctggcaggaaaccatttaccccagggtgctcctagcagccccatgctcgccaatctggctatccgccgattggatagtcgccttacagggtgggccaacgcgattggcgccacatacacacgctatgccgatgaccttgctttctctggcgacagggacctggcaagacggccagacgcatttatccggggagtccaccgcatcgtcctcgacgagggccataacgttaaccctaggaagactcgggtaaggcggtccggtaccaagcaaactgtaacgggaattgtcgttaacgaaaggaccaatatatcccgccacgactacgacgcactcaaggctctccttcataactgtgctcaacacggtccggattcacagaacctgtcgcatcatgtggatctgcgggcacacttgatggggagaattgcctgggtgaccgcactgaatcctcacaaaggggaggtgttacacacaaagttcgcccttatccgttggtga

SEQ ID NO: 12858 - RNA, 1413 nt, synthetic construct
  source 1..1413: mol_type = other RNA
atgagcctgcgtttttggagtatgaccatggacgcagcctcttctacacgcgctaaggccggccttagagggatccgcagaccacacccagccccctctgctgtgtcacaggcattggcatatgccttcctggcaagcgaggtatgggcggccaaagaactcgttgatgctggcagtctggttcttggtgcgagacgtcgctggcttcggccggtagttgccgacgtgatggcggcttaccatcgcgcccctacagggtccactcgggagttggccgccttcatcgctaccgtccctgcttttgtggatgcagtggcggctgccgcacaacaacgaaggcccattaggatccatcgcgtggtggcaacagccagtcaagctcgacccgccggtggaccattacccgcaatagacacggttgccgatttggcagtgctactggggctgtctctcggcgaattagagtggtttgccgataccaagaattggaatcgaagggcgcctgcaggggctctgcatcactatcggtatgagtggagagccagacctggtcggaccccaagactcattgaggtgcctgaacagagactgcgcagggctcagagggctctgctggaatgcgtgataggcatgattcccctgaacgacgcggctcacggctttgtccctggcaggagcgccgtaactggcgctaccctgcacaccggacgggaaatcgtcgtctcgctggatctcacaacttttttcgcaagggtgcgggcctcacgagtgtacggagtgcttagacaggccgggttcgctgaatccgtcgctcatgtgattgccggcctgtgcacaaactccgtaccaccaagggttatcgctgcgatgcccgacgggggatctgctgaggagcggttcgcactgcgtcatgccctcgctgacagacatctgccccaaggcgcgccgtcttcacctactcttgccaatctcgccatcaggaggctggattcccgtttgtccggctgggccacgagtgtcggagctacctacacccggtacgccgacgatctcgcattcagcggtgatcgcgagttagcccgcagaccggacgcctttatccgcggtgtcgagcgaattgtgcacgaggaggggcacagcgtgaacccacagaaaactagggtccgccgttccggggttcggcaaagcatcacaggaatagtcgttaacgaacacacgaacatcagccgacgggagtatgatcagcttaaggcaattctccacaattgtgcagcccacggccccgaatcccagaatcgggaccaccataatgacttcggagcacatctgttgggtagaatagcctgggtgtcaactgtgaaccctctaaagggaagatcactaaggcagaaattcgccctcattgactggtga

SEQ ID NO: 12859 - RNA, 1017 nt, synthetic construct
  source 1..1017: mol_type = other RNA
atgccggtcccccggcttgatacactggccgatctcagtgctttgctcgggctcgacatcggcgagcttgaatggttcgccgatgcccggggatggaatcgtagggccccagaaagactgcagcactatcgccatgagtggcgaacacgacctggcagaactccccggctgctagaggtgccagagcagagaatgagacgcgctcagcgcacactgctggacaccgtgattggcgtgctgcctgctcacgacgctgcgcatggctttatgccaggacgtggcgtgatctctggggctgaggctcacctaggttccgcagtagttatctccctggacctcgtctcattcttcagccgagtgagcgcccgacagatctatgcagtactgcggagggctgggttacctgaggtggttgcacaccgggtgaccgccctgtgtacccatgctgtgcctccggctgtcctcgcaggtatgcctccaggggggagtcctgaggagaggtttgccctgcggcaagcgctagcacgaccccatttgccacagggcgcccctagctctcccatgttagccaacctggctgtgagaaggctggatgcacggctttctggatggtcagacgccgctggcgcacggtacacgagatacgccgacgacttgtcgttcagcgggggagccgaactcagtagacgctctgacgcattcgtccgtggcgttgccaggattgtggccgccgaaggtcacgagctgaatgaaaggaagacccgcgtgaggagagccggagaacgccagtccgtaactggcgttgttgtcaacgataggttgaaccttgcaaggcgggacgtcgatcagctgaaagccatacttcacaattgcgcggtgcacggtccagaatcccaaaaccgcgccggacatcccgattttcgcgcacacctggagggacgtttaaactgggtcgagtcattgaatcccgcacgcgctgcgagactcagacgggattttgaaaggattgcgtggtga

SEQ ID NO: 12860 - RNA, 1392 nt, synthetic construct
  source 1..1392: mol_type = other RNA
atgagcgacagtccaggagctactggtgcaggacgagcggccctcgtgttaggcagagaaccccatccctcttctgcgggggtggccacagccttggcatttgcattcctagctgccgatgtatggagtccatccggtctgtccaccgcagggactgccgttttaggtgtgaggcgaaggtggctgggacccctgatcagggacgtcctggaggcgtaccgacagccacctcacgacgcctccttggaattgtcgagagtgatcggggccacagaatcttttagggctgcggtccgacttgctgattccagaggagcccctctgcgcgtccttcaccacaaggttgctgagagccgggcaagagaaatgcccggcctggtgcctcacatcgatacaccggcagacctcgccaggctcctggaactctcagtaggcgaccttgactggttcgccgacgccaagcagtggaatagacggagcgctgtggcagctctgcaccattatcggtacgagtggcgtttgcgcccggggagaactccacggttgctggaaatccccgagactcgcgtgcgggcagctcagaagcgtttactcgtagaggtcctcggcctgatccccacacacgatgcggcccatgggtttgtcccgggaagaagcgccgtgactggcgctagtcggcataccggctcggatgtggtcgtgtccctagatctcacaacgttttttgcacgggtgaccggcgcagccgtttacggaaccctgagaagggcaggattgccagaggccgtagcctacgctattactggcctctgtacaaccgctgcccctcccagagttctaagcgccatgcctcccggaggggatcctgatgagcgcttcgctctgaggaaagcactggcctccactcaccttccacaaggcgccccttcttcaccaatgcttgccaacctggccatccgacgcctggacgcaaggcttcaaggctgggcggcagctgctggtgggacatatactaggtatgctgacgacctggctttctcaggcgggggacagttagcacggaggccagacgccttcgtgaggggtgtgcagcacattgtgatagctgaaggccacaccgccaatcctcgcaaaacacgcgtccggcgtgccagcgtgaaacagaccgtgacgggggttgtggtcaacgcgcgaaccaatatgtcacgtcgcgacgttgatcgcctgaaggcaattattcataactgcgtcctgcatggtcccgagagtcagaatacggctgcccatgccgattttagagcccacctcctcggcagacttagctggctggaatctttgaaccctgagcgcgctcggaccctgagaaccgagttccggaggatagagtggtga

SEQ ID NO: 12861 - RNA, 1299 nt, synthetic construct
  source 1..1299: mol_type = other RNA
atggctcttgccttcctggccgctgacgattggtcggccactcgactctctgccgccggatcactagttctcggggctaggcgcaggtggcttggaccactcgtacgggatgtgctggcggcttaccgcgaacctccacatgatgcctcccgcgaattaaccaccgttatcagcggttccgatgcattccgtgccgccgtggatagagcagacgccagaggcgctcctctgcaggtgacccatcacctcgtggcccagagccgaggaagagaggcacctgctcctgcaccactgctggatacagtcagcgggctggcgcggctgcttgatctgtctgtgggcgacttggactggtttgcagacacaaagcattggaacaggcgtgccccggctggtgctttgcaacattaccgatatgaatggcgtctgcggccagggagaactcctagactcctcgagatcccaggttccaggttgcgggcaacgcagcgcaagctactggtgggcgtgctcgggtttattccaacacacgacgctgctcacggattcgtgcccggcagatccgccgttactggagctagcaggcacacagggaaaaatgtggtcatctcagccgatctgactagtttctttgcacgcgtatctggcgcccgcgtttatggcaccttgcggagggcagggatccccgaaactgtcgcttacactattaccggactgtgtactacagccgcgccaccccgcgtaatagcagccatgccgcccggaggaaacctggacgagcgcttcgcgttacgaaaggcgcttgctgccacgcacttaccccagggtgccccttctagccctatgctggcaaacctcgccattcgtaggctggatgccagactcgagggatggagttcagcggctggggccgtgtataccaggtacgccgacgacctggcattttctggtggaggtgcattggcacggcgggctgacgcatttgtgagaggcgtggatcggattgtgacctccgagggccatacacttaattcacacaaaacccgcgttcggggcgcctctctcaaacagacagtcacgggcgtagtcgtcaacaagcataccaatatgagtaggagagatatcgacgagctgaaagccatattacataattgcgtggtcaacggccccgacagtcagaatcaaggcgcccaccccgacttcaggagccacctactggggcggctgtcctggttggaagcggttaaccccgctagggggcagaagcttagagtggagtttggccgaatccactggtga

SEQ ID NO: 12862 - RNA, 1386 nt, synthetic construct
  source 1..1386: mol_type = other RNA
atgacgtccaaactgaggggtgccacacccgcagctctggtactggccagacgtccgcacccatcctctagcgaggtggcctccacactggctctggctttcctcagtagcaaattctggcacgccacagcgcttagtgaggctggctcggcggtattgggtgcgcgtagacgatggttgggcccactggtgcgggagacacttactgtttatcgcgaagctccccatgatgcccccagggctctgaccgcattcatcgccgctgctgatgtgttccgcgctgccgtcgctcacgctgatgcttctggcgtccctatcgggcttgcccaccatcggattcctttgacccgagccagacctgtgccaggagttgtgcctcccctgggcaccctcgctgaacttgccgactttctggagctccccattggcgacttggactggtttgccgacactaggcagtggaacaggcatgcccctagcggcgcacttcagcactaccgctatgaatggagagcacgtgcagggcggactcctcgtctgctggaaataccaggcgcgcgcttacggtcagctcagaggaccctgctcaccggggtaatcggcctcgtgcccacacacgatgcagcccacggttttgtgcccggcaggtctgcagtgaccggagcaagcagacacaccggcacggatgtggtcatcagtctggacctgactaccttttttgcacgcgtgacaggggcgcgaatatacggtacgctgcgcagagcaggattgcccgaagccgtcgcctatactatcaccgggctatgtacaactgcggctcctccacgcgttattgcagctatgccggcaggtggacggccagaggaaaggttcgccctgcggcaagccttagctgccacccatcttccacagggagccccttcatcacctatgctagccaatctggccttgaggcgcctggattccagactcgccggatgggctgctgccgcttctagcgtctacacccggtacgccgacgacttggcgttctccggagacttaactctcgcgagaagggcagatgccttcgcccgaggggtggagagaatcgtcgcagcagagggacaccttgttaatccgcataagacacgggtacgccgcgccagtgtgaaacagactgttacagggattgtggtcaacacgcagaccaacatgtcccggcaggagagcgacagactcaaggctataatccataattgcgcacggcatggccccgaaagccaaaacaggggggcacacccagaatttcgagcccacctgctgggccgactatcatggctcgagacactcaatcccgcccgggggaggaagttaagagccgagttctctaggattcattggtga

SEQ ID NO: 12863 - RNA, 1404 nt, synthetic construct
  source 1..1404: mol_type = other RNA
atgtctgccggtgctgccgtgcctaggccaactccagccgcactcgtgttggctcgccgaccacatccctctaccgatgccctggctgctactctggccgctgcactcctcggcgcaaagacctggagcaagactgagatgatcgatgctggggcacacgttctcggagccagaaggcggtggttgggacctctggccacagagatcctgagctcctacccccgcgcaccaacggacagtccgagagagcttgcggcacatattattgactgtgccgctttctccaacgccatcgaagccgccacctcaaggggggttcccaacattatcgcgcattaccccctaactccccctctgaccccacctcaagccagagccgttacatccgcgttaccgcggcttgacacacttggcgacctcgccgcctttttaaccctgacccccggcgagctggattggtttgccgatacgggccagtggaatcggaccgcacgacctggggcgttacatcactatagacacgaatggagggtgcgcccaggtagaacacctcgtctgctggaagtccctgggaccaggttgcgcgcactccagagaaccttactgcatgacctccttgggctgattccaactcatggggcagcccacgggtttgttccaggacgttctgctgtgacaggcgccgctcgccatacaggaactgctgcggtgatatcactcgacctgactacattctttgctagcgtgacaggaagtgcaatctacggcactctacgccgagccgggtacccagaatcagtggctcactcaatcacaggcttgtgcacgcatgctgtgcccccccgtgtaatagccgctatgcctccaggaggtgatcccgccgaacgagccgctctgagaagagccctggctgcaccccatctacctcagggggctcccagctctcctgtcttgggcaacctggcattgcggcggctggatgccaggcttgcaggttgggcagacgccgcagctgctacctataccagatatgccgacgatctggcgttcagtggcggtacagacctgagacggagggccgacgcttttgttaggggcgtcacccgcattgcactcgctgagggccacactgtcaaccctcacaaaaccagggtccgaccggcatcggtacgccaaagcgtgacgggaatcgtggtgaatgagcaccccaatattagccgcgtagatgccgaccggctgaaagctatcctgcacaattgcgagctgcacggtccggctggccagaatagggcaggacacgccgatttccgtgcgcaccttctcggacggatatcctgggtcgagcagttaaacccagaacggggcgccaggcttagagcgtccttcggacggattcgatggtga

SEQ ID NO: 12864 - RNA, 1254 nt, synthetic construct
  source 1..1254: mol_type = other RNA
atgattgaggttggagccagagccttgggcgccagaagaagatggctggggccactggcctcagagatcctgagctcctatcccagggccccaaccgacgctccaagagagctggccgcccacataacagggtgcactgccttttctaatgccgtggaggaagcgacaagcaggggcgtgcccatcaccatcgcctcttatcccctgacaccccctcaagcgggcgctgtaacaagtgctcttccccggctcgataccctgggagacttggccgcattactaggcctcaccccgggcgaactcgattggttcgcagacactggccattggaatcgacgggcccgcccaggtgtcctacatcattatcgctatgagtggagggctcgtccgggaagaactccgcgacttcttgaggtgccagggactagattacgggccctccagagaacacttctgaacgacctgctagggttgattcccgcgcacccagccgcccatgggtttgttcctggaaggagcgcagtgacaggcgcagcacgccatacgggagcagctgttgtgatttcgctcgatctgacatctttcttcgcctctgtgtccgcacagaatatctacggcaccctgcggagagtcggttaccctgaagcggtggcctactcactgaccggtctgtgcacacacgcagtcccgcccagagttatagcagctatgcccccaggaggagatcctggtgagagggccgctttacggcgagctttggcctccgctcacctgccacaaggtgctcccacctcccctgtgctcgggaacctcgcaattcgacgcctggacgccaggttggacggttgggctgaagctgcagaggctacttacacccgctacgcggacgatctggcctttagcggaggcgatgctcttcatcggcgtgcagatgcgttcgtacggggcgttaccaggttagtaacggccgaggggcacaccgtcaatccccacaagactcgtgtccgccctgcgtcagtgcggcagagtgtgactgggattgtcgtgaacgcaaggcctaacctcgtgcgcgtcgaagccgaccgccttaaagcaatcgtccacaactgtgtagtgcacggaccagccggccaaaataggggcgctcatcctgacttccgagctcacctgctgggccggatcagttgggtggaacagctcaaccctcagcggggggcacgtctaagggctacgtttgcccgcatcaggtggtga

SEQ ID NO: 12865 - RNA, 1176 nt, synthetic construct
  source 1..1176: mol_type = other RNA
atgattcggggccataccccccacagttcgacggctgacgtggcatcagctttggctggggccttcttggctgcagatgcctggacagaacgggatctggttgccgcaggtgcccacgttttaggggccaggaggcgatggcttccaccactcgtgcgggagacacttgctgcgtatcgccgcccacctgtggatgcccctagagaactcggcgactttgtcgaaatgacagctgcgttcggactggcagtcgttgccgctcacgatcgacggacccccattcgcattgaacatcgggtattggtcgccgctagagccgtaccagccacacctgccgtgcctagggtggacggactggacgacctcgcagacctgctgggcttaacacccggcgagctcgactggtttgcagaccgccgccactatactcgtcgtgccaccgatacccggctgcagcactaccggcacgaatggcggactcgtccacagaggactcctcgcctgttagaggtgcccggatcccgcctggtggcagtacagaggacagtgctggccgagctgcttgggccactaccagtccatggggccgcccatggttttgtaccggggcgaagcgcgatcacaggtgctgctagacacaccggcgcagcagtggtgatcgccctggatctctctactttctttagtcgggttaccgccggcagggtctatgccaccttgcggagagcaggatacccggaggctgtggcccatgccatcactggcctgtgcacccatgcagtgcctccgagggtcattgcggccatgccttccggaggcgatgccgatgaacgctttgctgcaagaagagcgctcgccgcagctcacctgcctcaaggtgcacccacatcccccatgctagcgaacctgtctgtccgtcgattggacgcccgacttagcgcatgggctgagagagtggatgccacctacaccagatacgctgacgacctcgctttcagcggtccaccggcccttgctcgaaggtcagacgctttcataggaggaggggagagaatcgttacggccgagggccaccccccaaatgcaaggaaaacgcctgggaggccagctagacccccacctagaggaccaggcaatgcggggacagatcccccccatactcctcgcactggctga

SEQ ID NO: 12866 - RNA, 1113 nt, synthetic construct
  source 1..1113: mol_type = other RNA
atgcgtgccgcactgcgcagggccgtaaaacgcggaactccggtaatcattgcacaccacgttctggcagaaccggtcgctcccgcctctgcatcccctgtacctcggctcgccagtgtgaccgagctcgctgctgccctgcacctggagataggcgaattggaatggttcgccgatacccgactacagcttcggcgggcgtcatctacgaggctccagcactatcggtacgagtggcgagaaaggcctggtcgcctccctcgacttctggaggtgccagggaggcgtttaagggccgcgcaacgcgctgctcttgatgctgtgatagggttagcccccttgcacgatgccgcgcacggctttgttccgggaagaagcgctcgcactggggctgaaaggcatgtggggtccgaggtggtcatcgctctcgatctaacgacattcttcgccagagtcaccgctagagacgtgtaccgcgccttgcgtgctgagggtctgccagaatctgtggcatatgtgctgaccggcctgtgcactcatgcagtcccatatcgggttgcagcccatcctccacgcggaggagacttggatgagagatttgccctgcagaaggccctgacagttccccatctaccacaaggcgcccccacttcccctgcactggctaacctgtgtgttcgtcggcttgacgcccggcttgcgggttatgctgaagccgccggagccgtgtacaccaggtacgcagacgatctcgctttttcgggagggcctgccttagctagacgagcagacgcttttgcacggggcgtccggagaattgtggctagcgaggggcacgagctgaatgaccataaaaccagaattcggacagccagcgtcaggcagagcgtgactggcatcgtggtcaacacacgccccaacgtgacaagagccgagtacgacgcgctgaaggccaccttgcacaattgcatcagggatggcccagcaagtcagaacagggcgggtcatgcagagttccgcgcacacctcctgggccgaatctcctggatcgcttcactcaatcccgccaggggagaaagactgcgagccgagttcgacagaattccctggtga

SEQ ID NO: 12867 - RNA, 1095 nt, synthetic construct
  source 1..1095: mol_type = other RNA
atgcgagccgccctagctgacgctgcacacagagggcgtccactgggtattgctcaccatctgatcgcagaaccgcccagcggtacacatcctggtagcttagctgaactcgccgccctcctggaactcacacctggcgagctggattggttcgccgacacacagctgagacagaggagggcccccgatggaccactgcagcactaccgctacgagtggagggagaggccagggagattgccccgactcttggaagtacctggcagaaggctgagagccgcccagcgagttctgctcgaggaagttgtaggcctgctcccactgcatgacgctgcccacggctttgtgccaggtcgctccgttcgaaccggagccgaaagacacctgggccaggaggtggtcattgctttggacctaaccacttttttcgccagagtgagcgcacgcgatgtgtaccggctgttgagaggggcctctatccctgaagcggttgcatatacaattaccgggctgtgcactcacgctgtcccctatagggttgctgcacaccctcctcgcggaggagatctcgacgaacgcttcgccctccagaaggcccttacagtcccccatttaccccagggggctccgacctcacctgctcttgcgaacctgtccctgcggaggctggatgccagactggctggatatgcagctgcggctggcgcagcatacacgcgttatgccgacgatcttgccttttcaggaggccccgcattagccagacgggctgacgcatttatacggggtgtggagcgtatcgtggcagcggagggccacctaatcaacgcacataagacccgagtccggaaagccgctgtgcggcaaagtgtgactggggtggtcgtaaatagggtcacgaatgtgactaggaccgagtttgacgcgcttaaggcaactttgcacaactgtgtggtccacggcgctgcctctcaaaacaggggcgcccatccagatttccgcgcccatcttctcgggcggataagttgggtggcagcgttgaatccagcccgcggagccaaacttcgggaggagttcgaccgcatccattggtga

SEQ ID NO: 12868 - RNA, 1380 nt, synthetic construct
  source 1..1380: mol_type = other RNA
atgaaggaaacaacagtgtctgccgccgcccttgtacttgctcgtcacccacacccgtctgtacccgcactggccacagcactaggacacgccttcctggccgccgaccaatggactgcgagggagctgattgcatccgcagccagaactttgggtgcccgccataggtgggtggggcctttggttgccgaggtgctggctgcatatcaccggcctcccatcgatgctccgcgcgaactagccagcatgatcgaggcagctgaggcttttcgggctgccgtggctcgagctgagcagagaagagctccgatacgaatcgcccactacgcagtggaacctggaacggcaaggcctatgcccgcaggtgttccccgtatcaacggccacggggcgttagcagagctcttgggattaagcccaggcgagcttgattggttcgccgacaccgcgctctggaatagacgaggcacaagcgagcggttgcagcactaccgttatgagtggcggcagagggaaggacgcgtaccgagactgctggaggtgccacagcggagactcaaaggggtacagcgcagtgtgctggcatccatcctcggccccattcctgcccatgacgctgctcatggctttgtgccagggcgatctgccgttagtggtgcggccttacacaccggcaacgatgtcctcattgctctcgatctgtccacctttttcgctcgcgtcccagccaggcggatattcggcaccttgcgccaagctggactgcccgaggctgttgcgcataccgtttcaggcctgtgtactcatgcagtgcctccaagggtgatagccgcaatgcccaggggaggcacagcggaagatagatttgccttgcgaagggccctggctacgcctcatctgccccaaggagcccccacttcaccagcactggctaacctggcaatccatcggcttgacgctcggctttccggttgggccgatgctgctggggcaacctatacaagatacgcagatgacctcgccttttcagggggtcctccacttgcccggagagctgacgccttcgtccgaggagtcacccgcattgtggaggccgaaggccactctctgaaccgcctgaagactagagtgcgtgcctcgagtgtccggcaggtggtgaccggtattgtcgtcaatgaccggactaatctcccccgagccgaatttgaccgccttaaagccgtcctgcacaattgcgtgatgcatgggcctcactcccagaatagggccggtcacagcgacttcagggcgcatctactcggcagaatcagctgggttgaagcgctgaaccctgggaggggtccacgccttagagaagaactggagaggattcgttggtga

SEQ ID NO: 12869 - RNA, 1476 nt, synthetic construct
  source 1..1476: mol_type = other RNA
atgaacgagacgggccccatcccaggggacgatgatccaaccggaccagccacagctagacggaggggaggcaggcatgtgcctagccctaggtcgacacgcggcagtgccactctcggtagagaacccgcacccggtgcaccagggttatccctgttgctcgcatacgcattccttgctgccccggactggaggcaggaggaactgatagccgtaggtgcggtgctccttggagcccgtagacgttggttaggccctctcgctcgcggcgtactaacagggtaccctcgaagaccagtgggagccccgagggagctggctagatggatcgctgcccagccagcctttacggatgcaatcgcccgtgcatcagctcggggcatgcctatttcccctgcccggtacctaaccgccgtgactgaaggtccggctccagctggttctgcacctggctctgccgtggctacacctggcacaagagacttggcctggctggctcgggaactgaggcttacccccggggagctggattggttcgccgacactcgccattggaataggcgtgccgcaagccgtgcactccaccactatcggtatgagtggagggtcagacccggtcgggtacccaggttgctggaagtccccggtatccggctccggacagttcagcgacacgttctggaccacatcttggctcctatccccctgcacgatgccgcccatggctttgcacccggacgatcagctaggaccggtgccgctgttcacactggggctgacgtggtggtcgccttagaccttgtgtccttcttcgctcatattaccccagggcgcgtgtttggggtatttcgacaagccggcttccctgaggccactgcgcatgcactcacgggcctgtgtacccacgaggttcccgacgccgtcctgcaatccatgcccgatggtgggggaagtggcgagcgctttgccctccgtcaggcacttagggcagctcacttgcctcagggagctccgagcagcccagccttagcaaacctggccgtgcgccgcctagacgctagactagccggatgggctgcagcggctggaggaagttatactcgctatgctgacgacctggccttcagctcacccgcacctctggccagacgagctgatgcgttcatccggggggttgagcgcattgtggtcgccgaaggacatgccgtgaatcgccccaagactagagtgtccggagcgtctgtccgccagaccgtgacaggcgtcgtggtcaatgcgaggaccaatgttgccaggaccgattacgacgcactgaaagcaattttgcacaactgcagagtgcatggcccagaatcacagagacgggggcaagccgatttcagggcgcacctagcggggcgaattgcgagagtcgaatctctgaacccacagcgaggccggagacttcgggatgcatttgagcggatacgctggtga

SEQ ID NO: 12870 - RNA, 1479 nt, synthetic construct
  source 1..1479: mol_type = other RNA
atggatcgcaccgggccgaccacaggagacgatgaccgaatgaggccagccacagctcgtgacggaggaggtagaggcagaccctctccaaggcccactcctgcaagtgctaccctagccagggaaccagcccctggagtacccggactctcccttctgctggctcacgcctttttagccgcgcctcagtggcgacgcgaagaactcatagtcgcaggggcggcacttctaggagctaggcggaggtggttgggtcccctcgttagaggcgtgctgagtgggcaccctagaccccctgatggagcacccagagagctggctcgatggatagcggcgcagcctgctttcacggaagctgttgccagggccagcgctagagggacacccatcggtccagctcaccacttaccagccgtcccagaggaacgcacccccttgagaaccactgcctccgcagatgctgtgagaaccccgggaactagggacctggcatggctggcccgcgaactcagactgacaccgggcgagcttgattggttcgcggatacccggcattggaacagaagagccgcccatcgagccttgcaccactaccggtatgagtggcgagtaaggccaggtcgcgttcctcggctgctcgaaattccgggcatcagacttcgcaccctgcagaggcgcgtgctcgaccatattctggccccactccccttgcacgatgctgcgcacggctttgttccaggacgttccgctaggaccggagccgctgtccatacgggagctgatgtggtgattgcactggacctggtagccttcttcgctcgggttcctccgggacgggtctttggcgtgttccgccaggcaggcttccctgaagccactgcccatgccctgacagggttatgcacccacgcggtcccagacgctgtgttacgtagcatgccagacggaggctcagcaggggagcgttttgcactaggccgggcccttaggacggctcatcttccccagggtgccccctcttcccctgctttggccaacttggccgtgaggcgcctggactctcggttagcaggttgggctgcagcagccggcggtacatatacccgttacgcagacgacctgagcttctctgggcctgccagtctcgcacgaagggcagacgcgtttgtccgcggagttgagcgcatcgtggtcgccgaggggcacactgtgaacagactgaagacacgcgtgggtggagcccccgtacgacagacagtcactggcattgtggtgaacgtgcgtactaatgtggcccggactgattacgatgcactccgagccatcctgcacaattgtcgggtgcatggccccgagtcacaaagacgggggcaagctgacctcagggcccatctagctgggcgcatcagctgggtcgagtcactgaatcctcagcgggggaggagacttcgggatgcctttgagcggatctcgtggtga

SEQ ID NO: 12871 - RNA, 1455 nt, synthetic construct
  source 1..1455: mol_type = other RNA
atggacggtgcagggccacgtgcagtacgtggaccagctaggccacggcggggaagaggtgcaccagaaggccctacttccgcaagcgccacactggctagagaaccagctcccggagttccgggccttgcgttcctgctggcccatgctttccttgccgcaccagactggcggagggaggatttggtcgctgccggtgccgctttattgggcgctcggaggcgatggctagggccattggtgaggggcgtcttagcaggctaccctcgtagacccgaaggagcccccagagaactggccagatggattgccgctcagccggctctcacagacgcagtcgccagagcggctgcaagaggcgagcctgtacggccagctaggtatctcccacctgcccctgaggaacaggctttcggggatcgctcagcgcctggaggtgtggaggcatctggggcacgcgatcttgcttggctggctcgggaggttcgactaaccccgggggagctcgattggttcgccgataccagacactggaataggcgagccggagcccctgcgcttcatcactaccggtatgtgtggcgtgcgaggcctggaagagctcccagactcctggagatacccggcatcaggctccgcacagtccagcgtagagtgctggatcacctgctggccccgatacctctgcatgaggcagcccacggattcgtgcccggaaggtcagctaggacgggagctgccttgcataccggggctgacgtcgtgattgccctcgacctcgtctctttctttgcgcgagtgccccctggacgagtctttggggtgtttcgccaggccgggtttcctgaagccactgcgcacgccctaaccggactgtgcacacatgaagtgcccgatgccgttctgcgcgccatgccagatggcggttccgcagaggacaggttcgcactcgctcgggccctcagaaccgcacatcttccccaaggtgcaccctcgtcccccgctttggcaaacctagccgtgcgtcgcttggacgcccgcttatcaggatgggctgcagccgcaggtgggagctacactcggtatgccgacgatctggcgttcagtggtcccgctgatcttgcgaggcgagcggatgcatttgttcgcggcgttgagcgcatcgtggtggccgaaggccacactgtgaatcggcgaaaaacccgtgttcggggtgccgccgtaaggcagaccgtgactggcgtcgtggtgaacgcccgcacgaatgtggcccggacagactacgacgccctgaaggcaatcctgcacaactgtagggtccacggcccagagtctcagagacgggggcaagccgactttcgagctcacctggctgggcggatcagctgggtagaaagcctgaaccctcagaggggccgcagactgagagacgcctttgagcgcattagttggtga

SEQ ID NO: 12872 - RNA, 1467 nt, synthetic construct
  source 1..1467: mol_type = other RNA
atggacgacaccgagtcccttccagacgatggtggatccttccccgctagagggggccctgttagggcatccagagggactgctgcggctcgcacactggcaaggacgccagcaccaggtggtcctgggttggcgtttctgctggctggtgccttcctgacagccccagcatggcaacgtgaggacctcctggatgcaggggccgcagtgttaggaggcaggaggagatggcttgggccgctcgtcagagcggtgctagctggatacccccgtagacccgatggtgccccacgagagttggcgaggtggattcgcgcccagccagtgttcacagacgctatcggcagagctgccgcccgaggagtaccgatcactcccgcacggtatttaaccgccggtgcacccgaggagggacatagaccgagccgcgttgatctgggtactggtgcacctgctgctccaggagccggagatttgggcaggcttgccagggaactgcgactgaccccgggggaacttgattggtttgcggacaccaggtcctggaatcggcgggctcctagtcaggctctgcgacactaccgctacgagtggcgatctcggcctgggagagtgcccagactgctggaagttcccggaatccggctccggaccgtgcagagaagagtcctcgatctcgtcctggcacccatccctctgcatcctgccgcccatggcttcgtccctggcagaagtgccagaacgggcgctgccctacatgcaggcactgacgtggtcattagcctggacctcgtgagcttctttgcccacgtgagtcccggcagaatcttcggcgtcttacgccaagctggctgtcctgaggctaccgcccacgtcctgacaggcctgtgtacccattctgtgccagaagctgttctgcgagccatgccaggtgggggcacacctgaggaacgatttgccttggcacgcgctcttcgtgcagcccacttgcctcagggggcaccatcatctcccgcccttgccaatctcgccgtgaggaggcttgactcacggctggctggatgggcggaagctgcaggaggcacatatacacggtatgccgacgacctcgccttcagcggacctgctgggttagcacggagggcagatgccttcctgaggggggctgagcgcatagttgccgctgaggggcacgaggtaaaccggcacaaaacccgagtacgctcggctgcgacgcgtcagactgtgactggcgtagtggtgaacgcccacccaaacgtggcacgggctgactatgatgcgctgaaggccaccctatacaattgcttggttcacgggcccgaatcacaaaggcggggacaggccgattttcgtgcccatctcggcggccgcataagctgggtggagtctctgaaccccctccggggacgcaagttgagggaagcctttgatcgcattggctggtga

SEQ ID NO: 12873 - RNA, 1680 nt, synthetic construct
  source 1..1680: mol_type = other RNA
atgctcggctggcaacgcagaataccagcggaggcggaacatgtgcacagggcccgatcatcgcctggacttccccgtgggacccagacagaccaacaccgtgcaccccaagcccctgactgcgcatccaggtcttccgctcctgagcaacgggaacaagtcggtcgtgacccctctccggccgataggcagggaggaaccggagaaggtggtcacgggggcaggcgaagcaatgacgggaggcagcctgatgtctcctcccggaccagaagagcgggacctccaccaacgaccgctggtgcagcccttgcacgtcttccaacaccgggggggccaggtttagccttcttactcgctagcgcctttctcgactccccctcttggcagagagagcacttggtggaagcaggggccgccgtattgggagccagacgaaggtggctgggacccctcgtacgcagtgtcctgagcggctatcccagaagacctgacggagccccacgcgaactggccagatggattgcagctgagccggtgttctcagatgccgtcggtagggccagagctcgacggagtcccatcagacccgcacgcttcctcgttcaggaggactctgaaagagccgacccacctgagcccgttccacctgacgcagcagtggagagcggacggacctcaggcatcaaagatctcgcttggctagcgagagagctgcgcctgactcctggcgagctggattggttcgccgatacccgccattggaacagaagggcagggtcggccctgcagcactaccgatacgtgtggagggtcaggccagggagagttccccgactgctcgaggtgcccgggataagactgcgaacagtgcagcgccgcgtgctcgatctgctcctagctccgatgcccttacacggtgccgcacacgggttcgttcccggaagatccgctcgtactggagcccgggtccactctggcagtgacgtcgttatcagcctcgatctggtcagtttctttgcccgggtgccccctggccgagtatttggagtgttccgccaggagggctttcccgaagccacagcccatgtgctgaccggcttgtgcacccatgctgtgccagaaagggtattgagggacatgcccgatggcggttccggtcaggaacggtttgacctggcccaggcgttaagggcccctcatctgcctcagggagctccttcttcaccagcccttgcgaatctggctgtgcggcgcctggatagcaggcttgcagggttggctgacgctgcagggggtcgttatactcgctacgccgacgacctggcatttagcggtccgggagccctgactcgaagagctgatgctttcattcgcggcgttgaacggattgtggaggcggaggggcacagtgtgaatcggaggaaaactagggtgcggggagcttccacacgccagacagtgacgggggtggttgtgaacgtacggccaggcgtcgcacgccctgattatgacgccctgaaggccactcttcataactgtgtcgtacgcggtccagagtcacagaggcggggcagagctgatttccgggctcatttggctggccgggtgagctgggttgagtcactagacccgccacggggcaggaagctacgtgaagcatttgatcagatcgtctggtga

SEQ ID NO: 12874 - RNA, 1464 nt, synthetic construct
  source 1..1464: mol_type = other RNA
atggtcagcgacgagcgtggccatcatagagggtcagacggagctcctggtgctccaggacgtccagcactgatctctagagccacagcccccacatcagccgcctccagagctctggctcgcacaccagatcctgggacagcagggttggccctacttctggcggaggcatttctcgaagcttccgcctggcagagagaggagctggttcgggtgggcgccgagttgttaggtgccaggcggagatggttagggccgctgcttcgaggtgtactaggcggctacccacgtagaccgggtggagcaccgagggagctggcaagatggatcgaagcccagcctgtattcgtggaagctgtttcaaccgcccgggcagctgggaggcctattgttcccgtgcgctacttggtcggtgagcgcgatgggcccagaactccagaggaccctgaggcaagcgaagcagagtgtagggacttggcctggctcgcaagggagcttggcttgcccccaggcgaactggagtggttcgccgacactcgccactggaacagacgggcggggcttctcttgcagcactatcgatatgtatggcggtctaggcccggtcgcgtacctcgattactggaggtgcctggcattcggctcagaactgttcagcggcgagtcctggaccggcatctgttaccaatccccctgcatcccgccgcccatggatttgtgcctggaaggagtgcgcgaagcggagcgactcttcacacggggtctgccgttgtgataaccctggacctcgtctctttttttgctcgcgtgaccccaggaagggtgtttggggttttcaggcaagccggttatccggaggcgacagcccacgtgctgacaggactctgcacccacagtgtacccgaggccgtgctcagggcaatgcccgatggaggcaccgctgaagaacgcttcggcctgacgcaagctctacgcgcccctcacttacctcagggagctcccagttcacccgcccttgctaatctggccgtgcgccgactggatgctcgtcttaccggatgggccgaggctgccggaggtgtttataccagatacgccgatgacctggctttctccggacccgccgaattggcaaggcgagctgacgcgttcgtgagaggggctgatcggatcgtgactgccgaaggccacgctgtgaacccacggaagacacgggtgagggggtcctcggtcaggcagtctgtgactggcatagtcgtcaatgcccgcccaaatgtcgcacggaccgaatacgaagtcctgaaagcaattctgcacaactgcacgctccatggccctgaatcccagagtcggggccaaggcgatttcagaagccacctcgcaggccgcatcgcatgggtgtccagcctgaacgcgctgagagggaagaaactccgcgatgcatttgagcgtattagctggtga

SEQ ID NO: 12875 - RNA, 981 nt, synthetic construct
  source 1..981: mol_type = other RNA
atggcccgggaactacgcttgacccccggagatctcgactggttcgccgacacgcgccagtggaatagacgcgcggtgccagtgctgcagcattatcgctactcatggagacaacggcccggacgagtacctcggctgttggaggtcccaggtcccagactgcgggtggtccagaggaggctcctcgacagaatcctggctcctctgccattacatcccgccgcccatggatttgtacgggggcgatcagcccttacaggagcggcacttcataccggggcagacgtcgtgatttccctggatctcacggcattcttcgcacacgtggttcctggcaggatttttggcgccctgaggcaggccggatatcctgaggccactgcgcatgtcttgacagggctaaccacacactctgttccagacgctgttctgaggtcgatgccggacggaggtggcccagatgagaggttcgctctccgtagagctctgcgaacagcccacctcccgcaaggtgctccttcatcccccgctttagcaaacctggccgttcggcgccttgacgcaagactgacaggctacgccgaagctgccggcggagtgtacactagatacgccgatgaccttgccttcagcggttccgcagatctggctcgcagggctgatgcgtttgtgcggggtgtgggccggatagtcaccgcagaagggcttgccgtgaacgctcgaaaaactcgtgtccgcggcagcagtgtaagacagtctgtcaccgggatcgttgtgaacgctcaccccaacgtggcccgcactgaatatgataccctgaaggccatcctccacaattgcgcattacacggccctgaaagtcagaggcggggaagggcagagtttagcgatcacttggctgggagaatcgcctgggtgtccgccttgaatgcgagccgtggcgagaagctgcgagacgcatttgagaggatttcttggtga

SEQ ID NO: 12876 - RNA, 1284 nt, synthetic construct
  source 1..1284: mol_type = other RNA
atggcaaggcttctggctcgcgccttcctggatgcaccaacctggcagcgggaggatctactggctgcgggagctgatctgctcggagccagacgcagatggttggggcccctcgttcgcacggttcttagcggacatccgagaaggccagccggagcaccgcgagaattagcagcctggattgaaagggcccccgcattcgaagaggccgttgccagagctgcggcagctggtactcctttagcgccctcacactttttgctggaggatgcacctgccgatacacatgacctgggagagctggcgagggagttacgactgacccccggggagctcgattggttcgccgatactagatcatggaatcagaggacaccacagccggcccttcggcattatcggcatgcttggcaagtcagacccggcagaacccccaggctcctggagattcccgggatccggttgcggactgtacagcgtcgggtcctcgacagaatacttacaccactccctctgcatggagcggctcatggcttcgtgcctggtcgaagcgccagaactcatgccgccgcccacactggaagcgacgttgtcattgccctcgacctggtgagtttctttgcaagtgtcccaccagggagaatcttcggagtactcaggcgggcgggctaccctgaagctgttgctcacaccctaaccgggttgtgcacccacgccgtgcctgaacgggttctacgcgcgatgcctgatggcggtacacccgaggaacgctctcgtctgacccaggctcttcgtgctcctcacctgccacaaggggcaccatcctccccagccctggctaatctgtccttgcgccgtctggacgctcgccttgaaggttgggctgaggcagccggcgccacatacacaaggtatgccgacgacctcgccttttctggccccgcatcgctagccagacgagctcacgcatttgtgaggggcgtggaacgtattgtaactgccgagggccaccgagtgaacccaccgaagacgcggatcaggggagctagcgtgcgccaacaagtcaccggggtcgtggtgaaccgacaccctaacgtgcccagaaaagagtacgacgccctgaaagcaatactgcacaattgtcgggtgcacggtcccgaatcccaacggcgaggtagggtgcgctttctcgagcatttagcagggcgcatcgcatgggtggcctctctggaccctcagaggggcaggaagttgcaggacgcctttgatgctatcggctggtga

SEQ ID NO: 12877 - RNA, 1374 nt, synthetic construct
  source 1..1374: mol_type = other RNA
atgaccaacgattataaggccgcccaggtgctggcacatacaccacacccaacccctgcaatcgtcgccactgctctgtctcacgctttcttagccgcacccgactggacagtggaagcgttagttagcgctggcgctgaagtcttgggtgccagaaggcgctggctaggacccctagtacgagccgtggtgtgtgcctaccatcggaagccagcggacgccctccgagagttagctgcacacattggggcctcggagccattcgctgccgcagtagacaaggcccacgaccagaggaaacctctgaggcttgctgcatatgccgtggcagagcctgagctcagagagggaacacaccccgtgcccgaagtagccggactcgagcagcttgccgctgttctgggggtcaaactgggagaactggaatggtttgcagataccagacatctgaatcggcttgcttcccggagttgcctgcagcactatcgttacatgtggagggaacgacccggacgaactccgcgcttgctggagattcccggccttcgcttaagaagcattcagcggaaagtcctgcacggactcctcgccccgataccacttcataatgccgcccatggcttcgtgcctggcaggtcagcttcttcaggcgctgcgctgcatacaggcgcagatgttctgatatccatggatctcttgtcatttttcgcaaatgtgacagctgggaaggtgttcggcgctctgaggcaaagcgggtatccggaagcggtcgcccacaggttgactgggctgtgtactcacatcgtgccccctagggtcatctcatccatgccacctggtgggagtgcagcagaacgcttcgccttgacccaggcgctccggcttcctcacctaccacaaggtgctcccacctccccagcgttagcgaacctagccctgcgccgcctcgacagtagactgcaaggttgggctgaggctgccggcgcaaagtacactagatacgccgacgatctggggtttagcggtggacccgctctggctaggagaaccgagagatttctgcgcggcgcaaagcacatcgccgcagacgaaggacataagctcaatgagagaaaaacaagagtgcgtcctcggagtacgcgccaacaggtcacggggatcgtggttaatcagcacctcaacgcaccccggcgtgagtttgatgcccttaaagccattctccacaactgcatgctgttcggccctgagagccagaaccgagccgatcataccgatttccgcgctcatttgctgggccggattacctggatggagtccctgaactctgcccggagcgttcgattgaggcgtgactttgaccggatctcttggtga

SEQ ID NO: 12878 - RNA, 1467 nt, synthetic construct
  source 1..1467: mol_type = other RNA
atgctgggggctacccagagcgtcttcggagtgaggcatcggtggctgcccgccttagtgcgagaggtgctcgtggtgtttcgcacagcgcccgttgatgcacctcgggaactcgccgccgttatccgtaggtccgccgctttgacaggagccctgagccgtgcaggcgaaagaggcagacccctggccatcgcacactatcccgtgggggaagccgaacaccctgaacccgcaccagctgctgagccagctagagcatccgcctctgctagtgcttctgctcccgaacccgccagggcttctgctagcgcagctgaacctccaccagctccctccgcagccgaaccagcaccagctctgtcaggagcggaacctgcacctgcagcgagtgcgctggtcccagtacccccacctgctttggctctcccgctcgagcctcctttgccacctcctatgccgttaccccgcacgctgcccgctttagcagcacttctggatgtgactgcaggcgagctggactggctcgcggacactggaggttggaatcgaagggccagggagggccccttacatcactacaggtacgaatggagaactagaccaggccgcgttcccagactcctggaggtccctaacgagcggatgcgcacagctcagcgcacactcctcgctgaagtcctggggggacttccgctgcacgatgcagcccatggcttcgttcttggaaggagcgccctgacagccgccggactacacacagggacggatgtggtgattactttggatctggttacgttttttacaagggtcaccgccgggcgggtatatggaaccctaaggcaggaaggcgttccagagcgggtagccctcgctttgaccggcatcgccaccaatcgggtaccccccagagtcattggagccatgccaccgggtggtgacccaggtgagcgtttcgcgttgagacaggcccttgcgactgctcatctgccgcaaggcgctcctacctcccctatgctggcgaacctggccatacgccgcttggactcgaggcttgctgggtttgcacttgccgccgatgcccgctatacccgatacgcagatgacctgaccttctctggtcctctgcctctaagacgccgggccgatgcgtttctgcgaggtgttacccggattgtggtggacgagggccataccgtgaatcgacgcaagacacgggtccgtccagcagccaccagtcaacgggtcactggcatcgtggtgaacgagaggactgccctcccgagagctgagttcgaccgcctgaaggcaattcttcacaactgtgccgagcacggcgccgcctcacagaatagagccgggctggaggactttcgtgcacacctcctagggcggatatcatgggcccgagccttgaaccccgtgaaagccgagagactgcagcgggagttcgacaggatcgtgtggtga

SEQ ID NO: 12879 - RNA, 1599 nt, synthetic construct
  source 1..1599: mol_type = other RNA
atgcgatggtccgccgacgaagtggacggaagccgaagggatccaccatcacctgggccaccaagggggacccaaaccgattctggaacttctccccaggcatcccatcggacaagtagcggcagaacgcctgcccagacgcataggagctcagccggacataggtctactatccgtgctccaagacctactgccgcggcagccgtccttgctagaaggccaaccgctagcgccggtcaggttgcgacagctctggcactggccctgttagcagccgctgattggacaccggagggtatgcttgccgttctgcagtccgtattcggcaggaggcacaggttccttccggtcctagtccgcgaggtgcgtgcagtgtacagaacagctccacaggatgccccaagggaactcgccgccgtgattagacagtcggctgccctgaccgacgcactggatagagctcgggcggctggcagacccttggctatcgttcatcaccccgtgagccctggatcggaggatcaccgggagagcgcattgccacacgctcctgccgctctgtctgctccagctcccagtactgccgcgcctccacctaggaccttaaccgagctcgcggctctcctggatgtcactcccggagagctagactggctggccgacaccggtgggtggaataggcgtgctcctgccggccctctccatcactaccggtacgaatggcgaagtaggcccgggcgcgtacctagactcctggaagtgcccacagaaaggatgcgcgcagcccagcggatcctccttcacgaggttttcgccctccttcccctgcatggtgccgcacatgggttcgtgcccggaaggagcgcattaactgcagcgcgtctccacacagggcgcgatgtggtcatagcacttgacctggtaaccttttttacccgcgtgaccgctggacgcgtttatggcgcattacggcaagaaggtacccctgaacgcatcgcactggccctgaccggcttagccacaaatcgggtgccggctagagtcattggcgcaatgccgcctggcggtgaccctgatgagcggttcgctctccggcaagcccttgcagcagctcatctaccccagggggccccaacatctcctgcgttggccaacctggccattcgccgcgtggactcccgattggccggatatgcagaagccgcagatgccgtatacacacggtatgccgacgaccttactttcagtgggcccgttgccctgggaagacgagctgacgcttttatacgcggcgtcactcggattgtggaggatgagggccacctggtgaaccgacagaagacgcgcgtcagacccgcagcgacttcccagagagtcaccggaatcgtggtgaatgagcacacggctctccccagagtggaatttgatcggttgaaggccattctacacaactgcgcggagcggggccccgaatcacaaaatcacgacgggcactccgactttcgagcccatctgctgggccgattgtcatgggcccgcgacctgaacccgtctaaaacagagagattggaacgtgagtttgcacggatcagatggtga

SEQ ID NO: 12880 - RNA, 1599 nt, synthetic construct
  source 1..1599: mol_type = other RNA
ccgacaccagcaagcctggctgccgcaggtgtgccttccccttcatctgcacgagccgctccggtgagcccaggaagtggagtcttagcccgcagacccgtctccacgcccgatacagtagcgaccgccctcgctcttgcattattggccgagggcgagtgggcaggggaaaggatgatagcccgggccgcaactgtctttggcgttcgccaccggtggctacccagactggttagggaactcctggccgtgtatagacaggcacccgaaggatctccaagggaactcgcggctgtaatacgacggaccgcgtcattcacagccgcgctcgaacacgcaacggaagttggaagacctttgaccattgtatcgtatcccgtggctgctgacggcccacccaggttaagtcccgctctgtctcctcctagtgccgccgttgacggcattccccttgtcgccgccagtaacccacgcgatccgaggcacggtactgcaccagccgccttggctacagctgcaggacccgcagcactcgctacagcaactggcccggcagcactcacaccagctgctccaccccgagggctagctggacttcgcaccctggccgacctggctgaactgttgggcgtgacaccaggcgagttggattggctggcggacgtgggggcatggaatcgcagagcaagccccgggcctctgcatcattaccgctacgaatggagagcaagaccagggagggtccctcggcttctggaggtaccttcagcgcgcatgcgttctgctcagcgcacgctgctgcatgacgtgtttgccctgctcccgctgaatgacgctgcccacggctttgttcccggaaggtccgcagttactgcggctcggctgcatactggtgcggctgtggtggtgacgctggacctaaccacctttttcgccacagtgaccgccggcaggatcttcggggccttaagacaagccggggcaggcgaaagggtggctttagccctgaccgggatcgctaccaatcgggtcccccctcgcgtgatcactgccatgcctccagggggtgacccagatgaacgagccgccctacgacgtgccttagcagctgcccatcttccacagggaggccccagctcccctgcacttgctaacctggctctgcgacgcctcgatagcagactggctggatatgccggggctgctggtgccagatacaccaggtacgccgacgacctcactttctcaggcggtacagatctccgaaggcgggcggatgctttcgtcgtggccgtacgtaggattgtggaggaggagaaccacaccgtcaacctgcgcaagactagagttcgtcccgcggccacttcccaacgggtgacaggtatcgtcgtgaacgagcacaccgccctgcctagagcggagttcgatcgtctgaaggccattctccacaattgcgctgagagaggacctgcaagcgagaatcgggccggccacgacgattttcgcgcccatctgcttggccggttgacctgggcccggtctttgaaccctgccaaagccgagaggctccagcgggagtttgatcggatcgcctggtga

SEQ ID NO: 12881 - RNA, 1599 nt, synthetic construct
  source 1..1599: mol_type = other RNA
atgagatggagcgccgacgaggtggacggctctgatgctgacccctcatcaccggggctaccccgaggtacacagatcgattcagggactaccagtcaggcgcctctgagaacaccctctggacgtgccccagcccttcagcacaggtccagtgcaggccatagaacaccccctccccccacaccagcaacacctgcatctgctgtgctggcaagaagaccgcaaccgagcgctgaggccgtcgcaagtgcgttggcgttggtcctgttggctccaccggctgcaccagactggacaccaacggggatgctgtccgccctgcagggagtgtttggcgctagacatcggtggctgcccgcccttgttcgggaagtgcgcagcgtctacaggactcctcctcaggatgctccgcgcgaacttgccgccattattcggcacagccagccattcctggatgcggttggaagagccgaggcccgtggtagaccattagcagtcctgagatatcctatcacggccgaagcacccgctcaacctccagttgctccagggccaacccctgccactcctggtcctatacccgccactccagctgcgttagctgccttgctcggtgtgactcccggcgagctcgactggttggctgacgtgcgggcctacaatcggcgtgctagacccggtgccctccacctataccgatacgaatggaggttaagacctgggcgctgtcctcgcctgctcgaagtacccacggaaaggatgcgccgagtacaaaggaccctgctgcacgaggttctggccctactccctgtgcatcatgcggcacacggatttgtaactggtaggtccgccctaaccggagcacgggtgcattctggctcagccgtagtgatctccctggatttgacaaccttcttcgcccgagtaaccgcagcgggcgtttatggctccttacggcgggcagggttttctgaggccgtcgcaaccacgattactgggctgaccacaaacagggtgccccctagagttatctccgcaatgcccccaggaggaggaccggatgagagattcgctctccgtcaggccctcgctaccgctcaccttccccaaggagcgccaacttcccctgccctcgccaacggagccattcgacggcttgacgctcggctggagggatatgccgcagcagtcggggctaggtacacaaggtacgccgacgacctggtgtttagtggccccgttgcacttcagcgcagggcagaggcctttgtccgcggtgtcacacgcctggtggacgatgaggggcacgaagtgaaccccaggaagtcgcgggtgtctccagcctccacttcacagcgagtcaccggcattgtggtgaataccggcagtagcttgccccgggaggagttcgaccgactgaaggccctcctccataattgcgctaccctgggcccagcttcgcagaaccgtgctggagtgcctgattttagggcccacctgcttggccgcataagctatagcagcagcgtgaaccctctcaaaaccaggcgcctgatcagagaattcaattctatcgattggggggtcccacgcgaatga

SEQ ID NO: 12882 - RNA, 1686 nt, synthetic construct
  source 1..1686: mol_type = other RNA
atgcccgctgatgcctcgagacggactgctcacggcaggctgaatcgaagcattgcgccccccaggtgcagaaggtccggatcattcagcagacggattgtgatgggcagacctgccggccatactccagcaccctccttggcagccgtagccgattctctagctgccgcctttttggctgccgcccacccaaaaccagcgagagacagagatcctgctcaaggaagtgatcccacaggtgatcgggaagcagcgagtggtcccgccccaacacagaaccaggacgctccacaggggcaggactccacacagggcacagacctgactggagacagggatcccgcgtttaccatcgcctggacaaggtctgtgctgatcgcggctggggctgatgttctgggagcacgtcgcaggtggttgccaggcctggtgtcagccgtgttggctgcctaccccagagctccatttgaccgtcctcgcgaacttgggcgctggatcgcccaatctgccgagctcactgcagctgcagaacaagcagctgccgctggccggcaccttgtactggtcagacatgccctctatgagattcccgcagcacatggagctggggctgctggagagaggcctgcttcatctggcgcagaggtcttagctcgtgagcctgccagcaggaggccacgaacacctgcagacttggcccggctgcttggtctagacgcaggcgagctggactggtttgctgacctccgcgggtggaatcgcttagccccaggcaccaagctccaccattatcggtatgagtggcgaagtagaccgggacgagtgccacgcctgcttgaggtccctggtcagcgactgatgtacctccagcggcagctgatcgcagaggtgtacacggatctgccagtgcacccggctgcacatgggttcgtttcagggagaagcgctatcacgggagcggccgtacatgcaggcagtcacgtggtgatcggcatggacctcaccacctttttcgcccgggtcacccgcggacagatacatgccggtctgtgcaggcaaggttggggcgaagccctggtccccatcttggcaggcttagggactcatgccgttccgcccgccgtaattcgcgccatgcctccaggaggagatccgggagagcgacaggccttagccgctgctctgcggattccacacctacctcagggggcacctaccagccccctgcttgcaaacctcgcaatgcaccgcctggacgagagattgacaggctgggccaatgccgttggcgcgaggtacaccaggtacgccgatgacttaaccttctccggcgatacccggctggccgctagatctgatgcgttcatacggggggtggaagcaatcgtgacagactccgggcagagaatcaaccctaggaagactcgggtccgccctaggggaactagccaacgggtgacggggattgtggttaacgagcaccctgccatggatcgacacgcctatgaccgactgcgtgctattctccacaactgtgcgcgcaccggtcccgaagcacagaatcgggatcgccatccccacttcagactgcacctcctcggcaggataaattgggccatcgcccttacccccgaaagagccccgggtctttggcgtctatgggacgcgatagaatggactgactga

SEQ ID NO: 12883 - RNA, 1437 nt, synthetic construct
  source 1..1437: mol_type = other RNA
atgacccccaatccagggcacaccccagcaccctccataagagctgtggcagactctctcgcttccgccttcctggatgcagcacgagtgccccttgacccgggatcaggaggcgaggttttaggccatggagccgccgctcgggaacatggatggaatcgacctgtgctcattgctgccggggcttcagtgcttggggcacgaagaaggtggttgagtcccctagtgcgggcggtcctcgatgcctatcctcgagccccttttgatcgcccccgtgagctggccgcttggattgaggcctccgctgtgcttggagacgcctgtgcggctgctaccgctagaggtcagcacctggttctggtgcggcacgccgtatatgaaccagtaggggcagcaagcccgcttcccgcaacaccagctgaactcgccgggctgttgggcttggacatcggcgaactcgcgtggttcgccgatcagcgcggatggaatagacgggctggttccgcccggctgcaacactaccgttacgagtggcgcgcaagacctggaagggtcccgagattgctggaggttccaggccagcgcctgatgagactgcagcgccagctcgttcacgaggtgctgacggcacttcctatccaccccgccgctcatgggtttgtcccaggcaggtctgcaagaacgggcgctgccgtccatgctggtagtcacgtggtgatcggcatggatctcacaacttttttcgcccgcgtgggcaggtcagaaattaccgcggcattgaggagggcaggatggggagaggcggtagctcctgtcctggcagctctggctactcatgcggtgcccgaggccgtcatcagagccatgccacccggtggcaaccctgaagaacgctttgccttagcccaagcactcagactccctcatcttccccagggggccccaactagccctatgttggccaatctggctatgcgtcgcctcgacgacagactgcttggttgggcagctgccgtgggagctcgttacacccggtatgccgacgatctgacctttagtggagatcagcgcctagcggcccgaagcgatgctttcattcggggcgtgagcgggatcgttgcggattgcggtcagcgggtgaacgaaaggaagacaagggttcggccccgcggtacaagtcagcgagtcacaggaattgtcgtaaacgcccacccagccgtcgaccggaggtcttatgacgccctgagggccccactgcataattgcgcacgcactgggcctgcagcccaaaacagggaaaacctgccatacttcagagagcacctgagggggcgaatagactgggtggtgtcgctgactcccaaaagggagcctgccttacggcggctatgggaggccatcgagtgggaagagccgggctctgcgcccttacgttga

SEQ ID NO: 12884 - RNA, 1326 nt, synthetic construct
  source 1..1326: mol_type = other RNA
atgatctcgtccgccctcgcccacggattcttggctgcttccacagaagcagactgggctcgggcaccactgattgccgcaggatctgctgtattaggcgcccgtcgacgatggctccccgctttagtagatgacgtgctgcgcgcgtttccacgtccacctttgcgtggcctgcgggagttgcgagagtggattgctagcgctccagggcccatagccgccgttgaagcggcagctgagaggggacgccctcttagacttgcaagacacccagtgtaccacgaacctggggctgcacctggaggaatgcctgccaaccccgctgagctagctgccctgtgcagcatcgctcccggccaattggagtggtttgctgacaccaggctctggaacagacgcctgagtggcgaccaacaccggctggagcattaccgctatcggtggttggaacgacccggtcgggttcctcgcttactcgagattcctggcgagaggctgcgcgcagtgcaacgaagcgtgcttgattgtgtgctggcagagctgccagtacacccagccgcgcacggtttcgttccaggtcgcgatgcaaggagtggagcggccgcacatactggcagggacgtcgtgatagggctggatctgaggacgtttttcgctagggtcggctaccctcagatcctgagagtgctgagagcagccgggcacacggaggcagttgccacacttatcgccgggttatctactcatgcggtgccgcctaggattctccgcgaaatgcccccgggaggatccccagaggaaagattcgctctccgtcgggctttggcagcgaggcatcttccccagggagctccaacttcacccgccctagccaacctggtcagtgccggtctggatcggagactcgcaggctgggcccagaagtttggggcgacctatacacgatatgccgatgatctgaccttctctggggacagagccctacggtcaagggccacccgttttattcgcggcgtcgacctcattatcgccgaggaagggcatgccctgaaccccagaaaaaccagagtgcagccggcagcgatcagccagcgagtgacaggcatcgtcgtgaataggcatccgaatctgccccggcgggaatacgatctgctcagggctatacttcacaattgcgccttgcacgggcccgcatcccagaatagagccggccaccccgactttcgcgctcatctgcggggtagaattggctgggctgccgcacttaaccctgatcgcgaagctgccctcactgccgccttcaataggatcgactgggaccggtga

SEQ ID NO: 12885 - RNA, 1506 nt, synthetic construct
  source 1..1506: mol_type = other RNA
atgcccgattcatgcacagctggggcttccctgaggagcgctcagcagagaacaagaactgactcacaggtgataggtgagacaattgccgctctgacaacacaacacggcccagagcacgcggaacccactactgccagcgtgacagccgcgtctgcaaccctaaagcgtactcctcgaccttcgtctagtaccattgccagcactctggctcaagccttcctcggatctcccgactggtcaaagcccggattagtagacgcaggggcccacgttcttggagccagacggcgttggctgggccctttggcagcacacgttctgcgcggctacccaagaccaccggtagatgcccctcgggaactcgccgcagttgtgctgcaatgtgaacctttccttgacgccttagcaaaggctgcccagcagcggaaaccaatccgactcgccaattacgtgttagcgtccgccgtcgcgagggagaatttggtgcagggggcgcccagaatcgatacgctcgccgatctggccgccttgttacacgtgaactgcggcgaactcgaatggttcgccgatacaaagcactggaacagacgggcaggtggcactctggctcactatcgctacgaatggcgcaccaggccaggtaggctgccgagattgctagagatacctgccccccgtctgcgcagcattcaacggacggtgctgcgcgagttgctctacccgcttgagctacacgacgcggcacatggcttcgttcctggccgtagtgccgtaaccggtgccgcacagcataccggcagggatgtggtggtcaacctggatcttgtgagtttctttgctaaggtcaccgctgggagggtgtttgggaccctcaggcagtccggcttcaccgaagctgtggcccatagactgacaggtatcgcgacccatgtggtccccccacgcgtactgtctctgatgccaccaggaggtgacccagccgagagatttgctctaaggcaggcactttctctgccccatctgccccagggggctcctacttcacctatgctggcaaacctgagtctccggagactcgatgcacgcttggctggactggtcgagaaatttgatgggggctatacccggtatgccgatgaccttgcattttccggagggagagatatggcccgacgcgctgacgcttttgtccgagcagctaccgtcatcgtcaaggacgaaggacatagcgtgaatcggttgaaaacgagagtgaggccagccggcgttaggcagtccgtaactaatgtggtcgttaatgagcgcacaaatgtgccgcgggtggacttcgataggcttaaagctacgctgcacaactgtcgcgtccacgggcctgagtcccagaactggaacggccatcccgactttcggggacatttactgggaaggatcagctgggttgccgcactcaatcccgctcgaggagcccgactccgtcaagacttcgaccggattcagtggtga

SEQ ID NO: 12886 - RNA, 1365 nt, synthetic construct
  source 1..1365: mol_type = other RNA
atgacgagggccgctgcgactttgaagagaacaccgaggcctagctcctcagccatcgcccagacactcgcccaggctttcctggcgagccctcagtggactaaagcggagttggtcgctgctggggctcatgcacttggggctcgaagacgttggcttggacccttagccgcacaagtggttcggggataccctaggccacctctcgatgcacccagggaactcggtgccatgatcggctcctgcgatcccttcatcgaagccaccgcaaaagccctgcagcaaagaaagcctatccttattgcaaattacgtgttagcgccctccgtagcccgcgaaaatcgccacgcaggcgtcccacagataggcacactcggtgagctcgccgagcgtctcaagttgtccggaggcgaattggagtggtttgccgatcctaagcactggaaccgaacagcagctcggaagctgcagcactatcgttatgaatggcgaacaaggccaggccgactgccaaggctcttagaaatacccgccccgcgactaagagcactgcagaggaccgtcctgagagagctgctatacccactggagttacacgacgctgcacacggcttcgttcccgggagatcggccgttactggcgctgcacaccatatgggacgcgatgtggtgctgaacctggatttggtgacgttcttcgcaaaagtgaccgccggtagggtctatggaaccttgcgccaggccgggtacactgaagccgtgtcacaccgcctcgtgggcattgccacccatgtggtgccccccagagtgctagcccaaatgccctcaggaggcgacgctactcaacgatttgctcttcggcagtctctgtcagtccctcacctgcctcaaggggctccaaccagcccaacccttgccaatctgagtctgcggaggctggattctagactggccggcctagctgagaagtttgacgggggctacacacggtatgccgatgatctggcattctccggagggcaggaccttgcacagcacgctgacgcgtttctgcgtgccgccaccctgatcattgaggaccaggagcatagcgttaaccagcagaaaacgagagtgaggcggagtggggtaagacagatggtgacttctgtcgttgtgaacgaacgcacaaatgtcccacgccctgacttcgaccggctcaaggcgatcattcataattgtaggatgcatggtccccagtctcagaaccgcgaggctcgcagcgactttagagctcatctgctcggacggatcagttgggtagcggtacttaacccggcccggggtgcaaaactgttgcaagactttcaccggattcagtggtga

SEQ ID NO: 12887 - RNA, 1515 nt, synthetic construct
  source 1..1515: mol_type = other RNA
atgcctgacccttgtaccgctggcgctgcgttacggtccgctcaactccgcacccgcacagatagccgggtgatcggagaggcaatcgccgcgatgaccgcacaacccagagcaagagcagcaggcagggccgatcctgcagtggctccagtcactgccgcttctgcaactctcaagcgcacacccaggccgagtcctacagccattgcggcaactcttgctcaggcgttcctgtcctctccagactggtctaaacctgccctcatggagtcaggcgcccaagttctgggcgccagacgacgatggcttggcccattggcggcccaagtcctacggtcacaccccaggcctcctgtagacgccccaagagaattggccgccctggtcctggtcagcgaaccatttgttgaagcactggccaagagtgtgcagcagaggaaaccaattcaccttgcgaggtacgttctcgcagccggagctgcacgcgatagccaggtaaggggggcccctaggattgatactgtcggagcactcgccgcacggttagggttaggggtgggcgaactggactggttcgccgacccacggcattggaacaggcgagctgatgcccggctccagcactaccgttataggtggctggttagacccggcagagtgccgaggctgttggagattcctcgccccagattgcgtttcctccagcgcgccgtactccgcgaactgttgcaccctctgcccctgcatgatgccgctcatggattcgttcccggcagatcagctgtgacaggggctgctcagcacacaggtcgtgccgtggtggtgaacctggacctagcctccttctttgcccacgtgaccgctgggcgagtctttggggtgctgcgacaggctggatttaccgaggccgtggcccatcagctaacgggcttgtgcacccacgtcgttccaccccgaatactggtgcagatgccaccgggtggagatcccgcagacaggcttgccctcagacaggcgctttcccttccccatctcccccagggagctcccactagtcccacactggccaatctgtccttaagacgcctagatagccggctggctgggctcgctgagaagtttgatgggggttacacacggtatgctgacgacttagccttcagcggcggtcgggacatgctgagaagagcagatgcgctcgtacgggctgccggcactatcgtggaggacgagggccaccgcctgaataggctgaagagcagggttagaccggcaggaacgcgccaagccgtcacctctgtggtagtgaacgagcggaccaatcttgcccgcgatgattttgaccgtttgaaagccataatccacaattgccgcgtgcatgggccagaatcgcagaaccgagactccgtcccagagttcagatcacatctgctgggtcggatcagctggctgagttctctgaaccctgctaggggagcacgtttgcggcaggctttcgaccttatcacctggtga

SEQ ID NO: 12888 - RNA, 1602 nt, synthetic construct
  source 1..1602: mol_type = other RNA
atggtagtttcaggggataccgtggtaagtgtcagcatgggtgcatgtgatgggttctccgatgaggccggcagtgtgtttcggaggccttccctaccgggggtcactcctggtcacgcagtgctgcctgacccttgcacttccgacgcatcgctgagatccgctcagctcgggaatcgcaccgattcacaggttattggcgaaacgattgcggtactcaatcccaacatcgcccatattactcctgcctccgcaacactgaaaaggactccacgaccctcgaccctcgccgtgacagagacactcgcccaggctttcctagccgcaccacagtggaataaagccgccctcatggcggcaggcgctcatgttcttggagcccgcaggcggtggttaggcccattagtgtccgatgtgctgcgtgggtaccttcgcgcacctgtagatgcccccagagaactggccgcgcgaatccatcatgccgagcccttcgtggaggcgttggctaaggcagcccaacagagaaaacccattcgactggcgcactatgtcctcgctcccgctgttgccagggagaatgcccctagacagactcctagaataaacaatttgggcgacttagcgcatctcctggaactgacacccggcgaactggagtggttcgcagacacccgtcactggaacaggatggccactcgcaagcttcaacattatcgctacgagtggagggtcagaccagggagattgccacgccttcttgaggtgcccgctcctaggctaagagctatccagcggattatccttcataagctgctgtacctcatcgaactgcacgatgcagctcacggttttgtcccaggacggagcgctgttactggagccgcccagcacaccgggcaagaagtcgtgatgaacctggacctggtgtctttcttcgctaaggttaccgccggaaaagtcttcggagccctgagaaaggctggttttccagaagccgtcgcacatcggctagccggcatatgtacgcaccgagttcccccccgtatcctcgccttaatgcccccaggcggagatccagctgaaagatttgcccttcgccaggccctgtctctgccacacttgccccaaggctcaccgacaagcccgatgctggctaacctgagtgtgaggcggctcgactctcgcctggcaggattgtctgagaagtttgacggagtgtacacccggtatgcagacgatcttgcttttagtggcgggaaagatctcgccagacgcgctgacgcttttgtggctgccgtgaccgcgattgtgcgggacgatggtcacaggatcaaccgcctgaaaacccgtgtccggcctgcaagcgtcaggcagagcgttacgagcgtggtagtgaatcaaaggacaaacccagctaggtcagatgtggaccggttgaaggccatactccacaactgccgaacacgaggccccgagtctcagaattgggacggtcaccctgacttcagaggccatctgctgggaaggattagctgggtggcaaccttgaatccggagcggggggcaaagttactgcgggagttccaccgtatccagtggtga

SEQ ID NO: 12889 - RNA, 1386 nt, synthetic construct
  source 1..1386: mol_type = other RNA
atgacaggcagtcagaagcccgtgacacctgcttcctcagtcctcagtcgcacccctaggcctacagattcagctgtggcggcaacgttggctcaggcatttctgaacagctcccgctggacctccgccggactgattgaagcgggggcacaagtcttaggcgccagacggcgctggttgggtccagttgtgactctggtgcttcgttcatacccacgccctccagtggatgcaccgcgagaactgggcgccatgatcctgggttgcgaaccctttgcccaagcgcgggccaaagctgccgttcagcggaagccactgaggctggctcattatgtactggaacctatggtagctcgtgagaacgggcagccaagagtcccgcgccttgacactcttgcagacctggctgccatgctggagctgacaggaggtgaactggagtggtttgccgatccccagcagtggaacagactagccgtccccgcacttcagcactatcgatacgtctggaggagacgacctggcagattgcctcggctactcgagatacctgccccacggctcagagggatccagaggactgtgctgagggatctcctgtaccccctggagattcatgacgcagcacacgggttcgtgccaggaaggtctgcagtgacgggtgctacacgccacaccgggcaggatcttgttttgaccctcgacctcgtgaccttttttgcacgcgtgactgctgggaaggtcttcggggtgttacgacgcgcaggctacacagaggccgttgcccacaggttggtgggactgtgtacgcatgtagtgccccctagagtgttgagcgctatgccacccggtggatctcccaccgaacgtttcgctctccgacaagccctgtcacagccccacttaccgcagggagccccttctagtccggtcttagccaatctgagcctcagacgactggatgctagactaaccggcctagcggacagcttcgaagctgtttataccaggtatgccgatgacctggccttcagcggcggcaaaaagttggcccggagatctgcggcttttattcggttcgcgacagtaaccatcggagaggagggccacggcgtgaaccaacccaagagtcgcctgagaaccgccggtgaacggcaacaggtgacatccgtggttgtcaatgagagaactaatgccgtcaggtccgagtttgatcggcttaaagcaactctccataactgctggactcacggcccagatagccagaatagggacaggcatgccgacttccgggcacacctgttgggacggatatcttggatggcctccctcaattcggacaggggggctcgtctccttcgcgacttccagcgtatccagtggtga

SEQ ID NO: 12890 - RNA, 1569 nt, synthetic construct
  source 1..1569: mol_type = other RNA
atggccccttgcgacgggtttttcgacgaggctggcagtggcttttggagagcgtcccttcccggtgccactccaggctacgcagtgctcccagatcgaagcacctctggggccgcactgagatctgcacaactggggacacgcactgaaagacaggttatcgaggaaaccattgccgccatgactacatcatcgatcccggtgacacccgctagtgccaccctcaagcgcaagccccgaccatcaacttcagccatagcagccacattagctcaggccttcctcaattcccctcagtggagtaaacccgaaattacagtcgccggagcccaggtactcggagcacgtaggagatggctagggccactggctgcccacgtactgctgtcttatcctcgccctccagttgatgcgccaagggaactgacagccacgatccttgcgagcgagccctttatcgaggctgtcgcaaaagcagcctctcagtacaagcccatactgcttgcgtcctacgctctggcacctaccactgctcgagagaaccgtcaggctcgcgttccccggattgacaccctcgctgctttggccgagaagctacatctgacactcggtgaactagagtggttctccgaccctcagcactggaatagaacagccgcccggaaactgcagcattacagatatgtctggaggagcagaccgggccggttaccaaggcttctggagattccgggcctgcgcctgcgaaatatccagaggaccgtgttgactgagctgttataccctttggaattacacgacgctgctcatggattcgtccccggacgaagtgtcgttaccggcgctgcgagacatacagggaaggaggtggtcgtgaacctggacctgactacattctttgcgaaggtgaccgcagggcgggttttcggtaccctgcgtcaagccggcttcacggaatccgtggcccatagactgacgggaatttgcacccacgtggtacctccaaggattttggcccagatgccaccaggaggggatgcagatcaacggttcgccttgcgccgcgccttatcgcaacctcatctcccccagggggcaccctcatctcccgtactcgccaatcttgccttgcggaaactggattcccgcctagctggacttgcggatacatttgacgctggttatactaggtatgctgacgacctgacgttcagcgggggaagggagcttgccagacgggtgaacgcttttatcaggaccgccaccggcatcatcgagaatgaaggccacggcgtgaacaaactcaaaagccgtgtgcgaccggcagcagtgagacaggttgtcaccagcgtcgtggtgaatcagcggaccaatattaaccggctcgacttcgataggctcaaggccactctgcacaactgtcggaggcacggccccgaatctcaaaacagagaagctcacgccgactttcgggcacagcttctgggccgcatcagctgggtgactgctttgaaccctgataggggtgcaaagctcctgcgcgattttcacctgatagcatgggagtga

SEQ ID NO: 12891 - RNA, 1179 nt, synthetic construct
  source 1..1179: mol_type = other RNA
atgtacccccgtcctccaattgacgctccccgcgaactggctgcaacgattttcctgtcagacccgttcacagaggccgtcgccaaagcagctcaccaacggaaacccctgcgggtggccaactacgctctccttccagccactgcccgggagaatcggcagccaaaaatacccagactggacacactggcctctctggcgggacttctagagttgtcctacggggagctggagtggtttagtgatccacagcactggaataggaaggctgagcgaaaactgcagcactataggtacgaatggagacagcgaccgggacgtttacctagactgctcgagatccctgcacctaggctccgcaatatacagcgcaccgtcctccgggaacttctgtatcccattgagcttcacgacgccgcacatggctttgttcccggtagaagcgctggaacaggcgcggctcaacataccggacaggaggtcgtgattaacctcgacttagtgacttttttcgctaaggtacctgctggtagggttttcgggacattgcggcaggcgggattcaccgagtctgtggcacatcgcctcacagggatctgcacccattccgtaccacctcgagtcttgtctcttatgccaccaggcggcaacttaacggaaaggttcgcactgagacaggctctcgcccgacctcatttaccccaaggggccccgacaagtccaatggtggccaacctgagtctaagaagactggatagccgcctatctggccttgccgaaaagtttgacgcccgttacactcggtatgccgacgatctggcctttagcggagggaatgagctggcccgtaggacctccgcctttattcgcaccgcgatctcaatcatcgaagcagaaggccacgaagccaacaggttgaaaacccgggtgaggcccgcctccgttaggcaattggtgacctcagtcgttgtaaacaagcacactaatgtgactcgatccgacttcgatagattgaaggcaatcctccataattgtctgagcttcgggcccgaatcgcagaacagagaggcgcacgcagattttcgcggctatctgctcggccatgtgagctgggtggctgctctcaatcctgatcggggtgcaaagctgctgcacgatttccaccgcatccagtggtga

SEQ ID NO: 12892 - RNA, 1416 nt, synthetic construct
  source 1..1416: mol_type = other RNA
atgaccacccccacacccggagctgctgtgcttgcacggacacccaatccgagcccgcggaatgtgagcacagcactggcttatgcttttcttgcagcccccacctggagtgaagctgagctggccgccgcaacaacttacgtcgtaggcaaacgaggaggcacaagaagcgccaagtggcacacccaactcgcaagtagcgttctgcgcgcctaccccaggccaccattacgtgagccgaggcagctcgcagtgttcattgccggcgctaaaccattctatctggccgttgatagggcgacccgactccacgccaccctaaccattgctcattatgtgcttccccccactaacgtcgccgagctgaagtctcctctggaagaaagatccctgatacctcagacactggcagagctcgccggcgtgctcgatctgacagtcggggaactggactggttcgcagaccctctccagtggaataggaccgcccggaataagagactggtccactacaggcatcagtggcgtttgcggcctggacgcactcctaggctactcgaaattccagctccacgcttgcgtgagatccagcggtccgtgttaagagaattgctgtcccccctgcctctgcatgatgccgctcatggctttactcccgggagaagcccagccactaacgcggctcatcacacaggcagaaacgttgtagtgaatgtcgacctcactaccttttttgctcgcgtcacggccggcaaagtcttcgggatacttcgccaagccggatttccagagacagtagcccataggctagcgggactgtgcacccacaccgtgcccttaggagttatcgctgagatgccccagggaggtggcgcttcagggagattcgcctttcgacaggcactggccacaccgcacttacctcagggggcacctaccagtccagccctggcaaacctgtcactgcgcagactggacagcagattggcagggcttgcggcttctttcgatgctgactatactaggtacgcggatgacttggccttctctgggggaccaggtttttctcaccgctcactcgccttcgtgagtttggttcacaaaatcgtggaacaggagggtcatacggtcaatgacgccaagacgcgggtgagaggctcaggggtgcaacagcgggtcactggcgtggtggtgaacgctcacacgaacgtgtcgcgagcagagtttgaccggcttaaggccatcttgcacaactgtgcggttcacggccctgctgggcagaaccgttgtggtcctcaaggatccgaacactccgatttcaggggccatctccagggtcgcattgcctgggtacggcatcttaatccagcgagggcagccaagctggagcgaatcttcgccgcaattatctggtga

SEQ ID NO: 12893 - RNA, 1371 nt, synthetic construct
  source 1..1371: mol_type = other RNA
atgaagccatcgcagcccactgccgctgccagtgtgttggtgcggattcctcacccctcagcaaacaccgtggctacagccctcgcccacgcattcctcgctgcaggagattggtcaaagcccgcactaacagcggcaggggccgatattttaggcgcccggcggagatggttaggcccacttgcttctcacgtactcagaaactaccatcgaccacccgctgatgctccccgtgagctggcagctgtcgtccttggatgtcctgcttttggcgaggcgcttgcaaaggcggcaacccagaggcgccctatcaaactggcccacttagccgtggcaccagccgtagcacaagccgctagggttccccggctggatactgtggcagacctcgcggggatgttagccttgaccccgggtgagctggaatggttcgccgaccccagacactggaatagaactgccgggccacggctccagcattattgctaccagtggcgtagtcgaccaggtcgcgtgcccagactgctggaaatacctcagcctagactgaggaccctccaacggacgatcctgcgcgagttactggcccccattcctcttcacgacgcggcccacggatttgttcctggtcggagcgctgtttccggagccgctatgcacacaggcgccgatgtcgtggtcagcctggacctcgccgccttctttgcgcatgtctcaccgggaaaggtatttggtgtgctgcgccaggcgggctttacggaagctgtggcgcataggctgacaggcctgtgcactcatgcagtgccggtgggggtactggctgagatgccaccaggaggggaccctgctagcaggttcgccctacgccaggcccttgctgttgcccaccttccacagggggcaccgacctctcccatgctggcaaatctcgcactgagacggttggactcccgactatctgggtgggctggcgctttcgacgccgtgtacagccgctatgccgacgacttggctttctctggtggtgccgaactagccagaagggccgacgcctttatacgcggagcagggcgaatcgtggccgatgaagggcacagcctgaatggcctgaagactagagtccataaagctggcgtccggcagaccgtgaccggagttgtggtcaatgagcgtacaaacattgcccgtgcagagttcgatcaattgaaagccgtcgttcacaactgtgccgcgcatggccctgagggccaaaacaggggcggacatcctgatttccgcgcacacctgctcggcaggatcgcatgggtgtcctccgtgcatcccgctagaggggctaggttgcgagccgcttttgatgaaatcagttggtga

SEQ ID NO: 12894 - RNA, 1380 nt, synthetic construct
  source 1..1380: mol_type = other RNA
atgatacctgcaggacaagctgtggctccagccgcagcggttttagccaggtcctctcgaccaacaccggatgccctcgcgtcggcactgagtcacgcctttctggccgcggatgattggtccaagcccgccctaatgacggccggaacgggaattctcggagccaggcgaagatggcttggccccttggctactcacgtcctgaggtcataccacagacctcccactgacgcacctcgcgaactcgctgccgtggtactggggtctgaagccttcggggaagccctggagaaagctgccagacagagacggcccatcactctggtgagatacgcagctgaaccagctgtcgcccgagctgcacgcgttcctaggttggacaccttggcagaattggctgaggtgctagacctgagcgtaggggagctcgagtggttctcagatcccggtcagtggaaccgcacagcctccagtcgtcgccttcaacattacagatatcagtggaggagcaggccaggcagagtaccccgattactcgagatcccacttcctcgactgcggggccttcagcggacagttttacgggaactcctgtcccccattccgctgcatgacgccgcccatggcttcgttagtggacgttctgctgtcagcggcgccgctcttcatgcaggtaccgaggttgtcgtcaatctggacctggccgccttcttcgctcacgtgtcacctgggagggtctatggggtcctgcggcaggcaggctttacagaggctgtagcccaccgcctgaccggactctgcacacacgcagtgcccgtgggggtcattgctgagatgcccccaggtggtgaacctggcgaccgcttcgctctgcggaaggcactcgcgactgcacatctaccccagggggctcctacagcgcctatgctggctaatttggcactgagaagactggatagccgtttgtcaggttgggccggcgcctttgacgcggtgtatacccggtacgccgatgacctggcttttagtggcgggactgagcttagccgtcgagccgacgcgtttgtaagaggcgcagcaaggatagtggcggacgagggccacagcttaaaccgcctgaaaaccagggtgcatagagccggcgtgcgccaatctgttaccggagtggtggtgaacaccaggaccaacgtggcccggccagagttcgatcggcttaaggcagtgctccacaactgtctgctcctgggtccggaaggacagaatcgggacggccacgatgattttcgggcccatctcttggggcgcatcgcttgggtcacttccgttaatccagacaggggagccaaacttcgcgctgtgttcgatgccatctcttggtga

SEQ ID NO: 12895 - RNA, 1431 nt, synthetic construct
  source 1..1431: mol_type = other RNA
atgaagcacactccggattctaccagaccggggcctctcgcggattctacccctggaccaacccccgcatcagccgtcttgggccgaacaccacggccctctcccaagacggtggcaactgcgctggcccacgctttcctagccgctgagtcatggtccaaacccgacctggtagaagctggggccactgtcctcggagctcgaaggagatggttaggccccttggccggacacgtgctagctagctacagaaggcctccggccgacgctcctcgagaacttaccgccgtcgtgctggggagcgcaccatttgctgaggccgtagccaaggccgaccttcagtgtaaacccatccgcatcgcgaggtacgctgtcccaccagcagggatgggagaagcagcaggtgtgcctgccggggtaccacgtctagataccctggcggagctagccgcaatccttggcgttgacgctggacggctggagtggtttgctgaccccaagcactggaatcggacgacgggcaatcccaggctgcagcactatcgctaccagtggcggacccgtcaagggagagttccacggcttctggagattccacaccccagactgcgcgccgtccaaaggaccgtgctgagagagctcctggctggcatacctctccatgcttcagctcacggcttcgtccctggcagaagtgccgtaagtggcgccgcaagacacacaggcagggacgttgtgatcaatctggaccttgcagcctttttcgcgcacgtgacccctggtaaggtctatggcgtcctccgggctgcagggtatcctgagagcgttgcccataggctgactggcctttgcacacatgccgtgcctgtgggagtgattgcagaaatgcctcctggagggagtgccgaagatcgcttcgccttaaggcaggctctcaggaaagcgcacttaccccaaggagccccaacttcccccgccttggctaatctcaccttgcggcggctggattctcggctgcagggttgggcgggtggtttcgatgccgtttatacaaggtacgccgacgatttagcatttagcgggggtcctgtactcgctcgtcgagctgacgcctttttgaagggcgctgcacgaattgtcgcagacgagggacatactttgaacgcgacaaaaacacgcgtgcataaggcaggggtgcgtcagtcggtgactggggtggtggtgaaccgccataccaacgtgtcccgccgcgattttgatcgcctgaaagccgttctgcataattgcgtggtccatggcccggatggccagaaccgagacggacaccccgacttcagagcccagctccgtggcaggatcgcatgggttgcctccgtgaacccaggtcggggagcaagactgctggccgatttcacactgatagactggtga

SEQ ID NO: 12896 - RNA, 1440 nt, synthetic construct
  source 1..1440: mol_type = other RNA
atgggcgcacccttacgctcagctaagcgcggggcccagactgatagactggtgatcatagaagcggtggctgctatgatcccaactctgtctgccgccgtgttggccaggaatccccgtcctacaccccaggctatcgccactgcccttgctcacgcatttttggcagccgaagattggtccaaaccctctctcatcagtgcagccgccagcgtgttaggagcgaggaggaggtggttggggcccctagctgagcacatcctgggcctctatcatagacggccagccgatgcaccacgcgaggtagtagccgtagttctgcacagcgaagccttcgagacagcagtcgagaaagccgcaaaggcaaggaaacccattattgtggcccattatgtagtccaacctgctgttgcccgcgaggcgcgagttcctcacctagatacacttgcggggttagcggggctgttgggccttagcataggagaacttgagtggtttgccgatcctaggcaatggaatcgtaccgccacatccaagcggcttcagcattaccgctatcagtggcggtcacgcccaggcaaagtgccaaggcttctggagattcctcagcctcgcctccgagctctccagaggaccgttctacacgaactgctggcccccatcccccttcataatgccgcacacggctttgtcccgggaagatcagccgtctctggagcaagggctcacacaggagctgaagtggtggttaacttggacctcgccgccttcttcacccacgtcactccgggtaaagttttcggcgtgctgagacaggcaggcttcaccgaggctgtggcccatagactcacgggactctgtactcatgctgttcctgtgggcgtcttagcagaaatgccgccaggcggggatccaaccgacaggttcgcactccggaaggctctcgcactgccacacttgcctcaaggggcacctacctcacccatgctggctaacctggctctgagacgcctggactcccggctcagtggatgggctggtgcgtttgacgcatgctacactcggtacgcagacgatctggcgtttagcggtggtagcgagctggcccgaagagctgatgccttcgtgagaggggctgccaggattgtcgctgacgagggccacagtctcaaccggctgaagacccgggttcacagagccggagtgcgccagtctgtaacgggggtggtggtcaatcagcacacgaacgtcaccagaggtgactacgacgccttgaaggctgtgctgcataactgcgtctccctgggccccgaagggcaaaaccgtgacggccaggcgaatttccgagcccatctgatgggtcgggtggcctgggtgtcctcggtgaatccaggccggggagccacactgcgtgctctatttgagcgaattgtgtggtga

SEQ ID NO: 12897 - RNA, 1383 nt, synthetic construct
  source 1..1383: mol_type = other RNA
atggcggtggccaccacgggtgcagccacattagcaaggacacctcgcactagcccggctgatctcgctaccgctttggcgcacgcgttcctaggggctgaatcctggtctaaggccgccttggttgcctcagctgccggtagtctgggagccaggagacggtggctgccacctcttgctggccacgtgctagctgcctatcatcgtccccccgccgacgctccaagggaattagccgcggtcgtggggcagtgtgacgcctttcgcgaggctttagccaaatcggctaggcagcgtaagccaatcaggctggcccatctggtcccagtggctggaaaggccagagacagcgccaccgatatcccacggatagatacccttgcggagctcgccggtaggctggagttgtccactggcgaactcgaatggtttgccgaccctgggcagtggaataggtccgcgagaacccccagactgcagcactaccgatacgagtggcgtagtagacccggccgagtgccgagacttctcgagatccctggaacccgtctgcgcgcgatccagagacgcattctgcgcgatttgctccagcccatcccgcttcatgacgcagcccacggctttgttcctggacggagcgcaattacaggggccgcacggcatacgggcaatgaggtggtcataaacctcgatctcagtacattcttcgcgagggtcactccagggaaaatatttggagttctgcgccaagcagggtacgcagaggcagtggcccatcggcttacaggcctctgcacacacgcagtacctgctcgggtattagcagccatgcctgcaggaggggatcccggagagagatttgccgtccggcaggccctggctagagcacatcttccccagggagctccaactagccccctgctggcaaacctggccctgcgtagactcgactctagactggccggctgggctgcagctgtaggagcatcctatacccgctatgcagacgacctggccttttcaggcggtcctgatttggcccgcggtgctgatgctttcatcagaggcgccgctcgaatcgtggccgacgaaggtcacgacctgaacaggcggaaaacacgggtgcgcggtgctgcaacgcgacaaagcgttaccggcgttgtggtcaacgctcacactaatatttctcgaggcgactacgatcggattaaggcaattttgcatcactgcgtgctcgacgggcccggagagcaaaaccggtcaggccacccagatttccaggcctatctgagggggcgaattgcatggatcgaatctctgaatgccgccaggggcgctcaactaagggcggaattcgatcgcattcagtggcagactgcctga

SEQ ID NO: 12898 - RNA, 1365 nt, synthetic construct
  source 1..1365: mol_type = other RNA
atgagcaacaacggctcagcagtgttagcacggacacctcacgcccttcccatggccctgtccacagcgctggcagatgcatttctcgcagcggaccaatggacagccccggctttagtacaggctggcaaccatacaataggatcgcagcggagatggatccctaccctggccgcccatatcatcgccacatatccacggcgccctctggacgcgcctagagaactcgccgcagtagtcagacgctccaagcccttcgcacgtgccctagcacgtgccagtcgaactggtaagcccctcccccttgccaattactgcctggaccctgcaagtgcgagggagtccccactgggaattcctgttgtcgacaacctgggagtgctctctcagcatttgggcataactcccggcgaactggaatggtttgctgacccaaaacacttcaaccgctccgctgcccccatcttacagcattacaggtatgagtggcacaccaggcctggcagagtgccgaggttactagaggttcctgccccgaggcttcgcactctccagaggacgatcttggccaatctcttgagtccaatccccttgcacagcgccgctcacggctttgttcccggtcgatctgctgttagtggggctgccgcgcacgctggtaatctggttgtgattaatttggacctggcgaccttcttcgcaaaagtgtctgctggacgggtgttcggcgtccttcgccaagccggatatgctgaggccgtcgcacatcggattactggactgtgtacacatagggtgcccgccagaattctgagcaggatgcctgctgggggtgagccaaccgaccgcttcgcactgaggcaggcccttgccctaccgcacttgccacagggggctcctacttcccccatgctggctaacctggctgtgagacgcatggactcaaggctgagcgggtgggccgggaagtttgatgccggctacacaagatacgcggatgatttggctttctcagcagggacaactctcgcccgggggtctgatgatttcatagccggcgtgtctcgtatcgtaaccgatgagggccacagcctgaatccaagaaaaaccagagtccgaggagcaagcctccggcagacggtgaccggtgtggtagttaatgaacaccccaacgtgaccagggcggattttgaccgactgaaggctattctgcataattgcgccgtccttggaccagaactcgccaatcgccaggctcatgccgattttcggtcccacctgcttggccggatcgcatgggtggcctcagtgaacccacgtcgaggggctcaactccgcgcagactttgctagaattgtctggtga

SEQ ID NO: 12899 - RNA, 1344 nt, synthetic construct
  source 1..1344: mol_type = other RNA
atgctggctcggaccccacatccctctcccgaagctgtctctacggcccttgcggacgcttttctagccgccgaacagtggaacgccgaggcactcgctcgtgcaggcaatcatacttgtgggtcccctcggagatggattaccaccctggctgcccacatcgttgcttcctatcctcgaccacccgtagacgcgcccagggaactggctgctgtcgtcaggcagtccaagccttttacaagagccttggcaagagcctcgaggactggcaagccactgcccctgaagcactatacactggatccagccgtcgccagacatagccccctcgacgtccccgacattgggaacctctcagagctcgcgcgcttgctcggaattacacctggggagttagagtggttcgctgaccccaagcatctgaacaggaacgccgcacctatcttggcgcactacagatatgtgtggcacactaggccgggtcgtgtaccacgcctactggaggtgcctgctccaaggttgcgggccttgcagagggtggtgctgagccaactgctttgccctatcccaccacatcccgctgcacatgggttcgtgcccggtcgatcagctgtcactggcgcaggcgcacacacgggaaagctggtggtggtgaatctcgatctggctaccttcttcgcaaaagttacagccggccgcgttttcggcgtgatgagacaggcagggtacgcagaagcagttgcccatcgtctgacaggtctgtgcactcaccgcgtgcctgcccgagttctctctcagatgccaccgggcggagatcctgctgacagattcgccctgaggcaagctttggctctaccacacttaccgcagggtgcccctacttcccccatgctcgccaatttagccgtgcggcgcatggatagtcgcctggctggatgggcgcgacgctttgatgccgggtatacccggtacgccgatgacctggcatttagcggaggtcgcgacttagcacgaggcgctgatgcatttatagccggcgtgggccggattgtagcggatgaggggcaccggctcaaccacagaaaaaccagagtcagaggagcctctgcaagacagagtgttacaggagtggtagtgaacgctcaccccaacgtgcgtcggaccgacattgaccgccttaaagcgatcctgcacaattgtgccacctacgggcctagcagtcagaatcttgagggacacgccgaatttcaagcccaactgcttggccggatagcctgggtggcaggcgtcaatccgcatcgaggagcccagcttagggccgtctacaggcggatctcatggtga

SEQ ID NO: 12900 - RNA, 1470 nt, synthetic construct
  source 1..1470: mol_type = other RNA
atgagtacaaatagcactgctacccgccgagccacaagctcaggacttcccaccccctccccagaagggctcgcaactgctttggcccactccttcctggcagccaagtcatggaccgctcaggacctgaaacagagtgcggcggatatccttggggcacggagacgctggttgggtcccttagtgagaggcacgttagccgcctaccataggaggccggacggagcatccagagagctcgccagcttcatagcaacctctgagccattctttgaggcagtgagccgggcccgtaaacagcggaagccaatacgattagcacactacgcaatcttggggcctttgccgccacgtcatgccattgccaatcagcctcagaagacggggaaaattcctagcgtgtccggcctcgagggtctggctactatgctcgggctcgagatgggcgagctagaatggtttgctgatatagggggctggaatcgacgcgctactgccggttctggaaccgcaggctttaccagagagactggccggaggtatagacacagtaagttccagcactattcttacatctggcgatcccgggaaggacgcgcaccaagactgctggaggcccctctgccccgacttaaaacgatccagagggcagttctggacacctttctagcgccaattccccttcacccagccgcccatggtttcgttcctgggcgcagtgttgtgactggtgccgccaaacacaccggatcggccgttattattagtgctgatctgtccacctttttcgcccgcgtcacagccggcaaaatctacgacgccctgaggcagtccggctattctgaagctgtggctcacaggctgacaggaatctgcacaaacgccattcccgcctcagtgctgaacgcagtgcctcccggaggagctcccgaagagagacacgcactgaggcaagcgctggcaacccctcacctaccacagggtgccccctcatcacccgcgcttgctaatatcgccatacggaggctggatagccgtctcgctggatgggccagcaagatgaacgccacatatactcggtacgctgatgacctcacgttctcgggcgggcctgaacttgctcgaagagccgacgcctttatggcgggcgtcggtaggatcgtcaaggaccaaggacatacactgaaccatagaaaaactagagtgcggagagctggggtacgccaaaccgtcacaggcgtagtagtgaatcaacacgtcaatactacacggcgtagctatgacatcctcaaggctaccctgcataactgtgtgaggtacgggcctgagagccagaacccggattctcagacatctgctgataacgcccattttcgcgaaaggttggcgggccagatcgcgtgggtcgcatctgtgaatccagcacggggcgctaagctgcgcgctaagttccagcaaatttcctggtga

SEQ ID NO: 12901 - RNA, 1386 nt, synthetic construct
  source 1..1386: mol_type = other RNA
atgatgcacgcacctcggaggatccagtctgaggggactcgggtccttgccagaaccccccaccccacaacttctggggttgccaccgcagtcgcttttgcctttctcgccgctggtgagtggaccaaagccggtttggttcagagcggtaccgaattgctgggagttaggcgaaggtggctccctagtctggctgctcaggtgctgggctggtacccacggcctcctgtcgatgccgtgagagagttagcagcagttgtcgagggctgtccagcctttattaatgccgtcgatagggccgctcgacagcgggtacccattcgtatagcccgctatgttctcgcgccaggccaggctcgtcaaacacccttccccatccctcgaatttcatccgccggcgatttagcagacttgcttgagttgacaagcggggagctggactggttcgcagatgtcaaacactggaacgggcgagcggagccccggttacaacactaccggtacgtgtggagaactagaagcgggcggactccgagactgctcgaaatcccagcaccccgcctgaggtcactacagcggactgtcttgaggagtattctggcccctgtccctctccacgatgccgctcacggcttcgtttcaggacgttccgccgtgacaggcgctaggctgcatacgggcgcccagatggtgatagctctggacctgaccgctttcttcgcacgcgtcacagctggtaaggtcttcggcatcctccggcaggctggatattctgagagtgtggcacatctattgactggactatgcagccacgtggtacccccccgcgtgctttctagaatgccgcctgggggagccgtggatgagaggtttgcgcttaggcaggccctctccctgccacatcttccacaaggagcaccaacctcccccatgctggccaatctggccgtacgacggctcgactccagattaagtgggtgggcgtcagtggcgggagctgtgtacacgaggtatgccgacgacctgacctttagcggcgggaaagagctggcaggacgtgcagacgctttcgtgcgaggggccgctagaatcgtgggcgaagaaggacatgcactgaacccacgcaagtcgagagtaagggccgccggtgttagacaggtggtgaccggcatcgtggtgaacgaaagaacaaatgtggcccgcagcgaattcgaccgcctgaaggcggttcttcataactgcgtggtacatggtcctgcaggccaaaaccgcgatggccacggcgattttcgcgctcaccttctggggcggatcgcttggctggaagccctcaatccgggtcgtggagcgaggctcagagcagactttgcccgcattcggtggtga

SEQ ID NO: 12902 - RNA, 1356 nt, synthetic construct
  source 1..1356: mol_type = other RNA
atgaccacaacaactcccggtgccagggtgcttgcgcgaacacctcatccgtcccctgtcgctatcgcgactgctctagcccacgcctttttggcgaccgatgactggtcaaagaacggcctgttggctgccggggcagaggtattaggagcccgcagaagatggctgggacccgtcgctgcagaggtgctcagattctacaggcaaccgcccgttgacgcccctcgtgagttagccgccgtggttgtgctgaacgatgcatttcgggcagctgtggcccgggcaaaaaaaaacggggtcccaatcaggatcgctcacttcgccccaactcctgtgcgtgctcctagaggcttgaacgacctcagtgatctcgcacgactccttcggctcccagccggagagctcgactggtttgcggatacacgccactggaataggagagctcacagcaaaagactccagcactacagatatgagtggcgatccaggcctggaaggatgcccaggctgctggaagtcccacggccaaggttgcgggagttgcagcggacagtgcaccgggaaattttggccggcctgcgtgttcatagcgccgcacacgggttcgtttccggaagaagtgccgctaccggagctagatttcacgagggagcgagggtggtaatcaacctggatctggccactttcttcacccgggtacgcgctggccgagtatacggtatttttcgcagagccggctttgcagaaccggtggcacatgccctcaccgggctctgtacgcattctgttccttctggcatagcaaggaacgctcctgcaggagggactgctggggagtggttcgagcttcgacgcgcccttgtcctaccccacttgccacagggcgcaccctcgtctccagccttagcgaacctggccgtgcgcaggctggatttcaggctggaaggctgggcaaccgctgctggtgcagtgtatactcgctatgccgacgacctggctttctcaggaggggaccaacttgctcgtcgcgccgacgcatttgtccggggtgcaacccggatcatagaagccgaggggcacctggtcaatgcgcacaagacacgtgtgagggggagttcagtgcgacagaccgttacgggcatcgtggtcaatgaacgcgctaatgccagccggcccgagtacgagagactgaaggccattctgcataattgcgtgagacacggccccgagtcccagaataggtctggccatcatgattttcgcgcccatctgctgggcagagtggcttggatggaactgcttaatcccgcccggggtctaaagctgcgcgaaagcttcgaccgaattgaatggtga

SEQ ID NO: 12903 - RNA, 1209 nt, synthetic construct
  source 1..1209: mol_type = other RNA
cggtggctgcctcgggtagtcgctggggttctagggttctaccatcgaccaccacgggatgcacatcgcgagctcgccgctgtcattgagctaagcgatacttttcgggcggctgtcgagcgtagcgtcgaacagaggcggccgatcagaatcgcgcattatgtggtggggccaggacatggtgcgaagcacgccgtgctcccgctcaatgatctggccgaccttactagacttttgggcttgacccctgaccaactcgactggtttagtgacacacgccactggaaccgccgagcatcatcaggctccctccagcactacagatacgaatggcgcgcgagagccggacgagttccaagactcctggaagttcccaggcctaggctgagagaggtacagaggaaggttctgtctttgatactgagtcggctagctgtccatgacgccgcccatggattcgtgcccggaagaagcgccgcaactggtgctaggccccacgaaggcgcaaaagtactgattaatctcgatctgagcaccttcttcaccagagtgactgctggcagggtctacggcgtgctgcgacaagagggatttcctgaggcagtggcccacacaataacagggctgtgcacccactccgttccacctcggcttgtgacggctgccccctctggtggtcgcttagacgaacggttcgttctcaggcaggctctggctgtgccacatcttcctcagggcgccccctcctcacctatgttggccaacttagcggtgcgtcgattggaccggagacttacggggtgggccgaagcagcaggagcagtctataccaggtatgccgatgatctggcttttagtggcggggatgatctgacaaggcgggccggagcttttatccgtggggtgcggagaatcgtcgaggacgagggccactttgtgaatgcacgcaaaacccgcgtgtctggctggtccgtaaggcagtcggtgacaggcatcgtggtgaacgagcatactaatgtcacccgctctgaattcgaccgcttgaaggccgtactgcacaattgtgttctgcacggtcccggaagccagaacagatcagggcaccacgacttccgatcccacctccttggcaggattgcttgggtggcaatgttaaaccccgccagaggagccaaactgcgtgagacattcgataggattctgtggtga

SEQ ID NO: 12904 - RNA, 1389 nt, synthetic construct
  source 1..1389: mol_type = other RNA
atgttggccgctccagcatggaccgaggctgccttggttgccgcttgtgccgctgctctaggacccgcagcggaactgtccaccaccttccatcacgatgccgacccgggcgatggtgggttaagagatgacggaagccgggacgacggtccacatgacgatggccctccccacccttggctacctggtcttgcgcacgaggccttgcgcgcatttcccagggctccccacgacgagccaagactgctggccgaggtgctccacactagtggtgccctcggacgcggtagagcacgtgctgcagcccagggtgcatctctgaggatagttcgcgtggccgtggtgactactccaacgcgagctgccgatcctcgtctccgcagactagggtccgttgccgacctggccgcattactgcacctgacagtcggcgagctggactggttcgcagacgtccggcattggaatcgacggcacgcctctgggcctcttcagcaccacaggtacgaatggaggaccagacccggcaggacgccaagactcctggaggtccctggccatagactgcgcgacctgcagcgcgtggctttggatgaagttctcgccgccgtccctctgcatgacgcagctcacgggttcgttccggggcgttctgctgtaacaggcgccgctgtgcataccggagcggaagtcgtggtggctctggatctgagaagcttttttgcacgcgtgggagcaggacgcgtgtatggcgctctgcggagggaaggcttgccagaggccgttgcgcatgtcctaactgggctgaccacaacaagcgtacccccggccgtacttagcgccatgccaccaggcggcgatccttcagagagggccgctctcaggagggcacttgcgcttcctcatttggctcaaggagcgcccacaagtccggcactcgccaacgttgcctcacgacggctcgattccaggttagctggatgggcggcagcggcaggtgcaagatacactcgctatgccgacgatctcacattttcggggggacccggagtagccgcaagatcagatgccttcgtcaggggagtaggccgtgtggtggccgacgaagggcacgaactgaatccacacaaaacccgagtgcgaggggctgctacgcggcaaactgtgaccgggatcgtcgtgaacgagcacgtgaccgtcactcggacaagttacgatgcgctgcgggctcttctccacaatgccgaacggaccggccttgaggcccaaaaccgggctggtgtgcccgagttcagagcccatctggagggccggattggctgggttgagcagttacatcccgccaggggggcccgtttgagagaactgctggcacgagtgcctcgctga

SEQ ID NO: 12905 - RNA, 1374 nt, synthetic construct
  source 1..1374: mol_type = other RNA
atgacaggagctcccgacgctgtggcaagaggtctggcactcgcgctccttgctgtggctgacgccgattggaccgaacccggactcgtcaccgctgcttcggatgccctgggactggagccaggcgatgtggacgctcgatggctgcccggtttggcgcatgaggttctgcggcggttcccaagacctccccgtgacgaggctaggctgcttgctgtggtggtggaccgttcaggcgctcttggcagaggtagggaacgcgcccgcacagaaagacgcgctcttcgggtggtccatcccggtgttgttgcccctggccggacagagactgatgacgcaggagctggtgcccctgatggacgaccagaacttagaggcgttggggatctcgccgccctgttgggtctgaccattggcgaactcgaatggtttgccgacacacggctctggaacagacggcatcccagtggccctctccagcaccaccgctatgagtggagggcacgcccaggcagaacaccacgactgctcgaggtgcccgggttcaggctcagagacttacagagagtcgttttggatcgagtgttagcaggtgccccggtacatgacgccgcgcatggtttcgtcccgggaagatctgctgttacgggggcagctgtgcatcagggcagtgaggtggtggtggcactggacctgcgctctttttttgcgcgcgtgacagctacccaagcctacggagcactgcgaagggaggggctacctgagcctgtcgcccacttactggtcggcttgtgcactaacgccgtgccagccgccgtattgagcgccatgcctcctgggggggaactggatgagagagtggccttacggagggcccttgctgtaccccaccttgcgcagggagccccaacttctccggccctagccaatttggccatgcgccgtctggattcccggttagcaggatgggcagcagcggcaggtgctcgttatactcggtacgcagatgacctttcattctccggcggacaagaagtagcagccagggcggatgccttcgtcaggggagtcgggaggatcgtagccgacgaggggcacgagctgaatcctcacaagacccgggttaggggtgccgcaactaggcagacggtcaccgggatcgtggtgaatagcgggaccaacgtcacccgagcttcctacgatcggttgcgggccatgctccacaacgccgcaagcacaggactagaggctcaggaccgaggcggggaaccagactttcgcgcccacgttctaggccgcatagggtgggtggagcagctgaatcccgctcgtggcgcaaggctgagagaactgctggcgcgcgtgcccaggtga

SEQ ID NO: 12906 - RNA, 1371 nt, synthetic construct
  source 1..1371: mol_type = other RNA
atgagcgtgcggtcacccgcttcagctgcaggagcccacgaaccagacccaggacccgacgctgtcgccactgttctcgctgacgcattcttaggcgccgaatggtctgtccgcggactcgcagcagcagcaggtgaagctattgacggctctgcccggttttggcgtccactagcgcgggacctggtccatgcccttcctcgagccccccttgacgaccctagaacactggccgcgctgataaggagagatcccgcgttcacggaagcagtggctgaagcacgacggcgcggacgtcctctacggaacgtgcaccacgtgccggtgactcaggaggcaaggtcagcggacccgagattacttagactaggcaccgtcgctgacgtggccaggctgcttcacctgaccgtcggggagctcgattggtttgcagatccaggcaggtggcaccgtagggtggatggtggcccactccaacatcaccgctatgagtggcggagcagacctgggagaacacctaggttgctggaggtgccagggtttagactgcgcgatctgcagcgcgtggtcttggacgaggtgcttgctgcagtacccctgcacgacgctgctcacgggtttgtgcctggcagaagcgctgttactggggcacggcggcatgttggacgagaggtcgtgatcgctctggacctgacatcgttcttcgccagggtgacagccggacaagtgtttggatccctccgccgggaaggccttccagatgctgtcgcccatgtcctgactggcctctgcaccaccagtgtacctcccggcgttctctccaggatgcccccaggtggcagtcccgaacagagattcgccctgagacacgccctggctgtggcacatctagcccagggtgctcccacatccccctccttggccaatgtggcggtccgcaggctggatagtaggttggatggttacgcccgagcagccggggcaacctataccaggtacgccgacgacctcgcctttagcggcgatggaaccttagccgctagggctgatgccttcgtacggggggtgggacgcattgtcggggatgaggggcacttgctgaatcaggccaagacgagggttcgaggagcggccacgcgtcaagtggtgactggagttgttgtaaaccagggcacaaacaccgtgcggtctgagtacgaccagctccgcgctgttctgcataatgctgccactacagggttagaggcccagaaccgcgccggtcatcctgatttcgcggcccaactgtgggggagaatcggctgggtagagcagctgcatccgggtagaggcgcccgtttgcgagctgcattcgcgcgtgtgcctagatga

SEQ ID NO: 12907 - RNA, 1377 nt, synthetic construct
  source 1..1377: mol_type = other RNA
atggatgaatcaagtggcagccggaggtcacatctggtgacacggccaggtcctcctcctgcaccagacgtagcaaccgccctagcaggcgctttcttggcagcggaggaatggtctgccccatcccttcgtgaagccgcagcagcctgtctcggatctcgcaggcgctttgttgggcctgtcgtgactgccgttctgaccgcccatttacgcgctccaagagatgccccacgcgaattggccgccctgatcctgagggtggatggctttgaggacacagtacgcagagccagtagaaggcggcccgtgagaatcgcccaactgtcacccaccacgacggtcagtcgggttgctgatgagaggaggcctagagtcgacaccgtcgctgacctcgctcgcctgttgggcaccgatgtgggccatctggattggttcgctgacacaaagctatggaacaggagagcaccggccgggcctcttcatcactataggtatgaatggcggcaaagacctggacgagttccgcggctgttggaagttccaggcctgcgcttacgggagatccagcgcaccgtcttagatgagctcctggccccgttgcctctccatgatgccgcacacggatttgtagcgggtagaggagctcggagtggagcggcactgcatactggcagagaggtggtcatagccctggacctcgtcagcttcttcgccagggtggacggcagaagaatttattccgtgctgcgtcaagcagggttacccgagcccgtggctcactcggctactggacttgtaacacacgccgttccccccgctgtcctttcagcgatgcccccaggagggacctccgatgagcggtttgccctcagaagggctcttgcggtaccccacctgccccaaggtgcaccaaccagcccaatgctggctaatctggccgtgcggaggcttgactctagactaggcggttacgctcgagcagccggggctacttatacgagatacgctgatgacctcgcctttagcggggatgctgctttggctggccgagtggacgcctttgtgaggggggtgggtcgcatagtctctgatgagggccaccggctcaatcacgccaaaacacgcgtgcgtcgtcgaggggtgcgacagacagttactggaatcgtggtgaacgagagcacaactattgggcgcagggaatacgacaggctgcgggctatcctgcataactgcgccgcatacggcccctcctcccagaatcgagccggacacgcagacttccgggcacacctcctgggtcgtattggctgggtggaaagcctggaccctgaccgaggacgacgcctcagagccgagttcgctcggattgcgtggtga

SEQ ID NO: 12908 - RNA, 1437 nt, synthetic construct
  source 1..1437: mol_type = other RNA
atgaacgcccgagacttggacgcctacaccagaacagtcgccactgcgctggctcacgcctttctgatggcagatacatggatgaaaccagccctcttagacgccggcgctagtgttttaggggctcgccgcaggtggttaggacctctggccagagagattttggccacctacaggagtcgaccaaccgatgcgccccgggaattggtggcagttataagatccgcgcccagctttgtgtccgctatagaggtgagtgtggagcggcaggccgcgattagaatcatccaccaccccacatctcctaccgaggcacgaataagggtggatcaagtcagtgccgagctggccctagcttctctcgctaatgctcataccgcatcggccaacccggcatccgctcacaccccttctgcacatacagtgactaggcttgacagcttggtggacctcgctgcactgctggacctcacgcaaggcgagctggattggttcgcagatgtcaggctctggaataggagggcgcgtccagggagactccaccactatcggtatgagtggcgtcaacggccgggtcgcactcctagattgctggaggtccccgggcagagactaagggccatccagcggaccgtccttgatgaggtgctgtcccccatccccttacatccagcggctcatggctttgtggctgccaggtcagccgttactggggctgccgtacataccggagcagcggtggttatcaacctggaccttactagcttcttcgcccgggttactgccggtcggatctacggtgtactgcgacaggccggcctccctgaagcagtagctcacactctggtcggcctagccgtgcatgctgtgcctccacacatcctttctcagatgccaccgggtgggtcacctggcgagagattcgcactgcgcaaggtactggctgtaccccatctgcctcaaggcgccgctacaagccctgccttggccaatctcgccgtgagacggctggacagcagactcgctggttgggccgatgctgccggaggacagtatacccgctacgccgacgatctggcctttagcggaggacccgaacttgctcgcagagccgatacagctattcgtggcatcacccggattgtggaagacgaagggcacacaatcaatccccgcaaaacgcgggttcgcgcggctattgtgaggcaggtggtgactggagttgtcgtcaataagcgtaccaacacaccacggcgcgaatttgaccagcttcgaagcgtcttgcataacgcagcaacgcagggccccgactcacagaaccgtggctcacactccgatttccgagcccaccttctggggcgcatttcttggatggaatcggtgaatccatcccgggggccaagactgagggcagcattcgcaaggattgaatggtga

SEQ ID NO: 12909 - RNA, 1329 nt, synthetic construct
  source 1..1329: mol_type = other RNA
atgcggcagcgaagcgtggctgtgggcttaagtcacgctatgctggcctgtcctgaatgggctttcgatgcacttgtcgacgcctgtggtcgggctcttggtgtgcgaccaggctggctctggcccttggtggacggtgtgctcggtgcctatagacgccctcctctggatgcccaccgcgaacttgcccggtggatcgaggcctcagatgattttcagagcgcattcgtcgcagccagagaggccgggagggtgattacgctagcgcgcctggagactgtagccgcctctatggcacccacctcgctcgctgttccctcgatcgctggcctgggcgaactggctgatttcctggaggtgagtcccagccagctggactggctgactgataccgtgcattggaaccgccgcacacctagagggaggcttcatcactacggatatgactggttggtgcggccagggagaaccccaaggttactcgaggtcccgaccccccgtatgaggcgagttcagcggttggtgctgagagaaatcttaggcaggctcccactaaatgacgcagctcacggctttgtaccgggaagatctgcggcgacaggagcagcagctcatgtgggcgctcagaccgtgataactttggacctgcgcactttctttgctagagtccccgctaggagagtctttagcgttttcaggcaggcaggctacccggaaggagtagcccatgcgctgacgggcctctgcacacacgccgtacctccatgggttggggctcggatgcctgctgggggatcctcagagaatcgcgcagctctcaggagggctattagcgagtcacatctcccccaagggtcccctacatcccccgcactgagcaatctggcggtgagacgcttggattcacgcctgagtgggtgggctgaagccagtgacgccacctacacccggtatgccgatgatctggcattttccggggttcgacttcgaggtagagccgccgttgctttcatcgccggcgtggaacgtatagtcagggatgagggccacgtgctaaatgagtccaagactcggattgccggaagaggagcgtcccaacgggtgacaggcctggtagtgaacgacgttgtcgccgtcgaccgtgcctacttcaacgaattgaaagcgattctgcacaactgcgcagcccacggaccacgtgggcaaaaccgtgccggtcaccctgactttcgggcccatcttgcaggacgcctcgcatgggtggagtctgtctctccatctcgaggcgccaggctgcggagagattgggacaggatcgactggagctga

SEQ ID NO: 12910 - RNA, 1329 nt, synthetic construct
  source 1..1329: mol_type = other RNA
atgcggcaacggtctgtcgctgtcgggctcagtcacgcgatgttagcctgcccagagtgggccttcgacgctctggtcgacgcctgtggtagggcccttggagtgaggcctggctggttatggcctctggtcgatggcgtgttaggggcctaccgtcgccctccactggatgctcatcgtgagctcgccctgtggatcgaggcgagcgacgattttcagagtgctttcgtggccgcacgtgaggccggaagggtcatcaccctcgccaggctggagactgtggctgcatccatggcccccacttctctagccgtgccctcaatagctgggctgggggaacttgcggactttctggaagtattgccgtcccagctcgactggctgacagatacagtgcactggaatcggcgcacccctcgtggcaggttgcatcattacggttatgattggcttgtgcgacctggcagaacccctcggttgctggaggtgccaactccccgcatgaggcgcgttcagcggcttgtcctgcgcgagatcttgggccgactgcccttaaatgatgctgcgcatggctttgtcccgggaagaagtgcagccacgggtgctgcagcccacgttggagctcagacagtgatcactctggatctaaggacgttcttcgccagagtgcccgcacgacgagtgttctcggtgttcagacaggcggggtatcccgagggtgttgcgcatgctctgacaggcctgtgcacacacgccgttcccccatgggtaggtgctcggatgcctgcaggcggaagcagcgaaaaccgggctgcccttcgcagagccatttcagcaagccacttgccacagggctctcctacctcaccagcactgtccaatctggcagtacggcggcttgactcacgcctgtctggatgggccgctgcaagcggtgctacttacaccaggtacgcggacgacctcgcttttagcggggatggaatgagaggccgagccgcagctgcctttatagccggggccgaaaggattgttagagatgaggggcacctgctgaatgggtctaaaacatcgattgcaggccgaggagccagacagaccgtgaccggactcgtcgtaaacgactctgttgctgtggatcgcccatatttcgacgaactcaaggccatcctccacaactgtgcagcccatggcccgagaagccaaaaccgcgcaggacaccccgatttccgcgcacacctcctaggacggttggcctgggtggaatccgtgtccccctccagaggcgaacggctcagaagggagtttgacaggattgactggagttga

SEQ ID NO: 12911 - RNA, 1614 nt, synthetic construct
  source 1..1614: mol_type = other RNA
atggccgccagcattcgtgaagaggccgctatctctcggacctcggttcccgaggaaaataacggcgcaagacgcagacgcaggctgcccttagcttggggcaacgctactgactgtgggcgaggggggtggagtagacagaccaacactttatcaggcgtgacacccgggtataatagccagcctgagcgcactacagcaggaactactcccagattcgcacgttcccgtgcccgaactgatcgcagcgtggctcggggttcatctcatcccttccagggctctgtaaaagagcacagcattgctgtgggcctgagtcacgccatgttggcagcgcccgaatgggcctttgaccctctcgtcgacgcatgcggcagagcattgggcgctaggcctggctggctttggcctttggtcgacggaatcctggatgtctatcgaagaccgcccagagacgcacacagagagctcgcgcggtggatcgaagcgagtacggccttcagaggagccatagaagctgctcgggaggccgggagaagcattgctctggcacacctggagacaattccagcgagcatgggcccaacgccactgaccgtgcccagcatcgctggtcttggggaactggccgacttcctgggagtgagtccgggacagctggactggcttacagacactgcccatttcaaccgcaggaccccacgaggccgactgcatcactactcctacgattggctggttcgccctggtagggctcccaggttactggaggtccccacgcctcgcatgaggagggttcagcggcgtgtacttcgggagatactcaccgccctgccactcaatgatgcggcccacggattcgtgcctggtcggtctgcagttacaggcgccgcagcccatgccggtgctgaaacagttatcaccctcgatctacaaaatttctttgcccgcgtccctgcccagagagtctactctgtgtttaggcaagcagggtatccagaggccgtcgctcacgccttgaccggactctgtacccacgccgttccaccttgggtgggagctaggatgccggtcggagggagtttggaagatcggcttgcattgaagcaggctatctccggctcccatctgccacaagggagcccaacctcacccgcgctttccaatctctcagtgagacgcgtcgatacacggctgaacggatgggccgcagcttctggggcagcgtacacacgatacgctgacgatctggctttttcaggagagggactaaggggtcgggcagccgcaacctttatagccggcgtggcacgcatcgtgttagacgaggggcatctgctcaacgaatccaagactcgcatttccggtcgtggagccagacagagcgtgaccggcctggtagttaatgatggcgtggccgtggaccggctctatttcgatgagctgaaagcgattctacacaattgcgccgtgcacggtccgcacggccaaaacagggcccagcatgctgactttagggcccatcttctcgggcggttggcttgggtggagtccgtgtcgcctagtaggggcgtaagactgcgacgggaatttgaccgcatcgattggtcttga

SEQ ID NO: 12912 - RNA, 1038 nt, synthetic construct
  source 1..1038: mol_type = other RNA
atggcccccacctctgcagccgttccctctttagacggactgggagaactggcagattttctcgaggtcacgtccccgcaactggactggttgactgacacagcccattttaaccgcaggaccccccggggcagattacatcactatagctatgattggttggtgcgtccaggtagagctccccgccttctcgaggtacctactcctcggatgcgaagagtccagcgccgggtgctcagggatatactggggccactccccttaaacgacgccgcgcacgggtttgtaccgggaaggtcggccatttccggcgcatcggcacacgctggcgctcataccctcatcacacttgatctgagtacgttcttcgcccgagtgcctgccaggcgtgtgtattctgtgttccggcaggctggctaccctgaagctgtcgcccatgccctaaccggcctgtgcactcacgctgtacccccatgggtcggtgcacgcatgccaagcggaggaagcccagaggatagagccgcccttcgtgatgctatatccaggagtcacctgccccagggaagtcctaccagcccagccctctctaatctgactatgcggaggcttgatagccgcctcacaggttgggcagctgcatctggtgcggtttacacaagatacgctgacgacctggccttttccgggagtgatttgaggggccgcgcagcaacatcattcatctccggcgtcgataggattgttagggccgaagggcatgtgctgaaccggagcaagactagaattgctgcgcggggtgcacgacaatccgtgaccggactagtggtgaatgacggcccctcagtggataggcctacctttgacgagctgaaagccctgctgcacaattgtgtggttcacgggcctgcctcacagaatcgagctgggcatccagacttccgggcccaccttctgggcagattgaactggatcgcgtcagtcagccagacccgagggacacgcttgcgcagagacttcgacagaatcgactggtcttga

SEQ ID NO: 12913 - RNA, 1356 nt, synthetic construct
  source 1..1356: mol_type = other RNA
atgcgccctggagcaacagcccagccatctgccactaccctagccgccgggcttgcacacgctatgctagcttgtccgctgtggacctttgacgtgctcgtcgatggctgcggcagggcacttggaagtcgcccaggatggctctggcccctcgttgagcgcgtcctcagtagttaccatcgccctccccacgatgccactagagagctggcaagatttatcgcccagacgcgtgccttgcacgatgcggtggaagctgcgcgtgctgatgggaggactatagcccttcagcacctggagacaacaccagccaggtcgggggaaaatggcgcccgaggtgtcccaaggatcgatggcctaaatcaattagccgaatttttcgccgtcacaccaggtcagctcgattggctgaccgacacagcccactataatgggagaacgcgtcgggggcgccttcaccattactcttacgactggatgcggagagaagggcgggctcccagactgctcgaagttccctccaggcggatgcgtgaggcacagcgattagtgctggctgagattctgactcctctcccgttacatgacgcagcacacggcttcgtacccagcaggtctgcgattacaggcgctgctgcgcatgtcggtgccgaaaccttgattacactggacctgtccaccttctttgcccgcgttccagcccgaagggtattcggcatccttcggcgagcggcatatcccgaggccgtagctcatgctctgaccggcttgtgtacccacgcagtgcccagctgggtcctggcaagaatgccgcctggagggtcccctgaagaaagggcagcccttcgggagtctttgacgaggtcccacctgcctcaaggctcccctactagccccgccctgtcaaacttgtcagtgcgaggtctggacgggcggttagatggttgggccgctgcttcaggcttcagctacacaaggtatgctgatgacctctgcttcagcggacctcacctcacccatcgagcggctgcttcttttatcgcaggtgctgagcgcatcgttgccgctgagggacaccgggttaatcggcgcaagaccagaatttcaggagcgggcagtagacagagcgtgaccggcatagtggtgaacgagcgcctcaacgccactcgcgagcatgtggacgagctgaaagccattctgcataactgcgcagtgcatggccaggcctcccagaacagattcgggcacccagaatttagagcccacctggaggggagaatcacttgggtggccgcactgaatcccggaaggggagcaaggttgcggcggcaattcgacctgatcgactggggatga

SEQ ID NO: 12914 - RNA, 1188 nt, synthetic construct
  source 1..1188: mol_type = other RNA
atgctcgccgcctatcataggcctcccggaggtgcaccgagagaactggccaggttcattgcgcaaacgagtgcctttggcgccgctgttgctcgggcagtggagaagggggtccccattcccgtagccaggtacgctgtgggattcgccgctgtgggtactagcgctggcattgcagctgatgtcggcgccctggcggaactgctcgacttaacggtgggcgagctcgagtggtttgctgacaccggacactggaataggcgggctaggcctgggcctcttcgccattacagatacgcatggagaacaagaaccgggcgcgtaccccgactgctggaagttccaggtcccagattgaaagctgtgcagcgcagggtgctgcaccagatgctggggtcgatccctctccacgacgcagcccatggctttgtaccaggacgaagtgtggccactggggcagggagacatcttggcgccgagatgcttataagccttgacttgcgggcttttttcagctccgtgggggccagtcggattcacggaatcttccgacaggcaggcatgcctgaggccgttgcgtacacactgacaggtatatgcaccgccgctgttccacctgcggtcctgtcacggatgccagacggcggttctcccgacgaacggttcgcactgaggcgcgctttggccgcagctcatttgccgcaaggcgcaccatcctctccagcactggcgaacttgtcagtgcggcgcctagacagccgattagccgggtgggccgaagccactggagcagtttatacccgctatgctgacgatctggcattttccggatctgagcctctggccagaagggccgacgcgtttgtcaggggcgtggaaggcatcgttacctcagagggccacctcgtgaatccccggaagaccagggtgaagggtgcctccgtccgccagactgtaacaggagtggtggtgaactccgtcccaaacgtccctcgacccgtcttcgatgagctgaaagccatccttcacaattgtgtggctgatgggcccgaatcacagaacggagcccgtgggccagctcaccgtgatttcagagcccacctactcggccgtattagctgggtcgagtctctcaatccggcacggggacagagattacgcgatgatttcgatagaatccagtggtga

SEQ ID NO: 12915 - RNA, 1299 nt, synthetic construct
  source 1..1299: mol_type = other RNA
atgcaggggcgtgaggtgctggttgaaacgctggtgcacgcattcctgggcgcagagtggaccgcagatgctcttagcgcagcagccgtagacgctttgggcgcacgaagaagatggcgaggccgggttgttgcgggcgttttagtcgcctttccccacccccccttagatgcccctagggagctagccaggtgcctggacgcactcctgcctgaccgtgctcaacccggggttgcgcatctggctcctgtggctgcgagagcctcagcttcaagctctcctgtcccgcgcatagatggctggggggacttggctaggctgcttgccctgacaccgggcgaacttgaggccttcgccgacgtgcagcactggaaccgaagagcccccgagggacccgtacagcactacgaccacgtgtggcgcgaaagacctgggagggcaccaaggctgttagaggtccctcgtccacgcctgcgggcagttcaacggtcggtgctggatcagctcgtggggttagccccagtgcacccagctgttcacggctttgtccccggccgatccgctatttctggggctgctgtccatgccggagctgccatggtcgtgacccttgatctgcagcggtttttcgcccaggtaaccgctccaagagtcttcggcgtactccgggcagagggtctaccagaaggggtcgcacacgccctaacgggcctgtgtactcatgaggtgcccgtggccgtgctgcgaagaatgccctccggtggaactccagaggaacgcgcggccttgagacgctccctctctctggcacacctccctcaaggagctcccaccagtccggctctcgccaatgtagcgcttaggcggttggtggccaggctagcgggatatgcggaagcggctggagccaggtatacacgctacgctgatgacctcgccttttcagggggtcctgctttcgccaggcgtgcagacgcttttgcacggggagcagctaggcttgccgccgaaagcggttgggccgtcaatcctagaaagacacggctccgcccggccagtaccagacagacagtcactggggtggtcgtgaacgcccatcctaacgtgcggagggcagacgtggatcgcctgcatgctatcttgcataattgcgccgtgcacggcagcgctggtcagaatagggccggcgtgccagattttcgcgcccatctcctgggaagagtggcgtgggtggccgcagttaacccacggagaggagccgccctgcgagcattgttcgactccatcacctggacttga

SEQ ID NO: 12916 - RNA, 1362 nt, synthetic construct
  source 1..1362: mol_type = other RNA
atgcacggacgcgacgccgttgtggaagcgttggcccacgctttcctgggtgcagagtggacaccagccggcctacgagctgctgcagcagatagcttgggcgcccggaggagatggattggaccactcgtgacggctgtgctggtggcgtttccgcatcccccgctggatgctcccagagaactggcccaggtagtcgccggcctccttcctgaaagggcccaacccgtcgttgcccatctcgcacctgtacccgcacgcgcagttccatcctctagccctgtgcccgcgattgacggacgcgatgacctcgccagactacttggcctggcaccggcacagctggacggttttgcagatcttggccagtggaatcgtagaaccccccatggggcactgaaccccggtgctttgcagaactacgatcacgtgtggaggcagaggccaggtagggctccacgactgctggaggtccctcggtcgcgtctgagagctgtgcagaggtcagtgctggacgagatcgtagggttggcgccagtccatcctgccgcccatggtttcgtgcccgggagatcagccattaccggggctgctgtccatgccggcagtgcaatgctgataacactggacctacagcgcttcttcgctcaggtgactgctgcccgggttttcaggcttctccggggggagggattaactgaggccgtcgcctttgccctcacggggttgtgtacccacgccgtgcctgtcgctgccattcaccgcatgccagcgggtggcgaacctgaagaaagagccgccctgcggcgatctcttgcccttgctcacctaccccaaggggctcctactagccccgcgttagccaatctcgccttgagacggctcgatgcgcgactgactggttacgccgaggccgctggagctcgctatacaaggtacgcagatgacttagcgttttccggcgacgcccgctttgctagacgtgcagaggcctttgccaggggagctgctcggatcgtggaggacgctggctatgctgttaatccaagaaagacacgactgcggccagccagtacccgccaatccgtcaccggcatcgtggttaacgcccaccccgcagtgaggagagccgatgtagaccggctgcgcgcaatcctccacaactgcgcagtccacggacctgccgggcaaaatcgggctggagtgcccgacttgcaggctcatctcctggggcgaatcgcatgggtgtctgcggtgcaccctggtagaggagccaggctgagggccttattcgagcggataccatggcctgaaccgagcggtgcagcaccatccctggatccggcaggacctcgtccctga

SEQ ID NO: 12917 - RNA, 1305 nt, synthetic construct
  source 1..1305: mol_type = other RNA
atgcaagggcgtgatgtcctggtggagacactgacccacgcgttcctgggcgctgaatggactcgtgatagcctgagagccgcggctgttgattccctgggagcgcgacgcagatggcttggacctctcgccactggcgtcctagtggcctttccacaccctcctctcgacgccccacgggaactagccagatgtattgcaggcctcttaccagagcgagcgcagcccgtcgtagctcatttggcacccgtgccggcacgcgctttaccttcaagctcagccgtgccaagaatcgacggacgagacgacctggctcgcctattggccatcaccccggctcaactggatggctttgcggatctgggccagtggaacaggagagctgcggaaggcgccgttcagcattatgatcacgtgtggagggaaaggcctggcagggttccccggttgctggaaattccacgggccagactgcgcgcagtacagaggacagtgttggaggaggtagttggccttgccgcagtgcacccagccgcacatggcttcgttcccggacggtctgccatatcgggtgcagccgttcacgccgggagtgcaatgctggtcacactcgacctccagcgattcttcgcccaggtgactgctccccgcgtctttgggttactgcgggctgagggattgccagaggcagtggcttacgctctgacaggcttgtgcacacgccccgttccgatcgccgtgttaagacggatgcctacggggggcgatgtcgaagctagagcagccctgcgaagatcccttacgctccctcacctccctcagggagctcccacctctccagcattggccaacctcgccctgaggcggcttgatgcgcgtctcaccggttacgctgaggccgcaggagcacggtatactcggtatgctgacgacctggcattctccggcgatgagcgctttgcacgccgagcagaagcttttgctcggggggccgcgagaattgtcgaggatgccggttacgccgtgaacccccaaaagaccaggctgaggcctgctagcgtcaggcagtctgtcaccggagtggtagtgaatgtgcacccgaacgttcgcagagccgacgtagaccggctgcacgcaatccttcataattgcgtggtgcatgggccaagtgggcagaataggggagctgtgcccgactttggggcccatctgctcggtagaatagcctgggtcgctgccgtgaatcctgccaggggtgccaggctgcgtgctcttttcgacgccatcgtgtggcccggggcctga

SEQ ID NO: 12918 - RNA, 1299 nt, synthetic construct
  source 1..1299: mol_type = other RNA
atgcgtggtcgggacgcgctcgtagaggcacttgtccacgcttttctcggcgccgagtggacccacgacgcattaagagctgccgccgcagacagtcttggggctagacgcaggtggctaggacctctcgtcacaagagtgctggtcgcttttcctcaccccccagtggatgctcccagagaactgggccggtgcatagccgctctactgcccgataaagcccagccggtggtggcacatttagctccagttgctgcatcagctgccgaatccagcagtcccgtgcctcgcatagacggaatcgccgacttagccgccctgctcggactctcagttgacgccttggacggcctggccgattctggcagctggaatcgtcgggcaccagagggtcgtctgcagcactatgatcacgtctggcgagaaaggcctggtcgcgtggctcgactattggaggtgccaaggggacgactgagggcagttcagcggtccgctctggacgagattgtggggttagccccagtgcatcctgcggcccacggtttcgtgcctggcagatctgccatcactggcgcggccgagcatgtcggatctgctgtcgtggtgaccctggatctccagcgctttttcgctcaggttaccgcccccagagtgtttgggctgttgcggcgcgaaggtctgccagaggcagttgcctacacactgactggactctgtacacacgccgtaccggtcgcagtgctgaggagactgccggagggaggctcacctgaagaacgtgcggggctgcgcagagccctcacacttcctcatttgccccaaggggctcccaccagtccagccttggccaacctggctctgcggcgacttgatgctcgcttgaccggctatgcagaagccgccggggcaagatacacgaggtacgccgacgacctggccttctctggcgacgagagcttcgctaggcgcgcagaagcctttgcaagaggtgcgcaacgggtagttgaggacgccgggtatgctgtgaaccctcgcaagacgcgcattaggagagcatccgtgaggcagagcgtgactggcgttgtggtgaatgtcaggcccaacgtccggagggctgatgtagatcggctgcacgctatcctccataactgcgcagtgcatggccccgcgggtcaaaatcgggcaggagtcggggatttcagggcccacttgcttggacgaatcgcgtgggtagccgcggttaatccagggcgaggcgctgcacttagagccgtcttcgatcggattgagtggggatga

SEQ ID NO: 12919 - RNA, 1434 nt, synthetic construct
  source 1..1434: mol_type = other RNA
atggctgagccgaccggagtagacggggctcatccctttgctcgcacagccgatgttacaatcgcccgcaccacagatgcaacgacaacgaggcggacagctgtggcatcggctcgtacagcagagatcgccaccgtgcttgccgacgcctttctcgctgctgaagactgggccgttgacgccttacttgcagccggcactgcagccgtaggtccccataggcgcttcgtgcccatgaccgtcctcgcagctctaaggggatatcctcgggcacctcgggacgctcccagagaactggcagcgtttctgcagagtgttgacggtttcgccgaggcggtaaggcgatccgcggaaagagcgcccattaccgtggcaagtcgaagggccactcctacagaggcaccccctaatacaggccacgtgccccgcattgacaccgtcgcagatctggcacgcctgttagacctgactattgggaggctggaatggttcgcggacaccaaacagtggaacagaaggacgcatgacgctgtcctccagcatcacggctatgtttggcgggccagaccaggacgagtccccagattgctggaagtcccaaagccgcggttgcgcgctgtgcagagaactgcactcgacgagatcctgacttttctacccgtacacgatgccgcccatgggtttgtgcccggacgttcagcagtgtctggagcggctcaacatactggccggcaggccgtggtcaccctagatctggcccattttttcgccgccgtgtccgcccctatggtttacggcctgctgcgcagaggcggtcttcctgagcctgtggcccacaccttaacaggcttgtgcatccacgtggtgccacctcgcgtcattgccgccatgccaccaggtggcaccccagaagacagagctgccctccgtagggccttggcaactccgcaccttccgcagggagctccaaccagccctactctggcgaacgcttccgtctggagactggacacacgactcgccggatgggcagcgagtgcagatgccacctacacgcggtacgctgatgacctcgccttcagcggcgatgatcgtttcgccgctagagtggacgcttttgtaaggggcgttgggcgcatagtgaccgatgaggggcacatactgaatgcctctaaaactcgggtgcggcgacggggtgtcaggcaatcagttaccgggatcgtggtgaatgaaagaccaagcgttggaagggcagagttcgatcgcctgaaggctattctgcacaactgtgctgagcacgggcccgacggtcaagatcgtgtgggggtccctgatttccgcgctcacttgcggggaagagtcggctggtttgagcaggtgcatccagagaggggcgcccgacttctcgccgaattccagcggatcacatggtga

SEQ ID NO: 12920 - RNA, 1314 nt, synthetic construct
  source 1..1314: mol_type = other RNA
atggttgcaggcgccctagccgacgccttcctagctgctgagggctggcaccgagacgagttgaccgctgccgggtatgatgtgctcggcgtggagagaacctatgtaggtgtagctgtcggagtggccctggaggcttatccacgtgcacccgtcgatgccccacgacaattagccgcagtactcgctagtgcccctcggctggttcggctccatgattccagggtacccctcagacccgtccgcgttctgttaaggagggccaccgcagtgagagcacgtccaatcgtcgcatcgcgccttctggtcgatacgctccccgagttggctcgcgaactggacttaacggctgggagattgctatggctggccgacaccaaaggctggaaccggcataggggtcccacatccgcgctgcaccaccatcgtcacgagtgggtgcaacgccctggcagagcaccaagactcctggaaaagccaatggctatgctgaagcggactcagagaacaatcctggacgagcttttagccgctatgcctgttcacgacgcggcccacggattcatcgccggaagaggggtagtgagctctgcggccgaacacgtgggatgccctgttgtgctcagcgccgacctcactgccttctttgctaacgtgagggctgcgacagtctacggcgtgtttcgctctgcaggtttcgcggagccccttgcccatgtgttgaccggcatctgtacgcacagagtgccaccccatgtcttgaccgccatgccccctggaggggatcctgatcagcggactgccttgaggcgggccctgactgaagctcatctgccccagggagcccctacaagccctgctctggcaaatctcgcgctgcgacacctggacgttcggcttgcaggctgggcagcagccgtggatgctacatacacccggtacgccgacgacctgaccttttccggtggcgatgctctggctgcaaggccagatgccttcttgagaggcgtcgaccgtattgtcactgagcagggacacacccttaatgcacgcaaaactcgagttcgaagggccggcgtgcgacagtcagtgactggagtggtcgtgaacgaacgcacatcaccggggcggagggaagtggatcgccttcatgccatacttcataattgcgtggtccacggtccggcaagtcaggatagggacgggcacgctgactttagagcccacctgctcggccgcattggatgggtggggcaagttcatccggtaaggggggcggctctgatgacactgtttgcacagattcggtggtga

SEQ ID NO: 12921 - RNA, 1491 nt, synthetic construct
  source 1..1491: mol_type = other RNA
atggaattccccggagaggcagacggtgcgagagatgcctctacctcccccggatcacctcgtgggacacagtaccagcaagatgatacaccgagggaagctcggagagctcccagggcactcccacatggcggaactgaccggtcacctggcaatcccacacccacccccctcgacgtcgtagctagggctctggcagacagcttcctggccgctgatagatggaacagggacgacttaactgctgctgggtatgatgtgctgggggtggaacgcacatacgtgggtctggccgtgggaatcgcccttgacgcatggccacgaccacccgtagatgcccccagacagtttgccgcggtgttggccagtgatccgagactgatacggctacatgatagcagagtcccgctgaggccagtgagagtcttacttcgtcgcgccactgcggttagggcggtacctagggtggactctcgcctgctggtggatacccttcctgagctcgctagggaactggatctgacggtcggccggctaatgtggctggccgacacacgtggttggaaccggcgtccgggaccatctagtccacttcatcaccaccgccacgagtgggttcatagagccggtcgtgcccctcgcctactcgagaagcctatggcaatgttaaagcggacacagcggaccattctcgacgaactgttggtcgcaatgccagtgcacgatgctgcccacgggttcgtacctggaagaagcgtcgtctccggtgccgccgaacatgttgggcgatccgtcgtcctatcagccgacctgacgtctttctttgcgagcgttaccgctccctcggtgtacggggtgttcagaagcgctggatttgcggagcccttggcacacgtgctgacaggggtttgtacgcaccgcgtgccacctcatgtgcttaccgccatgcctcctgggggagatgcagacgcacgaggcgctttgaggcgggcattagccgccgcacatctgccacaaggggcacctacatcccccgccttggcgaatctgactttgcggcaccttgatgttaggctcgccggttgggctgcagctatgggaggcacctatactcgctatgcagacgacctcaccttttccggaggagacgctatggccgccagagctgacgcctttctgcgtggcgtagaccgaattgtcagggagcagggccacaccctgaacacccgcaaaactagggttcggcgcagtgctgtgagacagagcgtgaccggcgtggtggtgaatgagcgcacttcacccggccgacgcgaagtggataggctgcatgccgtgctccacaactgcgtcgttcagggtcccgcaagtcaagaccgaggtgggcacccagatttccgcgcccacctcctcggcaggattggatgggtagagcaggtgcatccaggcagagctcggcgactgagagatgagtttgcccggatccggtggtga

SEQ ID NO: 12922 - RNA, 1320 nt, synthetic construct
  source 1..1320: mol_type = other RNA
atggacgtagttgcaggtgccctcgccgacgctttcttgaccgccgctcgatgggagcgcgatggactcacggccgtgggatatgatgtgcttggggtcgagcggacgtatgttggcgtggccgtcggtgtcgcgttagatgcgtaccctaggccaccagtagatgctccgagacagctggcagcagtactcgctggggcaccacggctggttaggctgcatgaagcccgggagcccttaagaccagtccgcgtgctcttacgcagggctgctcccgtacaagcccatcccacagtggccagtcggctgttagtcgacaccctgcccgagctcgcaagggagctagacctgactgtgggccgtctactgtggctggcagataccagaggctggaatcgcggaccaggccccacttctccgcttcaccatcatcgccatgaatggctgcaaaggcctgggagaactccccgccttctcgaaaaaccttacgcgatgctgaaacggacccagcgcactgtcctggacgatctcctggccgtgcttcctgtgcatgacgcagcccacggcttcgtggctggaagatcggtagtctccggcgccgcggaacacgttggaagaccagtggttctgagtgctgacctgacatcttttttcgctagcgtgaagagccccacagtgttcggggtctttagaagcgcgggatttgccgaaccccttgcccaggtgctgacagggttgtgcacccacagggtgccacctcacgtgcttacagccatgccccccggaggtgatccggatgaaagggcggccttgcgtagggctcttgcagctcctcatctgcctcagggcgccccaacgtctcctgcactggctaatctgtcactccgccacctggacgctagattagcaggttgggccgctgctgtgggcggaacatatacccgatacgcagacgacctgactttctcaggcggtgatgccttggctgctaggccggaggcctttttgcgaggcgttgaccggattgtgaccgagcaaggccacacactgaaccggcgcaagaccagggtccgtagagcaggtgtgcggcagtccgtcactggcgtggtagtgaatgagcgaaccagcccagggcggagggaagttgatcgactccacgccgtcttgcataactgtgtggaacacgggccttcctcccaggacagaggagatcacgcagacttccgagcccacttgctcgggcgtatagggtgggttgagcaggtgaaccctggacgcgccagaaggctatgggccgagtttgcccggatccggtggtga

SEQ ID NO: 12923 - RNA, 1311 nt, synthetic construct
  source 1..1311: mol_type = other RNA
atggcccaggcgctcgccgatgcctttttggccgctgacgactggtcccgtgacgcactgacggctgcagggtatgatgtgctaggcgtggagcgcacgtacgtgggagtcgcagttgggactgccctcgacgcataccccagaccacctgttgatgcccccaggcagttggccgctgtgcttgctacagccccccggttagtgcgccttcatgattcacgcggaccccggcggccagttagagttcttgcgagacaagccacagcagtccgagcacggcccgttaccgattccccgctcttagtagacaccctccctgagctcgctcgagctctggacctgacggtgggacggctactgtggctggccgatactaggggttggaaccgcagacctggcgcctctagtccactccaccacgttcgccacgagtgggttgcgaggccaggacgtacaccgcgactgctggaaaagcccatggcaatgctgcggcgaactcagaggaccgtcctggacgacttgctcgccgccttgccagtacacgatgccgcccacgggtttgtaccaggacggtctgtggtaaccggcgcagctggtcatgtcggcagaagggtcgtgctgaccgctgacctgaccagcttcttcgcaaccgtacgcgcccctaccgtttatggcgtcttccgagctgctggctacgcggaaccactggctcatgtgctgacagggctctgcacacacagagtccccgtgcacgtccttactgctatgcccccaggcggcagcattgacgagaggagagcgctgcgcgatgccctggtggaagcacatctgcctcaaggggcccccacttcacctgccttagctaatcttgcactccggcatcttgatgctcgccttgcaggatgggccacagctgctggggctacctacaccaggtatgccgacgatctgacattctccggtgacgatagactggctgcgagagccgacgcattcctacgcggcgtggagagaatcgtggccgaccagggtcatacattgaaccctcggaaaactagggtgaggccggcaggcgtaaggcagagtgtcactggggtggtggtgaacgaaaggaccgcgcccggtaggagagaggtcgatagactcaaggcagtcctgcacaattgtgtggtgcacggacctgcaagccaggatcgagctggccatgccgactttcgggcccacttgttaggtcgcatcgggtgggtgggacaggtgcatcctgaccgtgcggccaaattgcgggccctgtttgcccgtatagaatggtga

SEQ ID NO: 12924 - RNA, 1485 nt, synthetic construct
  source 1..1485: mol_type = other RNA
atggagttcccaggagaagctgctggcgccagagatgctccaacttctcccgggagccctcgaggaacaagataccagcaggatgacactccacgggctggtcgcagagctcctcgagcaacgccccatggagggactgacgggagttcggggaaccctacgcccctggacgttgtagctgtcgcgctcgcagactccttccttactgcagagcaatgggcccacgacgagcttaccgcagccggatatgctgtggtcggagtcgaacgggcctacgtcggcctagcagtagcagccgcattggaggcctatccacgcccccctgttgatgctccgcggcaattggccgcagtactggccagtagcccccgcttagcagagctgcaccgctcaagggaaccacgtagacctgtgcgggtgctcgcaaggcgagccacagctgtaaggagtcgccccgagacagtgtcaagactgctcgtggacaccctaccggagctggcacgggaactggatctcaccgtcggcaggttgctgtggctcgccgatacacgcgggtggaacagacgacccggtccttcctcccctttgcaccatcatcgccacgagtgggtgagacgccctggaagaacaccgcgcctcttggagaagcctatggatatgctccggaggacgcagagaaccatcctggacgagttgctcaccgccctgcctgtccatgacgcagcccatggctttgtggccggtcggtctgtcgttaccggagcagccgcacacaccgggcaacaagttgtggtgtctgccgatttgaccagcttcttcgcctcagtgagcgcccccacagtgtacggcgtgttccgctctgctgggttcgcggaaccactggctcacgtgctgaccggcatctgcacacaccgggttcctccgcatgtgctgaccgctatgcccgacggcggtacacccgaagaaagggcggcccttagacaaatgctcgccgctgctcacctaccacagggtgctccaactagccccgcccttgctaacactgcactgaggcatctggacgccagacttgctggatgggctgccgcggtagatgccgtctacactcggtatgcggacgatctcaccttttccggcggtcaccgtctggctcgtaggacagacgcctttttaaggggcgtggataggattgtcactgagcaggggcatagactgaatccaaggaaaacacgagtgcgtaggcgtggagtgcgccagaccgtaacgggagttgtggtcaacgagcgaactagtcccggccggagggaagttgaccggttacacgcccttctgcataatgccgccgagcacgggcccgcatcccaaaatagggccggccacccagattttcgagcgcatctgctggggcggataggctgggtggaacaggttcacccaggccgtgcgagacgcttacgggaggaatttaccagaattgtgtggtga

SEQ ID NO: 12925 - RNA, 1485 nt, synthetic construct
  source 1..1485: mol_type = other RNA
atggagttccctggagaagcagacggagcccgggatgcatcaaccagtcccggtagccctaggggaacacaggatcagcaggaccacaccccaagggaggcacggagagcacctagagctcgccctcatggtggcaccgacagatcccccggcaatcccaccccactcgacgttgtggccactgccctggctgacgcgttccttgctgccgatgcttgggacgtggaccacctaactgccgccgggtacgacgtggttggactcgagcgtgcgtacgtcggcttggccgtgagagctgccctggagacttatccacggcctcccgtaggcgcgccaagacaacttgccgctgccttggctggctctccccctttagtgaggctgcacgatgctcgacgcgatcgaaggcctgtcagagtgctccttcggagagcggtcgctgtgcaggcagtgccaaccgtgtcaagccggctcctggtggacacactcccagagctggctagagagctggacgtaactgtggggcgactcctgtggctggcggatacacgcggttggaataggaggccagggcctgcctcacccttgcatcatcataggcacgaatgggtacaccggcctggcaggacacccagacttctggagaagccaatggatctccttcgacggactcaacgcaccgtcctggacgagctcctggccatgctcccggttcacgacgcagcccacggcttcgtacccggaagatctgtggtcacaggcgcccgcgtccacgtaggtcaacaggttgtggtcagtgctgatctgactacctttttcgcatctgtcagagcacccagcgtgtatggcgtgtttcgttccgccggactagctgaaccgctggctcacgtgttgaccgggttatgtacccatcgggtcccggtccacgtgttaaccgctatgcccccagggggagatgctgatgaacgcggggccctaaggcgacttctcgcggattcccatctaccccaaggggcccccacttctcccgctcttgccaatactgttctgcggcacctggatgcacgcctggcaggttgggcagcatcggttggggctgcctacacacggtacgccgacgacttgacgttcagtggcggagcagagttggccaggcgaccagatgcctttctgaggggggtggaaagaattgtgacggatcagggctataggctgaacgcgccgaaaacacgagtcaggcgtgccggagtgcgtcagagcgttacaggggtggtggtgaacgaacggacggctccaggccgtagagaagtggaccgcctgcatgccgtactgcataactgcgttgttcatggtcctgtttcccaggaccgcggcggtcatgctgactttcgggcacacctgttgggcagaataggatgggtcgcacaggtccaccctgcacaagccgtgcgcttacgggccgagtttgatcgcatcgcctggtga

SEQ ID NO: 12926 - RNA, 951 nt, synthetic construct
  source 1..951: mol_type = other RNA
atgcttgcggacacccgcggctggaatcgaaggccaggttccgcgtctcccctccaccatcaccggcatgagtgggtaaggcgtccaggtcgtacacctcggctgctggagaagccgctggatatgctgagacggacacagcgcaccgtactggacgaactcttggctgtgttgcccgtccatgatgccgcccacggctttgtgcctggccgttcagtcgtgtccggtgccactttgcatgtggggcagagggtcgtgataaccgccgatctgacctctttcttcgctagtgtgcgcgcaaggtccgtgtatggagtgttcagggccgcaggatttgccgagccactggcacacgttctgaccggactgtgtacacatagagttcctacccacgtgttaaccgctatgcccccaggaggcgatgtcgacgaaagggccgctctcagacgcgccttagctgatgcacatttgccgcaaggagcccccactagtcccgccttggctaatacagttctccgccaccttgacgctagacttgcgggatgggcagatgcagctggggccgtttacacacgctacgccgacgatcttacgttttcaggggacgacagactagcccgcagagcggacgcattccttaggggggtagatagaatcgttactgaccaggggctaaggctgaacgctcgcaaaacccgggtgcgacctgcaagcgtgcggcaaagcgtcacaggcgtggtggtaaacgaccgaactgcaccagggcgaagggaggtcgatcgtctgcacgccgtgctgcacaactgcgctgagcacggccccgagagccagaatcggtctggccatcctgactttcgggctcacctcctcggcagaatcggatgggtcgaacagactaaccctggtcgggccgataggctgcggagagaattcgttcgaattacgtggtga

SEQ ID NO: 12927 - RNA, 1485 nt, synthetic construct
  source 1..1485: mol_type = other RNA
atggagtttccaggggaggctgcagacgccagagacgctagcacctcccccggttcacctaggggaacccaagaccaacaggatgacacacccagggctggaagaagagcaccccgcgcaacccctcacggtggtacagacggctcaccagggaatcccacgcccttaaccgttgtggctggagccctcgccgatgcctttctgacagcggaacactggggcccagatgatctgacagccgccggatgggccgttgttggagtggagcgcgcatatgtggggcttgcagttgcagccgctttggccgctcatccacgccctccagtggatgcccccagacagttagcagccgtgctggaggcttctcctaggctggcggaactgcacagagctagggaagctcgccgccccgtcagagtagtggctagaagggccacagcagttcgagcccggcctgagacagcatctcgactgctggtggacacactcccagagttggccagggaacttgacctcactgtcggacggcttctgtggctggcagacacgcgatcctggaatagacggcctggcccttcttcccctctgcaccaccaccgctgtgagtggattcgtcggcccgggagaacaccgaggttgctggaaaagccaatggacatgctgcgaagaacacagaggactatactggatgagctcctcactgcgctaccggtccatgacgccgctcacggattcgttgggggacgcagcgttgtaaccggtgcggctgctcacacgggtaggcagatcgtggtcaccgcggacctcaccagtttctttgccagcgtcactgccccgactgtgtacggcgtgttcagggctgccggcttcgctgagcctcttgcacatgtgctgactggagtgtgcacccatcgggtccccgtccatgtgttgtccgccatgccagatggcggctcgccagaagaaaggcaggccctacgggcgatgctgagagaggctcacctccctcaaggcgcaccaactagccccgcccttgccaacaccgcattgaggcatctggatgcaaggttggcggggtgggcagcatctgttggcgcagtgtacacccgctatgctgacgaccttaccttctccggagatgagcgattagcggcacggcccgatgcttttctgcggggtgtagaccggatcgtcaccgaacagggcctccggctgaaccccagtaaaactcgtgccaggcgccgtgggacaagacagagcgtcaccggggtggtagtgaacgatcgcacttcaccagggcgccgtgaagtagaccggctccatgctattctacacaacgccgccgaacacggccccgagagtcagaatagagccgggcacccggatttccgcgcacatctgttaggccgaattggctgggtggaacaggtgcatcctggtcgagcccgtcggctacacgaggagtttgcccggatcacgtggtga

SEQ ID NO: 12928 - RNA, 1485 nt, synthetic construct
  source 1..1485: mol_type = other RNA
atggagtttcctggcgaagccgccggagctagggatgcatccacttcaccaggggcaccaaggggaactcaggaccagcaggatgacactccaagggccggggagagggctcctagagcaacactgcacggcggtacagacagaagttccggaaatcctaccccactgtcagtcgtcactgccgcccttgcggatgcattcctgacagctgaacggtgggaggctgacgagctcaccgccgttggctacgtggtggttggcgtggagcgcgcttatgtcggcctggcagtcgctgccgcattggaagcctatccccgccccccagttgatgcgccaagaaggctggctgcagttctggccgctgctcctcggctagtggcccttcataggtccagagaggaccgtagacccgtgcgggtgttagttcgccgggcaaccgcagtgagagctagaccagagactgccagccgcttactggtcgacacgctcccagagcttgcgagggcactcgatctgactgtcggcagactcctgtggttggccgacacgcgggcatggaaccgacgatccggtccgtcgtctcccttgcaccaccatcgacacgaatggataacacggcctggaagggcccccagacttctggaaaagcccatggacatgctgcgccggactcagaggaccatcttggatgagctgctgaccatgctgcctgtgcacgacgcggctcacggttttgtgccgggcagatccgttgtcacaggtgccgccgtgcacacagggcagcaagtggtagtgaccgctgacctgaccaccttctttgcatctgttagcgcccccacagtgtacggtgtgtttcgcgctgcaggattcgcagagcctctcgcccacgtcttgacggggctgtgcacccatcgggtgcctgtacatgtactcagtgccatgccagctggaggctcaccggaggaaaggcacgccctacggcaagcgttagcgaccgcccatttacctcagggggctcccacaagccctgctctcgctaatacaagcctgcgccacttggatgcgcgattagcaggatgggcgggggccgttgatgccgtatacacgcgctacgccgacgacctcaccttctctggtggtgatcgccttgctgcccggccagatgcctttctccgtggcgtcgatagaattgtcactgagcaggggtataggctcaatccctctaaaaccagagtgagacgccgaggggtccgtcaaagcgtgacaggcgtggtggttaacgagcgtcctagtcccggccgaagggaggtagacaggcttcatgccgtgctgcacaacgctgccgtgcatggaccggcctcacagaaccgtagcggacaccccgaattccgtgcccatctactggggcggatcggctgggtcgaacaggtgaatcccggcagagcaaggcgcctgcgggaagaattcgcacgaattgtatggtga

SEQ ID NO: 12929 - RNA, 1485 nt, synthetic construct
  source 1..1485: mol_type = other RNA
atggagtttcccggcgaagctgccgatgctcgagatgctagtacctcccctgggtcgccccgggatactcaagaccagcatgatgacacaccacgagccggagaaagggcacctcgggctacaccacatggcgggacggatggtagccccggaaatccaacccctctgagcgtagtggccagtgcactcgccgacgctttcctgaccgccgaccgatgggccgtcgatgagttgaccgctgcaggctatgccgtcgtcggagtagagagggcttatgtgggccgcgctgttagtgcagctctggacgcatacccacgacctcccgcagatgcaccaaggcagttggctggggttctggccgccaatcccagacttgcggccctgcatagaagcagagaggcgcgcagacccgtcagagttttggctcgcagagccacagccgttagggcaaggcccgtgaccgactctcctctgctcgtggacactctgcccgagcttgctcgggccttggacgtcacagtgggacgccttttgtggctggcggatacacgcgcctggaacagacacgctcctgccggatctccgctgcatcacttacgccatgaatgggttgttcgccccggacgagtgccacgcttgcttgagaaaccgatggacctcttacggcgcacccagcggacagtactggatggcctgctgactcggttacctgtccacgatgccgcacatggcttcgtgccaggccgaagcgttgtgactggtgccgccgtgcacactgggcagcaagtcgtgctgaccgccgacctcactaccttctttgcaaccgtatccgcaccaaccgtgtacggcgtgttccggtccgccggatttgctgagccactcgcccatgtgctcacgggcctgtgcacacatagggtgccccctcacgtccttgctcgtatgccagcgggggggacacccgaagaaagagctgcactgagggaggcgctcgccgtagctcacctacctcaaggggctccgacttccccggcacttgcgaacaccgcactacggcacttagacgctcgtctagcgggttgggcatctgccgccggtggaagatatacgcggtacgcagatgaccttactttttcaggagatgatcggctggcggctcggtcagaggcctttctgaggggtgtggagagaatcgtagccgatcaggggcatagattgaacccccacaagacgcgtgtgagacgtcggggcacaaggcagagcgttaccggcgtcgtggtgaacgacctcccctctccaggcaggagggaagtcgaccgactgcacgccgtgctgcacaattgtgtcgtgcacggacctgcatcacaggacagaacagggcaccctgacttccgcgcccatctcctgggtcgcatagggtgggtggaacaggtgcaccctggcagggccagacgtctcagggaggaattcgcccggattcgctggtga

SEQ ID NO: 12930 - RNA, 1314 nt, synthetic construct
  source 1..1314: mol_type = other RNA
atggtggccaccgccttggccgacgcctttctagctgctgaaggctgggacactgcacacctcactgccgctggccttgatgtcgtgggaccggagcgagcctatgtgggcctagcggtacgcgcagcattagaaacctaccctaggccacccgtaggagctcccagacaactggctgccgtggttgcgagagccccagctttggcccggcttcatcaccgaagggctgacaggcgcccggtgagagttctgcagaggagggctgtgcctgtcagagcggtacctaccgtgagctccagactgcttgtggatactctccccgagttggcaagagagctcgatctgacagtcggtcatttactctggctggcggacacccggggctggaatagacgtcctggtgctagcagtccgctccaccaccatcggcatgagtgggtcagacgccctggtcggacaccacgcttactggagaagcccatggatttgctgcggaggacccagcgcacgctactcgacgaactgctggtccatctgcccgtgcacgatgcagcgcatggctttgtagccggccggtccgttgttactggtgcagccgcccacaccgggcaagaagtggtggtaacggccgacctgacgaccttctttgccagcgtgcgtgccccatccgtctatggcgtgctgaggagtgccggatacgcggagcccttggcacacgttctgactgggctgtgtactcattcagtccctgttcacgtcttgcgagcgatgcccgacgggggatctttggacgatcgcgccgcattaagaagggccctggctgatgctcatctccctcagggagccccaagctctcccgcacttgccaacacagtgctgaggcacctggacgctagacttgctggctgggcagccgcctctggagctgtttatacacgttacgccgacgacctcacattctccggcggaactgctctcgctggcagagtcgatgcattcctgcggggggtagatcggattgtgaccgaccagggacacaggctcaaccccgctaaaacacgtgtgcgcaggcggggggtccgtcaaagtgtgacaggggtggtggttaacgagcggacctcaccagggcgccgagaagtggataggcttcacgcagttctgcacaattgcgtggagcatggaccagcctcgcaagaccgggcagggcatgcagattttcgcgcccatcttctgggtcgcatcggctgggtggaacaggtccaccctggcagagcacggcgactgcacgaagagttcgcccgaatacgctggtga

SEQ ID NO: 12931 - RNA, 1494 nt, synthetic construct
  source 1..1494: mol_type = other RNA
atggagttccctggcgaagctgatgacgctagaggggcctccagctcaccaggttctccacgggggactcaggatcagcaggacactactcctagagctggacgacgagctcccagggccactcctcatggaggtacagacggatcacccggcaacgccacccccttagatgccatcgccgtggcgctggccgatggatttttggctgccgacgcctgggacctgccaacactccgagctgccggctttgacgtcgtgggcattgagcgggtgatagtcggtgcggccgttgttgctgcactggacgcattcccaagaccacccacggacgctccaggctcgttggctgcagtgctagccaggacaccgcgcctcgtaagcgaacacgggaggcgtactcggcgtcgtccagtgagggtactcgctcgccccgttagccctgtacatgccgccagacacgtggaaggccccttgctggtggataccctgccggagcttgcaagggctctcgacctgacagtgggtagacttctgtggcttgcagataccaagggctggaatagacatgcagatcccgacggccccttacaccactaccggcacacatggactgtacgccccggcaggacgcctaggttacttgaggcccccatgcatcttctgagacgcgcccagagaacagtgctcgatgagttgctgacaaccctcccagtccacgacgctgcgcacggatttgttcccggccgcagcattgtgaccagtgccgctcgtcacgtcgggacggaagtggtggtcacaatggacctgacctccttctttgcgaccgtcagggccccttccgtgtatggggttttccgcaacgcagggttcgcagagcctgtggcacacgttctcaccggtctgtgcgtgcatgaggtgccccctcacgtccttcgagctatgcctgggggaggagggggctctctggatgaacgggtcgcactgcgcagggcactggcagaagcccatttgcctcagggcgcccctacttctccagcgctggcaaatctggccctccgacatctggatgcccgcctcactgggtgggcagtagctgcaggggccacctatacgcggtacgctgacgatctgaccttctcaggaggggccgctctagctgcccgagttgatgccttcatcgcgggagtcgaccggatcgtacgggaccaaggccatgaggtcaatccccacaaaacccgggtgcggagacgaggtgtacggcaagccgtgaccggcgttgtggtgaacgacagattaagtccaggtagggccgaggtggaccgactgcacgcaatcttgcacaactgtgtccggcatggaccagcttcccagaatagggatggccatccggagtttcgcgcgcaccttctcggacgcataggctgggtgggacagacacatccggcaagggcggccagactaagggccgaatttgatagaattgattggagatga

SEQ ID NO: 12932 - RNA, 1491 nt, synthetic construct
  source 1..1491: mol_type = other RNA
atgggctttcctggtgaagccgacggagtgcgaggcgcatcttcctctccggggcaaccaaggggcacccaagagcagctgacccatccacctcgagaagcccgtagagccccacgggcacttcctcacggctcaaccgaccagtctcccggcaatcctggaccccttgccgaagtagcgcaggcccttgccgatgcgttcctgacagctgatgactggagccgccccgctttgactgctgtgggatacgacgccatcggtgtggagcgggccatagtgggtctggctgttggggctgccctcgatgcctatccaagggcgcctagtgacgctccgcgacaactcgcccgcgttcttgcagctgctccacggctgcagtccgcatatgctgccagggaccccagagtcagacctgtccggatcttggcacgcccggtaggagctgttagggctggacggagcgttgatagccccctcctggtcgatacagtccccgaactggccagggccctggatctgactgtggggcacctgctgtggttagccgatccaggcggttggaataggcgccccgacgcatccagcgcattgcatcactacggatatgcttggatccctcgaggcggtcgtacacctcggctgattgagaagcccaagcctttactccgacgcacccagcgcctcttattggacggactgctcggggcattgccagtgcatgacgcggctcacgggtttgtcgccggtagaagtgcagtaacgggggccgccgaacatgtaggtaggcaggtggtggtgacggttgacctgacagcgttcttcgcttcagtcactgccgggtccgtgttcggcgtgttcagaacagccgggttcgccgaaccagtcgccagagtgctaaccggcttgtgcaccgctcgagtgcccgttcacgctctacgtactatgccagacggcgggtctgtcgagcataggtttgccctgagacaggccctgaggctgcctcacctaccccaaggcgcaccctcaagccctgtgctggctaacctcagcctgcggcacctcgacgcaagacttgcaggacttgctgccgcatccggagccacctacacgcgttacgcagatgatctgactttctcgggcgacgatcattttgccggcagtgtggacgggtttttaagagcggtcggccgtatagtggtagagcagggccacacaattaatcaggccaaaacaagggtcagacggaggggacgcaggcagagtgttaccggcattgtggtgaacgaacgcgttgcgccaggtcgggcagagcacgatagactcaaagccatcctgcacaactgtgcagtgcacggaccacaggggcaaaatcgcgcggggcatccggatttccgcgctcatctcgagggaaggattacttggatgatgcagttgaaccccgagagaggagcacggcttcgggctgtgtttgagagaatcgagtggggctga

SEQ ID NO: 12933 - RNA, 1500 nt, synthetic construct
  source 1..1500: mol_type = other RNA
atggctcgattcagaggagaggccgatgacgctaggagggcccctagtagcccgggatcacctaggggcacccagaacgaccagcagcatacacctcgagaggctaggcgtgcttcccgggctaggccacatggacggatcgatggttcccctcggaacagaggacacactcccctggcagtagtcgcacaggcccttgccgacgcattccttgctgcgccagaatggactatacccgctctcgatgaagccggttttgccaccgttggcgtggtccgccccttcgttagggtgactgtggtgactgccctggaagcatatccacggccaccccgagatgctcctaggcagctcgccgcagtcatcctacggtcaccccgtgtggtggatctgttcgaggccagggcagccacaaatcctgttagagttgtgtctcgcagcgtcggtcctgtagaagcgagagccgaccacgaaaccgcatcccgccttctggtggatactgtacccgcgctggcaagggaattggacctcaccgtagggcggctactgtggctggccgatactagagggtggaatcgcactgccgcagagggcccattgcaccactatcgctacgagtggctcgcaaggcctgggagaacaccgcggttgctcgaaaaacccctgcatcgtctcaaaacaacccagcggaccatccttgatgacctgctgacggcccttccagtccacgacgctgctcatggcttcgtgacgggcagatccgccgtgacaggagcagctctccatgtgggccaggacgttgtaatttctgctgatttgacgagcttcttcccctccgttagggccggcagcgtctatggggtgtttcgcgacgctggttttgcagagcccctggcgcatctgctgaccggtgtgtgcacacaccgggtgccggttggtattctcagtgcgatgcctcccgggggatcgcctgatgagcgattcgccctgcgccagcggttaagtgccgctcacttaccacagggggctccaacatccgccgcattgggcaatctggtgctcaggcatctggacgcgcgtttagccggctgggcaaagtctgcaggaagtgtgtattctcggtacgcggacgaccttaccttttcaggcggagcgtcattggccagcagagccgatgctttcgctagaggggttgaccgaattgtcgccgatcaagggtacgctctcaacccccagaagaccagagtgaggcgccaaggggtgagacagagcgtcaccggcgtcgtggtcaacgaacgcacctctgccggccgacgtgagtacgacttgctgaaggccacacttcacaactgcctacgggacggaccagcccgccaaaatagagggggccggccagattttagagcccacctggccggtagagtgggctggtttgagcaatgtaatccggagcgaggagcccgcctgaggagcttatttgagcagatcgcatgggcttga

SEQ ID NO: 12934 - RNA, 1539 nt, synthetic construct
  source 1..1539: mol_type = other RNA
atgaggtggtccccaggagaagctgatggcgctagagccgccgcttcttcacccggtttgcctcgcgggactcggatcgaccaggaacacacacctcaggagcttggaagggcgccacgggcagatgcaccagagagacacgacgaaagctcaggcgatcaccagcatgccgacccaccccctacctcaaggttggtggcacccgagcgaagcgctggactcgtcgagacagccatcgccctggcagacgccttcttagccgctagtgcttggcgcccggccgaactatctgcagcgggtacaacgaccgtgggcaggaggccaggcttagtggaacctgccgtcgccgccgttttggccgtgtatcctagggcaccacgggacgctccaaggcgacttgctggcgtgctggcatccgatcgcagcttcacagccgcatttgctcggctcactgccagacggcccgtacgtttacgcgtgcggaccgtagccccagtagttgccgctcccgttgcggcacatgtgcctgtggttgacgccctccccgatctggcagccttgcttggcgtgaccactgagaggctcctctggtttgctgacacccgtggttggaatcgacgcgtgcctgccggatccccactgcatcattacgagcaccgttgggtgcaaagaccaggcaggactcctcggcttctggaggcacccctgcatcagctgcgcaccatgcagcgggtagtcctggaccaggtcctagcacccctgcccctcagcgatgctgtgcatgggtttgtgaggggaaggagcgcgcttagcggtgccgaagtgcacgttgggcacgatgttgtcgtatctgctgacctggtgtccttcttcgccgcagtgcccgcctctagagtttacggaatttttagaagggtagggtatgccgaaccggtcgctcacgtcctgaccggtctgtgcactcacgtggtgcccgatgctgtgctcagagcgatgccccctggtggggatcttgacgagcggtgggccctgagacaagccttggccacaccccatctgcctcagggtgctccgagttcacctgcactcgctaacctgtcgctgagacggctagacgctcgtctcgctggctgggctcaagcagcagacgcggtgtacacccgatacgccgacgatttggctttcagtggggatggggcaattgctgcccggccagatgcttttctgcggggcgtggacagaatcgtggccgatgagggtcacgcactgaacccgcgtaagacgcgcgtacgcagacagggagtccgacagagtgttacaggagtcgtggtcaatgcggtcccaggggtcggacgacgcgaacttgatagactgagagcggtgctgcacaactgtgtccgctatggtcctgcctcccaagacaggggcgaccacgcagactttcgggcccatttagaaggccgcgtggggtgggttgagcaggttcacccggccaggggagccactttgagagcggagttcgagcgaatagcctggtga

SEQ ID NO: 12935 - RNA, 1521 nt, synthetic construct
  source 1..1521: mol_type = other RNA
atgcaacgcccaccaggggaggctggaggaacaagagcggtccccccttctcctggtcttcccaggggaaccaaaatcgatgaaaatactacaccacgggaagcggaacgtgcatctcgcgccctgccacctgcacctgcagatgagtccttcgggggtcgcagccagcatgacgccaatgccgacattgctcacgagcccccaggagccaccttagccgaagtggcacgagccctcgcagatgctttccatgccgcgcctgagtggtctgcacccagcttgttggccgctggctccagtgtggtggggtctagaagagcctttgttcgggtcgccgtcggcggcatactggagtcactgcccaggtctttacccgattccccaaggctactcgcccggctcattttggatcttccggggtttgtagccagtttccgcagagggactcggagaaccccagttcgaatccgatctagagcaattgccccaaccagggcagtgggtcctggaccaagagtggacactgtggtagacctggctaggttactgggagtcacggtcggccgcctagagtggttcgctgacacccaggggtggaatcgcctcgccgaggaaggtcctctgcaccactataggtacaagtggagggtacgccctggccgagttcccagattgctggaggtgcctctggaccgtctgcgaaccatgcagcggatcatacttgacgaactgctgaccccgatgcccctgcacgatgctgctcatggcttcgttgccggcagatcggcaattaccggggctgctgagcacactgggcgtgatgtggtcataggcctggatctggtcagttttttcgcgagtgttaccgccaaacaaatttacgggctctttcgccgggccgggttaccagaaacagtagcgcatctgctgacaggtgtgtgtacacatagcgtgccgcctagagtgcttcgtgcaatgcccgcaggcggctcagcttcagctcggtttgccctccggcaggcattgtccacgccgcatcttccgcaaggcgctccaagctcccctgcactcgctaacctgagcctccagcggcttgattcccgccttgcgggatgggcagacgcattcggcgctacttatacacgctacgccgacgacttggcgttcagcggcgatgcctccttggcctcaatggtgagggagttcgtacggggagccaccgctatcgtggttgactcgggacatacgatcaacgcccctaagacaaggatcaggagggctgggacccgccagactgttacaggcattgtcgtgaacgccactactgcccccggaaggagagagtatgaccgtctccgggccgtggtgcacaattgcgtgacacacggccccgaaggtcagaaccgcgagggtcaccccgcttttcgacaacagctgctcggacggatcgcctgggtcagccagctacaccccgaaaggggcgcaagactgcggagagaatttgagctgatccgatggtga

SEQ ID NO: 12936 - RNA, 1422 nt, synthetic construct
  source 1..1422: mol_type = other RNA
atgacaccccgcgaggcaaagagagcctcccggactttacctcccgcacccgctgacgagtcatcaggcggtagactgcacgctcgcggaggtcaaccttcaggggcctctccttacgaggtcgccgtggtgcttgcagatgccttcgcggccgctccaggttgggatgttcgtagcctctccgcagcaggaaccgccgcttttgggagtggccggcgattcgtaccactggctgttctgggggtactgcaggccctgccaagaccgatcctagactctccccgcaccactgcccgactgatcgttgcgttgcctgggtttgtggaggccgtgaggaggtctgctgaacgagcgcctgtcgtggtcctgtcgcgggaagtggttcccgtagcagcggtaggaccaggaccgcgtgtagatacggttgccgacctcgccaggttactcggggttaccgtcggtcgcctcgagtggttcgcagacacaaagggatggaaccgcagagctcccgcaggtccccttcatcattatagatacgagtgggtttcccgccctggacggacacccagactccttgaggtccctctgggccttctgaaaaccgtccagcggacagtgttagacgaattgttggcccccatgccactgcatgatgccgcccacggtttcgtgcccggtcgatctgctgtgactggggcagcccttcacacaggcagagaagtggtcctggcactggatctagtgtcctttttcgctgcggtgagcgccagacaggtgtacggcctttttcgtcgcgcaggtcttgcagagcccgtcgcacacttgctcgctggcgtctgtactcacgccgtgccagtccacgttctgagcgctatgccggacggcggaagcagcactgagaggtttgaactgcgtcgggccctcgctgctcctcatttgccgcagggagctccatcttccccagccctggcgaatctgagtttggctgggctcgacagaaggctagacggatgggctagggccgccgaagctgtgtacacacggtatgcagatgatctgagcttcagtggggatggcgagttggggggaagggtacctgccttcctgaggggcgtggaacgcattgtgaccgacgagggccataccgtgaatgcccgcaagacgagggttaggagggccggagtccgccaaaccgtgactggcattgtggtgaaccagaccacaagtcctgggcgaacggagcacgaccggctgaaagccattgtgcataactgcgtgagatatggcccagcatcacagaatcgggatgggcacccagcgttcagagagcacctcctgggccggatagcatgggtcgaacagctgcatcccgccaggggagctagactccgagccgaatttgacttaatccggtgggattga

SEQ ID NO: 12937 - RNA, 1374 nt, synthetic construct
  source 1..1374: mol_type = other RNA
atgaagccccctggcactagaacggccagagcgcttgctgccgccttcctaggttcccccgagtggagcgcaccagccttagtcgaacaggggcgagtggtactcgatcctgcccctgactggcttcctgctgtagccgcagctgccgtcgcagcacatagggagccacccagagatgcccctagagagctggccggctttctcctgggggtgagagaggagttgctggatgcgcgccctcggcttgacgatgatggcgagccactacctaggccagcagagcccagggttcgagcctggttacccaccactccacggatgggaagagctcggtggcccgttcacccgctacacgacctggctgatgtcgccgagatgctgggcactgacctggatcacctgagctggtacgcagatccacagggccgccaacggacagaacccgcaggacacctgcagctgtatcggcgcagatggcttccgaggcctggtagagtgccacggttgctggaagtccccacccctcgcttacgggctgtccagagggtgctcctggatcgggttctcgcacccatccctcctcatcccgcagcccatgggttcgttgctggcaggagtgccctcacgggagcaaggcagcacgtgggtgccgaagagctgttgacactcgacctcgccgccttctttgctaccgtacgcgctggtcgggtgtgggctactctccgatctgctgggtaccccgaaccggtggcctcactgttgacaggcctgtgcacaacctccgccactcgagacgatcttgcaactatgccacccggaggttctgaaggcgcacgagcccatgttcgtgcggccctagccacacctcacttaccacaaggcgcaccgacgtctccccagcttgccaatctggcggcacaccggctcgacagaagactggctggattggctgcggcggcaggtgctgtctatacccgctacgcggacgacctcaccttcagtggaagaaggggcaccgccgctctcaggcatcgagtagcggtcgtggttgcagacgagggctttgcgctgcagccggctaaaacacgggtccgcggacgtggagctagacaagccgtgacaggcgtggtggtgaacgaacgccctagcttacccagggccgaactggacgccttgagggctcgcttgaccaacgccgttaggcgggggccatcagcagctgatctggctgccgtggacggggaccgtcaagctcttcgcagggagcttgccggaagaggggcttgggtgactcaggtccacccagtgcgaggggaacgtctggctgctctactggccgccgtggactttgcagagccagataccgacctgtga

SEQ ID NO: 12938 - RNA, 1455 nt, synthetic construct
  source 1..1455: mol_type = other RNA
atgagcgtcagatccgcccacgcttacgccggaactaccggtcaggtcgacccgcaccatcggactcctctgttccacgtgaaacagcctccggaacagagaacagcaagggccctcgccactgccttactggctgacggtccgtggaccgtcgagggactaaccgctagaggacggcgtgctcttgatccagcccccgattggctcccagccttagccgcagctactgtcgcagcatggcgcgaacctcctagggatgctcccggagagttcgcccgctatctgtcagccgctcgggaacatccaccagcggagccacctggctacgatgacgaggaggatctccctcctcctgttcccgagccaagagtgcgcgaatggctccccacagctactcgcatgggtagggccaggtggcccgttcacccattgcatgacctctcagacgtggccgagttgctggccaccgacctggatcaactgcgatggtacgctgaccccctggatagacagaggaccgagcccgctggccacttacagctctatcggcggcattggcttgcaagaccaggtagggtgcctcggctcgtggaagtgcccacaccaagactgcgccgcgttcagagagtgctgctcgatgcagtacttgcacctgtccccccccatcccgcagcacatggatttgtggccgggagaagtgcgctaacaggagcccggcaacacgttggcgccgaacaattgctgaccatggacctggctgcgtttttcgccaccgtgagatcgggacgcgtgtttgccacactgcgctccgcaggctatcccgaacccgtagctgccctcatcactggcctgtgcacaactagggccacacgggatgacctggctaccatgccagctggcggtactcccggagctagagatcacgtccgagccgcccttgcactgcctcacttgcctcagggggcccctacaagcccacagctggcaaacctggcagcacacaggcttgatcgcaggctggcaggtctagctgcaagcgcgggtgccgtatacactcggtatgccgacgacctcacgttctctggaaggcgcggcacggctggacttcgtcatcgtgtcgctgcggtggtggctgaagagggcttcacggttcagccgaccaagaccagggtgagaggtcgcggagcccgtcaaacagtgacaggggtggtggttaatgaccgaacctccctcccccgggccgagttagatgcactacgagcccggctgacgaacgcggtcagacgaggtccatctgcagccgacctggcagcgtttgatggggatcggcacgctttgcgtcgacacctggccggaagggttgcctgggtcgctcaggtgcatccggctaggggaggtcgattggcgggattgctggcggccgtagactggagtggaccagacaccgacctttga

SEQ ID NO: 12939 - RNA, 1383 nt, synthetic construct
  source 1..1383: mol_type = other RNA
atgaatcagcggaccccccctggtacacacactgctcgtgcccttagcgcagccttcctgggggcacctcattggacagtggatgccctggtggcccacggaaggagagctctcgaccctgccccagactggctagcaggagtagcagccgccgccgttgaggcttggcgagaacctccaagagacgctccacgggagttcgctcgctttctgctggctgtccggacccaattagcagccgtccctcccgcctatgacgacgaagaggatcttccccctcgaccggcggaaccacgagtgagagcctggttgccagctgcaactgccatggggagaaccccctggcccgttcatcccctccacgacttagcggatgtcgcggagctgctgggaacggacctagatcacctggcctggtatgctgatccgcagggcaggcaacgacacgagccagcagggcacttgcagctctacagaagacggtggttggcccgacctggcagagttcccaggctgctcgaggttcccacaccacgcctgcgagctgtgcagcgtgtgctccttgacgcggtcttggcccctatcccagcccatccagccgcacatggctttgtgcccggacgcagtgccctgactggagctaggcagcacgtgggggcagacgtggtcctaaccatggacctcgccgccttctttgccaccgtaaccgcgggccgtgtatgggctacccttcggactgccggctacccagaacctgtggctacgctgttgactggactgtgcacgacacgcgctacccgggatgacctggcaacaatgcctggcggcggtactgacgcagctagggatcacgctcgcgctgcactggcaaggcctcatctgccccaaggcgctcccacatctccgcagctggcaaacctcgcagcacaccggctcgacaggcggttagacggcttagctgctgcggctggagccgcttatactcgctacgccgatgatctgtcattttctgggggtagaggaaccgccgccttaagggatcgggtggcagggattgtggtggatgaggggttcgcggtgcaacccgccaagactcgggttagaggccgcggtgcaaggcagacagtaacgggcgtggtcgttaacgagcggacctccctccccagagctgaactggacgcccttagggcccgcctgaccaatgcggtacgtaggggtccgagcgcggctgatttagccgccttcgatggggatgtgcatgcattgcggcgtcacttgacaggacgcgtcgcctgggttgctcaggtgcatccagccaggggggaaagactggccgcactccttgccgacgtcgattggggccgcagagacacatccctgtga

SEQ ID NO: 12940 - RNA, 1638 nt, synthetic construct
  source 1..1638: mol_type = other RNA
atggcgagaggtaggggacgacgcacagctggcagatccgggtctagtggcgatgcacccgggactgctaggcgtctccaccatgacgcctctggcgctgccctaagatccgctcagcagtcagcaggcccgacaggtcaagtggaccctcgccacaggacacggctgttccacgtgaatccccctaccgcacggacaactgcacgtgccctggcagatgcctttctgggcgccagagagtggcaggtacctgcgctggttgctcgggggagattggtgctggacgcagagccggattggctgactgatctcgcacgcgcagccgttacagcctggcgtgtgactccacatgatgccccagccgagctggctcgcgttcttctggcggtcccaggtgtgttcgagccccctgtgccggagatggtcacctcaggcgaagatggcgaggatgacgacgaagacggctttctcgtctgggcggccgatgaggagcctgaaggatggcaaggtgctcgagcggccgcaccaggtagtcctcgtgtggtgagatggctacccgcccacacacgtatggggcgaacgccttggcgggtagctcctcttgacgacctcgctgacgttgccgaactgctcgccaccgatctggaccatctggcctggtacgctgacagacagggtcggcagcgggctgaaccatccggaagactgcagctctacaggagacactggcgcgtaagaccagggagggttcctcgcctgctggaaacccccaggcctcgattacgaaccgcgcagcgcgtgttgttggaccgggtgttagcacctgtcccgcctcaccctgccgcacatggatttgtgaccggaaggtcagcggtaaccggcgcccaacaacacgtgggcgctgatgtggtgttaacgatggacctcgcagccttttttgccactgtgacaagcggcagggtgtatgccacattgagaactgccggctatccagaacccgtggccgatcttctcacgggactgctgactactcgggccaccagggacgacctcgctaccatgcctccaggaggatctgatgccgctcgggcccatgtgagatctgccctagccgccccacatttaccacaaggggctcccagcagtccccaactcgcgaatctgtgcgctcagcgacttgaccgtcgccttgcggggtatgcagctgcagccggtgcagtctacacgcggtacgccgatgacctgaccttcagcggtggacccgatgtagcccggcgtgttggagctctgagacacggggtggcacgaatcgtcgccgcagaaggcttcgctctgcagccagccaagactcgggttcgtgggaggggcgcaaggcaaacagtaaccggcattgtggtgaacgacagaaccagcctgcctaggcgggagttggacgcactacgcgctaggctgacaaacgccgtcagattagggccctccgtccaggatcttgcggccttcgacggtgacaggggcgctttgagggcacacctcgctggacgagtcgcttgggtcgcccaagttcaccctgtgcgtggggagcggcttgctgctctgttggccgcagtcgattgggatcccgttgatacccatctctga

SEQ ID NO: 12941 - RNA, 1350 nt, synthetic construct
  source 1..1350: mol_type = other RNA
atgaatcgcgaggtggccagagccctggctgatgctttcctcggggcacctgcttggcgtgtctccgtcctggtggacagaggacgcgccgttctgtccaccgaacccagttggctaggcagagcagccgtcgcagccgtaacgtcatggcccgaaccacctgttgatgccccgggagaactggcgcgctttttgctcggcgtcgacgtcggccctgaagatgaagaggctcgccctgagccccctcccagagttgttcggcgggttccaactcccacccgtatgggtcgtacacggtggcctgtccaccccctgcatgacctggcagatgtggcggagctgttaggtacagatctggagcatctggactggtacgccgaccggcagggaagacaacgcgcagaacccgccggccaccttcagctttatcgacggaggtggttgccaaggccgggtagggttccgcgtctcttggaagtgcctacccctaggctccgcgcggtgcaaagactgctcttggaccgggttctcggaccagtgcccgctcatcctgcggctcatgggtttgttccaggccgatctgcagtcactggggccgctcagcacacaggagctgatgtggtgcttacactcgacctggctgccttctttgctacagtaacaagcgggcgggtgcacgccactttacgcactgccggctatccagagccagtggtggcgctactgaccggcctggtgaccactagagccacgagggacgatctcgctaccatgccgccaggaggaaccgacgctgcacgacaccagctgagaggtgctctcgccgctgcgcatttaccacagggcgcacccacctcacctcacttggccaacctgggagcccagaggcttgaccgtcggttggctgggtatgccgcagtagctggtgccgggtacactcggtacgccgacgatctgaccttcagtgggggccctgacgtagctagacgagtgcgcgccttgcagcacgggatcgagaggatagtggccgacgagggctttgtggtccacccaactaagaccagagtacgaggcaggggtgcccggcaaaccgtgacaggaattgtggtgaaccgcggaacaagccttcccagggcggagctggatgctctcagggcaaggctgacaaatgccgctcgccgagggccatctgcagcagatcttgccgccttcgacgacgatagggtggccctgagagcacatttaactggccgggtcgcgtgggttgcacaagtccaccccgcaaaaggggccagactggcagcactacttgccgccgtagactgggatggccccgatacgagcctgtga

SEQ ID NO: 12942 - RNA, 1362 nt, synthetic construct
  source 1..1362: mol_type = other RNA
atgagcacagatcgggggcaggaagtggctagggctctggctgatgcctttctgggcgcgcctgtctggctcccttcagcacttctagcgcgggcggagttagtgatcggtgccaggccaccctggttggctgctgttgccgtgaccgccgctactgcctatcaggagccacccagggatgcccctggagagttagctgggtttctggctgcaagcagcgccctggaagcaggcctgttagccggaaaccccactgtgaccgccagaggaagacgtagaagagcccccgttagagtcgttaggcgcctgcctgcctctacagcaatggggaggactaggtggcctgtcgtgcccctcgatgacttgggggacttggcccgcctcctcgacgtagatcccggtcacgtggcatggtatgccgacggacaggggcgccaaagattggacccccccggtaggctgcatctctaccgtcgcgcatggttgcctaggccaggcaggacaccgaggctgctggaagtaccgaccccccgactgcggagagttcacagactcgtgctggatcaggttctagccccagtgccagcccatcctgccgctcatggatttgtgcccggtcgatctgccctaacaggggctcgccaacatgtaggcgcaggggtcgtggtatccatggacctgctttcattcttcgcaactgtgcacgtgcgccgggtgtattgggtgctcaggacagcaggctaccctgaacccgtggcatctgcactggccgggatctgtaccgttgcaactccggtcgccgatcttcgggctatgcctgctggtggcgacgatcaggagcgcagcgctcttagacgagccttggcagctccacacctgccccagggtagtccatccgccccacacctcgcgaatctgtgcgctcagcggctggaccgcagacttgctggctacgctggctcagtcggagctgtttatacccgctacgcggatgatctgaccttttccggtagattccgcgcgggaccactcatatcgggagtgggagctgtcgtacgggaggagggcttccggctaaacgtggacaagacgcgagtccgtgggcgtggcagtaggcagagcgttacaggcattgtggtgaacgagcgccctacggtacctcggccagagtacgacgcactgcgtgcccaactgttcaatgcagcaagaagagggccgagtgcccgggacttagcggaacacccagacctcagggcccatctgaccggaagagtcgcctgggtggcccagttggaccctgaacgaggccgacggcttagggcccttctggatcgggtcgattggtctggccccgcctcctga

SEQ ID NO: 12943 - RNA, 1065 nt, synthetic construct
  source 1..1065: mol_type = other RNA
atgacaggcagaggcgaacaagctgtcgcctccgccttagccggggcttttcttgccggcgattggaccgcgagcgaactctttgagcgcggtagcacaaccttgggcaggcgtccgcgatggttgagacgagtggttgtggaggtgctgtcactgtatcgagaggcacctgtggatagacctcgcgaactcgctacagtggtgctggcaactgacgggttccagacagcagcgtctcccgcacagcggcatgaaggtcctcccctgagagtcgtgagaattctggtggagcctactcggatggtccgctcaaggtggccagtagcccgggtggacacggttaccgaccttgcggatctcctggaactgggggtcggccacctgacttggtacgccgataccgctggaatgcagaggagaactagggttcaggctctgcagctgtatcggtataggtggttagaccggcccggaagggccccaaggttactggagattcccaaaccgcgcttgcggcgagcccagagattgctgctggacaggatcgttgccagagtcccagctcatgccgctgcccatggcttcgtaccaggacgtagcgcaaggactggcgcaaccccccacgtaggtaccgacgtggtgatcggactggatctcgctggatttttcgcctccgtccccgcgcaaagaatctacgggatccttagagtcgccggttaccccgaggcagtggctcacataattaccgggctgtgcaccactgcaacacctatagctgttttagcggctatgccagccgggggttctgccgatgatcgctacgcattgcgtcggaccctaacgatgcctcacctgccacaaggggccccaacatccccgcagctcgcaaacctctccgcttaccgcctcgactgcaggctagccggacttgtggctgctctaggcgccacctatacgcgctacgccgacgaccttcgctgtcctgccgatcccacatggcgtggtcggcctcgaggatcgagtgctgcaagtggcgggtcaagcgcaactcggggatctggctga

SEQ ID NO: 12944 - RNA, 1038 nt, synthetic construct
  source 1..1038: mol_type = other RNA
atggcaggatcacgctggcccgttgccactgtagatgatcttgccgacctcgctgggctgctcgatctcagcatgggacacctgggatggtacgccgatcccgcaggcatgcagcgcagaaatcgggtgcccgcattgcagctgtatcgttatcggtggttggataggccaggccgagcgccaagactattggaggtgcttaaacctcgcctgcgtagggcccagaggatgctgctggatcgaatagtcgggcttgtgcctgcccatgccgctgcacatgggtttgttgccggcagaagtgctaggacaggagcagctccacacgtcggaactgatgtggtaattggactggacctcgcagggttcttcggtagcgtgtccgcgcaccgaatttatggcatattacgcgtagccggttacccggaagccgtggctcatatcgtgaccggactgtgtaccaccgcaacgccaatcgcagtgctaggtactatgcctcctggcgggccagtggacgatcgctacgcactgcgccgtgccttgactacgccgcacttaccccagggagcgcctaccagccctcaactcgcgaacctgtctgcatatcggctggactgccggcttgctggtttagctgccgctgtcggtgccacttacacacgctacgccgacgacctgtcactttctggtggccccgaggtcgccagacagacagcaaggattgtcggcggcgtcaggcggatcgttagtgacgaggggtttaggctcaatgaagggaagacaagagtgcagccaagagccggccggcagacagtaaccgggatcgtggtgaacgaaagggccaacgctgccagagctgactacgacaggctgcgagccatcctccacaatgccgctcgcaccggggctcaaggacaaaaccgtggcggccacagagactttcggtcccatttgctgggccggattgcatgggttgaggccctgaatcccgctagaggacgaagattacgggcggatttcgacaggatcgattggacctga

SEQ ID NO: 12945 - RNA, 1332 nt, synthetic construct
  source 1..1332: mol_type = other RNA
atgacgacagggccagccgtagcccaggctctagcagacgccatgctcgcagaaggagcctgggatgccgctgccttagcaagggcagccgctagagtagttggcccgaggcgcagatggttaccagctctggccgccgaggttttagcgacgtgtcccaggccccccagagatgcaccacgctaccttggcgctgtggtcgctggtgctccttccttcgcccgtgctgaagaaagggctcagcgccgtggacatcctctgccagtgctgtcccgaccagtggtggctaccagagccggtggtagcaggtggccaactgctccactcgacgatgttggcgacctagcagacctgctggggttggacgtcggacacctcgattggatggcagacgtccgaggcctgcagcgtagagctcctgctggcccacttcacctccaccgctatcggtgggttgaaaggcccggccgagtaccccgcttactggaagtgccgagtccaagacttcgccgcgtgcagcgtaccgtcctggatgctgtgctggcgggacttcccgcccatgatgcagctcatgggtttgtcccgggacggggggtgttgtcaggtgcaagggagcacgtggggagggcagtagtcgtgcgagcagacctgactgccttctttgccgccgtcacagccggcagggtgttcagagtactgagagccttgggccagcctgaagctgtggcgcacgtgctcaccggactgtgtaccacacgcgcgcctgttcgagtgctggcagcgatgcctcccggtggacgtgatgccgatcggcacttactccggaggtggctggccgagccccatttagcccagggagctcctacttccccccatcttgcaaatctggccgcgcatagactggacgtccggctgagctcatacgcagccgcatgcggcgccgtttacactcggtatgctgacgatctcgtcctcagcgggggagatgacgttgccagacgagccgggcccttgcttgaaggagtcaggcgagtagtccgcgaggagggctatcgggtgaacgaggccaagacccgggtgcagcctagacacaggcgccaatctgtgaccggagtggtggttaacgacaggcctggggctgggagaagagagacagacgccttgagggcgctcttgcataattgcgtgcgccacggccctgcctctcaagatcgtgacgggcggggtgagggctttagagcccacctggaagggcgggttagttgggtggagcacgtgtctccgagaagaggtgcggcactgcgaggcgagctaggcagaatcgcatggtga

SEQ ID NO: 12946 - RNA, 1326 nt, synthetic construct
  source 1..1326: mol_type = other RNA
atgtcagccgagacggcccttgccagtgcattggccgaggcaatgctggctgggacatggcatcgcagaggactgattcgtgccatgtctgctacactcaaccgcacatccagacgggtgagatgggtccgccctctcgctgtcgaagttctggcagcgtacccgcaccctccacttgaccgtcccagggaactcgccggatttgtgggcactactccagctgtccaaagggctttaggtcggcggcgccctccaaaagccctggttcgagtagctacccccacaaccaccgtttcccggccctttccaacaccacgtgtagatcacgtagcgcagctcgctgagttcctggcggtggaccccgatgaactggtcttgcttgccgacccgcagtctcgggcacgaagagctcctagtaggcgcatagctcactaccggtatcactggctggacaagccggcaggcgccagattgctcgaagcaccaaaaccccgcttgaaggcactccagaggaaagtgctcgatgggctgttgactcccattcccgtgcatccggccgctcatggcttcgtaccaggcagatccgcagtgactggggccgctcctcacgttggagcagctgtggtggttaccgtagatctggaacacttttttgctgctgttcgagccggcagggtgtggggtgtgttacgggcagctggctatcccgaaccagtggcccatctgctgacagctctcactacccacgcgtctcccgtcgccaccttaagcgcaatgccacccggaccagatcggggaagagatttccgcctgcgacggaggcttgcgacacctcatcttcctcaaggggcccctacctcgccccagttagccaatttggtggccttctcactcgatcgcaggctagacgcatacgcaagagccgccggggtcacgtacacgagatacgcagacgacttgaccttctcaggtggccctgagttatccagggctgcggaggccctacttcatgcggttgacggcattgtgagagccgcaggctatcggctgaaccccgccaagactcgcatcagacgaagccatgagcgccagagcgtgaccggcatcgtcgtgaaccggcacacaactctggctcgtcctgagtatgataggctgcgtgccgtcctgcacgactgcgtgaccaatgggccagaggccgccgatcggaatggacacgacgacttcagggcccacctgctagggcgaatcagctgggtggctgccctgcatcctgcaagaggtgcaaggctgagggcggcctttgatgccgtcgcttggggagactga

SEQ ID NO: 12947 - RNA, 1269 nt, synthetic construct
  source 1..1269: mol_type = other RNA
atgctagccgggaaatgggctccgaaggccgcaaggaagcgattagggcgcacccttggacaacagcccaagtggttgaaacggctggtccgggaggttctgacagcctaccctagaccccctctggacagacccagagaactggcggcctttgtgcttcgaagcgcagcactggaacgcgcccacaggaagtctgggcccttaccgcgccctgtgagacgtttcagtacaccaacttcaacagtgctccgaccctttcctacgcctgtcctggatcacgctggggcactcgccgatttgctcgacttggatctagatgagctggagctcctagcggacactgctttgcgggcacgcagagcccacgatcccagaatcgctcattataggtatcactggagaatgaggccaggaggaccacggctcatcgaagccccaaaaccgcggctgttgaccgtgcaacgccggatcttggaagagataataggcctgatcccagttcatcctgccgcccacggcttcgtaccaggcagaagtgccgtcacaggagccgcactccacgttggagcgggcactgtggtgaatcttgatttagaacacttctttgctggcattactgctggcagggtgtggggcgtactgagggcagctggtttccccgagccagtggctcatcttctcaccgggctgacaacgcacgcgactcccgttgccgttctgtcggtcatgcccgacaggccaggtgaggctcgcaatttcaggctgaggagaagcctgggaacccctcatttacctcagggagcgcctacctccccacagcttgcaaaccttattctctacagcctggatcgtcgactgcaggcatacgccgatgccgcagggcttcgatacacacgctatgccgacgatctgaccttctcagggccccaggtgagacatccggactctgttgtcgccgctgtcacctccatggcagctgccgaaggctttcgcgtcaacgacgctaaatcccgggtgcgtaggcatcaccaacgtcaggtggtgaccggtattgtagtgaacgagtggactaatctggcccgacccgagtatgaccggctgagagccgtcctccatgactgccgggtgaatgggcctgctgccgcaaaccgggatggccatgacgattttcgcgctcacctccagggccgcgtatcttgggcgggaagcttgaacccaggtcggggtgccaagctggctgcaatgtttgacaggatcgtgtgggactga

SEQ ID NO: 12948 - RNA, 1323 nt, synthetic construct
  source 1..1323: mol_type = other RNA
atgaccggcccggccgatagacttgctactgccctagcggacgccatgctggcaggatcctgggactaccagtccatcctcgatcggacccgccaagttatcgccagacgccccccctggttagacagcttagcacgggaagtattagccgcgtatcagagggccccggcagacagacctagggaactggccgccttcgtcgtatcttctgctgcgatggctcgcgcaagaaggtccccaccacggctcccaactccagttgtgcggttctcctcacctacccgaatgatccggcggccttttgccacacccgtgctccaccacgcgggagatctagccgatcacctggggatcacacttgaggccctcgacgccttcgctgatacgaggctgcgcgcacgtagagcaagggcagagagaattgcacattacaggtacaggtggatgcatcgccccggtggagctcgattgctcgaagcacccaaacgaaacttgcgtgccctgcaacggaccgtgctggatgatattctggcccctataccaacccacccagccgcgcatggctttgtagctgggcggagcgccataacaggagccgctgaacatgtgggagcagaggtggtgattacactggatctcgagcatttcttcgcttcggtgactcccggcaggatctggggcttacttcgcgccgcaggatatcctgagccggtcgctcacttgttggtcggcctgaccacacacgccactccagtggcaaccctggcttcaatgccagctagcgccgaccccggtagggactttaggctgcgacgtcggcttgctgggcctcatctcccccagggtgctccaacatcacctgccctcgcaaatctggtcgctttcagcctggatcgaagactggactcttacgcgagagctgcggggagtcggtatacgcgttacgccgatgacctcacctttagtggcgacgcagctcttgcacgcagaagtgccgccctgatcgccgctgttaaaaggatgattcgccaggaggggtttacggtccatcctggcaagactcgcgaacaccacagaagccggcgccaggtggtgactggaattgtggtcaacgacaggaccaatataccccgggcagactatgaccgtctgaaggcagttctgcacgattgccgaagaaacggccctctggccgctaatagagatgcgcatcccgacttccgggcccacttgcttgggaggctgagttgggtgtctgccctaaacccggacaggggtgcccgcttgagagctatttttgatgagatccgatggacatcctga

SEQ ID NO: 12949 - RNA, 1530 nt, synthetic construct
  source 1..1530: mol_type = other RNA
atgagtgatactccggaccctggaccccccccaagaagaagtggggatgatcccggcggattggtgcgaagaggaggtcccccacgtccaccttcaggtggaccccctgcacctcctataagacctagacgcaaacgtccacgggggcgaccaagtccctttcgggaggatcggccagggaggcctgatgcactggtggatgcaatcgccggcgcactgctggctgatgccgatgactggacagcgtctggccttataggccgcgtagcagtcgtcttcgcaggtccgcacgattgggtcccccgactggtggagcaggttcttgaactctaccctagaccacctgccgacagaccacgcgagctacaggccgtggttggcgtgctgctgaatgatcttctcgaccccgcccctgacgacgacggagatgaaccaacaaccgaaattagaccagtaccccgcccggttcactggccagtagctagcactcggactgtgaggcgaccattcgccacccctccattggacgacgcaggggacttggcagccctcttaggggtggacctggtgcaactgacagctctcgccgacaccagacttaggggaaggcgcgctcgctctgaacagatcgcgaactatagatatcagtggctggacaggccgtcaggcccaaggttgctcgaagcgccacgaccccgtctactgtccgcccaaagggtggtgctgcacgaactgctcgatttaattcctacgcacccggccgtccatggtttcgtctccggacggtccgtggtaactggtgccagagagcacgtcggcgctgaaaccgtcctcaccctggacctcgaacactttttcgccgctgtgactgccggcaggatttggggagtgcttaggtccgctgggtaccccgagccagttgcacatctgctcgccggtctgacaacgactgccacgccagtccgcgtgctgacagctatgcctcctggccccgatcctggcagacagtttcgtcttcgccggaggctggcagtcccccatcttcctcagggagctcccacctcaccggccctagctaatctggttgctttcaccctggaccggcgtttagccgcatacgctgccgccgttgggctgaagtatacccgctacgccgacgatttgacattcagcgggccctttaggcaacgcgcccatgtacggagctttgcacgcgctgtgggccggattgtggctgacgagcggttcaggatcaacgaggccaagaccaggtggagaggcaggcacgagcggcagacagtcactggggtggtggtcaacgagcatcccgccatcgcgcgcgatgaggttgaccgattgcgggcggttctccatgattgccgacggtctggacccgcggctgctaatagacatggccaccccgacttccgggcccacttactggggagaatctcgtgggtggcaagcgtgcaccctgcacgaggtgccaggttgcgtgagcagtttgatggaatcgactggaccgcgtga

SEQ ID NO: 12950 - RNA, 1335 nt, synthetic construct
  source 1..1335: mol_type = other RNA
atgcggagcgagcatgctgtggcgttagctgacgccctattgacgggtccctgggatgccggcagaatggtggcaagggctcggctggtgtttgctcctgtacccgtggagctggcccacgtcgtggacgtagtcctggcagcacaccccaccccacctgtcgatgcaccacgatccctgcagcatctgctgctcgggcttccactgtccgctccggttccggtggtggcagaaggagccccactgttgcccaccccaagaattagggtcgttagaaggctgctatttacaacctccatggtcggctctcgattccccttacctcgggttgatgacgtcgccgctttggccgagagactcgggctgactgtcggcgagctggactggttcggagatcggaggggttggcagcggcgtgaaccacgttctgtgcttcagcactatcgctttaggtggcttagcagaccaggcaggaccccccgattactcgaagctcctcgtcctcgcctgaaagccctacagcggcaagtgctggatgagctcctcgctcctgtagccgtgcatcccgcggttcatgggtttgtggctgggcggtctgtgctgacaggagctgccgtgcacgccggaagagacactgtcatcactttggatttggaacaattcttcgccgggctgacagccagtagagtagctggcgttctccgcagcgcaggctatcccgaagcagtgtcatgggccttgacaacactggtctgttctactgtgccgatggcagtacttcgcgccatgccgggagcagaagcaggaggagagcgcttccgtttgaggcgcaggttagctgctcctcatctccctcagggagcccccactagcccacacttggccaatctggcagccttcggcatggaccgacgcctgacggcacttgccagaaggttcggagcggactacacgcgctacgcggacgacctcactttttccggtgcgccatcgcttggacgagcagctgatcgactcatcggtaccgtggccagaattgccacagccgagggcttctcaataaaccctgcgaagaccagggtgaggcgggcttggcagcgacagagagtaaccggcgtcgtggttaatgatcggcctgcagttgcccgcgacgaggttgatgcgctcagagccaccctgtttaactgcgtgcggtttggccccgtgagtcaaaaccggtcaggtgtccaggatttccgggcccacctcctgggtagaatcgcttgggtggccagtacagatgcacgcaggggagagcgtctgagggcccttgctgaccgcattgactggaattga

SEQ ID NO: 12951 - RNA, 1536 nt, synthetic construct
  source 1..1536: mol_type = other RNA
atggccggacgcagttttcctcggccccatgcacgacccgctttggttgcggcggcgtcagatgccttgttggctggcccgtggacagcagctgccatgctggctcggctggctgagtctattgaccccgtgggtccctggggtgccgatcttgtaggcgcagttctcgctgctcaccccttccccccagctgatgctcctcgcgagttcatggtcttcatcgacctcgccctgccccctgatgtaggcgtgaccacctggcagagcgttttagtgccagcaggagagccaacaggtgcgggccatcgagcagacgagcaggacgaggacgagcaggacgaagatgacggagaagacgatgatgaagaagatgacgaggaagatggaggaggcgcctttacaggcgcttggcccgcactgttcgaaccagtgccagggccagttgtcgttaggcgcctggctgcctcaaccgcaatgggtcctcgcagatggccagtgcccgctgtcgactacatcgccgccctagccagcagactcgctttaaccaccggggagctgctgtggtttgcagatacccgagggttccaacgcagggacacacggagcgagcttcgccattataggttcgcttgggttgagcggccagggagggtacccagactgctggaagcaccgcgtccacgtctgcggtccatacagcgaaggattctcgacgggctcttggctcccctcccgatgcatcctgccgcacatggggtcacaggaagatctgcgataactggcgcaagggtgcatgaggatgccgccgtggtgctgacgatggacctcgagtccttttttagcgccgtgacagctggcagagtctatggagtgctgcgttccgccgggtaccccgaacctgtagcccacttgctggccggcgtatgcacactgcgcactcctgtggatgtcaggaggagaatgcctactggcgctgctgcaaccacctctgctgcctggcggcttggcagaagactagacgtgccgcacctccctcagggatcgcctacctccccagccttggccaacctggtggcttttactctggaccgacgtctgactgactatgcagcgagagcggggtggagatatacccggtacgccgatgatctcacgttcagtcttcctggtggcggcacaggtggcgctagagcaggacgagcagccttacggctggcggaagccgttacaggcatggtggcgtctgccgggtttagggtgaacgaggcaaagactaggatccgcggtgcccaccaacgtcagttagtcacggggctggtggtgaatgcctcagcagccgtcccacggaccgagtacgacaggcttcgggccgtgcttcaccggtgtggcactgacggaccagcagcccaagccgatgaccacctgaggttccgggaacacctccagggacgcatcgcctacgtcgctgcaagtcaccctggaagaggggctcgccttctagccgccttcgatgccattacttggcccgacgattga

SEQ ID NO: 12952 - RNA, 1329 nt, synthetic construct
  source 1..1329: mol_type = other RNA
atgactcatgaccccgatgaaggactcgcgagggggttggcttgggcctttctggctgccgagacgtggaccagacctgctctcgtgggcagtgccgcaaccgctctgggaagacggcctcgttggctgggtccggtagtggacgtagtgctgcagcaccatcggtctgctcccaccgacagaccatatgccttatcaaggttcctcgtgagagagactacattactggagcatgcagcaagagctcgccgaggccgtgccctacgaatcgtgaccgtcccaacagtcactgccgcaacaggcaggcggagatggcctgtgccagatgtggctgatctgccatctttggccgggttgctggaactgcctcttgaccagcttgtctggctggccgatgcccgctcccagcaaaggagagcccccgatggtccactccacgcctatcggcatcgatgggttgaacgacccggcgctgtgccgaggttgcttgaggcacctacacccctcctaagggctgtccaacgccgcgtgctagagcgcatcctagtgtgggttccgacacaccccgccgcacatggctttgtccggggtaggagcgcaatatcccacgccaggagtcatgagggagccgacgaagtcgtttgtctggatctgcgggcctttttcgcatctgtccgagtggcccgtgtcgacggcttgtttagaggcgtaggataccctgaagccgtggcctggactttggcgtgcctttgcactcaccagacgcccgtgcgggttcttcacgacatgcccgctgggggagctgatgatgcacgagcctggttacgcgcgggcctacgtgaaaggcatctcgcccagggggcacctacctcaccagctctcgcaaacctcgcttgttttgccctggaccgtcggctggcaggtttggcagctgccactggtcgcgcttacaccaggtacgcggacgacctgacattctcaggagctgctgggggcgccggcagattagtaagcgcagtgagagccattgtgggggatgaaggattcgctctgcaccctgcgaaaacccgcgtgaggtcccgggatcagagacaggtggtcaccggactggttgtgaacgaccgggtgggcgtccccagagagtaccacgagcagctgcgggccgtgcttcacgatgctggtcgtcacggacccgcggttgcaaatcgcgttggctatccagacttccgctcgtatctcaaggggagggtcgggtgggttgagtccgtaagccctcaaaggggtcgccggcttagaagccagctcgacgccattgtgtggccagcgtga

SEQ ID NO: 12953 - RNA, 1332 nt, synthetic construct
  source 1..1332: mol_type = other RNA
atgtccaggcaccaggacgaagccctcgccagaggacttgcgtgggctttcctggctgcagaagcttggacggtgccagctctggttgacgctggcgcaacagctcttggccggcgttatcggtggctccctcgagtggctgcggcagttgtggctgcacatcgctcgcctccaaccgatggcccctacgcatttaccagattcgtactccagcagacctctctggtcgagcacgcagatagagcctcccgaagagggagcgtagttcgggtggtaagggtcccgaccttaccgggagcaatgggcgtgcgcagatggccagttccggagttgccagaccttcctgccctggcagatgccttggagctgccgctcgatcagctggtgtgggtggctgacactcacggtttgcagcgaagaacgcccgacggccccttccatgtttaccgccatcgatgggtcgagaggcctggtgctgccccaaggttgctcgaggtacctactccactgctgcgtgccgtgcttcgcagggtcctcgataggatcctggtgtgggtgcctgtgcatcccgcggttcacggtttcgtccgcggaaggtctgccgtgacccatgcagccaatcacgtgggcgccgaaagtgttgtgtgcctggacctgcgggccttctttgccagtataacagtcaaccgcgtgaacgggctgttccgtggtctgggataccccgagcctgtggcgtgggctttagcctgtttgtgcacacaccctacccccagagtagccctcgcaggtatgcccggagggggttctgcaagtagcagggcttggctacgtgccggcttgcgatcccgccatctcccacaaggggctcccacttcacctgccctggccaatttagcggggtttaccctggataggaggctagccggtctagccgccgcaactggactgacctattcacggtacgccgacgacctgacattctctggccccagagtcgaccaaggccggtttgtgtccctggtcggagcagtcgtccgggacgaagggtttgccctcaatccaccaaagacacggattcgctcagcgcagcagcggcaagaggtgactggcttagttgtaaacgatagagttaacgtgccccgcgcctatcacgatcagcttcgcgctgtccttcacgacgctacacgaaatgggccagccgcagcaaatagacaagcccaccccgattttcggagccatctggagggcagggtgggatgggtcgaaagcgtgaaccctgtgcggggaaggaggctgagagcgcagctcgaagctgtggtgtggcccgcttga

SEQ ID NO: 12954 - RNA, 1332 nt, synthetic construct
  source 1..1332: mol_type = other RNA
atgtctcatcgccctgatgaagggctggcaagagggttggcctgggctttccttgcagcagaccgctggaccgctcctgccttggttgatgccgccggcactgctctcggacatcgctataggtggatgtcagccctagtgaggcaggtcctggagaaccaccggttcgcccctacagaccgcccctacgagctgtctcggtttttgctcggcaggactgctctggtcgagcatgccgagcgagcagcacaaaggggacgcgctttacgggtcgtgcgcatatccaccgtagccggcgttatgggggagcgcagatggcctgttccggaggtgccagatctccccgctcttgccgacctcctggagttgcccctggagcagctggattgggttgtggacgcgcgcggcctttccagacgaactcccgatggtccttttcatcttcaccgacacaggtgggtggaacgtccaggtgcggtgcccagactgctggaaagtccaacgccacttttacgcgccgtgctgaggcgggtactagatcgcgtgctggtgtgggtacccgtccatccagcggctcacggcttcgttagagggagaagcgcggtgacgcacgcccgaacacatgtgggcgcagcttctgtggtttgcctcgacctcagaagttttttcacttccatcaccgtgggcagagtgaatggcctgtttagaggattagggtaccccgaggctgtcgcctgggccttagcttgtctttgcactcaccagacccctgtcgccgtgctagggagaatgccccctggtggttcagaagcagcccgtgcttggctgcgatcatccttgagggctagacatctccctcaaggggctcccacatcgccggctctggcaaatctggcctgtttcacactggatcggaggctcgcaggactagcggctacagctgggctgacctactccaggtatgccgacgatttgacgtttagcggcccacgtggctcagcacacagacttgtggcaagcgtcggctctatcgtgcgggacgaaggatttgacctcaacccagccaagacacgggtccgaggtaccggagaacggcaggaggtgactggtctggtggtcaatgaacgtctgaacgtaacccgggcatatcacgaccagttgagggccgtgctgcacgacgccaccaggaatggacctagtgccgccaaccgcgccgatcatcccgacttccggagccacctcgaaggacgggtcggatgggttgagagcgtaaacccagttcggggcaggcgtctgagggcacagctcgatgcgattgtctggccggggtga

SEQ ID NO: 12955 - RNA, 1347 nt, synthetic construct
  source 1..1347: mol_type = other RNA
atggtaatgcgcatagaccccgacgagggcatcgctaggggtcttgcttgggctcttctcgcagcggccgagtgggataaagccgcactgactagcgccctcggtcatgctttgggcaggaggcacagatggatccccaaggtggtcacagaagtcctggcagcctatcctcgggcccccatcgataggccacatgagctcactgggtttctgaggaccgggacctcattagtccacagcctcgcaagagccagacgccagggaagggcagttcggttgcaacatatacccatggtcaccggtactatgggactgcggcactggcccgtgcctgagattgacgacctcggcgggctggctctgcttctcgagttaccgctcgaacaactgatctgggcagccgatacccaagggcggcagagagcaactaggtcgggacccctgcacctgtatcgacatacatggcgacctcgcccgggagctgctccaagattgctggaatctcctactcccctcctacgggcggtcctgcgaagagtgttagaccgcatccttgtgtgggtgccagttcatcccgcagcccacggattcgttccaggtcgctccgctcccagtaatgcgcgggcacatgtgggggcggatgtagtcatctgtttggacctgcgtacgttttttacgagcattacagccgcgcgagtgaacggccttttccgcgtaatggggtacccagaaccggtggcctggactctggctgcgttatgcacacatcagacgcctgcccacgtacttgcagccatgccagccggtggcgactccacagttcgtcaccggcagcgcgcagagctccgtgttagacatctgcctcagggctccccaacttcacctgccttggctaacctggctgcccacggccttgacaggagactggcagggctggctgatcgcttgggcctcacctacacaaggtatgccgatgacctgaccttctctgggtccctaggcaacggcattggagtccctaggttggtcggagtgattggcgagatcgtgcgtaacgaggggtttgtgctgaataccagcaagacccgggtgagacataccggagagaggcacgaaattaccggactggtgacaaatcagcagctgtctgtcccgcgagcttaccacgaccagttacgcgccgtactacacgatgctgtgatgcacggccccgctgttgccaatagggcaggcctcccaaatttcagagatcacctggccggacgggtgggttgggtggaaagtgtgaacccagttcgggggagacgactacgggcccagttcgacgccatagcctggcctgattga

SEQ ID NO: 12956 - RNA, 1347 nt, synthetic construct
  source 1..1347: mol_type = other RNA
atgccagtgaagcgccgcgaccctacagcgcatgtagcacgggcactggcctggtcatttctggctgcccctgactggactgaggctgctctccggcggtctgcttgggtgacactgggtcgtagacaccggtgggtgagtgccttagcaggctccgcggtcgctacctatcgaacggcacccctggggaggcctcatgagttagcagggctgttggccgggtcagccgtgcttacaactgcccttcaccgcgctgccaggagagggactcctgttagagtgcgggtactgccaacgactccggccgcaatgggaaggcgacgttggccagtccctgaagtggacgatggcccagccctggctaggttgctgcaggtcccggacgagcaacttagctggctggccgatgttcaaggccgtcagagaaggaccccagctggaccccaccacctgtacaggtatcgctgggtcgccagacccggcactgttccaaggctgctcgaggcccccacccctttgctcaggcacgtgctccgaaggctgcttgatgaagttctcgtctgggtgcctgcacatcccgccgcacatggatttgtgcgcggcaggtccgttctcagccacgctagacgccacgtgggcgcagacttggtgctaggcctcgacttacgccacttcttcgccgcagttacagcagctcgcgtggctggcctttggaccctgttaggctatccggagggggtggttactctgctcaccggtctaacaactcatagaacacccgtccatgtgctgaccgcgatgccgcctggtggagacgtgtctgggcgtcacctgctgagggcgagattgagagcggcacatctgccccagggagcagcaagcagtcctgccctggccaatctggcctgctttaccctggatcaccgacttagcggatacgctgcggccctgggagccacttattcccggtacgccgatgatttgacattcagtgggccaagagacttacccgctgccaggctcgtacgttcggtgaccaccgtcgtagcagaagagggctttgccgtgaacccaacgaaaacccgagtacagcggtcctctgctcggcagcaggtgacaggactcgttgtgaacgctgggctagggatcccccgagaagatgaggatcggctgcgcgccgtcctacacgatgctgtccggagaggtcctcaggcggccaacagagacggcgtgccagacttccgggcccatttggagggcagggtgggttgggtcacctcagtgaatcccgtcagaggagcccgacttcggcgccaactcgaagctgtagtttggccaccccgctga

SEQ ID NO: 12957 - RNA, 1341 nt, synthetic construct
  source 1..1341: mol_type = other RNA
atgcgcagagcagaccccgtagcccatgtggccagagccttggcctgggcttttttggccgccccggcatggaccgaacccgaattgcgccgttcagcgtggaccactcttggccggaggcaccgttgggtgactccactggtgcggttggcgctcgtggtccataggacagccccgaccggacagcctgcagagttagccaggctcctggcaggaacagacgaactgcccgctgccttgcatcgagcggctagaaggggagctcctgtgcgggttagagtcgtccctgcagtccccgctcggacagcttctccaaggtggcctgttcctgaggttgcgggcgctcctgacttggcacgactcctgggagtgcccctggagcaacttgattggttagcggatgcccagggtaggcagaggcgcactccagcaggaccgctacacctgtataggtacagatgggtggaaagacccggcgccgtcccaaggttgctcgaagcacccacgccactcctacgacacgtcctgcgcaggctgctcgacgaagttctggtgtgggttccagctcaccccgcagctcacgggtttgtacgcggtcggtccgcccttagtcatgcacgcctgcacgttggcgcggctcaggtagtgtccctggacctgcgacacttcttcgctgctgttacagccgccagggttcgcggcttgtggacgttagttggctacccggagggcgtgacagctcttctgaccggcctgaccactcatagaacccccgtacatgtgcttaccgcgatgccaccaggtggggatgctagcgccaggcacttactgcgagctcggctgcgtgcacctcatcttccccaaggtgccgcatcatctcctgccctggccaatctagcctgtgctcgcctcgacagacggctcgcagggtatgcagccgcactcggagccacgtactccagatatgcggacgacctgactatctcagggcctgctgatctggccgcaccacgacttgtacgggctgtgagtgccgtcgtggtggaggaggggttcgctgtcaatcccgcaaagaccagagtgcaacgcagctctgcccgtcagcaggtcactggggtcgtggtgaacgcacgcacaagcgtccctcgcgaggaggaagatcgactccgggctgtgctacacgatgccgtgcggaacggcccagatgctgccaacagagccgccgtgcctgactttagagcccacttagagggacgtgtggggtgggtgagtgccgtgaatccagtcaggggcgctagacttcggcggcagctcgatgccgtggtatggcctggtaggtga

SEQ ID NO: 12958 - RNA, 1407 nt, synthetic construct
  source 1..1407: mol_type = other RNA
atgccggtccacaccaggagggatggagacgatggcactagaagggagagccatcgccctagaggcgttccagtgacgctggcccctgacgacggtttggcaaggggaatagcctggggactactcgccgcagaagattggacggccgatgcactgcaggctgctgtgacccgtaccctgggaaggccctgtgaatgggcgggtagggtagtaggaccagtgctggccgcctatcgggagccaccaacagatcggccagacgaactggcccgatttctcctgctagcaacacccctgaccgagatagcacatgccgtgcgtcaggaacatgagcctctgcgagtgcgagttctggccccagttcctggcagaatggggcgcagacgctggccagttcccgatctccccgaccttgtcgccctggctcgactgctggaggtgcctctcgatcagttggattggcttgctgacacggcacggttacaaaggcgttcaccaccaggcccctaccaggctttcgagcataggtggagaagcaggcctcatgccgctccacggttacttgaggcgccaggccccctacttagggctgtgcagaggaggatcctcgatcgtattctcgcatgggtgccagtgcaccctgctgcacatggcttcgtcgggggtagatccgcgatcaccaacgcagctcggcatgtaggggctccgaccgtcgtagctctggacctgcggagctttttctctactattacagccgctcgcgtggggggcttgtaccgaactatggggttgcccgaggccgtagtgcgcgtcttgacaggcctttccacccacgctacccccggttgggtgttaagtggcatgcccgcaggaggggatccctctgagagacacagacttcgggcgaccttgagaagccggcacctgcctcagggcagtcccacatctcccgcccttgccaatctcgcatgcttttctctcgaccaccggctgcagcgctatgccgagacagctggtctggtctactcacgttacgctgacgacctcactttcagtggacctgttgccaggccggcagccttgttagccactgtgtccacaattatcgtggcggaaggattcgtcgtccacccgggcaaatcacgcgttcgacggaccggcgaacgccaaacagtgactggtatcgtgactaatcgccggcccggaattgccaggtccgatagagacaggctgagagccgttctgcacgacgctcgaagacacgggcctgaagcggcaaaccgcgaacgccacccgcattttcgggagcacctccacgggagaatcacctgggtggagtcggtgagccctgtccaagggagaagactgcgggcccagtatgaagccatcgtctggcctgagcgctga

SEQ ID NO: 12959 - RNA, 1347 nt, synthetic construct
  source 1..1347: mol_type = other RNA
atgagtagcaaaacagtgcaagacgatcttgccaggcgcttgggctatagaatgctggctgtggagtgggatagagatcatctgttgattggctgcaggcgggctttgggatctgccccaccctggttggggccagtgattgacgctgtgctgcagcagtaccctgtaaaaccctccggccgtcaccacgagcttacagccctgatagcaagcactgaagaattccaggatgctgtctttgtgtcccgctctgggaggcattggcagattcgctccctccctgttggtgatctggacccggatgagctgcgcatggccacctctagatggccggttccaaccctgggcacagaggctgccctggcagacttgctgcgggtcgacctgcctgtgttgctgtggctggccgaccctaagaggatgcttcggaggcgccccgatggaggacttcaaccatacaggtacaggtggcttgagcgccacgggagaaccccacggttactcgaaatccctggacccctactccgccacgtgcaaaggcggctcttggagagagttatcgacaggattccccctcaccctgcggcgtatggctttgtcagaggggggggccctcataggaatgcagcccagcatgtcggagccgactgggtgatcaactttgatctgcgaagtttcttcgcaggcgtgcgtactggacgtgtggctgggatctttacagctgcaggatatccggcatccgtggtagctctgctagccgggcttgtcagtcgacccactcccgagttcgtgctgcgagggatgcctgatggtggcgaccccagcgacagagccctactgagagcccggcttcgggctgctcatctcccacaggggtcaccatcgtctcccgccattgccaacttagtcgcgttcaacctcgattgtcggctgaatcggctggcaaagaacgccggttttggctacacgcgctatgccgacgacttaacgttttcaggctcaggacctcgtccggcggctggtttcgtcccactcgtgcgaaaaatcattatagatgaaggattcgcacccaatgacaggaagctgagaatccgcggacgaggccagcgacagctcgtaaccggcatcgtagtgaatcagcacactaatttacggcggcgggatcatgaccgtctcagagccgttctgcatgacgcaataagaaacggccccgatgctgcgaaccgcgatcaccaccccgacttcagagcccacctggaaggtagagttgggtgggcagagcagctcaatccaaccaggggtgcccgactccgcaggcaactagaactgatcagctggccaagctga

SEQ ID NO: 12960 - RNA, 1344 nt, synthetic construct
  source 1..1344: mol_type = other RNA
atgaccccagaagaggacctggctttgaggctggcctatgtcttccttagtaccagctggagaagggccgacctaaccgacgcagcaatagcctcgcttgggggagagccagcttggctgggtgggctagtgagccgactcctgggttcaatccgggagcgccccgctgataggccctatgatctggctcgcgtcatcatgggccagcaggtgtacctagatggcttggatcgggatcaccatcaggataccgtgtggagggttcgatcctttcctgtgggggggttagtcgccgaaaccgagcgtatggcagtgccggattggcccgtgccacgtcttggaactgaaagggctctggccgacctgttgcgggtggacttacctgtgctgctgtggctggcggatcctcgaggatacctaaggcgtgcagacgacggcctccagccatacaggtacaggtggataaggcgacctggtaggacacctaggctgattgaagctcctggccctttacttagatacgtgcagcggcgcttgctggaccgcgttctcgttgggattcccgtccatcccgccgcatatgggttcgctcggggaaggaacgcagttagagctgctagacggcacgtcggttctgactgggtgattaattttgacctggtaagcttcttcaacggcatcagagaaagtagagtcagaggcattgtgcgggtagccggatatcccgagccagtcgccagactgatggcagccatcatgacgacagccacccccgtgcgcactcttcaacgcatgcccgacgacggccctgacgatgacagagccgttttgcggtcagtgctcagaacggcccacttgccccaaggagccccgacatccccagcaattgctaatctggcttgctacaggctggacgtgcgtctggcgggattagccgaatccctgggcctccgctatacacggtacgcagatgatttggcgttttctggacacggaactcgccccggtcgtcgcttctttcgcctcgtaaccgaaatagtcaccgatgatggctactgtctcaacgaccacaagcagcggcttcaaactcggagagggcgacagacagtgactgggatcgtggttaatgatcgagctaatctgaggcggtctgagtatgaccgactgcgcgcagtcctccatgatgccatgatcaacggcccggagcacgccaatagaaacgggtatcctgcgttccgggaacatctcgacggccgcatcggctgggtagagcagcttaacccagcgcgaggtgccagactcagacggcagtttgagctgattacatggccagaggataggtga

SEQ ID NO: 12961 - RNA, 1332 nt, synthetic construct
  source 1..1332: mol_type = other RNA
atgaggctgtccgatagcactctcgctcgggctctcgctatggccttcctggacggggactgggagttcgatcccctcctggatcgagccgcccaggttttgggcggcagacgacgatgggtgagaaggttggtgaaggacctgctagccgcatttcccaggacccccagagatgcaccatcagcgcttgcagggtggatcggggcccatccatccctgattgaggcagctgcaagggccagggacgcagctaggccacttcgtgttgcggcgatccatcctgggcacaccgagatgggtcgccgaagatggcctgtcgccactctggacgacctggctgatctggccgagctcctggatctcgaccaggcccaccttgcttggttcgctgatcaacagcacagagctagacgtgccccggacggtcctctccaccactacaggcggcgctggatatcacgcagtggccggaccccgcggttgttagaagtccctttgcccagactgcgcgcccttcaacgcaccctcacacatgaggtgttggcccatattcccactcacccggcggcgcatggatttgtgcgagggagaggcgctgtgacaggagctcagcagcacgttggccgggatgccgtgttgtccctcgatctgagcgcatttttcgcatccgtatcagcagcacgggtgcgcgcgatttggagagctgccggataccccgaacccgttgccgatgcgttaaccggagtagtgaccacccttgcccccgtgcggatgttaaccgccatgcctcctggaggccctccagaagcaagagcccttctgagagcctggctgcgagcctctcatctaccacagggcgcccctactagtccagccctggctaatctggccgcacatcgtctcgacgcaaggctcgccgggtatgctgctgcagcaggttggtgctacacacgttatgctgacgacttgacaataagtgggggtcccgagatggttcggcgtacggatgctgtggtcgctgcccttagccgcattgtcactgaagaaggctttcgcgtgaatccaacaaaaacgcgcctacggacagcgtctcagaggcagctggtcacgggcatcgtcgtcaaccggaggccaggacctggcaggagcgagtatgaccaactgaaggctctgctgcacaacgcctctcggacaggcggacaagcccagaacagagatggtcacccagccttcgcagcacacgtaaggggaaggatcgcttgggtggctcagctgcatcccgaaagaggggcccgcttactggccacttggcacgaggtggactggtcttga

SEQ ID NO: 12962 - RNA, 1449 nt, synthetic construct
  source 1..1449: mol_type = other RNA
atgcccagatctgctccaaggtgctacgcgagagccctccatgaccgcagtcatccggacgcaaccgtcatgacttccgaccgcgtgagaactttggcccggggcttggggaatgccttcttgggggctgaagcatgggcaacccggccaatggcagaagcggctgtgtcagtcgttggggttggagggaggaggaggtggccaaggaaactggcccgggaggttctggctgcttatccaagacctcccgccgatcggcctagagagttagcccggtttattgaaaattccccggtgttgtgggcggccttaaatcgttccgcaccccccggaagggctccagttctacgtgctcggcgaatcccccccacgccagtaaggatggccgataggcgaccgtggcctgtcccagagctgcatgatcttgccgacctggccgcactgctggatctggatcccgcccatctggactggttcgccgacgtcaaagggcttcaacgtcgcgccgcaccaggtcctctacaccactaccggtatagatggactactcctggcagcggcagacctcgcctgttagaggcacctcgcccccgtctgaggtcagtccagcgaacccttctggacgaggtcctcgccttaattccggtgcaccccgcggcacatggattcgtgcctggaagaagcgcagtaacaggagcaagacgccacactggcgccgcagttgtgatctcgcttgatctggcggcctttttcgcccacctcaacggtggcagagtctacggcgtgtttagaacggccggatacgcccagcccgtagctcatgctctcacaggcctctgtgtgcatcgcacacccgtggcggtgatagcggctatgcccccagcacgaccaggtagcacaccagaagctgtctctgcgcgccctggactccggagattgcttgctggtgcccacttaccgcaaggggcccctacgagtcctgctctagccaacctgtgcgtgatggcactcgataggagactgagcggccttgccgctgctaccggcttgacctatacacgttatgctgacgatctgacattttcaggggacttagagcccagggcagcccaacgcgtaaccgaagccgtgggtcggatcgtgagatccgaggggctggctctgcagccagccaagactagggtgcgggagcgctctaggcgacaagaggttacaggcattgtcgtgaacgaacacagtaatctgcccaggaccgagtacgatcgactccgcgccatactccacaacgctgcacggtctgacccagccgtgcagaaccgcgaacagcacgctgacttcagagctcacctgctcggtcggatcgcatgggccacccaacttaatcccgcccgaggccaaaagctgcgggctcaatttgaaaggatcgtgtggcctggagagcagccttga

SEQ ID NO: 12963 - RNA, 1344 nt, synthetic construct
  source 1..1344: mol_type = other RNA
atgtcagaccctcgcaccagagtccttgcacgggctctcgggaacgcctttctgacggctccagaatgggcgttgcggcctctgacggacaatgccgccacagtacttgggggacgtcgccgatggacaagacgcctggcacgggaagtgttggatgcgtatccgcgacctcccgctgacagaccaagggagctggccgcttttattcaggcttcccctatactgttcactgcagtgctgcgttccgtggagacaggtaggcctcttagggtgatcagaatgccacctgcccccgtccaaatgaacacacgacggccgtggcctgtgcccaaaattgattccattcaggatctggctagactgctggacttggagacagcacagttggactggttcgccgatgtcaaaggccttcaaaggcgagccgctccaggccctctccatcactacaggtacgcctgggcctctaccgcgtctaagaggcccaggctcctggaggcaccattacctagactgagatctagacagcgcactctgcttgagcagatcttagctcggatccccactcatcccgccgcccatggatttgtgcctggacgcagtgccgtgacaggcgcagaaccccatgcaggagccgctgtagtcataggcctcgacctcgccgcattctttgcttcaattcaagtgggtcaggtttatggcatttttcgtgctgctggatatgccgagcccgttgctcacgtgctgaccggtctgtgcactaccaggaccccagtacgggttataagtaatatgccggccacctcagacgtagagagccgcgtgcgactacgcaggctgctagcaggaggccacttaccacagggcgcaccaaccagtccggcacttgccaacctgtgtgcgctcggcctggataggcgcctaaacggtttagccgcggccgtggggatgacttatacccggtacgctgacgacctgaccttctccgcgggggaggaagttaatgccagacggctcatcaccgccgtcgacgagatcgtgagaagcgagggcttcgccttgcagagcgcaaaaacgcggatcaggcgtgatttccagcgacaggaagtcacagggatcgtcgtgaatgcccaccccaacctgaatagacgtgaatacgatgagctcaaggcaatcctgcacaatgctttgcgccatgggcccgaaggtcaaaaccgggccggacaccgcgattttagagcacacctcctcgggcgcattgcttgggttgcccagttgaacccagaacggggcaggaagctgcgggagactttcgaagcgattacttggcccagcctttcgtga

SEQ ID NO: 12964 - RNA, 1362 nt, synthetic construct
  source 1..1362: mol_type = other RNA
atgtccaggaggactaccagggaggctggcctggctaatgccctcgccttgtcctttctggctggggcatggtcagtggacggcctggaacaaagggggacaaccgtgttgggcgaccggcctagatggctgcgacgcttggttcggctggtgaccgacgcttacccacgtcccccggtggacagacctagggagcttgccgcgtatgtgttagctgcaccccccctccgacgtgcagcttactcggctgctcgccgaggacaccgacttccagctcccagagcctggctcgccgtaccaacagccatggccccaaccaggatggctccgtctcggtggcaggtgcctgcaatcgacgatgtgggcgcactggccgacctgctggatctcgagatgggacagctggaatggctggcagatgcccggggattactgcggagagcgcctcaggggcctttgcatcactatcgctatcgctggcaaccaaaagctgggggcgcgaggcttcttgaagcgcctttacctcggctgcgtcgcctgcagcggactcttctggataccgttctcgccagagtcccagttcaccccgccgctcacggttacgttccaggtcggagcgcggttactaatgcagccgcccatgtaggtgccgccgtggtagtgtccctcgatctggaagccttttttagctctctgagtgccggaagagcttacggcgtgttgcgcactgctgggtaccccgaaccagtggcccatctcctgactgctctctgtacaaacgccgtacctgtacatgtgctaagggggctcccagactctgtgcccgtcgatgtccgcttccgtctccgtcgggccttagccactccccacttgccgcaaggagccccaacgagtcctacactggcgaacctgtgcgcgcacgctctagaccgacgccttgcagggtatgctgcagcagcgggcgtgacatacacaaggtacgccgacgatctgacgttctcaggaggccccgggttattgagagctgctcccgcccttgtgaccgcagtccgaagaattgccgcagcagagggacacagagttaacgtggccaagaccagagtcaggagctccgcccagcggcaagtcgttaccggattggtggtcaacgagcgcctgaatctcccccgcggcgagtatgaccggctaaaggccgtcgtccacgatgcagtcagacatggcccggctgccgcgaatcgacatggtcacagggatttcagagcccacctagagggcagggttgcctggctcgaggcagtgcatcccgaacggggtgcacgcctgagagctcagctggcaagggtggcatggcctgtgagctga

SEQ ID NO: 12965 - RNA, 1332 nt, synthetic construct
  source 1..1332: mol_type = other RNA
atgcgggcccgagacagactagccgcagctctggccgacggaatgttagcgggggattgggccggtgcacctatgcgagctcaaggtgcattagtcctcggcgagcggcacgcttggatcagaagactggttcgggaggtgcttgaattctaccctgaaccacctgccgatcgtccccgagaactagcacggctgataggacgcacaagaactatggaggagttggagcggagagccagaagacgcagacggcgcttgccaattccccaacatcgggtgactacacctaccacaacagtgaggaggccgttcccggttgtgagcattaatgacgctaccgcgctggcagagtgcctagggctgtcagtccctgacctcctgtggttcgctgatactaaaggccttcagcgcagggccgcatctgtagggctgcatcactataggagcacatgggtcgggacacggtcaggttcgcggttactggaagcaccaaggccacggctcaaggaagttcagcgtcagatcctgcagcaattgctcgcccccattcccgttcacgaggctgcccatgggttcgttgccggtcgctccgctgtgactggagctcgaccccatgtggatgccgccactgtgataagtctggacctggagagcttctttagctctgtatcaggcaggcgtatctacggcctgttccggatggccggctttcccgaaccagtggcgcacctcttgaccgggctgtgcacacaggcaacccctgtggacgtcctcaggcgcatgccatctgggcacccagctgcctttagactgcgtcgtaaattagcagagccgcatttgcctcagggcgctcccaccagtccccacttggcaaacctcgcagcttttggacttgaccgccgactggccgcctatgctagtcggattggagcccgctacacccgctatgccgacgatcttacgttctctggacctgacctgcgcaggagatccaggggagtagtcgccgcggtagctcgaatcgttgcggaggagggctttgccctgaacaccactaagactagagtgaggggacaggatgaccgtcaaaccgtgacaggcgtcgtggtgaatcgccaccctaccgtcagcagggcggaatacgatacgctcagagccatcctccacaactgtgtgcgattcggccccgaaagccagaataggctgctgcacacggactttcggtcccatctcagaggtagggtcgcttgggtggctgccctggatccagagagaggcaggcgccttcttgcaacctatagtcagatcgatttttccccctccgggacctga

SEQ ID NO: 12966 - RNA, 1326 nt, synthetic construct
  source 1..1326: mol_type = other RNA
atgccagacgggagggctcgacttgcgattgccctggctgatgcttttctcgcaggcgcctggacaagtgacggattaaggacacaaggccagcttgtcctgggcgctcgtcatgcctggcttcgaagactcgcaagagaagtgattaaagcttatcctgagccgccatctgatcgacctcgggagctgttcgcgtttgttctgcagacacaggcaatggcccaagtagaaagacgcgctgcacggcctggcggaggatttccactgcccctgcaccggcttaccgcacctactagcatgattaggcaccccttccccgtgactagcctcgaccatgccggtgaccttgctgcactcctcggggtcagcatggaggagttgctgtggttcggcgataccaacggactgcaaaggagggcccgaagcgaccgtctacagcactacaggtccacatgggtcccaagcgtgagtggggggcgactacttgaggcccctctcagccggctgaaggcaatccagagacagattctggcccagatcttaacccccattcctatacacgatgccgcacatggcttcgtggtaggacgatccgctagaaccggagccgccccacatgtgggtacaggcttactcatctccctagatttggaatctttctttgcctccattaccgggtcacggatctatggggtgcttagggcggcgggttatcctgaacccgtagcccacctgttgacgggcctgtgcgctaccgccactcctgtcagggtgttggctgaaatgccaggtaccgcagcgccgtcggcctttagactgagaagacggctcgctgagccccatctgccccaaggagcaccgacctcaccccagctggctaatctctgtgcattcgccatagatcgtcgcctgtctgcctacgcctctgccattggcgcagtgtatactcgctacgccgatgacctgaccttttccggcgacaccctcgttgtcagacagcgcggggttgtggctgctgttgcacggatcgtcgctgaggagggcttccgcttgcacatcgataagactcgtaccagaggtcgcgacgcccgccaacaggtgacaggagtagttgtgaatgccagtacgactgtgccccgccgggactacgatactttgagggccatcctgcacaactgcgtcacacacggcccaagtactcagaatagggtggagcacaacgattttagggctcatttaagagggcggatatcatgggtggcctcattggacgcaggacgcggtcggaaactgctggcgacgttcgaacagatcgactggacatga

SEQ ID NO: 12967 - RNA, 1326 nt, synthetic construct
  source 1..1326: mol_type = other RNA
atgagcgaagctctcgtcgccagtgctttagccgcagccctcctagatgggccttgggacgcagccgcactcacaacccgagccacagctgcactgggtggaaggaggcgcgcttgggttgctggtgttgtggcggacgttttggcagcccatccccgtcctcctttggacgctccacgaagcttcactacagagctggctcggcaccctgctttagcacgcgccgtgcacgctgcagaaaggaggggaaggcctctaagacccgcccatctggaacctgtcccctcatcaatgggcagaagaaggtggccggtgcccgtgcttgatggggttgcagatctggccgctctgctggaccttgacctcgcggagttggattggtttgcggacccccggggtttgcagcgaagagctagtgggacagccctgcaccactatacctcccgatgggtcgcaaaacggggaacccctcggctcattgaagcacccaagcccaggctccggcatctgcagagaattgtcctccacgcggtgctcgatgtggtggacgtccacgatctcgcccacggctttgtaccagggcggtcagccgtcactggagctcgaagacatactggcgccgacgtggtcgtaaggatggacctatccgccttttttgcctccgtgggtgctgcacgcgtgtacggagagttccggaggctgggctatccggaagctgtggcacacctgctgaccggcctttgcacgcatcggactccactgactgtacttcgcaccttgccagccggcggaagagccgaagatcggttccgtctgcgccaatggctgtctgccgcccacttgccacaaggggctccaactagcccggccctggctaacttagtggccggaccattagataggaggctggccggacttgccgactctatggggcttaggtgcacgagatacgctgatgacgttaccttctccggcggtcctcagcttcgttcgggtgcaggccgcctcgtgagatgtgtcacggcaatcgccgccgaggaggggttcgtagtgaatggggataagaccagagtccggggcgctgagcaacggcaagtcgtgaccgggatcgttgtgaacgagcgtacaagtgtgcccagagacgagttcgatcgcctgaaggcgctgctgcacaacgcggtgagaagcggacctgcattgcagaatcgccggggccatccagactttcgcgcccatctggcaggccgtgtttcttgggtggaggccgtatctcccgcgaaaggccgaaggctgcgcgctacatacgatagaatagcctggggctga

SEQ ID NO: 12968 - RNA, 1320 nt, synthetic construct
  source 1..1320: mol_type = other RNA
atgagtgctgctgttgctgccgccttggctgctgccttcctggatgccccttgggaggccccacaactagcggcagctggacgctgggctttgggactcaggagagccgcctggttagatcggctggccgcagacgttgtggcacagcaccctaggcccccatgtgacgccccaagagcgctgacggctctcctcgtggcacacccagaacttgcctccgcacaggcagtggcccgaagacgaggtcgtcccctcagagtacggcacctggtggcagtacccgctgcaatgggtcgggctagatggcccgtaccaccacttggtggtgcagcggatctcgcagccctgctggaagtcagccctggggagctggattggttcgccgacgttcgtgggtggcagagaagggccgagggcacagctctccaccactaccgggctagctgggtggcaaagaggggagctccacgcctgctggaagctccaaaaccacggctcagggctctgcagaggagattgctacgggaggtccttggggcagtacccgcacctcctgtggtacacggatttgttcctggcaggagcgcagtcactggggctcgagaacattgcggcgctgccgtcgtggtccgcgttgatttgaccgccttctttgcgagcgtggatgcggcgcgtacctatcgggcctttcggtctttgggttaccctgaggccgtggcccacctgctaacaggcctcaccactcatgctaccccggcacgggatttacgagggatgccccctggcggagatgctgacgagcgtttcgcccttagacacaggctggctgctgcccatttaccgcagggggcaccgacatctcccgctttagccaacctttgcgcccgctcgttagaccgcagactggcaggcctggcagcagctctcggagcaagagtgacccggtatgcggatgacgtgactttttctggcggggaagaattagccgccggagcgcaaaggctagtgaggtgcgttacacgagtcgccgccgacgagggctttacggtgaatcccgccaagactaccgtgagaggacggggggagagacagctcgtgacaggcgtcgtggtcaacgaacggcctaatcccgtgcgctccgagttcgaccgcctgaaagcggtgctgcatcgatgtgccgtccatggccccgctagtgttgaagcaccgggaggggtggacttgcgctcccatcttgccggtcgcgttggctgggtcgaggcactttcaccttccaggggccgccgtttgagggagtcattcgacgccatcgcctggtga

SEQ ID NO: 12969 - RNA, 1320 nt, synthetic construct
  source 1..1320: mol_type = other RNA
atggccgaaccagatgccgtagcagcggcactcgctgccgcttttctcgacgggccatggacggccgatgctctaactgctcgggcccgagaagctgttggcgtacccagagccagatgggtagcccggctggcaggagaggtaactggcaggttcggaaccccgccattagacgccccccgtgaactccgagctgcagttgccgggtcaccagcatatgccggagcaagagatgccgccaggagagccggacggcctttgagagtcgcacatcttgctaccgggacaacaaggatggggcgcaacaggttttccgttccccccctcgataccgtcgacgacctggctgctttttgcggcctggatccagcacagctcgactggtttgctgacgtccatcgctttcaggtgagggcgggcggatctgctctgcatcactacagggcgaggtgggttgctaaaaggggcgcccctagactgttggaggccccaaaacctcggctgaaggcagtgcagaggaaggtgttacacgaggtgcttgaccgcttccctgtccatgatgccgcccatggctttgttcccggtcgaagtccagtgacgggcgcatgggatcacgttctggcccgaacagtggtgcggtttgatctggaggggtttttcgcaagcgtgccagccgcgcgtgtacatggcacattccgcagcaccgggtatccagaacctgtcgcccaccttctgacaggcttggtgacccacgttacccccctgcgggatcttcgtgccatgcctgatgggggatcggccgaggctagacaccgtctgcgcaggaatctttcccacgcccacttgccccagggagctcctacttccccggcacttgctaatctgtgcgcgcgggggctagacgccagattggatggcctggcacgggtcctcggtgcaacattcacccgctacgctgacgacctgaccttctctagtacaactggtctggaccccgtgcgcctccatagagctgtgagggcagtggtcgccgatgagggcttcactctcaaccccgccaagaccagggtaagaggagccggtagccgtcaagtggtgacgggactcgtcgtgaacgaacgccctaatgtgccccgggaggagttcgaccggctaaaagcggtgctgcataattgtgtgcgccacggtcctactagccaagaccgagaggggcacagagacttccgagcccacttgctggctcgcgttgctcgggtcgaatctgtcaacccggcgaagggcaggcgcttaagacggtcattcgaacagatcgcatggtga

SEQ ID NO: 12970 - RNA, 1347 nt, synthetic construct
  source 1..1347: mol_type = other RNA
atgtatgacgctagagggcgcgctttcttaggccggtgccttgccgacgcttttctcgcaggcgtttggaatgagcgggcattagttgaccgtgctggccgcgcactcgacagaagaccacgctgggtaagagccgtagccagggaggtgctggctgcctatcccagaccccccagcgatcgtcccagggaactagcgaggctcatcgaactagcgttgagggaacgccccgcacctgagggagatagcgaacctcccagggttaggcgctggcttgtacctgagccggctatgggcagacgcagatggccagtcccagagatcgcttcactgggagcgctcgcggggttcctgcaagtgtcggatggcgagttagcctggctggccgatgctaggggcttggaacgcaccgtggagaacgagagactgcgacattacagatacggtgctttgccccgtcctggacgccctgtgagggtcatcgaacggccaaagcaccgactgaaatctatccagagaagggtgcttcacgagctcctcgactggatacctgttcatgaggccgctcacggattcacaaggggccgatcagtacgaacacacgcacgggctcatacagggcggtttgtggtcgtgcgctttgacctggaggattttttcgcaagtgtgcgcgccgccagggtgtatggaatattccggactgccggttacccagaatcagtggcttacgccctgaccgtgctaactaccaacgtggtcccagccaccgtctggcacgagcttccacgccctgttgcccctcgtttgctgggcgctcaccatcatcttggccgcagactggcaaccccacacttgccgcagggtgcaccaactagccctgcattggccaatctcgcagcgtttagactggacaggcggctggatggcttggcgaagagtctggaaattagttactcccggtacgccgacgatctgaccttctctggagatgcccgtctcgtgcgagctgccgctacagtgcgtagagccgtcactcaaattgcccgggaagaggggtttaccgtcaacgagtccaagagcatgctggctacgagagcagggcggcagagggtctgtggagtggtggttaatgagcatctgaatacaccccggcgagagtatgacgtgctgcgggcaattctgcacaactcctctaggtatgggccccagactcagaaccgcgcagccattcccaatttcagggcccacctgcttggtcgaatcagctggatcgaatccgtcaacccgcgacggggggataaactcagacggcatttcgcctctattacgtggcaggaagactcctga

SEQ ID NO: 12971 - RNA, 1347 nt, synthetic construct
  source 1..1347: mol_type = other RNA
atgtacgacgtacgcgcaagggcctacctagcccggtgtttggcggacgcctttctcgccggagtctggactgagcgagcaatggttgatagagctggacgggcactagacccgaggcctcgatgggtgagggcagttgcccgtgaggtgctggctgtctaccatagacctcctgccgatcgtccccgcgagctagcaagattcatcgggcttgtgctggcagacaggtctgcccctgaagacgcgcccaaccctccacaggtcagacgttggttgataccggaaccagctatgggacgacgccgatggccagtgcccgaaattgcctctgtgggagatctggcctcctttctgggggtgagtgatggagagctcgcctggctcgctgatgctcggggattagagagaatggtgaaggatgaacgactgaggcactatcggtatgcgaccttaccacgtgctggccgccctgtacgcgtaatcgagcgacccaaacaccggctcaaggctatccagcggcggctgctgcacgaggtccttgattggattcccgcacatgaggcttcccacggcttcacaagaggccgcagcgtaagaacccatgcggggggtcacacagggcggtttgttgtggtgcgacttgatctcgccgacttcttcgcctctattaccgccgggagagtctacggtatctttagaacagccggctatccggaatcagttgctcatgccctcactgcactgatgacgaacgttatccccgccgtgttgtggcacacacttccccgcccagctatcccaaggcagatcgctgcccatcaccacttgggcagacagcttgcgacgcctcacctgcctcagggtgcaccaaccagccctgcattagccaacttggctgcatttcgcctggacagaaggctgaccggcttggcaggctccctggagattagttactcgagatacgcggacgacctcactttcagcggacccacccaactggttcgcagggctggcaccttaaggcgtgctgtggcccagattgcccgggaagagggtttcactgtgaacgatgacaagtccatgcttgccacacgggctgggagacaaagggtttgcggagtggtggtgaatcaacatctgaatgtgccacggagggaatatgatctgctcaaggccgtcctgcacaactcagccattcatgggccacagacccagaatcgcgagggcgtggtcaattttgaagctcatctgctgggcaggataacttgggtcgagagcctcaatcccacacggggtgacaaactgaggcgccagttcgcaaaaatagtctggcacgacgatccctga

SEQ ID NO: 12972 - RNA, 1350 nt, synthetic construct
  source 1..1350: mol_type = other RNA
atgctctctgcacccatgtacgaccacctgactcgcgcttccctctccaggtgcttggccgacgccttcctggctggtgcgtggaatgagaatcggttagccgggcgagcagggcaagccttagctcctcggagggggtggataggccctcttgtccgggaggttctggccgtataccacagacctcccgccgatcgcccaagagagctgaccagatttatagcacttcagctggaacagatgccgcctagtgaccttgacccgccacgtgtcaggcggtggtttgttgccgaactggcaatgggcagaaggcgatggcccgtgcctgatcttgcatctgccggtgctttagccggctggctggaggttgcaccaggacatctcgattggttggcggatgcccgcggattggagcgcacaaccgcaacagagaggctgcgaaactatcgctatagttggttaccacgcgctgcaggcccacctcgtctaattgaaaggccaaaggctcggttgaaagccatccaacgcagactgctgcacgagattctcgattggatccccgctcatgagagcgctcacgggttcactcggggcaggtctgtgaggtcccatgcagcggctcatacaggacggtacgtcgtggtcggcctcgatctaaaggactttttcgctagcgtggtcgccgggagagttttcggcatcttccgcacagccggttaccccgaaccagtagcccatgtgttgaccgctttgaccacaaacgccgtccctgtcgaggagtgggcatcagtgcccagaccgagagatcccgggcttgtaggtgcccatcaccgcctcggtagacgcctggcaacacctcacctgccacagggagcaccaactagccccgcgcttgccaacctagtggcatttgccctcgaccgtcgactggctgctctcgctagggccactggcgtgacctatacccggtatgctgacgacctgacgtttagtgggcccgcttcattactcagaggcgccgatcgcttccgaagctccgttgcggacattgcccgagaagagggattcagggtgaatgaaagaaaatcgaccctgatgactagagcgggacgtcagagggtgtgtggcgtggtggtgaaccagcgactgaatgttgcccggacggaatacgatgagctgaaggcaatcctgcacaatgcggcccggtccggtccttcttcacagaaccggcacgccgtggcagactttcgtgcccatctgctcggacggattgcctgggtagaaagcctgcaccccgggaggggagaaagattgagggctaggttcgaggtgatcgattgggacagatga

SEQ ID NO: 12973 - RNA, 1353 nt, synthetic construct
  source 1..1353: mol_type = other RNA
atggatagacgcactagagcctatcggtccctctctccttgcctcgctgacgcctttttagccggcccctgggacccagctgcattagctacgcgggcaggtttagtgctcgagcctcggccaccctggatcggattgttggtccgcaacgtccttgccgcttacgaacggaggccggctgatcggccacgtgagctagctaggtacattgccttgcagctggagagggtggacgcagataccgcagggcccagacctagagtgcgccgatggctgctcgcagaactggccatggttagaaggccatggcctgtgcccgaactggcaagcgtcggagctgttgccaatcacctggaagtctctgatcggcatctggcgtggctggccgacgttcgaggccttgaaagaacagggtccgatgagaagctgcgccactacaggtacggatggttacctcggcatggtgggccccctagagtgattgagaggcctaaggcgaggctcaaaagtatccagcggagagttctgcacgagatcttggactggataccagcccacgacgccgctcacggttttacacgcggcaggagtgctcgctccaatgcagcagcccatacccgccgtccagtggtcatggcgttggacctggaggattttttcgccagcgttagagcccccagggtgtacggaattttccgcaccgcaggttatccagaacccgtggctcacactctgacgggcctatgcactaatgctgtgcccatcgaggagtgggcagctgtgccacatcctactgcgtcgccgctagcccaggcccatcacagactgggccgtcgtcttgccacacctcacctgccccaaggagcacctactagcccggcacttgcgaacctggccgccttcactctggatcgcagactcaccgggctggcactcgctttggacgccacctatacgcgctacgccgatgatctcaccttctctggctcaagccgccttctggacaggggtgggcagatccgggcaacaatagccaccatagcccgggaggaagggttcgccgtcaacacccgtaagtccgtagtcacaacaagggccgcgcgacaacaggtgtgtggcattgtagtgaatgacagacttaatgtgaccaggcacgagtatgacgaactgaaagcgatcattcacaacgcagcccgacggggcccatcaggagaaaaccgggctggactgtctgattttcgggctcatctcctgggcaggatcgcctggattgagagtctccatcccgctcgcggggctcgacttcgatcacagtttacaagaatcgtatgggaccgacagggcgctgcctga

SEQ ID NO: 12974 - RNA, 1431 nt, synthetic construct
  source 1..1431: mol_type = other RNA
atgaggagaggacctgcaccattgggtacccccccaggcgacttagcacaagccgctgctgcagcattgctcgcaggtgcctggaccgaacgggctatgctacggcggctgcaacaggctgtacggcctctgggtcctagattgcccgcacgcctggttgcgagtgttctggccctccatcggacacctcctgccgatgctcctagggcactcgctcaggagatcgatgacctggtccgcggacatgcaccaagaggaggctggccaccgaacgcacgtgtcagacggaggtacgcccctcctaccgccatgagaggtgctaggtggccggtagcccctcttcccactgttgccgctctgggtcgactggtcggggaaagggatccaggggctctggcctggttggctgacgttcgcggcctggaaagagaggttccagatgagcgcctcagggcatatcggtatactcatcacccccggacaggtggaccaccgcgtgtactggaacgccccaaggcacgcttgaaggaagtccagaggaccctgctgcgggaggtccttgctccaattcccccccatgacgccgcctgtgggtttgtcgcagggagatccgtgcttgaccacgccgccaggcacgtaggcagaacggtggtggtgcagctcgacctggaggacttctttgcccaggtgactgccggccgagtgttcggaatcctgcgagccgccggatatcctgaacccgtggcgcacgccatagtgggcctaacgacaaacgtggtgccatacggcttctgggctcgaattccccgccccgatggtccacgggagatagagagacaccaccggttagggagaaggctcgccactccccatttaccccagggcgctccgacttcaccagctttagccaatttggcggcctttaggctggacaggagactggatggcctcgcgcgctcactcggactcacctattcccgctacgcagacgatctggccctaagcggaggccgacatctagctcggcgcgcttacgaacttgagcgcacaatcgcggctattgccgcggatgaggggtttagagtgaacccgcagaaaacaagggtgagggcccgggaaggacggcaaacagtctgcgggatcgtcgtgaatgagcgcccagctgtagcaagacgggacgtggaccgtctgcgagcccttctccatgaggccgaagtggccggaccaagagccgctgatcgtggagggatgggacctgccttcgaggctcacgtccgaggtcgtgtggcctgggtggcacaggttcaccctgcaagaggggcgcgtctgcgagagcagctgaggagagttgactggtcggcacttcgcgataccggggatgctggcgtgcacaggtcttctccccctggcgacaggcccttcaccagctga

SEQ ID NO: 12975 - RNA, 1371 nt, synthetic construct
  source 1..1371: mol_type = other RNA
atgcccccacctccagaccaaccgcaaccccttcgttctgacgcagctgctgcactggccgacgcgtttctggcaggagcgtggacgaggcccggtatgattcagagagggcacgacgccctcggcgttgaagcagtgccaggcctgcgatggttaaggcgtgaggtcgatcgcgttctggcagcctacgctcaccccccacgagacaggcctagagagttggccgcattcgtagcggccacaatcgatgcacgaagagccgctccgtttccccccaaacatcggctggtagctccgggagccatggcaggtagacggccttggcctgcaattcccgagctggataccgccggcgatttagccgactggctcgctctcagccacggagagctggcttggttcgccgacgttcaatcacgcgagaggcgcgctgacgaccgaagactgcgccactacacttacgcttggagtgctagacccggtgccccagtccgcttcttggagcagcctaaagctcgccttaaggcaatccagagacgcattctccacaagctgcttgtccatgtccccgcgcatgatgccgcgtacgggtttgtgccggggcgagatgtactgcaacatgctcgacgccacgctggagctgccgcagttctgagattcgacgtgcgggacttctttgtgagcttgcccgcaggcagagtctacgggatctttaggctggcagggtatcccgaagctgtggcacacgcattaaccggcctaaccacgaatgccgtcccacctggcgcttgggctgacgttccagcccctgctgaccctgctctgcatcgccagcatgtgctgcttggaagacggctcgccgctcctcacctcccacaaggagctccaacttctccactactggccaacttgtgcgcctttactttagatcgccggatggccgcacttgccgtgaagctgggtgccacatataccaggtatgccgatgacttggtgctgtccggggatagggcacttgccagacatgcccagcggactactcagaccgtacgggccatcgttaggggccagggtctaaggctgaacgaaaccaagacaacaatcatggtggcggcacagaggcagagggtgacaggcattgtcgtgaacgatcaccccaatatagcccgagatgagtatgatcggctccgtgccatcctccacaatgcagccagggccgcggatccccatgctgaaaatcgggcgcacgtgcctgacttccgtgctcatctccggggccgtatagcctgggtggagcacgtgaacccacaacggggagcgaaattgcgcgcccggttcgaacagattgcctggccagcctcccctagatga

SEQ ID NO: 12976 - RNA, 1335 nt, synthetic construct
  source 1..1335: mol_type = other RNA
atgacttcagacctacagaccgttgcaggcgctctggcctccgctttcctgcgtggagtgtggaacgaacggcgattagtagcccggggggaaagaatgattggccagaggccggtgtggctgactccattggtgcgccgagtgctcgagggctatcacagaccccccgccgacagaccaagagagctgcaagcctttattcgcgtgagtctccgcgacattacaggaagggctcgcttggccaaaagagtcgagatgcgccactggagcccgacacccaccgtcatggtggatcgcaggtggcgggtcccaatcctgcacaccgtgggagacttgggggcccttttaggtctggaccccggtgcgctgatgtggttagcagacgccaggggcctcgagaggtttgcacctgaggagcggctgaggaactatcgctacacctgggtacctcggacaacgggagcgccgaggttgctcgaagcgccaaaagcgcgtctgaaggtggctcagagagacgttctgagacgaattctgtgctgggtgccacctcatgatgcagcttacggcttcataaggggtcgatccgctcgggaccatgctgcacggcataccggacgggaggtggtgctctcatttgatctgatggacttcttcgcaggcgtaccagccagaagggtgtacggcatataccggctggcaggttaccccgaacctgtcgctcactgtcttacagctctctgcactaaccagattcctcgaaccgtttctaatgatatcctgggccgtcctgacccagcttacgccctgctgaggagaagactcggcacccctcatttgccccaaggcgcacccaccagtccagcattggccaacctggtcgcccacgcccttgacaggaggcttacgggcctagccgccgcacttggtggaacgtatacaagatatgctgacgacctcgtcattagcggggatgcccagttagcgcgcagaatcggggttgcccagcgagcagtagccgagatagcagctgatgaagggtttgttatccgccccgccaagacaagacgcatgagccgcgccgatcgtcaagctgtgtgtggaatcgtggttaatgcccggactaatatcccaaggagggattatgatcgtctaaaggccatcctgcacgatgccgtgcggcatggacccgatgcagctaatcgggacgggattgcggatttccgcgcccaccttgcagggagagtggcttgggtcacttctctgaaccctgatcgtggggccaaactccgaactacctttgacgctatcgtctgggaccctcggccccagacatga

SEQ ID NO: 12977 - RNA, 1260 nt, synthetic construct
  source 1..1260: mol_type = other RNA
atgctcacccggcgcgaagtttccgaggttctcgccgtggcattcctgagtggagaatggcactttgaggagcttcagcgcagggctcggagggcacttggtagacgcgcctggctaaggccactggcaattgaggttgtagatgcgtaccggcgacctcctctcgacagaagacgggaactggttgcgtatattgaacacgctatccctagacgcgtgaggcttcccccgcgaatcctgaggcagcccacattccaccccgccatgggatttgcgagatggcccgtgcccaggatcgacacagtaggggatctggctgcctttctggggctggaagtgggggagctggaatggtttgccgacgtaaggggcctggagcgtgtggtcgacgatgagcgcctcaggcattatcggtatacgagattacctcgcgcctcaggacctccccgagtgttggaagcacccaagcctcgtctcaaagcgctgcagcgccgtctactgcgggaggttctcgcctttgtccctgtccatccggctgcacatggcttcgtcggcggcagatctgcacggacacacgctgcaacccatgtgggccgtagggtagttgtgagagtggacctggaggatttcttcgctggcgtgactgccgctagggtgttcggcatcttccgcgcctgcggttacccagaaggagtggcccacgtgctgaccgggctctgtaccaatgcggtgccagctggtgaaagcgtcgccggtcactggcgattgagtcgcagactcgcggctcctcatctaccacagggagccccaactagcccggctttggccaatctggcagcctttgccctggaccgacgtctttcagggctagcagcagctgtcggcgcaaggtactcccggtatgctgacgatctggtattttcttccgacacccacctgagaaccccagtcgctgccatagggggcattgcccgggatgagggcttccaagtgaacgccggcaagactagagtcatgggacgcggtcggcggcaaactgttacgggagttgtggtcaatgcacatcccaacgtccctcgagtggaatacgagagattaaaggcaactttacatcgggctgcccacgatgggccagctggacttgacccaacagtgctgctcggcaggatagcctgggtggagagcttgaaccccgcccgaggagccaaattgcgcacagctttcgggcacatcgcctggaccccccttgagaacgggtga

SEQ ID NO: 12978 - RNA, 1212 nt, synthetic construct
  source 1..1212: mol_type = other RNA
atggcaagcagcctgtctcggcgcgagacagccagagtccttgcagggagttttctgggcggagagtgggaacttgaggccatggccaagcgagccggaagagcactaggtcggcgcgtatggcacaggagagtcgccgaacgaactctgagggcatatcgccacccacccagagatcgccccagagagctggcagacttcgtcttcacgctgctcgatgacgtgaggctcccacccaggctcttacgggaacctgtttttcacacggaaatggccccaggcaggtggcctgtaccgagaatcgacacacttggggacctggccgaccggcttgagctggaacctgggcagttgggatggctggctgatgtgcgaggactggagaggacatccactggaaagctgaggaactatacctatgtgcgtgtgcctaggagaagcggaccaccgcgggtgcttgagaggcctaaagcccgcctcaaagagattcagcgatggatactgagagaactcctggcttggattcccactcacgacgcggcccacggatttgtaaagggcagatcggcacatacccatgccgccctgcacgtggggcgaaaagttgtggtcaggctcgacctggaggactttttcgccgccgttagtgcagcacgcgtttacggggtatttagaactgctggctatccagaagcggtggctcatactctcacgggcctgtgcaccaacgtggtgcctgcagacgaaagcgtgccaggccacttcaggttggcccgtcgtttagcaactccccatcttcctcagggtgcccccacctctcctgctctcgctaacctggccgcccacgcattggataggcggctgaccggcctggctagagagattggtgctacatactcacggtacgccgacgatttggtcttgtcagctgatcaccatctccgaacaccacatgcagctgtgacagagttggcgcgggatgaaggcttcaccgtgaatcgggggaagaccagaaccatggggcggggttcccgccaagttgtcacaggcatcgttgtgaatgcccatccgaatgtcccccgcgctgagtacgatcggctaaaggcgatcatccaccggggcgactacgatcgcgagcatgtgttaggtcgcattgcctggatagcggccatcaaccccgctcgtgctgctaaactacgttcctctatgtga

SEQ ID NO: 12979 - RNA, 1386 nt, synthetic construct
  source 1..1386: mol_type = other RNA
atgaatcgggatgcggctggccatagggcaaccgctgcagacgtaagggctctgataccggtcctgcgtccatcccttagatcagtcgccggctccctcgccgatgctttacttgacggtgagtgggaagccgacgctatggtttctcgcgtgacagctgccctcgatcggcctggaagatgggtcagacagctggtgcggatcacccgtctgtcatttcccgtggcgccccatgacagtcccgaaagtcttcggcgagtgatcctggcaggccctccacttccccaggttgctgctgccgatgcccttgcaggcaggccactccctaccctggctagacgccccttaccagccagggtagtcgccctgcaagccggattgccacgatgggacggcgtaggggacttggcggcatacctgggcttgactgtgggagaactggcatggtttgcggatacgaggggctatgaggctcgagtgcgagcggagacactgcggcactaccgctaccgcctgctccagaagaggattggggggtgccgcctgattgagagccctaaatggcagctgagagagattcagcggagaatcctgcacgaggttctggaccagctgccggtgcacgatgctgcccatgggttcaggcctggcaggtcggttattgggtatgtggaaccgcatgccggccgcagagtggtcatccatctcgacctccgggactttttcgccagagttggagccggtcgagtgtggagcgtgtttcggtgggctggctatcctgatgcggtggcacacgtcctcacaggactgtgtaccaatgtttctccaactgccgttaggtctgacgtccgacgcactggggccttgagactagcagccgcatgtgggacagtgcacttgcctgctggtgcacctaccagccccgccttagcgaacctatgcgcctacgctctcgatcgccgccttgctggattagctcgtcgggtgagcatgcggtacacgaggtatgctgacgatcttgctttttccggaggacggtccttactgtggggcaccgacgccctcatcgaccgtattgcagcaatagccgcagccgagggattcccagtgaactcccaaaaaactgctgtgttgacagcatcaagacgtcagcgcctcgccggcgtagtggtcaacgatcaccccaacctggatcggcgcgagttcgacgccctaagggcaaccttgcacaattgtgtacacagcgggcccagttcacaaaacagggggagccaccaggatttcagagcccatctgactggtagagtctcttgggcctgcctgctcaatcccgccaagggtgccagattggaacgactactggaacagatcgactgggcaaggtga

SEQ ID NO: 12980 - RNA, 1365 nt, synthetic construct
  source 1..1365: mol_type = other RNA
atgaccagagaatctgcagcggtaactgtggctagggggctcgctcatgcgttcttggccggagactgggatccaccagccatggcctccaggggtcgtgaagccgtcgaaacaagacgggtgtgggtaagacacctcgccgatgcagctcggcacgcctatcctgacgctcccagagatcgaccccgagagctggctaccttcctgtctgtgtgcccacctctgacaaaagcaatagccgctgcaagaaggcgtagtgaggagccgccaacgatacgcaactggctggttgcagagacagccatgggacccgcaccttggccagtcgctaatctccacacgctgcgtgacctgcaggatctaatcggcatgagcaccgcaactctgaactggttcgccgacacgagaggtctggaacgcacagtggctgatgagcggctccggcactacagataccactgggctcctaagaggaacggcggcgccagactgatcgaagcgcctaagcctgtgctgaaacacttgcagcgggtgctcctgcgagaaattctggagccagttccggtacaccccgctgctcacgggtttaggcgcgatcgctcagccctgagccacgcaaatggccatatccagcgcaatgtggttatccgcgtcgatctggaggacttctttgcctctgtccgagccggtagggtgtacggcatttttaggggctgtggatatcctgagcccgtcgcccacgtgttgactgcgctgacaaccaatgctgtccccagggcagttagcgcccagacaggagctccatctgtggtggagagtaccgccgctttccgtcggttagccgggcatttagctcacccccatcttccgcagggcgctcctacaagtcccgctttggcgaacctcgcagcgttcgggcttgaccgcagacttgcaggcttggcatcggccgctgggcttacctacacccgctatgccgacgaccttgcattttcctcaattgacccccgtagcgaaggacagaatcggcgcctcgtggaatggatcactgggattgccgaggatgagggatttcgggttaacgtggccaaaacttccgtcagacacgcaggccagcggcaacgactagccggagtggtggtcaacgaacgagcaaatgtagagcgcagacaatatgacctgcttaaggccaccctccataacgccgctaggcatggtcctgcaggccagaataggactggacatccagccttcagggaccatctacgggggcggatctcatgggttaatcaactcaacccagcgcggggtgagagattactggccacctttgcccagattgactgggattccgccgataggtga

SEQ ID NO: 12981 - RNA, 975 nt, synthetic construct
  source 1..975: mol_type = other RNA
atgcctgcatggaacgtcgccgctatcgacagcttgcccgagctcgccgagcgattagagctgagtctggaacagcttcagtggctagccgatgtacggggtctggaacggtccgttaacagtgagcgactgcgtaatgatagatataggctgctgcctagagcttctggggtgccgcgggtgctcgagataccaaaggggcgcctcaaagaagtgcagcgctgggtccttcgggagatccttaaccaaattcctactcaccctgccgcgcatggcttcgttaggggctccagcgtcagaacgcatgcagaggtccacagcggccaggccatggtgttgggcctcgacttaaaagatttctttgctagcgtcaggcgcgcccaggtgaaggcaattttcagggctgctggtttcgagacagaggttgcacggaccctcgctggactctgcacaaacaccacacccagacacgtgggagcatcgcgcttgcttgccactcctcatctgccccaaggcgccccatcttcacccgctctggccaatttagcggccttcgcactcgatagacgcctgtccggtctagcatacgcccacgatctgctgtattctcggtatgcagacgaccttacctttagtggacccatgccaggtagagggaggcgacgatttctggtggccctggccaccgaaatcgcgagagatgaagggtttgcgattaatgaaaggaagactgctatgcatcctgccggaggccgccagcaggtttgtggagtggtggtgaatgcacgtccaaacgtgcccaggagagactacgaccggctcaaagcaacactgcacaatctggctgccgccgggccagtagacaggtcagaagctgccgcattagccgggcgtatcgcgtgggtagcttcattgaacccggcccggggcgctaaattgcgcgagaagtacgctaagatagagtggtccgaatga

SEQ ID NO: 12982 - RNA, 1323 nt, synthetic construct
  source 1..1323: mol_type = other RNA
atgcgcatcattgtggccgccttcctggacggatcttgggagccaactgcaatggctgcacgggcgcatcacgatctggggctcctgaccgtgaggcgggaaatcgactttggcgggaccgagccttacgtgtggctacatagagccgctgatctggttgccgatacctttgtagccccaccccggagtgagttgcgggcaatgcgggttctggtagctgagcacgctgccccagctattttacctctactcgaccaccctattgcggggccccatacagggactgcccttgtctcctccgctatgtcagaaccccggtggccggttgtgcatctggatacggttggagacgtcgccgctgcactggggttactgccgacacagctgtcgtggtttgccgacgttgcgagcctggagcagtcagtcacggacgaaagactgcgacactacaggtatcggtgggtagccaaaagcggatcaggccagcgcttagtcgaggcccccaagcagacacttcgcagagtccagcgatgggtcctccgccgtgtactgcacaacatccccgtgcaccctgcaacccatggcttcgtgcctgggagatctgtgcacacttatgtgggcccccatgtgggccggagagtcgtagtgagcttggatctccgaaacttctttaccagcgtggccgctggacgcgtcttcggtatatttcgggtcgccggatacgcagactctgtggcgcatactctcaccggattgatgacaaacgccgtgcccgcagacattcttcggggtcatccagatgcccccagggcgttgcgtttcccacaccttcctcaaggagcgccaaccagtccggccctcgcaaacctggccgctttttctctcgacaggagactgagcggtctagccacagcgatggatttgaggtatactcgctatgccgatgacctggctttctccagtgctggcggcttgagtcgaagggcaaggcgcagacttgtggtgacagttgaggaaatcgccagggctgaaggttttgacgtgaatcgtgctaagactagagcagctaccgccgggcgacagcaaaggctggcaggtagggttgtgaacgccgtggataatgctcctcgccgcgactacgacagactcagagccgttctgcacgacgcaagcatcaatggcccagtggcagccaatagggaaggccaccctgccttcgaggcacaccttcggggacgtatccactgggtcgcttccgattcacccgctcgccaaagacgactctggcagctgttcgatcagatagattggtccgagggctga

SEQ ID NO: 12983 - RNA, 1311 nt, synthetic construct
  source 1..1311: mol_type = other RNA
atgcggccggaattagcacgcgcccttgcagccggctttcttgctggcgagtggacaagagctggtctgaccgcctctggcgcagtggtgctcggaagacggcctagatggcttgcgccactcgtgcggcagactttggacctgtacccaagacctccaggcgatcggcccagggaactggctacaaacctggcgaggctcccagctgcagagaaagctgctctggccggtccacaggttcatcccgtggctgaaactcacatgattgccaatcgctggcggcttcccgagttagaccggctcgcagatctggcttcctatctgagagtgacagacggggagctcgattggttcgccgatcctcggcacctcgctaggctaacggtgcagccgcctctgcagcactatcgtgtgagtcacagggttgccgcctccggcggaatacgcgtcttggaggccccaaagccccgcttgagggccatccagagacgcctgctggatgagcttgcttcccgcattccccctcatgacgcagccagagggttcagacccggagggtctgtaagggcgtacgctgcacctcacgctggaaggtcagttgttctccgcatggacctcgaagctttctttgcgagcgtcaccgtgtcacgcgtttacgggatctggagaacagcaggctaccctgaacccgtagcccacgccctagctggcctggtaaccagcgtgctgccactagcctcctggcgagccatacccactcctgtcgacgaaggcttgctggatgctcactggcgcctcggcagacgattagccaggcctcatttaccccagggagcacctacatcacccgcaatggcaaacctggctgcctaccacctggacgtcagactttctgctttggcccgtagctggggcgggaggtatactcggtatgccgatgacctggccttttcgggtgcgacgggatggggaaccggtaccagtcggctgctcgacgcggtagagcgtatcgtcgtggatgaggggttccgcttgaacccgcgtaagaccggcgtgatgccacgagccggtagacaatccctggggggactggtggttaatgaaaggccacgagtgagccgagcagacgtcgatcggctgaaagccattctgcataactgccgagtgcatggaccgtctagtcagaatcgggatgatcatcccgcctttgaggaacacctcagggggagagtcgcatgggtggcccaacatgaccggcttcgtggcgccaggctattggcgatgcacgcagagatcgactggagccgctga

SEQ ID NO: 12984 - RNA, 1311 nt, synthetic construct
  source 1..1311: mol_type = other RNA
atgaggcctgagctcgctcgcgctttagcagccgggtttgttgcaggcgaatggacgaggccaggccttgaagcctcaggtgccgtggtcttaggtagacgtccgcggtggttggcaccccttgttcggcaggtgctggaactctatcctcgcgctcccgtagataggccccgagagctggccaccaacatcgcctctagaccagccgccgcaaaagcactgagggcacgggctgtggtactgccaatagctgagactcggatgctggctaacaggtggaggttgcccgtcctggatgatctcggcgacttagccgcattcctcggtaccagccccgctgaattggattggttcgcggatccccggcgtctggcacgtttgacaaagcaggcccccctacagcactaccgcgtaagccacttggtcgccgccagtggaggaatccgcgtgcttgaagccccgaaaccacgtctcaaggccatacagagacgtctactgcacgaagtcgcgtcactggtgccgccacatgatgccgcacgagggttcagaccagggggttcagtccggtcttacgccgcccctcatgcagggaggtctgtcgttctacatctggacctggaggctttctttgcctccgtgacagtaagcagagtctatggaatttggagatcggccggttacccagagcctgtggctcacgctctggcaggcctggtgactgcagtgttaccgctggccgcttggagagcaatccctgcacctgctgacgatggcctcctggacgctcactggagacttggccgacgactcgcggctccacatctgcctcaaggagcccccacttcccccgctatggccaatcttgccgcttttggactcgacgtccgcctgacagcccttgcaaggtcatggggggggcggtacactcgctatgcagacgaccttgccttttctggagagaggggatggggcaccgggaccagtagactgatcgacgcggttgaacggattgtggtggacgaggggttcagactgaacccccggaagacaggcgtcatgccaagggctggtaggcaagctctcgccggcctagtggtgaacgagcgacctcgggtgtccaggcgcgatgtggatctgctgcgggcgatcctgcacaattgcctggtgcatggacctagttcccagaatcgcgacgatctccctgcttttgaggaacatcttcgcggccgcattgcgtgggttgcgcaacacgacaccttgagaggcgcccggctcttggccgttcacagagagattgactggagccgatga

SEQ ID NO: 12985 - RNA, 1050 nt, synthetic construct
  source 1..1050: mol_type = other RNA
atgcttaccaatcgctggagactccctgaactgcatgaccccgctgatctggcggaactggtcggcatcacaacaagcgagctggattggtttgcggatcctcgccgcttagcccggagtgctggcgatgtgccactgcagcactaccgagtcgggcatcgtaccgcagcaagcggtggcattcgggtactcgaggctcccaaaccccggcttcggcgaatccagcggcagatcctcgatgaggtggcctctctgatacctccacatgacgcggcaagaggatttcggcccggcggatcagttcgctcctatgcagctccgcatgctgggaggcctgttgtaatcaggctggaccttgaggccttcttcgcttccgttaccgtggctagggtttatgggatttggcgctctgctgggtacccagagcccgttgcccacctgttagccggactcgtcacctccgtgctacctaggagtgcctggaggggggtaccaagacccgcagacgaacgtctgctcgatgcccactggcgacttgggaggcgcttagcagccagccatctgccacagggtgcacccacatctccggctatggccaaccttgctgccttcggtctagatgtgagactgacagcacttgcccgttcctgggggggtagatacacgagatatgccgacgacctcgccttttctggcgcagcgggatggggatcaggcacttccagattgttggacgccgtggaaacgatcgtgcgcgacgagggcttcactttgaacgctcgcaagactggcgtcatgccacgaggaggtaggcaaaccctggggggactggtcgtgaatgaacgacctagagtgagtaggcacgacgtggacttgttgagggccattctgcataattgccaccggcatggaccttcgtcacagaaccggcacgacgtccccgcctttgaggaacacctgcggggcagaatagcttgggtggcccaacacgatccagtcaggggcgcacgtctcttggcggtgcacgagagcgtggattggagcagatga

SEQ ID NO: 12986 - RNA, 1311 nt, synthetic construct
  source 1..1311: mol_type = other RNA
atgagagctgacttagccagggcccttgcagcgggatttctcgctggggaatggacacgccccggccttgtggagtcaggttccgttgttcttgggcggcggcccaggtggttagcacctttggctaggcagacaattgatctgtaccctcgtcctccacatgataggccccgcgagctcgcagcgtcaattagtgctcgtccggctgccgccaaagcagcaggtgtacggcccctcgtccaacccgttagcccgacacggatgatgactaatcgctggaggctgccagtgcttgatggcctgggagacttggccgacctgttagggctgacttcctctgaactcgactggtttgccgatccaaggcatctggccagaaccgctgcagacggccgactacagcactatcttgtgagccatagagtggccgcctccggcggaatccgcgttttagaggcgccgaagcgccgccttaagggcatccagcgggtgctactggatgaagtcgcttccctaattcctccacatgacgccgctagaggcttccgtcccggaggtagtgtacggtcctatgccgcacctcatgccggaaggcccgtggtagtgagactggacctggaggctttcttcgcctcagtgactgtgagccggatctatggcctgtggagatctgcagggtaccctgagccggtggctcactgtctggcagggctgaccacgaccgtgctgccacacgcagcttggcgagcagttcccaggccagcagacgatgatctgttagacgcccactggcggttggggaggcgtttagctgctcctcacttgccacagggtgctcccacttcgccagctatggcgaacctggcagccttcggactggacgttcggttaaccgccctcgctgaaagttggggcggtcgctacacacgatacgcggacgatctggccttttctggagccaggtcttggggcaccgggacaagcaggttgctcgaggtgatcgaagagattgtccgagatgaggggtttcggctcaacacacgaaaaactggtgtcatgccccgggccggaagacaagccttaggaggcctggtggtgaatgaacaacctagagtcgcccgaagggaggtcgacttactccgcgcgatcctccacaactgccgcagacacgggcctagcacccagaatcgcgacggagtccctgcctatgaacagcacctgagaggccgtatagcgtgggtggcccagcacgatccagtaagaggcgcccggctgctgaccgaacatgaggcaatagattggacgagatga

SEQ ID NO: 12987 - RNA, 1311 nt, synthetic construct
  source 1..1311: mol_type = other RNA
atgcgcagtgatctagcacgcgcactcgccgctgcttttcttgccggggagtggacccaaccaggactggtcgcctccggcactactgtgcttggtagacgggccagatggctccctcccctggtaagacagaccctggctctgtatccacgggctcccgttgatcgtccccgggaattagcagctaatctggcttctcgccctgctgcagccaaagctttgagggccgttcccttggtacgccctgtggtcgcgacccagatgcttaccaaccgatggaggctcccggtgttagacgatttggccgacgtggccagcttcctgcatctgtctgcctccgacctagactggttcgccgacccacgtcaccttgcaaggagtgcgtcagatgtgcccctacagcattaccgggtcagtcatagggtggcttcttcaggggcgattcgcgtccttgaagccccaaagccacgcctgaaagccgtgcagcgcagactgctgcacgagctcgcagccctgattcccccacacgatgcggcacggggctttcgtccaggaggttctgtgagatcgtacgccgcacctcacgctgatcgatccgtggtgttgagactggatctggaggccttcttcgcatccgtgactgtcagcagggtgtatggcatttggcgaacggcaggataccccgagcctgtcgctcactgtctggctgggctggtgacaagcgtgctacccctttctgcatggagagctgttccgacgccggcggatgacggtatgcttgacgctcactggcgcttaggcagaaggctcgcagctcctcatctcccgcaaggtgccccaacttcacctgcgatggccaatctcgccgcctttaggctggacgtgaggctcactgcactcgccagatcatgggggggacgatacacacgatatgctgatgacctcgccttcagtggggaacggggatggggaaccggaacaagccggttgatagacgccataggctccatcgtcgccgacgagggctttaggctgaacgcacggaagaccggcgttatgcctagagccgggcgccaaacattagggggcctggtcgtgaacgaaagaccaaaggttgcgcgtcatcaggtagacctgttgcgggctatcctgcacaattgccataggcacggccccagcacacagaaccacgacgatgtccctgcctttgaggaacacctgaggggccggatcgcttgggtggcacagcatgatcccgtacgcggacgacggttgcaggccgttcatgataccatcgactggagcagatga

SEQ ID NO: 12988 - RNA, 1311 nt, synthetic construct
  source 1..1311: mol_type = other RNA
atgagggtggacttggctcgcgcgttggcagcaggctttctggacggagagtggacacagcaaggcctgctagccagcgggaccgctgtcttaggtagacgcccccaatggctggctcctctagcccgacagacccttgccctgtatcctcgtgcacctgtcgaccgccctagggagcttgcgaccaacataagtagtaggcccgcagcagcaagagcaagatcggcagccccccaggtgcaacctgtggtagctaccaggatgctggggaacaggtggcggctgccagtacttgacggactgggcgacgtggccgattttttgggtgtcagcgcatcagagttagactggttcgccgatcctcggcacttagcacgtgggactgctggggtgccgttgcagcattaccgcgtgagccatagagtggccgctagcggcgcgattcgagtgctcgaggctccaaaggccaggctgaaagtaatccagcgacggcttctgcgggagattgcgagtatgatcccaccacacgacgctgcatgtgggttcagacccggcggttctgtacgagcttacgccgcaccccacgccgataggtccgttgttctgcgcctcgacctggaagccttttttgcctccgtcaccgtctcccgggtgtatggcatttggagaacagcgggatacccagaacccgtggcccattgtctggccggattggttacctccgtgcttccgcggtcaacatggcgcgctgtcccacaacccagggacgatcggctcctcgacgcccattggcgcttgggaaggcgacttgccgcaccacacctccctcaaggagcaccgacgtctcccgctatggccaatctggccgctttccggctggatgtccgtctcactgctctcgccaggagctggggaggcaggtatacacgctacgccgatgacctcgcattctctggcgctgctgggtggggaagtggaacgtcccggctgatcgatgccgtcgagacagtggtgcgggatgaaggttttcggctgaatcccagaaagactggcgtgatgcctagagccggccgtcagtcacttggcggtctagtggttaacgactctccaagagttgcccgccaccaggtggaccttctgagagccatcctgcacaattgccaccggttcgggcctagcactcagaacagagacgatgttcccgccttcgaagatcacctgcgaggccgcatagcctgggttgctcagcatgacccagtgagaggggcgaggctccaggctgtccatgatgcgatcgattggtcacgttga

SEQ ID NO: 12989 - RNA, 1311 nt, synthetic construct
  source 1..1311: mol_type = other RNA
atgcgcgatgatctcgcccgtgccctcgctagcggcttcttagcaggagaatggacccaggacgcactggttgcctcaggcaccgtcgtgctagggagacggcacccttggcttcctcctctggtccggcgcgtgctgacagcttatccgcgaccccctgccgatcgaccaagagagttggccgcagtgatagctgcactgccagcagcagcaagagccaggaatgccgccccagtggtgcacccagttgctgagacgcggatgctgaccaatcgttggcgtctgcccgtattagatgggctggacgacgtggccgcttttctacgcctggagcctagcgaactcgactggttcgccgacccacggaggttggcaagatccgcctccgacgtgcccctgcagcactatagggttagtcatcgggtaactccttctggcgccattcgcgtcctggaggctcccaagccaaggctgaaggctctgcagcgccgggtgctaacagaagtcgccagccttattccccctcacgatgccgctacaggatttcggccaggtggctcaatcagacgttacaccgccccccacgcaggcaggtctattgtgctccgcttggatttggaggctttctttgcaaccgtttctgtgtcccgagtctacgggatctggcggactgccggctaccctgaacccgtagcgcactgtctggcgggactcgtgacttgcgtcctacccaggtctgcttggagggccgtaccaagaccggctgatgagagattgctcgacgctcattggcgacttggtcgcaggcttgctgcaccccatttaccccaaggcgcccccacaagccctgcaatggcgaaccttgccgctttccgactggatgtgagactgtcagcgctggcaagaagctggggtggcgggtacacccggtatgctgacgacctggcgttttccggtgacgccggttggggcactgggactagtcggctgctggatgcagttgaagccatcgtcagggacgagggatttcggttgaatcagagaaaaacgggagtcatgccgcgcgctggaagacaggtactcggaggccttgtggtgaacgagcaccctagggtggcacgccatcaggtggatctcttacgggccatactccataactgcaggcgcttcgggccaagttcccagaaccgtgatgatgtgccggcgttcgaagaccacctgagggggagaatcgcctgggttgcgcaacacgacccagttcgaggagcccgcctccaagccgtgcatgacgctgtcgactggtcgaggtga

SEQ ID NO: 12990 - RNA, 1311 nt, synthetic construct
  source 1..1311: mol_type = other RNA
atgagtccagatctggccagagcccttgccgctgcattcctagggggcgaatggaccgaaccagggttggtggcctcaggggcaggtcttctgggtagacgtccggcatggttgcgcccactggctaggcagaccttagccctgtaccctcgacctccccttgataggccccgcgaactggcgacgaacgtggctagtcgccctgctgcagctagagccggagctgctgctcccttagcccagcctgtcgctcagacacgcatggtggcgaaccggtggagactcccagaactggacactctcgccgaccttgccggattcctggggctcaccgcgactgagctcgactggttctctgatccccggcggttagcacgagacgcttccgcagtccccctgcagcactaccggattagccacaggccagccccatccggagccataagagtcctggaggcccccaagcccaggcttaaagcgttgcaacggcggttactgcgagaactcgctgggcgcattcccccccatgatgctgcacgtggctttcgacccggcggttccgttcgcagttacgcagcccctcatgccggcagatccgtggtgctacggctggacctcgaagctttcttcgcctcggtcacggtgtctagagtctatggcatctggaggtcagccggctacccggaaccggtagcacacgcactggctgggttggtcacaacagtgttgcctagagctgcttggcgctctgtgccacgtccagccgatgacagcctgctcgacgcgcattggaggctgggcagacgactggcagcacctcacttgccgcaaggagcccctaccagccctgccatggccaatcttgccgcattcgggctggacgtgcggcttaccgctctagccaggtcatggggaggccggtatacacggtatgcggatgacctcgcatttagcggcgagaggggctggggaacagggacttcccgcttgctcgacgccgtggaggtcgttgtgcgggatgagggctttcgcctgaaccccagaaagactggagtgatgccaagagctggcagacagcgtctagcgggtctggttgttaatgatgccccaagggtagctcgggaggaggtggatctgctgagggcgatcctgcacaactgcgccaggtttggaccttctacccagaatcgcgcaggggttgtagcctttgaggaccatctgcgcggtaggatcgtgtgggtggcccagcacgatcccgttcgaggagccaggctcctcgaggcacatcgtgccgtagactggagcagatga

SEQ ID NO: 12991 - RNA, 1311 nt, synthetic construct
  source 1..1311: mol_type = other RNA
atgaggcccgaccttgcgcgtgccttgagcagtgccttcctcgctggcgagtggacacgagccggcatggtggaatctggcgctgttgttgtcggccgaagggcccgttggcttggtccacttgccaggcaggtcctggaactatatcctagagcccctttggatcgcccccgggagttagccactaatctggctcggtgtcccgcagcaacaagggccctggcatcaggcccaatggtccacccagtggccgtgactcggatgatgaccaaccgctggaggttgcctgtgctccacgatctagatgatctggctaccctgctggacttggaccaagctgccctggcctggtttgccgatccacgccatctggcacgaggggcaacagaagcacccctgcagcattaccgtgtgtcacaccgaccagccccatccggagccattcgagtcctggaagctccgaagccgcggctgaagagaatccagcgccgtttgcttgacgagctggcaggtagaatacctccccacgaggctgcccggggatttaggcctggagggtccgtagccagctatgcggctcctcacgccggacgaccagtagtgctccgcctggatctcgaggcattctttgcctccgtgactgtgagccgcgtctacggcacctggagatctgccggctacccggaacccgtagctcatgccctggcagggttggtgactactgtgttacccgcttccgcctggcgggcagttccaacaccctctgcggaccatctcctggatgctcactggcgcctcggacggagactcgctcttccacatcttcctcagggggcacctacatctcccgctgttgccaacctcgccgctttcggcctggacgtcagactgaccgcattagctgctagctgggggggcaggtacacgaggtatgcggacgacctcgccttttccggggataggggttggggacggggaaccagtcggctgatcgatgctattgagacggtagtgcgggatgagggcttccgcctaaatgcgagaaaaaccggggtgatgcccagagcaggcaggcagagattggcaggacttgtggtgaatgaccgaccgcgcgtcgcaaggagcgaggttgatctgctcagggctattctgcataactgcaggcggcacggtcctagttcacagaacagagatgacttacaggcatgggaagcgcacctacgcgggagaatcgcctgggtggcccaacatgaccctgctagaggtgcgcggctgcaagaggttcacgacgccatcgactggtcgcgttga

SEQ ID NO: 12992 - RNA, 1311 nt, synthetic construct
  source 1..1311: mol_type = other RNA
atgcgcgccgatcttgcccgggcattagcctccggcttcttggccgatgagtggacacagcccgccttagtggcttctggccgtactgttttggggaggcgtcccgcctggttaacccccttggtcagacaggtgctcgaactgtaccccagagctccagctgacaggccaagagagctggccgctaatatcgcggcttgtccagcagcaactcgcgctgggcaggcaggtcctgtagtgcatccggtggcacggacacagatggtagcgaacagatggcgcctgccggtgctagaccgcttggatgatgtggccacgtttctggacgtcagccacaccgacctggactggtttgccgatccgcgacgccttgcaaggtctgcttcagacgctcctctgcagcattaccgggtttcacaccgtcccgctccttctggcgccgtacgagtgctggaagctcctaaaccccggctgaaggtgatccaacggcggctgctcgatgaggtggcaggccttatcccacctcatgaagccgctagggggttccgcagcggaggtagtgtgagatcgtatgcagccccacacgccggtcgacctcttgtgctccggctggacctggaggccttttttgctagcgtcacagtgagcagagtgtacggaatatggcgcacagcaggctatcccgagcctgtcgcacattgtctcgccggcctggtcacatgcgtgctccctaggagtgcatggagggcagttcctgccccaactgacgacgggctacttgatgcccactggcggctgggaagaagactcgctgcaccacacttaccccaaggagctcccacctccccagccatggcaaatctggccgctttccggctcgacgtccgtttgactgcccttgcgcaaagctggggggggaggtataccaggtacgccgacgacctggccttcagtggtgatgccgggtggggaagaggcacgtccagactcattgatgctataggactgattgtgcgagacgaagggttcggcctgaacgccagaaagaccggagtaatgccaagggccggtcgccagaggttagctggcctagttgtcaacgatgagccccgcgtcgcgagaggagaggttgatctcctgcgcgcgatcttgcacaattgccggacccatggaccttcctcacagaaccgagatgacgtgcccgcatgggaagagcatctgcggggcaggattgcgtgggtggctcagcacgacccagtccgaggtgctcgtctacgggccgttcacgacgcggttgattggtctaggtga

SEQ ID NO: 12993 - RNA, 1311 nt, synthetic construct
  source 1..1311: mol_type = other RNA
atgcgagccgacctggccagagctttggctgctgggtttctcgctggcgaatggactaggaatgggctcgtggcctctggggcagttgttctcgggcgacggactgcctggctgaggacattggccacccaggccttggagctttacccacggccccctcatgatagaccgcgagaactcgccgtcatcctgaggagccttcctgccgccgagaaggccgttgctgtgggtccagtgacccaacccgtcgctcctacccgcatggtcaccaacagatgggctctgccccagctcgacgaccttgccagcgtagctgcattcttggatgtgacggcggccgaactggactggtttgcagacccaagaaggtgggccagagctgccgaagaaccccggttgcagcattatcgggtaagccaccgcacagcaccatccggcgcaatcagagtgctggaggcacccaaaccacgcctacgggcaattcagaggttactgctggatcaggtcgtctcaagaatccctccacacgatgcagcacgtggatttaggccaggcggcagtgtgcggtcatatgctgtgccccacgccggacggcctatagtgttacggctcgacctggaagcgttctttgcctcggtttccgtctcccgcgtctatggcatctggaggaccgccggctatcctgagccagtggcacactgcttagctggcctaacaacctgtgtcctgccgcgtagtgcgtggagagctgtaccaaggccgggtgaggatgaactcctggacgcccactggcgattgggaaggcgcttggcggctcctcatcttccccaaggagcgcctacttctcctgcactggctaacctcactgcctacgggttagatgtgcggctcacagctctggcaagaagctggggcggacgttacaccaggtacgccgatgacctggccttctctggagaggcaggttgggggcatgggacatctcgcctgctggatgcaattgaggagattgtgcgtgacgagggcttccgcctgaatccaaggaagacgggcgtgatgcccagaggtggtaggcaacgccttgccggactggtggtaaatgagcggccccgagttccgcgcgaagaggttgacctcctgagagcgatactgcacaactgcagacggcacgggccctccactcagaaccgagatcaggtgcccgctttcgaggagcacctgcgtggacgcgtgtcatgggtggctcagcatgatcctgtcaggggcgcccggcttctagcggaacttgacgccatcgactggagtcgctga

SEQ ID NO: 12994 - RNA, 1311 nt, synthetic construct
  source 1..1311: mol_type = other RNA
atgagagacgaccttgctcgtgcactagcggccggctttctggccggagattggactgctaccgggctacgagcatcaggtgctggtgttctcggcagacgccctcgctggttagcccctctcgtgcagcagacactcgacttgtatccccgccctccacacgatcgtcctagggaactcgccaccaatttggcagggcttcccgcggcggctaaagccttgagaaccaggcccgtggcacaacccgtggcacctacacggatgttagccaaccggtggcggctcccagttctggatgacctcggcgacctggccgatctcttgggagtcaccgctacggagcttgattggttcgcagatccgcgacatcttgctcggagcgctgcagacgtaccgctgcagcactaccgggtgagccatcgcattgcacccagcggagccgtaagggtgcttgaagcgccgaagccacgcctcaaggcggttcagagactcttgctggatgaggtcttgtccagggtgccaccacacgatgctgccaggggctttaggcccggagggtcagttgcttcttatgccgctccccatgcaggccggccagtagtagtgaggctggatctggaggccttctttgcgtctgttaccgtctcccgagtgtacgggatttggcggacagcaggctatccagagccggtcgcccataggttggccggtctggtgacagccgtgctgccaagaagcgcctggagggctgtccctagacctgctggtgacgggctgctggatgcccactggcgtttaggtcggcgactggcggcacctcatctgcctcaaggcgctcccacaagtcccgctgtcgcaaatcttgcagccttccggctggatgtgcgcctcagtgccttagcccgctcttgggggggaaggtacacccgttacgccgacgatctggcattctcgggtgctaccggttggggcactggcacttctagactgctggacgccatcgaggagatagtccgcgacgagggctttcggctcaacgccagaaaaacgggagtgatgcccagagccgggcggcaaactctaggagggctggtggtcaacgaccggcctagagtcgcccgagcagaagttgaccgccttcgtgccatccttcacaactgcaggcgaagtggagcttcctcccagaatagagacggcgttcccgcttgggaacagcatctgcgcggtcgaatcgcctgggtggcacagcacgacccagtgaggggagccagactgctggctgaacacgacgctgtggattggtcacgctga

SEQ ID NO: 12995 - RNA, 1305 nt, synthetic construct
  source 1..1305: mol_type = other RNA
atgcgagatgacctcgcccacgcactcgctgcaggattactcgcaggcagctggactcaacgcggcctcgtggcttccggtgctgaggttcttggaagccgccgccggtggttagacaggctcgctaggcacactctggaactgtaccccaggccccccttggaccgtccaagagagctggccagaatcgtcgcggcttttgttgacgcagatgcagccgcacggcctgctaccagacctgtagtgggtacaaggatgctgacaaaccggtggggcctgccaactctgcacgacctgaatgatctcgccgggtggctcggactgacctcttccgaactagaatggtacgctgatccccgtaggctagctcgcaccacaagccaggggagactgcagcactatcgcgtgtctcacagggtcgcctccagcggagcgattcgggtgttagaggcccctaagctggaactgaagggcattcagcgacgactgctggatgaggttctcagtagcgtgccaccccatgaggcagctagggggttcaggccaggtggcagtgtgcgcacttacgccttgcctcacgcgggacgtcccgttgtgcttcggctcgatcttgagtcattctttgcctcagtgaccgtagcccgagtgtatgggatatggaggtccgccggatacccagagccagtcgcacatagactgtctgggctggtgacctctgtcctgcctctctcattgtggcggagcgtaccaaggcccgccgatgatgccctgcttgacgcacattggagactgggacgaaggttggcggctccacatttgcctcagggtgccccgacaagccccgcattagccaatctagccgcctttcgactagacgtcaggctttccgctcttgctgcctcatggggagggcggtatacccgctatgctgacgacctggcctttagtgggggccggagttgggggacaggaacttcgcgcctgcttgatgccatcgaaggcgtcgttcgggacgagggcttccggttaaatcagagaaaaacaggagtgatgccacggggcggcagacaggtattaggcggcctggttgtgaacgaacgtccgcgtgtgtcccgggcagaagtggatagactgcgcgccatcctccataactgcctgacgcatggtccttcaacccaaaacagagagaggcaccctgccttcgcccagcacttgcgaggtcgcattacgtgggtggctcagcatgaccctgtcagaggggcacgcttgctcgcgcaacacgatgcggtcgactggtctagatga

SEQ ID NO: 12996 - RNA, 1311 nt, synthetic construct
  source 1..1311: mol_type = other RNA
atgagagcggatttagccagagccctcgcggccgcatttttggccggagaatggacacagagcgccatggtacagggcggggcagttgtcctaggcagccgaagaagatggcttacgcccttggcccgccaagtcctggacctgtatccgcggcctcctcttgacagaccccgagaactggcaacactgattagtactcgccctgcagtggctcggaccggtaatgccaggcccgttgtgcagccagttgtagcgacacgcatggtgagaaacccatggcgtcttcccgcactcgacgatcttggcgatctggctcaccacctgggtgtcgaaggctccgagctcgcctggtttgctgacccccgtcgatgggcgagaggaacatccgaagggagactccagcattaccgtgtgagccatagggttgcaccttccggagcaatccgcgtgttggaggccccaaagcccagggtccgcaggatacagagaagcctgctggacgacctagtgtcgcgggttcccctccatgatgctgcgaggggctttaggaccggcggcagtgtgcggagttatgctgctccacacgcgggtcgaccagtcgtgctgcgacttgatctggaggctttcttcgcatcagtgactgtcgccagggtgtatggcatttggcgttctgctggctacccggagcctgtcgctcactgcttagccggtctgaccacctctgttctcccgcgcagcgtatggcaagctgtgcctggacccgccgacgatggactgagagaagcacactggagactagggcgcaggttagccgcccctcatttacctcagggggcacccacttctccagccctcgctaatctcgcagcctaccggctcgacgtgagacttgccgctttagctcggtcttgggggggacgttatacccggtacgccgatgacctggctttctcaggggagcgggattggggagatggtacggcccgcctgatcgctgccattgatgtcgtagcaagggatgagggcttccgcctgaatccacggaaaacagccgtgatgcggaggggagatcgccaacggcttggagggttggtcgtgaaccgacggccccatgtagggcgaactgaggtggacctgttgcgcgctatcctgcacaactgtcggcgccacggcccatcatcccagaacagagagggccacccagcgtttgaagagcacctaagggggagggtggcatgggtggcccatcatgaccctgccagaggtgccaggttgagggctgccctggacgcagttgactggacccgttga

SEQ ID NO: 12997 - RNA, 1050 nt, synthetic construct
  source 1..1050: mol_type = other RNA
atgctgactaaccgctggaggctgcccgttctgcacgacttagccgatctggccgctttgctggagctagacgccggggagctcgattggtttgcggatcccaagcattgggccaggactgctggcgaagcacccttgcagcactatcgagtctctcacagggtggccgccagtggtggcatacgcgttctggaagcaccaaaaccgcgtctgcgccgcttgcaaaggcggttgttggacgaggccctcggtctggtgccacctcacgatgctgcaagggggtttcgagctgggggcagcgttggaagccatgccgctccacacgctggacgacctgttgtgctgcgcctggacctcgagtctttttttgcctccgtgacagtaggccgggtgcatgggatctggagaaccgcgggctaccctgaacctgttgcccatgccctggccggcttaactaccgccgtacttccccttgccgcttggcgtggagtaccccgacctgcagacccaggcctcctcgatgcccattggcggttagggagacgactagctgccccgcacttacctcagggcgcaccaaccagtccagccacagcaaacctggctgcgttcgggctggatgtccgccttacagcgcttgctgcggcatggggtggacgttacacacggtatgccgacgacctggccttctccggagatgctggttggggcagaggaacgagcagactgctcgacgcagtggaagagattgtgcgcgacgagggcttcagactcaacccccgcaagacggcagtcatgccaagagctggacggcagtcactggccgggctagtggtcaatgacaggcccagggtggctaggcatgaggtggacctgctcagagctattctccacaattgccggcggcacggaccctcaacccagaatagagatcaggtccctgccttcgcagagcacctacggggtcggatcgcatgggtggcgcaacatgatccggcacgtggggccaggcttctggcagaacacggtgctatcgattggaccagatga

SEQ ID NO: 12998 - RNA, 1311 nt, synthetic construct
  source 1..1311: mol_type = other RNA
atgagagaggatctggctagagccctggcagcgggattcctcgcaggtgcatgggaccgggatgggttactggcatcaggacggggggttctgggtagaaggcctgcctggcttcgccctcttgttcgcgatgtgctcctgcactacccacgccccccacacgatcgtccaagagaactggccaccgtgatcggcgcctttctggctgccgatcggagctacgctgacgcacccgctcatcgaccgttggcccctaccagaatgctcgctaaccggtggggtgtacccgcccttcacgaccttgccgacctcgcagacttgcttgatctcgacaccggcgagctggattggttcgccgatcctaaaagatgggcccggcggaccagtgaaccaaggctacagcactacagggtgtctcaccgtgtggtggcgacaggagccgtgcgagtccttgaagcccccaaacaccggctcaaggtgttgcagcgcagactcctggacgaagtcctcgctgtcgtaccgccgcatgacgctgctcgcggatttcgcccaggtggctcagttaggaggcacgccgccccacatgcggatcgatctgtggtcgtcaggttggacctggagagcttctttgcgagtgtgactgtgggcagggtgttcgggacttggaggacagtcgggtaccccgaacccgttgctcacgcattggccggccttactactacggttctgcctcatgctgcatggagggccgtgcccagacctgctcctgaacacttgctggacgcacactggcgattaggtcgccggttagccgcgccacatttgccccaaggagcaccaacatcccccgccctcgccaatctggccgcatatagactggacgtacgcctgtccgctctagctcgtgcttggggaggccgatatacgcgctatgcggacgatctggccttttccggggatagaggctggggccgcggaacaagcagactgctggacgccattgaggaggtggtcgtggacgagggattccgggttcaccctaggaagaccgcagttatgcctagggcaggtaggcaggtcttaggggggctcgtagtgaacgaccgtcccagagtgccaagggcagaggtagatcgtttacgggccatactgcacaattgccgcctgcatggcccggcctctcaagacagggacgggcatcccgcgtttgccgctcatctgcgaggccgaatcgcatgggtcgctcagcatgatcctgctcggggcgagagactcctagccgcatgggagtcggtggattggacccggtga

SEQ ID NO: 12999 - RNA, 1311 nt, synthetic construct
  source 1..1311: mol_type = other RNA
atgaggccagaagttgcagcggcgttaggcgctggcttcctcggaggagagtggaccgaggacgggctcctagcaagcggagctagggtgattgggcgcagacctcagtggcttagacagctggcagcccaggtcgttgctgcctacccagacgcaccccgagataggcctcgggagcttgccgctgcagtagcctcactaccagccgctgcaaaagcccggcgtacaagggcccttcgctggactccaacacccacagccatgggtcgtaaccgctgggcactccccgttttggacgggctagatgacctggctgccctgctggacgtgacccaagcggagctggattggttcgccgatcctaaacgatgggctcgagaggctgccgtagcccctttgcagcactacagggtggcacatcgggtggcgagttccggagccataagagtcctcgaagcccccaagcctcggctgaagcggatccagaggctgctgttggacgaggtcctcgatcggatcccccctcacgacgctgctagaggctttcgccccggtggctctgtagccagatatgcagccccacacgcaggtagggctaccgtgttgcacctggacctggaggcatttttcgcctctgtgacggtgggccgtgtttatggggtctggcggactgcaggctacccggaacctgtcgcccatctgctcgctgggctaactaccaccgtgctcccacgtgcggcctggagaacactgcctcgcccagcagaccccggattacacgacgcccactggcggcttggtagaaggctggctgcaccccatcttccacagggagccccaacttcccccgccttagccaacctggccgcctatcgtctggatctgcgcctgacagcgttggccgaagcttggggcggtcgctatactagatacgctgacgacctcgctcttagtagcgatcgaggctggggagctgggacctcacggttggtcaccgccgtgaccgaagtagtccgggatgagggctttagattgaatccgctgaagacagctgttatgcgacgaggagagcgccagcaccttgctggcctggtggtgaatgaacacccccgcgttgctagagccgaggtggatcggctcagggcaattctccacaattgcagggtgcatgggccgagcacgcaaaaccgagccgcagtgccggccttcgcagaacatctgaggggccgcgtggcttgggtggctcaacatgatcctgcgcggggggagaggctgttagaagcgtggagagccgtcgattgggagagatga

SEQ ID NO: 13000 - RNA, 1311 nt, synthetic construct
  source 1..1311: mol_type = other RNA
atgcgtccagatctggctagggccctagccgcaggactactcgcaggagaatggactcctgccggcttagtcgagtcgggctcaacagttcttgggagaaggagacgatggcttacccccctggcccgtcaagcgttagagctgtatcctagacccccccatgatcggcctcgagaactggccgcagtgctggctggtcttcctgcagcaggtcgtgccgctgccgatcgacctgtttcacgacctttgagtgggacccggatgttggccaatccctggaggctccccgcgttagatggcctcgacgacctggctcgccatctcgacttgactccaggggagctcgactggttcgctgacccgagacggctggcacgcagaacctctgaaccccgactgcagcactaccgggtcagccatagggtcgctccatccggggccattcgggtgttagaggcccccaagccaagaacgaaggctctgcagcgcctgctgctcgatgacgtagtgagcagaattgccccgcatgacgccgccagaggatttcgcagggggggaagcgttggcagttacgccgctcctcatgctggcaggccagtggtgttgcgcctcgatttggaatccttctttgccagcgtgactgtggcacgggtttacggcatctggcgctctgctggttaccctgagcccgtcgcgcatgcactagcaggccttaccactactgtgctcccacacgcagcttggagagccattcccaggcccgcatccccaaggctgcttgatgcccactggaggttgggtaggcgtctcgctgctccccacttacctcaaggggccccaaccagtccggctcttgcgaacctggcagcctatcggttggatgtgcgcttaacggctctagcacggacctggggaggacggtatacacggtatgcagacgacctcgcgttgtctggagatcggggctggggcacaggcacatcaaggctgctggacgcggtggagacagtagttagagacgaaggctttcgcctgaatccaagaaaaacagctgtgatgcctcgaggggggcgacagaccttaggagggctggtcgtcaaccagcagcctcgggtgagcagagcggaggtggatactctccgcgccgtcgtacacaactgcagacgccacggcccgtctacgcagaatagagaagagaggcccgctttcgccgagcacctaaggggtcgcatcgcctgggtagcccaacatgacccagcccgtggagcacggcttcttgccgactacgataccatagattggtcccgctga

SEQ ID NO: 13001 - RNA, 1311 nt, synthetic construct
  source 1..1311: mol_type = other RNA
atgaggaaggacctggctacagctttagccggcgcttttctatccggggaatggaccagcagcgggctgtttgacagtgccgtgcccgttgtgcagggcccaacaccatggctgcctgccctgattcggcagatcctggccgtttatccagcagcgccgcttgatcgaagccgggaacttgcagtggtaattggctctaggcctgccgctgggggtgccaaaagtgcaagaccaatagcatggcctgccgcgaccacacagatgacctccaacccctggcacttgccagcattgcatggactgggggacttagccgaaatgctcgatctgggcgccacagaactcgcctggtttactgacccccgccattgggcccgtagcactacggaccggcgtctgagacactacagagtgaccaccaaagtcgccgcttcaggggctgtcagagtcctggaggctccaaagtatagactcaagagtcaccagagacgcttcctgactgagatccttgatcgcatccccgctcatgatgctgcccacggtttcagagcgggccgctcagtcgcatcctatgcagcccctcacggaggccagccagtagtcgtgcgtatggacctcgaaggattcttcgcctcgatcacggcaggacgggtctacggcattttgcggtccgctggctaccctgagcctgttgcccacgctctgactggtcttgccacaaccgtgctaccgcgggcagagtggaatgccatatctcctcccgcgaaccccgacttgagagaggcccattggaggctcggtcggaggcttgctggtcctcatctgccgcagggagcacccacaagtcctgctctcgctaatttggcggcgcaccgtttggacgtgcgccttagcgcactggcatcatcctggggtggccgctataccaggtacgcagatgatctggctctctctgggggaattggctggcggggggacgtttcaaggttggtggccctagtgggggacattgtaagggatgagggctttcggctgaacgaccgcaaaactgctgtgctgccagctcactcccgccaggttctcggaggcttagtggtgaatgagcgaccccacgtgtctcgggccgaagtagatctgcttcgagccgtgctgcataactgccgacgcgatggcccatctacccaaaatagggccggagtccccgacttcgagggacatctcaggggaagaatcgcctgggttgcacaacacgaccccgcaaggggggccagattacgagcgctgttcgatgccatcgattggagcttttga

SEQ ID NO: 13002 - RNA, 1311 nt, synthetic construct
  source 1..1311: mol_type = other RNA
atgagggctgatttggcgagggctctagccggggggtttctagctgcggaatggactcgaccaggcttggttgatggcggtgccgtagttcttgggaggcgggtccgatggatgcctgctctcacccgacaagtcctggccctctaccccagaccgccattagacagaccacgcgagctcgccgccatcatctccacaagaccagccgctgcccaagccggaagagcaaggccaatggcacatcctcttgcccccgtccgcatggtcagcaacccatggagacttgtggttctacatgatctggctgaggtcggctccctccttggactgagccagcccgagttagcatggttctctgaccctcgccattggtcacggacagctcagcaggtgcctctgcagcactaccggatatcctctcgcaccgccccttcaggagctataagggtgctcgaagcccccaaacgccacttgaaggctatccagcggcagctgctgcaggagattgttggcagaattcccccccacgaagctactcacggcttccgcgtggggagatcggtgggaagttacgcagcccctcacgctgggcgtgctgttgtcatcaggagtgacctggagggcttcttcgcatcagttaccgtggggagggtgtatggtgtgcttagaaccgcagggtaccctgagccggtggctcactgtctggctggcctcatgactaccgtgctcccactcagcgcatggaggaagatcccccgaccgacagaccccgtattgctggatgcccattggcgtctgggtcgcagattggcagcgccacatctcccacaaggtgcgcccacatctcctgcactggcaaatctggccgcttatcgtatggacattcggttagacgcactggccctttcttggggaggtcagtacacacggtatgcagacgacatcgcgatgagtggggacaggggatggggacctgcagcagaccggatactgggcatcgtagcggaaattgcccgcacagagggctttcgcttaaatgcccgcaaaactggagtcctgccgcaggctggacgtcaagtgctgggtggcctggtagtgaacgacagaccccatgtgtcccgggccgaggtggatgtcttgagggccacgctgcacaactgcattcggcacggccctagcacgcagaacagacagaataggaccgcctttgaacagtatcttcaaggccgaatcgcctgggtggcccagcacgatagggatcgaggggccagactgcggacccagtttgatgccattgattggactcggtga

SEQ ID NO: 13003 - RNA, 1317 nt, synthetic construct
  source 1..1317: mol_type = other RNA
atgcggtccgagttggccagcgcctttgcaggtgcttttctcagcggtgagtggaccgagtccggactgtggggtagcggagccagggtactgggcagagatgccgtgtggcttcctgccctggtgcgagaggtccttgggctgtatgcttgcgcaccacatgaccgcccccgagaactcgctgccgtgattgcaatgcaggaagccgcacaggggcgtgatgccgagcatgcagtgccgtgtagatggcccgtgtctcctacaaggatgttgcggaatccttggcacctgcccgtcctccactcactggaagaccttgcgggcctgttagggctgaccaccgccgaactagcctggttcagcgaccctaagcgcttagcgaggacagctgccgacccacgcttacgccactatcgggtgaccactagacgagcgccgtcaggcgctatacgcgtcctggaggcgcccaaataccagcttaaggctcttcagcgtcgcctgttggctgacctcctaggggcaattcccccccatgccgctgcacatggctttcgggcaggcagatctgtcgcaacattcgccgggccccacgctggtaaagcactggtgctgcggtgcgacttggaggggttctttgccagtgtgacggttgggcgtgtatacgggctgtttcgcactgccggctatcctgaacctgtggcccacgctttggcaggcctgactacgacagttctgccagcgtctgtgtggaggaaagtgccccggcctgccgatccaggactgcttgacgctcactggcgtttgggcaggagactggctcaagcccatttaccgcagggcgcgccaactagccctatgttggctaatctggtcgctcacaggctagacgcaaggtgtgcaggcctcgcggaagcttggggatggaattacacccgctacgccgatgatctggctttcagttgcgctggcggaagaagagcaggtgcggctgctctgctgcggatggtggagagaatcgtcggtgaagaagggttccggctcaacgcacgaaagaccgccgttcagggctcatccgccaggcaatctctcggaggactcgtcgttaatgagcatgtacgcgtaccaagagtggagctcgataggctcagagccatccttcacaactgtgcccgatatggaccctccacacagaaccgaagtggacacgcagatttcgccgcccatctctccggaaggattgcctgggtggccaaccacgacccagttaggggggccagacttcgggcaggctttgaggccctggattggtcgcggtga

SEQ ID NO: 13004 - RNA, 1353 nt, synthetic construct
  source 1..1353: mol_type = other RNA
atgaccactccaaggcaagcagcggcgaccgcttcaggtatagccactgcgttgttagccggaccctggcggaggcgagaagctgtacgacgagtggcagtggctcttggtcatgccagggcccccagatgggttggcgctttggtgggcgaggtgctggatgcctatcgagacgcacccgctgatcgcccacgtgagctagcggcatttctggcctcaacaagggggtgggcgcaagggcaagctggagatgtggccccacgtgtggtgaggagagagcccgtccctactcgggtggttcgtcctcgccccgaccttaccgaagtaccagacctcgcggcgcttgcccggcttttggatgtggatcagggcgaactggcatggttcgctgatacacgcggccttgagagaacggcacccgaggaagctctccggcactatcgatggagagtggtagagcgacccgggggagttcgccttttagccgccccaaagccccgcctcagggagattcaacgccggctgttgcgccatttagttgccccagtgccgcctcaccctgctgcacatggctgcgtgccaggccactccgtcagaactgcagctgctccccacgctggagctgacacagtcctggccctggacctggagtcgttttttgcctctgtgccagcaggacgggtttggggggtcctacagggcgtcgctggtctgactgagcctgtcgcccatgccgtgacaggcctcgtcaccaccgtagtccctctggctgtctggcggagagtgccggttcctgaggacggagcggctcgtgataggcacgccagattagggagacgcctggctgtccctcacttgccacaaggggctcccacttcccctgccctcgcaaacttggtgtgcgccagactggacaggcgccttgctggtctagccgcaagtgccggggccgtttacacacggtacgtggacgacttgttcctcagcggccccccagcattaagacgaccggccttcgcagcaagggtagcagcgatcgccgccgatgaaggattccgcgtgcaccccgggaaaacgaggtctgctgggagaggtcggcgtcagaccgttctcggcgctgtggtgaatgtgcggcctaccttgccgagggcagaacgcgatgccctcagagctctgctccataactgtgccgtcagtggctgggcctcccaggtaagggacagggatcccgccacatttcgggaacacgtgctaggacgcgttgcctgggccagcagcatggaccctgtcctgggagccagactgcgggtgctggcagaacggatcgattgggacgcaccaggcaccgcctga

SEQ ID NO: 13005 - RNA, 1347 nt, synthetic construct
  source 1..1347: mol_type = other RNA
atgactgccagcagacgcacagcagcgaccgcttccggagtagccactgcccttctggccggtccttggcgaagacgcgatgccgtgaggagagtggcggtggcattagggtacgctcgggctccgagatgggtaggcaccttggtcggcgaagtgctgctgacataccgcgaagcccctgcagataggcccagggagctggcagcgttccttacaacgacggctgggtgggagaggggttggtctgcaggcgaagtacggcctagggtacaccggcgggaaccagtacctacacgcgttgtcaggcgccgccctggagttcgtgaagtgtccgatctggccgcccttgcccgactgttggacgtggaccaaggggagctggcttggtttgccgacgtgaggggcttagagaggaccgccccagacgaggccctcagacactaccgttggcgggttcttgagcgacctgggggagtgcgtcttgttgccgctcccaaaccccggctcagagaggctcagcgacgcctattgagacacctcctggctccgctgccagttcacgacgcagcccacggatgtgtgccaggtcgctctgtgaggactgctgcagcaccacatgctggcgctgccgtggtcctcagcatggatctggagtcattctttgcgggtgtaccagctgggcgtgtgtggggagtcctgcaaggagtggcgggactcaccgaacccgtggctcatgccgtaactggcctagccactacagtcgtcccagctgccgtatggcggagggtacccgtgggtacagatcctgaccgccatgctcggttgggacgacggttggcagctccccatctcccagttggcgctcccaccagtccagcactcgccaatctcgtgtgcgcccgattagatcgccggttggccggattggccgcttcagcaggggcagtgtatacccgctatgtggacgatctgaccttctctggggggcctgggctaagacgcgacaggtttgcagccagagtggcagccgttgcggctgacgagggtctacgtgtgaatcccgctaagactcggactatgggcaccggacatagacagcaggtcctgggcgccgtggtcaacgtcagaccgacccttccccgacccgaaagggatgcccttcgggcactgctgcacaactgcgccgtccacggctggagaagtcaggtcagggacagagatccggccacattccgggatcacgtgctgggcagggttgcatgggccgcaagcgttgaccctgtcctgggagcgcgattaagagagctcgcggctcggatcgactgggatgtcccaggcacggcctga

SEQ ID NO: 13006 - RNA, 1350 nt, synthetic construct
  source 1..1350: mol_type = other RNA
atgactcggcctcgccaagctgccgctacagccagtgggatcgcgaccgcactacttgccggtccctggagacgccgtgacgcagttcggcgagtggctgttgccctgggtcaagctagggctgcgcgatgggtggggacattggtcgccgaggtcttagccgcctatcgggatgcacctgccgacagacctcgcgagttggccgcattcgtgcggacaactgaaggctgggcacggggacaagccgctgatgtgcgaccgagggtggttcgccgtcagccagtcccaaccagaacggtacgggttagggcccccgttgcggatctccctgatctggcagcactggccaggctcctggatgtggaccagggcgagctcgcctggcttactgacgtccggtcatgggagaggaccgctgatgcaccacttcgccattacaggtggagaaccgttccgcgacccgctggaggagttaggctcctggccgctccaaaaccccgattgcgggaggcccagagaagggtgctgaggcacgtgttagccccactgcccgtgcaccctgcagcacatggctgcgtcaggggacggagtgtcagaacagccgcattgccacacgccggcgcagatgttgtgctcgggatggacctcgagggcttctttgcaggaattcccgccggcagagtgtgggggttactgcagggcgtcgccggtctgactgaacctgtggcgcacgcgctgactggcttggctaccacagtagtgcccgtcgctgtgtggagaagggtgccagttcctgctgaccctgcaggcagagataggcaccacagattgggacgccggcttgccgtgccacacttacctcaaggggcccccacatctcccgcgcttgctaacttggtgtgcgcccggctagaccgacggttagcagggttggctgccgcttccggtgctgtctacacgcgctatgtggatgacctgaccttctccggcggagccgcacttaggcgtgacaggtttgccgacagagtaaccgcggtggccgccgatgaaggattccgtgtccatccagggaagacgcgtactgcaggtagcggtcgccgtcagcaagttctgggggctgtggtcaatgtcagaccaacacttccgcgacccgaacgcgacgcattacgcgctctgctgcacaactgtgctgtgcatggctgggctagccaggtgcgcgatgcagaccctgccacctttagagacgcggtgttgggaagagtcgcctgggcctccagcgtagatcccgtactcggcgctcggctgcatgccctagctgaacgcgtagactggtcagcggccccgtcttga

SEQ ID NO: 13007 - RNA, 1335 nt, synthetic construct
  source 1..1335: mol_type = other RNA
atgacaacacatcgccaggacgcagtaactgcggcaggcgtggctacggcattgctcgctggacgatggcgccgaagggagatggtccggcgagttgctgtcgccctggatagagctcgggcgcctaggtgggtgggtacactggtgggagaggtgctggtggcctatcgggaagcgcctgcagatcgccctagggagctggcagccttcgtgccaaccaccgagggctggtctaggggaagaaccgccctgccgcgacctagagtcgccagatggcagcctgttgccgtgagcgttctgaggcgcccgtttccagtggccgaacttccggacgctgcagccttagctcggctcctcgatctggacctgggggagctgctgtggttcgccgatcccagaggactggagagaacgtcaggcgagcccctgcgccactatagatggcacgctgtcccacacggctccggtatgcggctccttgctgcacccaagcctcgcttgagggagatccagaggaggctgctgcggcatgtgttagcccccgtccctctccacgctgctgctcatgggtgcgttcccggacggagtgtcagaactgcggctgcccctcatgctggtgccgatgtggtcttagggatggacctggaagccttctttccctcagtagctgcagcacgggtgtggggccttctgcaagggacagtcgggctcacagaaccggttgcccacctagttactggacttgtgaccactgtgcttccagcggcagtctggaggagggtgccagttccaccaggtgccggctctgccgataggcaccgacgactcggccgaagactcgctgtgccccatctgccacaaggcgcacccacatctcccgccttggccaacttggtctgttttcgcttggaccggcgtttggcaggtcttgctgcagccgcaggagggaggtacactagatacgtcgacgacctgacctttggaggggggcgtgctttagcggccgatcgtttcgccgctagagtggccgcgattgccgcagacgagggctttcgggtgaatgacgcgaaaacccgtgcagtaggcgccgctcgtagacaggaagtgctaggagcagtagtgaacgcacgtcctactctgccacggcccgaacgggacgctttgagagccctcctccacaattgcacgaccaggggctggcggacccaagtgagagatcgcgatcctgccacattccgcgatcacgttctgggccgcgtagcgtgggcctcttccgtagaccccgccctaggtgctcgccttcaagccatggccgccagggtggactggagttga

SEQ ID NO: 13008 - RNA, 1302 nt, synthetic construct
  source 1..1302: mol_type = other RNA
atgactgcctcgggaattgcaaccgctttgctggccgggccatggtcccgaagaacaatggtgcgcagagttagcgttgccctcggctttgccagggctcctaggtgggtcggcgcgttagtagacgaggtcctagctgcctacgtctcagcccccgctgatcgcccaagggagttggcagcctttgttaccactacccaggcatggcagagaatgggggcactgcgaagagtggtgcatagacgaccagtcgcgacctctgtcgttcgccaccgcttcggagtgccccctttgcctgacgcagcagctctggcaaggctgctcgatctggaccagggggagttggcctggttcgctgacgtgcggggccttgaacgaacagccggtgagcccctcagacattacagatggcacgccgttgaaaggcggggaggcttaagactgctcgcagagcctaagccgcgtctgaaggagatccagcggaggcttctccgtcacgtcctggtgcccgtacccgtacacgatgccgcccatggatgtgtgcccggacggtcagtgagaaccgctgctgccccacatgctggaagtgccgtcgtgctcgggatggacctggaagccttttttgcctccgtgacggcacctcgaatctgggggctgttgcagggcacggtgggcttaactgagcctgtggcacatctggtcaccgggctggtcacgacctctgtgcccacctctgtttggcgggccttgccgcttcccgatggtacagatgccagggagagacaccgacggttgggtcaacgattggcggcgccgcatcttccacaaggagcacccacctcccccgctctagccaacctggtgtgctatcgccttgaccgtcggttagccggcctggctagtgcatttggcgccaggtacacacgttatgtagatgacctgacattcagcggggacagacgcattgagacaggccgcctggctgcactggtgactgggatcgcagctgaggaaggcttccgcataaacccagctaaaactcgcgtggccggtgctggtagcaggcaaagggtgctcggcgcggttgtcaatactcgtccaactctgccacggcctgaacgggatgcccttagggctctcctccataattgcgccagacacggttgggcgagccagacacgggaacacgaccctgccaccttccgggaacacgtgctaggacgcgttgcctgggccgcttccttggaccctgtattcggagctcgcttgcacgcgttggcacggagggtggattggtcatga

SEQ ID NO: 13009 - RNA, 1044 nt, synthetic construct
  source 1..1044: mol_type = other RNA
atggtggctgccgatgacggtcctcctggtaggggacgcccaaggttaagaactcgccccgcattggcccgattgctggacctggaccaggccgacctggcatggttcgccgatgtgcgggtcctcgagaggacggtggatgagcccctgcgacactatcgctggcacgccgttgaacggagaggtcggctccgtctgctggcagagccaaagcccagattgaaagaggcacagcgccgactactcaggcacgtgctcgctcccattccagtccacgacgccgctcacggatgcgtgcttggtcgcagcgttaggacagccgctgccccacaagcaggacgagcactggtgttaggcatggacctggaagccttttttgcgtcggtaagcgctcctcgtgtctggggcctactgcagggcacagcaggcctcacggagcctgttgcccacctggttaccgcccttggcactaccacagcgcctgtgtctgtctggcgcgcacttcctctccctggaggcgtagaggccagagaacggcatcggaggctcgcagctccccatttaccacaaggggcccccacctcccctgctttggcaaacctggtatgtttcagactcgaccgtcgacttgctgggctggctgcttcctgcggagctaggtacaccagatacgtggatgacctgaccttctctggcgatagacgtattagaggggaccggctggctgccttggtgacagaggtcgcggccgaggaagggttcagagtcgatccggccaagactagggtcgcaggtgccggatcacggcaaagggttctcggggccgtggtgaacgctaggccaactctgccgaggcccgaaagagatgcgttacgcgcgctgctgcataattgtgcgcggcatgggtgggccacacaaactcgaggccacgaccccgcaacctttcgggagcacgtactaggacgcgtggcttgggccgctgccttggatccagtgcttggagaacgccttcatgccctggccgcacggatcgattggagttga

SEQ ID NO: 13010 - RNA, 1173 nt, synthetic construct
  source 1..1173: mol_type = other RNA
atgctcgcggcctatgcagcagcacccgttgaccgcccacgggaactgacactgttcgtgcagaggacccaggggtgggaaagaatgggcagtccccctcgggtagtgcacaggcagcctcgtgctacagctgtggctcgcgaccgtttcggggttgccccactcgctgatgctgctgcccttgcgcgccttctggacctggaccatggagaacttgcctggttcgctgatgttcgcggcctggagaggacagtgggtgagcctctgcggcactaccggtggcacgcagttgagagacggggaggggtgcgactcctggcagaaccaaaagcccgtttagaggaggtccagcggcctctgctaaggcacgtgcttgcccgcgtccccgttcatgacgctgcacacgggtgtgtccccggtagaagcgtacgaaccgccgcagcgccgcatacatcaagagcagtggtgctggggatggatttagaggccttttttgcgtctgtgacggctccccgggtttggggacttttgcaggggaccgtcgggttgaccgaaccggttgcccacttgctgaccggcctagtcacgactactgctcccgctggagtatggcgtgcccttccagtaccttcaggcgccggtgcccgagaacgccatagaaggttgggtgagagactgacgactctccacctcccacaaggcgcgcctacaagtcctgccctggccaacctggtgtgctttcggctggataggagactcgctggactcgcagcaactgtaggggcgcggtacacaaggtatgtggatgacctgaccttcagcggcgacaggagactgagagccgatcagtgtgccagcttggtgacagaggtcgctgccgaggaaggctttcgggtgaatcctgccaagacccgagtggcaggagccgattccaggcagcaagtgctgggcgccgtcgtgaatactcgccccaccctaccaaggccagaacgagacgcactccgcgccctcttacataactgcgccaggcacggatggactggccaaacccgcggtcatgatcccgctactttctccgagcatgtcctgggcagagtggcttgggccggatccttggacccggtctttggcgagagattacacgcactggctgcccgaatcgactggtcttga

SEQ ID NO: 13011 - RNA, 1422 nt, synthetic construct
  source 1..1422: mol_type = other RNA
atgacagccccctccgaaaggagggcagctgggactgctgcaggcatcgccactgcacttttggccggtagatggcggcgccccgaaatggtcaggaggactgccgtagccctaggccgcgatagagccccacgatgggtagggacgttggtcggtgaggtgctggacgcctaccgagatcctccagtggatcgtccacgcgaactggccggctttgtgagaaccacagccggatgggcaaggggttggaccgtcgttccgcagccgaggataacccggtggcagccagcacggaccgatgtagtccaccgtccttatggtgtcgcagccctgcctgacctgactgccttagctcggctgctggacgtggatgctggcgaactggcttggtttgccgacacacacaggctggagaggaccgtcgccgagcctctcaggcactaccggtggaccacagatggcgatagattgctggccgctcccaagagccggctgaaagagattcagcgaagattgctgagatatgtgataggccccctccgagttcatggggcagcgcatggctgtgttcctggacggagtgtgcggaccgctgttacaccccataccggcgcagcccaagtcctgcagatggacctcgagtctttctttgctagtattgccgctgagcgcgtccacgggctacttcgatctgtgggcgggctgccagaaccagtggcacttgcggtgaccggcctcgtgacaactgtggtccccagatccacatggagacgcgtgcctgttccagacgacgtggaccgccatcatcgcttagggcggcgattggcggggcctcatttaccccaaggagcccccacttctcccgcactcgcgaatctggtgtgcttccgcctcgatcggcgattaggcggactcgccgccagctttggagctgcttatacgcggtacgtcgacgatctgacattttcgggtgggcgcggaatcgaccagggaccattcgaacgtctcgcgggcgagatcgtggtggaagaggggttccgtttgaacagatccaagactcggtccacgtcatcagctggacggcagtctgtgttgggaactgtagttaacgtgaggcccactctaccccgcaccgagagggatgcccttagagcccttctgcacaattgcgctacacgcggctgggccagccaggttagagacagggaccctgcaacgttccgggaccatgtactcgggcgcgtggcttgggctagcagtatcgatccagctttcggcgcgagactgagagctagggcagccctgattgactggagccgaccagacgagggtgcatgtgggaggacccctgccgatcgtccgtcagatggaacccttccgcctcccgacgatgacggaggtgcacgttgcggcgaaagatga

SEQ ID NO: 13012 - RNA, 1356 nt, synthetic construct
  source 1..1356: mol_type = other RNA
atgactgccccaggaggcagaagagctgctggaaccgctgccggtattgcaacagccctcctggctgggagatggcagcgaagagagatggtgcggcgtacagcagtcgcccttggactgccaagggccccacgatgggtaggaaccctcgtcggcgaagtgctggctgcgtatcgcgaccctcccgttgaccggccaagagaactcgccggctttgtcagagcaacagctggttgggctcgaggttgggcagccgttccccaacctaggatcgtacgctggcagccagtccccacagctttggtcaggaggcgccatggcgtcgcgggtttacctgacctggctgcccttgccagactgctggatgtggacgcaggggagttggcctggttcgccgacactcaccgactggaaaggaccgtgggcgaacggttgcgccactaccgctggaccacagctggagatcggctgctggctgtgcctaagcccagactgaaggaggtgcagcgccgcctcctcagacatgttgtcggcccccttggggttcatgacgcagcgcacggatgcgttcccggcagatcagtgaggaccgctgtatcgcctcatgcgggcgcagatcagctcctgcagttggatctggagtcattctttgccggtattgccgcagagcgggttcacggccttctgcgaagcgttggagggttaccggagcccgtagccaggacagtgactggcctcgtgaccacagtggtaccgcgatccgtgtggcggcaactacccgtgcctgatgatgctggcaggcatgagagattggggaggaggctagccgtgccccacttaccacagggagcgcctacctctcccgccttagccaatctcgtgtgcttcaggcttgaccggcgtctggatggccttgcagcctcctttggggctgtgtacactcgctatgtcgatgacctgactttcagcggtgaccgcgggattgaccgaggacggtttgagcaactggccggggaaatcgtccgggaggagggattccggcccaatcgtgccaaaacgcgcagcacgacgtccgcaggtcgtcagtctgtgctggggaccgtggtaaacgttcggccgaccctcccacgcccagaaagggatgccctgagagccttgctgcataactgtgccacacacgggtggagaacccaggtgagagatcacgacccggccacttttcgtgaccacgttctgggccgggtcgcttgggcaagtagcatagaccctgtgctcggtgcgaggctaagggcgcaggctgaacggatcgattggagttctggccctgatggaactgcagccccagcacctgcatga

SEQ ID NO: 13013 - RNA, 1371 nt, synthetic construct
  source 1..1371: mol_type = other RNA
atgacagcaccaagtggtaggcgcgccgcaactacagcggctggtatcgctgtggccttattggggagcagatggcggcggagagaaatggtacgagcgaccgctgtcgctctggggtacgcaagagcgcctcggtgggttggcacccttgtaggggaggttctcgtggcctatcgagatgccccagtggacaggccccgggaactagctgccttcgtgagaacgactgctggctggcaacggggatggacacgcgtaccccagcctagagtggcacggtggcagccaacggtgacggaggtggcattccggcgacacggggtcactgaattgcctgatctggccgcgcttgccaggctgcttgatctggacaccggggagctcgcttggtttgcagacgcccacaggctggagcgcactgtacgggaacccttacgccactaccgttggcggactgtgggaagcagactggtggccgcacccaaaccccgtctcaaagaggcccagcggcgcctactgcgtcacgtagtcggtcccttgcctgttcatggcgccgcgcatggctgtgttcctggaaggtccgtccgaaccgcagtagctccacatgccggagccgcagtcgtgctccagctggatctggaggccttctttccctcaatagcagcggagagagtgcaggccctgctgcagacagttgggggattgcctgaacccgtcgcgcacgctgtgacaggcttagtgacaaccgtcgtgccacgttctgtgtgggctgcagttcccgttccagcaggccctgatagggacagggacaggcaccatagagtgggtaggcgcctcgccgttccacatctcccgcaaggcgcacctacttctccggccctggctaacctcgttgcctttcgcttggataggaggctcgccggactggcagcctctttcggagcccagtacacacggtatgtggatgacctaaccttttccggcgacagagcactcgacaggggtcgctttgcctccttggtcggggctgtggtcgctgaggagggattccgtctgaacgctgccaagactagaagtaccacctcagcagggaggcaaagcgtcctgggagccgtggtgaatgtgcaccccactctgccaagaaccgatagggacgcccttcgcgcccttctgcataattgcgctgtgcatggctggcggtcccaagtccgcgatcatgacccagccaccttcagggatcacgtccttggcagagtggcctgggcggcttcgattgacccggcttttggcgtgagagctcgacgcctggccgatcgaatcgactggacagctcacccggtacgaagcccagaaggccctgggcacgactga

SEQ ID NO: 13014 - RNA, 1350 nt, synthetic construct
  source 1..1350: mol_type = other RNA
atgactgccgagagacaagccgcagccacagctgccgctattgcaaccgcattgctggctggtccatggcggcgtcgcgaaatggtgaggagggttgcagtggccctggggcaagcaagggctaggacgtgggtgggtacattggtcggcgaggtccagaccgtgtatcctactgctcctgtcgaccgacctcgcgagcttgccagagtcgtgcgcacgactcaaggctgggagcgtggccaaagccatcgaccgctcgccagggctgtacgttgggaacccgtgcccactgcgcttgcatggcgcagatggccagtggccgatctcccagaccaagctgccgtcgctaggcttctggacgtcgatgccggagaactcgcctggttcgccgacgctagaagactggagcggacagccggcgaagcccttagacactatcggtggcgtgttgttcaacgcccggcaggagtgcggcttttggcagcacccaagcctcggctaaaggaggcacagcgccgcctcctgaggcatgttctggacagagtacctgctcacgacgccgcccatggatgtgttcccggcagaagtgtacggacagcagtggccccacatgccggtagcgcagtggtgctgaggatggatctggaggcttttttcgccagtgtcgcggctgggagagtgcatggcttgttgttgggggttgcgggtctgcctgaacccgttgctcacgtcctgacaggactgatgaccaccgtactcccaacggaggtatggaggcgcataccccccccagatggcatcgaagcacgcgagagacacagacggctggaacagcggctgaccgtgccacatttaccgcagggggcgcctacatcacccgcgttagcaaacctggtgtgccacaggctggaccgcaggttagccggactagctgcggcatccgggggaacttacacccgatacgtggacgatctgacgttctccggcgacagacgtattgcccgcgaccggtttgccgacctcgtaaccgatgtggtcaccgatgaaggatttcgagtgaatgccgccaaaaccagcgctacatctgcagccaggcggcaagcggtgctgggaacagttgtgaatgatcacccaactcttccccgacccgagagggatgcgttacgcgctctcctgcacaactgcgctgtccacggctggactactcagacccggggcagagatcctgggacattccgggatcatgtgctcggtcgagtggcctgggccgcttctgtcgacccagcatttggggcccggctacacaggctcgctgatcgaatcgactggaccgctcctgcccactcatga

SEQ ID NO: 13015 - RNA, 1335 nt, synthetic construct
  source 1..1335: mol_type = other RNA
atggctgccgtcacagcgtcaggcctcgctactgcattactggctggcccctggcggagacgggatatggttcgccgggtggcagtggctctaggtcaagcccgcgcagccacatgggttggcacaatggtcggggaggtccagactggatatccacaggctcccgtagatcggccgcgtgagttggcacgctttctcaggacaaccaggggctgggcgaggggacaagacaccactcctccaccccccgtgctaaggtgggaacctcagccaactcggctggcatggagccgagcacctgtcgcagatcttccagaccaagccgccgtggcgagactgctggatgtggacccaggcgagcttgcttggttcgctgacgcacgagggctcgagcgtaccgtaggcgaaccactcaggcactaccgctggcaagttgttccacggccccacggggttcgcctattagcggcacctaaacctaggttgaaggaagcccagcgcaggctgctgcgacatgtgctggcacgggtgcctgtacatgacgccgctcacgggtgcgttcctggacgatctgtgcggacagcagttgctccccatgcgggtagccccgtggttctgagaatggacctggaggccttcttcgctagcatcgccgcagagcgagtgcacgggttactgttaggaccggcaggtttgccggagccagtggcacacgtactcgcctctctggttacgaccgtagcccccgcacaagtatggcgccaggtgtctcttcccaccggcattgaggcccgtgaacgccatcggcgtcttggtagacagctggccgtaccccatcttccacaaggcgcccctacatccccagcgttggccaatctcgtctgctttaggctggacagaagactggcagggttggccgcctcatgtggagctcgctacacgcggtatgtcgacgatctgaccttctcggggggaacggctttaggccgggacaggtttgctgatcttgtgactagagtggtcgccgacgaaggcttcagagtgaatgccgcaaagactgcagccacctccgccgcaagacggcagtcagtcctaggggcggtcgtgaacactagaccgaccttgcccagaagggagagggatgccctcagggctctgctccacaactgtgctaccagtggatggcctggacagacacgaggccgcgaacctgctaccagcagagatcacgtcttgggacgcgtagcctgggctgcgagtctcgatcccgcctttggcgcccgtcttcacgctctggccgaaagaatagactggtccgctgagcctgctggttga

SEQ ID NO: 13016 - RNA, 1203 nt, synthetic construct
  source 1..1203: mol_type = other RNA
atggtgggagaggtgcagactgttcacccaagaccgccggtcgacagacccagggaactcagccgggtagtgagggccacacaggggttcgcaagaggccacgcttcattaccactgccacgagtggtccgaaggaacccagtgcccactgcacttgcgtgggaacgctatcccgtgaccgatctgcctgaccaggcagccgtcgctcgtctcctggatctcgatgccggcgagcttgcctggttcgcggacactagagggctggaacgcaccgcaggggaagctctccgccactaccgctggcatgccgttgacaggccacacggggtaaggctgctggcagctccaaagcctcggctgaaggaggcccaaagacggttgctgcgacatgtgttggcgcccgtgcctgtccatgaagcggcacatggttgtgtgcctggcagaagcgttcgcacggctgtagctccgcacaccggatctgccgtggttctgaggatggaccttgaggccttctttgcaggaatccccgcaggcagggtgcatggcttgcttctaggtcccgccggcctgccagaacctgtagctcatgtcgtgacagggctcgtcacaaccgttgtgccggcccaagtgtggagagccctacccgtgcctcccgacgtagatgctcgggaccggcaccatcgcttgggacgaaggttagccgtagctcacctgccacagggcgctcctacctcaccagctctcgccaacctggtgtgctttagactggatcgcaggcttagcgcactcgccgcctctagtggtgcccgttacacacggtatgttgatgacctcaccttttccggaggacgtagtgtcggaggcgatcgcttcgctgcactggtggctgaggtggtcgctgacgagggcttccgagtgaacgccgccaaaacatccgctgttggggccggtagaaggcagtccgtgttgggcgcggtggtcaatgtgcatcctgcgctgcctcgcagggagagagatgcactgcgggccttgctccacaattgcgcaactcacggctgggctggacagacgcgtggtagagatcccgacacctttcgggaccacgtcttagggcgagttgcctgggccggttctctggaccccgtctttggggcacggcttactgcactagccgagcggattgattgggccgccgcggattga

SEQ ID NO: 13017 - RNA, 1353 nt, synthetic construct
  source 1..1353: mol_type = other RNA
atgacagcggggagaagagcggaggtgaccgctaacggcattgcgactgctctgttagccggtgcgtggcggaggccacaaatggttcggcgcgttgccgtggccctcggatatgctagagcaccccgatgggtgggcacccttgtgactgaggtgctggcagcctactggcacccacctgccgacaggccaagagaactagccctgtttgtaagaacgactgctagctgggctaggggaacagcatccggtcccccacctggagtcgttagatgggagccggtccccactagtgttgtgaggccgcggttaccaggcgtcgaactctctgatctcggggcgctggctaggctcttggatctggaccagggggagctggcatggtttgccgacgcacgaagactggaacgcaccgcccccgagccacttcgacactaccgctggaggatcgtggatagacctaccggggtccgccttctagccgcacctaaaccccgcctgaaggaaatccagcgccgtctgcttcgacacgtgctggacccagtacccgtgcacggagcagcgcatggctgtgtgagaggccgatctgtgcggacggcagccacaccacatgcaggagctgccgtcgtcctgcgcatggatcttgaacatttcttcgcctcagtgcctgcccctagggtccatggcctcctactgggtcaagccgggttgcccgaacccgtagctcatgccgtgacaggcttggtgacgacagttctgcccgctgctgtgtggcggagaatcccgctgcctgacgatgtcagggcgagggagcggcataggcgattaggggcaagactggcagtcccacacttgccccaaggcgctccgtctagccctgccatggccaatctggtctgctttcggcttgaccgcaggctcgccgctttggctgacgcattcggcgcaacatatactcggtacgtggacgacctgacctttagtggtggagctcgcgttggacgtggacgcttggctgggttggtcggtgagattgcccgggacgaggggtttcgcgtgaacaccgccaagacccgtgccatatcctcagcccggcggcaagatgtactcggcgtggtggttaatgatcacccagccctccctcgtagagagcgcgatgctctccgggcactcctgcacaactgcgccacccacggttgggcaactcagctgcgtggcagggctcctgcttcgttccgagatcatgttcttgggagggtggcatgggcggctgccgtagatcctggcttcggagccagactgcacgccttagccgaccggattgactggagcagacccctgggctccgcttga

SEQ ID NO: 13018 - RNA, 1329 nt, synthetic construct
  source 1..1329: mol_type = other RNA
atgaatccgagggaacaagtggccaacggactggcaacagccatgctgggcggtgcttggtccagggaaccaatgcgggcccgcattgcacgagcactaggacgcccgagagctcctaggtgggcaggtgcactggtaggccaggtgctgggtgcttatcgggatgcccccgccgatcgaccacgtgaattggccgcctacgtgcaaactacacccgcttggcagcttgcttgggagcataggcggccccctcgaatcgtaaggtgggctcccactcccactgtcatggttgcacggccctggccggtgatagaactggacgacctcggcgcgcttgcgagactactggccattgatcaaggcgagctcgcctggttcgccgatgtcagatctatagagcgtcgttctgggcagcccctccggcattatcggtggagggcgcttccaaaacgcggaggggttcgcttggtggctgcaccaaagccacgcctgaaggagattcagcgacgcctcctccggcacgtgctgacacagattccagtgcacccagctgcccacgggtgtgttcctggacgctcagtgaggacagcagttgacccccacgcgggagctgccatagtgatcagagctgacgtcgaggggtttttcagcagcatttccgccggcagaatctggggcctgttacgcatggccggactgcctgagcctgttgcacacactatcaccggactggtcaccaccgtcgtccctacccaggtgtggagagccgtacctagaccgaccggcgcactgctgctagacgcacatctcagaatgggtgagcgactggccactccacaccttcctcagggggctccaaccagccccgtcttagctaatctggccgcattctcgctcgacaggcgcctgacaggtcttgccggagcttttgggggccagtacaccagatacgtggacgacttgactttctccggcgggccttcacttagaaacgcacgcagcagatttgtggaattggtggatgacatcgtgcggagtgataggctgcgactgaacgaaaggaaaacggttgtactcggcgctgctggacggcagcagctcttaggagccgtgatcaacgatcaccctacggtggcccggcatgaaagagatgcgttgcgggctctgttgcataattgcgccacacggggctggcaaacacagacgcgcggcttagaggccgacgagtttagggcgaccctcctggggcgtatctcctggattggcgggctagatcccagtttcggtgccaggttgcgtcgatcttttgacgccgtcgattggtcatga

SEQ ID NO: 13019 - RNA, 1278 nt, synthetic construct
  source 1..1278: mol_type = other RNA
atgaccacacgtagcgaccaacagcgccaggtggcagacggtttggctacggctcttctcgcgggtccctggaccgttccactcatgacccgtcgcgtgagaacagcacttggcctcagggggaggcagccttgggtggtaggtctggtcgccgaggtagcggacgcctaccgagatccacctgtggatcgccccagggaattggccgcctatctacgagctaccggatcatggcgactggctccagtgccccgtgtcgttgcctggactccggttccgacttcaatgggccccatgccttggccagtgactgccctaccggatctgggggcactggctagactgctcgatatcgaccagggggaactggcctggtttgccgatgtgcggggattagagcgcagatgcgcccctcccctgaggcattatcgctggcgagagattcccggcaggtctggccccagattagtggcggcgccaaagcctcggctcaaagaaattcaaagacggctgctgaggcatgtcctggagcctatccctgtccacgacgctgcacacggagccgtggctacacggagcgtcagaaccgccgtcgcacctcacgcaggtgctacagtcgtgcttcgggccgacctggtagcgtttttcccttccatacccgcagaacgcgcctggggactccttaggactgctgggctgcccgaagctgttgcccatactgtgactggtttgttgacaaccgtggcacccattgaggtgagcaccgatccaaggctccggcacccacatgtaccacagggagctccctccagtccacgcctggcaaatgtggttgcatttagcctggataggcggctagccgggcttgcagctcgtttcggcgccagatacacgcggtacgtcgacgacctcacattctctgggggcgcctcgctgagaacagccaggagtcgcttcgtcgcccttgtggaggaaatcgtgcgggatgagggcttcgaggtgaacgagcgaaagaccgtcgtgctgggggagtctggacgtcagcaggtccttggcgccgtggtaaatgctcatcctgcgttacccaggccggaacgggacgctttgcgagcaacgctgcacaactgtgttgttcatggatgggcctcccaagctcgcggcagaccaagagacgagtttagggcccacctgctcggaagagttgcatgggtggggagtttgcaccctggccacggcagacggttacgcgaactagccgatcggatcgactggaactga

SEQ ID NO: 13020 - RNA, 1278 nt, synthetic construct
  source 1..1278: mol_type = other RNA
atgactggagcagggcctgctgggccacttgcagacggtctggctaccgcactgctagcagggccttggacacggcccgcaatgcgaactaggggtcgggacgcactaggagccgccagaacaccagtgtggttaggccggaccgtggatgccgtcctaacagcgtacccccaaccgcccgctgatagaccccgtgagttggccgccttcctgttagcaaccgcagagtttgccaaactggctaggcgccgccctcctccacgagtagttagttggtcgcctgtcccaacggacgtgatggttcgcccatggccagtggagctgctcccagaccatgctgctttggcgggcctgctggatgtggatcagggtgagctggcgtggttcgccgacgtgaggggtctggaacgctcatccccagaaccccttaggcattatcgctggaggaccgtggctaaaccgggaggcgtaagagttcttgcggccccaaagcctagactcaaggagatacagcgccgcctgctgaggcacgtgtttgatgctgttcccgtgcatcccgctgcacatggcggggtacgacgtaggagcgtgctcaccgcctctgcaccacacgcagcccaacctgtcgtggttcgggtcgacctggtcagtttcttcgctagcgtaagagccggtcgggtgtggcgattactccggacagccggagttccggaaggtgtcgcgcacacggtcactggcctcgtgaccactgtcgctccactgcccttccgggctcttgaccctagactccgcacacctcaccttccccaaggagcccctacttcccccgcccttgccaatctcatcgcctttagcctcgatcggcggctgaccggattggcagctcgcttcgacgcctcctacacccggtacgcagatgacctggtgttttctgggggtaggggcttgggagcggctagatttttggatcgggtcggcgagattgtgagagacgaaggcttccgtgtccatgatggcaagacggccgtactgggaaggtcaggccgacagcaggtgctgggggttgtgttaaaccaccaccctgccgtgccccgaagagaaagggatgccctcagagccctcctgcacaactgcgctactacaggatggagggcccaagcccgcgatcgtgatgactttcccgcccacgttttgggcagaatcgcgtgggtccaaagcctggacccggtgcatggtaggagactgcgtgccgcttatgacgcagtggactggtcttga

SEQ ID NO: 13021 - RNA, 1335 nt, synthetic construct
  source 1..1335: mol_type = other RNA
atgactacaacagctcatagacgaagggcagcagccctaagggccggaaggagacgtcacgatcgggatagctctggccatgcagccgctggcactgtcgctgatgccctgctcacaacggactggcagaccggtaagatgcaaattgcagtccgccgagtaacggcagggcgaaaagggtgggccagacagttcgtccaatttgtcagacgcgcttatcctcgggccccctatgacaggcctcgggaacttcgactcttcctgcaggcgaggggaggaatcccacgggacgtggtagccaggcaccggttagttagtgctactcgggtggtacgaatgcgctggaataccccgggcttgggagatcttgctgacctcgcagccttcctggatctggatggagatgccctggactggtttgccgataggagggaaataaatcgacacgctcgcgacgagcgtctgcgccattaccgctacgtctggctccctcatcgtctcatcgaggcccctaagccaagattaagggatctgcagagactggtgcttgatcgcattctagcgcgggtgccagtacacgacggtgtgcacggcttcgttcccggtcgaggggtgcacacttttgctcggacccacacaggaagagacgtgttggtgagcatggacttacgggctttctttacctcagtcaccgccgctcggatctacgggttgttccggggtattggctatcctgagcccgtggctcatacactgaccgccctgaccaccacacgaacacccgttgccgtgctgagatctgcaccggaccctcatctcgcagccttgcttcgcagaccccacctaccacaaggagccccaacctcccctgccctggcaaacctgtgcgcataccgcttagacagacgcctctccgggcttgctggcaggtttggagtgacatacgggcgttacgccgatgacctggctttttccgggactttgagcgctccacatgtgacccggctcactgcgcttacagggagaatagcggacgaagaaggcttcaggctgcacccccacaaaacgcgcgtgagaaccaggagtcagaggcaggcgctgactggtctggttgtgaacactcgccccgcggttccacgggaggactatgaccgtctgagggccatcctgcacaatgccgctacgcacggccttgcagaggccaaccgtgatggccatgccgacttcgctgcacacttggccggcagagtcgcgtggatgtcacatcaccatcctgcccgggctgcaaagctgcaccatctcttggcccaggcactcagagatcagcccaggtga

SEQ ID NO: 13022 - RNA, 1230 nt, synthetic construct
  source 1..1230: mol_type = other RNA
atggtcgctggggccgtggctgacgcgcttttgaccaccacatggcacaaggaccagatgctggcagccgtcaggactgttactgctgcccgacctccgtgggctagacgactggtggctgttgtcctgcacgcatatcctcagcccccagccgataggcctcgggaactgagaaggttcctgctccatctgaccagaagggcccatgtccgtcggcggttagtcacgcctgcgaggaccgtgcacatgaggtggggcgcaccagctattgactccctcgcagacttcctgggactcgatggagatgaacttgattggttcgccgatcgcagagagatcaacagacacgcccgagatgaacggctgcgccattacagatatgcctggttgacacaccggctcattgaggcacctaagccccgcctccgagacttgcagcggagagtgctagacgatattcttagcgcagtgcccgtgcatgagggcgtacacgggttcgtacgtggacgcggagtgcactccttcgctcgtgcccatgccggatgcgacgttcttatcagtctggacttgcgggcgttttttagctctataactgcagcccggatctacgggctatttaggggcataggctaccctgagccagtggcacatacactgaccgcgttgacaactacgcgcacccccgcacatgttctacgtgccgcacccgatccacacttagccgctctcctgcgccagccacatctgccacaaggtgctccgacaagtccggcgttagccaacctttgtgcttataggctcgacaggagattggctgcactggccacccggtttggcgtgacatacgggagatatgccgacgatcttgccttttcaggccgcctcggtcgtactgaaactgaccaccttatcgccctggtggatggtatcgcagccgaagaggggttcagagtccacccaggtaaaacagaggttagacgccgctctcaaaggcaggctctgacgggcctggtcgtgaatgagaggcccgctgtgccccgagaggattacgacagactgcgagcaattctgcacaatgccgccactcacggcatggccgaagctaaccgggacgggcatgcggattttgccgctcatctcaccggaagggtagcctggatgtcacatcaccaccctagccgcgctgccaagctcaaaaccttactggaccgggcactggcgaccccctga

SEQ ID NO: 13023 - RNA, 1332 nt, synthetic construct
  source 1..1332: mol_type = other RNA
atgtctacggcggcccatcgacgcagggatgcagctttgagggcagcgctgcggcggcatgacagagagtcctcaggacatgctgcgccgccacaggtggcaggagcactagctgatgctctgttgaccactgattggcggcccgctcagatgcaggctgtcgttcgggcagttgtggccggtagagcaccatgggctaggcggctcgtggttgccgtatggagggcctatccccgggctcctgtagacagacctcgtgagttgcggcagtttctgatcaaccgagcactggccaggcgcgctgttatacgtcggcggatagtggctcccactagggtcgtgaggatgcgctggggtgctcctgccctaggagacttggcggagcttgctgcctttttgggactggatggcgatgcccttgactggttcgcggatcgcagagaactcaaccgccacgcaagggatgagcgactgcgccactatcgctacgtctggaggcctcatcggctcatcgaggcacccaaaccaaggatgcgtgacctccagcgcagattactggacagaattctcagcgtggtgccagtgcacgacagtgctcacggcttcgttcccggcagggggactcacacgtttgctcgcgcccacactggcgccgatgtactggtgcgcttagacctgagagcgttctttccatccatcacggccgcccgaatttacggcctgttccgcggacttggatatccggagcccgtggcccatactctgacagccctgaccacaacccggactccagctcacgtcctgagagaggcccccgatcctcatctggccgccttattgagacaaccccaccttccacaaggggccccaacaagccctgctctagctaacctctgcgccttccgacttgacaggaggctcagtgctctagccgggagatttggggtcacctacggtcgatacgccgatgacctcgccttcagcgggaccttaacaaacgcccgtgccgaccgtttggtggaactgaccggccgcattgccgctgaagagggctttagggtgcacccgggcaagacacgaatcaggagacggtcacagagacaggaactgaccggactggtcgtcaatgaaagacctgcagtgcccagaaaagaatatgatcgacttcgggcagtgctccataatgcagcaaggcacgggctggccgaggctaatcgtgacggccacgcagacttcgcagcacacctcgcaggtagagtagcctggatgtctcatcggcatcctacacgcgcggccaagctgcacgaacttctggcccgggcgctgacctga

SEQ ID NO: 13024 - RNA, 1413 nt, synthetic construct
  source 1..1413: mol_type = other RNA
atgactactgcagctcatagacgccgggcatctgctttacgcgctgccaggaggcgccatgatcgcgaatcatccggccatgctgctgcccggacacctaagggagcacataggcagtcaccttggcaggtggctggtgcactggccgatgctctgctgacaaccagctggcgccctgaagatatggttgctacagtcgggagtgtcgttgcaggcagacctgcctgggccaggagactggtcggagcagtgctcctggcatatccccgggctcctgccgatcgtcctagagagctgcggcatttccttgccggcctcgagggtagaccccgagttgctgtgagacgagccgtggtaagacacaggcccgtcgtgcccgtaagagtggttcgtatgcggtggggagccccaggagtggacggattggcaggactggcggcgttcctggaccttgatggcgacgcccttgactggtttgctgaccggagggaaatcaaccgccatgccagagacgaacggctgcgccactacagatacacctggctgacgcaccggctgatagaggcgccaaaaccacgcatgcgggcactccaacggcagcttttggaccagatcttgtcacgtgtgcctgtccatccctccgtccacgggttcgttccagggcgagacgcccacacctttgctcgtgcccacgctggggccagtgtattggtgtcaatggatctccgagccttctttagctcgatcacggccgcaagaatccatggcctcttcctggggataggttatccggagcccgttgcccacgcacttacagccttgactacaacccggactcccgcacggattctcagggcagcctctgatccatacctggctgcgttactgcggcaaccccacttgcctcagggagcacccacatccccggcactggctaacctctgcgccttccgcctggaccgaagacttagcgggttagccggccgcttcggtctgacctatggccgttatgcggacgacttagctttttctggaactctcgccgacggtagagtggctaggctagtggcgttggccggccagattgccagggaggagggctttcgcgctcacccaggcaaaacccgagtcaggaggaggtcccagcgccaagagctaaccggccttgtggtcaacgataggcccgccgtgccaagggaggattacgaccgcctgagagccattctgcataatgctgccacccaggggctagctgccgccaatcgagatggacatcctgactttgcggcacacctggcaggcagagttgcgtggatgagccaccaccacccaagtcgagccgctaagctcaaggatctcctggatcgggtaaggtccagcgggccggaagtgagcgtggaaaggcgttcttga

SEQ ID NO: 13025 - RNA, 1257 nt, synthetic construct
  source 1..1257: mol_type = other RNA
atgctgaccgtcgactggcagccagagcgcatgaccgctgtggtcagaacggttgttcgggggagggctaggtgggctcgaaggttggtcgatgctgtcctccgcgcatatccaagagcgcccgctgatcgacctcgtgaactgtgccgcttcctcaccaaccgtggcggtattccccggacacgggtaaggcggagacttatgactcctaccagggtggtgagaatgcgttggggcgcacctcctatcaatgacttagcggagctagctgccttcctgggggtagacggcgatgccttagactggtttgctgataggagggagattaaccggcaggcgagggatgagaagctcagacactttcggtacgcctggttgccgcaccggctgatcgaagccccaaaaccgcggttgagaactatgcagaggaggctcttagatcgaattttgtctcgggtgccagtgcacgactccgtgcacggttttgttcccggccgcggtacacacactttcgcccgagctcacgcaggtcaagccgtgttgataagcctggacctgcgcgcattcttttcgagcatcactgccgcacgaatctacggactcttccggggcattggatatcccgaacccgtcgcgcacgcattaacagcgctgacaaccactcgaacgccagcgcgcgtgcttagagcagctcctgacccccatctggcagccctgctgcgtcaacctcatctcccgcagggagccccaacatctcccgctttggccaatctctgtgcctttaggcttgaccgcagactaagcggactggccggcaggttcggcctaacatacgggagatatgccgatgatctggcattcagtgggaccctggacagtaccggaattgccagacttgtgaccctggccggccagataaccggtgaagaggggtttcgcatccaccctggaaaaacaagagtgcgccggcagtcacagcgccaatcactgacgggcctggtggtcaatgcccatccagcagcttcccgcaaggactacgacactcttagggccatcctccataacgccgccgttcacggccttgccgctgcaaatcgtgataaccatcccgatttcgccgcacacctggccggaagagtagcctggatgagtcatcaccatccctccagagctgcaaagctgcatcagctgctcgctaggactgctggggaccagccaagagggccttcctcagtgagcaacagccggtcttcttga

SEQ ID NO: 13026 - RNA, 1386 nt, synthetic construct
  source 1..1386: mol_type = other RNA
atgactacagctgcgcataggagaagagccagtgcattgcgagccgccagaagacgccacgatcgcgatagctcgggacacgccgcgacttctacatggtacgggccccatagacagcggccatttagggtggcaggcgcactggctgacgcattacttaccaccgattggaggcccgaacagatgacagctgcagtacggtctgtagcagcaggacgggccgtgtgggctgttcgtctggtaaaagccgtgttactcgcatatccccgactgccagccgacaggcctagagagctccggcagttcctcgctaatctgcctcctaccccacgcactacggtgcggcaagccgtgatccgccatcgacttgcggtgccaacccgtgtggtccgcatgaggtggggtgcacctggcataggggacctcgctgaactcgccgcattcctggggttggatgatgatgccctggattggttcgctgacagacgagagattaacagacacgctcgggacgaaaagctcaggcattaccgatacgcgtggaggccacaccggctcatcgaagcccccaaacccaggctgcgcgccttgcaacgtcagttactggaccagattctgtccgccgttcccgttcatgaccatgtccatggctttgtgcctggtcggggaccgcacacatttgcaagagcccacgcaggcaatgccgtcctagtgtcaatggatctcagagcttttttctcatccattacagctgcccgcatatacggcctctttcgtggaattggttatcctgagcccgtcgctcatgcactaaccgcgcttactacgacccggacaccagcccccgtgttaagagacgcgccagatccgtatcttgcagccctgctcaggcaaccccacttgcctcagggagcccctacaagccccgcactggctaatctgtgcgcgtttcgactggaccggaggctgagcggacttgcaggaaggtttgggcttaactatgctcggtacgccgacgacctggctttctccggcaccctgaatacgtccggggtggacaagttcagcactctggccggcaggatcgtccacgaggagggtttcagaatccacccacgtaagacccggatccgcaggcgatcacaacgccaggcactgactggcctggttgtcaacaccctacctgccgcccctcgcgaagactacgatcgcttgagggctatcctgcacgatgccgccactcacgggctagctgaggccaacagagatgggcacccggagttcgccgctcatttggcgggcagagttgcttggatgtctcaccgtcatccgagtcgcgctgccaaactgcaccggctcttggaccaggctcttgccaagccatga

SEQ ID NO: 13027 - RNA, 1377 nt, synthetic construct
  source 1..1377: mol_type = other RNA
atgacaaccgctccccatcgccgtagaacaagtgccctgcgtgcagcaagaagaaggcatgatcgggagtccagcggccatgctgctcctgctgcacaagtcgccggcgctttggctgacgccctactgactaccagctggcagcccgacgatatggtggctgtggtgcgttctgtcgcaggaggacgccctatcagagctcggcgcctggtagaagccgtgcttcaggcgtatccacgagcccctgctgatcggcccagagaactccgcagattccttgccgctctgcctactaaaccccggaccacggtgaggagagctgtcatacgtcacagactggcagtcccaacccaagtcgtccatcttcggtggaacgccccggcattgtccgatctggccgatctggccgatttctttggacttgacggcgacgcactcgattggttcgccgataggcgggaaattaatcgcaaagctaatgaccagaaactgaggcactatcgatacggctggctgcctcatcgactgattgaggcgccaaagccgaggctgcgagcgcttcagagacgattgctggacaggatattgagcgccgttccggttcatgatcgggtacacggctttgttccgggacgggggacccacacttttgcccaactccacgccggagcccccgtattggtgtctatggacctccgggcattctttagctcgatcaccgcagccaggatctatggtctgtttcggggtatcggttaccccgagccagcagcccacgctttaacggcgctgacaaccaccagaacccccgctagagtgcttcgtgcagcacccgatccttacttggcggccctcctacgccgccctcatttaccacagggggctcccacttcccctgctctggcaaacctctgcgccttcagacttgacaggcggctgacagggctggcagataggttcgggctgacatacgcaaggtacgccgatgacctggctttctcaggcactctctcccgaacacggattgaccgcctcgtgacactggccacccagatcgtgcacgaagagggttttaggacccaccctggcaagacgagagtgcgcacttcaagtcagcgccagagtctcacagggctcgttgtgaatgccaacccagccgttccccgggaagactatgaccggctgcgagccattctgcacaacgcggccactcacggcttagccgacgccaatagggacggacaccccgacttcgccgctcatctagcgggcagggtcgcatggatgtctcaggcacacccttcaagggcggccaagttaaacgccctcttggagcgcgctctagggccagaggtgccaagaccaggacgacgctga

SEQ ID NO: 13028 - RNA, 1395 nt, synthetic construct
  source 1..1395: mol_type = other RNA
atgagtactgcggcccacagaagaagggcctctgccctgcgggcagtgagaaggagacacgatagagaatcaagcgggcatgcagccatcagaacttggaaccgtaagagactagctccggccaggagatggtattctcccaggaggcagccatcctcttccgtcgccagcgccttggcagacgcattgctcactacaaactggaggcggccccatatgttgtcagcagttcgggttgtagctcctgcaagagcgcgccgccttgtggacgcagtgctacaagcgtatccacgcgctcctgttgatcgtcctcgcgaattgagcaggttcctggccggatttggcgtccctcgtgctgtgatccgacgtaggctagtggcccccgctagggtcgtgagaatgcgatggaaggctccaaggatagatgatctggctgggcttgctgcatttctcgagctggacggtggcgcgctggattggttcgccgacagacgagagcttaatcgtcaggcgcgagacgagcggttacggcactaccgctacgcatggctgagccatcgcctgatcgaggcccccaaaccacggctcagggccttacagcgacgagtgctggatgagatcctggccactatcccagtgcacgacgctgtacacggctttgttcccggccggggcactcatactttcgctgaacgacatgccggacaagacgtgctgctcaccatggaccttagggcctttttctccagtattacggccgcacgcatttatggtctttttttgggcgctgggtaccctgaaacggttgcacacgcactgaccgccctcacaaccaccagaaccccggctcgcgtcttaagaagcgccccagatccggacttggctgctgtgctccgaaggcctcatttaccccagggagcgcccacatctccagcactcgccaatttgtgcgcctttcggctggaccgccgcttaacagggctggctgaaaggttcggcctgacctatgctcggtacgccgacgacctcgctttcagtgggacagggcctgtggatcggctgacacctctggtggcccacattgcaacagaggagggcttcagagttcgcccagacaaaaccaaggtgcggcatcggagccaacgccagtccctgaccggtctggtcgtaaacgagaggcctgccgtcgctagagccgattacgaccggctccgcgcgattcttcacgatgccgcaacccacggactggatgccgctaaccgtgatggacaccccgacttccttgcccatctcactggtcgcgtagcctgggcttcgcatgatcacccctcacgggcaacgaaactgaggcggctgctcaatcaggtgcagtcctcacacatagtcggaagatga

SEQ ID NO: 13029 - RNA, 1233 nt, synthetic construct
  source 1..1233: mol_type = other RNA
atggttgccggcgctcttgccgatgcattgctgaccaccacctggcagcctgaggaaatggaagccgcagtcaggagtgtggcagctgtgcccgaagcatgggctcgtaggctggtccgcactgtcttaagcgcctatcctcgaaaccccgccgatagacctagggaactgcgccggttcctcacggctcggagagcttacatcaggcaccgactcgtgactccaacccacgctgttcggatgcgctggaatgctccacccatcaatgatttggctgagctggccgcattcctagaactggacggagatgctcttgattggtatgctgacagaagggagattaaccgtcacgctcgagacgagaggctcaggcattaccgctacgcttggcttccccatcgcctgattgaagcgcctaaaccactgctgcgggacttgcagcggcgtttgctcgatgacgtgctggccaccgctccagttcacgaacacgcccacgggtttgtgcccggaaggggtacacacactttcgcccgagttcatgccggccgtgacgtgctggtgtcaatggacttgcgcgcctttttttcctctattacggcggcgcggatatatgggctgtttcgcggtatcggctatcctgagccggtggcccacgccttaactgcccttaccactacacggacgcccgcacacgtcttgagagccgcaccagaccctcacctcgcagctctgcttagaaggccccatctccctcaaggcgccccaacatccccagccttagcaaacctgtgcgcttacagactggatcggaggttaacaggcctcgcagaccgattcggtctaacttatgccagatacgccgacgatctggccttttccggaacccttacacacgcccaagtggagcgcctggttgcgctgactaccagcatagcagccgaggaggggttcagggtgcatccccataagacacgctttagaacccaggcccagagacagagtgtaaccggcctggtcgtaaacgatcgccccgctgtaccgcgggaggagtacgataggctccgggcaatcctgcacaatgcggctacacatgggctcgcagaagcgaatagagacgggcatgctgatttcgccgcacacctaacaggaagagtcgcgtggatgtctcatcatcacccgagccgggccgctaagttgcaggacctccttgtgcgagcactgtcagccccttga

SEQ ID NO: 13030 - RNA, 1281 nt, synthetic construct
  source 1..1281: mol_type = other RNA
atggccaccgccctggcagatgcccttctgacaacgtcttggaggagaaaggctatgatcggtgcgggaagggcattattgggcaggccgactagatgggttccccgcgttgtcgacgccgttgctgcagcttatagagatgcccctgcagaccgacctcgcgagttggctcgctttgtggccgagattattcgcacaactcccggtgcgaggaggcagtccagacggacagtaatcagacatcgccttgttgcccctacccggactgtccggatgcgatggaaaaccccccgcatcgacgacctagctgctctcgccgacttcctggctgtcgacggcgatctcctcgattggttcgctgaccgaagagaaattaaccggcatgcccgggacgaaccactcaggcactatcgctatcagtggctgccacaccggctcatcgaggctccaaaaccgcgcctccgggcaattcagcgacgtctactggaccacgtgctggcggcaattccagtgcatgagcgagcccatggtttcgtggccgggagaggcgtccacacgtttgctggatcacacgccggacgtgcggtgctggtgagcatggatctccgcgccttctttagctcaatcactgctccccgggtgtacgcgatgtttaggcaagccggataccctgaacccgtggcacacgctctgaccgctcttaccaccacccgcaccccagccagggtattacgaggggctcccgacacaacaagggctgccatgttgagacagccccacctgcctcaaggagcacctaccagcccagcactggccaatctttgcgccttccgcctggatagacgactgactggactcgcggaccggttcggtctgcactacagtaggtacgcggatgatctcgctttctccggaacactaggcgaacggaggactctggacttgataagttatgtgaggggcatagcagcagaggaggggtttcgggcccatcctgataagaccagagtacggcggagagccgaccgtcagcttttggccgggctggtggtcaactctagacccgccgtgcctagggaagagtacgatggcctgcgtgctatcctgcataatgccgggagacatggcttggccgcggcaaacagggatgggcacccagattttgccgctcacttagccggccgtgttgcatggatggcccaccagcatcccgctagagcagcaaagctgcacaatctgcttcgcgccgcattaacagccccgacgactgcaggctcctga

SEQ ID NO: 13031 - RNA, 1182 nt, synthetic construct
  source 1..1182: mol_type = other RNA
atggtgttcggacgcagggcaagatgggtccgtcctgctgttgacgcggtgctcagggcttatcgcgaagcaccaggtgatcgacctagagagctggccggctttctggctgcatccgggagactgggggctcacaggactgtggtgcgacaccgtcttgttgccccgacgcgcaccacaagaatgcggtggccagcaccggcaatcgatgacctgggcgcactggccgatttccttagcctggatggggacatgatggactggttcgcagaccgacgcgaaatcaacagatacgcaagggacgaacggctccgccattataggtacacatggctgccccatcgacttatcgaggcccccaagcctatgctgcgcgatctgcagaggcgcctgttagccgaggtactcgctggaatgcccgttcacgagcgggtgcacggctttgtgcctggacgaggcgtacatacatttgcagcgtcccacaccggccaggaagtcctggtatctctcgacttgcgggccttcttcagtagtattacagcagctcgtgtgtacgccgtgtttaggcaagccggatatccagagcccgtggcccataccttgacagcactgaccaccactcgcactccagcccatgtccttagagacgccccagacgctactcgtgccgccttgctaagacggccgcaccttcctcaaggcgcccctacatctccagccctcgctaatttgtgcgccttccgccttgatagaagactcaccgggctggccgacaggtttgggctacactacagcagatacgcagacgatctcgcgttctcaggtacggtaggagatcggcgcgtcggcgacctgatatcatacgtgcgggcgattgtgaccgaggaaggtttccggacccaccccggaaagactcgtgttcgacggcagggggatcggcagctgttagctggcctagtcgtcaacgcgaggcccgctgtggctagggaggattatgatcggctccgagccgttctgcacaacgccggaagacacgggttggctgcagcaaatcgcgagggccatcctgactttgctgcgcatctcgctggtagggtcgcctggatggcccacaggcatcccactagagccgccaaattacacagcttgctgcggtccgctgtggctgccgataggcagtga

SEQ ID NO: 13032 - RNA, 1329 nt, synthetic construct
  source 1..1329: mol_type = other RNA
atgactactgcggcccacaggcggaggttagctgctctcagagctcggacccggcgccatgaccgagttagctccggtcatgccgctgccgctgcaccaagagtggcaacagcactggccgatgcctttctgtcgacgcggtggcggcgaaaagccatggtgaaagccggagctgcagtactagggagagagagaaggtgggtggatcgagcagttgtaaaggtcctgagagcttatcggatcgccccagccgataggccaagggagctagcgggctttctggaaggcattacccggccggccgtgatacgtagaagacgcgttactcctgtgcaggtggtaaggatgcggtggcacgcaccccctattaatgatttaggagaactggctgccttccttgatgtcgatggggaccttctcgattggttcgccgatcgcagggagatcaatcgccatgcccgggatgaacgtctgagacactacagataccgctggcttccccaccgcctcattgaggccccaaagccccacttgctggccctccagcgacgtctgctggacgaagttcttgcccgtgtacccgtgcacgagcgagcccatggcttcgtgcctggcagaggcgtgcatacattcgctgcttcccatgcagggcaagcggtggtcgttcgcctggacctgagggctttttttagtaccgtcacagccgccaggatctatggtatctttcggagcgcaggatatcccgagcctgtcgcccatgccctgactgctttgacaacaacccgcacccccgcaagggtgctgagagatgcgccagaccctcgcctcgctgctttgttgcggcgacctcacttaccacaaggcgcaccaacctccccggcattggccaacctctgcgctttccgcttggacaggcgacttacgggcctcgctgggaggttcggcctgcattattctagatacgccgacgacttagccttctctggaccggaccatccccataacctgatcccctacgtgcactcaattgctgtcgacgaaggtttcgagataaaccctgccaagacacgagtgcgcgggcaagctgatcggcagctcctagccggtctggttgtcaattctagtcccgcagtccctcgcgaggactacgatcggcttcgggcgaccctgcacaatgcggctactcacggactcgcagaggccaacagggacgggcacgcagactttgcagcacagctggccggaagagtggcttgggtgagccacagacacccagcacgtgccaggaaactccaggaactgctttcagcggccctggcgaagccttga

SEQ ID NO: 13033 - RNA, 1284 nt, synthetic construct
  source 1..1284: mol_type = other RNA
atgtccgccgcactggcagatgccctgttaacgtctcgctggaggcctgggccccttcaacggactggaaccgccgttcttggaggcagacccccctggttgcgtattgcagtcgtcgctgttctgcgggcttacagacacgcaccggctgataggccccgggaattagcggcgttcctctcttgcctggagcggtcaggtagaccattggtgcgccggcatcccatcaggctaagacgagcgacgcctgtgagaatcgtccggatgaggtgggacactccacgcatcgacgatctagccgccctggccgatttcctgggtgtggatggggatcatctggactggtatgctgatcggcgacatctgaatagacacgcgcgggacgaacggcttcgccactacagatacgcatggctgccacataggttgatagaagccccgaagccacggttgagagccttgcagcgtcgtctcctcgacgacctcttaggccgcctacctgtgcaccctcacgctcacggctttgtgcctgggcgcggagtgcatacatttgccgcaccacacgctggccagaaacttgtgattggtctggacctcacagcattcttcagtagcattactgctgcacgcatccatggcctctttcgcaccgccggctatcccgaaccagttgcgcataccctgaccgccctgacaacaactgccactccagcagccgtactgagaggacgtaccgacccacatcgcgctgccctgctgagacgtccacatcttccccagggtgctccgaccagtcctgctctcgcaaacctggtggcgtaccgacttgaccgaaggctaaccgggctcgccgataggttcgggcttcactatacccgctacgctgacgacttggctttcagcggaactctgggcagaggagagcctgcccacctgatcgccgctgtgcacacaatagccgccgatgagggctttcgagtgcacccccgaaagaccagggtccgcggtagaggcgatagacagcggctggccgggttagttgtcaacgagaggcccgccgcctcacgtgaggactacgatcggctccgggccgtactccatgatgccgcaaggaggggacctctggtggcaaatcgagagggccacgacgactttcccgcttatctgagggggagggtagcgtgggtttcccatcgccaccctgccagagcagcaaaactgcacaggatgctcgcagtcgccttggctggacctgctgctccacccacggtgacaacaccgtga

SEQ ID NO: 13034 - RNA, 1344 nt, synthetic construct
  source 1..1344: mol_type = other RNA
atgttttgccctcctggaacaggaggcagcctcgatagatcactcacatttgccgggcatgccaacttgggcgcggtgagacaggcagtgaacagtgccctagctgaggcgtttcttgcctgtggctggcgtgatgggcccgcaagacctgctctggacagactgacccgcgccggtgctgaggttcttggaggtcggccatggtggctgaggccgttggctgcagaggttcttcgggcccacaggaacccaccattagatcggccccgcgagctggccgcttttttaggccggagggtggctggttcccgtccaattatggtcaggcgcgcagtcccagttcgcactgtccggatgcggtggccgactcctaggatcgatgacctggctgcgttggccgacttcctggggctcaccggtgaagaactggattggttcgccgaccgccgagaaattaatcgccacgcgagagcagagcagctgaggcattaccgctacagatggctgccacaccggcttatcgaagcccccaaacccagactgcgcgcccttcacaggcggcttctcgacgatctgctgggacggttgcctgtgcatgacgccgcccatgggtttgtgcccgggagatctgtgcatacgttcgcagcacctcatgccggccgggctttggtgatcagggctgatctcgccaccttcttctcttcaataactgcaccccgtatctttggcctgttccgcacagccggctatccggagcctgttgcccacgctcttacgggactcacaactacgaggacccccgctgcagtattaagggggcacgggtacgataccgctcgtatgctccggcagccacatctacctcaaggagcccctacatcccccgcactggctaacctcgtagcattcagattagatcgcagactggcaggcctggctgcacgattcgacttgacttatactcgatacgcggacgatctagcgttttcgggcccccggaccgatccaaggaggtttctcgacgctctcagaacagtggtcgccgacgagggcttccgactgcatccagccaagaccagggttcgaggacgcgccgatcgacaaagcctggccggactggtcgtgaatgaacaccccgctgtgccaagaactgactatgaccgcctccgtgctatattacacgacgctgccagacacggtttggccaccgccaatagagacggccaccccgacttcgcggcctatctgaccgggagggtagcgtggattgcacaccatcacccgacacgagcagccaagctacaccggatgctggcagccgctctgaatcctcccccaccttga

SEQ ID NO: 13035 - RNA, 1182 nt, synthetic construct
  source 1..1182: mol_type = other RNA
atggttgtggcaggtttggtgcgggctggcgccgaagtacttggtgcacgaccatggtggctaagaccggtcgtggcgcgggtattgcgcgcttatccccatccgcccctcgatcgtcctagggaactagcggcctttctggacagacgcgtgcagccccacccagttgttgttcggagggccgctcctgctagggtagtgcgaatgcgttgggatacccctcagctgaacgatttgggggccctcgcagattttctcgaggtgtctggcgacgagttggactggttcgctgaccgcaaagaaataaataggcatgcccgcgacgagagactgagacactaccgctacgtctggctgccacaccggcttatcgaggcaccaaagccaaggctacgggcgctgcaacgtagactgctcgatgagctgctggggaggatccctgttcatcccgcagctcacggattcgtcccaggaagatctgtgcatacctacgccgccccccatgcaggacagcgaatggtcgtgcgtgccgatttggctgcctttttctccagcattacagcacagcgcagctacggactgtttcgcctggccggctatccagagcctgtcgcacacgcccttaccgcacttactaccactagaaccccgattgatgtgttgcggggcagacccggctcaactaggacactcctgagagagggacatctcccacaaggcgcaccctgcagtcctgctctggcgaatctggtcgccttccgactggacaggcggcttacaggtttagctgcccgcttcgggctgacgtatacgcggtacgccgacgacctcgctttttccggccctagggccctcaatttagacgcgctcgctgctgtggtgaaggatgaagggtttagactccaccctgccaaaacaaggatcagaggtcggggggatcagcagcgccttgcaggactggtggtgaacgaacatcccgccgttccccgcggggaatatgaccacctgcgagctattttgcacgacgccgccaggagaggcttagaggctgctaacagagagggcaaagcggacttccgggcctaccttatgggacgggtcgcctgggtaagtcaccgtcaccctggccgagccgcaaagctggataggttactgaaggacgcactgaggcggggggattga

SEQ ID NO: 13036 - RNA, 1182 nt, synthetic construct
  source 1..1182: mol_type = other RNA
atgctcggcagactggtgcgggctggaggtgaagtcctaggaggacgaccttggtggctccggcctgtagtagcaggggtgctgagagcctatcgggacgctcccgctgacaggccaagggaactggctggctttctgagtggccgcgtgcagtcacaccccgttgtggtacggcgcgcagttcctgtgcgcgtagttaggatgcggtgggatacacctagaattgacgacttgggcgtgctggccggattcctaggtttagcgggggatgagttggattggttcgccgacagaaaggagatcaaccgccacgcacgcgatcagcggcttagacactatcgttaccgctggctgcctcatcgtctgattgaagcccctaagccgagactgcgagccgttcagcgcagactcctggatggcgtgctcggaaggatccccgtgcaccctgcagcccatgggttcgttccaggccgtggtgtccatacctttgctgtgccacactccgggcagcccatggtggttagggtggacctcgcaagcttcttttccagcgtcacagccccccggatatacggactctttaggaccgctggatatccagagcccgtggcccatgcattaacagctctgaccacaacgaggacccctgcggatatcttgggaggcaaataccttcccctgctccgacacgcccaccttccacaaggcgctccgtcgagtcccgcgcttgctaacctggtcgcctatagattggatcggcgcctgtctggcttagcagcccgttttgggatgacttatactcgatacgctgatgatctcgccttctcagggcccagggtatctgcgccaaggctcctggccgctttagaggcagtggtcaaggatgaagggttccagctccgacacgcaaaaacccgggtcagaggccagggtgacaggcaagttttggcggggttggtggtgaatgagcgcccagcagtggcccgtgtcgaatacgacagactgcgcgccgtccttcatgacgctgccagacgaggactggacgaggccaatagggacggccacgccgattttagcgcttacctgaaggggtgggtcgcctgggtgtcccatagacatccgggcagggctgcaaaacttgaccggctgctagcagccactctgggtgaggaccgggcttga

SEQ ID NO: 13037 - RNA, 1383 nt, synthetic construct
  source 1..1383: mol_type = other RNA
atgtccacagctgcccaccgtaggcgggcttcagctctcagggctggtcggagacgtcacgacggtgccagttctggccacgctgctactcgccggcaagctccaaggagagtggcctctgccctggccgacgcattcctgactgtggcgtggcgacgggctgagctcttagccgtgggacgcaccgtccttgctgctcgaccgagatggctgggcccagtagtgactgccgtcctgcgagcttatcgcgacccgcctgtcgatcgtcccagggaactagcggcctttgtggccggagccactggaccagcaggccaaagggttggagcggcggttgtgagggaacggaggatggttcccacccgcacacagcggatgaggtggggtacgccagctatagacgacctggccgccttggccgattttctcgacctggatggggatcatcttgactggtttgccgacagaagggagctgaaccgccacgcccgtgacgaaagactccgccattatcgctatacctggctcccccacagactgatcgaggcaccgaagcctagattgcgagccgtccagcggcacctcttggataccgtggtaggcctgcttcctgtgcacggaagcgttcatggctttgtccctggcagaggcgtgcacacttttgccgccgcccatgccggaaaacccacggttgtgcggctagacctccgggcattcttcaccactgtgacagcagggcgggtgtacggcgtctttcgaaccgctgggtaccctgagcctgtggcacacaccctgacagccctgactacgaccaggaccccagccgcagtgctgagaacagcccctgatagagccgcagcaggtgcacgagctgctctgctgagacagccacaccttcctcaaggtgcacccacatcccccgcgctggctaatctgtgcgcctacaggcttgatagacgattagccggtctagccgttcggttcggggtgggatacactcggtacgcggacgatctggcattcagcggagacttgactgccagacaggctggccatctggtgacacacgtgacagcggtagccacagctgaggggttcgggaccaatccagctaaaaccagagtcaggggccgcgcagataggcagcagttagccgggttagtcgtaaacgcagcaccagccgttcctcgcgcggaatatgacctgctccgcgccattttgcatgatgctgcccgtaacggccttgcagccgccaatcgcgatgggcatcccgacttcgcagctcacctcgcgggtagggtggcttgggtcggacataggcatcccgctcgggcagcaaagttgcgccgactcctggctgatgtaggcgcaccccggacctga

SEQ ID NO: 13038 - RNA, 1224 nt, synthetic construct
  source 1..1224: mol_type = other RNA
atgttgtggcagaggagcgagcttttggctgtaggacacaccgtgttgggtgcaagaccacggtggctcggacccgttgttaccgccgttctccgggcttaccgtcaaccgccagctgatcgaccacgggagcttgcggcctttgtagccgctgtgactgggcccgccggaacaagagtccaggcagcagtgatccgcgaaaggcgttttgtggccaccagagttggcaggatgcgctgggcaactcccgccgtagatgatctaggcgctctggccgattttctcgacgtggatggggataggctggattggttcgcggatcggcgcgagctgaataggcatgcccgggatcaacagcttcgacactatcggtatctatggcggcctcataggctgatcgaagcacctaaaccccgcttgcgagcattacagcggcacctcctggacacgatcgtggggctgctgcccgtgcacgaatctgttcacggcttcgtggctggcaggggggtgcatacatttgccgctgcccatgccgggaaacctaccgtgctccgcctggacttgagagcattcttcacaagtgtgactgccgcacgtgtgtatggcctcctgaggaccgctgggtatccagagccagtggctcatgccttgacggcattaaccacaactagaacaccagtggacattctgcgcgacgctccgaatagggctcatgctgccctcctgcgacaacctcaccttccccagggagcgcctacatctcctgcgcttgccaatctctgcacgtttcgtttagatcgcaggttagcaggactggccggcagattcggtgccgactacaccagatacgccgacgacctagcgttctccggggatctcggtggcagacaggctcagcacctgatcacacaggtcactgccatagccaccgccgagggctttggcgtcaacactgccaagaccagagtccgcggacaagcggatcagcagcggcttgctggactggtcgtcaacgctgctccggctgtccccagagccgaatacgacaggctgcgagcaatactgcacgacgctgcacagcacggaattgacgccgccaacagagacggccatcctgacttcgccgctcatctggccggtcggattgcatgggtagcccaccgacaccctactcgcgcaagcaagctgcagcggttgctgtcagcagcggttcccgcaccatga

SEQ ID NO: 13039 - RNA, 987 nt, synthetic construct
  source 1..987: mol_type = other RNA
atgagatgggataccccgcggatagacgacctagccgcccttgccggctttctggggttcgacgcagacgaactggactggtacgccgaccgaaaggaattaaaccggcacgcgcgtgatgagaggttgcgccattatcgatatacctggttggggcgccgcctgatagaggcaccaaaaccaagattacgggcagttcagaggcgtcttctggatgatgtgttgggaaggctacccgtgcacccagccgctcacggattcgtgccaggacgcggacctcacacatttgctgctgctcatgcagggcagcctgtcgtggttcggctcgatctggctgccttctttagcaccattacagccggccgagtctacggcctgttgcgaacagcaggctatccggagcctgtggctcatacactgacagccctggtcaccacgaggactcctgcagccgtgctcaggaacgccccagattggcgtactgccgccctccttagacacccccacttacctcaaggagcccccacgtcaccagctctcgcgaacctgctcgcttacaggctggatagacggctcagcggcctggcagcgagatttgacgctacctacacaaggtacgcagacgacctcgcgttctctggccccctcactggtggcgtagctggtaggctggttgccgcagccactaccgtagtcgccgccgaaggtttcagggtccatcctgggaaaacccgcattagaggccgcgcagacaggcagcttctgactgggctggtggtgaatgatcgccccgcggtaccccgagctgagtatgatcacttgcgggccgtgttgcatgacgcagcgcggaatggacttgcagccgccgatcgcgatggtagagccgactttgctgcttacctgcgggggagagtggcttgggttgcacacgcccatccctccagagctgctaagctgcaccggctgctagccgcagccttgagttga

SEQ ID NO: 13040 - RNA, 1317 nt, synthetic construct
  source 1..1317: mol_type = other RNA
atgagcactgctgctcataggcgtcgcgcatccgcgctgagggcaacattacgtcgccacgatcgagactccagcggccatgctgctcgggctgtagctggagccctggctgatgcttttctgaccgtggattgggcacgcggaccccttttggaggtgggcagggaggtactgggacgcagaccacggtggttggggcctgttgttaccgctgtgctgagggcctatagagaggcccctgcggacagaccacgggaacttgccgaactgataagcgcgcctggtcggcagccaattcgggtgaggcgtgcaacggccactcgcactgttcggcaacggtgggactctccgagagtggacgacttggccgcccttgccgagtttctcgcagtgacgcctgatgaactggactggtttgccgaccggaggggactcaataggagacatcccgatcctcgcgtaagacactatgcctacacgtggattggggatcggctcattgaagcccccaagtctcgcctgaaggctctccagaggagagtgctggacgaactcctaggaccccttcccgtccacccgttcgcccatggattcgttccggggagatctgtccatacattcgctgcgccacacgccggacaggtcactgtggtcaggatcgacctgcgcggctacttttccagtgtgaccgccgggagagtgtacggcttatggcgaaccgccggatatcctgagcctgtcgcgcacgccctaaccgcactctgcacaaccgctacaccacacgccgtctcaagaagagtcgagcaccgtacccctcacttaccccaaggcgcgcccacatcacccgctttagcaaatctggtgacttttcgactggatcgacggctggcgggtttagccgccagattcggtgccacctacagtcgatacgctgacgacctggcgttctcgggccctcttcgacaaccagctcgcctggtggccgcagtaacagccgttgccgctgaggagggtttccgggtgaacccagccaaaaccagggttcgggggcgtggtgaccaacagaggctggctgggttggtggtcaacgatcggcccgcagtgcccagagcagactatgatagattacgcgcagtgctccaccatgccgcacgcgatggcttagatgccgcaaatagggacggccacccggattttgctgctcacctcacaggcctagtcgcatgggccgcacatgggcatccaactcgtgccgcacgattacacgggttgctccgcgccgcaggcatcaacaggaggactgctacacctccatga

SEQ ID NO: 13041 - RNA, 1062 nt, synthetic construct
  source 1..1062: mol_type = other RNA
atggagttggccgaattcatcgccgctcaccttcctgctaggctgccagttcgaatagtagtcagacgggctgtccccacccggacagtaaggatgaggtgggatactcctgttcttgacgacctcgcggccctggccgaactactcgaactcgatggcgatcgattggactggcttgccgaccgtagggagatgaaccgcaagactctgcgcgaacccctgcggcactatagatacacctggatgggacgcaggctgatcgaggcaccaaaacccttgctgcgaggacttcagagacggttactggacgaagtgctggggcgcattcccgtacacccagcagcacatgggttcgtgccgggacggtccgtccatacatttgccgcccctcataccggaagggacgtggtggttcgtatcgacctcgcccatttctttgcctctattagcgtgcagagagtctacggcctctttagatctgtcgggtatcccgagccggtcgctcatgctttagcggccctgtgtacgacaagcaccccaagtgacatcgctaggggtagtatcgctcttcgcaccccccacttaccacaaggcgcccctacttcccctgcactagctaatctgtgcaccttcaggctggatagacggctaacgggcctggccctctcctttggtgcgacatacacacgatatgctgacgatctcgcattctcaggctcattcaacgcagaccacgtgatagccgcggtgcgccaaattgtggctggggaggggtttcgcgtgaacccagcaaagactagagtgcgggggcgaggcgatcgtcagagattggcaggcctggtggtgaatgagcgtcccggtgtcgctcgcgaagagtacgaccgccttagggctatcctgcacgcagccgccagagatggactggatgccgcaaatcgggatgatcatccggacttcaggaaccacctgctgggaaggattgcctgggttggtcacggcagccctgccagagctgcgaaattgcgggagctctttggattggttgcagccactggcctctga

SEQ ID NO: 13042 - RNA, 1305 nt, synthetic construct
  source 1..1305: mol_type = other RNA
atgtccacggctcagcacagacgccctgatgcagctcttcgagccggacagggaaggcacgacagagtctcctcaggacacgctgcactggccgatgcattcctggctacacccgcctgggaaagagccgcacttcttggcgccgggtacgaagtgcttggacgtcggccgaggtggttaggcccagttgtgaccgcagtgctgggagcctatcgcgaacctccagctgaccgtcccagggagttagctgcctttgttgccgcactcggccgcgtgccttttcgtgctcgggtagctgttcgtagggcggtaccgaccagggttgtgcggatgagatgggatactccccggttggacgacctcgcagcgttggctgagttcctcgaggttgatggggaccatctcgactggtacgcggaccggagagagatcaacagactagcagcggacggcgccctgcgacactatagatacacttggctggccactcgcctgatcgaggcccctaaaccccgactccggaccctacagcgccgattgctggatgaggtgctgggaaggatccctgtgcatccagcagctcatgggtttgtcccaggcagggacgtacgcacattcaccgctgtgcaccttggcaaaagcacagtggtgcgcctcgatctgagcgcgttcttcgcttcaatgacagttagccgtgtgtacggacttttcagaggtgcaggttatccagaaccggtcgctcacacgttggctgccctgtgcacaacccggactcctccagatgtcgtgcgcgacgcccctagttttttgctcgctgcccagctgaggcagccccatttaccccaaggcgccccctcttcgccagctctagccaatctgattgccttccgcctggataggaggctggccggtttggcagacaggtttggcgcggactactccagatacgcagacgatctcgccttctctggggcctttgacgcaccccgactagtggccgcagctaccgatgtggtagtcgacgagggttttcgggtccatcctatgaagacacggattcgggggcgggcagatcgacagcaacttgccggactggtggtcaacgagcacgcagccgtccccaggaccgaatatgatctcctgcgagccatgctacacaccgccgctagggacgggttagctgctgccaatagagccggccatccagatttccgcgcctatctggctggcagaatagcctgggttgggcgggatcaccccagtagagcggcgaagctggcacgcctctttactgccctgccttga

SEQ ID NO: 13043 - RNA, 933 nt, synthetic construct
  source 1..933: mol_type = other RNA
atggtcaggcggcctacacggcatgagcctcctcgacatcgtccaccaccggcaccccttcctctgccagtggataggggcagacccgccgatagggggacagaagtaccagccgcccgacctgctactcctgcacctcacagaggtcctcgaccacatcccggtccaccagccgcacacggatttgtgccgggacggagcgctcatacctttgccgggatccacacagctcagcccgtggttgtcaggatcgacctgcttgccttttttacacacatacccgctactcgggttcatggcctgttccgcaccgcgggataccctgagtctgtggcgcacaccttgacaggcctatgcacgaatcggaccccacaccccgtactcagacgtgccccaaccgaactaccccacagggccgctcgattagccgctcttagaactggccatctgccacagggcgctcccacttcacccgctctggctaacctgtgtgcatatcgcctggaccggagactgaccggcttagccgacgccttcgcaatcacctactccaggtacgccgacgacctcgccttcagcggagacttgactacgcgccgcatagacgacctgattgccgatgtgacagacatcgcgcgcgatgaaggtttccaggtgcacccggcaaagactcgggtgcgtggcagagctgataggcaactcctcgctgggttggtcgtcaaccagcaccctgcaacgccacgggatgagtatgatcagctgagggccatcctgcacaatgcagccagaaccgggctcgccgctcaaaaccgcacaggacatcccgatttcgcgcagtatctgattgggagagttacctggattagtcaccatcaccctgcacgcgccgcaaaattggcggccctccttgctcatgcattggcggccccctga

SEQ ID NO: 13044 - RNA, 1329 nt, synthetic construct
  source 1..1329: mol_type = other RNA
atgctctggcctgcagtggtgagggttacgggcgtgccccaacaagcacgacgtgaccctcggaggcatcgtcccgacactggcacagcatatcgaccaatcaatagtgcggtccagtcacggggaactccagctgggacacctgtggtgcccaggcagagagatccagctctgcatggttctctgcaccgcgccacaagaactggggataccgatgacggactgcgcagcctgagatgctcccatggaggcgtcagcagggctgaccaagcaggcttaccctgtggtgtcaggagccgaagcttgcgcggcaattctggaaaggaccatagccctcgtcaccacaccaccggggccaagtcaagactgcgagccctgcaacgccggctactggctgaggttcttggacgcataccagtccacttagcagcccacggctttgtgccggggagaagcgctcacacctttgctgccgcccatgcagctcaaccggtggtggtaagaattgatccactaggtttctttactcacattcccgccactcgggtccacgggcttttccgaacggcaggctacccagaacctgttgcccacacactcacgggcttgtgcaccacaagaacaccacatcccgtactgcggcgcgcccctactggtcttccccatagggctactcgcctggcggcactcggaactggacatctcccccaaggggcccccacatctcctgctttggctaacctttgtgcctataggctggatcgcagattgaccgggctcgccgatgccttcgagacaacttacactaggtacgccgacgatcttgccttctccggtaacctgacaacccgccgcatccacacgagatctccgccatcccctacttcacccgctaaacgggcatccgaatcgactcagccacggccagcgtcagtgggagcacctaccggaaactctagtcctgacagcagttctactaccacacccccgcatcacgccacgaacaccacctccagtgccccttccagtacaaccccccctgcgccagcttcaccaccctcaaccggcccaacaacaccgactagcctgcataccagtagcgacgagttttcagaatctgccatcaccacccggcacgcccagcctaattcccccaggtgctggcccaagctgttaagacaccgtcggctcacaaggcggggctctttcgcagggtccagacagggccacgttggcaggcctaaaagagggttgagcaggacatatacctgctcggcggatctgcgacaagcttccacggccacccggctgtgtgacccactcacctga

SEQ ID NO: 13045 - RNA, 1614 nt, synthetic construct
  source 1..1614: mol_type = other RNA
atgccgggcgctgctccattcataggtcgcgggcttactccacggattcatcgtcacgccacctgcattgccgatactcacggcggccctaggtcactgcgttgtagccatggaggggtcagcagagctgatcaagcggccccacctcgaggagtcagatcaaggagtctacgaggcaacccgggcgacgccatcctcacatctgcaccacaccaccggtgtgtaggcacgctgagggagccagtgcacccctacgatcgcgcctctagtggccatgcagctacaccaaccggactgccagtgaacaccattcacgcactcgcgaccgccctggctgatgcattcctcgcaggagccggatggagaaggggcgacctggtcgatcagggtggcttggtactaggcgtgcgccggagatggctttggcccgttgccgatgcagccctggtggcataccttcatccccccacagataggccacgggaattggctacttttctctcgacactggaccctttacgggccgcggttactgcagctaggcagcatcggcgcccaatcgtgattcgagcccgacccgtgacgcctacacgtaccgttcggcggccttggcacacacctgtaatcgacactgtcggcgatctcgccgctatgctcgatctctcaattgagcatctggactggtatgccgatcggagggctatgaatagacgggccccggcccaccgcttacaccattatcataacagatggaccgacagagggcgactgatcgaagcacccaagtcccgcctacgggctttacagcgtcgtctgctggcggaggtccttggacccatcccagtccacccgactgctcacgggtttgtgcctggaaggagcgcacacacattcgccgctactcacgctgcccagcccgttgtggttcggatagacctcctggctttttttactcacatccctgctacccgcgtctatggtctgttccgaaccgcggggtaccctgaaccagtggctcataccttgaccggactctgcacaaccagaacgccccaccccgtgctacggagagctcctaccgacttggcgcatagggctgctcgattggcggctctgagaacggggcatctgcctcaaggtgcccctacttcccccgccttggccaatcgctgcgcatacagactcgacaggagattaacagggcttgcagacgcattcgagatcacctatacccgctatgcagacgatctcgccttttccggtgacctgacgacccgccggatagatgacctgatcgccgcagtgactgatatcgccagaggcgaagggtttcaggtgcatcccgccaaaacacgcgtgagagggcaggccgaccgacagttactcgcgggtctggttgtgaatcaccaccccgccacaccccgtgacgagtacgaccaactgcgcgcaattcttcacaatgccgcgaggacaggcctggcagcacaaaacaggacaggacatccagatttcgcccagtacctgattgggagggtgacctgggtaggacaccaccatcctgccagggctgccaagctggccactctgttggctcaggcccttgcagccccgtga

SEQ ID NO: 13046 - RNA, 1380 nt, synthetic construct
  source 1..1380: mol_type = other RNA
atgacaactgtacgcgctctgacaaccgcactcgctgatgccttcctggctgacggcgactggcacaggccagacctcgttaaccggggtgggcttgtcctaggggttcgacgccggtggttatggcccatagccgatgctgtgctggtggcctacccccatccgccaagagacaggccacgggacttagccgccttccttgcgaccctcgagcctctgagaggggcagtaacagccgcacggcaacacggacgccctattgtgattcgggctaggccagtagctcccatccggaccgtcaggcacccttggcacactccggtgattgacgacatcggtgcccttgctgccatgctggatctcagtatcgagcacctggattggtacgctgatcgcagagctatgaatcggcgggccacagatcagcgcctgcatcactacggatataggtggacgaatcgtggcagactgattgaagctcccaaaccgagattgcgcgccctgcagagacagctgttggctgaggtgctggggccaatcccagtgcacccagcagcccacggcttcgttcctgggagatccgcccatacctttgccgcagcgcatgctggtcagccagtggtggtcaggatagacctactcgcttttttcactcacatacccgcctcacgcgtttacgggctgcttcgaattgccggctatccagagcccgtcgcccatacgctcaccggactgtgcacaacgcgtactccccacaccgttttacgccaggcccctgccgatttgcctcacaggagcgcaagattggcagcactgagagccggacatttacctcagggagcacctactagccccgccttggcaaacctctgtgcgtatagattggatcgacgcctaactggcctcgcagatgcttttgccctgacctacacaagatacgctgacgacctcgctttttctggggatctcacgaaccagaggacctccgatctgacagccgctgtcactactatcgcccgcgacgagggcttcaggatccatcccgataagatccgggtgaggggacaggcggaccaacagctgcttgcaggcctggtggtgaatcaccgtcccgctgcgccgagggacgaatatgaccgtctcagggccattcttcacaacgctgcacgaaccggactggatgcgcagaaccacacaggccatcctgcctttgcggaacatctgacaggccgggtcgcttggatcgcccatcaccatccaacccgagccgccaatcttgcaagactgctagaccaggccctgaatcctcccgatggccggtctacaaccgcgacccgacaagcacccgcacaattggacgtgggtgaagccgcaacttga

SEQ ID NO: 13047 - RNA, 1602 nt, synthetic construct
  source 1..1602: mol_type = other RNA
atggctgccgaggacatcccggttgcagccaatggctcggcttcacgccccgcaactgctgaacgggccgctacaggagtgagactcggctggctggggtgtacggacgggagtgtatccagggctgatcaagctgctccacctggtggagctcgctcccgtagcttgagagggaatccgggagacgccacactgacccaggctccacatcaccgctgtgtcggcaccctgagagagcctgtgcatccccatggtagagcctcctcaggtagagccgcacccattaggtgggcggcagtgaccactgttcacgcactggccacggccctcgctgatgcttttttggctgaagatagttggcgacgtcccgacttggtgcatcggggtggcctagtgttaggcgtcagacgaagatggctgtggcccgtagccgacgccgttttagtggcttaccccaggcctcctcgggatagacctagggagctagccgcctttctcacaaccctcgacccgctgcgagacgccatatcagcggctcgttggcagggacggccaatcgtcatccggactcgcccagttgcggcgaccagaacagttagacgcccatggcacacccccctcatagacgacgtgggcgctttggctgcacttctgcggctgagcgtggagcacctggattggtacgccgaccgaagagcgatgaatcggcgcgccagcgatcagcgtctgcaccattacaggtgccgctggacggacaggggcaggttaatcgaggcccctaagccgcgacttggagcgctgcagaggcgcttgcttgccgaggtgttgggccctattcctgtccatcctgcagcccacggattcgtccccggtaggagtgcacacaccttcgctgccgcacatgcgggacagccagtggtcgtgcgggtggatctgctggccttcttctcctctgtcccagccactcgggtctacgggctctttaggaccgccggtcatcctgaagccgtggctcacgcactaacaggcctgtgcactactcggacaccaagctccgtcctgagacaagctcccagcgatctcccacataggtctgctcggcttgctgccctgcgagcaggacatttgcctcaaggggccccaacaagtcccgctctggccaacctgtgcgcatatcggcttgataggcgattagctggcctcgcggacgcttatggcgcaacttatactcgctatgccgacgatctcgcattctctggggatctctcagccagctctctgatcacagccgtgtctgaaatcgtgcgggatgagggatttcgcattcaccccgataaaaccagagtgcgaggccagggagatcgccagctgcttgcagggctggttgtaaacgggaggcccgcaacccccagagatgactacgaccgtctgcgcgccctcttgcacaatgccgcacggacaggcctcgacgcccagaataggaccgggcaccctgcatttgcagaccacctagccggcagggtagcctggattgggcaccagcacccagcaagagccgcgaagctggcagctctgcttgctgaagcccttgcggcccgttga

SEQ ID NO: 13048 - RNA, 1335 nt, synthetic construct
  source 1..1335: mol_type = other RNA
atgaccagtgccagatccctggctgtagccctggctgatgcgttcctggccgatggtgagtggagacgtccagctttggcagatcggggcggcctggttctgggtgtgaggagacgctggcttgtgccagtggccgatgccgttctgactgcttaccctaggaggccctccgaccgcccaagagagttggcagctttcgtagccggactggagcctctccgtgaagccgttcggcgtcccatactgatctcatcccgacaggttgtcgccactcggacgattactcaccgctggcatacccccgtgctcgaccatctcggagacttggccgcccagctcgggcttagcatagagcacctagactggtacgccgaccgcagagctatgaaccggcgagcggcggatccccgattacaccattaccgatataggtgggcaggcacccggctgattgaggcaccgaagcccagactgagggacttacagaggcgcctacttacggacgtatttggaagaatacctgtgcacgatgcagctcacggatttgtacctagccggagcgcatctacatttgcaactgctcacagtggccagcctatcgttgtgcgggtcgatctgcttgccttcttcgcgactgtgacagctgcccgcgtgtatgggctactccgaaccgcaggctatcctgagccggtggcgcatgcattaaccggcatctgtaccatccgaacccctgccaacgtgttgcgtatggccccaccccatctgattgaacggcccgcccgaattgcggctttgagggctggccatcttcctcaaggggcccctacatctcccgtgctcgccaacctctgcgctttcaggttggatcgcagactcacagggctggcaggggcatttggggtgtcctacagaagatacgctgatgatctcgcctttagcggaggcatctctgggcagaggctggatgacctgctggttgctgtcgctgacgtggtcagggatgagggcttccgggtccaccccacaaaaactcgcattcgcggacgcggtgacaggcagttgctggctggacttgtggtcaacgaaagaccggccgtgccccgcgacgaatatgacaggctcagggctatcctgcataatgcagcacggaccgggctggccgcgcaaaatagaggtggacacccagcctttgccgaacacctagccggccgtgtcgcttgggtcggtagagcatcaccacaccgggccgcaaagctggcatcgctgttagacgccgcgcttgccacagctgccaatccagcccatccacaccagcgggacatcgtggacatgtga

SEQ ID NO: 13049 - RNA, 1308 nt, synthetic construct
  source 1..1308: mol_type = other RNA
atgacagacgccagaggccttgcggtagctctcgcggatgcattcctcgctgatggcgaatggcgcaggcctgctctggctgataggggtggacaggtcctcggcgtaagacgccggtggttggttcccgttgcagacgccgtagtgaccgcataccctaggcgcccaagtgaccgtccccgagagttagctgcctttgtgtctggtcttggccccttgcgggaggctgttagaagggccgcgacaccaattgtggtccggtcccggcctgtagtagccactcgaaccgtcagtcaccgttggtcgacgcctgtcgtagacgacctcgggggactagcagccgtgcttgggttgaccatcgagcagctggattggtatgccgaccgcagactgctaaatcgaagggccgccgacgatcggctgaggcattacagatcacgctgggtggggggccgactgattgaggcaccgaagcccaggttaagagccctgcagcggcggttgttaacggaagtgctgggccccgttccagtgcatggagcagcccacggattcgttccggcacggtcagcagccacatttgctgctgcccatgccggcaggccagtagtggtgagggtcgatctcctcgctttctttgcgactatcggcgctggtagagtctatggcctgttgcgaaccgccggatacccagaacctgtagcacacgcactgaccggcctctgcactattcgaacaccagcctccgtattgagactcgccccccatgacctcgtcgatagaccggtgaggctggccgccctaagagctggtcaccttcctcaaggggcccccacaagcccagcccttgcaaacctgtgtgctttcagactcgataggaggcttagcgggctggctggcgcctttggactgacctatgggagatatgctgacgacctggccttctccggtgaattacccggacggcgcctggatgaccttctggtcgcagttgcggaagtggtgcgggctgagggattccgtgtccaccctgctaagactcgcgtgcgtcgtaggggagatcgccaggttctggcagggctggtcgtaaacgagcggcccctggtaccccgggaggaatacgatcgcctgagagctatcttgcataatgccgccctgaccggtctagccgcgcagaatcgaacagggcaccctgcctttgcagagcacctcgcaggcaggatagcgtgggttgggcaaggctctcctcaccgcgctgctaaactggccgccttactcgacgcagcgctgagcactgacccacgctga

SEQ ID NO: 13050 - RNA, 1320 nt, synthetic construct
  source 1..1320: mol_type = other RNA
atgactaccgtcggcagtttggccgttgccctggcagacgcctttcttgcagccgatcgctggctccgaggggatctcgttgcgtccggtggcagggtcttaggcgttcgacggagatggctgtggcccgtagctgatgcagccctcgcagcatatccacgagctccccgcgataggcctcgagaactggccgctttcctcgcaaatctggcacttcttgctgaggtggtgggggccgctaggcagagaggacacacagtcgccgttcgagccagacccgtcacacctacccggaccgtgcgcagaccatggtctaccccggtcctggatgacctggcagacctcgccaggctgctagacgtgacccccgaccagctggattggtacgcagaccggcgtgcaatgaaccgcagggccgatgaccagaggctgcaccactataggtaccgctggaccgtggctggtcggctgatcgaagccccaaagccacgcttatgcgcccttcaccggcgcttgcttgcagaggtgctgggacccttacctgtccacccagctgcacacggctttgtacctgggagaagcgcacacacatttgctgctgcgcatgctgggagggcagtcgtagtcaggattgatctcgccgcattcttcggttccgtgcccgcacggcgtgtatacggcctttttcggactgctggctacccggaacccgtggctcatactctgacggccatctgtacaactagaacacctgcagccgtgttgcgggctgctccagttgacctcccggacagagtctggagactcgctgcgcttagagggggccacttgcctcagggagcgccaacaagccccgccttagccaacctgtgcgcatttaggctcgatcgtcggctgaccggactagctgccgccttcgacgtggactatcagaggtacgcggacgatctggctttctctggagagttgcctccccgacgcgtcgcagatttgttggccgcggtgacagaggtggtacgggacgaaggattccgagtgcacacgcgcaagactagagtgcgtggacgtgccgaccggcaactattggccggcctggttgtgaacgagaggccagccgtgccaagagtggagtatgatagactgcgggctatactccataatgctgcccgcaccggcttggccgcccaaaatcacgctgggcatcccgcctttgcggaacatctagctgggcgcgtggcctgggttggtcatacgcatcctggcagggccgcaaaactcgctgccctattagccgccgcgcttgcgtcacctcagacttga

SEQ ID NO: 13051 - RNA, 1377 nt, synthetic construct
  source 1..1377: mol_type = other RNA
atgctgtcaggggtagggggcgaggaacctccaggtcgacctggagagagggttgccgccgcactagccgatgcctttttggctggcgattggggcagagatggcctactggggagaggcgctcttgttgtgggggtgcgtgcacggtggttgagacgcgttgcggccgaagtgctgggagcgtaccccagagtcccagccgataggcctagagagctggcaggcttcgtggccgcaagcccagtgtatagagcggcatggcattctgctagacgcagaggtcggcggcttagagttagggcccgccctgtcacagcaactagaactgtccggaggccgtggccaacaccagtagtggacgatctcgccgctttagccgccctcctgggtctgacgcccgaagaactggactggtacgcagaccggcggtccattaatcggcatgcgcgtgatgagcgactgcgccactaccggtatacctggctcggcggccgcttaatcgaagcccctaaacccagactccgcgccctgcagcgaagattgctcgcggaagtgcttggtcccgtgcccgtacacccagctgtccatgggttcgtgtctggtcgcagcgcccacacattcgcagccgctcatgctggtcgcccgactgtcgttcgggtcgacctggtgagtttttttgcaactgtgagcgccccgcgcattttcggcttgctgcgtctcgccggctatcctgagccagtcgcgcacacgctcaccgctctgtgtgtgaccaggaccccagccggagttcttcgagcagctcccgctgggttaccggataggccctaccggttggccctgctgagaggaccccaccttcctcaaggtgcccccacctcaccagcccttgccaatctctgcggctttcggcttgacaggcgcttggctgggttggccgctgctttcggggcaacctacacaaggtacgccgacgatctggctttcagtggagacttacctccacgaagggccgccgccttggtcgatagggtcacagctgtggtggcgggtgagggctttagggtgaggcccgacaagactaggatccgaggaagagcggaccggcagctgctagccggtttagtggttaacacagcccccggggtgccaagggacgagtatgaccgactccgcgcactgctccataacgctgcacggaccggactggccgctcaaaaccgtgccggacaccccgatttcgaggctcacctcgcgggtagaatagggtgggtaggacgtgaccgtcctgcacgcgctgctaagctgagggccctgtttgaggctgcacgactgcggcctgacgatggatcccctggtgcacacgcagcagctccctga

SEQ ID NO: 13052 - RNA, 1233 nt, synthetic construct
  source 1..1233: mol_type = other RNA
atgttagggtacgccccgcagtggaccgatggagtggtagacgaggtgctcacctatccccgaccacccgctgatcgtccacgcgaactggccagattcatcgcacggctcagagcctttcgaagtcacgttgccggagcacctggggccagtcctgaagcagctccggtgagagtggtccaccgggttgtgactccaaccgtgacagtcaggcagccattccacacgccaaggttggacagcgtggcagatgtcgcagattggctgggtctgtctattgtggagctcgagtggtttgcagacgtgcgggagattaatcgccaggctactgaccggaggctgcggcattacacctataggtggctgaatggcagactgattgaagcgcctaagccgagactcagaagcctgcaacggaaagtcctggacgagcttctgggccccatccctgttcaccccgccgtacatggtttcgtcagcggccgctcacctcataccttcgcggcacctcacgctgggcagcgaatggtcatcagactggatgtaatgtctttctttgcctcggtcacagctgcccgggtatacgggctgttacgtgctgcgggcttccctgaacccgtggcacacgttttgaccggcctgtgtactacaaggaccccacccgatgttttgcgtcgagcccccgccagagtgccaaatagggacctccgactggccctattgagggccccacatttaccgcaaggggctcccacgagccctgccttagctaatttgtgcggatttagattagaccggcgcctcgctggattggcccaatccaacggattgcgctacaccaggtatgctgacgacctggccttctccggcttcacttcccagccccagaggtttattgacatagttcggtcaatcgtcgcggacgagggatttcgcctaaacgaggcgaagacaagacttaggggggccgctgataggcagctgctagctgggcttgtggtgaacgccgcacctgccgcacccagagatgaatatgatgccctccgggctctgcttcacaacgccatctacacaggcctggacgaacagaaccgcgatggtcatcccgattttgtggcacacctcgccggccgtatagcatgggtgggtcatcgacaccctacacgcgccgctaaactccatgcacttttccagcgcgctctttctggcccaccacctgaggcgactgcctga

SEQ ID NO: 13053 - RNA, 1341 nt, synthetic construct
  source 1..1341: mol_type = other RNA
atgactcgtggacggaccctagctgtggacgctgccgatgccttagcaggcgccttcttggccggagaatgggacccacctgcaatggccaggcgtgctcagcgcgctttaggagatagacgggggtggactctggagctggcgagagtggttcgggcagggtttccagaacggcccgccgataggcctcgcgaattggctggcttcatcgggagatgtgaagtatttcaccgcgctgttcaagacccagaccgccccatgcgcgtaagggtctggatggctcccccaaccgaaatgggtcccgcgaggtggcctgttgctcctcttcctgacgtggctgctctggccacttggctcggcgtcacagtcgatcacctcgcctggttcgccgatcgccgatcgctcgaacggcacgtcgacgatgagcggctgcgacactacagacggagatggctggccaaacccgacggaacagcacgactgctggaggccccaaaagaggagctgaaggacctccagaggcaggtgttgcaccagattctggacaggatcccggcccatgatgcagctcacggcttcagacccaaccgatcagtgaggacctctgccgccgtgcacagaggccaagaggtcgtcgtgaggctggatcttgaagctttttttacgagcgtagacgtggggcgcgtttatggcattttccgactggccgggtaccctgaaccagtggcacatacactcgcagccttatgcgtgaccgtgactcccggtgccgttttacgatccgcgcctcctgtcccagattctctggttgacgcgagacgccgtctgctacaccggcttaggtccccgcaccttgcacaaggcagtcccacgtcaccggccctcgctaacctggtcgcttttagacttgacagacggttggccggtcttgcagctgcactcgatgcccgttataccaggtacgccgacgacctcgtcctgtccggtggaagaaatctcgtgcgcagtgcagggcccatcctgcatctcgtagagcgcatagcccgtagcgaggggttcacagtgcatgatcggaagactagagtgctgaccagcgcacagaggcagcggatcacaggcctagtggtaaacgggggcgtgaatgttgcccgccccgactatgatagactgcgggccgtgctgcatgacgccgctttgcacggtccagaggcagcgaatcgagagggccatccagactttcaggcacatctacagggaagggtcgcttgggtgggcgcaggaaaccctggaagggcacataagttggcgcgggcgttcgctgccattgattgggatgcctga

SEQ ID NO: 13054 - RNA, 1362 nt, synthetic construct
  source 1..1362: mol_type = other RNA
atgtccacgtccagggcatcagttgccaacgctttagctgccgccctgctggacggagaatggaagagcgtcactacgcttgcaggcaggggagctagggcgttgggtgtgtctcaaagaagacttggcgccgtcgctggagatgtcctggctgcataccgcgaaccgcccctcgacagaagacgcgaactgtcgtcttatttgctcgagcttccgagctttcacgtgttatgggaagggccaggtcgccctccgatcgtacagaggcacagactgcccttggcggatatgggcagggccagatggcctgttccaacaatcgccacttccctcgaactggcatcctgggccgaggaagacctgtccgtgctcgactggtacgccgatgttcggagcttggaacgctctgccgcacccaagctgaggcattatgaccgggaatggagatacaacaggcgaggaggtgtacggctcttagagcggccccgatccaggatcaaaggtctgcaaaggcgcgtgctgcgtgagatgttggatgttgtgcctgctcacggcgccgcacacggatttgtagccggtcggtcagtcgtgagctttgtgacaccacatgtggggcgagacgtcgttgtgcgcttggatctgactgcctgcttcgcatccattactgccccaagagtcttcggagtgttccggatgctgggctacccagaagccgttgcccacacccttaccgggctgagcacaaccgtggttcctcgggacgttttgcgaagtgccccccaggctctacgcaacgaggacctggacgcgcggagatggctgctgacacggcttgctgagccccacctcccacaaggcagtcccacatcgcctgccctggctaatctggtgctcttccacctcgatgcccgtctctccggattggctgccgctgctggagccagttatagtaggtatgctgacgacctggcattttctctggatggcactgatgccgtccggcgagctaaacgcctagtggcgagcgccagaagcgtcgttgcggacgagaggctccgtctaaatgatgccaaaacctctatcacccgtagatcacagcggcaggtgctgtgtggcgtcgtggtgaatgataagcctgcagtagagaggcgccgccgagagtcactaagggctgcactccataacatacgacagcatgggcctgagtcacagaaccgtgcagggcatgaggattttagagcacatctgttaggggagattgcgtgggtgtctgcagtgaatccagaccacggcgagcgccttcggagtgaattcgcacagattacctggtctgagcttggccctggggcaagccagccctga

SEQ ID NO: 13055 - RNA, 1011 nt, synthetic construct
  source 1..1011: mol_type = other RNA
atgcctgtctggaggtggcaggttgcccggtggactacctttgacgagtgcgcagccgctttagatctgacgcccggtgaactctcctggttcgccgacgagagagggtggcacagacgatcagggcccgtgttgcgtcattactcttatcggtggatacccacagccaccggaggagctcggctgatcgagcgacccaagccacggctggcagaagtgcagaggcgcatccggcgtcaggtgttagatgcccttcctgtgcacgaagccgcacacggcttcaggagaggcagatccattcacacgtgtgcacggccacacgcaggacaggatgtggtggttcgtctggatcttgcaggcttttttccaactgtcagcgcttcccgagtacgatcactcttggatctggctgggtaccctaaagccgtcgctgctgcaattgccgggatactgacaacaagaacacccgtggatgttttgcgcagtgcgcctgccaggtccgctatgctaagccatctggctggtacccatttaccgcaaggggccccctctagcccatctgtcgccaatgcggttactcaccacctcgaccggagactgtcagggctcgctgcagtcctgggagcgaactatacccggtacgccgacgacctggcattttctggcgacgccagcctgccattgcatcgcctcctgccgggtgtacgccggattgtcactgatgagggcttcaggctcagggacgataagacttcggtgaagcctgcttatcgacagcagcgcgtggccggccttgtggtaaacgctgccccagcagtggccagggctgagtacgacgaactgcgcgccgtgctgcataattgcgcaaggaccggtcctgcgcaacagaacagagcgggccaccccgacttcagagcccatcttatgggaaggatcgcttggatcagtgccacaaatgcagcccgcggaaccaaactacgcggcctcttcgatagaatcgactggagttga

SEQ ID NO: 13056 - RNA, 1053 nt, synthetic construct
  source 1..1053: mol_type = other RNA
atgaacggagagagggtcacatcagcctccttgctgggcccaatgcccgtctggagatggcccgtagcacggtggacaaccttcgatgaatgtgccgctgcgttggatctaccgcccggagaactgtcttggtttgcggatacacgtgggtggaatcgcagagcccctgcgcgactccgtcatcactgccatcactggattccaacagccagcggcggagcaaggctaatcgaacggcctaaaccgcgccttgccgagcttcaacggcgcgttaggcggcacgtgctcgatgcactgcctgtgcatgaggctgctcacggctttcgtgggggcaggagcatccacacttgcgctcagccacacgccggtcaggaaatggttgtgcgcatggggctggaagggttttttcccgcagtgtcagccactcgcgtacgagcgctactggagctggccggatatcccccagctgtcagagccgccttagcaggcatcctgaccaccagaacacctgtcgacgtacttcgggcagccccagtgcgagctaggtctttagggcgcctcgccggaactcacttgccccaaggcgctccaagcagtccctccgtggctaatgccgtgacccatcatctggacagaagactgtccgggctggcagcaagccttggtgtcaactacacgcgctacgccgacgatctcgctttctctggagacgctgggctccccctccataggctgttgcccggtgtgagacgcatcgtgaccgatgagggcttcaggctgagagacgacaagacctcggttacacctgcatatcggcagcagcgagttgctggcctggtagttaacgccaccccagctgccgccagggcacaatacgacgagctcagagcagtgcttcacaattgtgccaaaactggacctgctcctcagaatcgtgcaggccatcctgatttccgagcgcacttgcggggcaggatagcctggattagtgccactaacccggctcggggtgccaagttaacggacctgttccaccggattgagtgggactga

SEQ ID NO: 13057 - RNA, 1110 nt, synthetic construct
  source 1..1110: mol_type = other RNA
atgaacggggaaagggttactccggccagtcctaccaatcccgcaaatcccgcggaacatacaaaaccatttggcccccaagaaccgagcctgttggaccccctcccccctatctggaggtggcaggtgcctcattggcctacattcgagagctgcgccgctgctctggatctcactcccggtgagttgtcatggttcagtgatcctaggcactggaatgaccgtgccaatcacacactgcgacactaccaccaccgctggatcccaacttccacgggaggcctgagactcatagagcgcccaaaaccccggctggctgaactccagcgccggattcggagacacgtgctgacagcgttgccagtgcacgatgccgcccatggctttcaccctggacgatcgatcctaacctgcgcacagccgcatgcaggccaggataaggtcattaggatggaccttgagcacttcttccccacagtctcagctcggcgcattaggtccctgttagagcttgctgggtatccaccagccgtcgcccaagctcttgccggaattctaacaaccactactccacccgtggttctcaagaacgcaccgcggaaggtgagagatcaattaaagaaacctcatctgccccagggagcccctagctcaccagctgtggcaaacgcagtcacaaatagattggaccgaaggctctctgggctggctcagaaattgggcgccaactacacgaggtatgcggacgacctggctttctccggtgaggccaccctgccactgcatcgactgtttcccggagttagacgcatcgtagaggatgaaggatttagactgcgcgacgataagacctctgtggctgccaaacatcagcggcaacgtgtggccggtctggtggtcaataccaaaccagcggcccagagaacgtattacgacgatttacgtgccacccttcacaactgtgcaaccaccgggccccaggctcagaaccatgcaggtcaccctgactttcaggcacacttaaggggccgcatcgcctggatatccgcaacttctgcccctcggggcgtaaagctcaaggagcttttcgacagaatcgattggagctga

SEQ ID NO: 13058 - RNA, 1089 nt, synthetic construct
  source 1..1089: mol_type = other RNA
atgaacggggaatccgtgacatcagcctcactgctccagccatggcctgtgtggcgatggcccgtctccagatgggccagtttcgatgagtgtgcgggggcccttgatttgatgcccggcgagcttggatggttcgccgatgcgcggtcttggaatcgcagggccaatccggtgctacgtcactattcttaccgctggatcccgaccgctagtggcggcattcgcctgatcgaacgcccgaaacctcggctggccgaactccaacgccgggtaagacggcacgtgctggacgcactccccgttcacgaggcagcccatggttttaggacaggccggagcattctgacttgcgctcaaccccatgccggccagcagttggtggtgagaatggatttagaagcctttttccctactgtgtctgcccgcagaatccgagcactccttgagcttgcaggttaccccgctgccgtctccgcagcattagctggcatactgactaccgctacccccgcggatgtcctacgagaggctcctgctggtagaaggggtcctgttcgggcccgtctcctcaatagtctggcagctactcacctgccacagggagccccctcctcaccaagcgttgccaacgctgtgacccatcatctggacaggcgattggctggactggctcgtacccttggggcgaggtacaccaggtatgccgacgacctggcattcagcggggatgcaggcctgccactgcacagactgttgccaggcgtccggctcattgtaacaggagagggatttaggttgcgcgaggacaagacaagcgtagccgcagcccaccagcagcaacgtgttgccgggctcgtcgtgaactctgctccagctgcaacaagggcctcgtatgacgaacttcgggcggtgctgcacaactgcgctaggacgggccctgcagctcagaatagagctggccatcctgacttccgcgcgcatttactgggacggataggatggattgcagccacgagccgagccagaggggaaaaacttaaggccctatttgacagaatcgattggcacgccgagactgccggggactga

SEQ ID NO: 13059 - RNA, 1068 nt, synthetic construct
  source 1..1068: mol_type = other RNA
atgaccggggagagagtgacgccagcttctctgctaggacccatgccagtatggaggtttcaagtcgccaggtggaccacctttgacgagtgtgcagccgccctcgacctgactccaggagagctgagttggtttgccgatgctaagggatggaatcgccgtgcagcggaaccagtgcgccattatacataccgctggatccccactgccagtggaggcgtcagactgattgaaagacccaaacctcgtcttgccgagctccaacgccggatagtacgccacgttgtggacgcccttcccgtgcacgaggctgctcatgggttccggaggggtcgctcacccttaagttgcgccgctccccacgctggtcgagaaacagttgtgaggatggatctggagggcttcttccctacagtgagcgctcggcgtatctccgccctccttgcattggctggctatcctccagccgttgcagaggcactggcaggcgttctgaccactgctgtgccgcctgccgtcctagcaacagtgccagggggaagaagggaccctgcacggacgagactgttgagcaacctcgcggccacacatcttccccagggtgcaccgtcaagcccttctgtcgccaacgctgtgacccaccatttggataggcggctgggtggactagcgcgagcgttaggagccacgtacacaagatatgctgatgacttagccttctcaggggattccctgcctctgcatcgacttctccccggcgtgcggagaatcgtgaccgatgagggctttcggctgcgcgacgacaaaaccagcatagccggagcgcaccagcgacagagggtagcagggctggtcgtcaattccgctcctgcagctactcgggccgactacgatgccttgagggccttgctgcacaattgcgccaggaccgggcccgaaactcagaaccgatccgggcacccagactttcgcgcacacctcctcggccggattggttggattgctgcgtcttcggaaagaagagctgccaagctcagggatctgttcggcggcatcacttggccgtga

SEQ ID NO: 13060 - RNA, 1074 nt, synthetic construct
  source 1..1074: mol_type = other RNA
atgaatggggagaaagtgaccagcgcctctccccttggtcccttacccgtttggagatggcccgtggctcggtggacgacctttgatgagtgcgcggctgcactggatctcacgccagacgaactctcctggttcgccgatgctaagagctggaacagaagggctgccggacctctgaggcattataggtacagatggatccctaccgcctcgggcgggattcgtctgattgagcagccaaagccacggctagccgagctgcaacggaggctacgtcgccacgtcctggacgctctgcctgtccacgaagctgcgcacgggttcagacccggtcgctctgctatgacatgcgcagctccgcatgccggccgagacttagtggttcgcatggacttagagggcttctttccgacagtgtccgcccgcaggttgcgcagtctgctactccttgctggatatcctgaggccgtagccggtgcacttgctggcatgttgaccaccgcagctcccgtcgacgtgctcacagcagcccctgatggcaggagagatagtgcccgaactcgactcctgaacaatttggcggccactcatctcccacaaggggcaccatcatcccctgctgtggccaatgcagtgactcaccacctggatcgacggcttgcaggtctggccaacgtcttgggcgccaggtatactagatacgcagacgatctcgtgtttagcggcgacaccggacttcccctgcataggctcctgccaggagtgagagccatcgcccgcgatgagggttttcgcatcagggacagcaagacctcagttacagctgcgcatcagcggcaaagggtagcggggttggtggttaactccagtccagccatagccagagccgaatacgacgaactgcgcgccttgctgcacaactgtgcacggactgggcccggagtccagaatcggcatggccaccctgatttcagagcgcaccttctgggccggatcggatgggctggagcctcttctcctgcacgggcagctaaactgcgtgaaatgttcgaccgaatttcatggacagggtga

SEQ ID NO: 13061 - RNA, 1050 nt, synthetic construct
  source 1..1050: mol_type = other RNA
atgctggatcccgtctggagatggccagtcgctcgatgggagacattcaccgactgcgccagagctcttgatctgactgaaggagaactgagttggtttgcagacgccaggacctggaatcgcagggcagacgctccgctgaggcactatacttacaggtggatacctacggccagcggaggcatcaggctgctcgaacgcccaaagccgcgtctagctgaactccagcgtagggtcgttcggcacgttgtaaatgctctcccagtgcatgatgccgcacacggcttccgggctggtagatctgccttaacatgcgcagcgccccacgccggacaagcattagtggtcagaatggatctggagggtttttttccatccgtgtcagccaggcgtgtgcgatctctactcttgctggctggctaccctgaggctgtggccttagcactcgctggtgttctgaccaccgctgcaccagttgacgtgattactggggcccctgatggaacacgggacgcttccagagtaaggctgctgaacaatcttgctcgaacccatctgcctcagggagcccctagttctcccagcgtcgccaacgccgtcacccatcacctcgaccgcagactggcaggtctagcccgggttcttggggctacttacacccggtatgccgacgatcttgcctttagcggacccgcggagctccctctccacagattgctgcccggggtgcgcgaaattgtacgcgccgaggggttccgcttgcgcgataacaaaacgtcagtggctgccgcgcaacatcggcaaagggtggctggcctggtggtgaactccgcacctgcggcagccagagcggactatgatgatctgagggcactgctccacaactgtgcccgcacatgtcccgcggcacagaatcgatatggccacccagacttccgggcatacctgttgggccggatcggctggattgggacagggcatccagcccgtgctgccagacttcgggcccttttcgaccgagtggagtggcccgacactttgcccggctga

SEQ ID NO: 13062 - RNA, 1074 nt, synthetic construct
  source 1..1074: mol_type = other RNA
atgaacggcgagaaggttaccagcgtgtctccactgggaccacgacccgtttggaggtcgccagtccccagatggaccactttcgacgactgtgcagccgcccttgaccttactccaggagagctagcctggttcgcggacgcgcgatcttggaaccgtagagctgggactgccctgaggcactaccgctaccgctggttagccaccgctggtgccggaattcggttgctcgagcagcccaaacccaggctggcagaactgcagaggcgagtgtgcaggcatgtggtgggcgctcttcccgtccatgaggctgcccacggctttcgcagaggcagatcagccatcacctgtgcagcaccccatgcaggacgagccctggtggtgcgtatggatctagaaggtttcttcccggccgttagtgcccgccgggtaagaagcctgctcgaactcgccgggtatcctgccgcagttgcagctgctctcgctgggattctgaccacggctgcacctgtcgatgtgttagccgccgccccggatggaaggagagatcctgcgcgcacacgcctgttgaataacctcgcttcaacacacctaccccaaggatctccttcagcaccagccgtggcgaatgcagtgacccatcacctggacagacggcttgccggcttagcacgcaccctcggagttcggtatactcggtacgccgacgatctcgccttttccggtgacgctactctgccactgcacaggcttctgcctggcgtgaggttgatagtcagggatgaaggctttaggctccgggagtccaagacaagcgtcacggggacacaccagagacagaggattgctgggctggtagtgaattccagcccagcggcggccagaccggattatgacgctctgaaagcattgctgcataatcgggtacgcacaggccctcagccccaaaaccgcctttgccaccctgattttcgagcctacctgctcgggcgtatcgggtggatcgctgctagtcaccctagacggggcgagaagctgcgtgctttgttcgaccggatctcctggcagggttga

SEQ ID NO: 13063 - RNA, 1863 nt, synthetic construct
  source 1..1863: mol_type = other RNA
atgaatggctctgggcccgacggtgccagagacgatgtccctagagacttcgtgtcacgcgactgcgccccacgcgatgaagtgagcggaggtgaagtgtctggcggagaggcatctggaggagcagcctcgggaacgctacccgcagctactgatgccgcaccagatgccgcaacagctgcggctgatgctgccgctgctgatgccgacgctgacgctgacgccgatgcagcaacggatgcagccgctgcaacagcggcagcagctacggacgcagctgctgctgctactgcagccgcagccactgatgcggatgcagccaccgctgcagccgctgatgcagacgtcgcagccgacgatgaaccagggcacgacatggacgagcttgcaccaggaccggcccatgccgaacatcctgggggtgcaccagaaccagccgagccagttgaaccggccgagctgatcgaacgcggcgattggcctgcactcatccagcggagcagggatcgagcccggacaaggtggagaagcaacgcagggcgttccgtggcagctgctttggctgggccatggcaacgcgatgctctggccgaccggttaactgaagaggcggggcattccgctgatgcggctgctgagctggccaatcgccttgtggagctcaatccttctcccccctttgggggagagaggcacttggccagattaatagccgatctaccccctctgcctgccccagcacctgttgcaccctttcgcattaccggtgggactgcagaaccccaagccggcttgtccgtagccgcaagggagtggcgatgggacgtccctcgttggaacaccgtaggcgagtgtgccgaggctctggacctgacagttggggagctggactggttcgccgatcggggaacttggaacaggagagctgcctgtccgctccggcattaccgatataggtggattcctacatcctcgggcggcgtgagactgctagagcagcccaagcctcgcttggcggaactccagcgaaggatcactagacacgtcctgagcaggctgcccgtacacgaggctgcccatggcttcagacctggcagaagtgccttcacctgcgccgcgcctcatgctggatctgctcgattggtcaggttcgacctagagggcttctttgctgcagtcgctccgggccggattcggtcattactgggtagagccgggtatccccgggcagttgctggagcattggctggggttctgactaccgcagcacccgtggatgtgcttagcgcggctcccagggcatcagatgatgccgtccggcacaggttacttcggggcttagctgccgcacatctccctcaaggcgcgccatcctcaccagcagtggcgaacgctgtgaccgcgggactggacgttcgactcgaagccctcgcacgagctttggacgcccggtatacaaggtacgccgacgacctggccttctctggcgacagcaccctgccactccatcgccttcttcccggcgtgagacgtatcgtgatggatgaaggctttctgctgcgtaaagggaagacaagtgtcacattcgctcatcagaggcagcgcgtggcgggactggtggtaaatagtgctccggccgtacctcgggaggagtacgacgcacttagagcgctcctgcacaactgcctgagaaccggtccagccgcccagaatgttcacggccaccacgactttcgcgcccacgtgctcggacgcataagctgggtgggagcgacacaccccggtagagctggtcgtcttcggaccgtgtttgacaggatctcctggcacgaaaccgacgtcaccgggagtcgccacggctga

SEQ ID NO: 13064 - RNA, 1305 nt, synthetic construct
  source 1..1305: mol_type = other RNA
atgagtgccgtggagcgacgcgtagctgcgagacgtcgacaggcagaagagctcgccgctatcgccctggcaggtctgtgggagcagacagaattggcatctaggttggagggccactcccgcctagatggcgacgatgccagactgctcgcccagcgtctgctggagacattccctggaggtagtcccagcgttgccggctttgtggacgcgctcaggaggtaccctccccttccggtcagaaccctacctggctccgctgtcgtaccagtcgagccctggcctgtttggcgctgggacgtaccccgttggagaaccgtgagggaatgtgcccaggcgctggatctgaccgagggagaactctactggtttgcagacgcccgtggttggaatcggagagcccgagcctcactccgccattatcggtataggtgggtgcctactagatctggcggcgtgaggttgctagagcagcccaagccacgccttgccgagctccaacgcagagtggttcgtcacgtcctggccgcactgcccgttcatgatgccgcacacgggttccggaaaggccgatccgctgccacatgtgctggtccccatgcgcgcagggatcttgtggtcagactggacctggaagggttcttcgctgccgtgccagcaactaggctgcaggggctgctcgccttagctgggtatcctgccggcgtcgcccaactgttagcagggctgttggccaccgaaaccccagctgatgtgctttccgctgcgccacgggctggtgatgctttggtgcgcagaagactcctggagcatctcgcccggccacatcttccacagggagcaccgtcttcacctagcgcggccaacgccgtggcttgtcacttagacgtccgactggcgggccttgctcgggttcttggcgctacctatacacggtacgccgacgacctggcattcagcggcgatgcacggctggctttgcatcggcttctgcccggagtgcgccggattgcatcggacgaaggatttaggttgcgggatacaaagacgagcgtagctggggcacaccagcgccaacgagttgccggactagtcgtgaacacggctcctgccgcacctcgcgaagactacgacgcactcagagccaccctgcacaattgcgtgaggacagggcccgctgcccagaacagacatgggcacccggactttaggactcacctgctgggaagaatcgcttgggtgggatcaactcacccaggtcgggccgcgaaactcagggcattatacgataggataacttggtga

SEQ ID NO: 13065 - RNA, 1068 nt, synthetic construct
  source 1..1068: mol_type = other RNA
atgagaacactgcccgattcacgcgccgtacccgtagagcctgaaccggtgtggcgttgggatgtggcacggtggcgtacggtggaagagtgtgcccacgccctggacctcaccgaaggtgaactatattggttcgctgatgcaagggggtggaatcgccgcgctggaacagccttgaggcactatcggtacagatgggtacctacccggtccggaggcgtcagactgttggagcagcctaagcccagactggcagagctccaacgaagggcagttcgccacgtgctgggggctttacctgtgcatgatgccgcccacggtttcaggagaggccggagtgcggctacctgtgctgctccacacgcgtccaaagatctggtggtgcggctggacctggaggggttctttgcggctgtatctgcagctcgcctccgcggacttttaaggctggccgggtatcccgacggcgtagcaacgctactggccggtctactgactacttctactccagttgacgtcctggctgccgcaccgcgaagtagggacgatgccgtgaggcggcgcttactgcataggctcgcagctcctcatctgccccaaggtgccccaagctcacctagcgcagccaacgccgttgcctaccacctggacgtccgactcgcaggcttggctggggttttaggggccgcctataccaggtacgccgacgacttggcgttttcgggggatgcgagattgcccctgcaccgacttttgcctggcgtccgtcttatagcgcgggaggaaggattcagactcagagactccaagacaagcattgcggccgcccaccaaaggcaacgagtcgctggactggtggttaacgctgccccagccgctccaagggcagagtacgacgcccttagagccattctgcataactgcgcacgcaccggaccccaggcacagaatcgtcatggccacccggattttcgggcccaactcctcggccggattgcttggatcggctcaacacatccaggccgagcagctagacttcgggccctctttgagcgcatcacttggtga

SEQ ID NO: 13066 - RNA, 1374 nt, synthetic construct
  source 1..1374: mol_type = other RNA
atgcctagagtctccgaacctggcgacgatgaggccgctgacgttggcgactggagacagcgcggacgagcgagaaggcgtaggcgaactgtagagagacgacgccaagcccatcagctggccctactcgcgcttgaggggccttgggacagagccgatctgacagcccgcttggttaggggctctcggctcgatgatgatgacgcccggcacttgacggcgaggttgcacgagcgattcccggatgccccaccagatgatccaggtcgggtggccgcggctattcttgcactgccccctctgcccgtgaggacactacctggctctgttgaggccccagtggaacccatgccagtgtggcggtggccagttccccactggaggacactgggggattgtgcggaagccctggacgtggatgtcggcgagctccagtggttcgccgataccagaggttggaatcgaagagcaggcgccgccttgcgccattatcggtaccgctgggtgcctactcgatcgggaggagtcaggctgttggaacagccaaaaccgagactggctgagttgcagcgccgggtgacacgtcacgtcttagctgccctgcccgtccatgacgccgcacatggattccgcccaggcaggtcagctgctacatgcgcagagccccatgctgggcggagctttgtcgttcggctcgatttagaagggttttttgcagcagtgagcgccgctcgcgtcagagctttgctgcgactggccggatacccacccgcagtagcagctgctgtagccggactactgaccactacggcacccgctgacgtcctctcagctgcacctaacaccagggacagggaaagtcggcgcagacttctccggaggttagcagcaccgcaccttccccaaggagccccttcctctcctgccgtggcaaacaccgttgcccagcggctggaccttaggctcgcaggtttagcagctgctctgggcgcccgctatacccgttatgccgacgatctggtgtttagcggggatgctgatctgcctcttcaccgactcctgcctggcgtccggctcattactggggacgaaggcttcccgctcagggactccaagaccagtgtggccgcggcacatcaaagacagcgggtggccggactggtagtgaatgcctcacccgccgtgccaagggaggactacgacgctcttagagccatcctgcacaactgcgtgcgtactgggcccgctgcacaaaatcgggacgggcacccagacttcagggcccatctgctcggtcgcatcgcttgggtgggtgctacccatcccagacgtgctgcccgtctgagagcgctttttgcgcgcataagctggtga

SEQ ID NO: 13067 - RNA, 1248 nt, synthetic construct
  source 1..1248: mol_type = other RNA
atggccctgcatcgagccaccgtggctttggacggaccctgggaaccagccgcagttgccgataggttggctacaaccagcatcgatttcgaagccgcacaggaactcgccgcccgactgtttgctctgtgcccatcccgaccgttcggccctagacaactggccaacctcctgcgctcactccccgaacctgcaccagcagagccaagcgcccctgatctgccaagtgaagccgcccctagagaatggcgctggggcgtacccagatgggagacacccgctgaggttgcccgggcattggatctaaccgtgggggagttggagtggtttgcagacctcgggggctggaaccgtcgtgcacctttacccgttcgccactatcgctgtcggtggcttcctggtggccgcagacttgtggaggcaccgaagccacgtctggccgagcttcagcggcggattagacggcacgtccttgaccgcatacccgtgcacgatgcagcccatgggtttcgccccggaagaagcccgcttacctgtgctaggcctcatgccggtcgggcactggtagtccggatggatctcgagggattcttcgcggccgtgagtgggtatcgggtgcgaaggatgctgtgccattcgggctaccccgatcaggtcgctgcagtcgtcgcaggtctactgacaactcgggcccctgtggatgtgctcggagagcctgacagaggcgatcccgctaggtggaggttagcgcgcaatctggcggcggaacacctgccacaaggagctccatcttcacctgccgtcgctaatgccctggcgtacggcttggacaggcgacttgccgggttagctggcactctgggtgctacgtatacgcgatatgccgacgacctcgccttttccggggacgcagacctcccactccatcgtctgctacccggggtgagaagaatcgctcgcgaggagggcttcagggttagagaggacaaaactggtgttgctgccgcccaccagaggcagagaattgctggactggtggtgaactccgcaccggctgtagctcgggctgagtacgacgaactgagggcactcctgcacaattgcgccagaaccggaccagccgcccagaatagggatgggaggcccgactttgctgcttacttgttaggtcggatcggatgggcgtctacaggcaaccctgcaagggccgcgaaactgaaggaaatgttcggccgcattccctggtga

SEQ ID NO: 13068 - RNA, 1077 nt, synthetic construct
  source 1..1077: mol_type = other RNA
atgccggagcacgccagattaagaccagcgccaccaccagaacccccagcacctagaccctggaggtggggagtgccacgttgggctacaccggcagagtgtgcccgggctttagatctgacgcccggcgagctcgattggtttgcggacctcggcgggtggaatagaagagcggggcgacccctccgccattatagatatcgctgggtacccactaggaccggaggtgccagactcctcgagagtcccaaacctcggctcgcagaactccagcggagggtggttaggcacgtggtggccagatttcccctgcacgaagcagtccacgggttccgaactggccgctctcccgtgacttgtgctgcccagcactcaggcagagacgttgtggttcggatggatctggaagggttcttcacgacagtgagcggccgacgcgtaagggcattgttggccgccgctggataccctccacgtgtagctgccgttctggccggcttactgaccaccgcaactcccgctgacgtactggcagatgctccagcaggtcgtgacccggccctaaggtggcgacaggtcagaggacttgcgggtccgcatttgccccagggagcacctagctcccctgctgtggccaatgctgctgcacacaggctggacgtgcgattagcggggctggccagggttttaggagtggcctacacccggtacgctgatgaccttgccttctcaggggatgctgcggtccctgtccacaggcttgtccctggcgtgaggaggatagcccgggaggagggatttcggattcgcgaggccaagaccagtgtgaccggcgctcatcaacggcagcgagttgccggtctggtcgtgaactctgccccagccgtgtcccgtcgcgaatatgacgccctgcgcgcacttcttcataactgcgtcaggacaggtcctcgcgcccaaaaccgggatgggcaccctgacttcagagcccatctattggggcggatcggctgggcaggcacaggaaatcctcgtcgggctgctcgcctgagagcactgtttgaccgcatcgcctggtga

SEQ ID NO: 13069 - RNA, 1230 nt, synthetic construct
  source 1..1230: mol_type = other RNA
atgacctctgctgatctgctgcatctggctcggaccgccttggatggagcttggaccaggcccgcccttgcgacaaggttagccggcatcagtttacacgccgccccgaaccccgaccctgaagatctggctgccagactcctggacctgagcccttctccttttttcgggccccctgaggccctagccagattgctggccgatctgcccaggcaggtggaacctgctgcagcaccacgacctcgctggagggctgatgtacctagatgggagactcccgctgacctcgcagcggcattgcgacttacaccaggtgaactggattggttcgctgatgcccgcacctggaatagaagagccgcgactcccctgcggcattatcgtcaccattggctcgggcacagaccccttgagattccgaagcccagactggctgagattcagcgtcgcctcaacaggctgctcttggctcgcctgccccttcatgaggcagcacacggcttcaggccaggcagaagtgctgccacattcgctgccccgcatgccggacagcctcttgtggcacggtttgacctcgccggctttttcacgtccataacagctgcacgcttgagggcctattttcggcatctgggctaccccggtaatcttgcagtggcgctgactggcctgctgaccacagccactccaccagaggtcctccgagctgccccacctggtgcacaacgccaccgtttagcaaccccacatctgcctcagggagctccttcctcgcccgctatagcgaatgccctagccgctaggctggaccggagacttgcaggcttggccgaacgcatcggggccaattacacccggtacgccgacgatctcgcgttcagcggggatctccctgtcgaccgcttgagggcaggcgttcgacgaatcgctgccgacgaaggatttagactgcacccaggaaaaactcgcattgcggccgcccaccagcggcaaaagttagccgggctggttgttaacgtgcggcccgctgtgtcacgggcagatcacgacaggctgcgtgccgtcctccacaactgcgcacggaccggaccagacgcccaaaaccatgtggggcacccagacttcagggcacacctccttgggaggatcggctgggtaggagcaacacacccggctcgagccgctagactaagagccatttttgacacgatccattggggtcaggcgtga

SEQ ID NO: 13070 - RNA, 1209 nt, synthetic construct
  source 1..1209: mol_type = other RNA
atgctcacagaagcgcaggctgccgcagttcttgacggtccctgggatcggggaggtttagcggagcggctcgccgatgttatcggaccagtgcccgccgaagacctcgcagtgagattgctgggcctttctcctacagccccacctggcggggcacctagtttagtgagactggtcggggatctcgcactggagacacccccagaagaaccccgatggcggggtgaagtgcctcgatgggagactactggcgacttggccagggccttgggactcgacgtaggcgagttagcctggttcgcagatgcccgcgcttggaaccgtagggctggagagcccttgaggcactacagaacatggtgggttccctcgcggtcacatggccgtcgattgatcgagtcaccaaagcccagacttgcggagctgcagcgccgattagtgagacacctgctcgacaggtttgacgtgcatgacgccgctcacggttttcggaaagggcggagcaccacaactttcgctgccccacacgccggtaagcctctggttgttagactcgatctggagggcttttttacctctgtgactggcgcgcgtctgaggggacttctaacggcccacggctacccaatcaccgtcgctaccgcactcaccgggctgcttacaactcgcactccgcctgaggcgctgcatcctgctgactggccccagagacgcagattggctgcaccacacctgccacaaggggctccgtcctctccagccaccgctaatgtaattgcacgcgcactagaccgtcggcttgctgggctggccagaaccctgggagcaacctacacgaggtatgccgatgatctggccttcagcggcgacgatgatctcccgctacatcggctgttgccgggggtgaggggagtggtagaggatgaagggttcaggctcaaccccaggaaaactcgaatagccgcagctcaccaacggcagcggcttgcagggctggtcgtgaatgatacccctgctgccagccgcgcggaatatgacgacctgaaggccgtcctccacaattgcgctcggcatggcctggagtcccagaaccgccatcaccaccccgatttccgcgcccatttgcgcggcagagtcgaatgggtgagtgccggaaggcctgctagaagggcccgactgacagcactgctggacgccatttccggctga

SEQ ID NO: 13071 - RNA, 1236 nt, synthetic construct
  source 1..1236: mol_type = other RNA
atgtacgttagagcccgtgggcaccgggagaacgaatccctgagagtggcagcaagcgccttggacggcccttggacccaagctgaaatcgctacccggttaatgcccctgtacgtggatcccgccgctgctgaggtcatggccgacagacttgtgagtcatagccccagggcgccattcggcggtattgcagacctcgcccgcctaatcgcagccttccctcccattactcaggcgccagcaccccccccaaaacctaaacgttccctggatatcgccgggctccttgacgttacaccttctgagctggactggctcgccgacgcaaggggatggaataagcgggccggaaagccgctatggcattaccggtcttggtggactggcacttccactggaggtttgagactcatagaggccccaaaaccgaggttggcagaggcgcagagacgcctagtgcgacacctgggccttccggtgcatgaggcagcccatgggtttcggaaagggaggagcggcctcacgtatgcagcaccccacagcgggaaacctgtggtggtccgcatggacctggaaggatttttcgcctctgtaaccggtgctcgagtcagagcgcttctgcacgagtatgctcaggctaccacgctggctggcctgctgacaacaagagctcctctggccgtgttaagagatgcgccaaagacatccggagatccagatgtgcgacgccgactgctcgctcacctcgctcaccagcacttgccgcaaggagctccatcatcgcccgccgttgcaaacgccgtggcctatcgcctcgatctgcggctgtcaggcttagctagggccttgggcgcccactacacccgatacgccgatgacctggcatttagtgggccccaaaccctgcccttataccggctcttgccaggtgtggctaagattgcgcgggaagaggggttcagggtcaggcctgataaaacttcagtaaccggccagcaccagaggcaaaagctggcgggcctcgtcgttaatgccagtcctgcagccccaagggccgcctatgacgaacttaaggcacttctgcataactgccgccgcacaggtccccaggctcagaatcgcgcaggccaccctgactttcaggcccatgtccgtggaaggattgactgggtagctgccggtcatcctgccagaggggctaagctgcgggctctgttcggacagatcgattggtga

SEQ ID NO: 13072 - RNA, 1206 nt, synthetic construct
  source 1..1206: mol_type = other RNA
atggaaagtctccgggtggcagctagcgctcttgacggtccatggacgcgctccgcgattgccaccaggctgatctccttctatgcggaccctgctgccgctgagacaatggccgggcaattactggatcattgcccgaggccacctttaggtgacgccgctgacctggcaaggatgatcgcagcttttcccccaatgcctggttacgctccaccgccccctaagcccaagcgtagcctggacattgccgcgctgttggacgttactccctcagagttggattggctggctgatgcacgcggctggaacaggagggcaggtcagccactgtggcactatcgtagtcgatgggctgggacttctaccggcggccttagactcatcgaagctccaaagcctcggctcgccgaagctcaacgccggattgtgcggcacctggatttacccgtccacggagccgctcacgggttcagaaagggccgaagcgcggttacatatgcagccccacatgcaggcaaacccctggtggtgagaatggacctggagggattctttgcgtgtgtgacaggcgctagggtcagggccctagtgcatgagtaccagcaggcgtcagctcttgctgggctgctcaccacgcggacccctcttgaggttctgagatcggcccctccttcatccggcgatccagatgtgagacggcggttgctcgcccgactcgcttaccagcaccttccacagggagccccttcttccccggcggtagcaaatgccgtagcctaccgcttagatctgcgactggcaggcctcgctagggcactaggagccgactatacaagatatgccgacgatttggcctttagtggaccccagaccttgcccctgcacagattgctaccgggcgttagggcaatcgccagagacgaagggttccgtgtccgcccagacaagactagcgtgaccgggcggcatcaacgccagaaactggccggtctggtcgtgaatgcagcacccgccgtacctcgcgccgaatacgatgctcttaaagcactcctccacaattgccgcactacaggacccgacgcccagaaccatgtcggccgaaacgattttgctgcccacgtgagagggaggatagagtgggttgccgcaggacatcccgccagaggagccaagctgcggaaactgtactctcagataacttggtga

SEQ ID NO: 13073 - RNA, 1239 nt, synthetic construct
  source 1..1239: mol_type = other RNA
atgtatgcgtgggcaagagggtaccgggaaaaccgctcactcagagtcgccgcatccgctttggacggaccatggacacagactgatatcgcaacacggctgagtgcactttatgccgatcccgcagcagctgaggtgatggccgatttgcttgtgagtcactcgccccgacagccatttggctccctcgacgaactggcccgacagatagccgccttccctccgcttccgaaaccacctgctcctgagcccccaaagccaaagaagagtctcgacctgcaagccctgctggacgtgaccgcaagcgagcttgactggctggccgatgccaggggctggaataagagagccggtcagcctctctggcactaccgtagcaggtgggtgggcacctctacaggaggactgcgcctgatcgaagctccaaagccacgcttagccgaggcccaacgccgcattgtccgccatgtggacttgcccgtacatgaggccgctcacgggtttaggaaagggcggtcagccctaacttatgccgctccccatgctggcaaacctctggtggtgcgaatggacctcgaggggttctttgcatccgtgacaggtgccagggtacgggccttactgcacgagtacgaacaggccgccacactggccggccttctaacgacccggactcctcttaaagtcctgcgcgcagctcccaccacatccggagatcccgatatccggagacgactgctggcccacttggcccaccagcatctcccgcaaggtgcacctagcagccccgcagtggctaatgcggttgcatatcggctcgattgcagactggctgggttagcgaaagccctgggggccgaatacaccaggtacgcggacgacctcgctttttctgggccgcagactctgccagtacatagattactgcccggagttgttatgattgcgagggatgaaggcttcagagtcaggcccgacaaaacttcagtggctcgtcagcaccaaagacagaagctcgcaggcttggtcgtgaacacggcacctgctgtccctcgggtcgaatacgatgcgctgaaggctttgctacacaattgcgttaagaccggtccacaggcacagaacagagcgggccattctgacttccaggcccacgtgcgtggaaggattgagtgggttgctgctggacatcctgcccgaggcgctaagctgagggagctcttctgtcaagtgacctggtga

SEQ ID NO: 13074 - RNA, 1254 nt, synthetic construct
  source 1..1254: mol_type = other RNA
atgtctgtgaggcacctcgatctgccggtgcacgaagctgcacacggctttcgcaaaggccgatctgccctgacctacgcagcccctcatgccggaaagcccgtggttgtccggatggaccttgaggggttctttgccgccgtgacaggggctcgagtgagagctctgctgttcgaatacgaacaggccgtggtccttgcaggcctcctgacaacgcgcactcctcaggaagtgcttcgggccgctccagggacaaggggagatccagacgtgaggcgcaggttgttgtcacgcctcgcccaccagcatctgcctcaaggggcacccagcagtcccacgatcgcgaacgccgtcgcgtatcgccttgactgcagactaactggcctcgcgcgggctttaggcgccgattacacacggtacgcggatgacctcgcctttagcggaccccacaccttaccccttcaccgcctacttccaggcgtgcggaccatagcgcgtgacgagggattccgagtgaggccagacaagacctccgccgcaggtcagcatcaaagacagaagctggggggtctggtggtcaacgtcgcacctgccgctcccagagccgaatatgacgcagtcaaggctctgctgcataattgcctggcgaccggacctggtgcagagcctagatggccccaaaggttacgccgtgctagggcatggcctggtcgggttggtggaggtcgcactcgtggacagggatccgaggtagctcgggctctgcagccagataggctggtggtaccttatgacccgggagttgctgacggagccgccgattttgagatcggcaaagatgggctgaccgtaattattgtgggcgtggatggcagccccccaagtctccatgctgccgcttgggcaggcggtctagccagaagggaacgggcccagctggtcttggtctatgtagagcccatcgcctccccagcctactggactgcaatggggatggctggggcaacagaggctgcaactgctttcgtcgacgagataagagtggaggcagcggcctacctcgatcacgctggcatcccctgggagttggtgcactatcggggtgatcctgcccacgggttggaagccatcgccgaggaaagacgagcagactgtattgtggtaggaaggtcaagacatggggggggtctggtgggctcggttccaaaaatgctcgttaagggcgccaaacgaccggtggtcgttgttccatga

SEQ ID NO: 13075 - RNA, 1137 nt, synthetic construct
  source 1..1137: mol_type = other RNA
atggccgacagactgttggctcattgccctcggcccccccttggtaacgctagagatctctctcggctgatcctcgaattccctccagaaccagtcctagtgatgccaccggtgccaagaatttggaggtggggggttccgcagtgggagtatacggccgacgtcgccgctctgttggatgtgactctgtcagaactcgactggcttgcagatgccggcggatggaatcgtcgcgctggcgaacctctgcgacactacaggccaaagtgggtagcgactagtacaggcggcataaggttgatcgaggctccgaaacctcgtttagctgaggcccagagacggatagctcggcacttgtctctccccgtgcatgaggccgctcacgggtttaggcccggacgttcccccctcacatatgcgcagccacacgccggaaaagcacttgtggtccgcatggatttagagggattctttgctgctatcacgggggcacgggtgagggcattacttcgaactgccggctatccgcaccaggtggccatcaaactcgcagggctcctgacaacccggactcccctggatgttctccgggacacacctcccacccaaggggatcctgatgttcggcgacggttgctggcaaggctgcctggacagcatctgccccaaggagcgccctccagtcctcagctggccaacgcaattgcctaccgactggactgtagactggcaggtctggccaacgtcctgggcgcagagtacacccgctacgccgacgacctagccttctccggcccacagaccctcccactgcatcgacttctgcccggggtgagagccattgctcacgacgaaggattccgtgtcagacccgacaagagcagggtgagcgcggctcatcaacgccagaagttagccggcctggtggtgaattcggcgccagcagtacctcgcgctgagtatgacgccctacgcgctctccttcacaattgcgttcgcaccggccctgaagcccagaatagggccggtcatcaggattttcaaagccacgtcagaggcaggattgagtgggtagcggccggtcacccagggagatcagcaaagctgcgcgccttgtacaggaacatcgcatggtga

SEQ ID NO: 13076 - RNA, 1299 nt, synthetic construct
  source 1..1299: mol_type = other RNA
atgatttggcaagacgtcgctttgcgggcccttgccgagacagcagtcaacgcagacgcctgggaacaatccgagttggccgccgctctactgaggcacttccgcagggatgggggtgcaagcgatgctttcgcatggactctgctggcacacgtgccagaaccccctgaaagtgccgaggagctactagctctcctggtcgcagttccagagctgaccgctgcgcttccaaaagcccccaggcctgccctcgaggtcgaattatccccagggtggagatggccagtagccagatggcacacagctgagcagctcgcccatgggcttgatttggatgtgggggagctgatgtggttcgcagaccgggggggatggttacgccatgcccatcctccgctgaggcactaccggtgcagatggatgcgcacacgctccgggggaatccgtctgatcgagcagcccaaagcccgtctcgccgagcttcagcggaggatcactcgaagggtggtggacgccatgccagtccatgaggctgcccacggattccgcagaggacggagtgccgcaacttgtgcggccgaacacgcgggtcggcattttctggtgagggttgatgtagagggattttttgcctctctcacattcacccgcatttctagggcaatgcgtgccgctggttatcccggcgcagtagctggcgctataggtggccttctcacaactgccacccctcgagatgtgttagccgctgcgcctcgagtgcgggaatcggaagttgacgctaggcgacgcttgcttggaagactcgccgccgcacacgttccacaaggagcaccgtcatcacctgcgctggccaacgctctgatgcacagactggaccggcgtatagacgcttatgcagggaccttgggcgcaacctacacgcggtatgcggacgatctggccttcagcggcgatcgtcgcttacctgttgccgctctgctcagaggcgtcacggctattgtgagagcagaagggctgagactccgccagtctaagacccgcgtcttggcgccgcatcagagacagcggattgccggcctggtggtgaatgatggcagagctgtggcccccagagcggaatacgacgcactgagggcccttctccacaattgcgctaggactggcccccaggcacagaaccacgaagctcatcccgactttcgaagccacctgctgggtcggatcgcttgggtgggtatcaaccatcccggcagggcccgaaagttgggagagctgtttgaccggatcaattggtga

SEQ ID NO: 13077 - RNA, 951 nt, synthetic construct
  source 1..951: mol_type = other RNA
atggatgactggctgcgcctgctgcgcattgacagtggcgagttcgcgtggtttgcagacgatcggggctggaaccgaagggctgccgaacctctcagacattatcgttatcgatggatgcgtacacgcagcggtgggttgcggctcatagaggccccaaaacccaggttagcagaggtccagcgcacactgctcagacacctggagctgcccgttcatgaagcagcccatggcttccgacgcggtcgtagcgtgcacacttttgcagccccacacgccgggcgggatttagtgctcaggatggacctcgagggcttctttgccagcgtcacggccaccagggtaagggcactggttggtgacttggctgggctggttactaccgccgcccctgtggctgtcttacgagctgctccccccgctcctgatgtggaggtgaggagaagactgctggacagactagctcgaccccatcttccgcagggcgcaccttcatcacctgctctcgcaaatgcggtcgcccatcggcttgacagaaggatcactgccttggctgatgttcttggcgccacctacacgcggtacgcggatgacctcgctttctctggcgatgccggactgccattgcataatttgctgaggggagtgagacgaattgccgcggatgaagggtttcaggtccgcccagacaagacccgcatcactcccgcccaccacagacagaggcttacagggctggtggtaaatgattccccggctgcgtctcgggctgaatacgacgagctgcgtgcagtgctccacaactgcgtgcacagtggaccatccacccaaaaccgcggaggccacgcagactttagggcacaccttctgggacggatcgggtgggtgggagaaaacagacctgcccgggccgcaaagctaagagccttgttcgatcggattacatggtga

SEQ ID NO: 13078 - RNA, 1278 nt, synthetic construct
  source 1..1278: mol_type = other RNA
atggctccagatccgcacacagtcgctgcagccgctcttgccggaccttggcagctggagccactgaccgaacgactcgccgagcacggaaagtggaggtcgcctgaggagattggcgatgtcgttgctatcttgctcggaagatggcgtgctcggcctcgaaggccctttgaacgggtggtcactgaggtggaaggcttattggccgcaaggcctggaactaggccgcctgatctggagcccgacgtccctatatggcggtggccggtgcagcagtggacagatctggacgcgctagccctggggcttgatctcagggacggcgagcttgagtggttcgctgatcctggcgggtggttgaggaggactcccgctggaccactgcatcactatcgacgaagatgggtgactgccagatctggcacacctcgtctgctcgaaagcccaggaccccggctgcaggaactccagagacgcgtgggccggcatgtattggcgcggattccggtgcatgacgctgcccatggctatgtccgaggccgctcacctgcaaccctagctgccctgcatgccgggagagccatggtggtgaaagtggacttggaggggttctttggtcacgtaacgggagagcgtctggccggcctcatgaggatcgctgggtacccacctgctgtggcagctgcattggccgggctgttagttaccgccaccccagaacccgtactgaggtctgcaccagccgcagaaggcgcatgggaagcgagaaggagattgctcgaccggttagcagccccacacctccctcaaggagcacccacctccccagcagctgccaatctgctggcgttccgcctggatagacgcttagcggggcttgcagctgcactcggtgccacatatgggcgctacgccgacgacctggtgttctccgctgcgacactccccgcttcaggccttatcacgcggatcgggcgcatagctgaggaggagggttttaggttgcacgccaccaagacccgcgtccttcccagtcaccaccgccaaagagttactggactggttgtgaacgccgagcccggtgcagctcgtcgagagtacgacgcactgcgggccctgcttcacaattgcgcccggacaggtccagatgaacagaacaccgcggaacatcccgcctttcgggaacatctcctgggcaggatcgcctgggttagcactggtcgtcccagaagagccgatcgcctgagagccctattcgacgccattcgctggccctga

SEQ ID NO: 13079 - RNA, 1353 nt, synthetic construct
  source 1..1353: mol_type = other RNA
atggatggcccttggcggcgggatgacctagctgaacgcctagcccctctgcgcggatggttaggccctgacgaggtgggtagaaccgtcgctgtcctgcttgcacgctggccaaggccacctacagcagcacctgcccaggtagcggccgaattggcacggctgctggctgcattgccaagacgcgggccgattgttcccgaccctcctcctcggccacaatggcgatggcctgtggccccatggactgatctggctgcgctgtcccacgctctgaatctgcgcgacgacgagctcaactggttcgccgatccaggaggctggttgcgtcgagctccagagggtcccctgcaccattaccgcagaaggtggactgcgagccgctctggagtccccaggttgctcgaaacaccagggccccggcttcaggagctacaaaggcgggtcgctaggcacgtgttggccagaatccccgtgcacgacgctgcccacgggtatgtgcgtgggaggagcccacacacacttgctgccgaacacgccggacgggccatggttctgaggttagatctcgagggttttttcgggcatgttacgggtgcccgagtggcaggcctccttagaaccgccggatatcctcccgcagtagccgcagcgttagccggacttctcgttacggcgacaccggcccatgtcctcagacatgcgccagcgggagaaccccatgcctgggaacccaggagaagactgctcgacaggctagccggtccccatttgccacagggcgcacctacatcacccgctgtggccaacctgctggctcatcgcctggaccgccgattggcaggcctgtctaccgccgtaggcgctaggtacggaagatacgccgacgacctcgttttttccggcgagctgcccgtgcatgggttagcagccagagtcaccgctattgcacgggaggagggcttcagagctcggactgacaagaccagagtgatgccgagccaccaccgccagagggttactggcctcgtggtaaacgcacgacccgccgctccacgtgctgagtatgatgccctgcgtgctctgctgcacaattgcgcaagaaccgggcctcaagcacagaaccgggatgggcacccggcctttcgcgatcatcttcttggcaggatcagttgggtggccgccggctctcccaatcgtgaagctcgactgcgagccctgttctccgagatagactggtcgtgcaggagtggttcacgggcactcatggtcggggtggacgtgctgctagtacggcagccacgggatggagtgcacgatctcgtgggatgtggccccgctgatcacccgtga

SEQ ID NO: 13080 - RNA, 1062 nt, synthetic construct
  source 1..1062: mol_type = other RNA
atgcggcccgaggaacctgctgttcccgtctggaggtggcccgtgactccatggagctcactggatgccctgacgggaggattggatctgcgggcgggggaattggactggttcgccgaccggggagggtggttgcataggaggccagagggcccactgcaccactaccgcacaaggtggaccgcttcccgatctggagtgccacgcctccttgagacaccagcccccagactacaggagctacagaggcgcataggcagacgcgtgttggccagaatccctgtgcacgtcgccgctcacggttatgtacgcggccgtagtccgctgactttagcagcggcgcacgccggtcgagcaatggtagtcaggctagatctcgaaggcttcttttcccatgtgactggggatcgcatcgctggccttatgagagcagcaggttatcccccggccgttgcctcagcgttagctggattactggtgaccagcactcctgtgcacgtgctgagaggagcaccaccggctcctccagacgtcctggacagccgaaggaggttgctggaccgtcttgctaccccccacctgcctcaaggcgctcctacatctcctgccacagctaacctgctggcccatcggctcgatcgcaggcttgcagggctcgcagcagctgttggcgctgaatacggcagatacgcagacgacctcgtgttctccggtggagccagactgcccgcacatggcattgcagctcgggttaccgagattgccgcggaggaggggtttcgggtaagggcagataagaccagagtcctccccgctcaccacagacagcaaatcacggggctggttgtgaatgctcggcctgccaccccccgacgtgaatatgacgccctccgggccctccttcacaactgtgcccgaacagggcccgacgcccagaatagatcggatcatccagccttccgggagcatctgctgggacggattagttgggtagaagccgcgcatcctgctcgcggtgccagattgagggcccgttttgccgagatccgctggccagattga

SEQ ID NO: 13081 - RNA, 1275 nt, synthetic construct
  source 1..1275: mol_type = other RNA
atggcaccagagcctcacgtgctggccgctctgttgccaggaccctggaccgttgacgctctcaccactcggattgctggctgccgaggttggggaggacctgacgaagttggggatgtggttgccgccctgttagctcggtggtcacgggctccaaccggcagacctgacagagtcggagcacaggttgcggcactgcttgccgctcgaagccgtcgtcgacacgtcgttccagagtccccgcctgccgatttagcatggcggtggccggtggaaccatggacaggactggacgctctggctaggggcctcgacttgaggcctggagagctggattggtttgctgaccgcggcggctggctccatcgaacacctgacggccctctccatcactaccgaaggaggtggactaccagccgctcaggcacgcccagactgcttgagacaccggctcctcgcctttctgaactgcagagaagggtgggccgcagagtgttagcccgcattccagtgcacgacgctgcccacgggtttgtacgcggtcgcagcccacataccctggctgcagaacatactggcgccgccactgtggtgcgccttgatctggagggcttcttcgcccacgtgagtggtgctcgggtagctgggctactaagggcggcaggctaccccgatgctgtagcctccgccttggcagggttactggtcacaagtacaccagcccccgtgcgtagagcagcacctgcaggaggtgatgtcggcgcccgtaggagactgctcgatcgcctcgcacacccccatctgccccaaggagcacccacatctcccgccgtggcgaaccttttggcccacgtcctagaccggagactccatggtctggcgggtgccttgggagctcggtatggtcggtacgccgatgacctcgtcttttctggggacagactccccgcccacggacttgtggccagagtcaccgctatagcagccgaagaggggttccgggtgcgtccagataagaccaggatcgcacccgcacaccaccggcagagagttactgggctggtagtgaacgctcatcccgcggtggcccgcgtagactatgatgccctgagggcgctcctgcacaattgtgcgcggacggggccagacgctcagaatagggatgggcatccggccttccgggaccatctgctggggagaatcgcgtgggccggatcaggacaccctgcaagggctgcccgactaagggccttgtttgatgccatttcctggtga

SEQ ID NO: 13082 - RNA, 1278 nt, synthetic construct
  source 1..1278: mol_type = other RNA
atggctccaggtgcccaggtagtcgctgccttggccagacagggcaggtgggacactgtctcactgactgaccgactggctgtagccagtggctggtccggacccgaagagattgcgggagtggtcggccatttggtgggacggtggagacgggagccaacagtgccagacgatctgtttgccgcccaagttgcagagctgctagccctcccgaggcgccatctgagagtgggtgcaccccctgaacccgtttggcggtggcctgtcgccagatggaccgatgtagccatggtggcgaggggcttacacctcgacgagggcgaactggcgtggtttgccgacacaggcggctggttacgtcacgtgcccgatggaccgctaggccattaccggcggagatggacagcaagcaggccagggactcccaggctcatcgaagccccagctcctcgactcgcagagctccagaggcgtctgcttcgccgggtgctggatcgtatccccgttcaccctgccgcgcacggttacgtccctggaaggggtccacgcacgttggcccttctgcatgccgccagacccatggtgctgaggctggatttagaggggttcttctcccacgttaccggggcacgaatcgctgggcttctgcgcacagctggctatcccgaggctgttgccaccaccctagcagggctcctggtcacggctactcctcctgccgtgttaagagcttgcccccctgcagccgatcctcagccaagacgccggctgttggatcgcctcgcagctccacacttgccacagggagcccctaccagtccagcggtggcaaacctgctgacacaccgcctggaccggcgactttctggattggctgcggcagttggcgccaggtatgggaggtatgctgacgatctcgtgctcagcggagccgcaaatctgcctgtccacgggcttgcagcacgagtggccgctattgcccgggaggaaggatttcgcgtccgtccgggtaaaactcgcattgccccggctcaccatagacagcgcgtgaccggtctggtggtgaactccggctcacccgcagcctctagacgtgactacgacgatctccgggctttgcttcacaacgctgcccgaaccgggccagctgctcaaaatcgagccgggcatcccgcgttcagggagcatctggccggcagaatagcatgggtaggtggaggcaggcccagaagggctgaagtgctgcggagccttttcgacgcaatctgttgggactga

SEQ ID NO: 13083 - RNA, 1272 nt, synthetic construct
  source 1..1272: mol_type = other RNA
atggcgccccatccagcagcagtagcagcagcagcctgcgctggaccttggggtactgatcccttaaccgaacgacttgcgggcttgggtggatggagtggccctgaggaactggcgggtgtggttggtgcactcgttgctagacgccggcgtgccccaagggacagttctgcaggggtcgaagccgaggtggtagctctgctggctggtccccgcagacatcgacgcgtcgagcagccagatcccgtctggaggctccctgtgcccagatgggctgatctgtcggctctggctacagccctccacctggatgacggcgagctggcatggtttgcggatcccggtggatggcttcgccacgcacctgaggggcctttgacccactatcggcggcactggaccccctctagatcagggacaccgagactgatagaagcccccgcaccacggttagccgagctccaaaggcggattcgcaggcgggtgctggacagaatccctgtgcacccagccgcgcatgggcatgtgagaggtcgcagcccacatacgctggctgctgaacaccgcgcccgacctatggtgctgcgtctggacttagagggcttctatagccatgtgacaggtggtcgagtggccggcctgttgcgtgtggctggttaccctcccgctgtagccgcaaccattgccggccttttggtcactgcaacacccccgggtgtactgcgtgcctgtccacacagaggcgatcctgctgcccgacggcgaatgcttgatcgcctcgctgcaccacatctacctcagggggccccgtcttccccaacggttgcaaatctactgacttacggcttggacaggcggcttagcggactagccactgccgttggagcggcctacggacgatatgccgacgatctggtgttttccggtgatgctgccctccccgtgcacggattgacacgccgtgtggctgccattgccgctgaggaggggtttcgcgtcaggccagacaagaccagaatcatgccagcccaccacaggcagagggttgtcggcctcgtcgtgaatggagacgcccctgctgcctccagacgcgatcatgacgaactgcgggccatattacacaacgctgctaggaccggtcccgacgcccaaaacagggcaggacacccggttttccgggagcaccttctcggacggatcgcgtgggtgggtcatggaagacctgcaagggccgcccggctgagagaactcttcgacaggatctcatggtga

SEQ ID NO: 13084 - RNA, 1218 nt, synthetic construct
  source 1..1218: mol_type = other RNA
atgaccgaccccgaggccgtgctggtggctattctgcgggtgccatggcgcgaaagagcagtcgccgcagcggtaagagagattgtgggcgcccaaagagcacctgaactcgccgccagactgctggaaaggtggccagacgccccccgagtaacgcatgctgagatactggcgggcatcaccactgcccttggtaggaggatcgtgttggatccgttaccccctccaaggtggcggtggcctgtacagagatgggaggatgtggacgccttggctgctggcctggacctacgtgacggggaactcgactggttcgcagacacccgcgggtggttagctgatgggcgccttggccattatcgcaggcggtggcacgatcgccggctaatagaggcccccaagccaagactggccgaattacagcgccgcgtgggtcgtcgagtgttagcccatattcccgtccacgacgctgcgcacggttacgtacggggcagaagccctcttacactggctcgggttcacgccggccaagctctggtgctccgactggacgtggaggggttctttacccgcattggaccggcacggatcgcaggtttgctggccacggcaggttatccggctgcagtcgctcggacactcgctggattgctggtcactgcaacacccccaggcgttcttagggcagcaccagcccatgtggacgccgctacccgtgatagactacgcgctccacacctgcctcaaggagcccctacttcccctgccgtcgcgaacgtgttagcccacggactggatcgacggctcacagctttagcggccgccgctggagctagatacggaaggtacgccgacgatttggtgttcagcggggacaccactcttcctgtccagggacttctgcgtcgggcacgagatgttgccgcggatgagggcttcgccgttagacccgccaaaaccagggtcatgcctgcacatcatcggcagagggtggtggggctcgtcgtgaacgagacacccgcggtttctcggcgcgaatttgatgcactgagagctttgctccacaattgcgcccgaacagggcccgcagctcaaaatcgcgacggccacccagactttagagcccacctgctcggcaggatcggatgggttgccactggtagtccagcaagggctgagaggctgcgtgccctctttggcgggatctcatgggattga

SEQ ID NO: 13085 - RNA, 1191 nt, synthetic construct
  source 1..1191: mol_type = other RNA
atgcgccctgatccggaagtggtgctcgcagcagtgctgcgcgtcccttggagggaggaagcactcgccgctgcggtgacaccggaagtcgctagaaggctcgtggaactgtggcctcaaccgccacgcgatactcacgccgccatcctggctggcattaccagatgcctcggccggcggatagtgttggatcccctgccaccaccacgttggagatggcccgtcgaacggtgggaggacgtcgatgctcttgccgccgggttggatctccgggatggagagctggactggtttgccgacgttagagggcgcctcggtgatgatgctcgcgctcactatcggaggcggtggcatgagcgtcgccttatcgagagccctaaaccaaggctggcagagctgcaacgcagggtgggacgcaaggtcctggcccatatccccgtgcatgacgcggcacacggcttcgtagctggcaggagtcccctgactttagccagggttcatgccggccgtgagatggtcctgagacttgacgtggagggctttttcacacgaattggcccagctcggatcgccgggcttcttgcaacagctggttaccctgccgccgtggcgagactattagccggcctcctggtgacctccacacctcctggagttctcagagccgcgcctgcagggacggcagttgaaaggctgagggcaccccatctcccccaaggagcaccgacatctcctgctgtggctaacgttttggcccacggacttgaccgacggctgtcagcgttagctgccgcagtcggagcgcgttacggtaggtatgcagacgacttggtgttttccggagacggcgccttgccagttcagggtctactgcgacgagccagaggggtagcggcagatgagggttttgccgtacgggcctctaagactcgcgtaatgccagcccaccatcggcaaagagtcgtggggctggtcgtgaatgctagccccgccgtgccaaggagggaatacgacgctctaagagcactgctgcacaattgtgctcgaaccggacccgccgctcagaacagagatggccaccccgacttccgggcccacttattggggcgcataggctgggtggcaaccggtcaccccactcgagctgcaagactgaccgccctgttcgacgccatttcgtggaacgggtga

SEQ ID NO: 13086 - RNA, 1239 nt, synthetic construct
  source 1..1239: mol_type = other RNA
atgcgcaggaggcgaccagaccctgaagccgttttggtagcagtgttgcgcgtcccatggcgtgccgatgctttaaccgccgcagtggctggtgaagttggagccgacgcagcccctgaacttgtggcacgccttctggaaagatggccagttgcgcctcgcgacactcatgccgccattgtcgcaggaatcggcgcaagtctggggcagcgaatagtgctcgatcccctgcctccccctaggagacgatggccagtccagccctgggaggacgtggatgctctggctgccggcttggatctgcgagccggagagttggactggttcgccgatccgggcggatggttggataggtccgcgtctcccagactggctcattaccggaggcggtggcacgggcaacggttaatcgagacaccggccccacgcctggctgaactccaaagacgcgtgggcagacgtgttctggcccacattcccgtgcacgacgccgctcacggctttgttgccgggagaagccccctcaccttagccagggagcactcaggcaggcagtgggtgctgcgcctggatgtggaggggtttttcagccgcatcggacctgccaggatagccggtcttctgggagctgccgggtatcccgcagctgtagcaggcgctctcgctggactgctcgtgacgtctactcctgccgccgtgctgagaagagcacccgaacggcccgcagacgctgtcagagatcggttgagggcgccacatctacctcagggcgcaccaacaagcccagctgtcgccaacgtacttgcccatgggctggaccggcggctatctgcacttgcagcggctgctggcgctcggtacggtagatacgctgacgacctcgtcctgagtggcgatggcccactgcctgtccaagggctgttgcgccgtgccagagagattgctgcggatgagggtttcgacgtccgcccagccaaaacccgggtaatgcccgcgcatcatcggcagcgtgtggttgggctggtggtgaattcagccccgagggtgcctagacacgagtatgatgcacttcgagcactccttcacaactgcgccaggacaggcccagcccgacagaatcgcgacggtcaccccgacttcagggcccatctactcggacggatcgggtgggtggctactggatccccagcacgagcccagcggttacgtgcactctttgacgcgatcgattgggcgtga

SEQ ID NO: 13087 - RNA, 1266 nt, synthetic construct
  source 1..1266: mol_type = other RNA
atgaccgaggaggctgagggggttctcagggacgttctgggcgtccggtgggaggtagctccactagctgccgccctggcagatagaattggggaaagggccgccggtgccgcagaaagactggttgaaaggtggccacaagcgccaaggggtacacacgccgatctggtcgaagagattgcagtgctactggccgtgcgcagacgactggtgcctgcagaaccccagccttcttggcggtggggtgttgccgagtgggagtcagtggacgcattaagtcgtgggcttgatctgcgcgatggagagacagagtggttcgctgatcccggtgggtggcttcgaagggcacctgaaggccccctccaccactatcggggcacttggcgcgtgtctccatcaggagcgccacgactgctcgagactccggctccacggattgccgagttgcagcgcagaatcgggaggagagtgctgatgcggatccccgtgcatcccgcagctcatggctacgtgagaggccgatcccccgccacttttgcagcggtacacgcgggtgctgcaatggtcctccgcgtggacgtggagggcttttttagccggataggcccagctcgtatcgccggtctactccgcaccgcaggatatcccgcagccgttgctgccgtgttagcagggatgctcgtgaccagcaccccgagagccgtactcaggagagcccctggcgctcctggagaagcacgaaggcgcttgatagaccgactcgccctgccgcatttgcctcaaggagcccctactagtcccgccgtcgccaatgtcttggctcacggcctggacagacggcttgatgggctggcgggagccgttggagccagatacgctcggtacgccgatgacctggtgttttccggcgaagcagatctgccggtccacggtcttcttcgcagagcgggcgaaattgccgctgacgaagggttcgacgtacgccccgacaagaccagggtgatgcctgctcaccataggcagcgagtcacaggcctggtggtcaatgccggccctgctgtgagccgtcgcgactatgatgacctccgggccctgcttcataactgcgctagaacggggccagacgctcagaacacggcaggacaccccgccttccgtgagtacttgttgggccggatcgcttgggcaggaacaggaaggccagcccgtagggatcggttagctgcgctgttcgcccggatcgacttcgggcaggatcgctcctga

SEQ ID NO: 13088 - RNA, 1203 nt, synthetic construct
  source 1..1203: mol_type = other RNA
atgacagatcctgaagcagtcctcagggcactactgggcgtaccctggcgtctcggggcactaacccatacactcggggaggtcctgggtgaacgagcccctgaagtggccgctcgtctggttgaccagtggcccgaagctcctagagcggcacatgctgagctcctggccggcattaggggcgcattggggagacgcatagtggtggaggaaccagcccccgtttggcgttggcccgtagctaggtgggcttcggtggacgagttagccgccggactggatctaagagcgggcgagcctgaatggttcgccgaccctggtggatggttacggcgagctccggagggcccacttcaccattaccgcgcggtctggcgaggagatcgactgatcgagacacccggcccccggcttgcagaattgcaacggagaattgggcggcgcgtcctcggtagaatcccggtacacccggccgcccatggatatgtgagaggccgaagtcctttcactttagcagccgagcacgccggcagggctatggttgtgcgcctggacgtggaggggttttttaccaggattggcccagcccgcattgctggactactgcgggcagccggatatccagctgctgtggccagagtgttggccggcatgctcgtcgccagtaccccaagagctgtgcttcggaggggtccatccagccaacggcaacggctcgcacttccccatctgccccaaggcgctccatctagccccgctgtcgccaacctccttgcacacgggcttgaccgcaggttggggggtttagcggctgccgttggggctagatatggccgctacgccgatgacctggtgttctccggagatgagctccctgtgcacgggcttgtacggcgcgtttcagcgatcgccgctgcggaaggattcacgctcagaccggataagactcgcatcatgccagcgcaccaccgtcaaagggtgaccggcctggtcgtgaacgctactcccgcagcctctcgcagggactacgatgacctgcgtgccctgctgcataattgcgtgcagcacggacctgacggacagaatagggaagcacaccctgcctttcgggagcatttgttagggcggatagcctgggttggtgctggccgaccagcaagaagggcaagattgcgggagttgtttgataggatcgccttctga

SEQ ID NO: 13089 - RNA, 1305 nt, synthetic construct
  source 1..1305: mol_type = other RNA
atgaattggctctctctcgcacagcgagctctggacgggccttggctacaagggcccctagccgaaaggttaggagatgaactggaccccgccgccgctgagaggttagcttcagccgtcctcgcacatcggcctagaatgccctggacagagcaggccagattcgccagggaactcgccgaaattccagacgtggtggcagctttggcaccagggaacggtaggggacctcgcgttctggtcagcccagaatggaggcctgtttggcggtggcctgtgccagaatggacgactaccgagcatctggctcacgcgctggatctcaccccgggtgagttggcctggtttgccgactctcgaggctggttgcgaagacaccggggagggcctttacctcactaccgccacagatggctgagaactcggggtggagtgcctcggttgctcgaggctcccaagccgcttctggctgagcgccagaggcgactgctgagacacctgctgcgagctatccccacccatcccgctgcgcacggttttgcgaggggacgtagtgtactgacttttgcaaggccacacgcagggaaagatcttgtcctgaggttcgatttagagggcttcttttcgtgtatcggagcagcccgtgtggcaggccttatgcggtgggctgggtacccaggacctgtagccaccgccctgacagggctaatggttactgccactcccccgccagtgctgagagaagccccacctcctgcagggccaggtcaggttgacgctcgcagacggcttctgacacgtctcgccggcacacatctcgcacaaggagcacccagcagccccgcactggctaacctggtggcctattccctcgatcgccggcttagtgcgcttgcgagggaacgcggccttgcctacacacgctatgcggacgacattgctttgtccggcgaccatgctacaagcgtgccggccttgcgcagagcagtctcaagaattgcccgagatgagggcttccgcatacgggccgacaaaacccgagtgatgccctctcacaggcggcagagactgaccggcctggtcgtcaatgccgagccagctgtagcccgggatgagtatgacacactccgcgccctattgcacaactgcgcaagaaccggccccactgagcagaatcgcacgggtcaccccgatttcgccgcccatgtgaggggacgtatcgcttgggtggctgcaacgcatccaggtcggggtgagaagctgctcgcccagtaccgtgcgatcaggtggcccaccccttcctga

SEQ ID NO: 13090 - RNA, 1443 nt, synthetic construct
  source 1..1443: mol_type = other RNA
atgtcagtgaggctctttgccgaaaggaagcacatgctgagcgcctccgatacacctccccctccaaaagatgccgccccacttgctggactgagccgatctatcgcggacttcttgctctactccctagaacaaggattcgctctgaacgccaaagccctgagggagcgtgcaagggcccactttttcgatgccagcgagatcctcgaggctgtttatgtagaactggaatcagatgagtggccttggagaggccagaccgcagatgtgctggcgcagagaattctggtcagtgaggcgttattggatctgcaggccccgatagatgaagatgagctgtggtacctggacgacgaaacccttgcctcttataagacacagcacgaatcttacctcttcagcctgtcgacaatgcctgtttggaaaccaccatctgtcaggggtcacgcctggctacattcagcccgaagtagcgtaccatccctggagtccgtttctgacattgcaacctggttgaatgtctcacgcgacgagtgggacggcgctactaacgcgagtaagtaccgtcttcgcgtgcaccgcaagcctagtgggaaactacgcctcctggagatccctccggaaccgaaacgggtgctgcagagaagactcctgcaccgcttattagaccatgtcgcacctcacgaagccgcacacggattcgttgccggacggtccgtgcatactcacgcctccctgcatatccagcaacaggtggtgattcggctggacctcgctgacttcttcgcaaacacactcgctgctagagtgtttctgctgttccgggctctcggctttgtcgcacacgtggccaacgccctgaccgcactttgcacgaccagtcaaagccgggtcagcctcaggggtgcattgggtgcagagtacttgaatgggaatcggtatgacatctattctgttaaccatctcccccaaggtgcccccagctcaccagctcttgccaatctgtgtgcgcatagtcttgacgtgcgcttaactgctatcgccggccagtttggagccatatacacgagatatgctgatgacattgtgatttccgggtccggcgaaattgcagctaggcccagaaagtttataactctggcccgggagattatcgctgatgagggctggaggcttaaccccgataaaacccggatcatgcgtaatactggcaggcagagcttcaccgggctggtggtgaatgaacgggtcaacgtggctagagacgagtttgaccgcatcaaggctgcagtacatcgcgccaccagggacgacgttccccatgtacttgggctcttgtcatggctgaagcagtcctctcccgagagagccgctaagttacgacagaaattgctagcacgaaatgatttgacagatgtgcgatctgcgtcgaagacacgttga

SEQ ID NO: 13091 - RNA, 1416 nt, synthetic construct
  source 1..1416: mol_type = other RNA
atgagcgccaacgaagatacatcccccgatgactcacgcactccccttctggcattcgaaagattcgcgaggtccattgctgagtttctgttgtacagtcatcgagagggctttcagctctccgtgtctgctttacgtgcaagggccacgagacatttcggaggacacgactacctggtgtgcgcgataatcagggaggtgatcgatgacgtcgccggctggtgtgatttgccccccacaactctcgcccagagaatcctcgatagctcagcactggaggaactggtggcgccgtttgtggaggacgactactggttcctcgatgacgacgctctgttggatcttcggtcggcccaggccaggcgtgttgctgatgctgcaagtctcgccgcatggcttccaccccctcaaaatggggctgaatggctaagggaggcccgtttgataagcccttcatttgcaacagtggtggatttagcaaggtggcttgacgttagtccagaggaattcgatgcggccatggccaaccgccggtataggctgcgcgtccacgcaaaaccctctggagggactagactgatcgaaattccgcccgaaagtctgcgcgtcttgcagagacgcgtgcttcaccgactgctggatcgcatttccccccacgcagctgcccatgcctatgtgagaacccgctctgctcacactcatgcagcccagcacgtcggtcgagaaatggttgttcgtctggacctccgcgacttctttccttctatcaagggagcccgggtctttctgctttttaggagcctgggtttcgcagctaatattgctaacgttctaaccgccctctgtgtagcgagccaaagcagagcttcactgcgaagagccttgggcgccgcacacgttgctttcttcgagaggttcagcgccaatcacctccctcaaggcgctccaacatccccagcactcgctaatctctgcgcccattccctggacgtccggctgaatgcacttgcagagtcctttaacgctacctatactcggtacgccgatgacctggtctttagtggtgacgagggcatagcctctgagccacgagaattcgtgtgcttagcgcgggccatcgtgagcgacgaaggctttcagctaaatacagagaaaacgcgcattatgaggaagtccgctcggcaagccttcgccgggttggtagtaaatgaaaagatcaacctgccacggtgtgattatgaccagctgaaggctgccgtgcacagggctacccttcggagtacctcagaggaggtgtcaaaactcctggggagaatcgcatggctgcggcagaactctcctcatagagccgacaagctgcgatctaaactaatttcgagcttaccaaaccagtccgcgtctcctaccgccccttga

SEQ ID NO: 13092 - RNA, 1470 nt, synthetic construct
  source 1..1470: mol_type = other RNA
atggttatcgacgctgctccaccttctcccgaatggcttgccgcccagcttgctgccctttttagccacgcggtggcccacggctacagcttgaagcctgccactctcgcacggcgatctagtaggcactttgccggagcttcaggcatcgttcgacatgtcgccagagatctccagaagcgcggtcagaccgggaacgattggactaagtggcctacagaggtcttggctgacttcatactcaagtcaaatgcgtttgtgccactcgtggatggctacgctgttgttaccggcgaagtcgagtccccaaaatacgagactgagccggacgcggagatcatggcccttctggcagagaatcctgaagcgctggctgcatggctggagcgggacgaagccgacgacgtacctctgtatgccccgtttgtagccacaaggcccctgcctgaggtgatgcccaacttcgccgccacgttacccgcactgaacggggtcagtgatattgcccggctccttgacgtatcccgagaagaatgggacgacgcattagctcggtctaggtatcgcctgcgctgcgtgagaaagtctagtggaggcgtgcgtctgatcgaaatcccgtcagaggctttgagggtcctccagcggagaacattgcatagactgctcgggcgcgtgtccgtccatgatgctgcacacggctttgtgcgaggtcgctccgtgcacacccatgctgccgctcacgttggtcgcgatattgtgattcggctcgatctcaaggacttcttccccagcatctcaggagcaagagtgttcctgtttttccggtccttgggctataacgtacgtgccgccaacgcccttactgccttgtgcgtggcctggcagacgaggagatctctgcgagatgggttgaaaacattggcgaccaccacagatattaacgctctcctacccaggtacagtgttgcacacgttccacagggcgcaccaacctccccagctctggctaatctgtgtgcccggtcattagacttaagacttgacgcatgggcaaagtcgtttggagcaacctacactagatacgcagacgatctggtattcagcggcgacgcagccctggctaagtcttggcgcgccttcatcgctaccgcacgtgtgattataggggaggagggatgggagctgaatgttcaaaaaacaagggtgatgaggcgttctgtcagacaagtctttaccgggctggtggtgaatagccgcgtcaacgtggcccgggatgaattcgatgccctcaaagctagcgtccacagattctgtaaacccgacgcgacagccaatgcggatgagctgcgagtgctgctagggcgggtggcatggctaggacagagccatcctgccagggccgaaaagctgaggaataaactgtatgcctccactgacagtcgcgcagatacgaacggtgacgcggcttga

SEQ ID NO: 13093 - RNA, 1461 nt, synthetic construct
  source 1..1461: mol_type = other RNA
atgccggctaccgtgccctccgagactacacctcctccagaagttgacgcgatcgcagacgctctggcagccttcatgctggccgaacatacagctgggcgctcactaactgcccgagcgctcactgcacgtgctagcgcacgcttcgtcggctgcagtgcccttcttggagctgccagacgagacttggccctgcacgcggagctagcttggccacactggtccgccgcacaattggccgctcgaatccgtaagcttcccgcctttgaacgcctcgtgacccagagtgtgctcctgaccgccgctatcgaggacattaccgctactctggctcacgcggcagatgagaaggaacggggcgaacacgccgattgggtggctggtttgcaagcaaggcgggcacgtttacaggctgacctcccaaggatttggccagtggcagctaccgctgggtctgacccacccagggttgagagcgggcttcagcctctcgccgatctggcaaggcggatcgaaatctcggaagacgagctggatgccgcccttagaacctccagaactcctcacgccttccgccttctcgtgatgcgcaaacagtccggcggcttacgggtgatagagcaaccccaggacgcgctgagggtgttacaaagaagagtgttgcgggaggtactggcgaccgctgatttgcacccggcggcacacggttttgtcaggggacggtccgctttaactcacgccgccctgcatagcggtagacggttagtactgcgactggacatcgccgacttttttacatcaattaccgctgggagagtacatagtgcattcttgcgcctgggaatgccccctagggtggcaactgctctcacggccctgtgtacatctgtccagcgggctggagcattgagggccgcattgcggcgacatgatgccttcgcaagccagacacgcattgtcggccacgtacgcgattggcaacagaccctgtgcgtcccccatctacctcagggagcccccacatcacctgccctagccaactggattgcttaccgcctcgacagacgtcttagtgggctcgcagcggcctgggatatgcggtattcaaggtatgccgacgatctgactttttctaccgacgcctctgattgcaatagcctgcgcttcgtcgatcaggtgagaacaatagtggctaccgagggctggctgctgaacgaacggaaaacgctggttatgccgcagtctaaccgacagagggtgacgggtatagtggtcaaccagacaatgaatctgtgtagacaagactacgacgcactgaaagcagccgttcacagacatgttaatgccccaccagatgacgctcagcgcagccagctccttggcaggatcgcctggctcgcccagtttaggcctgagagggccgatcggctgctccataagctgcgttccgcgcccagatga

SEQ ID NO: 13094 - RNA, 1362 nt, synthetic construct
  source 1..1362: mol_type = other RNA
atggccgctgttcacgccctcgcccatgccatcgcatcagcattccttgatggaccatgggtcccaagagagatggcacagcgggctacatatgctgtccgcggggtgcgtaccgaaaccagagtggggctgcatctcgtgattccacacgaagccgtccggactcggacttggctgccagcactggctagggccaccgtcatgagatttccagagcccccccatgccaccctcgatgcattggccgtatggattggggaccaagattctctggcccgccacgcccatatcactgtggtacgggctattgctctgcctgccccagcgatgagtacaatgaggggagcgttagctgacctgggcgtgccttcgatcaccacactgcccgagctggcagcgcaaatcggcacttccgtggctgccctggatttcctcagcagagcccggccacgggaaattgtgcgaccgcaacaccgcactacactgctaaggaaacagagtggtggccttcgggttctcgagataccctctccgcctcttgcaagagcccagcgtgcaatccttgacgcaatcgttgcccacgtgcctatccacgacgcagctcacggattcgtcaggggaaggtcccctagaagcgcagcggtccgtcatatgcaccgcgaggtggtggttaggctcgacctcgcagatttctttttgagcattactgcggctcgtgtgcgcggcgtgttcagcagaatggggtaccccgacgtaatagccgctagattaacacggttgacaacgaccgcgacacggcccgatgtgatcgcctctcttaggacccacgtcgatcatgcttccacgcatgccctggcgcagcgactaagaaccccacacctcccgcagggcgctccttcatctcctgccctggccaatttggtggcctaccatctagacgcccgcctggctggtctggcacgaagatttggggctacatacacccggtatgctgacgatctaacgttttcaggtgatgctagcctctcccaccacgtccgcgggttagtgcgaagtgtcgtggccatatgtcgagacgagtcctttggcgtgagacatgacaagactcgggtattacgccgacacagacgccaggacgtcctgggtgttgtggttaatgataggcctaacctggcaagggaccgttatgacctgctccgcgctgtactgcatagggttgccagggaaggctgggaacgggcagagattgacggacagcccattggcccctcagcccttgcgggacatgttgcccacgcttgcaccttggtgaacgatgcccgagccaggaagttgcgcgcaatgctggccaggctgccctga

SEQ ID NO: 13095 - RNA, 1227 nt, synthetic construct
  source 1..1227: mol_type = other RNA
atgcttctccggagcccgtgggaactgtacgctctctgggcagcgctggacgaggcatttggaagaagaatgccgtttaccagacagctcgcaatggaagcactccgggttggtcgggtcggggaggaacgtttggctcgcggtctgagggaagggagggcatttagaggcctgttgcgagacgaggaaccactcaggctggtactgtgggatctgcctgtgacccagatgcagccacccagggtgcctctacattgggagcctcccgagctgcccacagatgacgcgctggctgcctggctgggattagaactcgggcccttgcgagcattcgcggatctacaagatagagccagacatcaccctccagcctggcgtaactatcagcaccgctggatcggccgaaggcttatcgaggcccctaaggcccggctcaaacacgttcagcgtcgcgtcctgcacggcatactcgacgccctggtagtccatccagccgcccatggattcgtgagaggcagagatcgcagatcacatgccgccccacacgtcgggcatgaggtggtagctcgcgtggacctggccaggttcttcccgagtatccaccgacggcgcgtgactggcctttttgaggccatgggctatcctagacgggtggcaaggctgttggctgggttgtgcgccgctaggactccacctgacgtggtcgaggctggtccagcagatgcacctgtgaggtatgacgccccacatctgccccaaggagcacccacctctccagccgtggccaatgctttgtgctggcggctcgaccagcgactttccgctcgtgcaaccgcgtccggacacgtctacagcaggtacgccgacgatctgactatttctgggccccggcggggtatgagagccttagttgctgccgtgcaggtgatcgccgcggatgaagacttcgtggttgcagccgacaaaacgagggtgatgcaccagtcggagcagcaacgcgtcacaggcattgtcgtgaatgcacagcccggagttccccgacgcgaaagggaacggctggaggctattcttgtgaactgtggccgcacagatcctgctgcacaaaaccgggacgggcaccccgattttgcggctcacctgagaggacgtgtcgccgctgttggcgccgtgaatgctcgccatggcgagaagcttctagccttatggcaggctgtagattggggatga

SEQ ID NO: 13096 - RNA, 1314 nt, synthetic construct
  source 1..1314: mol_type = other RNA
atgcacgccgctacgttttgtgctctccttgccgaagcattcctggccggcgactggcaacccgcagatatggcgaggcggggatcagccatgattgacgcagcagggtcccagaggaggtggatgcgcagactggctggtagagtggccgaaagcctaccacggggagagcatctgactccagcccgcgtggcgtcgtttgttgaacgggatctgggatttcgacgcgtctggagtacttggttgagttcctgtaggattcggcagaggttttgggtccaccccactatggggcctagccagctcccactggaagcagcgttaccccaggtcgcaacagcggggcaactagcagactggttgggcgtgggagtgagcgaactggccgggttcgcagacctccagggaaggcacttaagagccagtgcccgcagccggcgacattatcgacgtcgctggcgagagccaagaagcgtagccggcagtcctcggcttctggaggctcctaaggaccgcctgcggcgattgcagaggcgcatactgagggggatcctgtctcaggtccaggtccatgacgctgctcacgggtttgtgcccggaaggtctgttcactcttgtgctgcacggcacgcttgcaggccggttctagtccggatggatctctcagccttcttcaccggcatcgatggccgtagggtggctggtctgtttgaggcaatgggcatcccgaggactgtagccagagtgctggccggtctgtgcacaaccgctactcccgccgatgagctcgctgcgttagcccacacctggtggctccgggtcttgtatgcccgaccgcatttaccccagggcgctccaacaagccctgcccttgctaacctgtgcgcattcagacttgacgcgcgcctggatgcattcgcccgttcaaagggctggagatacaccagatacgcagacgacctgtacctctccgggcccgatcgacctcatcggctcgttagaatggtgcatagaattgcccgccaagagtccttcacagtgaatgcccggaaaacctccatcatgcggcctggtcgcgctcatagatgtttgggcctttctgtggaccgtcaaccagctgtaccacggcagctgagagagcgccttgaagccatattgacgaattgcgtgcgtcacgggcctaacggacagaaccgagaaggccaccccgattttaggcgccatctggagggaagagttgcctgggtgaccgctgcctgcccaagacacggtgaaaggttcgccaggctcctggaggagatccagtggccttga

SEQ ID NO: 13097 - RNA, 1353 nt, synthetic construct
  source 1..1353: mol_type = other RNA
atgattagccatcttccccgcggcataccaggggtgccaactagcatgcacgaccaccggcaagctgcagatcccgccgttcgcagagccggatctcagggaacagaatccgaggtcagcctgcatcaccctctgatcgacgctctcgcggacgctttgctggccgttccgtgggatagggaagcccttcagcgggggtttagagaggtgctgggcggttacgaccccttagcagccggtttagccgcacggctgtggacggatgctaggccagacaggggtgaggcagtgaggctgctcgtcgaagacgtagagctgcggcgccttctccaagggccagttgtagcccggagaagggcgtggcatttcccagaggaggacccggcacctcttcgattcgagggactgccggagctgcctgatgtagcggcactggcccgctggttaggctggtcagtgcccgtcttgctaggccacgccgatctgcgacatgaccatcggcgccgagccgaatacagggattatgtctacagatggcatggagctagacttatcgaggcaccgaaagaccggttggctggtggtcagagacgtatactgcgggagctgctggttcacgtccctttgcacgacgccgctcacggctttgtgagaggcaggtccccaagaacacacgctcggctccatgtcggctgtgctgtggtggtacgggtggatctagagcgcttctttgcttctatcaccgccccccgagttagggggatgtttcgggcactcggatatcctcgcagggtggcgtctcttctagccggcctgacaacatcatggcccccacctgatgttgtgcccggaggatccccatggagtgcccctcacttgccacagggagcccccacttcacctgccttggccaacattgtctcccacgggctggacagacgtctccaagggcttgctcgacatcacggcgcggcttactctagatatgcagacgatctgaccttctccgggcgtgcattgccttcgtcactcgtgcccaccatcgagcagatcgctgtgagcgaaggctttcgggtgcgcagatgcaagacgaggcgtatgggagaaggggctgcccaacgcgtaactggcctcatcgtcaatcgacacgtggccgtgagccgcagagaacgcgatcacctgagggccctgctgcacttagcactcacccgcggtcccgccagtgttcgtgtcgaaggcgtggacgatgtgaggagttggctccgggggagaattgcttgggtggcacatgcccgacctgcacatgcggaaaggatgctggaggtcttccatcagattgcctggaccgcatga

SEQ ID NO: 13098 - RNA, 1365 nt, synthetic construct
  source 1..1365: mol_type = other RNA
atgcttgacgtcctcaggcagggtcgaccagggccatctcctttttgggtgggacttgtggcccgggtgagagacgcattcggacccacttccccccccccaaccctagacgcattaactaggatgctggcggaggacccaatcttcgatgaggactaccgggcagagatggccctgctcacagaggccgacgggtggaagaccccaccctacgtggatcgactgatttttcgccctgtgggatctaggttcaggccaggggcagcagctgcagaatggccagtccccagactggaaagtgtgcccgaattggccgcccatctcgaggtacccgaggctactctggaaggatgggctgacgttggcgggtggttgggcaggtatccatcagatcggcgccagcactacgtgagaaggtggatacctggggtgcctggtagaagatctcgcccaacccccctacgtagagctgcccctgggtgtgccccctgtctcagatcaagcggtggctcaggtccgcgcctcattgaggctccaaagacacagctggccaaaatgcagagaaggatccttcgcagcatcctggacctggtgcctgtacatccggcggctcacggatttgttcgggggcgaagcattcgcacgcacgctgcacgacacgtgcacatgcaggtcgtgctccggttcgatctgaggcgcttctttccttcagttcaggcaccgcgtgtccagggcctatttcgctacctggggtacccagaagaggttgcccgtttgctcgccggactgtgcacaacaatcacccctcatgacgtttttcccccccggactgcggctgatgtccgtcaactgtatcgccagagacacttgcctcaaggcgcgccaacctcccctgccttagccaacctgctctgcctgggactggacagaaggatgatgggcctggcaagggccttcgacgctggctattcccgctatgccgatgacttggtattcagcggaggcgctgcccttgctgcacgatcgagaaggtttggaggattcgtggcccgcgtcgtggaagaggagggctttctgcttaaccatgataagacgcggcggatgccccggtctggtagacaagaagttaccggcttagtggtgaatcaggggcctgcttacccgagagatgagttcgatcggttaaaagccatactccaccagtgcgcactggatggccctgaaaggcacaatcgcgagggccatcccgattttcgtgcccatctgcttgggcgggtcagtttcgtggaatccgtagacccgagaaggggcgcgaaattgagggtccggttcgagcgaatccggtggggtagcagtcaacgatga

SEQ ID NO: 13099 - RNA, 1242 nt, synthetic construct
  source 1..1242: mol_type = other RNA
atgagccacgctgtggctgcagccatcgctctagccctgctagagccagagcggtggcgatccggagttagggcaagtttggaatcttttgaaggcctggacgccgaatctcggaccgccattgggagactcgtaaagtccctttacgtccgacctgaagtggacgagctcgctgccctcatcgcaagagatcccaaggtgacccttcggggcgtcattccccgtaggtgggccttaccccctttgaggatgactcgtcctccctatggcgcaccacctttgccaacgccagccgacctggctgcttttctggatgtcgaggtcggcgagctctcgttcttggcggacccgaaaggctggaacactgatgcgcgcagacagcactaccgaacccgctgggttcccaaaaggcgcggtggtaggcggctgatagaggcacctaaggctcggctgaaaagggtacagcgcaaggtgttaagaggtattctcgacccggtacccctgggagcagcagctacagggtttgcgccaggcgccagcccaagtaagcacgcagctcgtcattcaggcaagcgctgggtgttgaaaatggatctggccgactttttcgcacacgtggggtctggtcgggtgagagccatctttgagacgttgggatatccgctcgcggttcgccgactactcgtgggactatgcaccacacgggcccctgctgaactgcttctcgacgccgatcctgtggagagagcgctgcatggtcgccgccgattaccccagggagcaccaacaagccccacccttgccaacttagctgccgcccccctggaccatagactttggaaccttgctgcccgtctggggctgacttattcccgctacgccgacgatctggcattctccggggacaggatgccagagagtctgatacccagaatcgccgcgatcggcattgaagaagggttccctctgcagctccggaagactaggaggatgggccgagctgtcaggcaggagctgacagggttggtggtgaatgccgatcctgcgccacgcagggaaagctatgaccggctcagagccatccttcaccaagccgctctggatggacctgcagccgccaatagagaggccagggaagacttccgggcttacctgcggggcagaattgagtgggttgcaggaggacgaccgcaacgtcgggcaaaactggatgctctgttcgcaagaatcgattggtcatga

SEQ ID NO: 13100 - RNA, 1056 nt, synthetic construct
  source 1..1056: mol_type = other RNA
atggggctgataatctatgcaatcctgtcaagaggcaagatcgacgccgtggccattaggaggagtcggaaagactacagatccccgtttttatttcgccgggctggaaggcctgatgcaggcaaactggcctctcgtggcttacccgtgctagggaacgttaacgaagtggcagcgcttctgggcgtcagtcccaaacagttgcgctggttaagcgtggccgacttcggccactatcattccttcctcttggagaaaaaatcgggagctgccaggcttatcgacgcccccaagccacagttgaaggctgcccaaaggaagatttacgagctcctcctgaagaagcagccactccaccctgccgcacatggcttctgtccgggtaaaaatgtacgtgatcacgcagcccggcattgcgggaagcaaactgtcctggggatggatgtcgctaacttctgcccctccgtgagtgcacggagagtttgtggactctttaagtcctggggctatggagaggatgttgcccttctgctgactacactgaccacgtacaatgggcatttgccccaaggcgcccctacatctccagctctggccaatctggtgttcactcatgctgatgcacgtctggcaggtctagcgcgacgcttcggtgcggagtatagcagatacgctgacgacatgacattcagcgggggccaggccttccagaggaagctttctgcattttcaaaagctgtgcagggaattgtaaaggaggaaggttttgcgctcaatcacaacaaaacacggcagatgcggcatggaaggcgacaggtggtcaccggccttgtggtcaatgaaaccccacacgtttcacgacgaatgcggcgccgcatgagagctatcctgcacaacgcccaacgcaagggactcgaagcccagaacagatttaagcaccctcggtttgcggaacacctcagggggcgaattgcttggataaccagcctgcaccctaggttgggtggcagactgcttgaggggtggaaagctgcccgcgccagattcgcaggatga

SEQ ID NO: 13101 - RNA, 1389 nt, synthetic construct
  source 1..1389: mol_type = other RNA
atgggactgtttgatttcattaaggggctgtttggcgggtccgcccaggttcaatctggtccgactcatgccgacgtcaaccctgcgcatgatcaggccggaagggaccagacagaaacttcatacgcagagtccattcacgctgatgctggggaggcagtaccgcacgagcattcctcaccgcagaattcttcctcgaacaaggtgttcagggaacgcaaggctagcaagaacatagttcttagaaaattctcctaccggccttccactgtcgctacaccccaggagcaagagattgtgcgccaccgcccctacaagtttgccgtgccaggaccacataccggtgagtttctcgatctcagccaggatgctgacgagagatggctggagtattatggactgcctaccctggcgacacccgacgaccttgccgactggtttggcatatcgataggtaagttggcttggcttacccaccggatgcgtgacggaaacagaccaaaagacgtgaaagatgctcactaccacttccagtggaaaaagaagagaagcgggtcatggcggctgatcgaggcacccaaagaagagttaaaaggcgttcagaccaaaattcttcgagagatcctggaccttgtcccagcacatccagccgcccacggatttgtgcctgggaggagcatcctgagcaacgccgtaccccatgtgggaagtaagttcctcctgaagctagacctggaaaacttttatccaacagtgcgttacagcagggtcgttgcaattttcaggtccctaggcttctctcgggaagtttccatctggttggcgcgacttacggtgagtgcccccccttggtctttggatgcaccaaaaaagaattgggaattctggcaactgatgcccccgcatttacctcagggtgctcctactagccccgccttggccaatctgagtgcatttgcgctggatgtgcgcttaagcggcatggctaaagcttacaacctcaagtatacccgatacgcagacgatctgaccttctcaggccccgggctctcaatcccagccctgaacgaatttatcccactgactagtaagattattgccgccgagagattcttcgtgaacaaaaagaagcgtaagatcatccggaattctcagcggcaatgtgtcacgggcgtggtcgtgaatgaaaagattaacgtctctaggcaggattatgaccagctcaaagccatactccacaattgcgtaaaaacaggccctcagcaacagaatagaaatcaacaccctgattttgctagtcacctccgcggccgcatcgcccatatgatgcagttgaatccctctaggggggcaaaactactggaaatctatcagaagatcagatggtga

SEQ ID NO: 13102 - RNA, 1077 nt, synthetic construct
  source 1..1077: mol_type = other RNA
atgggactctttgactttatccgtggattgttcggcagttctcctaatcaccaggtcgagcagtcaggcgagcaaagggatacaacccctgggagatctgatccaggggtgagcgaaactgctagccctacacctcaggtggaaccacgccagagtgtaagcaagagaacgcaaactcatctgccttgcagtaagcgctcacctgtcaagctacaacagctggagtatcgcccagggatcgtgagaaccccctcggaacaggaagtttccaaacagaagccctaccgattcgctagcattgggcccaggacaggcgaatacttgaatctatccagggacatggatgagcggtggttggaatacttcggactgccccaactagctaccccagacgacctggcccagtggcttaatctcagtatagggaaactcgcctggcttacccatcacaccagggagggctacagaccgaagaatgaatccgattctcactatcacttccagtggaagcgcaagcgatcggggggactgagattgattgaagctccaaagcaagagttgaaaaatgctcagcaccagatcctgcatcagatcctcgactcagtccctacccatcaggccgcacatggcttcgttcgaggacgcagcatcctctccaacgccagcagacacgttggatcaaagtttatcctgaagctggatctcgagaacttttatccttccgtgaaatattcacggattgtggctattttcaggtctatgggcttctcacgtgaggtaagcctgtggttagcccggcttactacgtctgccccctattggggtctgaaagcaccggagaagaactgggagtactggcagctcatgcagaggcaccttccccaaggtgcgccgacatccccagcgttagccaatctgagcgccttcagtcttgacgtgcggctgtctggcctggcaaaagcctataacctcaaatactcccggtacgcagacgacttaacttttagcggcccaggtatgtccattcccgcactgaacgagtttatccccctgacaaacaaaataatatctgattga

SEQ ID NO: 13103 - RNA, 1380 nt, synthetic construct
  source 1..1380: mol_type = other RNA
atgggctggttcgacttcctacgtaaaatctttggcttcggccgggcagagtcttctcagggttcacagaccgtcgccgatgcaccactagcagaggcccctgtaaccgaatcatcagccgctgagtcccctagttccgatgttagcgactccgaggtgtcagagccagcggagaaacggaaagctgagcctaggcccaattctacagtcccccgccccgatgttcaccttcgcccattggactacgttccctcaacggtgccgattcctcccgacagagagattgtgtccgaaaagccttatagattcgccgtgcctgctccacggacaggagaatttctcgatctgagccgagattcagacgaacggtggttagaatactacgggctgccgcggcttaagactccagatgatctagcggactggctgggtgtgaccaccgggactttggcctggttgactcaccgttttagggaagggcatcgacctagcgatgaaagagatagccattaccactatcggtggatagctaagcgaagtgagggttggaggctgatcgaggcccccaagagcaagctcaaggacgtccaaaccaagatcctgcgcggcatccttgactccgtgcctgcccatagtgcagcccatggattcgtgccaggccgctctatcgtctctaatgctacaccccacagcggctcgaaattcatcctgaaaatggacctcgaagacttctatcctacagtgagatacagtagagtcgtagctatttacagatccctcggatttagcagggaagttagtctctggctggcaaggctgtctgtgtcagccttaccgtggtccctgaagtcccccgtaagcgctcacgagtacgtggtttataccgcacaccatctcccacagggagctcccacatcgcccgctctggctaatctgtctgcttacggtcttgacattagactggccggcatggccaacgcataccgcattaggtatactcggtatgccgatgatctcactttcagcggacctgggcttagtatcccagcattaaacgagtttattcccctggccaaaaagataatccgtgaggaacgatttacgatgaaccggcgaaaactgaaagtcatccgcaacagccagaggcagattgtcacaggcgtggtggtgaatgaaaagaccaacgtatctaggaaggagttcgaccaattgaaggccattttgtataactgcataaagcacggcccacagtcccagaatcgcgccgagattgcgaactttgcggagcatctgagggggcgcatagcccacatctcccaactgaatccgagaagaggagcaaaactcatgcggatgtacagtcagatcgggtggacctga

SEQ ID NO: 13104 - RNA, 1101 nt, synthetic construct
  source 1..1101: mol_type = other RNA
gataggccatatcactttgcttggccgggaccgagaacaggggaatacctggatctaagtactgacgctgacgagaggtggttgcaatactacggcctgcctaccctgcggacaccagaggaccttgcagactggttgcatataccaattggtaagctggcttggctgacactcagaacgaatgatggtcacaggcccgtgtccactgaggcctcacactatagataccaatggatcccaaagaggtctggaggatggagactaatcgaggcccccaaagaacagctccgactcgtccagacccaaattttacgggaaatactggatcgcatccctcctcactcgtccagccatggtttcattgctgggcggagcattattaccaatgccgaaccccatttgggccagaagtttatactcaaactcgatctgcaggatttctacgcctctgtccgttatgcacggatagtagctatttatcgatcattcggcttcagcagggaagttagcatctggctggcccgcctctcaaccactgccgtaccctggtctttgcagttccctacgcgcgacgcaaggtcctggacattccacgcctactacgcattccatctgccgcagggagcaccaacctccccagcacttgcgaacttgtctgcgtatggtctggacgtcaggttagctggcatggccgcagcgtacgggttaaattacacacggtacgctgacgaccttacctttagtggccccgggagggcttttcctagtctgcgcgaggtgatcccttttgccaatcgtattatccgaagtgagagattccgccccaaccagaaaaaggccaaggttatccgtagatcacagagacaaactgtgactggagtggtggtcaacgagcacctgaacgtgagccgccaggagtatgatcggctgaaggccattctacataactgcgttaaaatgggcccctcctctcagaaccgcggagaactggccgactttcctgcccacctgagagggaagatcgctcacgtgatgcttctcaatgaggatcggggcctcaaacttctggaaatctatcatcgaatcgactggagccggtga

SEQ ID NO: 13105 - RNA, 1359 nt, synthetic construct
  source 1..1359: mol_type = other RNA
atgggcctgtttgatatacttaaaaggttactggggttcgggccccgacctgatacaggaccagctgcaccaccaggccaacctgcaccaccaccggaaagtctccctggacccgcctcagccactattgctgagcccagtcctcagaaacgagcatccgcacgggaggcccatgaacagccagccaggagggttcgtgttgtcctgaaacctcttagatatcagtccaacctgatcccgacaagctccagccaggagatagtgagcggcaaaccttaccgcttcgccggtattgggccacagcaggggcagttccgcgatttaagccgcgatattgatcaacggtggctggattacttcggactgcctgtcttggctacccccgacgacttggcggcgtggttgaatatacctatcggccagctggcttggcttacacataggacatccagaggccatcgagccgaatccgtcaaacaatcacattacgtctatagttggatagcaaagcgctctggcgggcatagactcattgaatcaccgaaatcggacctgaagcacgcccaagagcagattctccggggattactggaccacgtccctccacacacggcagctcacggttttgtgcccggaaggtctatcctcactaatgcctccccccacgttgggcagcgctttgtgctcaaatttgacctccgggacttctacgtaactgtgcggtattctagagttgtagctatctttcgcagtctaggttattctcgagaggtggccatttggctggccaggctgacgacctcctcagtgccctggggcatcaaggcccctgtgaaggaatgggagctggccaagtatgcttctcgtcacctgcctcaaggagcaccaaccagccccgccctcgctaacttatccgccttcggtctggacgtgcgactagatggcttggcgggggcatacggactggagtacactaggtacgctgacgatctgaccttctctggccccggtaccgcaatcccagcccttcacgaactaatccccctcattcagaagattatcagagctgagaggttcagcagtaattggcagaagagaagagtgctcagaaatggtcagcgccagacagttgccggcgtagtggtgaacgaaaaactgaatgtgtcgagacgggattatgactctctcaaagctaccctgcacaactgccggaagctggggccgtcaactcagaaccataagagccatcccgagtttgcaagccaccttaggggccggattgcgcacgtccgccaacttaaccccgcgcgtggagagaagttgttggccatctaccagcagatcgactggagcaagtga

SEQ ID NO: 13106 - RNA, 1368 nt, synthetic construct
  source 1..1368: mol_type = other RNA
atgggcctcttcgattttctttcacgcctcattttcgggtcgcctgcttcccatgactccgcagccgatgtgccaccaacagctccggagccatcacgagccgatgctgcacctaaacacaacagcccgcctcccaagaggccatcccggattaagaatcggacgtccagtacccgtccggttagactcgtacctttgagatacgtgggttctctcgtccgtacgccccagcagcaagagctgacagccgagaagccctacccattcgcttcccgcaacctaaacccgcggactggagaagatcttgggtggctggatctgtcgaccgatggggatgaaaggtggttgcagtactattctctacccatactcaagacaccaaccgaccttgctcagtttctaggcatccctctgggacggctggcatggttaactcagcgcagacactctaattatcgccccgcaaccattcgggagagccattaccactatcgatggattactaagcgcagcggtggacatagactgatcgaagctccaaagcagcagctgaaacaggtgcaacagaagatcctgagtggcattctggaccgcgttcccgcacatcctagtgctcacggcttcgtcgcaggtagaagcatcttgaccaatgcccaggcccacgtggggaaacgattcctgctgaaactggacctcgaagacttctacactaccgtgaggtaccgcagggtagtcgccatctttagatctcttgggtacagtagggaagtggccttatggctctctaggcttacaacaagcgcggtccccagagaatttgtgggaccagacagcagacctggttggcaccacagtctgagcaggtatgcccttctgcatctgccccaaggcgcccctacctcacctgcactggctaatttgtccgcctacgctctggatgttcggttggccggcattgctggagcatatgacatggactattcaaggtatgcagacgacctgactttcagcggggaaggaagatctattccagcccttcaggagtttgttcctctggtccagcaaataatacgcgcggagcgatttcggcccaacaggtccaaacggagggtggtgcgggattctcagcgtcagatcgtggccggcgtggttgtcaatgagagaaccaatgtggcccgaaaggactacgatctgctgaaagccatcttgcacaactgtatgagggagggcccctcctcacagaatcggtacaatttggaaaacttcgcggagcacttacgtgggcgcatcgcgcatgtaacacaactcaaccccgagcggggcgcccgattactcgagatgtatctcagaatcgactggaactgctga

SEQ ID NO: 13107 - RNA, 1341 nt, synthetic construct
  source 1..1341: mol_type = other RNA
atggggctgtttgagttctttaagcgcctcttttttggcagccccgcacccgacgtgacgtcttctgctggctcggcatctgcccctcattcttcaccaactccggccgcccctgctaagtcaacgccaagacgccgccgaaaacgagtgcccggacagtcctcaaggccaccagtgcagcttcgttccctgcgctaccgaagtactttggtccagactccaaggcagcaggaacaagttcccactaagccctatgcatttgccgtcagggatttcgatgcctatcttgacctgagccaagatgccgacccccggtggttggagtattatgggttacctgccttaagaacccctcaggacctcgccaattggctgggcatccccgttggtagactggcatggctgacccagcagcatctgccggatagaagacctgcatccccaaaagaggcacactatcattaccaatggaaacagaaacggtctggcggataccgtctgatcgaagctccgaaagagctgctgaagaccgtgcaaacccagattctccgagaaattctggatagggtacccccccatcctgcagctcacggttttgttgaggggcgtagtatagtaacaaacgcgaggccgcatctcggccagaggttcattcttaagttcgacctggagaacttctatcctagcgtgcggtacagccgggtggttggaatcttccggagcctcgggttttcccgcgaagtcgccatatggcttgctcggctaacgacaaccgccgtgccacaggaattcagatcacctgacagcaggcccggttggcactggtccatgagtacctacaggtcccaccacttgccacagggggctcctacttcacccgccttagccaacctgagcgcctacgccctagatgtgagactgagcggccttgccaaggcgtaccatgtgacttataccaggtacgccgatgacctcacattcagtggcgcgccaaggacagttccagcgttaggagaggtgatccagctgacagaaaagatcgtgcgctccgagagattcagacttcaccctcgaaagcggaaagtcctgcggaataatcaaaggcaggtggtgacaggagtcgtagtcaatgatagattgaacattagtcgcaaagagtttgaccagctgaaagctaccttgcacaattgcattaagctcggccctgcttctcagaatcgcgcggaacatcccgagttcgcagctcacctccggggacgaatcgctcacgtccggcaactcaacgcactacgtggggacaagctgatggctttgtttcagagaatcaactggaaccgctga

SEQ ID NO: 13108 - RNA, 1401 nt, synthetic construct
  source 1..1401: mol_type = other RNA
atggggctgtttgagttcatcaagagactcctgtttggatccccagcgccaaccacagccacacagtctggcgatgatagccccctagagcgcccagccgagtctggttctgcatctgctgcgacgtccgctatgactccagccgagcaacaccggcaacggatgcgctaccaaagtcgccagcgaaacgccggccggagggaaagagtcagggtgtccttgaggcccctgcgttacgaatcgagcctggtgcccacatcggcatcccgagaacaggtcgccgaaaagccctacttgttcgccacttgctctgtggatccgcgacagggtccacgccatggctacctggacctaagtcaagacgccgatccacgctggctcgaatattatggacttcctgtgcttagaactccacaggatttggccgattggctccagatccccgtgggcagactggcttggctcacccagcggcaacatcgggagaggaggccacccaccgttagagaggcacactatcactatcagtggatccgtaagagaactgacggacacaggctgatcgaagcccctaaagagaagttgcgagccgtgcagacgcagattctggaggggatccttaaccacgtccctccccatcctgcagctcatggtttcgtggaaggcagaagcattgtcactaatgcaagaccgcacgttgggcagcggttcgtcctgaagttcgaccttgagaatttttacacgacagttcgctatagccgggtcgtcggcatatttcgcagcctgggcttctctcgtgaggtgtccctgtggctagccaggcttaccactaccgcactgcccgagcaggtgaaaaaccctgaaggcctccccgggtggcattggagtctcgcaccctatagggcagctcatctgccacaaggagcccctaccagccctgccttggctaatctgtcagcctacggtctggacgtgagattacagggactggcgaaaacataccacgtgaactacacccggtacgcggacgatctaaccttctccggggaggctcgtgtacttccggctctctcagaatttattcctttatgccagaggatagtgagaagcgaacgatttgtattgaacctgcgtaagcggaggctggtgcggagtaatcaaaggcaggtggtaactggggttgtcgtaaatcagcgcaccaacgtttcaaggagagagtatgacaggttaaaagccaccctgcacaactgtctccggcagggacctcaatcacagaaccgcgaggacgttgagaattttgctgcccacctccgcggacgaatcgcacatgtgacacagctcaatccggctagaggcgctaaactgttagaaatgttccagcggattcactggacagggtga

SEQ ID NO: 13109 - RNA, 1317 nt, synthetic construct
  source 1..1317: mol_type = other RNA
atgggtctgatcacactgctgaagaggatcctctttggaagcgcaccatcaatcccgcatgcaggagggcaacctgagcctgccgcggaaagcacaggagatcataccgctagagtgggcgctgtgagccaaagaccctccggtccagtgagattagcccccttgcggtaccagagtagcctggtccggacaccacctgacagggaacatgctgacggggccggcaaaccataccggtgcgcacacatagatccgagacggggcggctaccttgacctctcgaccgacggggatgctcgctggctggagtattacggactgccccacatagctactccagagcaacttgctgtttggctccagctgcccttagggaaggtaggatggctgacggatcgattctgtcagaaccatcgcccccagaacactcgtgaagcgcactatcattaccactggcttgccaaaaggtctgggggccataggctgatcgaggcccctaaaagccagctgaagcaggtacagcagcagatcctccgtgagatcctctgcagagttccccctcacactgccgcgcatggctttacagcgggacggtcaatcagaaccaatgctcgcccacatgtcggtcagcgggtcctgataaaatttgacctggaggatttctacccctcctgcagatacgccagagtggtggcaatctaccgctcccttggctattgtcgggaagtcgccctctggctggctcgcttaacaacctctgccgccccggctaacctaaggttccccgacgggaacctgcggtccctaatgccttatctccctcgccatctgccacagggcgcaccaacttctcctgctctggcaaatctcagtgcctattccttggatgtgagactcgccggtttggcagcccgctatcacctgaagtacacccggtacgcagatgacttgaccttctcaggggacgggcactctattcccgccctacgagagattcttccactgattacccgtatcgtgcgcgacgaacgctttagggtgaaccgtaaaaaaaggaaggtgattcgaaacaatcagcggcagactgtcacgggcgttgtggtaaaccaacacctgaatattcgaagggacgagttcgaccggttgaaggctattcttcataattgtcgaaagcacggtcccgcaagtcagaatagggatgatcaccctgattttgcagcccacctgagaggcaggatcgcccacgttatgcaattgaataggcaccgaggagaaaagttactcgcgatgtatgaccagattgattgggccagatga

SEQ ID NO: 13110 - RNA, 1287 nt, synthetic construct
  source 1..1287: mol_type = other RNA
atgggccttctgcgcttgctgcagaggttgtttttcggaagttctgcgaccgctgaagaacctcggcaagacgtcagacccagtagccaatccaaaccttccgcctccgccgagaggcagagagaacggttggcacctctgcggtaccagagctcccttgtcgcaacgcctcgaagccgcgaggtggtggaagggtcctcaccaccgtatcggtttgcgcatcgtgatgctgtggggggcgcgtatctcgatctcagtcaagacgtggatcccaggtggcttgactactacggcctgccacatctgagcacgcccgaggacctagcaggctggctgagattgcccatcgggaaggtggcatggctcacctaccggttttgcgaaaacaggaggccgcaatctgccaaggaggcacactatcacttcagatggatccgtaaacggtctggcggacatcgactgattgaggcccccaagaagactctccgcctcgtccagatacagatcctgcgcgaaatcctggaccggattccaccacatcctgctgctcacggtttcgtaaggggaaggagcttaacaacaaacgccgccccacatgtggggaaacgcgttgtcgtgaagttcgatttggataatttctacggcagcgtaagacagtcacgcattgtcgccatctttagatccctggggtacagtcgagaggtagccctgtggctcgcccgacttaccacatcagctgctcccggatcgttaaaactgccactcggcgagtcaacttccatttggaaatatatgcctcgtcatctccctcagggtgcaagcacaagtccggccctggctaatctgagcgcattcggactagatattcggttagccggtctggctagagcctggcacgttgactatactagatatgccgatgatctcaccttttctggcgaccccaaatttgtcgccgcagtgggagacttcatcccattagtgcagcagatcatacgggacgaggggtttcagtctaagaggtcaaaaaggcgcgtcctgaggaccaaccagcgccaaactgttacaggtgtggttgttaatcagcacatcaatgtgtctcgggcaaagtacgatagactcaaggccaccctgcacaactgtgtgaagcacgggcccgcttcgcagaaccacgacctgcatgccgacttcgctgcccaccttcgaggacgcattgcacacatgcacagacttaatcctcatcgtggccagaagctactggcgttgttcgctaaaataaagtggtga

SEQ ID NO: 13111 - RNA, 1260 nt, synthetic construct
  source 1..1260: mol_type = other RNA
atggggctgtttgattttcttaggcagctgtttctgcccagctcccgggatgtcgcctcacctagccaccgcagaagggagagagctcctagacgccgcgttaagctcaccccccttaggagaaggcatggacagcggccctggtccgagccaatagaggaagaaaccccgccctatcggtttgcccaatacggaatcagagatggcaggttcctggacctaagcagagacggagatgagagcctgctcgacagcttcgatcttcctgttatccatactccggagcagctcgccgagtggttgcaaatgccactgggtcaggtggcatggttgacacagcgcttcagcgacgggtatcgcccagagaatgagcagcaggcgcactatcatttcagatgggtcaagaagcgatccgggggctggcgcttgatcgaagccccaaagcagaaactgaaacaggtccagacacaaatcctccgggaaatcttggacagggttcctccccataattgcgcgcacgggttcgtacgacgtcggtccatcgtgacaaacgctcgacgccacgtgggccaaagagccattttaaaactcgacctggaagacttctacgctaacgtggggttttctcgggtggtcgggatttttcgtggactcggatactcgcgggaggccgctctgtggttaggtaggctgactacctccaaggtgcccagtaacctgaggtacccagaacggttctcaagtgccttctttcccttccttaagagacatctaccccaaggcgcaccttcttctccagctctggcgaatctgtcagcttacggcctcgacgtccgcctttctggccttgccaggagttattctgtcgaatacacccgatatgccgatgacttaaccttttccggcccccagtcttttattagggcactccctgtattcatccctttgacgtcacagataatacgagacgagcgatttcgtgtgaatagaaacaaacgtaaggttgtgagaaacaatcagcaacaggtggtggcaggtgtggtcgtaaacgctcacacaaacatgccgcgtcgggaattcgatcggctcaaagcaattctgactaattgtgtgcggcacggtcctgcaagccagaatcgcgagcaccatgcagatttcagtgcccacctaaggggacgggttgcccacgctgtgcagctgaacccacacaggggcaataaactgagagagctgtaccatgccattgattggaagcgctga

SEQ ID NO: 13112 - RNA, 1296 nt, synthetic construct
  source 1..1296: mol_type = other RNA
atgggcctgttggactttctgcgcagattacttggcggtcagccagcgtcgcccaatgatcaaccctcagccccagacacaagcactttagtacgcgatccccggaccggaggtgttacaccggcagcaccaaaactcttagctcctctgcggtaccgatccagtctgaatagaacagccactgctgctgagagagttgccgaactgccttaccggttcgcaaacctcagcgtggatggcgacggctacttggacttgtccaccgacgcggatgaacgatggttggaacattttgacctgccacacttgagaacgcccgaagacctagcaaatttccttcagctgcctttgggtaagctcgcttggctgacacaccggttcgaagagggaggcagacctgcgggggaaaaggagagccactaccaccatcattgggtcaaaaaaaagctcggggggcaccgtctgatcgaagcacctaagcagaccctgaagatggtccaacgccgtattctgcgcgacattctagatcacgttcccccccatcccgccgctcatggatttgttactggcaggtctatccggaccaatgctgagccccacgtgggaaaatccgtgcttctgaagttcgatttgcagaacttctatccctctgtgaggtattccagggtggtggccattttcaggtctgtgggcttctcaagagaggtggctatctggctgggaaggctgacaacaagcgccatcccagcaagcctgaaatacccacaggatgaccctagtgcactttggatgtattatccacgccacctccctcaaggcgcatgcacctcaccggcccttgccaacctgagcgccttcgctctcgatgtgaggcttaccgggctcgcgcgcaagtatgatgtgcactacactagatatgctgatgatttaacgttttccggtaccggccgatttgggggcgcccttagcgagtttatccctctggtcacccatatagccaagtccgagaggttttacattcacaggcaaaaacgccgggtactaagaggatctcagagacagactgtcgccggagtggtcgtaaatgagaaacctaacgtgtcacgacgcgacttcgaccgtctgaaaagtatactccacaactgtgcaaagcatgggccatctactcagaaccatgacgaccatccggattttgccgcccacctcgccggaaggattggtcacgtcctgcacctcaatccccatcggggggctaagctgcgagagctgtacaaccagatcgactggagtcggtga

SEQ ID NO: 13113 - RNA, 903 nt, synthetic construct
  source 1..903: mol_type = other RNA
aggccagcgggcgttagggaagcccactaccattaccattgggtgaagaagaagacagccgggcacagactcatcgaggctcccaaacagaccctgcgtgcggtacagcagaggatcctgcgcgacatcctggacaaagtgccaccgcaccccgctgcacatggattcgtctctggccggtccattcgaactaacgcagagcctcatgtgggtcagaggattctgctgaaattcgatctgcagaacttctaccccagtgttaggtatagtcgagtggtgtcaattttcagatccgtgggttatagtcgggaagtggcaatatggttagcccgccttaccacttcagccatcccggcctccctcagctttccaaagggcgaccccagcgctttgtggacatattaccctagacatctgcctcaaggggccgctacgtcgccagctttggcaaacctttccgcttttgctctagatgtacgcctggctggtctggcccgaaaatacgacgtacggtacacacggtacgcagacgatctcacctttagcggctcacaccgcttcggcggagccttatctgagttcattcctctggtggtgcacatcgcaaaatctgagcgttttgttcttcatcgtcagaagcgcaaagtcctgaggagctcccagaggcaatctgtggcgggagtcgtcgtcaatcaaaaggccaatatcgctagacacgagtttgatagactcaaggcagtcttgtataactgcgtgaagcacgggccctcaacccagaaccacgatgctcatcctgactttgccgcccacctcgcaggcagaatagggcatgttttacacctcaatccagcccggggagccaagcttagagaactatataatcggattgattggagccgctga

SEQ ID NO: 13114 - RNA, 1338 nt, synthetic construct
  source 1..1338: mol_type = other RNA
atggggcttttcgactggctaaagggcatgctaggtggggctcccccatcaccaacccctgcagctccttcaccacccgcagctggcgtacgcatcaatccatttacacaagaagtggtccagctggggatcgatagacggacatcggctccttccttgcatgctttcaggtacagaagctctttggtgagaactccccctagtcgcgaattcgccgctaaaaggccatacccctccgcgcagcgccaagtttataagggctggctggacttgacaactgacagcgacccgcgatggcttgagcactttgggctcccccctcttaaatcacctgatgatctggccaagtggctcaacgtccccttaggccgcctcaattggcttagcggtaggtatcgagatggcggtcacccgggaaccgcaaaagaggcacactatcacttccaggtgatcccgaaacgttctggaggagcgcgcctgttagaagccccgaagccacagctgaaggccatacagcagcggatcctccgggacattctggataggataccagtacattcccaggcacatggtttctccaaaggccgttctattgtgactaatgccgaaccccatgtggggaagcgaatcattctgaagtacgatctcgagaatttttatccttccgttcggtataacagagtggtggccatttttaggtccatcggatttagccgcgaggtcggaatttggctggcccgactaacgacaagcgccctgccctggaacaccagtgacattcctagactcggcgagttgagcgggctggagactaggggccgatactgggagctctatggtagtcgtcaccttccccaaggcgctgccacttctccagccctggcaaacctgtctgcttatagtttggacgtacgcctgtcaggactggcgcggaagttcgatgcggattacacccggtacgcagacgacataacattctctggcaccaaaaggtttgcaggagccctgtccgattttatacctttagtcgaacgggtggttcgcgccgagaagtttgtggtgcacaagggaaagagaagggtgctgagaaacaaccagagacagagcatcacgggcgttgtggtcaatagcaaacccaacattcggcgcgaagagttcgacagactgaaggccatcctgcacaactgcctcaaatacggtcctagtacccaaaatcgggacaggcacccaagattcgctgaccatctcagagggcgagttgccttcgtctcacagcttaatgctgataggggggaaaaattgcgtgagatgtacgataggatcgactggcggaagtga

SEQ ID NO: 13115 - RNA, 1305 nt, synthetic construct
  source 1..1305: mol_type = other RNA
atgggtctattcaactggctgagaaccgtgttgtttggcgctcccccacaacccacaggggacttcacacccgatcaacctcctcctgctggacgcgacgtgcacccagtgacgggagaaagagtctcccacagccgcgcacgcttagacaggctcgagtaccgaagcagcctgattcgtactccatccagaagagaatcagccgggtcagatcccccctatcagtttgcccataggaatccacgaacggggcgatggctggacctcaccactgatgctgatcccaggtggctggactattacggactgccgcacctgaaaacacccgctgacctggcagattggcttgagatgcccatcgggcgcctgggttggttaacccatagattctgcgacgataggcgcccgccatctgcacagacagcccactaccacttccagtggctgaacaaaaagaccggcgggcataggttgattgagagcccaaaaacatcactgaagggggctcagcggaagatcctctccggcattattgagcgcatccctccacacaggaatgctcacggattcgtggccggacggagtattttgtcgaacgcccgtcctcacgtgggcgcgtatgctgtcctcaagctggatctggagaatttttatccctcagtgcggtacagtcgggtggtggccatctttcgctctgttggcttcagtagggacgtcgcgatatggcttgctagacttaccacgagtgccgttcctcatgatattcctagaccagctggcggccatgcagcagtctggccttatttcagccgacatctcccacaaggcgcgcctacttcccccgcactcgcaaacctctctgcctactcgctggacgtaaggctaactgggatggcccgtgcctatgatgtaacctacacacggtacgccgatgaccttacctttagcggaagctatcgcttcgctgccgctattcgggactttgcaccgctggtcaccaggatcgtgagggatgagcgatttaaggccaatcggtctaaacagagaataatccgtcggaacaagcgacagactgttacaggtgtggtggtaaacgaaaaacctaatatatcccgggatgcctacgacaccttaaaagccatcctgactaactgtgccaagcggggcccctccacccaaaacagaggagcccacgaaaatttcgcggcacacctccggggtagaatcgctcatgttgcccatcttaatccgcgcagaggcgcaaagttgttgcagctatacgcgactatcgactggtctaggtga

SEQ ID NO: 13116 - RNA, 1317 nt, synthetic construct
  source 1..1317: mol_type = other RNA
atgggcctattcgaccttctgcggagactgctctttggagcgccagcatcgccaaccgacactgctggctctagccctgctcctcgagccagccagatgcctgttgctcccaagtccttgcccgtagccacacctgcaggtaaaagaggtcccgcaaggaagttgcccccatttcgctatcagagcaagccacgcagaactagccccaaggctgagagagttgcccggaggccgtacactttcgcagcgccaactgctctgggggaatatctggatctgtctacagacgctgaccttggccttttggatcacctgggattaccgagactgcagacacccgcagatatcgcagagtggctggaaatcccactaggtcggcttgcatggctaagcgggcgattcttcgaaaatcacaaaccacaaagtgagcgatccgcgcactataatttcagatggttgaaaaagcgcagtggagggcataggcttatcgagtcccctaaaaaacagcttaaggcagtgcaggagaagatcctgcgggaaatcctggacaaagccgatgcccaccccagagccttcggattcattgctggacggagcgccattctcaacgccagggaacatgttgcaccttatgtgctgctgaagttcgacctggaaaacttttacccctctgtacggtattcccgcgtggtggccatttaccgtacattagggttttcaagagccgctgcgatttggctggccaggctcacaacaagtgcggtcccgagcagcatgagttttccaggcggcgatccttacgggctgaacccctacctctcacgccatctgcctcagggagcacctacgtcaccggcactcgctaacatgagtgcctacggcttagacgtgagactaaccggactggcccggtcttttggggtcacttacacccgctacgccgatgatctgaccttctctggcgatcaaaaatttgccggcgccctccgagacttcatcccattgaccgagacgataatcaggaaggagaggttctttctgaatgtctccaagcgtcggatcatacgcaggtctggccggcaaaccgtgaccggtgtggtcgtcaatcagcatccaaatctcgccagggctgagtttgaccgcctgaaagccatactctttaactgcgtgcgtctcgggccctcaacccaaaaccgtactaatcaccctcagttcgctgcccacctccagggcaggattgcccatgcagcttccattaacccctcccgcgccgctagattgcgagctttatatgaccggattgattggtcaaagtga

SEQ ID NO: 13117 - RNA, 1290 nt, synthetic construct
  source 1..1290: mol_type = other RNA
atggggctgttcgctttccttcgtcgtatcctcttcggagcacctgaggatgcggccgatgatggaggctcaaccgcaccccgccaatcaccgccaccacaatctcccgctacagcccggcgacgaagaactccactgccacctctccggtatggctccaaacaccccaggacacctgccgcccttgaacaagtagcagagcgcccttatcagtttgcgaatctgggacccgcaggcagattcctggatctgtccacagacgccgacttaagtcggctggagcagctggaactgccacgcctcctgacacctgcggatgtggcacattggttgaacatgccgcctggacgcttggcctggcttagtggccggtttgagccacagcagagggcagcatccgagaaagccgcccactaccactacaggtggatcaggaaacgctctggtgggatgcggctgatcgaggcccccaaggtacggctcagacaggtgcagacccgcattctacgagaaatactcgatcatgtggctgcccatgaccatgcgcacgggttcgttagggatagatctgccctgaccaacgctaagcctcacgtcggcagctacgtagtccttaagctggacctggagaacttttacgctagtgtgagatactctcgcgtcgtcgcaatctttcgcgccttaggcttttcacgggccgctgcactctggcttgcaagattgaccactagcgcagcccccgcttccctaagtttccctgacagatcccctctcggcctcctgccgtatcttccccggcatttgccccagggggctccaacatctcccgctctggccaacttgtccgcctggagcctggacgtgagactgactgggctggctaaaaagtatcacgctacctatactagatacgcggatgacctgacgttcagcgggtcgcacagatttgctgccgcattatcagaattcataccactcgccgaaaagattatcaggtcggaaaggtttaaggtgaatagggctaaacgcaaagttttgcgaaggagcggaagacagactgtcacgggagtggtgaccaatgcccgtccgaacattgctcgggaggactatgataggcttaaggccattctccataattgcgtgcgcagaggcccaagcacccagaatcacgacagccgaaaggacttccaagcacacctacggggtcgggtggcgcacgttaggtctgttcatcccgcccgtggtgctaaattattggccctgtaccagaggatcgactggaagcgatga

SEQ ID NO: 13118 - RNA, 1047 nt, synthetic construct
  source 1..1047: mol_type = other RNA
atgggcttctttacgtggctctttaggtggctgggctggggcgctgattccagagacttccccagtgacaccgagcgtaccagcgatttaggagtgcgaaccagctctggatctcttaatcgctcaagtttcgacgactctgatgccccgcgacggaactcagacctcacagagactgccattcactcgaactccgagcggtccgtgactactagacccgtcaccagtcgccctaagttgacattgtcacgaagggaggaggaacgcatacggaatccgcctgaaaggtccccctgtgtggaagtggttggggagacaccatatcggtacgcacggtttggcagtaccactgggcgacacctggacctgagccaggatggtgacgactcccagttaaacgcccgctgcctgccaatcttccacacaccagaagaactcgcaggttggcttcagatcccccttaatcaactggtgtggctcgtgcatcggtttagcgctggcaggcctccagcatctgacgctgctcactacgtgtttcaatggttgaagaaaaaatctggcggctggcgtctaatcgagagcccaaaacccattctaaagagggcgcaggtaaagattctgcgtgagatcctggacaggatccccgctcacagaagcgcccatggattcgtcgcaggaaggtccatcgtaactaacgcagaacctcatgttgggcaggatgtcgttgtggccttcgatctgtctaacttctacacaaccgtgggatttagtcgggttgtcgccattttcagatccctcggttactcaagagaagccgctatatggcttgggctgctcaccacttccgccattcctggtaatatggcctttcccgagagaaatccatatgcctttgatccctatttgaagagacatctgcctcagggggctcctacatcgccagccctggcaaacctgagcgcgttcggactggatgtcaggttgaccgggttagcgcgcagcttcggcgcaacgtatacgcgctacgctgatgacatctcactctga

SEQ ID NO: 13119 - RNA, 945 nt, synthetic construct
  source 1..945: mol_type = other RNA
atggccttcttcgcctggttattcagatggcttggctggtctaccgacccccgcgactcttgggatgcacctgctcctcctcaggctgccgatagaagtgccgtgcggacagccactttagaggccccgccaagagctccatccagacctcccagcgagccacttcctcggccaaggctgacacccaccaggagggacaccacacgccacgatgctcgcaagtcccacgcaaccttcgtcgaagtaactggggccgtgccgtacaagtacgctagatttgggagcggtacgggtcgccatctggatctttctcaggatggagacgaggccagactgcagcagaggggactcccggttttccgcacccctgagcagctggcagactggctcggtgtgccactaaaaaaggtggcttggcttgtacaccggttcagtgctgggcggcctgccagtgtcgaacaggcacactaccactttcgatggctgaagaagaagtccggcggctggcgtctcatcgaatcaccaaaacaaactctcaagcaagcgcaagtcaaaatattgagagagatcctggaccgcgttcctacacacagcgcggcccatggatttgtgacggggaggagcattctgactaatgccaaaccccatgtcggacatgcgatgctggttaaactggacttaagtaacttctatgccacagtggggttttctcgggtggtggcactatttagggcgctgggctattcacgtgaggctgcaatttggctgggcctcctgaccactagcgccatcccaggaaatatggcatttcccgcccgggatccctatgccttcgaaccctatctccgacgtcatttgccacagggcgcacccacctcccctgcattggctaacctctcagcctacaggctggacctgcgacttgctggcttgtccaaatcgtga

SEQ ID NO: 13120 - RNA, 1356 nt, synthetic construct
  source 1..1356: mol_type = other RNA
atgttcagttggctcgggggaggtgaaccgtccagccctagccaaccgaccactgacagaggccaacagccagacccccaacattcccccacacccccagcagatcatgggccagacaggacttctcggagtaccacaccccctcgtcagcgacctcggattcgacggttcccaccaaagcgcaatcccaggctgaacgtgagatcccatgatcagcagcatcggcggaaccgaaaaaaagcaagttttctggaagtgacgggtgcaagcccttacaggtttgcccggttcgggagccaaacaggacggtacctggatttttctcgcgacggtgatgacgcgcgtttgcgagacagaggcctccccgtgtttcatacccccgaagagttggctgagtggctcggcctaacacttaataagctggcttggttggtgcacaggttttcaaatgggaggccagacagtgtagaccacgctcactatcacttcacttggcgcaagaagaggtcgggtggggtgcgtctgattgagtccccgaagcagaccttgaaggaagcacaggttaaaattctgagagagattctggatcgggttcctactcacccggcagctcacggcttcgtagcagggaggtctgtgctcactaatgctaagtctcatgtgggacagggcatcgtcgtgaaattcgatttgaccaatttctacaccaccgtctcatattctcgagtcgtcgccattttccgaacactgggctacgcgagagaagctgcgatatggcttggtctgctgacaacgaatgccgtgcctggaaacatgccattcgaccgccagaagctgtacagcatcctcccctattggagaagacaccttcctcagggcgcgcctacttcacctgcattagctaacctgtctgcctatcacctcgacgctaggttaaccggcatggcccgtgcctttggcgccgattacacccgctatgccgatgatctgactataagcggaccagagacattatcctacgccctgagaacactcatccccctagtcgagcagatcatcagaagagagaggtttcagagcaatcggtccaagagacaggtgctgcgggctcaccagcggcaagtgatagccggcgttgttgtaaacgtcaaacctaacgtgtcaagagctaaccttgataggctcaaagcaaccctgaccaactgcgtgcgcatgggaccatcgacgcagaaccgcgaccaggttgaagactttcaggcccacctacgtgggcgcatcgcccatgtcctccaattgaatcccgcccgcggagagcagctgcttgccattttccataggatcgattggaggcgctga

SEQ ID NO: 13121 - RNA, 1506 nt, synthetic construct
  source 1..1506: mol_type = other RNA
atgggcctgattcgatggctgttgcatcggctgggatggcggccagcaccacttacgcggtcgttgcccacagcaggtccggtttctccagccccagcaacacctgctccgctggatacgccccctttagacactccccccctagcccaggcttcacttacccctgcctggccggtagtagcttcccctgtggtggctccacccgctcaagcgtccccaattgtggcctcacccaatcccgatagtgtgcctccaagcattctgtttgaccctcccgcggtggctccagccaatagtcgcaagaggccaagaatttggagccggacaagcaggatccgactcgtccctacgcggcggaagcaacagaggcaggcagcacgtagaccagctatgctggtggaggaaacacagggtgcggcaccctaccgatacgcccgttatggatcaaggaccggtcactacctggacctatcaagggatggagatgtcgtgcgacttcagaggttcggccttcctgagtttcacaccccagagcagctgagccactggatcggacttcctctgaaccgcgttgcttggctcgtgcaccgctttagtggagggaggcccgagatggaggaactagcacactaccatttcagatggatcaagaaacggctcgggggttggcgtttaatcgagtctcccaaaactaccctgaaattggtccaaaccaagatattgcgggagctgctggacaaggttcctgtgcatgcagccagtcatggatttgttaagggccgctccattctgacaaacgctagagcccatgtcggccagagcgtcgtactcaaattcgatctcaccaacttctatacaacagtgtctttcgcccgcgtcgttgccatattcaggtccctcggctatagccgggaggtggctatttggctcggtctgctcactacatccgcagtccctgggaacctgagattccaggaccagggaccttacgccctggtcccatatttgcgcaggcatttaccgcaaggcgcgcccacttctccagcccttgctaacctctcagccttcggcctggatctgcgcttgactgggctggcccggagttttggagcacactacacccgttacgccgatgacctgaccctttccgggcccgaagaactggggaaggccttgagaaccttaatcccgctcacacaacaaatcatacgacaggaaagatttgttctcaatcccgaaaagagaagggttctgagatcccaccagcgccagactgtgactggcgtggtagtgaaccagaagaccaatgtgtctcgcggcgactttgaccgacttaaggccattttgaccaattgcgtgaaacagggccctagcacccagaatcagaaaatggtcgaggatttctatcaccacctccaagggaggatcgctcatgtgtctatgctgaaccccctgagagggcagaaattaacgctgctatttcaggcgatcgactggactagatga

SEQ ID NO: 13122 - RNA, 1332 nt, synthetic construct
  source 1..1332: mol_type = other RNA
atgggcttgattcgctggttgatgcagaggcttgggtggggttcctcacgcggaccagtgccaactgagagcaacagcagacccgccagtgaacaggcctctgcaaagtcagaaaatcttacccctacaagtctgcgcacgacacggcgctcatatccaccaggaagagcacggcttgtcgccagcacacgcgtcgagtccgacattacacgaccctcgatggcgtacgtagagacggaaggcgaaccctataattatgcacgctacggatctcaaaccggaagatacctagacctgtctagggacgccaatgaggctcgcctggctcagtttggcctgcctgtactgaggacccccgacgatctcgcaaattggatcggcctgcctctcaacaaagttgcctggctggtgcaccgtttctctgctggtagaccagccactgttaaggacgcgcattatcacttccattggcttaaaaaacggcaaggtggatggcgtctaatagaggccccaaaagccatgttaaagctggtgcagactaagattctccgcgaactgctcgatccaatacctgtccatagaagtgcacatgggtttaccgtgggacgaagtatcgttacaaacgctctcccccacgtgggccagcatgtggtcctcaagctggacctgtctaacttctacacaaccgttagcttcgcgcgggtagttgcaatcttccggggtctgggctattccagagaagtcgccatctggctcgggcttttgaccacttccgctgtgcctggcaacctgggcttccaggaacaggggccgtatgctttggtagcgtacttaaggagacaccttccgcaaggtgcccctacaagccccggcctagctaacctgtcagcttttggactcgatgcccgaataactgggctcgccaagtcattcggggcaacctacactaggtatgctgacgatctgaccattagtggcagcaaagagctgactcgagggctgagagccattatccctttggtgcagcagatcgtgaggcaggagcgtttttttgtgaatcacaagaagaggcggatcctgcggagccaccagcgacaatctgtgacgggcgtggtggtcaacgagaaacccaacattagccgtggggattacgaccggctgaaggcaatgttaaccaactgtcagaggcatggcccctcctcccagaatagagatggagtcgtggatttttacaatcacttgagggggtgcattgctcacgtgtccatgctgaatccggttcggggacagaaactcaccgagttattccaagtcatcgactgggccaggtga

SEQ ID NO: 13123 - RNA, 1338 nt, synthetic construct
  source 1..1338: mol_type = other RNA
atgggactcctggcattcctccagcggctgttttggggagctcctccgagggagtcatctatggtggggagaggaacagccggagctccttttggcgacccgctgagccgggataactctctgagcggtcctgccaccagcggccaagtcctgtataagtcccggcgtggtgtgttccagaatcccgcttcaaacaggtacgcacctcacggagacaggacaggtagggggcaggtggtggaacagtccccctatagatttgccaggcgtgacctgcccagcggaggtttcatcgatctgaccggagatcaccggccagatgtgctgaatcagtacgggctccctcttcttcgcacccctgatgatctggcacggtggctatcaatccccctgccacggctagcgtggttgattggacgattcgacgataatcacaggcctcagtccgagtctgagtcccactaccactttcactggattaaaaagaagtcaggggggttccggctgatagaggcacctaaaagtcaactcaagcagattcagcttcagattctacgaggcatcttggacagactcgtgccacaccccgcggttcatggattcgtccccggtagaagtattcgttctaatgccgcccctcatgtgggccaggcatgggttcttaagttagacctaaccaacttttacccatccgtatcgtttaaccgggtggtggcaatcttcaggtcactgggctattgccgtgaagtggccatatggttgggccgcttgacgacaagcgccattcccagcagtttgaacagtccagatagacgcatggcaactgtctggccatacctcagacgacacctgccccaaggtgccccaacttctccagctctcgccaatctgtccgctttcgggttagacgtgagactgcaggggttagccggcgcatatggccttcgctataccagatacgctgacgatttgacactgagtggaccccagcgagccgtagcagctcttcgcgagatcataccatttgccgggtggattgtgaggcaggaaaggttccaccttaacaaagctaaaagacgcgtcctgcggcgctatcaacagcagtccgttacgggcctcgttgtcaacgaccaactgggcgtaccgcgcgcggaattcgaccgactcaaagccatcctgactaactgtctgcgacatgggcctgccagccagaatagggaggcccatccggcctttgctgcgcatctgttgggccggatcgggcatctcgctagcgttaatcccggccgcggcgtcaagctcaggtctttataccaacagatcgactggaatagatga

SEQ ID NO: 13124 - RNA, 1311 nt, synthetic construct
  source 1..1311: mol_type = other RNA
atggggctgatagcctttctgaaacggctgttctgggggacccctactcccagttctgtgccttccgccgagagtgccgactcgtcaaggctggccgcggatagcacctccagctcagcaaaaatcatcgtcaggcgcaagtttcgaggcccagatctgctgcgattcagtgccaccgtacgtagacagggccggaccgtacaagtggttcgggggcagccatacagatttgcccggccgttcgtgatcagctctgtggattacggggacctgtccactgacacaaatcccgccgccttgggcagattcgacttgcctgtgttacggactcccgaggatttggcgcattggctgggcattcccctcggaagagtggcgtggcttaccggccgattcttcgaaaatgagcggccccagtcagatgacgttgcgcattaccactttcattgggtaaaaaagaagtctggggggtatcgcctgatcgaagcaccaaaagcccttctgaagttcgcccagactcaaatccttagaggcatactcgatagggtgcccgctcaccctgcagctcatggttttgtcaagcagagatctattaggtcaaacgccgctccccacgtaaagtcagcatgggtcatgaaactcgacctatccaacttttacccttctgtgactttcagccgtgttgtcgcaatcttccggtctttaggatatagccgcgaggtcagtatatggctcggccgcctgacaacctcgactatcccatccaacctgagcgcacccgacagacgagagaatacagtgtggccatatcgcttaagacacctgcctcagggagcaccgacaagtcctgctattgccaacttgagcgcctttagcctggatgtgaggctaaatggactagcagctaagtaccacgcccgctacacacgctatgctgatgatcttacgctgtctggtaagggcaaatccatcccagctctcagagagattattccaatggcagaatggatcgtgcgtaacgaacgcttccacctgaataggtccaagaggcgagtccttaagcagcatcaacgccagtcagttaccggaattgtcgtgaatcaaaagctcggagttggtcgggccgagtttgaccagctcaaagctatcctcaccaactgcattcgtcagggaccggtgagccagaacaggaatcaacacaacgactttgcttcccatcttaggggtaggatagggcacttcaaaagtgtgaatgctgaacggggcacaaaactcttgaagctgtattaccagattgactggacgagatga

SEQ ID NO: 13125 - RNA, 1311 nt, synthetic construct
  source 1..1311: mol_type = other RNA
atgggcttgctgtccttcttaaaaaggctgctgtttggagccccagcctctaacgacgctccagctcggcctaagccatcaaatgatcctgcttcaagaccagcaactccacccgcatcccccccatctactgacgggacagctacaaaaaagcgggtccgcttgacccctatgcgaaggcagggaccaagggagcgtggccaacctgcacgggaaaccgccaggccaccctatccgtacgcttttcccacttacggaggcaagttcctggacttatccgacggaaccgatttcgagagactccgacagtttggactcccggagctggtgtatccagggcagctggcagagtggcttcagctccccctgggccatgtcgcttggctgacctaccggttctgcgatggtaacaggccccagactgcagggcaggctcattatcacttccattgggtgcgcaaaaagtctggggggcaccggctgatcgaagcaccgaagagtcgcttgcggcgggtgcaagaccagattctgcgcgaaatactcgatagggtgccctcacatcccgctgcccatgggtttgtgagaggccgcagcattgttacaaacgccgaaccacatgtgggccacaagttcgtctttaagctcgatctggagaacttctacccttccgtaagatatagccgagttgttgccacattcagatctttgggatacagcagagagattgccatatggctcgcacgcctcaccacatcactcattcccaccgaccttcctacgcctggccaaaggcccggtatgctgtacgcgtactttggaagacacttgccacagggagcgagcaccagccctgcgatagccaacctgagtgcactcggtctggacattcgtttatcgggtcttgccaatgcgtatggctgtacgtatacgcgatacgccgatgaccttacattgagcggccccggaaaagcagccggtgctcttagggaactaatccctctgtccgaacagatcgtcaggagtgagaggtttcacctgcaccccgtgaaaagacgaattctacgccgtggtcagcggatgagggtgactggggtcgtagtgaatgacaaggttaacatcgcacgtggcgattttgaccgcctgaaagccatccttaccaattgcatcagaactggccccgaggctcagaacagagaggggttaccggccttcagtgatcacctgcgggggagaatcgcccacattacacagctcaatcctaatcgaggcgctaagctgcaagccctattcgcccggatccgctggccttga

SEQ ID NO: 13126 - RNA, 1392 nt, synthetic construct
  source 1..1392: mol_type = other RNA
atgggcctcctggatttcttacggcgtcttttctttccccaaccgtcgccccctcctaataaaactgcctttgatggagtaccttccccacggcctccagtaagagcgccaagtgacaacgggcggcatccgagcgataactcacactcagcggcaacctctactgctgagccggaagtcgagtctagggacaggcggcctaagaggcccagaaggaccggacctcgaccacgagccaaactcacccctcttcgccatgcccccccagagtttattgcagatcgatctacagaggtgacccccattccctatcgtttcgctagatttggagtgcgaagtggtggtttcctcgatctggcaagcgacggggacgacgcgagattgcgcgagaggcaattgcccgtgttacacacccccgaggatctcgccgcttggcttggcatccctctggggaaactcgcatggcttatccaccgcttcacagctaacagccggccactgagcgaacgcgaggcacattaccacttccgctgggagaggaaaaggtcaggggggtggaggctcatcgaagctcctaaagccacgctgaaggatgtgcagtgtaggatcctagaagagatcctctcccgcgtacccgcacatccagctgcccatggcttcgtccccggcagaagtatagtgacaaacgccgccgagcacgttgggaagcccattgtggtgcgcctcgacttgactaacttttacccaaccgttactctcgcacgcgtcgccgcgatttttagaagtgtgggttactcaagagaggcctccgtctggatggccagactttgcacttctagcctgccgcagacggctggctttcccgaaggtaatgcctctgccatcaggccatatctgcctgcacatctgccacagggcgcctgcactagcccagctctggctaatctgagcgccttctccctggatgtgcggctatccggactggcacgggctttcggcggtgtgtatacccggtacgctgacgacctaacattttctggaccagacggatttaggcgcgccctgcccaatttcttgcctttggtcgaacaggtgatacgcgaggaaagattccgtataaataaggctaagagacgcattattcggtcaaacgcccgacagatggttacaggagtcgttgtaaacgataggaccaatgtgagacgagtcgactttgaccggctgaaggcgctgctgacaaactgtttacgacacggcgccagatcccagaaccacgaagggagggataatttcgccgcatgggttcgtggccggatcgcacacgtgcaaagtctgaatgctgctcggggctccaagcttttggccctgtatcagcagatcgactggcgttga

SEQ ID NO: 13127 - RNA, 1158 nt, synthetic construct
  source 1..1158: mol_type = other RNA
atgcctttgagatacgacggacaccgtagtggaaagaggcagaagaacgccgaggaggtggatcggctgccttaccgttttgcccaacagggggttaggtatggaggctatctggatctttccgatgacgctgacgtgggtaggctcgagcagctgggtcttccaatactgcacacaccagagcagatagccgtgtggctcgatagacccctgggccaggtggcctggctgattcacagattcagctctggctatcggccagaaaatgaaggggaagcccactaccattacaggtggcaacgaaaaaagtcaggcggctggagactgatcgaggctccaaaacctattctaaagacagtgcagcagcagattctcaccgatatccttagccaggtgcccgttcatcctgctgcgcacgggttcactgcaggcaggagcatcgttacaaatgcagccccccatgctggacagcaggtcctcgtgcagtttgatctcgcaaacttctacgcaaccgtaagcctctcacgcgtggtcgccgtatttaggagcctgggttactgccgggaggccgctatctggctggcaagactgacaacttccgcaattccgcagactgccacatttccggaccaggacacccatgcactgaccccattccttccaaggcacctgcctcagggagctcccacgtctcctgccttggcgaatttgtccgcctattctctggatgttcgactcaccggattcgctgctagttgggggggtacgtatacacggtacgccgacgacattaccatctctggctccaaatcactaatccgggccttgcccaaatttatccccctggcggagagaattattgggcaagaacgattcgtcttccatcgtcaaaagcgaagagtcgtgcgcgattgtagtcgccaggttgtcaccggcgtggtggtgaactcgcaccctaacttatcccgcccccaatatgaccgcctaaaagccatcttgactaattgcatacggcatgggccatcaactcaaaacagagaaaaccatgccgactttgcggcttggttacgcgggcacgtcgctcacgcacggaatcttaatccccaaaggggcctgaagttacaggcactctacgatcaggtagactggcagcgctga

SEQ ID NO: 13128 - RNA, 1302 nt, synthetic construct
  source 1..1302: mol_type = other RNA
atgggtctgctgaggtggctccttgggctctttggtgccaatagtggaaccgctgtggccaaggcatggacagatcaggctctgaggtccactgctggaagaccatggcgcaggccgcgcttgtcctcaattagaaggaacgccgtatctcctccacttcgccgaactcccgcgcccactacaccacaaccggcctataggttcgccagacagggagtagctggtatgcttgaatctctgcggggccggagttcttatttgaatctcgcaaccgacctggaccgcacccgcctagatagatggaacctgccccctttggccactccggacgagttagcagactggctggagatcccagtaggtaaattagcttggttgtcaggccgtctcgttagcgggaataggcccccctcaacacgcgaggctcactacgtgtttcggtggaaggctaaaagaagcggcggcgcaagattgattgaaagccctaaaccactcctgcgacaggtgcagaccaagatcctgagagaaattttagataaggtgccccctcacgcggcagctcatggtttcgtggccggacggtccattctgaccaacgcgaaaccacactgcgaccgggtggtggtggtgaagtgggacctgacggacttctacgcctctgtcaggtacagtcgcgtggtggccattttccggtccctggggttttctagggaggtcgcactgtggctcgctagcttaacgacatctgccatcgccgctgatctgccattccctgaaagcggcccccaagctctacgcccttacttggggcgacatctgcctcagggagcagcaacctcgcccgctcttgccaatctgtcagcctttagtcttgacgtaaggctgtccggactcgctagagcatttggcggcgcctatactcgttatgcagatgacctaacaataagcggggatgacgccttcgcccggcaactgaaaaatgttatccctcttgttgagaaggtcattcgtcaggaacgatttcatgtgcacgcaaaaaagcgaaaggtgatacggcgcgggcaaaggcaagttgttgcgggggtcgtcgtcaaccagcaccccaatatccgtcgggatgattttgataggttgaaagccatcctctacaattcggcgaagcacggacctgcctcccagaacccaaacggccatcccgacttcgccgcacatctcagaggacggatagcccacgccgcgatgctcaacagcgtcagaggcgagaagctgatgcgactgtacgaggctatcgatttcggctga

SEQ ID NO: 13129 - RNA, 1350 nt, synthetic construct
  source 1..1350: mol_type = other RNA
atgtggagattgttctcaagtctctggcgattgtttacggggcactccggacggcaggcgaaaaatccatatgctacattcggcacaacggacgaaagcaccgctaatgagacatttgatgatgcaatggtaagtccacccgaaccccctagacaccagaggaaacctaaggctgatcagcgctacccccgccttaccaagttcaggtaccagcctgggagagtgagtgacagagagcatgccccccagattgtgaccggcacaccataccgctacgctaaccctttcgtcgtgagccccggcatgttcttagatatgtccaacgatcttaggtctgagagactcgaccgttgggagcttccccaactgaaaacacctcaggacctggccgattggctgcaactgcccctgggcaagatagcctggctgactgacagatttacggaagccaatagaccagttgacgcatcaaaaagccactatcattattgctggaagcaaaagaagtccgggggctatcggctaattgaggccccgctgcctctgctgaggcaagttcaggaacagattctggatgaaatcttagcatctgtgccggttcacgccgctgcacacggattctgctcgggacgttcagtcgtcactaacgccaggccacacgtagggcagcagctcgttatcaaaatggatcttgacaacttctacactcgggtgcgatacgcccgcgtagtagcgctttttaggtcattaggctacagtcgggaggttgctctgtggttagcgagactcaccacttccgcagtgccatccaatctcccctttccaggtggggaaccaaagcagctccggttgtttctagcccgacatctacctcagggtgcccccacctctcctgctatcgccaatctggtggcttataacctggatgtgcgcctggcgggactggctagatcttttcaggtgcagtataccaggtacgcagacgatctgaccttcagcggaggcgaagacctgcagtattgtagcagggtgttcctgccgttggtgtctcagattgtccgcgacgagcggttccagatgcacgccaccaagcgtaaatttcttctcccaagctgccggcagcaagtcactggagtcgtggtcaacgagaagacaaatatatcccgcaaggagtttgaccgactcaaagcaactttgtataattgtgtgaagacagggcctgccgcccagaaccataatgcacacgccgacttccaagcacatttgcgcggccggatcgcttacgtgcagcaactcaaccccgcccgaggtgctaaactgctcgatctgtaccagcaaatcaggtggtga

SEQ ID NO: 13130 - RNA, 1335 nt, synthetic construct
  source 1..1335: mol_type = other RNA
atgtggcggcttttcagtttcctgtggcagctacttggcgggcgatcccccgacagcagggtttctgagcctattagccctggcggcaccgtgtctgagagaacagcaagttcaagtgcggctctttctcccgctcctgggcggaagaagtctaaggcagaccagaaaaggcccgttctggtcccactcacctatagaagaccacgcttatccgaccgcgagcacgcccctgaaattgtgagcgaatccccgtataggtacgcgctgccttacgttgtatcacagggaaagtacctggatctgagccaggacattcgaccagagctgctccaacggtgggatttacctctgttgaaaacacctcaggacctggctgattggctccatctgcccgtgggccaagtcgcctggctttcagggcgttttggagagggaggacgccccgcagatgcttcgaaggcacactacaggtattcatggaagaagaaaagaagcggcggctacaggctcatcgaatccccactgcccctccttagacaggtgcaagagcagattttggatgagatcttgagccgcgttccagtccaccaagcggctcacgggttttgcgccggtcggtctgtagtgaccaacgccgcgcctcatgtcgggcagcatgtggtgatccgcctggacctcgataatttctactccagagtccgccatagtcgagtcgtggccgtcttccggggaatgggtttctcgcgagaggtgtctctgtggctcgctaaattagtgacttccgccatcccgagcaacctagagtttcccggagatcagccaggcttgctgcgcctgtttctgccccggcaccttccacaaggtgcacccacatctcccgcagtggccaatctggtggcctattccctggatgttcgcctggcagggcttgccagagccttcagtgccaattatacacggtatggcgacgacttaaccttttcaggaagtgccgaattgtctcaaggtagccgtcttttcctcccactcgctcaggctattataagagaggaacggtttagggtcaactcccgaaagcgtcggttcatgagacagtcaacgaggcaggaagtaactgggctggttgtaaacgaaaaagtgaattactcccgtcaggaatacgacagactcaaggccaccttgcataactgtgtgaaaactggttgggagagccagaatagggccgggcaccctgactttctggcccacttgcgcggcaggatcgcatatgtgcagcagatcagcccgctcaggggcgctaaactgctggctctattcacgcgaatagtgcggtga

SEQ ID NO: 13131 - RNA, 1116 nt, synthetic construct
  source 1..1116: mol_type = other RNA
aaccgctcatccagcatcgtgagccaacagccataccgcatggccctgccttccgtcagaagcccgggtacattcttggacctcacaaccgactatagtcccgataaactcaatcaacgcgacctgcctcttctgaaaactcctgaggacctggcaaattggctgcagaagccactaggtaccgtagcatggttgacagactattacaatgaggccaggcggccgatagacattcggaaagcccactacagatactcttggaaacagaagcggagtggcggctaccgtttaatcgaggcaccactgccaatgctgaaggaagtccaggagcagattttagatgagattctcgatagaatcccagtgcattcgtgcgcacacggattctgtaccggcaggtcaattctgacaaatgctcgcccccatgtggggcaagatgtggtggttaagctcgaccttgataacttttacaccagggtccgatattcccgagtagtcgccatcttcaggagcatcggttatagcagagaggttgccctgtggctggctaagctcaccacctccgctatccccagtaacctggaatttccaggaaacgaacccaaactgatgcggctttttcttcccagacatctccctcagggggcccctacttctcccgctatcgcgaacctggtcgcttattctttggacatacggctgtccggcctaacacagtctttcggcggcaattacacgcgttacggagatgatatgactttcagtggggactggcagtttattaaagcgatgcggctcttccttcctctgacccagcaaataattaggcaggagagatttgttgtgaacgggaggaaacgcaaggtgctgcgtaggagcaaacagcagagcgttactggagtggtggtgaacgataagacgaacatctctcggaagtcatatgacaatctaaaagccactttgcacaattgcatcaagtccgggcccgactctcagaaccgcgaggaacaccctaattttcatgctcacttgagaggacgagtggcattcgtacagcagttaaaccgagccaagggcgataagctgctcaggatgttcgaacaaatttcatggtga

SEQ ID NO: 13132 - RNA, 1335 nt, synthetic construct
  source 1..1335: mol_type = other RNA
atgggcttaatccagtttttgcgaagcctgttcttcggcagcggacctcagagtgctggaacagctagccgacagtactcagaccagtggaatgccggcagctcttcggcgaatcagaatagttctactcccacagccaccgcaccagagacagtcaggacccgacccaagctggtgccgctgagaaggcacaagaaaggcagaaaccgtcaactgattagcggggagcgcggcctaaagactgcgccttatcaactggccgtcccagacgttacctcccccggtactttcctggacttgtctagagatggcgactcagctaggcgcgccgattgggagctccctgagttgacgacaccccaggatctcgcagactggctcgaaattcccttggggcacctgggatggctaacgggtagatacctcgatggtaaaaggcccctggacgccagtaaagcccactatcattacacctggaaacagaaacggaaagggggcttcagactcattgaggcaccttatccactcctgagacaggtccaggaacaaatcctggacgaaattttgtgctgcgttcctacccatgtctccgcccatggcttcaagacaggatgctctgtactgacaaatgcccagccacacctgggcaaagacgtggtggtaaagctggatctggataacttttataccagagtgagatattcacgagtggttgcactcttcagggggattggttacaatagggaaattgccatatggcttgcgcggctgactacttctgctatccccggtaacttgcgatttccaggggggcaacctaagctgatgagcctgtttcttccccgccatttaccacagggagctcctaccagcccggccttagccaatctggtagcatactccctggacatcagacttaacggcatcgctgaatcttttggcgcacagtatacccgctacggggacgatctaactttctccggagatcacaagttccgtgcctcgcttcggttattccttcctctggtccgccagattatacggcatgagaggtttgtgctcaacccaaagaagatgcaagtggtgaggccgtgttcccggcagctcgtgacaggagtcgtggttaatcagaagcctaatatctcacgcaaagagttcgatcggcttaaagctacgctccacaactgtgtgcggctggggccagagtcccagaaccgtaccaatcacgaaaactttcgggcacacttgcgcggacggatagcttttgtgcaacagctcaaccccgctagggccgagaagcttctaatgatctacaaccgcatcaagtggagttga

SEQ ID NO: 13133 - RNA, 1338 nt, synthetic construct
  source 1..1338: mol_type = other RNA
atgcgcttcctcgaattcttgaagcgcctttttttcggagggtcagcacagtccacagccgataaatactccaggacccctgacgacactcgattccagtctaccctcgctccgaccgagcccgaaacccatcctgagagccagataagtgaccacgtcaaacgcgagcagcattggcctgtcctagtgcctctgcgtcggaagaggatccgccagactactcacaacggggaggaaaccgccggccctaagaagtacgccctcgctttaccatatattatgtcacccgattcttatctggaccttacacaggatgtgcaacccgagctcctcaacaactgggaccttccacacatcgtcacgcccgccgatctggccgattggcttcagatctccttagggcagctggggtggctgacggaccgctttagcgaaggcaagaggccgatcgatgctaggaaggcacattacaggtattcctggaaagaaaaaagaagcggtggctaccgactgattgagtcaccactgcccatgctgaggcaagcacaggaacagatccttgacgaaattctggaacagattcctccgcacgctgccgctcacggattcaggacagggagatctatcgtcactaatgccgaaccacatgttggtcaggccgtgctggtaaagcttgacctcgacaacttctatacacgggtgagatttagtcgggtggtagctatcttcaggagcctgggttactcccgagagatttctttgtggctagctcgcctcacgaccagcgcgattcctggcaatttacagtttcccggcggacagccaaaactatttagcctctttttgcctcgccacctgccacaaggagcgtctacaagtccagcactggcaaatctggtggccttttccttggacgttcggctgagtggcctggccaagtcttttaacgcgaattacacccggtatggagatgatctcactatctcgggcgatgagcgattccggcattcactgagattgttcattcccctggcaagacagataattaggcaagagcgcttcgtgttgaacgcaaaaaaaaagaagatcatacggccaatgtcccaacaacgtgttacaggggtggtcgtgaatgagaaaactaacatcccccgaaaagagtatgacagactcaaggctacccttcataattgcgtgagatttggacccgagagccagaaccacgatcagcatgaacactaccaagcccacctgcggggcagaatagcgttcgttcagcagttgaatcctcacagaggtgagaagttactggccatttaccgtaagatcaattggtga

SEQ ID NO: 13134 - RNA, 1338 nt, synthetic construct
  source 1..1338: mol_type = other RNA
atgctgttgctcgaactgttaaagcgccttctctttggctcttcagcggtatcctcaaagaaaagggtagtcgagactgctagttcgcgcagcgatgggagattttctccccccgctgaagcttccgtggccgtagcagataagcccaggaagaagcctcgcgaagagcaaacttggccgattcttagaccactgagacgcaaaaaagtgcgtcctgaacgggatgctgccgcaaacgccgggagcaaacagtatcccttcgcttatccttacgttgtgagcgacggctcctacctggacctgactaaggatacagaccgtgagcggctggaccggtgggatcttccctacttcgagacgcctacacagctagcagaatggtttaatttgccccttggccagctcgcctggttgaccgataggttcagcgatggaaaaagaccagtggacaagtctaaggctcattatcgttatcagtggcggaccaaacggtctggcggctaccgtctgatagaagccccacttccgctgatgaggcaggtgcaggagcagatcttggacgagattctagacagggttccaacccatgacgctgcacatggcttttgtgccgggcggtcagtagtgacaaacgccgaaccgcacgtgggtcaagcagtggtggttaagttcgacctggacaacttctataccagagtgaggtacagtagggtcgtcgcagttttcagaagtttcgggtactccagagaagtcgctatctggctcgcccgactgagcacctccgctattcctgcgaacctcgactttcccggccgccagccaaaacggttacggctgtttctgccacgccatttgccccaaggggcccctacttctccctgcatggcgaatctcgtggcgtttagcctggatgtccggcttagcgggttggcaaagtcattcggtgccacctatacacgatatggagacgatctcacgttctcaggagatgagagttacctgaggagcttgcgcgtctttatccctttagcccaccagattataagacaggagcgcttcgttctgaacggaaaaaagaagcaaatccggcgaagggtgtctcagcagaaggtcaccggcgtggttgtgaatgacaaaacaaacatcccacgaaaagagttcgaccgcctcaaggccactctgcacaactgcgtccagcacggacctgattcccagaatcacgatcaacacccaaactttagagcccacctaaggggtcgaatcgcatacgtgcagcagctgaatgagcatagaggaaataaactgctctccctgtaccaagccattaattggagttga

SEQ ID NO: 13135 - RNA, 1113 nt, synthetic construct
  source 1..1113: mol_type = other RNA
atggacttatctcttgatggcgatgattcgttgctggccagctaccacctacccgtatttcacactccacaacggctcgccgactggctgggtattcgggtgggggaattggcatggctggtgcacaggtcaacgtccgatagacgacccgcagacgagcagcgcagccattatgtataccggtgggtcaaaaaaagaagcgcgagtctggaggctggatctcccaactcacggccagttcagacacagtggcgacttattgaggcccctaaacagaccttgaaggctgcccagcggaaaatcttaagcgaaatcctggagaagatccctgcccatcacgccgctcacgggttcgttcgaggcaggtccatagtttccaacgcaagaccacatgtgggccaggcggtggtcataaaactggacctgcaaaacttctatgccaatgttacctactcgcgggtcgtggcaattttcagatctatgggatattgccgggaagctgcaatctggctcgggaggctcactactagcgctgtgccatggtcactcgcagtgcctgacggcgacgaggcaatgaagtccctctacgttcgccgccatctccctcagggagctcctacatctcccgcgctggctaatcttagtgccttcggccttgacgtccgcctgagtggactgcttaagaagttcggagggaactacacaaggtacgccgacgatttgaccttatctggcagtgatgattttcgtttttcactcagatgtgtgatcccgctaaccgagcagattgtacggtccgaacgcttccgactcaaccaccgaaaacgtaaggtggtcagaagagggcacagacaactggtgacaggtgtggtcgtgaatgccaagcctaacatccgccgcgatgagttcgatcgcctgaaggctattctgtataattgcgtgaagctgggtcccagctctcagaacagggacgcccatgccgacttcagcgcacacctgagaggcaggatcgcctttgtcaggcagctgaatccggcgcgggctgaaaaactatggaggttgtttgagaatatacgttgggacgggtttcccccaacccaaggttccaggtga

SEQ ID NO: 13136 - RNA, 1320 nt, synthetic construct
  source 1..1320: mol_type = other RNA
atgaagctcctcttagatttcctgaggtggctactaggggacagaggcgggaccagtcgtacagggagccagcagccaacaggcactcagtcacggcggctgaaacgacgcccagtgaaactgacaaaacgccgccgcctgtctggtaatgccctcctgatgcaaaggcctaagccaatcaaatctctggccccgccctaccaattttcggcctacgcatctgaccacaggcagttccttgaccttagccaggatggcgatgatagcctcctggcctcctatcaccttccagtatttcataccccacagcatctggcgcagtggctcggtgtcagggtaggggagctggcttggctggttcaccgcagcacctccgaccgaagaccggcagacgagcagcgctctcattatgtctacaggtgggttgaaaagagattagcctccgtggagtccggaatgcccaatacgaggcctgtgtccacacagtggaggcttattgaggctcccaagcagactttgaagtgtgcacagcggaagattctcacagaaatcttagagaagattccgactcaccaggccgcacacggatttgtgagaggaagatcaattgtcagcaatgcgaggccccatgtcgggcaggcagttgttataaagctcgaccttcagaatttctatgctaacgtcacctattcaagggtggtggcaatctttcgatccatggggtactgccgtgaagccgccatttggctcgctaggcttactactagtgccgccccttggagcttggctgtccctaacggcgacgaggccaccaaaagcttgtacgtgcggagacatctgccccaaggtgcgccaacatctcctgctctggctaacctgagtgcctttggtctggatgttaggctgagtggattgctcaagaagtttggaggaaattacacgcgatacgctgatgacctgactttgtcgggcgatgacgatttccggtatgcgttaagatgtgtgatccctctgaccgaacagatagtccgctcagagcgattcagactgaaccaccggaaacgtaaggtagtgcgacaaggccatagacagctggtgaccggagtggtagtgaataccaaacctaacatccggcgcgatgaattcgaccggcttaaggcaatactccacaactgcgtgaaactgggccccgcactgcaaaaccgtgacgggcacggcgattttgctgcccacctacgcggccggatcgctttcgtgggccaattgaatcccgcccgggccgaaaaatgccagagattgttcgagcagatcagatggtga

SEQ ID NO: 13137 - RNA, 1341 nt, synthetic construct
  source 1..1341: mol_type = other RNA
atgggtttattcgactgggtgcgaggtcttctggggtttggcaatcctgctccaaaccccgtggaatcccctgtggaaacgaaaaacgcccccttgcctactccagcttccggggtcgcctcaccaccttctggtcctgccagttccagacgcgaccgtggagtcactaggtcaagggagttcaggcggtcacgatccgctatacagctgcggaccctgaggtttcagctgcgcccaaggtccgacttgcggacgaccgttcaggatcgagcgcattacagattcgccagaccatccgtggaaggaggctttctggacctgacacaatcaggcgatacgggaaatctggagcaactatctttgcccgtattcagaacccccgaggagatcgccgggtggttgcaaattcccctgggacagctggcgtggcttgtgcatcggttcgatgaagaccagaaagcaggtgacgagaagacaagccactactggtatagacttatccccaagcgaagtggcggacagcggctcatcgaagctcccaaggcgaaactcaagagggcccagtggcagatcctcgatggcattctatctaaagtcccggcccacagggctgcacacggattcgtcgccagtcgcagtatcctgacaaacgccaccccacatgtgggccaacgcgtgattgtaaaactggatctggagaatttctatccgagcgtgacctttaaccgcgttgtcgccatattcagaagcctgggctactgtagagaggcagctatctggcttggtcgtctgaccactacaacattgccacgccgtatttcccctgaactcagccgatgcgccgatctcaacgattataggggacggagactgcctcagggggcacctactagcccggctctagcgaatctttcagcttttgcactggacctgcgcctctctgggttagcacggtcttttcatgccaattattcgagatatgccgatgatataaccttttctggcgacgacagattcctccggagcctcgctgttttcatccccctcgttaagacaattttaaagtccgagcgttttcgagccaaccggcggaagtggagagtgattcgcaataaccagcgccagaccgtgaccggggttgtcgtgaatgcaaggcccaacgtgactcgcagaaactacgacaggctgaaggcaatcttaactaactgcattcggaggggcgccagcacacaaaatcactcgcagcacaaacagtttgctgcccatctgttggggaggatcgcgcaggtaagtcacctcaatgctgagcgtggccagaagctttacgcactgtacagctga

SEQ ID NO: 13138 - RNA, 1311 nt, synthetic construct
  source 1..1311: mol_type = other RNA
atggggctgttccagtggcttcgtggcctctttggattcggggatgcagccccagagtcctctgcccagcctcatagtcccagttctagcagggctagtgacagcaatcgcgctacaccagccgctcgaccaccaagaaaaaggcgcagaccagcccgcctgaagcctttgagattcaaacccccacggaaggtcggaggacgaacgactttgcctaaagaccggggttatagattcgcccgccctagtgtaacgggaggctggctagacctctcccagggaggcgacgcatctagactggagcgctactcactgcctgtctttaagattcctgagcagctcgctaagtggctggagatccccctgggtcaactgggttggcttgttcacaggttcgatgacgagcacagagctgcagatgaaaagtcagcccactacttttatcgctggattgacaaacgggccggcggcaaacggctaatcgaagctcccaaggtgaaactgaagggggtgcagtggaaaatcttagatggcatcctccgcaaagtacctgcacaccctgccgcacacggtttcgtaaccggtaggtccatatcgaccaatgcggtgccacacgtgggccaacgtgtggttctgcagctggatctggagaatttttatccctccgtgtcccttaatcgcgttgtggccatatttaggtcactcggctactgccgagaggccgcaatttggcttgggaggctgacaaccaccactctgccagcctccatgaccgcgacatttggcagaggacccgaaatccatccgtaccgagggaggagattaccgcagggggctcccacttctccggctcttgcgaacctcagcgccttcgtattggacctgcggctttctggcctggctcggactttcggcgcaaactatactaggtacgcagacgacctaacatttagcggggatgcagtcttcttgaagagcttggctgtttttattcccctcgtcaagcagatcgtgagggatgaacggttcttaattaaccgcaggaagtggcgagtgctgcggaacaatcagcggcaaactgtggccggtgtcgtggtcaacacacgaaccaacgtggccaggaaggattacgatcgcttgaaggccacactgaccaactgtgttcgtagaggagctagcacccagaaccatgacagacatgagcggtacgcctcacacctgctggggagaatagcccacgtggcacatcttaatcccgcgcggggagaaaagctccgtgtcctctatgatcaaatcgactggaataaatga

SEQ ID NO: 13139 - RNA, 1350 nt, synthetic construct
  source 1..1350: mol_type = other RNA
atgggcttcttcgactgggtgttcgggtggctcggtttaggccttcggtcacccgcaaagacagcaggcagtgctcccccaggatctccgggtgatagcctggggcaaccaggggaaaccgaaacccaatttcggactaggaatagaaactacgccaaggtggcgctaactccccgaacattcagagctaccagggcaggtggtgaacacccggaagagcgccgtgcaacaggagattggccatacaaatttgcaagaagggcccccgatccagctcgctggttggatctgagtcgcgatgctgaccgcgtaagactcgcccagttcggcctgcccgtactcgaaacgcccgaagaccttgcgcgttggttgcaggtcgagctgggggagcttgcttggctcagcggtcattttcacttcggaggccggccagacagcgttgcgagatcccactatcactatagttggatcgagaagcgatctggagggcggcgcttaattgaggcacccaaggctaggctgaaacatttacagacacagatccttcgatgcatcctggacagggtgcctcctcatagggccgcacatggcttcgtcgcaggacggtcgattttgagcaacgccgccccccacgtaggacagagagtgctcgttcagttcgatctaagcgacttctacccctcagtgtcctactcccgcgtcgtggccattttccggagtctgggcttttctagagaggtgggttgctggttagcccggctgacgacttctgctgtgcctcacgagctgctcaccggcccttcctcaacccgcttcgggtccaggtttgattctgatcacgagctgtatctgcgtcgccatctgccacagggagcccctacctcaccagcccttgccaacctctccgccttcgtgttggacctgagactcgctgggctggctagggctttccaggcacattacaccaggtatgccgacgacctgacctttagtggcgggactaggtttcagcgaagcctggctgtttttatccctctggctagacaaattatccggggcgagcgctttagcatacacccattgaagtttcgagtcaggcggagggggcagcgccaaacagttactggcgtcgtggtcaacgatcatcttaatgtgtctcgggcggatttcgacagactgaaagccatcctacataattgtgcccgtcacggccctgcatcccagaaccgttcacaattgccggactttgccggccacctgagaggacggattgcccacgttcagatgataaatcctcggagagcagccaaactcgtggcgctctttggacagatcgactggacacgatga

SEQ ID NO: 13140 - RNA, 1293 nt, synthetic construct
  source 1..1293: mol_type = other RNA
atggggtggctggactggttgtggcggctgtttacaggcagcggtgctgacagatcacctcaggagctgacctcggccagaggcacagcagcagacccagcctcaaaggcaagacgacgtcctggacgcagacgccgactggttccactgcgctatcgccgtaatccctctagatcccctcctgctttggcagcgcagctcccatatcgcttcgccaggagaagcgcagacctgcgacactggaacgatctcaggcaagatgggcagccacgtcggcttgaacaactaggccttcccgtgcttgctgggccggatgacattgcttgttggctttcattaagcgccggagaagtggcttggctcaccggacgcttttgggaagggaggtctgcccctagagtggcagcaagccactatcactacagatggatcgctaagcggaggggaggaaggcggttgatagaggcccccaagtctcggctcaagcgagtgcagcagcagatattagcagagattctgggacgcatcccacctcacgttgcagcccatgggttcgttacaggacggtctatccagaccaatgcccagccccatgttggccagcgggtgttgcttaaactggacctcgagaacttttacccatcagtcacctaccccagagtcaccgccattttcaggtccttaggctacagtagggaggccgccatctggctggctaggttagtgacaacagccgtcccgcccaatctctgggaggctggtagaccgtccgatgtagcggaaaccagatatctgcgacggcatttgccccaaggtgcgccaactagtcccgctctcgctaatctaagcgcatttgtactggatctgaggctggccggtctagccaggtccttcaacgcacagtatactaggtacgcggatgacctcactttcagcgggggcgaagtattccagcggtccctcgccgtctttttgccccttgtgcgtcagattgtggcccaggagcagttccgcctgaacagtaggaaaacggccgtgcagagggcttcgcaacggcagagagtgactggcgtggtcgtgaattctaaactcaacatccgccgtgaagactacgatcggctgaaggccacgctgaaaaactgcattcaatacgggcctactagtcagaatcgcgaacgccaccctgagtttgcctcccatctgagaggccgaatagcatttgtcacctctctgaacagccaacggggcgcgaagctactggctctgttcgagcagatcgactggaatcgatga

SEQ ID NO: 13141 - RNA, 1290 nt, synthetic construct
  source 1..1290: mol_type = other RNA
atgtcctttttcgacagcatcctccgctggctcggactcaagaatacgccgccaaccggtagagatcacgcccaacagaggaggggcaaactacggagacgacggggcaggctggggcatatctatatggtacctctgcgtcgccgacagggacagagatctgcagatcccaccgaggacgcgggcgaagaatcagctgagtccccctacaggtttgctcgctttggcggctacggcgaatatcgtgacctgagtaaagacagcacgccagagcggctgtatcagttcggacttcctcagctgtgtacccccagtcacatcgctgaatggctggaagtgccttgcgggaggttggcatggctcattcaccggtttgatgatggtgggcgcgccgcccatgttgcacaagcacattatcattactcatggctgaagaaaagagggggagggtatagactcgtggaagccccgaagcctatcctgaaggcaatccagcagaaaattttaagggagatcctggatcgcattccccttcacggagccgcccatggcttcgttgctggtcggtccatctgtactaacgctcagccccacgtgggccaaagggtggtcctcaagttcgacttagagaacttctatgcaaacgtcagcttctctcgggtggtggctatttttagatccgtgggtttttcaagagaggccgcgatctggctggggcggttaacaacagcattgccacctgagggacttcctgccccaggtggagacagaaatgtcgtgcgaccttacctgagcagacacttgccacaaggggctcccacctcaccagccctcgctaatttgtcttgctacgccctagacctgaggctagccggaatggccagagcctttggcgctacctacactcgatacgcggatgacctcacattttctggcgatcagcacctgattgattcgctgaacgtcttcataccgttggttaccaaaatagtgcggagtgaacgtttcactgtccacgcggggaagcggaaagtagttagaaataatcagcagcagcgcgtcactggggtggttgtaaatgagagacttaacatttgccgcaaggattacgaccgcctgaaggccatcctgacaaactgtgtgaggcacggagctgcaacacagaaccgtgagcaacgggccgacttcgccgcacatcttcgcggtcggatcggccatgtgcagtccattcaccccggccgaagcaggaagctgcaggctatattcgatcgaattgactggaggagctga

SEQ ID NO: 13142 - RNA, 1299 nt, synthetic construct
  source 1..1299: mol_type = other RNA
atggggctgctgaattttttttggcggctcatttttggtgatcccccgagtcggccggagagcagttcttcagcttctcgtgatagtagcgtatccagaaaccctagcacacctcggacacggactcgaaaactgcgcgctaggctgatccccgatcgcgtcaagagaagccgccaggacttcccccagaatatagtgtcttccctgccctacaggtttgcaaggctgaacgtgacgggcggttatctcgacctttcgcaggatttggacgagccccaattacagcagttgggactgcccctgctcgctactcctgagcagcttgctaattggctcggcattccgctggggaaactggcctggcttacacacagatgtgatgaagggcagcggccacgcgacgtcagacatagccattaccattaccgttgggttaagaaaaaacagggcggctacaggctcatcgaagcccccaagcaccaattgcgcagactacaagacaaaatcctcttagaaatactgtgcaagattcccgtgcatccagctgctcatgggttcgtagccggacgatcaataaggtcaaatgcagaaccccatgttggtcagcgcgtggtggttaagatggatctcgcgaacttttatcctacggtgaggttcagtcgggtcgtgtccatcttccgagccatcgggtttagccgggaggtggcaatttggctagcgcggatcaccacttccgctgtccctttggccttcgagggcccacctggtgagttgaatcggtgggccctgacaccttattatagtagacacctaccacagggagcaccaacctcccctgcccttgcgaacctgtctgcatatctgttagacaggcggttggctggcttagcgcgcaggttcagggccaattacacccgttacgccgatgacctgaccttttctggggacgcaaagttcctgtcaggacttcgaaactttgtgccactggttcataccgtaattcgcagagagagattccagcttcactacaagaaaactaaagtgcacaggtctaatcagcaccagcgagttactggagtggtcgtcaatgagaagccaaacatgtccagagccgatttcgaccgactgaaagccatcctgaccaactgcatcaggcgcggcgtgagcacacaaaaccactcacagatcccagacttcgaagcacacttgcgtggaaagatttcccacgctaagtttctcaaccctgccagaggcgcaaagctcctggcccttctcagaaaaattgattggcaaagctga

SEQ ID NO: 13143 - RNA, 1290 nt, synthetic construct
  source 1..1290: mol_type = other RNA
atggggctgtggtcttggcttagaaggcttctgtttggccaaccgaaacgctcagcagcctcccgcagtgatgatcgagaacaaaaaagacggcggccaagggctcgacttactcccctcagacaccgccagaggagaacggacagatggaggcagagggatgccgccgggtccattaacaaaatcacagtcaagagccagccctacaggtttgcatggagctcagtgttcggcggcttcttggacctaaaccgcgatggtgaccctgctcgccttaaacaggctgggctgcctgtatttcaaaccccccaggaactggccgattggctgcagatgccaatcggacgtctcgcatggctcgtccaccgcttccacgaccaccaacggccagccactgtgaaactgagtcattaccactaccaatggatagcgaagaggtccggagatcgacggttgctcgagatccctaagccacagctcaaagcagcccaggagaagattctccgcgagattttggacctcgtaccgacccattcagccgctcacgggttcgtcaccggacgaagcattaagaccaatgccgaaccccacgtgggccagcgagttgtgatgaagtttgacctggaaaacttttacccttccgtaaagtatagtagagtcgttgcgatatatcggtccttgggatatagcagagaagccgccatctggctgggccggttaacaacgtctataacacctccactgggaacattaaaggacctagctaccgaagcggagtggataccatatgcaacccgtcatcttcctcagggagcacccacaagtcccgccttggcaaatttgagcgccttcgctctggatctgagactggcgggcctggctcggactttccatgccaactacacccgatacgcagatgacctgactttctctggtccggatcagttcctgaggagcctcagggtctttattccactggtgatgcagttaatcagacaggagcgctttcgtgtgaaattatctaaacggaaggtgatccggaactcccagcagcagcggatctgtggggtggtggttaacgagcagatcggtattcccaggagagagttcgacaggctgaaggctattctcacaaattgcgttcgcagagggcccgctactcagaatcacgagagacatcctgactttgctgcccatctgcgcggcaggatcgcccatgtgtcacaccttcactcggagcgtggcgcacggctactggatctcttcgaacaaatcgactggaattcttga

SEQ ID NO: 13144 - RNA, 1299 nt, synthetic construct
  source 1..1299: mol_type = other RNA
atgggactcttcaactggctcagatgttggttcctcggcaaaagaccacctgcaaccaatgacgttgtttctgaccaaggcgctgcccctcaacgacgaaaacgccggcggaagcactctcgtgcaaggctcgtcccactgcgtgcagctgccgctagggatgctcgtaggaggttcccagggttgaccactgcagagcggacaggggcagctccatatcgcttcgcgcgaccttgtgttcttggtggctggctagacttttcattggatggccagacagaacaactgggcagcgccggcctacccgtgtttgagacgccacagggactggccgactggcttgaattaccccttgggaggttggcgtggctgattcataggttcgagatcgagcagcaacctccagaccaggccaaggcccattaccatttctgttggctacctaagagaagggggggaaagaggctgatcgagagccctaaacccatcctcaaacgcatccagcatcgtattctgcgcgagatcctggacaaggttccgcttcaccccgccgctcacggatttgctgccaagcgctctatccggactaatgccgctccgcacgtgggtcagagggtgattctcaaaatggatctggaaaacttctacccctccgtcagatttagtagagtggtagcgatcttcagatccttaggctatagcagagaagccgcgctgtggctttctcggcttactacgtcttcacttccagccaacgccgcccagtggagtttatggtcccccgaactggaagcatatctctgccgacatttgccacagggtgcaccgacctcacccgctttggccaatctcagtgcatttagcctcgacctgcgcctggcagggttagctcgcacttttggagcccgatacaccaggtacgctgatgatctcacatttagcggggacgaacacttctccagatcgctggccgtgtttatacccctggcagagcagattattcgggccgagcgctttagaaccaacaaatccaagcggcatgtcgtgagagatcaccagcggcagcaggtaacaggtgtcgtcgtgaacaggcaccctaatgtggcccgccctgactatgaccggctgaaggctgtgctgacaaattgcatacggcgaggcccctccacccaaaaccactcaagggaggatgattacgcggcccacctgagaggctgcattgctcatgtggcattcctgaatcctagccggggagagaagctgctggacttgttcagtcagatagattggaaccgctga

SEQ ID NO: 13145 - RNA, 1293 nt, synthetic construct
  source 1..1293: mol_type = other RNA
atggggattttccaatttatacgtcgcctattgtttggctctagcccttcccgccctatcgctccagctgacacccacagcgctctgaagcagattaagccgtctaggcctagaagaaaaccgcgactccaaccactccgctttaacaaaaaaaagaaccgcgactcccccgacatggtcgatgtctccccacttccctacaagctggcaaggccatacgagctccttagataccgaagccagagtgaccactatctagacatgacccaggatgtagatcaccaaaagcttaggcagtaccatttgcctgcttttagtactcctgaagaaatagccaattggctcgaatatcccctgggcaaactggcatggctaacacacagattcaatcaggctgatcgccccgacgacgtaaatgaaagccactatacttatcattggctgcctaagcggaacggatataggctgatcgagagccccaagccctttatgaaaatggctcaacagcagatcctgcaggatattttgaacaaaatccccgcccatccaacagcccatgggtttgtgactggtcactctcaagtgacaaacgccgtccctcacacaggcaaaagggtagtcgtgaagtttgacctcgagaatttctacgcctcggttaagttctcaagggttatctcaatttaccggtccgtggggtactgcagagaagccgccatatggcttgctcgcttgactaccacggcgattcccatgtctatgcctttcccagatggatcactccggccgctgtatccatacctgagccggcatttaccacagggagcccctacctctcccgcactggcaaatctttcagccttcagtctggatgtgcgactgtccggcctcgcacggtcattcgatgcggagtacacgcgctacgcggacgacttgaccttttctggctccgatcaattccttaggtccttgcgggtgttcatacccttagttgagcagattatcagaagtgagagatttcaggtcaaccagagcaaacggcgtatcctgcgcaacaaccaacagcaaaaggttaccggcgtggtcgtgaatgagcatactaacgtgcctagaaaagaattcgatctgctgaaggccatcctcacaaactgtatccggaagggtcccgccagtcagaatcgagagggacacccggacttcgcaagccacctgaggggtagagtggcttatgtgcagcagctcaatccaaatcgagggcagcgtctgctgcagttatatcagcagattaggtggtga

SEQ ID NO: 13146 - RNA, 1269 nt, synthetic construct
  source 1..1269: mol_type = other RNA
atggggctgtttcagttcatcagacgtctgctatttggatcatccagcgggaggccagtgactcccaccgattcctatagtaaacagaacaagacacagcgagcttaccgcaagcccagactcaaaccttttagataccggcagaatcggcgcacagacacgaccgagctcgaagaggtgtcaagtcctccatacgagttagcaaggtacgccagccggacagggcactatttcgacatggcacaagacaccgattttgaaaagctggatcagtacaatcttccacggttctgcaccccacttgaactgagccagtggttggaattccctttgggaaagctcgcctggttgactcaccggttcaatcagttcgacagacctgacgacgtgaaggagagccactacgtgtatcattggctacccaagaggaacggcttccgtcttatcgaagcacctaggccgtttatcaagatcgcgcaggagcagatcctcaaagacctgctaaatcgaattcctgtacatccggcggctcacggatttgtggctggccacagctccgtgaccaacgctctgcctcataccggcaaacgcgtcgtcgtgaagttcgacctcgagaacttctatacctcagttaaattttctcgcgtggtttctatataccggagcattggctattgtcgcgaggtgtctctgtggctcgccaggctcaccacttccgctatccccatgagtatgccctttcccgatggtagcctgcgaccactgtatccatatctgtccaggcatttacctcagggggccccaacttcaccagccctggcaaacttgtcggccttttctctggacgtccggctgagtggattagccagatcttttgatgccgagtacacacgctacgctgatgatttaacttttagtgggtctgatcaattcctgcgagcattgcgcgtctttattccgctcgttgagcagatcatacgaagcgagagattccaggtgaatcagtccaaacggcgggtattgaggaacaatcaacaacaaaaagtcacaggcgtagtcgtgaacgaacacacaaacgtgcctcgtaaggaattcgacctgctcaaggctattcttacgaattgcattagaaaaggtcccgcctcacagaacagaaagggtcatcccgatttcgcgtcccacctgagaggcagggttgcctacgttcaacaactgaaccccaataggggacagcgccttctgcagctttatcagcagataaggtggtga

SEQ ID NO: 13147 - RNA, 1293 nt, synthetic construct
  source 1..1293: mol_type = other RNA
atggggttctttgattttatacgacagctgttcttcggaccagcacctgatcggtctgtggcaagaccggaaacctcagccaacgttaaaccttcaaaagctccccggatcttcagaaaacctagactgagccccctcaggtacaataaaaaaaagaggttcactccacccgagaacgccgacgtcggatcactcccgtacaagctcgctcgcccgtatgaattgttacgctaccgttcggaaaccgatcactatcttgatatgacccaggacggagacgccgccaagctatcccgcttcgaccttccagtgttttctactcctgaggacatcgctcactggttgaacctcccacttgggaagctggcttggctcacacatcgcttcaatcagtccgatagacccgacgacgtgaaagagtcgcattatacgtatcattggctccctaagcggaacgggtttaggctgatcgaagcgcccagaccatttattaagatggcacagcagcagattctgcaggaaatattgaatcagatccctgtgcacgatgcagcccacggctttgtcacggggcacagtccagtgacaaacgcgattccccacaccggtaaacgtgtcgtagtcaaattcgatctggaaaacttctatgcctctgttaatttcgcccgagtcgtcagcattttccgctccgtaggatactgccgggaggctgctctgtggttagccaggctaagtacaactgctatcccgatgaacatgcccttccctgacggctcacttcggcctctgctcccatatctgtccagacatctgccccaaggcgcaagcactagtcccgccctggcaaatttgagcgcattttccttagacgtgagactgagcggactagctcgaagcttcgatgccgactacactcggtacgctgatgacctgacatttagtggtagcgaccagtttttgcgatccctgagagtgttcatccctctcgttaatcagatcattcggtctgagcgctttcaggtgaatcagtctaagcgcagggttctgaggaataaccagcaacagaaggtgacaggggttgtagtcaacgagcacaccaacgtgcccaggaaggagtttgatcttcttaaggcgattttaaccaactgtatccgacaaggcccagtgggccaaaatagggagcaacatcctgattttgcctctcacctgcgcggccgtatagcctacgtgcagcagctcaacccaaataggggtcaacggctgttgcagctgtacgagcagattagatggtga

SEQ ID NO: 13148 - RNA, 1275 nt, synthetic construct
  source 1..1275: mol_type = other RNA
atgggcctctttgatttcctccggagaatttttttcggatctcctccgagccaaacagtttcccctgtggagagcgcaccagttcccgaggagacgagctcccgaaagcctcggcgcaaaaccactctggagcctctccgctacagttccagccactctagcagggtagagaacattgaggaagtagccgcccctccctacgagttggcgagatatggcgccaggacaggccattattacgacatgactcgggatggggacaccgagaaattggccagatatgagctcccactgttttcaacccccgttgaactagctgaatggctaaacataccactcggtaagttagcatggctgacacacaggtttacccagttcgatcgccctgatgacgcccaggactctcactacatctaccactggaaacccaaaaggagcgggtttagactgattgaatccccacggcccttccttaagatggcccaacaacagatcctgcatgaaatcctgaatcagatccccgtgcacacggcagcccacggtttcgttaggggcaggtccagtgtgactaatgccacacctcataccggaaagcgggtggtggtcaagttcgatctggagaacttctacacttcagtgaaattctcccgtgtggtcgctatatttcgcaatctaggttattgtcgcgaagcctcgctttacttagcgaggctgactaccagtgtgatcccaatgtcattgcctttcccagatggatcactgcgcccgctggtgccatatctgtcacgacaccttccacagggggcctctacctctcccgctttagcaaaccttagtgcatactccctcgacgttcgcttgagcggactcgctcgagctttcgatgctgattatacgagatacgctgacgacttgaccttctcgggctctgaacagtttttacgaagcctgcaggtgtttttgccactcgtcaaccagattattagatccgaacgatttcaggtcaaccacatgaagaggcggatacttagagagaaccagcaacagaaggtaacaggcgtcgtggtcaatgaacaccccaacgtgccccgtaaggaatttgacctgctcaaagcaatcctgacaaattgcattcggcaggggccgcggactcaaaatcgcgagaatcatcctgacttcgccagtcatcttcgtgggagagtggcgtacgtccagcagctgaatcccaagcggggacaaagactgctgcatctgtatgagcagatcaggtggtga

SEQ ID NO: 13149 - RNA, 1278 nt, synthetic construct
  source 1..1278: mol_type = other RNA
atggggttgttcgactttattaggcagcttttcggaagccctcctgatcggagtgggcaagctgccgccccagatcctgtgccagaaccagcacctcacgagcctccccagaagagacgccccgtgaggcttcatcccttgcgatatcctaagcgccgtccgcgaaccgaatacaatatagaggaggtgccagcaccaccatacgagcttgcacgctatggcgccatgactggacactactttgatatgacgcaggacacagatgcagcacagctcagccggcatgagctaccgcaatttgccacccctctggaactggctcagtggctggaaatcccattaggtaaactggcttggctgactcacaggtataatcactcagatggccccgaagacgtgaaggagtcccactatacctaccactggctacccaagcgcaacgggttccgcctgatcgaagcccctagacctttcatcaagatggcacagcagcaaatccagcaagaaattctctctcggatccccatgcaccattcggctcatggctttgtgagtgggcattcccccgtcacaaatgcccgtccccatgctggcaaaagggtggtgctgaaattcgacttagaaaacttctacgccaatgtcaagttctctagagtcgtatcaatttttagatcacttggctattgcagagaggcggctctttggctggctcgcctcacaacctccgccattcccgccaacctgccattccctgacggtacgctgcggccgttgcttccctacttatctaggcacttgccacaaggagctccgacctctccagcgctggcaaacctcagcgcgtattccctagatgttagactgagtggcctcgcccgaagcttcggagctgactacaccagatatgccgatgacctgacattttctggtagcgaggcattcctgcggtccctgaaagtttttatacctctcgtgcaacaggtaatccgtagtgagaggtttcaggtgaacctcagcaaacgcagggtcatcaggaacaatcagaggcagacagttactggggtcgtggtgaacgaccacactaatgtatcacgaaaagagttcgaccggctgaaggcgatactgaccaactgtatccgccagggaccagaaactcagaatcgggagcaacatcccgattttgccaatcacctccggggcaagattgcccatgttcagcagctgaaccccaacagaggtcagcgactcttgcacttgtacgagcagattagatggtga

SEQ ID NO: 13150 - RNA, 1278 nt, synthetic construct
  source 1..1278: mol_type = other RNA
atgttcattcctatcacaggaccactcccgtcaagcatcaagattcgcaggcccatctctatagtgacccccttgctgaaaccctcctcttcccaccggaccgagctggagggaaagcctcggctgaccccgttacgctatcgcccagttgaatcgcgtgcagaagcggccctgccagttgaccacctcccttatcgattcgctcgactcgccactaggcccggccagtactgggatctcagcagagacggtgaccccgatcagctacgaacccttgggctgcccgagttccacacgcctgaacagcttgctgactggctgcagatgccggtggggcgattggcctggctcactaggaggtgtgcagagactcaacggccagaaacagagcgggatggccattattactgcagatggatggaaaaacggagcggaggatggagactcattgaagctcctaagcccatcctgaaaagtgtgcagcagagaatcgctcgtgagattctgcagaacatccctccacacgaggccgcacacggatttgtgagaggaaggagcattgtcaccaacgcacaaccacatgtgggtcgcagagtcgtcttaaagctagacctggagaacttttacgcttctgtgcggttcgctagggtagtagccatcttcaggcgagttggttacagtagggaagcggccatatggctcgcccgcttaaccacatctgccgcgccttggtcattgtcagcccctgatgggagtgacgatacgctccggccctacactgcgtggcatctcccacagggcgctccgacttcaccagctttggcaaatttgagcgccttttctctggacgtccggctgacaggcatggcacggtgttttggggccgcctacacgcgctatgccgacgatctgacctttagtgggtcccagagactgataagggctcttcctaccttcctgcccttgataacacagatcattcaatccgagcgctttcgggtcaaaaaggagaagcgcaaggtgcttaggaataatcagcgacagactattgctggcgttgtggtgaacgcacatcccaacgtaacacgctccgatttcgatcgtctgaaagcaatcctgacaaattgcattagacatggccccagcgaccaaaatagagaacaggtgccagatttcgctgcccaccttaggggtcgtatcgcccatgtgatgcaactaaaccctcacagaggcgccaaactgctggcactttatgagcagatcgactggaatcactga

SEQ ID NO: 13151 - RNA, 996 nt, synthetic construct
  source 1..996: mol_type = other RNA
atgggcctgtggcagtggctgaaacagcttctcttcggaagcacaagtgtggaggtcgaaatccctactgaggaggagcgtcaggaacgtcgaccaacccccaaactgactcctctgcgttatcacgtttcttcatgggagaaccatctgccttggaaacgagagtttgtgagccagcgcccctatagatttgcatgcaatacggatgtctgggggatgtacaacgatggctatgttgacctaagccttgatgcaaactttggtcagctggaacgctgggggctccccaagttcagcaatccagaggaattggctgaatggctgggtcttccggtcggccgggttgcatggttggctgacagagtgcgcagaggcgactggcgaggagatagggccaccgaccactactaccggaaatttgtcagtaagcgaagaggtgggtggcggttgctcgaggcaccaaagcctgccactaaggctgtgcagtaccgcatcctttccgagattttggagagggtaccacctcatcctgccgcgcacggcttcgtaaggggaaggagtattgtgacaaatgcaagaccgcacgcgggccaagccgttctggtcaagttagaccttgaaaacttctacacttccgtgtcgtatgctagggtggtggctatattccggagactcgggtattcacgggaagccgcgatttggttagccaggttgaccaccacgcaagcacccgagaacctccaaccgccccatgggaaggctaggctggattggcgctataccctacggcacttaccccagggagccccaacatctcctgccctagcaaatctcgccgctttctctctcgatgtgagactgtccggaatggctcggtcatttggcgcccagtacacaaggtacgccgacgacctgaccttctccggtcccaaacgctttctgcaatctctggacacattcctgccactggtgatccagataatccagagcgaatga

SEQ ID NO: 13152 - RNA, 1281 nt, synthetic construct
  source 1..1281: mol_type = other RNA
atgttccgttggctactgcgactgctttttggggaggacgaaagtgttacacaaaggtcccaacccgaaaaaatcgcccccgtagagactgatgaagcccctaaggttcgggtgaggccaaggctggcacggtttgagttccgccgacgcagggggcatcattcgacctccgctgccactcggactaccgagaagccgtaccggttcgcactcccgaatggtgtgtctggtgaaacaatagacaggagccaggatcagaattttgagcgactgacccgttgggagttgccagctctgaccactcctgaggacctcgccgattggatggaggtgagtattggagagctggcctggttaactcaccgcactgagtccgcctatcgccctccctctctagaggccgcccactaccatttcaggtgggtgcataaaaagagcggaggctcaagactgattgaatcaccaaagcgcaggttgaagcacgttcagcagctcctgctgcggggcctgttagatagagtacccgcccatccagcagcgcatggcttcgtgcgtggccgaagcatagtcagtaatgcccagcctcacgtgggaaaagcagtcgtgctctcctacgacctggaaaacttttaccctgccgtgcggtataaccgggtggtagctgtctttagagggctcggctattcccgcgaagccgccatctggcttacacgactgacgaccagcgctttgcctccaagaatgcccttacccgaggggagaggggctaatcttatccgggcttatgctgcgcgacacttgccacagggagctccgacaagccccgcacttgcgaacctgtccgcattctcacttgatgtgagactaaacggcctcgcaaattctttcgaggccaactacacaagatatgctgacgatctcacctttagtggagacgaccgcttccgccgctcactggcaacgtttattcctctggtcaaccaaatcgttagaagcgaacagttcgtggtccacagggagaaaagaaaggtggtaaaacacggtcaacggcaactggtcacaggtgtggtggttaatgatagacccaacgtctctagggccgcgtacgacaggttgaaggctaccctgcacaactgcgttcggcagggccctgcaagccagaatagggatgaacacctcaatttcgaagcgcatttgcagggaaaaatctctcacgtgagacagctcaacccagcccgcgctgaaaagcttcagcggctgtttgaccgtattgagtggtga

SEQ ID NO: 13153 - RNA, 1275 nt, synthetic construct
  source 1..1275: mol_type = other RNA
atgctcaggtggctgttcagccttctgtttggatccagggacgatggaggtcgtcctgctccagcgcagagaagaaaaaggcccaagtattggaggatcggcaagattaagctgtccagatttcagtatggcagacgaaatcgaaagctccaacgggacgagttggttagggagaagccctacgcctttgctttcaggtatcctcttcacagcaaatacatagatcgctcaggctcaggagactccgagaaactggccaggttcgaactgccggatctcaggacacctgatgacatagctcagtggctagggatgcccctgggaagggttgcatggctgacacacattacagagagacagtttcgaccacagtctttgagcgaggcccactacacctttcattggatgccaaaaaagttcggcggtgcacgcctgattgaggcacctaagcccctcatgagaaaggtccagcatcagattctgcgcgggattctcgaccatgttccagcacatgatgccgcacatggcttcgtgaaacacagatctgtgctgactaacgccgctccgcacgtggggcaaagagtggtactccgcatggatctcgagaacttttatgccaatatccggttttcaagggttgccgcgatattcagagaactgggatacagtagagaagccgctctgtggctggcccggttgtgtacctctgggcttcccccacgtatgccactccctgaaggtcggggtgccaatttagtccgtaattacaccgcccgccaccttcctcaaggagctccgacttctcccgccctggcgaatttcagcgcatattcgttggacgtgcggctgactgggctcgcaaatagtttccatgcaaactacacacgctacgccgacgatttgaccttttcagggggcgaccgttttttaaggagtttacgcgtctttatccccttggtcaaccagattatcacccaggaacggtttatcgctcagcctgctaaacgccgcgtgatccgggacaaccagcggcaaaaggtaacgggcgtggtcgtgaatcagaaacccaactgcgatcgacgggaattcgacgaactaaaggctatcctgcacaacagcgtgcgcttcggacccgcctcccagaacagacacgaccacgaggatttctatgcgcacctgaacggccggatcgcacatattgcccagctaaatccacagcggggcgagaaacttcgatccatgttccgacaaatcaattgggctaacagcccttga

SEQ ID NO: 13154 - RNA, 1323 nt, synthetic construct
  source 1..1323: mol_type = other RNA
atgggcctgattgattttctgttccggatgttgggtctaaagagagaatcaaggggggaattacccacgagtgtaccgaccaaaccccgccctgccgctaaaacccaaaccaaaacctcctatccacgcctgcacccactgagattcaaacgggaaagatggtccaaagttaagaagtcatcccagaaactgtctgcttctacccgccctttcagtgtcccagatgccaaaacagagcgaccctatcccctggctaatcaggacgtcaggtatggaggatatcttgatctgagccaggacagcgacccagtgcagttgcgagaattggagctgccccagtttactaatcctcccgagctggcagagtggttaggaattccagtggggcagcttggctggctgacataccagtttgacgagggacaccggcctctcactcagagagccggtcactaccacctccgttggcagccgaagcgtaactattcggtgcggctaattgagtccccgaaacctctgctgaagcaagtgcagcgtaagatcttgcgcgagatcctggaccatgtccccgcgcattctgcagcccacggatttgtctcaggcgaaagcattctgacaaacgccaaacctcactgtagacagagggtcatcgtgaagttcgaccttgagaatttttaccctaggatcaggttcagaaaggttaccgccatatttcgggccatgggttatagccgagaggcagctatatggcttgcgcgcctctgcacttctaacatcccagttgacaccaagctgccttcaatggatcccgaagtaatctttttgtacacgccccagcatctcccacaaggcgctccaaccagccctgctctcgcaaacctggcggcttatggcctggatgtgcggctcgagggacttgccaggagtttcggcgcaaattacacacgatacgctgacgatctgacattcagcggggatgacaagttcctccggtcccttaagattttcattccgttagtggaacaaatcataagagagactggctttagtgtcaacaaagagaagaggaaggttatccgggataaccagagacaggcagtaactggggtggtggtgaaccagcatcccaatatgaacaggaaagactacgataggctcaaagccattctaaacaattgcgtgcgccacggggccgaatctcaaaatcgagatcagcatcctgactaccaagcccacttacgggggcgcgtggcacatctgctgcaactcaatccaaagaagggcacaaagctccagagattgttcgaacgcatccagtggtga

SEQ ID NO: 13155 - RNA, 1317 nt, synthetic construct
  source 1..1317: mol_type = other RNA
atggggttctttgacttcctgctcaggttgctcggcctgaagtccaagccgcaggctacaatggcaccagctgcggggacccagttcaagaagaccacttcacctaagcggaccgaccggaagttggaccccttacgctttcagcgcgagcgctggagtaaagtagcaaaatctccccagcagcaaaccaccacatctcgaccgttcagcgtacccgctgtgaaggtcgagcaaccataccccttcgcccatttcagcccaatgggtgacggatatctggacctgtcccaagacggtgattctgtccagctccaagaactggagcttccagaattctcgaatccgcagcagatggcagattggctgcagatgcctgtcgggcagttagcatggctgacttgccaatttgaggaaggctacgctcatgcaacggaaaaagcggcccattaccacttcaggtggcttcctaaacgtaattttggctgtcgtctgatcgagagtcctaagcctctcctaaaacaggctcaacggaaagtgctgagagagatcctcgacaacgtccctacccaccaagccgcacacgggtttgtccagggaagttcaatcctaacaaatgcgcagccacattgcggtaaaagagtggtgctcaaatttgatcttgagaacttttacccacacgtgagattctcaaaggtggtagccatattccgttccatgggatatagcagagaggccagcatttggctcagtcggctatgtatgtctagactgcctttggattgcaagcctcccacagcaaatcccgaagctctgtggatttatcaaccaacacatcttccccaaggagcccccacgtcgcctacccttgccaatctcgccgcctacgtgctggatgttcggctggatggcctggcgcgaagcttcggtgccgactacagcaggtatgccgatgacctgacattctctggcgatgctcagtttctgaggtccctcaaatccttcatcccatttgttgagaagataattagagagactggctttaaagtgaataagaacaagcgcaaagtgatccgcaataaccagaggcagtcagttaccggagtgactgttaacgaacaccccaacattaaccggaaggagtttgaccgactgaaggctatcttacacaactgtgtgaggtacggctccgaaagccagaatagggatcagttgcccgactttcaggcacaccttcgggggcgagtcgcttatttccagcagttgaacccaactcgcgccgccaagttgaaacaggtgttcgaacagattagatggtga

SEQ ID NO: 13156 - RNA, 1263 nt, synthetic construct
  source 1..1263: mol_type = other RNA
atgtcactctggcagctgcttaagaatttactctttggagggactgctgcgtcctcaaatcccgccgtccgcaatacagagcatgagcgacgcagggggaggcctaggcttcaacccctgaattatagccagcattcccgcaaccgacagccctcccggcaggttagcgagaagccgtatctgtacgcccgaaaagatacctacagacaggacgggtggtacgatctgcgggagggtggcgacgcagagtttctgcagcaagaggggctgcctctgattgagagccctgccgagctagcagattggttagaccttaagcctggtcagttagcgtggctcactcactttttctcacctggcagtcgcgccgagagtgtggaacaatcccactaccactatcactgggtaagcaaacgttctgggggagagcggctgatcgaatctccgaagcccatgctcaagcaagtccaaagcaagatccttcagggcatcttgaaccaagtgccggtgcataggtcgtgtcacggcttcacgagggggagatctatactctccaacgccgaaccacactgtggtcagcgactactcctgaagtttgatctgcagaacttctacccatcagtgagcctcaatagagtgatagctatcttccggtcgcttggctacaacagggaagtggccatatggctgggtcggttgaccaccaccgcaatcccctccagtattccattccctgaagaaggccccaaaggcctgcgtgattatctcgcagaccatttgccacagggcgccccaactagccctgctctggcaaacctgtccgcctttagcttggatctgagattgcatggattggcaaatagtttcggcgctaactacacaagatatgctgacgacattacatttagtggacccgagactctgctgaaatctctaaaaaccctgattcctctggtggaagccgttatccgcgatgagcgcttcacggtcaacaaggccaaacgcaaagtaattcggaataaccagagacagacagtctgcggggtcgtggtgaatgaacaccccaattattccagaaaagaatttgacaggcttaaggctatgctgttcaattgcatcaggttcggaccagactcacagaaccgtgagggacatccaaactttcgggagcacttatggggccggatttctttcgttaagcagctcaatcccgcgagaggagccaagcttgaagctctctggaaccagatctcttggtcttga

SEQ ID NO: 13157 - RNA, 1296 nt, synthetic construct
  source 1..1296: mol_type = other RNA
atggaccaacgctggctggggattctgatagtggtcgcagcttggatcgtcgtaaggacattatttggaaagaggagaacccagccacggagctctcgcagcattcacaaagaacgatatgagcagcaaagggttaggcccgcaattcgggagaagcgccctctgattgtcgggcgcaacaaatcgccactgctggccgttgcaagtcctcctcactctttcgcccatcgcggacttaaacccggtacatggtacgatttgtcccaggacggccgcaatgatgagctcgtgagacgtggcctgcctgttttccagacccccgatgaactcgccgcgtggctgaatgtcccggtgaatagactggcctggctagcgtacagatgtacacgggggaaccttccaggcgtgtcacagagtcattatgtgtatacatggaagcccaagcgcacctatggctatagactcatcgaatctcccaaagcaagcctcaaaaccgtccagcgacagattctgaccgagatactagatcaccttcttgtgtcagaggcggcccacggcttccggaaagagcactcaatccttacgaacgcccagttgcacgtgaatgctgcagttgtggttaagttcgatctgagcgacttttacttgacagtacgcagtggccgaatcactaatttgttacgtagggtgggctacagccgcgaagtggcgatctggctgaccagattgactacgtcaactattcctggaaacctcccaccgccccccaccaaccctatcgtgatgtggaactaccggcaacggcacctgcctcaaggtgcaccaagctccccagcactggccaatttagtggcttacaggctcgaccagcgtctcttgggtcttgcaaagtccttcggggccaactacactaggtatgccgatgacctaacattctccggtgatgaatctttcgccgcagctctcagggcctttatcccgcttgttgaggctatcatcaggcgcgaacggtttcagtccaataatgccaaaagacagatactgaggagacaccagagacagatcgtggctggggtcgtagtcaacgaaaagccaaacttttgccgaaaggactttgaccggctgaaggctatactgcatcgatgcgtgactcagggacctgctgcccagaacagagatcagattgaggacttcgctgctcatctgcggggacggattgcccatgtacgacagctcaatccccaaagagccctgaagttagagagtctgtttcaacgtatcgactggcggaggtga

SEQ ID NO: 13158 - RNA, 1266 nt, synthetic construct
  source 1..1266: mol_type = other RNA
atgatgtggtatctgattttgatcgccgtcgtaactggcattggtgtcatggttgccagatccagagtgaggggagctagtaggtcacgaccacccggagattctcggtggcgtcgacttagacggcccttccagcatccacccaccccaaggacatctggggaagtggtccggcaacccccttacgctttcagctatggtgcaggggggaaagggcgtttttgcgacctgtcacaggatctcaatctagaccgcctgaccacgtggaagctcccggtgctgcgcactcctgacgacatagcccagtggcttggactgcccgtgaatcgtcttgcctggctcgcacataggtgcaggagaggccgcccagaaggtgttcagcagtcccactatcactaccgctggctccctaaagcctcaggcggcatgcggttaatagagagtcctaagcgtgaactgaaagccatacagcggcggattctgaaggagattctgcaagccgtgccagttccagcggcggctcatggtttcgtgcgcggaaggtccatcaagacccatgccgtattgcacgagcggatgcatgtattagtgcggatcgatctcagggatttctatgcaagcgtaggcttcaaccgggtggtggcaattttcaggacgattgggtacccacgcgaggccgctctttggctggcaaggcttactaccgccgctttgcctacaaacttagctgggccccctgaagaccccggagctgtttggagatacagaagaaggcaccttccacagggagcgccgacaagccctgctctagccaatctcagtgcctactggctcgacaagcgtctgactgggctcgcccgagcatttggcgccaattactcgcgatatgctgacgacctgaccttttctggagatgacgcgttggaccccaagctccgggttctgatccaactgatcgaacaggtggtcagagatgagcgatttcactcccatagaaagaaaagacgcgtgctgcgaaggcaccagaggcaggtcgttacaggcgtcgtggtgaacgacaaacctaacgtgagccggagagattttgatcagctaaaggctgtgctgcacaactgtgtgcaatttggcccggcttctcagaatcgcgagggccatgcacacttcgctgcacacttgcgcggtcggatcgcccacgtccagcaattgaaccccagcagaggagcaaaactgctggccgtctacgggcagatcgattggggccgctga

SEQ ID NO: 13159 - RNA, 1452 nt, synthetic construct
  source 1..1452: mol_type = other RNA
atgatagcgccaatccttaattggaacccagtctacggaggctctactgtcgacagaataaggaaccgtcactggctgtgtgacccagctgtcgacacgctaggcaattcaatgcagactatgcattgccagggaaaggacgtgtttatgggactgtggtcctggttttggtcatggtggaggcccacagggagtaaccacgcactcccaagctctccgccagctaatagagcgtccgggcagaagcggcaatggattggcagtacgaccaccccgaaattgcctaggctgcgttaccgctcacctgaaatggtccgccaatggagaatcgagggccgaggaacccaggttgatcagttgccctacgtttatgctcgttatgcacgtactcgccgacggaaacagttcctgaatctcctgacagatacccgcgtagatctgttacagcagcacaggttgccagtgctcacaactctggatgagctgagccagtttctcgggctgcctataggccggttagcagggcttatccacctggcagaccacggacggcctccaaccgagaagaagtcccattactggctgaaatggattcgaaaaaagagatccgggcacagactcatcgaggctccaaagcccgctttgaaaaaagtccaggagattattctgcgccagattcttgatctagtgccagcacaccccgctgcacacggattcgtgcccaactgcgacattcttagcaacgcccagctgcacgcaggtagggctgtggtagtaaagttcgaccttaaagacttttatccctccgtgacattcagcaaagtcgttgccatcttccggagcctcgggtatagcagggaaatggccctctggctggcccgactgacaaccagtgccctacccatcggtatggctttccctgataagaatccttactccatcatgcagtttacgcggcgccatcttcctcaaggtgcgcccacatctcccgcgctggctaacttggcagcctattcgttggacgtgagactgactgggcttgccaggcgctttggagccatctacactcggtacgccgatgacttaaccttctcgggcgaccatcgattcctgaagcagttgaagcgattcgtgccgctgaccgaccaggtgattgtgcaatgcaggtttcatagccagcctgccaagaggcggattctcaggcagtctaaccgccaaactgttacaggtgttgtggtcaaccagtctcccaactgttcacggagagattatgatcagctcaaagccatcctgcataattgtgtaagacacggccaccaaacccagaatagagatcaacaagtggattttagggcccacttacagggcagagtggcccatatacggcatctcaatcctgacagaggcgtgcgcctgcagaagatcttcgaaaagatcaactggaatagttga

SEQ ID NO: 13160 - RNA, 1293 nt, synthetic construct
  source 1..1293: mol_type = other RNA
atggggttgctgaattggtttttctctttgctatttggatccccaaggagggctgccagtcctccgactgctatgagtcagactagcggggctcgctcaagcgcccaaactcacgggcgcgtgcgcttaaaaaaggaccgtccccggcagtggagcaacaggttccggtccacacgggttgtggtgcctaagaagccctatccatttgccaggaagtcaattaccggcagaggctacctcgacatgtccaccgacggtgatgaccaagccttgatagccgccggcctccccgtatttcaccatccccaagagctggcagactggttgaggctgcccctgaaggaacttgcgtggctgacaaaccacttcagacacggccggcccatagatcctcagcgtgcgcattaccactttagatggatagagaaaagaagaggcggatggcgactaatcgagagcccaaagcgcctgctgaaagctcttcagtcaaggattcttgacgaaatcctctccaggatcgccacacacagtgcggtgcacggcttcgttcttggccgttcgattctgaccaatgccgaaccacatgtcgggcaatgcgtcgtcgtgaaacttgacttagagtctttttacccttctatcaggctggctagaattgcccgtctcttccgaggactggggtatagccgagaggcagctatctggttaggacggctggtcacgtctcggttacctctcaaccagccgttcccaaccggaaaatccggcacatctagtctgacgctgtggccatacttccctgctcatctccctcagggagctccgacatctcccgcactgtccaacttggtgctttcgcgactggacgccagacttgccggtctggctcgcaagttcggggctacttacaccagatatgcagatgatctcacattctccggcccagagaggttcgcagcaagcctggctgtgtttatcccactagccaagcagatcattaggcgggagggtctgagagtgaaccgcggaaaaactcgcgtcctcaggcaggccggaagacagatcgtaaccggtgttgtggttaacgagcggcctaatatcgatcggcgggcatatgataccctcaaggcgattctgaccaattgtcatcggcatgggcccactagccagaaccgcgacaatcacccccagtttgcactgcatttgcgagggcgaattggccacgtgtcattgctcaatcctgcacgcggtgccaaactgctagccatatttgaacagatcgattgggaaagatga

SEQ ID NO: 13161 - RNA, 1281 nt, synthetic construct
  source 1..1281: mol_type = other RNA
atgggcttcttcgatcgcattaggagagcattgtccggagagcccccccccacttcaaaagcgggcgaaactggcgagcggcctcaagagtaccgcagttttcccagagtgaaacctgttcgaactgttgcccggcatctgcccgtgtgtcaaccagacgctttggtgcgcgtcgagaagccctacgcctttgcccgtaggtcgccgctcacaggtgagtatctcgacaggcgggtgggaggaaaggtcgaaagattgaggaagttccggcttccagagttcggcaccccggaggaactggcgacatggatggggcttcccgtgaagacaattgcttggctagctgattttcacaaccgcaacgccggcgaaaaaaccgccaaaaagcagcactatagatacacatggcgacgaaagcgtggcgggagagggtggaggctgatcgagagcccaaaacctgtgcttaagctggtccagcaacgtatcctacatgaaatactggatagagttccagcgcacggggccgcacatggttttgtcaaaggcaggagtattctcaccaatgctgcatcccatgccggaaagtatgtggtagtccgttgtgatcttgccaacttttatccgtccatcagcttcaaaagagtgcgggccgtttttgcggggctggggtataattctgagatcgcgtggtggttggctaggctatgtaccaattgcaccccagacacgctggaaggcccttctggaggagcactgggcaggtttgcagccggtagacatttgcctcagggcgcacctacttcaccagctctcgctaacctcagtgcatgggcattagatgtgcggctgagcggtttggcccgacgctttaatgtggcctacacacgatacgctgacgacctgacgttctccggtgatgagaagtgcttaaatgggctgaccatggcacaccttctggcctacatcagggggatcattcgcgacgaaagattcgttttccaccctactaagcgcaaactcgtcagacgcgggggaaggcagatcgtaacaggcttaaccgtgaaccggaaacctaacgtccctcggccatacttcgacaagctcaaggccaccctccacaactgcgccagacatggaccctcactgcacaatcgagagaacctgcccgatttccgcgctcacctggaaggccagatagctttcgtaaggagcgtgaatccacagaaggccgctcggctgcagcggatttttgaccggatagtgtgggagggttctggatga

SEQ ID NO: 13162 - RNA, 1287 nt, synthetic construct
  source 1..1287: mol_type = other RNA
atgggactggggttcttgcggcggctgtttgggggtggctctgacaagccgccgtcaggacggaagacaaaccctaaaagacgtgcactcaaacccactgtggtacctggcgctcatgctccagcgccaaccgctcatccgcttcccgtctttgagaagccttacgccttccccctgttcgcgccagatacacaaaaggagtctcgggcacgctttctggacgggcgcgttggtggaaagcctgaccgccagaagggttggaacctgccccgtctggagactcccgaggacttggctaagctgtgcggcgtgccacttaaaacccttgcttggctctgcgactaccacaggaggaacgcggatgaaaaggttaagaaaaagcagcattaccactacgtgtggaagcagaaaaaagccggaggctggcgattgattgaggccccaaaacctctgctcaaacactgtcagcagcgcgtgctcagagagatcctagatagggttccccctcatggcgccgcccatgcttttcgtgccggaagatccattaagaccaatgcagcagcccacgccggtaagtatgccatcgtgaaggctgacctgagttattttttcccatcgataaggttcaaaagggttgtgagtgtgttccgaggactggggtacaatctggaattagcacgatggctcgcccggttgtgtactaacagacttcctcccgatctctccatccccggaacaaacaatacctgggctttatactctgtgctaggccacctggcaacgagccttggacggcatgtcccacaaggggccccaacttcccctgctttggccaatctgtgtgcctgggcaatggatgtgagactcaatgggcttgcgaggaagttcggcgctgtctatacccgctatagcgacgatctgacgttttcaggatccgcagaactcatgggtaagcgaaggatcaattatttcgtgagatacgtgcgcggcattgtgaggaatgaacggttcaaatggcaccctaaaaaagtcagagtagtaagacggggcagccgccagatagtcacaggcctaacagttaacgagaagcccaacgtggggagggccgatttcgaaaccttaaaggcgatcctccacaactgcgtaaagcaggggcccgctagccagaatcgatcaggccacgcagactttcgcgcctatctgtctggcaaactggcctttgtcaagagtgtcaacccacaaaaagcagctagactggagcgggactttgccaagattaaatggtga

SEQ ID NO: 13163 - RNA, 1257 nt, synthetic construct
  source 1..1257: mol_type = other RNA
atgggtttgagctttctcaaaaagctatttggcggctctgaatccgagaggccttccgggaaaaaaggcaagccaagtcaacggcttcctaagactacactggcccggtacaagccaaaaccttacgttccaagcctgagggtgaaaggggctaagccatatcccttcgctcagcctgcgtgtcctggattccttgacgggcgcgtcggagaagatgcagcacgactgcagcgttacggcctgcagaggctccaaacacccgaggagctggccgcgtggcttaaaatccctctgaaaaccttggcttggatggccgactatcaccgtaccaactacctggaggacgttaagaagaagcagcactaccattacaaatgggtcaagaagaggtcctctgctggataccgactcattgaagctcccaaaccgatgctgaagatgatccagcggcgcattcatgaggaaattttgtccaaggtgcccccacatccagcagcccatgggttcgtggccggcagatctataatctccaatgccagccagcacgccggaaagtacgtcatactcaagattgatttacaggacttctatccgagcatcaaaagaaggagagtgttggcggtttttcgcggcctggggtacggagtggaggcttcacattggttaatgaggctttgcgttaactgcatcccctcgaattgtgacgcccccgatgattcttcaaaggcttttcactggatcattagaggtatgtacgtgccacgccacctgccacaaggtgcaccgacttctcccgccctggctaatttcgcggcatgggccttagatgtcagattggccgggctggcaaagaagtttggagtgacctatacacggtatgccgacgatctaacgttcagcagtgatagtaagctcatgaagggaaaaagcatgaccatgctgatccggtatgtccgcggcatcgtaaaagacgaaggcttcaggtggaatgcatcaaagaaagctgtggtgcgacgggggagtcgacaggtcgtgactggcctcacagtgaacgcaaaacctaacgttgcccggaaagagtttgacgcccttaaagctattctccacaattgcgccaaaaaagggcccgcatcccagaacagatcaggcgtcgcggacttcagggcacacctgcagggtcgcataggttttgtacgtagcgtgaacccccctaaggccgccagactgcaaaaggtatatgagaagattgcttggtga

SEQ ID NO: 13164 - RNA, 1299 nt, synthetic construct
  source 1..1299: mol_type = other RNA
atgggcattttcgactggctgtttgggaagaaaaagaaagccgcgtatggagcagactgggacactactcagtctgctccctcatatcagggtcctgcaaatcagcctgcgcccgagcagagagagccgtttataaatgcacccgctagaaggacgaaacgcacccgtacatggggcctcaagtggcggcagcaacgatccaagcaccctctagaaagcgtcccgaacgaagaggagcccttctcgctatggagcaatccattcaaacatcacgccctttatgggggcaccgaagccaaaccatccaaaggtggatccgccgccaggattgaggcactgggcttacctaatttggagaatctggatgaactggcagccctcctcggcgagacgagaaacaacctcctgcattacatcatccgtgatcgacctggcgataggcattatgtggcccgagacttacccaagaaatcaggagggacaagaatgcttctcgtccccaagccaagactcaaagctatacagcgcaagctcaatgcaaagcttatcaggcgactgcctttgaacccggcagcacacggcttcaggagaagccacgacgttctgagtggcgcttctgtgcatgtggctcggtccgtggtaatttccgtagacattgaagcctttttcccatctcttacatttcgcagggtcagtggctttctgcgatctatcggttacagcaggggaatcgctaccgccctggctaacctgatgacaatccggccttgtaatgtggctggcatcgggaggacagctgacactaggtacccacaactgccccaaggtgctcccaccagcccaggaatcgctaacgccatctgctggagaatggacaagcggttgtcagccctagcccgcaaattcggcggggattacactaggtacgccgatgatctgaccttctcagggttcgatgagatggccaaaggagcggggcggctgttacagttggtgcggaagattgttaaaactgaaggactggccctgaacgagaagaaaacacgcattatgcggaaggggagacaacagcgtgtcaccggtgtggttgtcaatcagcagaccaacgtgagtcgccgtgaatttgataagcttaaggcgattttgcacaactgcatcaaacatgggcctggcggacagaaccgggaaagcgtgccagacttcaaggagcacctgcgcggacgcatagcacacataagtcacattggccccgagagaggtagaaagctcaaggccatgtttgaccagatccggtggtga

SEQ ID NO: 13165 - RNA, 1212 nt, synthetic construct
  source 1..1212: mol_type = other RNA
atgggaattctggactggctgttcggtaggaaacggagactgcccgctgaaccagaagtttttgtccctaggcctgtggaggtgcccgattctcccaacgctcgggaaccctttctgaaccatcccatgccccggagcaagcgcagatggtattatgagcgcaccgctaatctgttctggagaaatggacgaagtaaagagccaaagtattctacttcaatcgaacctagcccaagtaggatcgaagccctcggcctgcctgacctccgagagttaagggacctggcagccctgcttggtgtagcgttgaaagacctgaagcagtactccgcccgtcctaaccacgccaatgggcattaccttcccctgtacattacaaaaaagaacggcaccaagcggctacttctggcgccaaaaccacggctcaaagctatccagagggccctacaccagaagctcgtcagaaagttgccgttgaacgaggctgtgcatggttttcggcgtggacgagactccctctcctcagcctctgcccacgtgggaagggacgtggttatctgcatggatatagaggagttctttccgtcgttcgatttccggagagttagcggatttttcagggcagtgggctattctagggaagtagccgtgatgctggccaacctgacaaccgtggcaccagatgacgtccctaatgcagagagcagatactgtcgagatatcccacaactgcctcagggcgcacctacaagtccggggttagccaatgctatttgttggagaatggacaagaggctggcagcacttgcgcaccggtttggagccgagtacacacgatacgccgatgacctcacgttttccggtcacgatgatttagctgatggggctaacaagttcgtcagaatggtgcgcgagattttgctctcagaggggttgtatgtcaatgaagataagactcgtatcatgagaaaatccagacagcaacgtgtgaccggcgtagtcgtgaacgagcggactaacgttagccgccgggaattcgaccgcctgaaggctatactgcacaattgcgcgaaacatggacccggcggccagaatcacgaacgccatgaggactttgcaggccacctacgcgggaggattgcctacttctgccatatagggcccgagaggggccgcaaacttatgcgcatgttcgaactcatcaactggtga

SEQ ID NO: 13166 - RNA, 1203 nt, synthetic construct
  source 1..1203: mol_type = other RNA
atgtgtgtcgcaaacaaacccaatccaaaggaaccgttcctgtcctcccccgaacacaccctcgaccgaaggcacaggaaaagatgggctgggcttgcctataggcgaaaacgatccaaatggcggatttcacctgtggctgatcagtcaatcgaaggctgtgactggcgcgataagctgggcaatgtcagcgcggacagagtgccgcaaggagttgccggaagagtagcaaccctcggattgcctgctataaattccgtggaagaccttgctgcactgatcgggatcacgcctaaccagttagctggttttgctctccggggggatgggcaaaggagccattacgtgggcagacccatcccaaaaaagtccggtggtgagagacggttgctcgtgccactgcctcgtctgaaagccgctcagcaagccctgcacaggaagctgatctcgctgctacccctacagccttgcgtgcacggctttcggctgaaacacgacgtcctcacaggaagtagcgttcatgttggaaggcaaatcgtaattggcatggatattgcagagttcttcccttcatttacatttcgccgcgtcagtggctatttccgtgccttagggtacagtagagggattgcaatcgcccttgcaagtcttaccattacatcttgcatggacgttcccgactataccccagaggcctactctaaccactcttacaccgagctgccacaaggtgcgcccacttctcccgggatagccaatgcgatctgttggaggatggataagcgactaagcgccctggcgcggaagtttggcggcgattacactagatatgctgacgatctcactttctcaggctttcaggacatggccgataacacaggccggttgctgcggattgtccgccagatcattgaaacagaggggttcgtggtaaacgagaataagactcggatcatgaggcgtggaagccagcagcgagtcacgggtgtggtggtgaacgagaagaccaacttgcctaggcgcgagttcgacaaaatcaaggccataatacacaactgcattaaacacggcccagctactcagaatcatgcccagcatgaaaattttaaggaacatctgcgcggtagagtggcacatgcacagcacattggaccggagcgcggacagaagttaaaggccatgttcgatagcatcgtgtggtga

SEQ ID NO: 13167 - RNA, 1380 nt, synthetic construct
  source 1..1380: mol_type = other RNA
atgggatttctggattggctgttcggcagaaagcggttcctgccaccgcacacacctccttcacccgtcggacccaggaatcccaatatccccaccatctccgaatccgggactgctcccgtaagaccgccagctgggggacaatcccagtcaggtcagcacagcctggggagtcgatacaatccccgcatcctgcgtccccgcagaaggagatctagccggcctagagagattgatgccgggaaatccgagcatctggaccggtggccacacgatgaattagacaggcctgaccctgccagtttaaccctgccagcacctcgagcggactgggttccgttgggcgatcagagcgccctcgctgctctcctgggaatccagcccactgacctcaagtactggctagtaggccatcatctggatgaaaactatatactccgcgaaatccctaaaaagagcggtggaacccgattgctgatggcacctatgccaaggttgaaggcactccagagacaactccaacaggcactggtgtctcggctcccactgtcaccgtcggtgcatggcttcaggcgacgccatgacgtccttaccaatgcagcggtgcatgtggggaaacgggtcgtggtttgcatggatatagcagacttcttcccaagcttcgacctgagaagggtgtgcgggtattttcgctggcttggctatagtcggagtgtcgccctgtccttggctagtctcacaaccgctgactcattcaacgcacgactggccaaaggacgcggcaggacaggcctttcctctgattggacagagcggaacgaggtcgaaaatcggtgtcaaagcgtgaacaagatccatcggactagcccacttcgttaccgcggatatagactaccacagggcgcccccacttctcctgggattgcgaatgccattgtatggagaatggataagcgtctgtctgctttggcgcggcggttcggaggtgattacacgcgctacgccgatgacctcacattttcggggtttgagaaattagccaagcacactcgtatgtttattaaacttgtggagaagatcgtgcacacggaaggcctagctataaacagaaagaagactcgcatcatgcgttccggcagacggcagagggttaccggtgtcgtggtgaaccgccagaccaacttagctaggagagactttgacttgcttaaagccatcctgcacaactgtattaccaaaggcccctctacacagaatcgaagcaatcaccccaacttcagggagcacctgagagggagggttgcccacgccctccacattggtcctgagaggggcgccaagctgcagcaactgtttaaccagattgattggtcaaggtga

SEQ ID NO: 13168 - RNA, 1164 nt, synthetic construct
  source 1..1164: mol_type = other RNA
atgagaatgcttaagccccgttataggcggtcaaaagatccaaaaagcatcgaagggaagcaaaacgaaccgattggctactggcatgaacagatgggcgggacagttaaggacccggtgaaaggtggaaatccatcacgaaccgctcagctgggcttgccctctatcccccatgccgacgcactcgcgtctctgcttggtatatcgacaagagccctggaggggtggattggcgggctacttaatgagcaaaactacgtagtgcgcggtatagccaaaaaatcaggcggaacgaggtacctcatggcccctatgcctaagctgaaggctttgcagcgaacactgagaaccagcttggttgataaactaccactgaacgcctgcgtacacggcttccggcgcgatcacgacatcctgtccaacgggacagtgcacgtgaacaagagggtggttatttgtatggatgtgttgcaattcttcccttccttcgatctgcgcagagtttgcggatatttccggtggttaggctacagtcgcgggatcgctctgtccctggccaagtttactacggccgacagttttaatggtcagttagtctccgcatccggacgggaggggtttgctcagagcaccccagcctacgtagccctgaaaaatcagtacaggcagcctcaattgccccagggagcccctacttcacccggcatcgcaaatgctattgtctggagaatggacaagagactcaccgcacttgctcgtaagtttggcggcgattatacacgctatgccgacgacctgactttctctgggttcgagaagatggctaaacatgccaaattaatcgtggctctggtggagaagattgtccacactgaaggacttgcaataaataagaagaagaccaggatcatgcgtaaaggtcgccagcagagggtgaccggagtcgtggtgaataaacaaactaatgccagccgggagcagttcgatctcctcaaggcaattctccataactgtgcgaaaaagggccccagcacccagaaccgatctaaccacccaaactttaaagaacacctgcggggacgagtcgcgcatattgctcacatcggccctgagaggggggcgaaactgaagaagctctttgacgcaatcgactggagtagatga

SEQ ID NO: 13169 - RNA, 1401 nt, synthetic construct
  source 1..1401: mol_type = other RNA
atgggcctatttgactggttgtttgggcgcaaaaagaaagacccccctacctataggaatccatacccccccaaagtgcactcattcagcgagttctctgccgactctaccttgcccgcgcctaggcagcaggctcgtaggaacaagcccactcgtcgcaaactgcagccatttgctccgcagtcctacaagggccatagaacactcggcctgtcctggagaagagaacgcagtaaggaaccagttgatcgagttcctaatagctacctgagtgtggcccattttcagcacttcggagggaccccatcaagcataccagagggcggcgatgccgcaaaattgctcaatgtcggtctacctgtcctgcgccattttaacgaacttgccgctctactggaaattgattctactagtctttacaaactcgtcgtgaggactagcgcccagcattatctttttcatgagatcgctaagaagtcgggcggaatccgtctcttaatggcgcccttgccacgcatgaaagctgcccaaaggcgacttctccaggcattagtaagcaaggtcccgttgcacctggctgcccacgggtttcgagaaggacaggatgtactgacgaacgccggccctcacgtaggaaagccaattgtcatatgtatggacattagtgacttcttcccttcttttacattccggagagtctccggcttcttcaggcacctggggtatccacgtgggatcgcggttgcgctggcaaatctgactacttggtcaccaagaggccagttccagctgccgcaaacaaccgggcggaacctgcgatccgtggactacaaagaacgcaaggtgcagcttgctcgggccgagtggctggattcaggcggaaacgagatcccttcccggatgtggccccagttacctcaaggtgcccccactagccccgggttagccaacgctatcgtgtggaggatggacaaacgactttctgcactggcccgcaagttcgggggagactacaccagatatgccgacgacctcacgttctctggttttgagaaaatggctgagcatagcagaaccctgattagcttggtggagaaaatagtgaagaccgaaggactcaccattaacgtgaataaaacaagggtgatgcggaagggcagaagacaaaaggtgacaggtgttgtggtcaacaagcagaccaacgcctcacgggaacagtttgatctgctgaaggcaatcctccacaattgcgcaaaaaaagggccgagtacacagaatcggtccaaccatcccaatttcaaggagcacctgaggggacgggttgcacacattgctcacatcggccctgagcgcggtgcaaagctgaagaagctctttgatcaaatcgattggtcccggtga

SEQ ID NO: 13170 - RNA, 1188 nt, synthetic construct
  source 1..1188: mol_type = other RNA
atgagttttcggctgcgtcgcagcaaagagcatataggacctgtgaaggacctgacactctctggtagccgtaatcctatgaccggggaagcaagttccgtgggagcaattggcaatatcggaggtagcgcaaggcacccagatatcgggtttgactccgctaccatccgctcactggggcttcctgagattgaacacctcgatcagctggcccaagtgctgcagatcgaccggaaccagctagtttggttggccgcaagacctgccttctctgaaaatactgatgcccactatacgctgaaagcgatccccaagaaagccggcggcaggagattgctcatggtcccgctgccactcctgaagcgggcacagcagagactcctcgcggaactggttagaaaactgccagtgcatgaggccgctcacggatttagggttcagagaaacacacttacaggagcttccattcacgtgggtaaggacgtggtgatagggctggatattgccgatttctttccctcattcacatttagaagagtgtcggggtacttccgctcacgaggctacggccgagggatctctgtagccttagctaatctgactactaacaggctgcttgacactatcaccaaggacggaaaaaggtggaagtatcctaaacggaatgcgtttcccgagctttttgaacatccccctcacccaatattaccccaaggcgcccccacgtctcccggtattgccaacgctatctgttggaggatggacaaacgcttggcagccctggctctaaagtttggcggcgactatacccgctacgccgacgacttgaccttcagcggattcggggacatggctaggggcgctgagaggctgattaagctcgtacggaaaattgtcgagactgagggtctagctcttaacgaaaagaagacacgcgtaatgcgccagggacggcaacaacgggttaccggcgtcgtcgtgaatgatcagaccaatgtgagtcgacgagatttcgatcgactgaaggccatcttacataactgcatcaaacacggcccacacgggcagaacagagagaacgtcccagatttcgagcagcatttgcgggggcggatcgcacatgtgtcccacattggaccggaacgcggcaggaagctcatgagaatgttcgagcagatacgttggtga

SEQ ID NO: 13171 - RNA, 1371 nt, synthetic construct
  source 1..1371: mol_type = other RNA
atgggctttttcgactggttgttcgggaagaagaaagacccttatgggggcaaattgcaaaagggctattcatccccacgagcacagccacagccggccaaaacctaccaacaccagcctcagggctacgggggacctgtaccaccacctacaccccagcagcaacgtgccgtaggtgtgaggttcaggtttctcaagtggcgcagagcaagatctaaagatccactcccccctctgcccgaccaaaccattagcggtggcatagaccccatgaccggagcctataccgagccgggtgccatcgctggattgggagggactgcgcaacatccagacccacactttaagcctgatcgggtgagagccgctgggttgcccgagattccccatttggacgcgcttgctgctttagtcggagtcggtcgtaatactctggtgtggcttgctgggaaacctctggctagtgagggctgtgattcccactataccgtcaaagccatcgataaaccgagcggaggccaacggctgctgatggttccgctgcctaaactcaaggccgttcagcgcgcacttgtggaccgcctgattaataagctcccagttcatgatgccgcgcatggctttcggaagggaagagacgtgctgagcggtgcaagtgtccacgtgggcaaggacgtcgtgatctctctcgacatccgcgatttctttccaagcttcaccttccgacgggtgtcgggctactttcgcagtttggggtacggaaggggaactgccgtagctctcgcaaatctgacaaccgcgagacttaacgacgcccaggtcaaacagggcaaaaggtgggtgtacgctgctcaggtacacaagttacggacatactcccacccagaactcccccagggagctcccacatcacctggaatctctaacgcaatctgccgacggatggacaagagactggccggtctggccagaaagttcggcgccgactatacgcgatatgccgatgacatgacgttttccgggtccgatgacctggccttccacgcacccaaatttataggccttgtgacaaagattgttcagtcagaggggctagcactaaatgataagaagactcgcgtgatgaggcagggcagacagcagagggtgacaggggtcgttgtgaatcataagactaatgtgtcaaggcgcgattacgatcgtctgaaggcaatcctgaacaactgcatcaagaggggcccccacggtgaaaacagggagaaccatcctgatttccggggatggttacaggggaaaattgcccacgttagccatattgggcccgaacggggccgaaaactccaggctctgttctctcagattagatggtga

SEQ ID NO: 13172 - RNA, 1338 nt, synthetic construct
  source 1..1338: mol_type = other RNA
atgggcttcttcgactggctatttggcaaaaagaaggacccatattcaggcaacgtccagaaggactataccagtccaaggcaaagaccccagacggcccagacatatccacagcaaccccacggctacggttcacctgtaccgcccccgaccgtgcagcaacagcagagtctgggcatccgtgatcgctacctgagctggcgccggaatagaagtcgagctcacgtaccacctgtggctgatcagacccttggcggcaacgaacatctagggcacttgggaggtacttccagacaccctgacaggcaccagaatgccgcggctttgcaagcggctggacttcccctcctgccccaccttgacgctctggcagcaatggtgggggtggagctgaagacactggtgtggctcgcctcgaaacccgtcgcttccgatgaatgtgaatcccactataccatcaaagcaatcgataagccttccggcggcaagcgtctgctgatggtccctttacccaaactgaaggccgttcagcgagccctcgtcgagaaactcgttaacaaacttcccgtgcatgaggccgcacatggcttcaggaaaggaagagatgtgctgacgggagccagcgtacacgtgggtaaggatgtagtcatttgcgctgacattcgggacttttttccatcattcacttttcggcgcgtcgcagggtatttccgctctttggggtacggacgcggaacagcagtggccctcgccaatttgactactgcccgaattaatgacgccctggttcggcagggagacacatggacctacgcggcagaagtttacaaggtccacctctgggggcatccagaattgcctcaaggcgccccgacttctcccgggatagccaacgctatctgcagacgtatggataagagactgaccggccttgcccgcaagttcggggcagattataccaggtacgcggacgacctgactttttctggtggggatgacctggccttccacgcaagcaagttcctcgggctggtgcgccagattgtgcagacagagggactaaccttgaatgacaagaaaacaaggataatgcggcagggaaggcagcagcgagttacaggtgtggttgtgaatgataagacgaacgtgtctcgaagagactacgacaggttaaaagccatcctgcacaattgtgtgaagaggggccctcatggtgagaaccgggataaccatcctgattttagaggatggctccagggcaaaatcgctcatatcagccatattggtccagagcgggggaggaaactgatggctttatttcaacagatacggtggtga

SEQ ID NO: 13173 - RNA, 1335 nt, synthetic construct
  source 1..1335: mol_type = other RNA
atgggctttttcgactggctgtttggcaaaaaaaaggacccatacggtcccaggcgggatccctatcagcagcaacccaaagcctatgggggacccgtgcccccaccaactgctcaacaggcttctgcaattggcctgaggaacatcttccttagctggcgaagacggcgttccaaaggccctgtcccagcccaaccggaccaaaccattcgcggtggattgaaccctcagacaggagcttgggtggaccctggagccatcagctccatcggcggcacacgtcagcatcccgatccatactacgatagtgcaaaggtcagggccgctggattgcccgacttaccccatatagatgctatggcggaggtgcttcgcgtcgataggcggaccctggtgtggctagccgcgaaacctgttccgggcgacagcctggatagtcactacacacttaaggaaatgcctaagtcgagtggcggtacccggctgctgatggtcccactgcctaagctgaaggctgtgcagcgggccttggtggaaaaactagtcaacaaactacctatccacgaggcagcacatgggttccgcaaaggtcgcgacgttctgagcggggcctctgagcacgtcggaaaggacgtggtaatctgcgctgacattagagattttttccccagcttcacctttcggcgggtttccggatattttcgctcattagggtacgggcggggcacagcggtggcattagccaatttgaccaccggtagactgatggatgccagagtccagatgaacggaaggtggcagtacgccgctaagctcaagcatccagaaacgcacgcacgatatcacccggaactgcctcaaggggccccaacctctcctggaattgcaaatgccatctgcaggcgcatggacaaaaggctcaccgggctggctcgaaaattcggcgccgactacactcgttatgcagacgatctgacattctcagggggcgatgaccttgcctttcacgcgtcaaagttcctcggtctggttaggcagatagtgcagactgagggccttactctcaacgacaagaagactaggatcatgcgacaaggacgccagcagcgcgttacgggggtggtagtgaatgataagacaaatgtgtctcggagagattatgacagactcaaggcaattctgcacaattgtgtaaagagaggaccgcatggcgagaatcgtgataaccacccagacttcagggggtggttgcagggcaaaatagctcatgtgtcccacattggtcccgagagagggcgaaagctcatggccctctttaaacagatcagatggtga

SEQ ID NO: 13174 - RNA, 1335 nt, synthetic construct
  source 1..1335: mol_type = other RNA
atgggaattttcgactggctgtttgggaagaaaaagaaagatccttatggtgggggcggcctgagcaaggattatggtgctcctaagccatacagtgatatgcccaggcagtaccagcggccatcagaccctgctccaccacgtaccttcgaaccggacaatcgcgagataaatctgtcgtttcggctgggacgatccaaacaacccgtgaccccactgagggaccagacagtagggaggaatgctaagccgggtacaaccaacttagaccatctgggcggcaccagggataaccccgatccttatacagacgtcatgaaactccgcagtaacggcctcccagagatcgacagcctggatgctcttgccgaactggtgggatccactcgcgagtcactgctctttctggcagccaggtctggatgggataggcccgcccattactccctcaggcagattccaaagaagagcggaggcacccggttactaatggcgcctatgcccaagctgaaggcagtgcagagagcactacatggcaaactggtgcagctccttcctgttcacgaagctgcgcatggcttcaggaaggggcgagacgctcttagcgcagcaacccctcacgttgggaaggacgtagtcatatctgtcgacatcgagaacttcttcccctcttttactttccgtagggtggctgggtacttgcgaacactgggatacggtcggggcgtcgcagtagccattgccaacttgacaactgccagactcgccgacggcaaatacaaagagggctcaagatgggttcctggacacaacctccgccaccccgatatggccggacgctaccaccccgaattacctcagggagcccccacatcccccggtctagcaaatgccatctgcctccgcatggataagagattggacgctcttgccagaaaatttggcgcgacctatacgcgatatgccgacgacttgactttttctggctatgatgacctggctaagagtgccgggaacctgttgcagctgatcagacaaatagttcggacagagggtcttcgcctcaatgaacagaaaaccagaatcatgaggggaggtcggcagcaacgagtcactggcgtggtggtgaaccagaaaacgaatgtgccaagacgcgaatacgggactttgaaggccatccttcataactgtattaaacacggaccagcggggcagaatcgggataatcacgcagatttcaaggagcacctgcgggggagaattgctcatgtgagccacatcggtccggagcgtgggagaaaactgatgcgtatgttcgagcaaattcggtggtga

SEQ ID NO: 13175 - RNA, 1356 nt, synthetic construct
  source 1..1356: mol_type = other RNA
atgggcctgttcgattggttgtttggcaagaagaaggacccctatgggactaagccaggccaggactatggagacaaggatcacgcccccaaaccctacaatgaccagcctaaacagtaccagtcagcacagaagccctaccaagctcctccaaagtcatacggtgctccaccaccgaaacctggcgagaggacggagaagctttcattccgacaggcccgttccaacaaacccgtcgatccgctcgccgatcagaccatcaagacacctcggagagggcccaacttggcccaccttggcgggactagggaaagtcccgaccctcatacagatgttattaagctgcgcaacaacggaatgccagaaatcgcccacctggacgatctggctgacttagtgggcgcaacaagaaatgagataattttcctggcctctcgcccaggatggggagaaccttcccattataccctgaaagagcttcgcaaaaagagcggcgctacacgcatgctcatggtgcctatgcccagaatgaaagccgtccaaagggctctaaatgctaaactcatctccaggctgcctgtacacgaagcagcccatggcttccggaaaggacgtgacgtcctcaccagcgcaagcccgcatgtggggaaggatgtggttatatccgtggatatcgaggacttcttcccatcctttaccttccggcgggtcagtggctactttcggaatctgggttatggcagaggtgtgagtgtggctcttgccaatctgatgactgcacgcctgagagacggtgcaaccaaacagggaaacaagtggaaaccggtcgcgtatggaagccatcccgatattggaaagcggtaccaccctgagatcccccaaggggctccaacctctccaggactggcaaatgccatcagccgccggatggataagcgactgcacgcgttggcccagaaattcgcagccgactacacacgatatgccgacgatttgactttttctggcaatgatgaactggcgaaatcggttgggaacctactccaaattgtgagacaaattgtgcgaaccgaagggctccgtttaaacgagaaaaaaacaaggattatgcggaagggtaagcagcagcgcgttacgggggtggtagtaaacaagcagactaatgtgtcaagacgggaatacgacaaactcaaggctatactgcacaactgcattaagcacggcccaaccggccagaacagggagaatgtgcctgactttagggaacaccttagagggaggatcgcgcatgtctctcatatcggtcccgagcgcgggcgaaagttaatgagaatgtttgagcagatcaggtggtga

SEQ ID NO: 13176 - RNA, 1359 nt, synthetic construct
  source 1..1359: mol_type = other RNA
atgggcctctttgactggttgtttggcaaaaagaaaaaggatccttatgggggctctttcagacaggattatgatagcggacgctcgtataatgaccaaccagtcgagcggtaccagagcaaagctaccagaaggcctccagccgtcgaatcccccagacagaaacataggactgggaaattaagctttcggcgcctgcggtctaaccaggcccttgatccgctacccgaccagaccttagacggccgcaacccgaacaccggccaactgacaggttccccactgtcacaccttggaggcacaaggcaagctcctgaccctcacacggacgctcagcgactgaggaatcacgggctgccagtagtggagcacctggatgacctggcagaactgctgggtaccgctcgggatgaactggtgtacttgagtgcacgacccactgttgaggaacctacccattacacgttgaaggaactcccaaagaagagcggagggactcgtctcctgatggtgcctatgcccagacttaagtcactccagcgaactttgaatgcaaagctgatttcactcctgcccgtgcacgactgcgtacatgggtttcgtactggacgcgacgttttgtcgtccgccagcgctcacgtctccaaagatgtgctagtatccatggacattgaagatttcttcccctcatttacattcaggagggtggcaggatatttccgcagtcttggctacggccgagggacatgcgtggcactcgcgaacctgacaaccttccgtctcgctgacgcaagtgtgaaaagaagtaacaggaacgcctggaagcttgcgtccgtccatcatcacccagacgcaatgaggagatggcatccagaacttcctcagggggccccgacatctcccggaatagctaatgctatcgcccggagaatggataagcggctgcacgccctcgccctcaaattcggtgccgattacactagatacgccgacgatttgaccttttctggcggcgaggagttagccaagggcgttgggcgacttctgatgctagcgagaaagatcgtgaagacagaaggcctcgccctgaatgagaacaaaacccgcataatgcgcaaaggacggcagcaacgcgtcacgggagttgtggtcaatcaacagaccaatgtgagccgcagggacttcgataagttaaaggctatcctgcacaactgtatcaaacacggtcctgggggtcagaatcgggagagcgtgcccgacttcaaagagcatctgagaggcaggatcgcgcacatttctcatattggacccgagcgtggtcggaagctgaaggccatgtttgagcagatccggtggtga

SEQ ID NO: 13177 - RNA, 1008 nt, synthetic construct
  source 1..1008: mol_type = other RNA
atgcccgcccttccgcatctggatgccatggcagagctgttgggcacccctagaagcgaactacagtggctagcgcaccggcccgtgcaggaaatagcaaaatctcatgtgcactataggctctttgaagtgcgcaaaaagtcaggcggcacacgccttttggcagcacctctcccacgccttaaggctgtccagcaccagttgttagacaagctgatctcccgattacccgttcatggggccgcccatggtttccgacggggaagaggaattctgagtggggcaaacgtgcacgtagggaaggatgtgctcgtatgctttgacatcaaggatttcttcccaaccttctccttcaggcgtgtctcagggtattttagatggctcggctacggcaggggcattgcaaatgccatcgctctgctgaccactgcggcacttcacgaggccacaaccgggggaaaggggcagtggactcccgcttacaacacaaggcaccccgacctggtgagacggcatcacccagaattgccgcaaggcgctccaactagccctggccttgccaatgccatttgctggcgaatggataagcgcctgagcgcgctggcttctaaattcggaggtgattatactaggtacgctgacgacctgacctttagtggtggtcaagatctcgctcgccatgccgataacctgatcaagctggttcgcaaaatcgtgcggaccgaggggctggagttgaatgagcagaaaacgcgtgtcatgagaaaaggacggcagcagagagtcacgggagttgtggttaacgaaaagacaaacttatccaggcgggattttgacaagctgaaggccattctgcacaattgtgccaaacacggtccagctgggcagaatagagcagaccatcctgacttcaagggacacctccaaggacgtgtcgcccacgcgatgcatatcggccctgagaggggcgccaagctcaaagctatgtttgacaaaatagtgtggtga

SEQ ID NO: 13178 - RNA, 1350 nt, synthetic construct
  source 1..1350: mol_type = other RNA
atgggcctgttcgactggctattcggaaagaaacgggacgaatatggcgcaggcctcaatcgcagctatccaccttcacagccccagcaagtacgcccagtccccagtcaagggggccctgttccttcagccgggactccacagaatggcaagagaacatcctaccttagctggagacgaagacgctcgcgggagagcgtagtatctgtgcgcgatcagacactggggggatctgttgatccacaaactgggcgacattcagaggctggcgccataggcaatttaggtggaagtcctagacacccagacccctatttcgacgctggtcgagttgcctcccatgagctgcccgctttgcctcatctggactcccttgcagccctcgtggaaactccactcccggaactcaaatggttgagcgtgatgccacccttcggggataagatgtggggccactattgccttttcgaggtcaagaagaagtctggaggcacgcgacttttggccgcgccattacccaggctgaaggccgtccagcgcagaatcctagataagctggtgagtaggctgccggtgcatggtgctgcacacggcttccgccgaggtaggggaatcttgagcggcgcgaccgtacatgttggaaaagacgtccttgtctgctttgatattaaagactttttcccctcctttaccttcaggagagtctctggcttctttcggtggttggggtacggaaggggtattgcgaacgccatcgccgctttgactacagtgcgtctgaccgacaccaaccgccgtcgcgaagggaagtgggaacaccctgggctggcaaagcatcctgacatgctcaaaagaagacagccggaattaccccaaggcgcccccacttcccctggattagcaaatgccatctgttggaggatggacaaacgtcttagtgcactggcacggaagttcgggggagattacacaagatacgccgatgatctgacatttagcggcggggaggactttgctaggcacgctgccaacctcattaaactggtgcggaagatcgtgcggacggagggactggccctcaatgagaagaaaacccgcgtgatgcggaaagctcggcagcagagggtgaccggtgtggtcgtgaacgaaaagaccaatctatgccgtcgggattttgacaagctgaaagcaattctgcacaactgtgcaaagcacgggcccgctggacagaacctggagaaccaccctgattttaaggggcatctgcagggtagggttgcccacgccctccacataggcccagagagaggcgcgaggctcaaagctctgtttgataaaatcgtgtggtga

SEQ ID NO: 13179 - RNA, 1143 nt, synthetic construct
  source 1..1143: mol_type = other RNA
atgcgcgaccagacgttgggtggcgcccgtaacccgcaaacaggagctccatccgttgccggggcaattagcggggtagggggaactccaggacatcccgacccctacttcgatgcaggcagggtcgcatctcacgaactcccagctttgacccacctggatgcactggccgaacttatcgaaactcccagaaacgagctcctgtggctggcagtcaagccccctttttctaataagctctggggacactatcacctattcgaggtgaggaagaagagcggtggcactagattgttagctgcgcctatgcctagactgaaagcagttcagcggaagctactggacaaacttgtgtcaagactgccggtgcacggagccgcccatggtttcaggagaggccgagggattctcagtggcgctaatgtgcacgtcggcaaggacgtcctcgtgtgtttggatatcaaggattttttcccctcgtttaccttcaggcgtgtatccggttactttcggtggctgggatatggccggggcatagcgaatgctatcgctgccctcactactgcccggctcacagagacaaaccagaggcaaggaaccacatgggctgctgcccatacgggaatgcatccagatatgaaccatcgccgacacccagaacttccccaaggggctcctacctcaccagggctggctaatgcaatttgctggcgcatggacaaacgactgtccgcgctggcccggaaattcggaggtgattataccaggtacgccgatgacttaaccttcagtggggggcaggacatggcaagacacacagacaacctgataaaacttgttcggaagattgtgcgtagcgagggcttgcagcttaacgatcctaaaactagagtgatgcagaaaggtcggcagcaacgagtgaccggggtggtggtaaatgaaaagaccaacttatctaggcgcgagtttgaccgcctaaaagcgatcctgcacaattgcgtcaagcacggccccgccggccaaaacagggagaatcatacagatttcaagggacatctgcagggccgcgttgcccatgccatgcacatcgggcctgagagaggcgccaagctgaaggccatctttgacaaaattgtgtggtga

SEQ ID NO: 13180 - RNA, 1386 nt, synthetic construct
  source 1..1386: mol_type = other RNA
atgggctttttcgattggctgttccgtaggaaaaaagacgattattccaaagggctacagcggggataccagcgaccctcatctcatcctcaaccgttgccacctcagccggcgacaccacctcagagagctggaacccccccagaacccgcaggatggggatctccacctcccccaccaccgtggaagaatagaacccaccgcagctggatcaaccggcgatctaggactcctccagagccccagaggagtgagccgattccaaagggacggcctggtgaacttcgccacctgggcggtacagccaaacatcccgaccctcattttaagcccggcagagttcaagagctggggttaccagccataccccacctggatgctttggctacactgctcggaacaaccatttcgaaggtggccggctttgcagtgcgacctcccagcaccgctatgaattgggtgcattacttcctccaccctgtgcccaaaaagtccgggggcactagactcctcatggttccttgccccgagcttaagcggttgcagagacgactccatgaagtcctcgtgagaaagcttcctctacacgaggctgcccacggttttcgggctaggcgtgatagcctgtccaacgccaccgcgcatgctggcaaagcagtcgttatatgtatggatatcgcggattttttccctagcttcgactttagaagggtgtgtggctatctgaggtgggcagggtacggaagaggagtggccattgctttggctaatttgacgaccaactcccggaatgaatgcaagatgcgccgcaaacccgacgtccagaaaggggccggaacactgctgtcagcctggaaatgcgtcccgaagcaccccgacttactcgcaggctcactgccagaattaccccaggggagtcctaccagtccaggccttgcaaacgccatctgtaggcgcatggacaagcgcctcgcagcgttggccagaaagtttggcggtgcatatacccggtacgctgatgacctgactttctcagggggcgaagaaatgtcccgcagggccggtcgtcttatgcaactggcccgaaaagtaatcactagcgaagggctagcagttaatgagaaaaagacacgtgtgatgcggcgcggtcgccaccaaagagtaacgggcgtcgtggtgaatgagaagccaaacctgcctcgagccgagttcgacaggctgaaagcgatcctgactaattgtatccggcatggacccgcctctcagaacagggagcagcacgccgacttcagagcccacctccacgggtgcgtagcttatgccgcacatattgctccagccagggggggcaagctggtgaagctgttcaacgagattcggtggtga

SEQ ID NO: 13181 - RNA, 1092 nt, synthetic construct
  source 1..1092: mol_type = other RNA
atgggcctgggaaacttcttcagaaaactgttcggggggggagatgactatcagcgacggcccgggggtggtgattatcgcaagccatcagttggcgcaacgcacgcttcacctgccgcccatggtggaccacctccaccacctcctgccgcatcgcgtgtacatgccggcgatccggcttacagaagtcctcaatccggccaggccataaacgacagggaaatcactgatgccctgaagcacccctaccgaaggaaaaggcgcagcaagcaccccctgcaggggcatattcacgaaactggcagcagcaactggttttctccagatagaactaccaaccctgtgagacttaatgccctgggcctaccagtgctgtctactcctgtcgagctggttcccctgctcggcgaagagctcaaaaggctttatgattttgcttacgcaaatgatagggattccgaggacagccactacgcgtatcgacttgtgccaaagaaacgcggggggtggcggtttatagaagcccccaagccccgccttaaggctgttcagaagcgcattaaggagattttcgttgacaagctgcccgtctctaatcatgctcacggctttctccggaagagggatatggtgtctaatgcaaccccccacgtgggaaaagcctgcgtgatctgtgcggacatctccgacttcttccccacaatcggattcaaccgggtagccggctttttacgcagttgtggctacggtagaatggtggctgcagctctggctatgctcacgacaaatgcccattgggccagtgcggacgtgttgattggtgatgaggtcgtgaaaaacaaagacgcaaggaagcgggcccctgaggtattcaaatataccggggcgtacagacgtaccccacaaggagcaccgacatccccgggattggcaaacgccatctgctggcgtatggacaagcggctcgccggcttggccaagaaatttaatgccgtgtatacccgatacgcagacgacctgacattttcagggggggtcgaactagctggaagagcaggcgctttcttaaggtacgtggctcggatcgtctga

SEQ ID NO: 13182 - RNA, 1146 nt, synthetic construct
  source 1..1146: mol_type = other RNA
atgggattcttcagctggctgagggggatgctctttccacctgccacacccttaccgcctggaatgacgagagccgaagcacgtaggcgacgccaacccgattttttaccaaggccacgccgacgaagaccaagaaggcaccgttacggcagaccagaggccactttcagaccagctgaactggctcggtttgacctccccgcgcttgctactgtggaagatcttgcagcagcactgggtgtcacaacgggcaagcttcgatggctgacatggccctgccgcgatcggacctgtgaccattatgtgcggcgtcgggtgcccaaaaagagtgggggtgagcggttgctctgtgcacctaaagcagaaacccgcagggctcaggactggatctttcacgaaatcttggcccgtgtcccggtatcatcagccgcgcatggctttatccggggtcggtctatagtgtcaaacgcctccgcacatgtcggaaaacgggtggtggtgtccatggatctagaagattttttcccctccgtcagtatggccaccgtcgttggcctcttcgagtggctcggatacagcaaggaggttgcctggcacctctctatgctgtgtacctgcgcctatgggagacgcagagccttacctcaaggttcgcccactagtcccgctatttctaacctgatatgctggaaaatggaccggcgcctggctgggctggctagaaaattcggcgccacttatactcgatacggggacgacctgacctttagcggacacttccagcgccctgacaggcctggtaggctgatcggaattgcccgagcgattattagcgaggagggcttcgaggttgcccgccacaagaccagaatcatgaggcacaacaggcggcagtctgttacaggcttggtagtaaatgagaggaccggaatcggccgcgatgaagttagaaggctgcgcgccatcttgcacaattgcaaggtgcatggggtggagagccagaatagagagggcgacgagctattcaaggagcggcttagggggaagattgccctggtgaaaatggcgaaccctgaccagggagctaagctgctcgctgcatttcatgaagtggattggggcgcaacagcttccccaaaggggtga

SEQ ID NO: 13183 - RNA, 1152 nt, synthetic construct
  source 1..1152: mol_type = other RNA
atgtcttggatgtactttctgctggctggggctgccgtgctgctactcttggcactctccattccgcgagccgagcaacctgccgttgcagagcccaaatccagaagggggccacgcagaccccttccaggatcacgctggaggacccagcaccctggcgattctgaccgtttacgatctctcgggttgcctgaattaagagatacaagagatctgctgcggtggctgagactgtccttgcgggagctggtgccacttgctgaccacgccaatcgtgccacgagagacagaaacaactatatagagtggaccgtgcctaaaagacgcggtggcaagcgcgtgatcgcagctccaaagaagcgcttaaaggctatacagaccagaattcttcgcgagattctggacagggtccctcctagcgcagccgctcatggctttgttcgggggaggaacatcgtgagcaatgccgcccctcatgtgggtagggccatcgtggtaaacttcgacctcgtggatttcttcgaacacgtccattttccccgagtaatgggcgtgttccgccgcctgggctatagcaaagaagtggctcgctggttggcctacctgtgtacacataggccccttctagttgcgggagatggacacgggccactagcggctgcaaggcatgctgtccagggtgcccccactagtccagcggttagcaacctggccgtacataggcttgatgccagactcgcaggcctggctaggcgttttggctgcacttacacaaggtatgccgatgacttgactttctcaggcgacgaaccgtttaagagatctctcaagcgtttcgtccccctggttaggcgcatcgtatccagcgaacggttccgacttcacgaaggaaaaatgcggttcctgcgggcaggaaggcggcaagaagtgaccggggtcgtggtcaatagaaagatcaacgcacgacgcgaggagtatgaccggttgaaagcgattatccacaatgctcgtaggtccggaagtctggagtcgcagaatcgggagggtcggccccactttagggcctacctcctcggacgggccagtcacatcgcaatgctgtcaccggagcgaggccagcgactcatgagagaaattcggcggctgacatga

SEQ ID NO: 13184 - RNA, 1131 nt, synthetic construct
  source 1..1131: mol_type = other RNA
atgacagtgctggtcagcattggcctggcggcaatcgtcatcgcctttaccgccttgataatggctttaagtgcacttgatcggtctggggcccctcggtcacgtcctttgccaggagcccgggtgttcccacaagctggcggaaacatcgcgaagctaagagatcttaatctacccgagctcgactcgacacacgacttgctgcgttggctcaggcttgaactggtgcagctgcttcccctggcaaatcatgctaaccggactgagagatcaaattacgtggagtgggccgtgccgaaaaaatctggcggtcttagggtcatcgccgcccccaaaaagcggctgaaggctatccagctgcgcattctgagagaaatcctcgataatgtgccacctagctcagccgcccacgggtttgttaggggtcgcgacgtgctttccaacgccactcctcacgtgggcaaaacactggtggtgaatttcgatctcgtagacttcttcggacacattgcgtacccccgggtagtcggcgtcttcaggcgaattgggtacgggaaagaggtaagtcgctggctagcctgtctctgcacccatcaacctaagccccccagaggtcggggccatgatagagagggaaggcgccggcacgctgttcaaggagcgccatctagcccagccattgctaatttggcagcctggcgcctggacgcacgtttatgcgggttggctaggcgctttcagtgtacctatactagatatgccgatgacctgacgttttccggcgacgagcccttcaagaggtccctgagacgttttctgcctctcgttcgaaggatagttgctgcagagcggtttgccctgcatcgcagaaagatgcgattcgcaagagctagcagacgccaggaagtgacaggagtggtcgtcaaccgaaaaaccaacatccgccgggctgattttgacagactcaaggcaatactgcacaacgcaaggcgagccgggtccctggagagtcagaacagagaacagaggccacacttcagggcctatctgctcggcctggcagctcacgttgcgcatttaaatccgcagcgcggtgaaaggttgcggcgagaaattctcgctttagagtga

SEQ ID NO: 13185 - RNA, 1251 nt, synthetic construct
  source 1..1251: mol_type = other RNA
atgctcgcgttggctcctacgacctgggcctgctacgggattcctctcggcgtattcctctcggtcgccattttcctccggtatgcctatcgacgggctgggagcgagtccgagaaatgggacagcctcggtggccgtagatggaggtgcgaaagaaagggggatggagttggtgagctcagggaacgggtcacgcgcgagagagtgtggctgccaggatcaaagaggttaccccaaaaaccctccaacgcccagaaactaggagacttgggcataccagtgctgaaggataccgcagacatcctcaggtggcttggcgtcgacctgaagagcctgctgcctctggccaatccggaacgaagggttagacctgggaaatctaactacgtggagtggaccgtcaaaaagaggagagcaggccttcgggtcatctgctcaccgaaaccaaggctgaaggccatccagaggaaaatcaaggctgagattcttgaccgagctccagtgcacatggcagcgcacggattcgtgagaactcggtctattgctaccaatgcagccggacatgtgggaagaaagcttgtggttaacctggacctgcgcaatttctttgagcatatacgcatccaacaggtttacggcgtatttcgtcacctgggatatggttcagaagtctctcgttggctggcacgcttgtgtacacacgcaccacagttgggcgaagcgagtcgcgggctagacggacagtgggagatgcagaggatacgtagacatgccgttcaaggcgctcccacatcccccgctttagccaacctggcttgtctgcgcctggatcgtaggctcactggcctggccaagaaatttgatgccgaatataccagatacgccgatgatttgacattctccggtgacgagagatttaagcgcgggatgaagcggttcctcgatcacctgcacatgattatccggctggaaggttttagtgagaactacgtgaaacgacgctttatgagaagtggccagagacaacaggtgacaggggtggtcgtaaaccagcgggtaaatgtggcacgggacgagtacgatcgacttaaagctatcattcataatgccaggaagactgggctagacgcccagaaccgggatcaccggcctgacttccgcgcgtatcttttaggcagggccgcacatgtggcacagctgaatcccgaacgcggtcggaagttggtggaggctatccgagccgtgagctga

SEQ ID NO: 13186 - RNA, 1248 nt, synthetic construct
  source 1..1248: mol_type = other RNA
atgtcttactgggcatgggggatacttgttgtggttgccatagtcgttatttttattgcacgggtcactcagaggaagctacctagcggtttttggcggcccggatacagttgcggatttgccccgggcgcttggaaacgatgtgacaaacgagagggagccgacgcgggcttcccaagagctaaagatgctgagagactgaagcctctgcccggttttaaaaaacatcgacaggcaccagccgaccgtggcagattagtggctagcgggcttcccgtgctggagtccactgacgatgtgctggcctggctcggcctggacttacgcagcttcctcgcgctggctgatccaggggatcgaatccgtcctggcaaaacgaattacgtcgagtggacagtgccgaagaaaaggcatggggtaagaatcatctgttcgcccaagccaagattgaaggccgtgcagcaccgaatcaaagacgaaatactcgaccacattgtgccgcacgaagccgcacacgggttcgtgatcggccggtctattgtgaccaacgcagagcaacacgttggccgggccctcatcgtgaacctggacctgcgcaatttcttcgactatgttaggtatcaccgagtaatcggcgtgtttaggtggctaggatactctcttcaggccagtagatccttggctctgctatgcactcaccggcctaacctctccgctctccacgaggacccccctgaagcctatgtccggcatgtcttccgccatgcggtccaaggggcaccaacctcacccgcactggctaacctcacagtataccggctggataggagggtagctggcctcgcaagaaccttcgatgcgcggtatacacgctatgccgacgatttaacatttagcggagatgagcctttcaagcgtgggatgatcaggttcttgtcactggccaagcaaattattgccgaagagggctttaggcttaatatgcgcaagatgcgcttcatgaggccaagtcagcgccagcaggtgaccggagtgatagtgaataagaaggttaatgtccggagagaggattacgaccagctgaaggccatcgtgcataacgcccgcaaaattggttcattggaatcccaaaaccgtgaaaatcaccccgattttcgggctcacctgcttggaagggccgctcatatcagacagttgaacgcggcaagaggtcagtctctgatcgatcgcattcatgccattgcatga

SEQ ID NO: 13187 - RNA, 1323 nt, synthetic construct
  source 1..1323: mol_type = other RNA
atgatgcccgccttgcagattggggccgtggccataatcggactgctggtcgcagtgtttgctattgttgtagtgctgattattgttgtcaatatcgtgaaccaggcaaggagaggaggaccaggtggcgcacggttagaattgggcaccgatggtcttagagttagcgtggggggaaggtcacgagggaaaatcctgggctctagagcacccatcgtcctcggcaattcccctacatcctcatatcgagagagagacgacaaaatgcggcagctgcaccctcaatctatagacaggcagcggtccctgagactcccggttctggagaaacccgacgacattgtcgccttcttacagctgagggatttccgcgagcttgtgcacctgtgcgacactggcaggatgcagggcctacgcaacggaccaggcaagctgcggaactacaccatgcgcacgattcccaagcgtggcgggggacagaggtttctctttatccctaagccccggttgaaggcagcgcaacgcagaatcttgcacgaaatcctggataaggttccggtgcatgaagccgccaaaggatttgtgaggggtagggacgccaccgatcatgctcgccctcacattggcaaaccgataattgtggctcatgatattgccgacttttttccgagcatccgatatcgaagggtgtgttcttttttcatgtggttagggtacccccactcagtggcccggattctgtccctgctttgtactaccgcctctcttgcgagtctcgcacgcgtccttccacaaggggctcccacttcccccgccctagcaaatgctctttgctatcgtctcgactgtcggttggctgggctggccaagaaattcggagctacatacacacggtacgcggatgacctggcatttagcggtggagaggatttcaagagaggtctgaatcgcttcgtgccattggtagagacaatactcaaaagcgaacgtttccatcctaagaaagccaaacgcaggttcatgcgccggggaagacagcagaacctcgtcggcttaaacgtgaacgacagactctcagtcggccgggctgaaatcgatagactgtgcgccatcctgcataacgctagtaaggccgggtcgctcgagagtcagaatcgagatagaatccagaatttcgctgaccacctggggggccgtatcgcttgggtagagaggttccaccccggcaagggggccaagctacgaagccagtggcggcaactgatcggtgcaccaccagcccctccacctcctgatctcccagcagcgcctcccccagagtga

SEQ ID NO: 13188 - RNA, 1311 nt, synthetic construct
  source 1..1311: mol_type = other RNA
atgctgctactcgtggggatcttggtgctcgccgtggttgccgcgattctgattgccgccgccgccgttaaatctgggggtagccctcagacgcctcatccagctcaggctggaggacgggcaccaggtgcagtaccggaggcttccggaaatagattcgcagcaccacccggcgccaacttcacagggcctttcgacaagaagaagtggcttatcaaccctgactggagagaggctgacccaaaggcagcttcccgctatccacgggccgaggatcgtcggaggcaatggtctttgcctattctggacaatccagaggacgtggtgcgatttctagatttggggggcttcggcgtgcttgtcaatctttgtgatcccaatctgtggtcgtcagccgctggccattcagttcccaacccggccgccaactacaggtttagaagcattccaaagaggggaggtggggtgcgtttcatcgccgctcctaaaccgcgcctgaaagccgctcagcgccggatattgagagagatcctggataaggtgcccgtacacgatgcagccactgccttcagacccaggcggtcagttgcggatcacgctaggccgcacgttggccgacagctgattctggcttacgacttacaggactttttcccccgcatcagacacggaagggtcgctggactgtttaggtggttggggtaccccgcttccgtcgcaaggtgcctcgcactgctctgcacatgcagcgattccatggccgtctctacccaagcccgccatctcccacaaggtgcgcctaccagtcccgcaattgcgaacctgttatgtttccgcctggattgtcgtcttactggcctcgccaagaagttcggcgcgtcatataccagatatgcagatgacctggcatttagcggagacaatgagttcaaaaggggaatcactcggtttatacctctcgcagaaaaaattatccggaacgagggcttcgtcctcaacaagcagaagcgtcggtttatgcgccatgggagatgccagcggctgacagggctgaaggtgaatgacagcctcagtgtgggcagagaagaaagcgatctagtgaaagccatcctgcataacgctaaaaaggcgggctctcttgaaagtcagaataggcagcagcgaggcgactttgaggcacaccttcgaggcagaatctcctggatcagtcagtttcaccccgcccgaggagccaaactgttggctgaattagacaaagtaaccgggtttcaacgccgcgctggtccacctgccataacacctcccgattga

SEQ ID NO: 13189 - RNA, 1530 nt, synthetic construct
  source 1..1530: mol_type = other RNA
atgagcgaaaagctctctagacagcaaatttacgaccggattagagccacgtccaaggatagctatgtcttggaggaaatgcagaggctaggattctgggaatcgagtgatacgcctagtctgtcagaggtgctgataaagagggaagtcgcagctaatcaggagctgaataatttgcttgcacaggataggaagtatcagaatcaggaagccatgctcaaggagatgaggaaggcgcgtatgaagttagccaaggagaagagagaacaaaccaagcagaaaaataagcagaaaaaagacgacaaagcagaggcgtggaaggacactcagcagcagcagatcgtgtacctgggggagggtgtgtcaggcggcttgaatgagatcgaatccgccatagagtctttacagcgctttaacttgccagtatttgaaaacctgagtgatttcgccagcgctctgggaacagacctgtccgcgctccggtacctgttataccagcgtaaggtgagccggatcaaccactaccacgcattccaaatcccaaaaaaaagcggcggtaaacggaccatcactgctccgaaacaaaagctcaagaggctccagctgtgggtgttggagaatgtactgaaccgaattcagattaatcaccacgtccacgggttcattaaggaaagatctattgtctcaaacgcccgacctcacctccaaaaagatattgtcatcaatgtggacctgaaagattttttccccagcatttcatacaaacgcgtgaagggcttttttcataagctaggttatagtgagcagctctccacaattttcgctctgatttgcacctacgccgaaaccgagaaagttgagatggatggtgtgaactattatgttcagaagggaaaccgctttctacctcagggaagccccgcttcacccgctatctctaaccttatcgcctacaagcttgacaagaagatccaggggcttgctgcaaaattcaattttacctatacacggtatgcagacgatctcacattcagtacatccaaagagaatgagaaaaacatcgcctctctgctgtttttcctgaaaaagatcatagaggtggagggatttgctattcatccagccaagacccacatcatgagaaaagggaatctccagaaagttaccggcatcgtggtaaaccaaaagctgaatgtgcagcgagtccagctgcgcaaatttcgcgccctgttacatcagatagagaaagagggctggaaagatcaaaagtggggcaacgcgaaatatctcatcaacgcaatagagggatacatcaacttcgttaagatggtgaacgaatccaaggccatggtattcaaggcacaacttacttccattttggccaaacatgggcatcctccagtcgagcaagccgttgttgaagaagaatctaagataatcgctgaagaaaaggccacagaggtgaagattgaaactcccctgaaaactgacaccgaggctaaacagtacgactggtggaacgtgctttga

SEQ ID NO: 13190 - RNA, 1530 nt, synthetic construct
  source 1..1530: mol_type = other RNA
atgtcagagaagcttagtagacagcagatctacgataggattcgtgccacctcaaaagagtcttacatcttggaagaaatgcagagactggggttttgggaaagtagcgacacccccgggctccctgaagtgctaatccatagggagcttgtggcgaaccaggaattaaacaacctacttgcacaagaccgcaaataccagaatcaggaggctatgctaaaggagatgcggaaggcccggatgaaactggcgaaggagaagcgggagaagacacgccagaagaacaaacagaagaaggaggatcaagcagccaattgggcaaatatacagcagcagcagatcatctatttaggcgacggggttagtggcggactcaatcagaccgagagtgacgtggaaactcttcagaagttcaacttgcctgtttttaaccagatagttgacttcgcttctgccatcggagtcgatctctccacactgcgatatctcctgtaccaacgcaaagtttcaagaataaaccattaccacacattcgagatcccaaagaagaccggcggtaaacggttgatatctgcccctaaatctcgactgaaggccctgcaactgtgggtactcgagaatatcctgaaccacatagaaattaacgaccacgttcacggattcattaaggagaggagcattattagcaacgctcagccacatctggagaaggatatcgtgatcaacgtggatctgaaagacttttttccaagtatctcctacaagagggtaaagggacttttcaataagctcggctacagcgaacaattagcaacagtgtttggtctgatttgcacatatgccgagactgagcacgtcgagatggatggggtgagctattacgtacagaaaggcaatcgagtactccctcaggggtcacccgcttcacctgctatttccaatcttatagcctttaagctggataagaagattaaaggactggcttccaaattcaatttcatttatacccggtatgcagacgatttgtctttttccacgtcgaaagaaaatgaaaagaatatcgcatccctgttgttctttctgaagaagatcatcgaagcggagggtttcactatgcaccccgagaaaactcatattatgcgcaaaggaaacttgcaaaaggtcactggcattgtggtgaatgaaaaactgaacgtgcaacgtgacaggctgagaaagttcagagctttactgcataatatcgagagcaacgggtggaaagaccaaaaatggggcaacgccaagaatctgatcaacgcagtggaaggctacattaatttcgtgaaaatggtcaacaagtctaaagctgccgcctttaaagcgcagctcgagaacatcgtcgctaagcacggttacccagtgatcgtggaagaagtcgtggaggtcaaaacggaaaccatcgtggccgaaattgttccggaggtcaaactcgagaaccccataaagcccagctccgatgccaaacagtatgactggtggaatattctctga

SEQ ID NO: 13191 - RNA, 1527 nt, synthetic construct
  source 1..1527: mol_type = other RNA
atggaggagaagctgagccggcaacaaatttacgatcggatacggagtacgtctaaagagtcttacatcctcgaggagatgcagcgcttagggttctgggaatcgagtgaaaccccatcattatccgaactgctcataaagcaggaaaccacggccacccaggagttgacaaagctgttggagcaggacaaaaagtacaacgatagggaggccatggttaaagaaatgcgcaaagctagaatgaaactagccaaggagaagcgttctgaaaccaagaataggaataaggagaagtcaattgacaaagcacagaagtggaaggagactcaggaacgacagatcatttacctgggcgagggcgtcagcgcgggtcttaatcacactgagtccgacaaattgaatctgcagaaactcaacttacccgccttcgatcaggtgacggacctggcctcagccatagggctgagcctcgcggaacttcgctatctgctgtaccaaagaaaggtgagcaagatcaaccactatcataccttcgaaatccctaaaaaaagcgggggaaaacgggtaatatccgctcctaaatcgcgcctgaaggcacttcaattgtgggttttagaacacgtgctgaacaatatatccatcaatgacgtggctcacggcttcatcaaaaaccgttctatcgtcacaaatgcaaccccacatctggccactgacattgtgatcaatgttgacctgaaggactttttcccgactattaactacaagagggtcaagggtttgtttcataagtttggctatagcgagcaactcgctaccctgtttgccctcatttgcacatacgccgagacagaggtagtcgagatggatggagtgtcttactacgtgcaaaagggcaacagattccttccccagggatcccctgcaagtccggcaatttccaatctcattgcatatagactcgataagaaaattcagggactggcgtccaagtttaacttcacttatacaaggtatgccgatgatcttagcttttccaccagcaacgaaaacgagaagaacatcgcgtcactcctgttctttgtcaaaaagctgattgaggcagagggctttaccctacaccccgagaaaacacatatcatgcgaaaaggtgccttgcagaaagttaccgggattgtagtgaacgaaaaactgaacatccaaagaagtcagctgcagaagttcagggcccttctacacaatattgaaactaatggctggaagaaccagaagtgggggaaggcaaaaaacctgatcaatgctatcgagggatacatcaatttcatctcaatggtgaatgctgaaaaaggagccaaatttaagttgcagcttaaggatatcgtggccaaatttggttatccaatcgtggaacaggagacagctgaggtcaaaattgaaaccgctaagcaggaaatagttgagcctcccaagagtaagctcgagactccagaaacagcttctaaacagttcgactggtggaacatcctgtga

SEQ ID NO: 13192 - RNA, 1563 nt, synthetic construct
  source 1..1563: mol_type = other RNA
atgtcagagaagtctacacgtcaacagatctacgatcgcattaggatgacctcgaaggattcctacattctggaggaaatgaagagactggggttctgggattcttcagacgtgccctccctgagcgaaaccttaattaaacgggagtcagaggtgaataaagagctcacgagtctgttagagaaggatagaaagtatcgcaatcaagaggctcttctgcgggagatgaggaaagaacgcatgaagaaagctaaggagaaacgcgaagagacaaaactacgcaacaaaaaaaaacgactggacaaagccgctaagtggaaatctatgcaggaacatcaagtaatctacttagggaaggacgtgagcgcgggactgaataacaccgagactaatgaggcattgctaaacaagaataacctgcccgtgttcaagtctctaactgatctcggccagtccatgcagctcgaattgtcaaatctgcgatatcttctctttcagcgtaaggttagtcggcagactcactattataacttcgagatccctaagaagtccggtggcaaacggaaaatcagcgcacccaagaggaggatgaaagccctccagctgtgggtgcttaataacatactggacagaatagctattggtgaacaggcccacgggtttattaagcagaggtccattgtaaccaatgctggacctcacactgggaaagacatcgtcattaatatcgaccttaaagactttttcccctccattgattataaaagggtgaagggcctgtttcataagctcggctatagcgaacagatggcgaccatattcgccttaatctgtacacaagcagaaaccgagacggtggctatggatggagtgacctactacgttcagaagggtaagaggattcttcctcaggggagcccagccagtcccgcaatttctaacctgatagcctataagcttgacaagaaggtcaagggcctcgccgacaagctgggctttcgctacactcggtacgccgacgatttgtcttttagtaccgataaggggaatgaaaaaaacatagcgagtctcctccatttcgttggaaaaattatcaagtcagagggtctgaccatcaatcctgagaaaacacacatcatgcggtccggcgcacagcagaaagtgacagggatagtcgtaaatgagaaattgaacgtcgagagaaagcagttgcacaacttcagagccctgctgcataacatcgaaactaacggatggaatggccagaaatggggaagagccgataacgttatgcactctatcgaaggctacattcatttcattaagatggttaacccagagaaaagcatcagatttggtgagcagcttacgcgaatcgtcgaaaaacacggcttgcccctggtcgaagagaagacatgcacaaaacaagacatcgctccgaagcaggtggtgcaagtggaggaacctctgaagccagaaccaactatccagccgggacagaagcaagaggatagcaacaagaagacctccagcacagacgactggtggaatatcttctcgtga

SEQ ID NO: 13193 - RNA, 1539 nt, synthetic construct
  source 1..1539: mol_type = other RNA
atgtctgagaggagcactcgacagcaaatttatgatcgaattcgggcggctttcaccaaagatagttacattttagaggagatgaagcgcttggggttttgggactcgaatgttgacgcccccacactgcctgagagactgatccagcgagaggccgagattaatcaggagctgaacaaattgctcgctcaggatcgtaagttcagaaaccaggaagcaatgttagccgagatgaggaaagcccgcatgaagcaggcacgggaaaagcgggtactgaccctggagaaaaacaagcagaagaggttagacagagcagccaggtggcggtccctgcaacaggaacagattatctatctgggaaagggggttagcgccgggctcaataatacggatactaatgtccagtctttgcagaagtacaatttgccagtattctccagcctcacagagctcgccaactctatgaacctcgacctggcgaagctgagatacctgatctttcaaagacaggtgagcagacatacacactaccacacattcgagattccaaagaaatcaggagggaagcgtaaaatcagcgcccctaagcgacaaatgaaagctctccagcgctggatactcgacaccattctgagtcccatatcaatggatgagcacgcacatggctttattaagaacaggtccatcctaaccaatgcccagcctcatacaggcaaagagatcgtcatcaacgttgacctgaaggattttttcccttcaatcgacttcaaacgcgtgaagggcctttttcacaaactaggctattctgagcagatggccatcatctttgcgctaatttgtacccaggctgagactgaaacagtggaaatggatggcgtaaggtattatgtgcaacgaggtaaacgcattctgcctcaaggctctccggcttctcccgcaataagtaacctcgtcgcttacaagttagataagaaggttaacggactggctgagaaactgggtttcacctacactcggtacgccgatgatttgagcttctcaacctttaggaggaacgaaaaaaacgtggcaagacttcttcactttcttgggaagatcatcgaatccgaggggctggtcatgcaccccgacaaaacgcaagtgatgcgcaacgggggtctgcagaaagttactggaatcgtcgtgaatgaaaagctcaatgtgcagcgggaacagttgcggaaatttagagccctgcttcataatatcgaggtgaatggttggaaggaccaacgctggggacatgctcacaatcttatacactccatcgagggatatatccagttcgtgaagatggtgaatccccgtaagggcgacaaatttcggaagcagctggatcagataataaaaaagcacggctgcccgccaattgacgaaaccacattctacaaaaagactgtcgaaacgagtcagccttcccaacccattactagccagaccattgaaccagaaaaacatgcaaccccaaagggcaacgactggtggaacatcttctcctga

SEQ ID NO: 13194 - RNA, 1521 nt, synthetic construct
  source 1..1521: mol_type = other RNA
atgtcagagaaactgactaaacagcagatctatgatcggatccgagctacgtccaaagatagttacattctggaagagatgcaacgccttggattttgggagaaagcagactctccccagataccggagattttcatagagaacgaaactagactgctccaagagttgaatcagctactggataagaacaagcagtactctgaccaactctccatgctcaagagtatgagaaaagtgcgtatgaaaaacgccaaggagaaaagagaggttaccaggcagaataacaagctcaaagcgctcgaaaaagcagagcggtggttgaagctgcagcaggaacaggtgttatttctcggcaaggaagtcagcaaaggattaaataataccgagcccaatgttaactcgctgaagaagtttaacttgccagtgttccactccgttgtggagttcgctggctatatggagacagatctcccgtcgctgcggtatcttttgtatcaacggaaggtgtcaactattaaccactaccatacctttgaacttcctaaaaaatccgggggcaagcgaaagataagcgcccctaagtcaaggattaaagccctgcaactgcaggtactggacaaaatcctgaagaatatcccagtcaacgattacgtacacgggttcattcagggaaaatctatcgtctccaatgcccagccacatgtgaataaagacatcgttatcaacatggacctcaaggacttttttccttctattgagtacaaacgtgtcaaaggtctgttctataagcttggctattccgaacagattagtacgatgcttgcactggtgtgcacccagtccgacacctacgaggtgaatatggatggtgtaacctaccacgtgcaaaagggagcaaggttcttacctcagggctctcccgcttcacccgccatcagcaacctgatcgcatacaaactggacaagcgcattaagggcctagccgaacgcctgaacttcacctacactcgatatgccgatgatttgagctttagcacaacaaacgagaaccagaagaatatccgccagttattgtttttcgtcaatcagatcgttgtggaggaggggttcaaggtgcacccagaaaagactcatatcatgaggaaagggaacctgcagatggtgacggggatcgtggtaaatagaaagctcaatatcgagcgcaagaaactgagaaattttagggctctgctgcataaccttaatctcaatggatggaaggaccagaagtggggaaacgccgtgcatctaatacacgccgttgaaggttatattcggttcgtcaaaatggtcaaccctgaaaaaggtaaggaattcgcggagaaacttgctactattattaagaagcaaggctacccagaaatcagctgtcaaaaatacaacagcaacgatacaaccgaaaagacaacagctagtattaccaagcccgagacaaaccagaaggaggaaaatgactctcaggattggtgggacatattttga

SEQ ID NO: 13195 - RNA, 1515 nt, synthetic construct
  source 1..1515: mol_type = other RNA
atgtcagagaagttatctaagcagcagatctacgatcgtataaaagcaactagcaaggattcatacatccttgaggaaatgcagcggctggggttttggcagtcgggtggtcagccaacactgtcagaaatcctaatcaaacaggaagccgctattgagaaagaactgaatgagctactggcccaggatcgcaaattttctaatagggaggcaatggtgctggaaatgcggaaggcaagaatgaaggctgccaaggaaaagagggtagagactaagctgaagagagagcagaagcgactcgataaggctgagaactggaagctgcttcaggagaaacagattctttatcttggtgaagaggtgtccaagggactgcactacaaagaggccgccgtcaatctcctcgaaaaatataaccttcctgtgttcgaagacgcactcgcgttggcaaaatctatgaatatcgacctgaaagccttacagtacttggcttacaatcgtaaggtcagtaagataaaccattatcacacgttcgaattggagaaaaagtctggaggcaagagaaagatcagcgcccctaaacccaaactgaaagaaatccagacctggattcttgagaatatcctgcatcagattccgtacactattgaggctcatggctttgtcaaagagcgcagcatcgtgaccaacgcccaacctcacgtgaataaggatatagtcgtgaacgttgatctgaaagatttcttccccactattacatacaaacgggtgaagggtctgttctgcaaattgggctacagtgaagaggtggctacgatcctctccctcctttgcacttatagcgagattaacgaaacgactctggacggggtcacctattatgttcaatctggcgagcggaagctcccacaagggtcccctgctagtcccgcaataagtaatctcattgtgtataagctggacaagaagattaacggcttagcgcagaaattgaattgtagctatacaaggtacgccgacgacatgtcatttagcaccacccaagagaactcctccaacataagcaagctcctgtacttcaccaagaagattattgcttctgaaggcttcattgtgcacccggagaagatccacgttatgaggaagggcatgcaacagaaagtaacagggatcgtggttaacaacaaattgaatatagaccgaaaccagctaagaaaatttcgcgccttgttacacaatatcgaaaagaatggatggaaagaccagaagtgggggaaggccgtgcatgtcattaatgcaatcgagggatatatcaattacgtaaacatggtcaaccccgaaaaggggaccctgtttaaggagaacctgaagaacatcatcaaactgcatggactccctcacattgagaaaatcattatcccagagaaagtaacacccatcgcggtgtcgctgccagaagaaaaagaagagacaaccgttaaacagcaatccgagaactggtggaatatattctga

SEQ ID NO: 13196 - RNA, 1515 nt, synthetic construct
  source 1..1515: mol_type = other RNA
atgtccgagcagcttagtaaacagcaaatttacgataggatccgggctacatcgaaggattcttatatcctggaagaaatgcagaggctaggattctggcagtcaggagccgagcctacgctatctgagattttgatcaagcaggaagcgaagatcgaaaaggaattgaatgacctgctcgcgcaggatcgaaaatactccaacagagagagtatgattttggagatgcggaaggctcgaatgaaggctgcaaaagaaaaaagagccgagactaagctgaacaatgaaaagaagagacgtgagaaagccgaaaactggcagctgcttcaacagcaacaaatcctgtacctgggtgaggaggtcagcaaaggtttgtattataaggagtcaaacctcacgttgttagagaaatacaaactgcccttctacaaggacgctctggccctggccaagtcaatgcaaatagatttaaaagccctgcagtaccttgcctacaatcggaaagtgtctaaaatcaatcactatcacacctttgagttagaaaagaaaagcggaggtaagagaaagatcagtgcacccaaaccaaagctcaaagaaatccagaattggatcctcgagaatatactgcaaaaaattccgtacactaccgaagcccatggtttcatcaaagagcggtctatcgttactaatgcacagcctcatatcaacaaggacatagtggtgaatatagatctcaaggatttttttcccacagtcacctataagcgggtaaaagggctgttccataaaatgggctacagcgaggaagtggcggtgattctgggcctactctgcactcatagcgaaattaatgagactatcctggacggcgttacatattacgtgcagtccggagagaggaagctcccgcaaggcagtcctgctagccctgctatttctaatctgatcgtctacaagatggataagaagatcaacggactggcaaaaaagctcaacttcaactatacccgttatgctgacgacatgtcattcagcacaacacaggagaactccaagaacgtgtcccgccttctttacttcaccaagaagatcattgaaaccgaggggttcgttattcacccagacaaaattcacgtgatgaggaaagggatccagcagaaagtaacaggaatcgtggtgaacaagaagcccaatatagaccgcaaccagcttagaaaatttagggccctgctccacaatattgaaaaaaacggctggaaagaccagaagtggggcaaagccatacacgttattaacgcaattgaggggtatatcaattatgtacgcatggtcaaccccgagaaggggatcgtgtttcgccagaatttgaaggacattattaagcagcatggcctgccatacgttgagaagatatccatccccgagaaaatcacccctatcgtcattcctgtcccagatgaaaccaaggaaattccaattgagaagaaaccagaaaactggtgggatatattttga

SEQ ID NO: 13197 - RNA, 1518 nt, synthetic construct
  source 1..1518: mol_type = other RNA
atgagcgaacaactttctaagcagcagatctatgatcggattcgggccacctctaaggactcatacattctcgaagaaatgcaaagactgggcttttggcagagcgcaacagagcctactttgtcagagatcctcattaatcaggaagccaaaatcgaacaggaattgaacgagctactcgcaagggaccgaaagttctccaacagagaagccatggtcctggaaatgaggaaggcacgcatgaaagcggccaaagaaaagaggggggaaaccaaattaaatcaagaaaagaagcgtctggagaaggcagagaattggaagcagctacaagagaaacagattctgtatctaggtgagacggtgtccaaagggttgaatagcaaggagacagatagcaaaattctggaaaagtacaatctgcctgtatttgaggaccttttggcattggccaaatctatgcagcttgacttaaaagccttgcaatatctggcttacaaccggaaagttagtaaaattagccattatcacaccttcgaggttgagaaaaagtccggcggaaagcgcaagataagtgctccaaagagcaagctcaaagagattcaaacatggatcctggaaaacatcctccataagattccacataccatcgaggcccacggtttcataaaagagcgctctattgtcacaaacgcccagcctcacatcaataaggatattgtggtgaacattgacctcaaagattttttccccactgtgacctacaaaagagtgaaagggctgttccacaaaatcggctacagcgagcagatagctacggtgttatcgctgctttgcacttattctgagatgaacgaaacctccctggatggaattacatactatgtgcagtcaggagagcggaagctgccacagggatccccagctagtcccgctattagcaacatgatcgtttataagctcgacaagaagatcaatggtctggccaagaaactcaacttttcctacacccgttacgctgatgatatgacttttagtgcgaacgagaaaaattctaagaacgtatcaagactgctgtactacaccaagaagatcattgaatcagagggctttgtgatccatcccaacaaaatccacatcatgagaaaggggatgcagcagaaagtgacaggcgtcgtggtcaataagaagcttaatatagaccgcaatgagttaaggaagttcagggcgctgcttcataacatcgagaagaatggctggcaggaccagaagtgggggaaagcaatccgagtcataaatgctatcgagggttacattaactatgtctatatggtgaacccggagaaaggaactacgctgaaacaaaatctcaaaaacatcatcaccaagcacggccagcccactataaccaagctgtccattccggaacagactgtacctatcccagccagtgtgcccgaaaagaagaaagaaacaatagttcccgacgagaaacctgggaattggtggaacatcttctga

SEQ ID NO: 13198 - RNA, 1515 nt, synthetic construct
  source 1..1515: mol_type = other RNA
atgtctgagaaactgtcaaaacagcagatctacgatcggatcaaggctaccagcaaggattcgtacattctcgaagagatgcagaggttgggattctggcagtccggtgccgaaccgtcccttagcgaaatactgatccagcaggagactactatacagaaggaactgaacgccctgcttgcccaggacaaaaaatttcagaacaaagaggccatgctggtggaaatgcgaaaagctcggatgaaggcggcaaaggaacggagagtggagacattacaaaagcgggagcagttaaaaatcgaaaaggcgcagaaatggaagttgacacaggaaaaggagattatatacttgggcgatcaggtttctaagggcctcaatatccaagaaactaacgcggccctcctggacaactacaatctgccggtgttcgaagatgttctcgcactcgcacagagtatgcagattgatctgaaggctttacaatatctggcataccaccgctctgtttccaagatccatcactatcatacctttgaagtcagcaaaaagtcaggtggcaagcgtaaaatctctacgcctaaacctaaactgaaggagttgcaaaattggattctagagaatatcctccataaaataccacataccgacgaagcccacggcttcataaagaagagaagcattgtgacaaatgccaaaccccacctcgagaaggacattgtgattaatattgacctcaaggatttctttcccaccataacacataaacgcgtcaaaggtctttttcacaagatggggtacagtgagcagatagccacgatcctgagtctgctttgcacttactcagaggttgacgagatcgatctggacggagtaacatattatgtgcagtcgggcgagagaaagcttccccaaggagctcccacaagccccgccatcagtaacatgattgtgtacaagatggacaagaagatctccggactggctaaaaagctgaactttacttatacccgctatgcagatgatatgacattcagcacctcaaacgagaatgctctgaacgtctccaggctcttgtacttcatcaagaagatcattacgtccgaagggtttatcatacatccagacaagatccacatcatgaggaatggcatgcagaagaaagtcaccggggtagttgtcaataagaagcttaatgtagaccgactgcaactgagaaaattcagggccgtcttacacaacattaaccaaaacggatggaaggatcaacagtggggcaaagctatccacctgatcaacgcagtggaagggtacatcaattatgtggcaatggtgaatcccgagaaaggggcccagttcaagaaaagcctagtcgctatcatttctaagcacggtaaacctgagattgaaaaacctactccaattgagaaggagaaattgatcgtgcctcctgtgctagaggagccaaaaaccattgtggaagaccagaaaccagggaactggtggaacattttttga

SEQ ID NO: 13199 - RNA, 1014 nt, synthetic construct
  source 1..1014: mol_type = other RNA
atgtccggcaacctaaccagacaacagatctacgaccgaatcagggctgccagcaaggattcctatatcctggaagagatgcagaggttgggcttctgggataattccgacgtccccaccctgtctgagacattaatcaggcgtgaggttgaagttaataaggaactcaatgaacttctggccaaggaccgaaaattcagaaatcaagaggctatgctttcggagatgagacgcgagcggatgaagaaggcaaaggagaagcgagagcagactaagcagaagaacaaacagatacggctcgataaagcagcccggtggaagaaagcacagctcgaacagattctatatcttgggaaaggcgtctctgagggactgaacaatacagactacgatgcagaactgttgcagaaatataacctcccagtatttgatagtgtgaaggcgctggccgagaacatgggagtggaattggcctctctcaggtacctgttgtatcagcgtagggtgagcaagaatactcattactacaccttcgagatacccaaaaaatccggtggtaaacgcaaaatctcagctcctaagcatcgcatgaaagaactgcagatgtgggttctgcaaaatgtgctggataatattcctcactgcgacaccagtcacggcttcataagagaaaagagcattctgacaaacgccgagccacacgtagggaaagacatcgtcattaacgtggacctgaaggatttttttccgaccatctcttataaacgggtgaagggactcttcagaaactttgggtactcagagcagacggcaatcatttttgctctcatatgtacacaagccgaaacagaaactgtcgagatggacggcgtgacttattacgtgcagaaaggggagcgcttccttccacaaggaagccccgcttcacctgcgattagtaacatcattgcctacaaactggacaagaaggtccagggcttagctaagaagttcggttttacgtatacccggtga

SEQ ID NO: 13200 - RNA, 1392 nt, synthetic construct
  source 1..1392: mol_type = other RNA
atgatcaaaaaggaggcgagcctcagccaggaactgaacactctggtggctaaagataggaaattttctaatcaggaggcgatgcttaaggagatgagaaaagcgagaatgaagctggccaaagaaaagcgcgaacagaccaagcaaaagaataagcagaaaaaacttgacaaggccacatcatggcagcaaacacagctggaaaacataatatacctgggtcccggcgtgagtgccggactgaacaacaccgttagtgactcaaccattctgcagcaattcggactcccagttttccctaacatccccagcttggccaacgccatgcaagtcgatctagccacactccggtatcttctgtatcaacggaaggtgtcaaggactaatcactatcacgtgttcgaggtgccaaaaaaatccggaggcaaacgacgcatctccgctcctaagaagcagcttaaaaagctccagctctgggtgctgaacaacgttctctgccatctgccaaatgaaacagtcgctcatgggtttatccgacaacgttctattgtcacgaatgcagcacctcacgttggaaaggacatcattgttaacgttgatttgaaggatttcttcccaaccataacttatgcacgggtgaagggcgtatttaaaaaactggggtattctgagcagcaggctattattttcgcacttatctgtactcaggcagaaacggaggaagttgagatggacggcgtgaagtactacgtgcagaatgggaaaaggtgcttgccgcaaggatctcccgcaagccctgctattagtaacataatcgcctacaagctagacaagaagatccaggggttagcagccaaattgaatttcgcctacaccagatatgctgatgacctcactttttccaccactaatgacaatgcgaaacagattaccaagctactctatctgatcaagaaaatcgtcacagccgagggtttcgaggtacacccaggtaagacacacatcatgagaaaggggggccagcagaaggtgactggcatagtggtcaataagcaattaaatgtggagaggagccagctgcgcaagtttcgggcactgttacacaacctccagatgaacggatggaaggaccagcagtggggcaacgctaaacatctggtcaatgccgtagaggggtacatcaactttgtcaatatggtaaatcccgtgaaggccaaactgtacaaaacccagttggaaaagattgtggccacacatggctaccccctggtggacaacacaatgcccaagcctactgtaaccaccgtggtggccgaggtcaaagaaacgcttattccgaccgtggctaaagagaaatccgctgataagacagattggtggtcggtcttttga

SEQ ID NO: 13201 - RNA, 1533 nt, synthetic construct
  source 1..1533: mol_type = other RNA
atgacgttgaaactgaccaggcagcaaatctacctgagaatcaagtccagctccaaagactcatacgtcctcgaagaaatgaaaaggcttggtttctgggacaaggagcagcctactttgcccgagaatctgatcaaaagggaaaccgagattaataaggagcttaccgagcttcagaagctggacaagaagttcaagaatcaggaggcgctcctcgccgagatgcgaaaggaccggatgaagaaagcaaaagagaaacggctgcagactaaggaggctaataagaaaaagaggctggaaaaggccgctaactggaaactgctgcaagaaaaccagatcatatacctcggaaaggacgtcagttacgggctcgataacacgaaaagcgacgtggagagtctaaccaaatacaagctcccaatctataagaacatactacatctggcacagagcatggaaatctctctatctgagatccggtatctcttgtaccatagaaaggtcagtaaaaagacccactatcatacttttagcatcccaaagaagtcaggtggaactcgaattatatctgcccctaaaagcaaactgaagcgactccagtattgggttttgcacaacatattagaagttattcccccaggcgagcatgcccacggctttatcgccgggaaatccattcaaactaacgccctgccccacgtcgggaaagatgtggttattaacatagacctgcagaattttttccccacgatcacatttaagcgcataaagggactgttctctaaacttggatacagcgagcagctggcaacaatcttcgcgcttatttgcactgaaacaccttgtgacaaagtgcagatggacggcgtagattactacgttcaaaactccgagcgcgtcttaccccagggatctccagcctcgcctgctatttctaacctgattgcttggcgcctggataagaaaatccaaggtttagcttccaagtacgactttacctataccagatatgccgatgatctcacattctcagccgcggcaaaggctgaaaaaaatatcgccgggctgctgtacttcctcgagaagattattagaagcgagggcttgactattaatccagaaaagacatccatcatgagaaaggggcgccagcagcgggtaacaggtatcgtggtgaatgaaaaattgaacattccccgtgataattatcggcgctttcgtgctcttttacataacatcgaggcaaacggctggaaggatcaacactggagccactccaaaaatctgccgctgtcggtgaaagggtatattagtttcgtgaagatgattaaccccgataagggcctaaaattcgaagagcagctgaccaggatcatctccaagcacggctttccggaaatggaggtgaaaaagaccatcagctcaatccaggaacaaaaccagagtattgaacttgagaagcctattcaggaggtgaaatcttcaaaggaagacaaacagacagaggataataattggtggaatatattgtga

SEQ ID NO: 13202 - RNA, 1515 nt, synthetic construct
  source 1..1515: mol_type = other RNA
atgtctcagaacctgtctaggcaacagatttacgaccggatcaaagagtcctctaaagacagttacattcttgaagagatgaagcgtctgggtttttggcaggagacatctacaccatccctcccagagcagctcattaaaagggaggccgtgctgcagcaagaactccaagagctgctggccaaggacagaaagtatggaaatcaggaggccatgctgcgcgaaatgaggaagcagaggatgcaggaggcgaaggctaaacgggaaatcacaaagcagaagtcagaaaagaaacagcaggagaaggctgactactggaagaatctacagcagcagcagattatctacttgggcgaaaacgtgtctaagggcctccacaagagtgattctgacacagccaaactgctgcaatttagtctgcctgtctttgagaatgtcttagattttagccagaagtcaggatttagcctaagcgtgatcaaatacctggccttccatagaaacgtgagcaaaaagtcccattatcatgtgtttgagatccccaagaaaagtgggggcaaaagaaaaattagtgctcccaagcctcaactgcggtacctgcagcactggatccttgagaacattttgaataagatcccagtcggcgagatggttcacggcttcgctatcgaaaaaagcattgtgaccaacgcagaaccccaccttaagaaagacattgtcataaacatcgatctccaggattttttcccaagcatctcctataagcgcgttaaggggttgttctcaaagctgggttacagcgaacagctgtccacaatatttgcattagtctgcacgcaggcccacaccgaggaagttctcctggacaatgtcaaatacttcgtacataaaggagaacgcttcttaccgcaagggtcacctgcgagcccggccatatcgaacatcatcacttataagcttgataaacgacttcagggactctcaaagaaatatggcttcacctatactagatacgccgacgacttgaccttttccgctgcccaagataatgagcacaacattaacacactactgtactttgtgaagcaggtgattaaccatgaagactttaccatccatcccgataaacttcacatcatgaaacggaagcaccagcagaaggtaaccggcatagttgtaaatgagaaactcaatgtcgagcgaaagaagttgaggaaattccgtgcattactgcataatatcgaggtgaatggatggcagaaccaaacttgggggaaagcattccacttgataaatgccatagaggggtatatcaatttcgtgaacatggtgaacccccctaaagcactggcgttcaaagaaaagctcaatacgataattgcaaagcacggtaagccagtggttgagatccgcaaaactgctcccgagatcgctgaaactattaaggtgtccgaagatcaagaggaaattattacccctgccgaagagaagaccgattggtggaacatcttctga

SEQ ID NO: 13203 - RNA, 1515 nt, synthetic construct
  source 1..1515: mol_type = other RNA
atgagtcagaacttgtctaggcagcaaatttacgaccgcatcaaagcgtccagcaaggactcatatattcttgaggaaatgaagcgactgggcttttggcaggaaacctctacccccagcctccccgagcagctgatacagaaagaggtcgtgctgcagaaggagctgcaggaactccttgcaaaggatcggaaatacgggaaccaggaggctatgctgagagaaatgaggaaaaaacgcatgcaagaggccaaagctaagcgagaggtaactaaacagaagaatgagcagaagcgcaaagacaaagctgatcactggaaaaagctgcagcaggaacagataatctacgtcggtgaagatgtgagtaaagggctgcattgcaccgattccgacgtcgaaaagttactggaattctcgttgcctgcctttgaaagcatcagtgatttctctcagaaatcaggattcggcctcccgcttatcaaatacctcgcatttcacagaaaagtgtctaataagacgcactaccacatctttgagataccaaagaagtctggaggaaaacggaggatcagtgctccaaaacctcaactccgatattttcagcagtggatcctggaaaatattctgaacaagatctcagttggcgaggtcgtgcatgggtttacagcgaaaaagtcaattgttacaaacgcagagctgcacttgggtaaggacatcattatcaacatagatctgcaggacttctttccctcgattagctatcgtagagtgaagggactgttctccaagtttggctactccgaacaattaagcactattttcgccttagtgtgtacacaagcccacaccgaggagattttactggatgacgtgaagtatttcgtccataagggcgagcggtttcttccccaaggatcccctgcctccccggcaatcagcaatataatcgcgtataagttggacaaacgtctaaaaggcctggcccagaagctagggtttacttataccagatatgctgacgatctcactttcagcgcaaaccaagacaaggagcagaatattaacaaactcctgtacttcgtgaaacaaatcattaacgacgagaacttcacaattcacccagataaactccatatcatgcggggaaggcatcagcaaaaggttaccggcattgtggtaaacgaaaagttgaatgtggagcgcaagaagctgaggaagttccgggcccttttgcacaatattgaggtgaatgggtggcagaatcagacatggggtaaggctttccatcttatcaatgccgtagaaggctacatcaactttgtgaacatggttaatcctgtgaaggctctcgtcttcagagaaaagctgaacacaatcatcgccaaacacgggaaacccatagtggaggtcaaggaagttgtgcaggaaattgtcgagacggtagcagttaccgagatacaggaggagatgctagccccaaaggaggaaaaaactgattggtggaatatcttttga

SEQ ID NO: 13204 - RNA, 1515 nt, synthetic construct
  source 1..1515: mol_type = other RNA
atgtctcagaacctgtcccgacaacaaatctacgaccgtattaaggctagctctaaggactcatacatattagaggaaatgaagcggctcggattctggcaggagacttccactccctccctgccagagcagcttattcagaaagaagtggttctgcaaaaagagctccaggagcttcttgcaaaggacaggaagtacggaaatcaagaggctatgctgagggagatgaggaaaaaacggatgcaggaagccaaggcgaagcgcgaagttacgcgccaaaagaacgagaaaaaaagacaggaaaaggccgatcactggaaagaattgcaacaggagcaaatcatctacttgggtgagaatgtctcgaaaggcttacaccagatgcagtctgacacagaaaagctggatcagttttcactaccggtgttcgagaatatactggatttctcacagaagtctgggttctcactcagtcaaatccggtacctggcgttcaatcgcaacgtcagtgagaagagccactatcacacatttgaggtttctaaaaagagcggaggcaaaagaaaaatcagtgcccccaagccaaaactcaaactgttccagcagtggatattggaaaacattctcaataggatttccgtgggggaggtggtccatggcttcacacctaacaaaagcatcgtcactaacgctgcccctcacctaggcaaagatatcgtgatcaacattgatctgcaggactttttccccagtataagttacaaacgtgtgaaagggctgttttccaaatttgggtattccgaacagctatcgaccatttttgcattgatttgcacacaggcgaacaccgaagaggtgcttctggacggggtaaagtattttgtccacaagggagaacgctttctcccacagggctcaccggcctctcctgctattagcaatagcatcgcctataagctggacaaacgactccaggggctggccaagaagtttggctttgcatataccagatatgctgatgatttaacctttagcgccggacagaattccgagcaaaacataaaccggctcctgtacttcgtcaagaagataattaaggatgagaacttcaccatccacccagacaaactgcatattatgaggcggaagcatcagcagaaggtgactggcatcgtggtgaatgaaaagttgaatgtagagagaacaaagctgcgaaagttcagagccctgctgcacaacatcgaggttaacggttggcagaatcagacctggggaaaagcataccatttgatcaatgcaatcgagggttatatcaacttcgtaaatatggtgaaccccagcaaggcctccgttttcaaagaaaaactcaagaccatcgttgctaaacatggcgtccccttcgtggaagtgcagaaggtgattcctgatgtggtggaacttcccgaagtccttgagccagagcaggacgctgtaacgcctaaggaggaaaagactgactggtggaatattttttga

SEQ ID NO: 13205 - RNA, 1515 nt, synthetic construct
  source 1..1515: mol_type = other RNA
atgtctcagaatctcagccgccagcagatctatgacaggattaaggccagctcaaaggactcttatatcctggatgaaatgaagagattgggattctggcaggagacatctactccttccgtgcccgaacagttgattcagagagaagctgttctgcagcaggagctccaggaactcctggccaaggatcggaagtacgggaaccaagaagctatgctgcgcgaaatgcgtaagaagcgcatgaatgatgcaaaagccaagagggagattaccaagcaaaaaagcgagcagaagagacaggacaaggctgactattggaaaaatttgcaacagcagcagatcatctatctaggagagaacgtgtccaaaggcttacacaagtcggactccgacaccgagaagcttttacagtttagtctgccggtgttcgaaaatgtcctggacttcagccagaagtcaggctttggcctttctgtgatcaagtaccttgcatttcacagatcggtgagcaagaaaagccattatcacgtgttcgagataccaaagaaatccgggggtaagaggaaaatctcagcacctaaaccccagttacggcacttccaacattggattcttgaaaacatactgaacaagatacctgtgggcgaggtcgttcacgggtttacgatcaaaaaaagtattgtcacgaacgccgagagccacctaaagaaggacatcattattaacatcgacctccaagattttttcccttccatcagttataaacgtgtgaaggggctgttttctaagctggggtactcagagcagctgagcaccatctttgccctggtatgcactcaggctcacaccgaggaagtgctgttggatgatgtaaagtacttcgtgcacaaaggtgaaaggtttttgccgcaaggaagtcccgcttccccagccatctccaatatcatcgcttacaagcttgacaaacggctgcagggcctggccgccaaatacggtttcacttacactcggtatgccgatgacctaaccttctcagccggacaagataacgaacagaacataaataagctcctgtactttgtgaagcaagtaatcaatgctgaagactttacaattcatcccgataagttgcacattatgcgacggaaacatcagcagaaggttaccggtatcgtcgtgaacgaaaaactcaacgtcgaaagaaagaagctgcgaaaattcagggcactcctccataatattgaggtaaacggatggcaaaatcagacctggggcaaagccttccatcttataaacgcggttgagggctacattaacttcgttaatatggtcaatccaagtaaagcactggtgtttaaagagaagctctctgctatcatcgcgaaacatggaaaaccaattgtggaggttcgcacaactattcccgagatagcagagacaattaaagtctccgaggataaggaggagattatagcgcctaaagaggaaaaaacagattggtggaatatcttctga

SEQ ID NO: 13206 - RNA, 1515 nt, synthetic construct
  source 1..1515: mol_type = other RNA
atgtccgagcagctgacacggcagcagctctatgaccggatcaaaagctctagcaaggacagttacatactggaagagatgaagcgcctgggcttctggaagtcaaagggacagcctactctggaagagacactgatagagaaggaggcgagcttgcaacaggaactttcaactcttgtggccaaagaacggaaattccagaaccaggagctcctactgaaagaaattcataagcaacgcatgcagaaggcaaaggcaaaacgggaggaaactaaggagaaaagagcaaaagaaaaacaagagaaagctgcgcgctgggaggcccttaggacaaccgaaataatttatcttggcgagggggtttctaaaggcctgcagcctactgcctccaacgggaccctgttggcccagtacaacttgccgtactttgataccgtggcacaactggccgatgctatggggattagtacaaagatgctcacctactgggcgtaccacaggcctgtgtctcttaccagccactactatactttcgagattgccaaaaaaagcggtgggaagaggaagatcgcagcaccaaagaaaggactgaagaaactccagaactggatcttaactagtatcctgtctaaaatcgcccttcaggacgaagtccacggctttacgtccaaaagatcaatcgtgtcaaatgcccaaccacacatcggcaaggctgtagtggtgaatatcgatttgaaagacttctttccatccgttcactataagcgagtcaagggtttgttctcgactctaggatacagcgaacagatcgctagtatcctggcattattatgcacacaggcagagacaaagcaggtgactctggataacgtgttatactacgtgcagcagggtaatcgggtcctgccccagggatccccagcttctccagccatttccaacctcatcgcctacaagctcgacaaacgtatgaagggactggccaagcgatatggcttcacatacaccaggtatgcagacgatctcacattcagctcacatacggccaccgataaagatattgctgccttgctgcactttgctaagaagatttccaccagcgaggatttcactgtacatcctgacaaagtccatgtgatgaaacagtcgagacaacagaaggtgacgggagtagtggtgaatgaaaagcccaacattgaccgtaatagactcaggcaatttagagccctgctgcaccaaattaagaataaggggtggcaggacaaacagtggggcaaatctaacaatgtctatgcggccattgagggctatatcctattcgtccacatggttgctcccgagaaggctctcgtctttcgcaagcagctggaagatatagttgctatccatgggaccccaccccctacggaggtacaacccgtgccccagccggttaccgaagagaagacaatagttcctgagaataacagtaaggccaacgaagaggacacaaccaattggtggaccaccttttga

SEQ ID NO: 13207 - RNA, 1506 nt, synthetic construct
  source 1..1506: mol_type = other RNA
atgtctgagcaactgaccaggcagcagttgtatgatcggatcaaggagtcctctaaagatgggtacattctggaagagatgaagcggcttggcttttggaagtcacaaggagagcctactctcgaggaaaccctgatccagcgcgaagctaacttgaacaaggaactgactgctctggttgccaaagagcggaaatttcagaaccaggaaatgttgctgaaagaaatacataagcagcgaatgcaaaaagcgaaagctaaacgtgaggagactaaacagaagagggagcagaagaagcaagatcaggccgctagatggcaggagattcaagagaaagagataatttacctgggagatgacgtgtccaagggactgcagcagacggagagcaacaaagatctgcttctgcagaacaatctacccttttttgagaacgtgctccacctggctgaatccattggtacgagcactaagaagctgacttattggtgctaccatcgcaaggtgtcaacgaacagccactactataccttcgaaattccaaagaagagcggtgggaaaagaaagatctcagcacccaaaaccggactcaagaacctgcaaaagtggttactggacaccctactcagcaaaattacaatggcagaggaagtccacggattcaccgccaataggagcatcgtttctaacgccaagtcccatatcgggaaggaagtggtgatcaatatcgaccttaaggatttcttccccagtatacatttcaagagagtgaaaggcctcttcaaggccctcgggtactctgagcagattgcctccatcttcgccctgatcagtactcaggcagaaaccaaagaggttttgctcgatggcgtcaaatattacgtccagtccggcaatagaatcttacctcagggctcccctgcttcgccggccattagcaatctgattgcctacaaacttgacaagcgcttaaaaggactagcacagcggtatggctttacctacacaagatatgcagacgacctgaccttcagtagcgaggagaataatgctaaaaattcggcagctcttctctactttgccaagaagatcattacctccgaagactttacagtccaccccgacaaaatacaccttatgaaaaagtctaggcaacaaaaagtgacagggatagttgtgaacgagaaaccaaacatcgaccgcaatcggctgaggcagtttcgagcgttgctgcataatattagttgcaatgggtggaaagatcagaagtggggcaaagccaagaacatctacaatgcgattgacggttatatcttgttcatccacatggtacagcccgaaaaggcaattgtattccgtaagaagttagaggaaatagtcgtgaagcacggcaagccaatcacaaaatgttcaactccgctcccagtggaaacacagaagaaggaagagacactctcagagaaagaaaattcatcttctcctagtaactggtggagcaacttttga

SEQ ID NO: 13208 - RNA, 1512 nt, synthetic construct
  source 1..1512: mol_type = other RNA
atgagtaaggtgcttagccggcaggaaatctatgatcggataagaaactccagcaaagactactatattctggaagagatgaaacgtctggggttttggaaggaatcaagcgtgccaactgtggccgaatctttgattcagagagaggccttgcttaacaaagagctgcaggagctaattgctaaggacaagaagtatcaaaatcaggagctgatgctgcgtgaaatgcgaaagaaacggatgaaggaggcaaaggaaaagcgcgaagagacaaaacagaagaatgaacgagcacgcatcgagaggagtgagaaatggaagaaaattcatgcagcacagatcatttatctcggggacgattattctgcgggcctgaacaattcagcgccgattaacagcatcaatgccctgctgcccaccttctctgatgtccaggatctggccgccaagatgggcatcgatctctccactctaagattcctgtcattccaccgaaaagtctccaagaattgccattaccactcctacgagatcaaaaagaagagcggtggaaccagaaacatatccgtccccaaggggaagttgaaaaaggctcaacactgggtgctccagaacatccttaacaaaatcgaaatcaacgattcggcccacgggtttatcaaagggaagtctattgttaccaatgcccagcagcacgttaacaaggccgtgatcataaatctcgacctgaaggatttctttcctacgatccactataagcgcgtgaaggggctgtttattaagctgggctaccctgaacaactggcaattatattctccctcctctgtacccatgcccacacagaagaagtattcttggacggcatacgctactacgtacaaaatggcgaaaggttcctgcctcaaggatcgccagcctcacccgctatcagcaacttaatatgctacaagttagacaagaggttggatggcctcgcaaaaaaatacggagccgtctattctaggtatgccgatgacattacttttagtctcgacgacaatgagaacatcagcaagctgctcttttacgctcacaaaattatcgagggtgaggatttacagatcaacaaggctaaaacgcacattatgcgcaaaaatgctcagcagaaagtgacaggaatcgtggttaatcagcagccaaccgtagagcggaggattcttagaaaattccgggcacttttacataacattcttaagaatggctggcaggagcagaaatggggcaatggatctaatctgctgcatagcatcgagggatacattaattacatccatatggtgcacccaacaaaagctcaatcatatagggtgtccctaaaaactattttggagaagcatggtactcccgagatcaaggttaacatacccataaacatcgtccctcctccgcagatcgctagtaccgaggaagacccaaaagacagtgcgcccgaacaaaagaaagaggagacagactggtggaacctgttttga

SEQ ID NO: 13209 - RNA, 1512 nt, synthetic construct
  source 1..1512: mol_type = other RNA
atggcactcacgaggcagcagatttacgatcgaattaagagctcttccaaagatagctatatcctagaagagatgaagagaattggcttttgggagaattccgagatcccgagcgttccagagcagctgatcgccgaagaaaccgcattacagaaaacactcaaccagcttttggctcaggacaaaaaatattcagaccaagaggccatgttgagagccatgaggaagcagcgaatgcaggagagcaaacagaaacgcgatatcaataaacagaaaagagctcagaagatcatagagaagtctgagaaatggcagcaggtcaatcaaaaacagatgatctacctgggcgagtcagtgtcaaaggggctgcagaacgagcagcaaaatccgatccttctatccaagttcaacctggattttttcgaaaactcttacgacttcagtgtccaaagtggattcgacttgcccacgcttaagtacctggcctacaatcggaaagtgtctaaaagcacccattatcatgtattcgagataccaaagaagagcggcggaacccgcaagattactgcacccaaaacaaaactgaaggccttccaactctggatcctcgaacacatccttaacaagatcgtcgtagcacctatggtgcacggattcgtgcagaataggagtattgtgtccaatgcgaaccagcacgtacagaagaacgtggttctgaacttggatttaaaggacttctttccttctattagctataaaagggtcaaaggactgtttcggatctttggatattcggaatccatggctacacttttagcgctggcatgcacaacttgtgacatcgaaaagattcaaattgacggcgagacatactacgtgcagaaggggcctagatacctgccacaagggtcccctgcttcacccgctattagcaacctgatcgcctataaactcgacaaacgtctccatggcctggcctctaaatatgggtttacatacactcgctacgctgacgatctgactttttccggcaacgaggaagccgcacaatacatgggtaaattcctctgctttgtgaagaagacgattaagagtgaggacttcgaagtgaacaatgataagacttccattatgaggccttcgaatcagcagaaggttacaggtatagtcgtcaataagaagttgaacatcgaccgcaagcggctgagacagtttcgtgctcttctccacaatattgatcagaacgggtggcagaaccaaacttggggtaaggctatacacctaataaacgccgtggaaggctatattcagttcgtgaagatggttgatgccgccaaaggtgccaagttccatcaaaccctgctgaatatcatcgccaaacacgggcggcccatcatcgagagtaaaattatgcaggtgtcaaaggctgcgatccccgaagcgccaatagttgagaagaccatatctaaagcaaccaccgacaagcagaccgattggtggaatctgttttga

SEQ ID NO: 13210 - RNA, 1464 nt, synthetic construct
  source 1..1464: mol_type = other RNA
atgggtgaacgtgccacaagggagaacacccctggacgaagcgtgccagtggagaagcagcccttggaggaaatgaagaggcttggtttttgggagcagcctctgccagccttccctgaagagctcaaccagcgggaggatgacctggcccgggaactgaatgaactcttggccaaaactgggaaggagaataaagagaagggagaaatgttattgcgccagcgcgctagacagaaaaaactcgaaaaagctgcacggcgaaagttggcgcgacccgagacaatcccttatctgggcgaggaggtttctaccgggctcagagaaaccgagacgaacacggcactcctacaaaagtataatctccccgtttgtacttctttcagggaactcggagagcagatgaactgcgacttacctaccttgcagtatctgctttacaatcgaaaagttacctcttccacccattactacacattcaagtttcccaagaaaagcggtgaaatgagaacaatctccgctcccaaacagaagctgaagaggctgcagtactgggtaacggagaacatcctgaatagactgccagtctgtgatcaggtacacgggtttgccaaagaaaggagcatattgactaatgcctccccgcaccttggcaaagacattgtggtgaacctggacctgaaggactttttcccctcaatcagctacaaaagggtgaagggcctatttagaaaattcggctattctgaacagcttagtatcctgttggcgctgatctgcacagaagcccaaacccggcaagtcgagctcaatggccaaacttggtacgtgcagacgaatcgccggagtcttccacagggctcacctgctagtcctgcgatttccaatctgattgcatataccctggacaagagattagaaggagttgccaagaagtacaactttacttatactcgctatgcagatgatctgacattctcagcttataaagagcaggaaaggaatatcacaaagcttctctactttattcgcaaggtcataagagaggagcggttcacagtacatcctgaaaaaacccagatcatgaggaagaacaggcaacagcgtgtcaccggcattgtggtcaaccagcggcccaacatagatcgtcagcagctccggcgatttagagccctgttacatcatattgaggtgaacggctggcagcaacaacaatggggacacccatccgggtacctgccccacagcatcgaaggctacattaactttattcgcatggtgcacccgcataaggccaaaaagttcgaggagcagctgatgaagatcgtgttcaagcacggatacccggcaggtccagcttccagtcccgagacacgcatagataagtcaggggaaaaaaaagagccagacagccctagcacttcgtctttcgaggtggactggtgggggctaccactgaccacttga

SEQ ID NO: 13211 - RNA, 1500 nt, synthetic construct
  source 1..1500: mol_type = other RNA
atggccgagcagctaaccagacagcaattgtatgacaggattagagaaacctcgaaggacgcttatatccttgaggagatgaaacggctgggattttgggagaactctagccagcctactttgtctgaggctctcatacagcgcgaggcaactttgcagaaggagctgaatgagttgttggataagcagaggaagtacaactctagggaacagctgcttcgagacatgaggaaacagaaactgaaactttccaaagaaaagcaggcggagacgaagaaacgccaggaagagaagcgccaactgaaggctcagaagtgggtggaaagcaaacagaaagagatagtctacctcggggagtcagtatccggtggacttaatgagaagaccagcaatcaggcattgcttgccaagtatcagctttccgatttcgcctccgtgctcggcctggctgaagccatgaaggtgtcgctggcccagctgcgtttcttggcttttcaccgggcagtaagtaagacctctcactatcacttttacagtgtacctaagaaaagcggaggcaaaagactgatttctgctcccaaaccattactcaagaagtgccagcactggatcctggaaagcattctgtacaagatcaccccctctgaacatgttcacggtttcgtccctaaaaaaagtatcgtgactaacgcaaaaccccatttacagaaggacatcgtggtcaatctcgacctgaaagacttctttcccagcatttcctacaagcgggtgaaagggctatttgttaacctcggctattcagagcagctggcgacagtgctggccctgattagtacacactacgaaatggataaggtgaacgtcgatggagacgtttactatgtgcaaaaaggggagagagttttacctcagggctcaccagccagcccagccattacaaccctcatcgcctatacaatggatcgacggctgcaaggcctggcgaagaagcttgggttcacttacactcgatacgcagatgatctcaccttttccacagatgctagcaacgaaggcaatatagcaaccctcttatacttcaccaaacaagtagtggaagacgaaggtttcacggtccatccagacaagactcatgtgatgcgtaaagggagtcagcagaaagtgaccggggtcgtggtgaatgacaagctaggcgttgacaggacgattctccgcaaattccgggcctttctgcatcaagtttcccagttcggctggggaaagaataagtggggtaacggcgataacccgagacaatcagctctggctttcgccagctttgtcatgatggtggacaaggaaaagggaactaagctgatgaaccagatcaaggccatcgcagactcctctgtggtcaccgagaaaaagaaaacagtctcacaagagccccagaaacaagtgccggaggagaagacaaatactagtacacctgcctcacaggattggtgggatatcttttga

SEQ ID NO: 13212 - RNA, 1599 nt, synthetic construct
  source 1..1599: mol_type = other RNA
atgagcatgacgcggcaggagctgtacgatcggattcgaacaactagcaaggaagcatatatactcgaggagatgaagcgcctcggcttttggggcgatagtgaaaagcccactctcgcggaggagctgataaacaaacaagcccgtttgcagaaagagctctccgaactgaatcagaaacagcgccagtacaactcacgtgaggcaatgcttaaggaagttagacttgagagaatgaaggccagcaaagaaaagcaaaaggaaactaaggctagaaatgaagagaaagtaagacttaaagctgaaaagtgggctgagacgcagaagactaatatcatttatctaggtcaggaggtgagcgagggcctgaacaataccacttctgataaggagaaactggaaaaactgaagctaccttatttcgagaacatcgtggaattctctgagaagattaacaagccaattagtgaactcaggtttctcgccttccaacggagcgtctcgaaggtcaaccagtaccataactactacgttcctaaaaagtccggaggtaagaggttaatttccgcgcccaagccaaaattgaaacacacacagaactggatcaagacaaacgtcttggacaaaatcgaaatcaatgagaacgtccacgggttcgtgaaagaacggtctattctgacgaacgcagagccacaccaaaataaaaatctggtgatctctttagacctgaaagattttttcccgtctatcagttacaaacgcgtgaaagggctgttcctgaagtttggatattccgaacaacttagcaccttgttcggccttctgaccacacacaatgagactgataagctgaatgtcgatggagagatatattacgcccaaaaagtggataaagagacaggaaagactaataggtttttacctcagggctcaccggcctccccagctataaccaccctgatcgcctacaagatggacaaacggctcgagggactggccaaaaagatgggtttcacgtatacccgctatgcagatgacttgacctttagcagtgacctggacctgaaaaaggacaccaaagctacaaataagatcatcggaagcctgctctactttgtgaagaaggtggttactagtgagggtttcgaaatccatcctgacaagactcatattatgaggaaggggaaccagcagaaggtaaccgggatcatcgtgaaccaaaacaccgaaaataagctaggcattgacagacagactttacgaaagtttagggccttcctccaccagacagctaaaacagggtggaaagtggacaaaaatgcaaaggacaaaaagtggggcattcatcccgatcccaagcaggccgcccttggcttcgcttcatttattaagatggttgatgcggagaaaggggagaagttcatccagaaaatcaagtccatacccaccgcagaggactacctccagaccgacgatacaacattggtatcccagaagaccgaggagaagaccctgaaacaggtggaaacaaagtcaaaagagtcagaacaggaaattgaaaaacaatcggatgaatctgactggtgggacattttttga

SEQ ID NO: 13213 - RNA, 1536 nt, synthetic construct
  source 1..1536: mol_type = other RNA
atgagtcagcacccgaccaggcaacagctttatgatagaattagggcctcctccaaagacagcgtgatcttggctgaaatgaaacggttaggcttctgggaagatagccctcagcccactctccccgagactcttatcgcccgggaagccacactccagaaggagctcaacgatctccttacgacagagaggagattccagaactcagagcaggtcctggtagacatgcggaaagaccgcatgcgcaagagcaaagaaaagcaagcagagaacaaggctcgaagactcgaggagaggcgacagaaggcagagcagtggcagcagacgaagacccaggatattatctacctcggagagggtgtctctgccggcttacaggcagcgccctcagacctggagcgtctacaaagcttgggactgccaatattcgagaatgtattggacttagcccagcagatggggatccctcttcctaagctgagatttctggccttcgagaggaaaatagctaaggtgtgtcactacagctactttcagctgccgaagaaatcaggtggactgcggagaattgcggcaccaaagccactgctgaaacaagctcagcagtggattatgacacacatcctctatcagatccccaataaggattgcgtacatggcttcgtgcccgagcgctctatactgagcaacgcacagccccatctgggccaggaagtggttattaatcttgacctgaaggacttcttcccatcaatcagttatgcccgcgtgaaaggactgttcgtgaaactgggatatagtgagcagttggccactatccttgcactactgtgcacacatgctgaaaccaaggccgttaccgtggatggtgagcagtttttcgtgcaggaaggcgaacggcggcttgtccaaggatcccccgcttctcccgcgctctctaatctgatcgcccacaagttagataagcgactggaggggctggcggccaaatatgggtttacatacacacgctacgcagatgacttgactttttccgcccctaaagctgacgagcctgctattagcgccctgcttgcttatgtaaagcgcgtggtcagggaggaaggcttcgccctccacccggacaaaactcacctaatgaggaaaggggcacaacacaaagtcaccggggtcgtggttaatgaaaagccttcggtcgacagaaaacagttgcacaagtttagagccctcctccaccaaattgatcaaaccggctgggagggcaagcagtgggggaacacgccaaacatcgttcattcggtgcaaggttacgccaattttgttgcaatggtgaaccccgaaaaaggccagaagtttgtggcgatggtgaaggcactgatagctaaacatcccgcccctccactggttttgcgttacaccccggccccagaacaaccccctgctgatgaaactcattccacccagccagccgcaccaacatctccagctagtcctcagaagcctgaatccgactggtgggacgtgctggatctatga

SEQ ID NO: 13214 - RNA, 1515 nt, synthetic construct
  source 1..1515: mol_type = other RNA
atgagcactcagcttaccaggcaacagctttatgaccggatccgcacaacctccaaagatcagttcgtactcgaagaaatgcagcgcctagggttctgggagaagaaagagcaacctacactgtcagaaacattgatcaagcgagaagctgatctgcagaaagagctgaatgagctgctgaccaagcagaacaaatacaataaacgcgaggccatgcttctcgaaatgagaaaggccaagatgaaggcctctaaagaaaagcaggcggctacgaaactgcggaatgagcagaagaggaaagacaaagccaagaaatggcaggaatcacaacagaacgacatagtctatttaggcgagggagtgtctgcagccctgatccaaaaggagaacaatctggaaaacttgcagaaatacgaattgcctctctttgagaatatgcttcagctggctgaggctatgcagatcccgttatcaaaactgcgctttctggcttaccaccggaaggtgagcaaaatcacacactacaatcacttcacaattcccaagaagtctggagggctcaggaccatatcagcaccaatgccagatctgaagaaagttcagcagtggatccttgagcacatcctgtacaagattaagccaaaggctcaagttcatgggtttgtccccgagaggtcgatcttaagcaacgccacccctcacatcggtaaggatatcgtgattaacctcgacttaaaagatttcttcccctccatctcttataagagggtcaaaggcctgttcgtcaaactcggctattccgagcaaatagcactcacgttggcacttttgtgcacatatcacgagactgaaaagttgaatgtggataacgagatctactacctacataaaggagagcggtatctgccacaaggcagtcctgctagtccggctataacaaccctcatcgctcacaagatggacagcagactgcagggcttggccaccaagtatggtttcacctatactcgatacgcagacgacctgactttttccgccaataaagacgccgaggaaaacatcaataagatgctgcttttcgtgaagaaagttattgaaagtgaggatttcgaactacatcccgacaaaactaaaattatgagaaagggaagccagcagaaggtgaccggaattgtagtgaaccagaaacccaatgtagatcgtcagcagtttcgtaaattcagagccctgctccatcagatcgagcagacagggtgggagaacaagaaatggggcaacaaggacgcccatattgtgtacgcagttaagggttttgccgaatttgtgcacatgattaatcccacaaagggggagcagctcaagaagaagattgcggagatactgactaaataccctgcaaccgtgcctgccaagccccaaaaagaggtcgcgtcccagacgaaggaggaaaccccaaacattcaaactaatactaacattcagccaaccgaatggtgggatatttttgaaaactga

SEQ ID NO: 13215 - RNA, 1380 nt, synthetic construct
  source 1..1380: mol_type = other RNA
atggccaatcagcccagcagagaggacatcagaaagagggtcgctgaatctactaaggacgccgtaatactggaagagatgaaacgtttcggcttttggaaagaggagttttcacccgaactcgaggatatccttcaaaaacaaaaagaaaccgagactgagctgaacaccctcgtgcgaaagcagacgcgttacaggaatccagaaactctgcggaaagagatgcttaaagaacgtatgaaggcgagcaaacaaaaacggcaggaggccaaggagcgcaaagaacaaaagcggctcgctcgcgcagaaacctggaaaaagaggaaggagacagaggtactgtacctaggcgaagacgtgagttccaggctgtccgagacagaacccaacctggaattccttgccaagtggaacctgcccaatattgagaatcctttggctttagcaaacgccctttcattagagctgtcccagctccggttcttgacttacaacagaaaagtaagtttggtgaaccattataagcgcttctacataccaaaaaagatggggggcaagagacttatcagcgctcccatgccgcttattaaatcagcacaactgtggatactcaacaatattttgtatctgatcccacacaccgaccaggcccatggatttattcctcagcgctcaatcgtttctaatgcagcacagcacgtgggtaaggagttagtgctgaacctagatttgaaggacttctttcctagcatcagcttctctagagttaaaggactgtttcagagctttggctatagcggacagatctccacacttctggctctcttgtgcacagaagccgaggttgaacaggttgctatagacggcaagaaatattttgtgtccattggtgaaaggaccctgcctcaaggatcgccttgctcaccagccatttccaacttaattgcctacaagctcgataggcgcctacagggaatagcgaataagtggggcttcgtgtatacgagatacgcagacgatctctcttttagttgtgggtctgacaacctcgataactttcagcagctcctgtggagtgtccaggaggtcgtgaagtccgaaggctttactgtccatcccgaaaaaatccacatcatgcgcaaagggagccgacaggaggtcaccgggctgatcgtgaatagacagattgggatcgagcgaaaagagctgcacaggttccgggccttgctgcagcagattgaaaagaacggtccagctggtaagacatggaacggcaatccgaatctggagaattctatgcgggggtacgcgagtttcgtgatgatggtgaagcctgagctgggaattcgattcatgaagaagatcgattcgatcttctga

SEQ ID NO: 13216 - RNA, 1521 nt, synthetic construct
  source 1..1521: mol_type = other RNA
atgacacgccaagaaatctacaatcgcatccaggagctgggcagtaaacagtcctacatcgctgccgagatgactcgcctaggcttctggaaccaaggtggagagcccaccattccagctgaactgacccagcaggccaccgctctgcagactgaactgaatcagttgatggaacggcaaaggaggtatcagagtagacaggcaatgctgcaggaaatgcgtcaagctaggatggctgcagccaaacagagacgattggagacaaaggtacgtagggaagcggcacgcttagcaagggcagaaacttggaaaaacaaactcgctactactgtgccttatctgggtgatgaggtatctgccggactcaaaaataccaccagcgaccctgccagactcgcctactttgggctcccacatttcgacagtcctcttgccctggcacaggctatgagcctccctcttagcgagctgagatttttagcctacaatcgggccgtttccactgtaagccattataagagattctatctggcgaagaaatctggaggaaagcgtctgatctctgcccccatgcccagactcaagaaggctcagctgtgggttctggagcatattctgcacaaagttcaaccgactgagttcgcgcacggttttgtgaccgatcgaagcattctgacaaacgccacacctcacgtggggcaagacgtggtgatcaacgtggatctcaagaacttctttcccaccataggatatccccgagttaaagggctactcacaaagcttgggtactccgaggccatcgccacaatacttgctctactgtgcacagagccagacaccgaggctgtgcagatggatggcaagacatatcacgtcggtaatggggagaggacgttgccacagggagcccctacgtctccagctatcacgaacctgctagcctaccggttagaccggcgcctccaaggcatggcagcgagattcggatacgcctataccagatacgcagacgaccttaccttcagtgctaccggcgcagccgcaggtaaggctaaccaggtcttgtgggccgtggaacagatagtgcaatcagaaggctttactgtccatccagataaggtcactgtaatgcggaaaggcgatcagcagagggtgacagggatcgtcgtgaaccagaaaccgtcgatcgatcgcgcgaccttgaggcagtttcgagcgttgcttcaccagattgggcagtcgggctgggagtccaaaacctggggcaaccccaatccgacggcagatatccaaaatgtcgtcatagggtacgctaatttcgtgatgatggtgaagcctgacttaggacggcagctgcgggcaacaattgctggcctcattagcaagcctccgaccagctcctccgcctcatctatgcccactattgccgatgacctgtctcccgtgtcagcccccattaccacaccactggttcctccaacggcacccccagcctcaaaggactggtgggacgttctgtga

SEQ ID NO: 13217 - RNA, 1500 nt, synthetic construct
  source 1..1500: mol_type = other RNA
atgacaagacaggagatacaaaagcgcatcgaagagctgggtagcaaacagcagtttatcattgccgagatgactcgactggggttctggacccagcatggagaacccatcccagcagagctcgttgcgcaggatgccgccctccaaaaggaactttcccagctgctggaccgccagagacggtttcagtccagggatgccatgctgaaggagatgagacaagcccggatggctgccgctaaacagcggaggatcgaaacaaaacagcggcgagaagctgcgcgtaaagcacgcgcggacgcttggcaggcaactcttgcaacagatgtaccctacttaggtgaaggcacgcctgccgcactggccaatcacacagctgacccagaccggttgagacaggtcggtctgccccagtttgaaagcccattggccttggctagagcgatgggtctaagcctcagcgagcttaggttccttgcctataatcgggccgtttctacggtgtcacactataagcgattccacttaattaagaagtccggtgggaaacgcctgatttcagcacccatgccccgcctaaagaaggcccagctgtgggtactagagaatatacttagcaaggtccaaccaaccgaacaggcacacgggttcagggccgaacgcagcatactgaccaacgctcaacctcatgtgggaaaagatgtggtgatcaacatagatctcaagaacttctttccaaccgtgtcttatgggcgagtgaagggccttctggcaaaactcggctatagtgaggctctggccactgtcctcgccctgctttgcaccgagcccgatacacaggctctccaggtagacggaaaaacatactatgttggaaacggatccagatacttaccacaaggcgcccctacctcacccgcactgactaatttgctcgcctaccgtctcgacaggcgtctgaacgggctggcgcaagcatttgggtacgtgtatacccgatacgccgacgatctcacgttctctgccagtggcagcggggctggcaaagcgaaccaactgatttgggccgttgaacagatcgtgcagggagagggtttcgtcgttcaccctgataaaatctccgtgaggagaaagggccagcagcagagagtgaccggaatcgtcgtgaaccagaaagccagtatcgacagggctaccttgcggaggttccgcgctctgctgcatcagattggccagaccggatgggagggcaagacatgggggaatccggcgccggaggcagatatccagcaggtggttttaggctacgcacattttgtgcaaatggtcaagccagagttgggccggagtctggtggcctctattagggcactaattcagtcacgccctgacgcagccttggctcaaccggtggaacctgtgccagctactgtctcttcgactgctactaattccgctcctgtcgccagacccgtcaaggagtggtgggacgtactgtga

SEQ ID NO: 13218 - RNA, 1050 nt, synthetic construct
  source 1..1050: mol_type = other RNA
catcgaccagtaagcactgtgaatcactacaagtcattctacctgccaaagaaaagtggggggaaaagattgatatcagctcccatgcctcgtctgaagaaagcgcagttatggatcctggagcacctgctgcagaagatcacccccaccgaacaggcccacggtttcacgaccggacgctcgattgtgtccaacgcccaaccccatgtggggcaggaggtggtcataaacgtggatctcaaggatttctttcctaccatctccttcccgagggtcaaggggctgttcatggcccttggatttagtgagcaactcgcaactctgctggccctcctgtgcaccgagttgcctacctatgcagtgtctttggacggcagaacatactatgtggccacagatgagaggcggttaccccagggagctcctacgtctcccgctatttcaaatctgatcgcgtaccgccttgacaggaggctgcagggaatggccacccgttttgggtatgcatatacaaggtacgcagacgatcttactttttcagcaagcgatactgctgtgaaacaagtcgagcaggtgttgtggagcgttaaccagattgtagagagtgagggattcactgtccaccccgacaagatctccgttatgcggaaaggcagccagcagcgcgtaacaggtgtggttgtgaatgacaaaccgggagttgaccgggccacacttagacgatttagagccctcctgcaccaaatctctctcacagggtgggctggcaagtcttggggtggcaccgccactaatcatcaagctgatctgcgcaacgtggtcatgggctacgccaattttgtggccatggtcaagcctgaacagggccaggcgctccgggaacaaattaacaagctcattggcggtacgaacttatccgtgaatccattgctgagcgaacagccagctcccgataacgcaccagtcgtaacaggcgaatccactctaggaaccctaagtcagaaaccacctatcctgagccagaataaagactggtgggacgttctttga

SEQ ID NO: 13219 - RNA, 1488 nt, synthetic construct
  source 1..1488: mol_type = other RNA
atgacgaggcaagagatatacgacagaatccggggcctcggatccaaggattccttcgtcttggccgagatgaaacgcctcggattctgggaacccaccaccgacatgcccggactgcccgaacagctcattgagagacaaggtcagctgcagcgcgagctaaatgagctcctggagaaacagcgtaggtatgaaaacaggaaagctatgttggcagagatgcgcaagacccgcatggcagagtcgaagcggaagcaacaagaaactaagcagagaaatgagcagaaacgccaagagcgagccgctcagtggaaaaggcagcaagaacagacgattgtgtatttgggcgagaatgtttctggaggtctgcagagcgggaccgccaacaatgatcagctgcgacgatttggattgcctgatttcgattctcccttggccctggctcaggcagtcggagttaccctgtcccggcttagattcctcgcctatgacaggccggtgagtaccgtctcacattataagcgattctacctgctgaaaaagtcaggaggcaagcggctgatttcagcacctatgccttaccttaagacagtgcagtattggatcctggaacacatacttcgcaagatccagcctactgagcacgctcatgggtttacaatagatcggtctatcgttacaaatgcacagccccatactggtaaggacgtggtggtgaacctcgatctaaagaactttttcccttccattagctaccgaagagtaaagggccttttcgtcatgatcggttacgccgaaacaatcgccactatcctggcgcttctatgcactgagccagattctgatatgattgagttggatggcaaaacctactacgtggccaaaggaagcagagtgttaccccagggcgctccaacctcaccagcgttgacaaacatgattgcctaccggcttgaccacagactgcgcggtgtcgccaacaagtttggatacatttatacccgttacgctgatgacctcactttcagcgcatccgacgaagcggcagggcgtgtaggacagctcctctggtctatcaggcaggtgatcgatggggaaggctttgtcctgcaccccgacaaattacaagttatgagaaaggggagtcagcagcgggtaactggcctagtggttaatgaccagctgggtattgacaggaccactctgagaaagtttagggccctcctgcaccagatcgaacaaagcggctggcaagggaaaacatggggcaaaggccaaatacagaacaccgtgctgggctatgctaactttgtcgccatggtgaagccggagcaggggaaacggcttgttgagacggtaaagaggctgatgctgccagctgtggaaagcgcgggggaattaccgcgccaggagccaagtacaaatgggcagatcaatcagcctccaaaagacacaaacctgagtacagactggtgggacgtgttatga

SEQ ID NO: 13220 - RNA, 1566 nt, synthetic construct
  source 1..1566: mol_type = other RNA
atgtctctgacccgtcagcagctatacgatcagattagagcatcatccaaggaggagtacattcttgaagaaatgactagacttgggttttggccaaacaatgtggggcagcctgcacccgcggtgacacttattagaaaggagggcgaattaaaccggcagctgaatgagctgctggccgaaaagcagaagtatcgaaataagagaaagatgcttgaagacatgagaaaggatagaatggcaaaagccaaactcaaaagggctgaaactaaaaaaaggcgggaagaggagcgggtaaagagggccgctgagtgggcagctaccaagaatctccagattgtttacctgggggaggacgtatcagccggcctgaacaaagtgacccccgataccgcccaactcacccgctttggcctgccagtgctgagcgatgcggtagccctggcaaacgccatgaacatcaccatcggcaagctgcggtatttaagcttctccagaaagatcggccatcatacccactaccagcgatttcaggtgcccaagaagtccgggggtacaagggttataagcgcccctatgccacaactcaaagccgcacaacactggatcctggagaacatactctataagatcaagaacaacgatgccgctcacggtttcgtgccgggcaagtccatcgtcacaaatgcgactccgcacatcgggcaggacatcgtcattaatctcgaccttaaagacttctttccctcagtggcctacaaacgtgtgaaaggcctcttctgcaaactaggatacgccgaacaagtggccaccatcctgggactgatttgcacggagcccgaagtggatgaagttttgctggacggtcgcaagtactatgttgcgaaaacagaaaggcatctgccccaaggagctcccactagtccagcaatcaccaatcttatctgttacaagttggatcagcggtttgcaggcctggccaacaagtatggatatgcctatacgcgttacgctgacgatatgacattctctgccaagggtgacgcagcagacaaggctggccagttgctgcgggctatcaagatgttcgtcaaagaggagggcttcacactgcaccctgagaagttgaaagtcatgaggcgaggggacaagcaggaggtcactggaattgtggtgaatgagaaactgtcattggaccgcacaacacttcgcaagtttcgcgcgttattgcaccagatcggacataccggactatccggcaaatcttgggggaaggggaaaaacattatttcgagcatggaaggatatgctaatttcgtgtacatggttaagcccgatctcggagccaaactgaaaagcagcttgacggccctcctccaacgcgaggatataaaagctgaggccaggagtatttgggcaggcgagcaggctcctacaaccccaagtgtcgcaggtgtccatataaacactactccgcaggctacgcctgctgccgaagttccacctgtgaatccctctactgacaaacctgccgctcctgacaagccatggtgggatgtattatga

SEQ ID NO: 13221 - RNA, 1593 nt, synthetic construct
  source 1..1593: mol_type = other RNA
atgtcccttactcgacagcagctgtatgatcagattagagcctcgtcaaaagaggaatatatcctagaggaaatgacacggcttgggttttggcccaagtctgtgggccagccaacaccagcagtgactttgatccggaaagaaggggaactgcgacgcagccttaacgaattgatagccgaaaaacagcgctacagaaataaacgcgcaatgctcgaagatatgcgaaaagctcggatggccaaggcaaagcagaagcgcgccgaaacaaagaagcgtcgcgaggaggagagggtaaaaagagccgcggagtgggccgccgagaagaatctgcatatcgtgtatctgggagagggcgtgtcagccgggctcaataaggtaaatcctgatacggcccagctggagaaatttgggctcccagtctgggctgacgctattgcgctcgccaacgccatgggaatcactatcggtaaattacgttacctaagcttcaaccggaaggtcggccaccacactcactatcagcgcttccagatccccaagaagtctggcggcaccagagttatctctgctcctatgcctcagctgaaggccgcacaacactggatactagagaacatcctgtacaagataaagaacaacgaggcagctcacgggtttgtgcctggcaaaagcattgtgacaaatgccgcgccccatattggccaagacatcgtgattaatattgatttgagggacttcttcccatctattgaatacaaacgcgtgaaggggcttttttgtaaactgggttacgccgagcaggtggccacaattctggctttaatttgcacggagcctgaagtggacgagctgctgctggacggcaggaaatattacgttacaaagactgcacggcatttgccccagggggctccaaccagtcctgcgattacaaaccttatctgctataaactggacaggaggttcgccggactggccacgaagtacggatatgcatataccagatacgctgacgatatgacattctccgccaagggacctgcagcaggcaaagcagggcaactgctgagggctgtgaagatgtttgtcaaagaggaaggatttactatacatcccgacaagctcaagatcatgagaaggggggatcggcgagaggtaaccggtatcgtcgttaatgagaaactgtcattagatcgtacgaccctccggaagttcagggcattacttcaccaagtcggacaaactggcctcgcgaacaaaacctggggcaagggtaagaacattatatcctccatggaaggttacgccaacttcgtgtacatggttaaaccggagttgggggcgaaactcaaagctacactcgcagctctgctgcagcgggcagacattaaggcagaggctagaagtatctggacaggagaagccctcccgcagaaggagtccaacaccgccatcagcggaaacaccgaaaccatcactacccccgttagcaccgctaccaatggcaatggagccgccagtgccgctagaggtaataccggcactgataagcccgctgcggctgataaaccatggtgggacgtcttgtga

SEQ ID NO: 13222 - RNA, 1530 nt, synthetic construct
  source 1..1530: mol_type = other RNA
atgagcttaaccaggcaactactctacgacagaatcagggctagcagtaaggaagaacttatcctccaggaaatgactagattagggttctgggcggaaaacctcgcccaacccagtcctgcggcctccttaattcagcaagagacagaagtccgccggcaactgaacgacctgattaacgaacgacagaagtatcgcaacaaacggatgatgttggaggacatgagaaaagcccggatggctaaagcaaagctgaagagagaggagacaaaacagcggagggaaacggctcgaaaagagagggcagccgcctgggctattaccaaagaccagcagatcgtttatcttggcgaggaggtttccgcggggctgaacaaggtagtgcccgatctcgtgcagctgcagaagttcggtctgcctgtgtttgcagacgctaatgctctggccaccgcaatgggaatcactcttggtaagctacgatacctgtcatttaacagaaaggtgggccatcacacccactaccagaggttccagatcccaaaaaagagcggcggcagccgtacaatttcggccccaatgccacagctaaaggccgcccagcactggatcttggagaatatcctctacaagattaaaaacgatgtcgcggctcacggtttcgtgcccggaaagtctattgttactaacgctgctccccatacagggcaggacatcgtgattaacattgatttgcgcgacttctttccaagcatcgcctacaagcgagtgaaaggcctgttttgcaaactgggttatgcagagcaggtcgcaactatacttgccctgatatgtaccgagcccgaggttgatgaaattctgctcgatggacgtaaatattacgtagccaagaccgcaaggcatttgcctcagggagctcccacctcccccgcaataacaaatctgatctgcttcaagctcgatcgccgctttaccggacttgcagaaaagtacggctatgcatatacacggtacgccgacgacatgactttttccgccaaagggccagctgcagacaaggccggccaactcctgagagctgtgaaaatgttcgtgaaagaggaagggttcaccatccaccctgataagctgaaagtgatgcgcaaaggtgataaacacgaggtgaccggaatagtagtcaatgaaaaattgtcactcgaccggactacgctgagaaagtttagggcgctgttacatcaggtcgagaagacagggctcgccaataagtcatgggggaagggcaagaatatcatttcttctatggagggctatgcgaatttcgtctacatggttaagccggaattgggagccaaactgaaagccactttggccgccctgctgcaacggcctgacatcaagagtgaggctcgtgggctttggacgggcgaggtcaaagagaagaaggtgtcagatacaccggtagctccaaccgcccccgtgaatccgcctcctagttccgcaagctctgaaaagccatggtgggatgtgctttga

SEQ ID NO: 13223 - RNA, 1608 nt, synthetic construct
  source 1..1608: mol_type = other RNA
atggctgaatccctgacccgacagcaactgtatgacagaattcgggccagctccaaggaggagttcatccttgaagaaatgatcagactcggcttttgggcgaggaacaccgcacagccctctcccagtgagacacttatcaggcgggagggagaactgagacgggaactgaatgatttattggccgaaaagcagcgttaccagaataaagtcaagatgctggcagatatgcgcaaagatcgtatggccaaatccaaactgaaaatcgcagagacaaagaagaggagggaagaggaacggaaagctcgggccgaagcgtgggcagttgccaaggaccaacagattctgtacttgggcgaggaagttagcgccgggctgaacaaggtgaaccctgacaccgcgcagctcgcaaagtttaacctccccgtatttgccgacgccaccgctctggccaatgccatgggaattaccttagggaagttgagatacctagcctttaatcgaaaagtgggtcaccatacacattatcagcgtttccaggtgcccaagaaatctggtggaaccagggtgatctcagctcccatgccgcaactgaaggctgcccaacactggattctcgagcacatcttatacaaagtctcccattccaacgctgcccacggattcgtacctgggaagagcatcgtgactaatgctgcaccacacgttgggcaggatatagtcataaacatcgacctgcgcgacttcttcccctcaatagcttacaagcgcgtcaagggtctgttctgcaaactgggctatgctgagcaggtggccacaatcttagccctgatttgtacagaaccagaggtcgacgaggtactgctagacggaagaaagtactatgtcgcaaagaccgctcgccatctcccacaaggtgcgcctacgtcaccggccctgacgaaccttatttgcttcaagttggaccggcgctttgccggtctggccgagaagtatgggtatgcatacacccgatacgcggatgatatgaccttctccgcaaagggagctgccgctgacaaagccggccagttgctcagggcagttaagatgtttgtgaaggaagaggggttcactatccatcctgacaagctgcaggtcatgaggaaaggcgacagacatacggtgacaggcatcgtggtgaatgaaaaactgagcatcgatagaaccacactcagaaaatttcgcgctttgctccacaatatcgagaaaactgggctctcgggaaaacgatggggcaaaggcaagaacattatttctagtatcgaagggtacgccaattttgtgtatatggtgaagccagagtggggcgcaaggcttaaagagaagcttgcggcacttctacagcggcctgatattaaggctgaggctcacgcaatttggaccggcaactctagtcagcccgtaactactgaggccatatcagcgtcttcgcacccagccggctacactagcagtgatacaacaactcctgcagccaccaccgatagcagcactacaattcctggacgcataacgcctccagagccaccggctgccactgataaaccctggtgggacgttgtgtga

SEQ ID NO: 13224 - RNA, 1524 nt, synthetic construct
  source 1..1524: mol_type = other RNA
atgcctgagggactaactcggcagcagctgtacgataggatcagggaaacttccaaggaggaatatatcctcgaggagatggttcggctcgggttttggtccagggacaccgacaaacccagtatccccgaagcgcttatcaaacaggaaggagagctcaatcggcagttgaaccagttgctgtctgagcgtagtaaatatcgcgacaaaaaacgcctgctggtggagatgcgcaaacaaagaatggcccaagccaaagctaagcgtgcggaaaccaagaagcggaatgagcagaagcgaatagagcgggcggctgcctgggctgaaaagaagcagcaagacattatctacctcggcgagaacgtctctgcgggtctgaacaagaaccaatctgataccgcccagctgcagaaatacaacttacctgtatggcacagcgctacagatctggcagccgccatgcaactcccactcggaaagcttagattcctcgcttttaatcgctcagttgctcaccagacccattatcagagatttgccatcccgaaaaagagcggcggtacgcggattatctcggcacccatgccacagctgaaggctgctcagcactggatattagagaacgtactgtacaaggttagcaactctgggagcgctaacggattcgttccaggcaagtcaattgtgaccaatgccatacctcacgtcggcaaggacctggtgattaatatcgacctaaaagatttcttccccagcgtcgcctataatcgcgtgaagggccttttctgtaaattggggtacagtgaacaggtcgccactatactgggactgatttgcacagagcccgaggtggacgaagtgctgttggatggccgaaagtactttgtggccaaaacagcaagggtgttgccgcagggggcaccaaccagtcctgcaattacaaaccttatctgctacaagatggaccgtaggttcgaagggctgtcagcgaagtatggttacgcttatactagatatgctgacgacatgacctttagcgcgaaaggcgaggctgctgcaaaggccggtcaactgctctgggccgtaaaaaaagtggtggccgaggaagggttcgtcctgcatcctgataagctcaaggtgatgaggaagggcgatcgacatgaggtcacgggcatcgtggttaatcagaaactttccatcgacagaactactttgagaaaatttagggccctactgcaccaggtggaactgacagggctggccggtaaatcatggggaaagggaaacattattgcctccatggagggatacgccaatttcgtgatgatggttaaacccgagcagggcagagcattaaagaccaagttagcagcaatcctttcccgcgccgatattaaagctgaagcccaggccatgtggaagaatgaaccacccgccgaacaacccgcaatgcctcccgcaaaccctgtagctccgcctgcaccagagaaaaagacagatgatccatggtggaaggtggtctga

SEQ ID NO: 13225 - RNA, 1539 nt, synthetic construct
  source 1..1539: mol_type = other RNA
atgcctgagggactcactcggcagcagctgtatgatcggatacgacagagctctaaggaggagttcattctggaggagatgacacgactgggcttctgggcacgtgatgtcaacaagccatcagtgccggagactcttatccagcaggaaggcggcctgcagaggcaactcaacgaattactccaggagaaggcaaagtaccgcaacaagcagagactgttgacagacatgcgcaaagagaggatggccaaggctaaggcaaagcgcgccgagactaagcaaagaaatgagcagaaacggatcgaaagggccgcggcctgggctgaaaagaagcagcaggatattatctatcttggagaagctgtctcagccggcctgaacaagaacacgtccaatgaggcacagctccagcatttcggcctgcccgtttaccacaatgctcagcagctggcagacgctatgcaactggccctcggtaaactccgctttctagcattcaaccggtccgtagccactaccacccactaccaacgtttccagctccccaagaaaagcgggggagttcgcacaatcagtgcccccatgccccaacttaaggcagcccagcactggatcctcgagaacatcctatacaaagtctctaatagtgatgccgccaatgggtttgtcagggggcggtcaattgttactaatgcccaaccacacataggtaaggacgtggtagtcaacattgacctaaaggatttctttcctggcatcgcatataaaagggtcaaaggtttattctgcaagctgggctatagcgaacaggtggcaacaattctgggactgatctgtactgagccagaagtggatgagattatactggacggaagaaaatacttcgtggccaaaacagatagggtcctgcctcagggggctccaacctctcctgcgattaccaaccttatctgctttaagatggatcgcagatttgaaggcctgagcaaaaagtacggttatgcttatacgcgatacgccgacgatatgacgtttagcgctaaaggcgacgctgctgccaaagtgggacaattgctctgggcggtgaaaaaagtagtggctgaagagggcttcgtgctgcaccctgataagcttaaggtgatgagaaagggtgaccggcatgaggttacaggaatcgttgttaacgaaaagctttccattgaccgtaccaccttaaggaaattcagagccttgctgcataatgtggaattgaccgggttgtctgggaaaaagtggggaaaggggagtattatagccagtatggaagggtacgccaattttgtggcaatggtgaaacctgagcaaggcaaaaaattaaaagcccagctggcagccttgttttccagagcggacatcaaggctgaggctcaggcgatctggaaaaatgaagagcagccccaacaggactccagcgtatcgccacagacccccaacacccaggacacaccgactcctcccaagccatcaggtccagaaaagccctggtggaaagtggtgtga

SEQ ID NO: 13226 - RNA, 1545 nt, synthetic construct
  source 1..1545: mol_type = other RNA
atgcccgagggtctgacacgacagcagctgtatgataagattcgcgaaagttctaaagaggagtacatcctagaagaaatggtgagattagggttctggcaaagggacaccgagaaaccaagcgtacccgaggttttgataaagcaggagggtgccttaaataaggagctaaatcagttgctccaggagaaataccggtaccgcaacaagcaactgatgttgacagagatgagaaaagctcgcatggcaagagcgaaagccaagcgtgcggaaaccaaaaagcgcaacgaggagaagagaatcgcaagggctgcggcctgggccgaacagaaacaacaggatattgtctacctcggagagaatgtcagtgccggcttaaataagaaggtgtccgacgaagcgcagctgcgcaagttcaacctcccggtgtggcataccgcacaggatctggctaatgccatgcagctttcactgggaaagctcaggttcctggccttcaatagaacggtggggcaccagacacattatcaacgttttcaaatccctaagaagtctgggggaaccagagtaataagcgcccccatgcctcagcttaaggcagctcagcactggatcctggagaacgtcttatacaagatcactaacagtacatcagccaacggatttgttcctgggaagtccattgtgaccaacgccattccacacattggaaaggatgtggtggtaaatattgacctgaaggactttttcccttctatcgcatataagagggttaagggcatgttctgcaagctgggttattcggagcaggtcgccactatcctgggtctgatttgtaccgaacctgacgtggacgaggtgatgctagataaccggaaatttttcgtagctaaaacagaacggaggttgccacagggcgcacctacttcccccgccattactaacatcatttgctttaaactcgaccggaggtttgaggggctcagcgcaaagtacggctatgcttatacacgatacgccgacgatatgaccttctccgcaaagggcgaaccagctgccaagattggccagttgctctgggcagccaaaaaaatcgtcgctgaagagggattcgtcttgcatcccgacaagcttaaagtgatgcgaaaaggcgacaggcacgaagtgacgggcatcgttgtgaacgagaagctgtcactcgatagaactactctgcggaagtttcgggccctgctgcatcaaatcgaacttactggactcgccaacaagacatgggggaaaggcaatatcataagctccatggaaggttacgctaattttgtggccatggtcaaaccagaacaagggaccaaactgaaaaaccagctgaacgctcttcttcagcgcaatgacatcaaggcggaggctcaggctatgtggaaaggcgaagaggttgcatctgccaaaccggcagaacacctcccagagaaagagaataagaaggataacaccagcaataacaataaaacgcccgataacgataaaccctggtggaatatactgtga

SEQ ID NO: 13227 - RNA, 1548 nt, synthetic construct
  source 1..1548: mol_type = other RNA
atggccgaaggccttacacgccagcaactgtatgataggatcagggcctctagcaaagaggagctgatattagaggagatgactagactcgggttctgggctaacaatactagccagccctccccaagcgagagtctaatccgacaagagggcgttttgcggcgtgaattggacgagctgatcaaagaaaagcagaaataccgcaacaaggagaagatgctgcaggatatgcggaaggaaagaatggctaaggcaaagctcaagagagcggagacgaagaaacgaagggaggaagagaggaaagccagagcgatagcctgggctgcggaaaaaaatcagtccattgtgtatctgggtgaggatgtgtccgccgggctgaacaaagtagtgtcaaatacggagcagctggccaaatttggccttcctgtgtggcatgacgcagttgctctggctaacgctatgggcgtcacccttggaaaactcaggtatctctctttcaatagaaaggtaggacaccatacccattaccagagatttcagattccaaagaagtctggaggtacccgcgttatctccgcccctatgccccagctgaaggctgcacagcactggatcctcgagaacatcctctacaaaattaagaacagtgaggcagcgcacgggtttgtgcccggcaagagcatagtcacaaatgcagcaccccacgtgggccaggacattgtgataaacatcgacctacgagacttcttcccttctatcgcctacaaacgggtcaagggccttttttgtaagttagggtacagtgaacaggtggccaccatcctcggattgatctgcaccgaaccagaagttgaagagatcacccttgataatcggaagtattacgttgccgccacagctcggcatctcccccaaggagcccccacttcaccagcaattacaaacctgatctgctacaagctcgacaagaggtttgaagggctgagtgccaagtatgggtacgcctatacacgctacgctgatgatatgacgttcagcgccaagggtgctgccgccgacaaagcaggccaattgctgtgggctattaaattagtcgtgaaagaggaagggtttactattcaccccgacaaactgaaggtgatgcgcaaaggagacaagcgtgaggtgaccggcatcgtagtcaacgataaactgagcctggaccgggttactctgcgcaagttcagagccttgttgcaccaaatttctaccaccgggctgtcaaataaatcgtggggaaagggtaaaaacattattagctccatcgagggttatgctaattatgtgtacatggtcaaacctgagcagggagcaaagctgaaagccacattagcggcactcctgcagagggaagacatcaaggccgcttcgcgttccatttggacaggcgaaactcttgccgccgcgcctgtcgtaacaactgtgaccgcagagactccggcatctaagccaattataaaggaaacccctccggcttcaaaggataaaccatggtgggatgtgctatga

SEQ ID NO: 13228 - RNA, 1581 nt, synthetic construct
  source 1..1581: mol_type = other RNA
atggcagaaggactaaccaggcaacaactctacgaccggatacgcgcatcctcaaaggaagaatttattttggaggagatgacaagactcggtttctgggccaagaataccagccagccttcactgcctgagactctgatccgccgtgaaggagagttgagaagagagttgaatgagctgcttgcagagaagcagaaatatcgtaataaggaaaggatgctggccgacatgcgcaaagagagaatggcaaaggcgaagctgaagcgcgcggagacaaaaaaacggaacgaggaaaagcggaaagcaagggcagctgcctgggccgagaaaaagaatctcgatattacgtatcttggcgaggaggtgagcgccggcctgaataaggttacacccgatgaagcccagttagcaaagtttggattgcctgtctttaaagacgcgaccgcgttagccgccgctatgggtgtgaccctaggtaaattgagatttctggccttcaacaggcaggtcgcaaatacgagtcactaccagcggtttgaaatccccaaaaaaagcggcggtacccgtgtgatttctgcacctatgccccagctgaaggccgcacagcactggattcttgagaacatcctgtacaagatcaacaactccgctgccgcacatggttttgtgccagggaagtccatagtaactaacgctgtcccccacgtgggacaggacattgttataaacatcgatctccgagattttttcccctctgttccttataaaagggtgaaaggcctattctgtaagcttgggtacgccgaacaggtggccactatcctcggcctcttatgcaccgaaccagaggtggatgagatcctgctggataaccgaaaatactatgtcgctaaaactgagcggcacctgccacaaggggccccaacatctccggctctcacgaatctgatttgcttcaaactggacagaagatttgagggcctggctgcaaagtacggatatgcctatactcgatatgccgacgatatgactttctctgctaagggcgatgctgccgataaagccggccaggtcctttgggctgtaaaacaggtggttaaagaggagggattcacgattcatcccgacaagctgaaggtcatgagaaggggcgataagcgggaggtgaccggcatcgtggtaaacgaaaagatcagcctcgaccgcgaaaccctgcggaagttcagggcccttctacaccagatttcgaagactgggctcgcggggaagcgatggggtaaagggcgcaatatcatatcaagtatggaaggattcgctaattacgtctacatggtgaaacctgaacagggcgctaagttgaaggagacattagccgctctgctccagagggaagacatcaaagcagaagcacataacctgtggacaacagggacaaccgaagggaccgccgccgaaaccactaccgagacacccagcgctccacaatccagtgcgccacaacatcccgagggagtgcacattgccaaggacacaccaactgctaccaacaaacctgacaagccgtggtgggacgttctgtga

SEQ ID NO: 13229 - RNA, 1578 nt, synthetic construct
  source 1..1578: mol_type = other RNA
atggctgaggggctgacgagacagcagttgtatgatcgcatacgggcatcgtcaaaagaggaatacattctcgaggagatgacaaggcttggattttgggctcagaatagttctcaacccagtctgcccgagacacttatccgaaaggaaggtgagctgcggcgagaactgaacgaattactggcggagcgacagaaatacagaaataaggagaagatgcttgccgatatgagaaaggaacgcatggccaaggccaaacaaaagcgtgccgagactaagaagagaaatgaggaagaaaggatcgctagggcagcagcctgggcggaaaaaaagcaacaggatattttgtatctcggagaagaggtgagcgccggccttaacaaagttaccccggacgaggcccaactgaccaagttcggcctgccggtattcaaagacgcaaccgcattagccaatgccatggggatcacacttggcaagctgcgttttctcgcctttaacaggaaagtgtctaactcatcccattaccagcgcttccagatccccaaaaaatctggagggacacgggttattagcgctcccatgccccagctaaaggctgctcagcactggatactggagaacatcctatacaagatcaagaatagcgatgccgcacacggtttcgtgcctggaaagtctattgtgactaacgctgccccgcatataggacaggacattgttatcaacatcgatctgcgcgattttttcccaagcattccttataagcgagtgaagggcctcttctgtaagttggggtatgcggaacaggtcgcctcgattttggggctgatctgcacggagcctgaagttgacgagattctgcttgataaccggaggtacttcgtggctaaaaccgaacgccacctaccccagggtgctcctacttcaccagcaattactaacctcatctgctttaagctggacaggcggttcgaggggcttgcagccaagtacggctacgcctatacccggtacgccgacgatatgacgttttccgcgaaagctgctgtggccgacaaggcaggccaggtcttgtgggccatcaagcaggtggtcaaagaggagggttttacaatccatcctgacaaactgaaagtcatgcgtaaaggcgacaaaagagaagtgaccggcattgtagtgaatgagaagctgagtttagacagggagacattaagacgcttccgggccttgctgcaccagatatccaaaactggtctggccgggaagtcctggggaaaggggaaaaatatcatcagctccattgagggatatgcaaactacgtatatatggtcaagccagagcagggagcaaaactgaaagccaccctcaccgcgctcctgcagagggaagacataaaagcccaagccagaagcctctggaccggcgaacaagctccagcccagcaacaagcaggccccgcttcacaggctgatactactaagacgaccgacacaacagctactacccaggcaccacctgcttccaatcctagcagttctgcgaagacagaaaaaccatggtgggatatcctctga

SEQ ID NO: 13230 - RNA, 1554 nt, synthetic construct
  source 1..1554: mol_type = other RNA
atggcagagggcctgactaggcagcagctgtatgaccggatcagagcctcctctaaggaggaatatattttggaagaaatgacccgacttggcttttgggcacggaacaccacacagccatccccttctgagacactcatacgcaaagaaggggaattaagaagggaactaaacgaacttcttgccgaaaagcagaagtatcgcaaccgggagcgcatgctggcagatatgaggaaagagcgcatgcagaaagcaaaggataaacgagcggagacaaaaaagagaaatgaagaaaagaggcgtgagaaggccgctgcttgggtggtgcagaaaaatttgaacattgtctacctgggcgaggaagtttccgccggcctgaataagaatgtcagtgacgaggcacagctaaagaagttttgtcttcctgtgtttaacgacgccgtcgccctcgctaacgctatggggataaccatcggcaaactgaggttccttgcattcaataggaaggtggccacaggtacgcactatcaaagatttgccatacccaaaaagtcaggtggtacacgggtgatcagcgcacccatgccccagttgaaagccgcgcaacattggattttggagcacatcctgtacaaaattgagaacgggaaagctgcccacggtttcgtgccaggcaagtcaattgttactaatgcggcaccgcatgttggacaagacctggtaatcaatatggacctgagagatttcttccccagtataccgtacaagcgggtaaaggggctcttttgtaagctgggatatagcgagcaggtcgccacaattttggccctgatctgcactgagcccgaggtggacgaggtgatgctggataatcgcaaatactacgtagctaaaaccgatagacatctgcctcagggggctccaactagtcctgccatcaccaatctcatttgcttcaagctagatcgaaggtttgagggcctcgccgccaaatacgggtacgtttatacgcggtacgcagatgatatgacattcagcgtcaagggagacgccgctgacaaagccggccaagtaatctgggctgtcaagcaggttgtgaaggaggagggtttcaccctccaccccgacaaattgaaagtgatgagaaagggcgacaaacgtgaagtcaccggtattgtggtcaacgagaaactgtctatagatcgcgataccctccacaaatttcgtgccctgctccaccagatctccaagaccggactcgccgggaagcattggggaaagggcaacatcatttcttcgatggaaggattcgcaaactacgtgtatatggtgaaacccgagcagggcgccaagctgaaagctactttagccacgctgcttcaacgggaagacatcaaggctgaggcgcgatcaatctggactggagaggcaacggctgtggctgcggcaccagctgacacaatcgcagatactaccgccagcgttacacctgtgaccccaaagcctgaaggaaaggcgactggggctgaaaagccatggtgggacattttatga

SEQ ID NO: 13231 - RNA, 1437 nt, synthetic construct
  source 1..1437: mol_type = other RNA
atggcccaggggctcacacggcaacagctttacgacaaaatccgcctgtcgagtaaggacgaggtgattctgcaagagatgactcgtctcggtttttggagcaaggattcagcctccgcgtcccctagcgccctgttgatcgaacgggaggatacccttcggaaagagctcaccgatttgcttaaggaaaagcagaagtatgcaaaccaggagaagctcctcgctgagatgagagctgtgagaatggagaaggccctcaaaaaaaggcaggaaacaaagctgcgcaaagaagaacagcgcaaagaaagagccgaggaatgggcagagcagaagaacaacagcatcttatacctaggggagaatgtaagtgcagggttacacaagatagtgtctgatgtgacacagctgcagaagtacggactgcctgtgtggcacgatgtcaatgccatggcagcggagatgggactgggactgggggagatccggttccttgcctttaatcggaaagtcgctcactgctcccattatcaacatttctacctgcctaagaaatcagggggaaagaggctgatatctgctccaatgcccaggctgaaagctgtgcagaactggattttgcacaacatcctgtacaggattaaaaattccgacgccgctcacgggtttgttccaggcaggtctatagtcacgaacgccacaccccatgtgggcaaagagttagtaattaacatcgatctgagggacttctttccgtctgtcgcctacaaacgggtgaagggcttattcgttaaactaggttactccgaacagttggccacaatcctgggcctgctgtgtaccgagccagacgtagatgagattgtgcttgacaatcgtaagtactatgtcgctaagactgagcgccatcttcctcagggcgctcagagctcacccgccattactaacctaatttgctataagttggacaagaggtttgagggcttggccgcacgccatgggtatagctatactcgctatgcggatgacatgactttctctgctaatggcgagggtatcgaaaaggccggacaactgatggctttcgtcaagaaagttatcaaggaggaaggttttaccatccaccccgaaaaactcagagtgatgagaaagggcgacaaacgtgaggtgaccggagtggttgtgaacgacaagctgagcatagaccgagaaacgctgcgaaagttcagagcactcttgcaccagataagcaaaaccggactcagtcaaaagcaatggggcaatggaaatatcgtttcctcgctgcagggctacgcaaactacgtggcaatggtaaaaccgggggcgggtgccaagctcaaagcaagtattaacgagcttttcaatcgaccagaaatcaaaagagaagccgtctcaattctgggcgataaaaaggaatga

SEQ ID NO: 13232 - RNA, 1533 nt, synthetic construct
  source 1..1533: mol_type = other RNA
atggctgagggactaactaggcagcagctgtatgaccgcatcaggagttcctctaaggaggaatacatcttaaatgagatggtccggctcggcttttgggcacaccagacagccactcctaccttacctgagagcatacttaaccgggaacgagagttaaggaaggaactaggcgatctgctggccgaaaaacagaagtaccgggacaaagaaagattgctggccgagatgaggaaacagcggatggaggctgccaaacagaaacgcgccgccactaagcagcgacgtgaagaagaaagacagtctcgggccgctgcttggaccttacagaaggcacatagtgtagtatatttgggggaggatgtatcagcaggcttgaataaagccgtctcagacaccgtccaactggctaagtacggattgcccctgtttcataatggagaggctctggccactgctatgggcgtgtcactggggacactccgctttctcgcctttaaccgaaacgttggctacattagccactataaacggttcaagctccccaaaaaatctggagggcacaggaccatcagcgctcctatgccacagctgaaggctgcacagcattggatacttgagcacatcctgtataaggtgcctcacagcccagccgcccatggatttgttcccgagagatcaatagtgacaaacgcagccccacacgttggacaggacatcgtcatcaacatcgacttgaaggacttcttcccctccatcgcgtacaagagagtgaagggtctgttctgcaaactggggtactccgaacaagttgcgacaattctcggtctgttgtgcacggaacccgaggtcgatgaggtcagtctggataataggacctactatgtcgccaagacagcaaggcatctacctcagggtgctccgacctcccctgccattaccaacctgatttgtttcaaactggatagacgctttgaaggcctggcggcacgtcttgggtatacatacaccagatatgccgatgacatgacgttctcgacgaaaggcgccgccgctgaaaagccagggcagcttatctggagcgtgaaacaggttgtgaaggaggagggctttaccattcaccccgacaaactcaaggtgatgcgaaaaggtgatcagcgtgctgtgactggtatcgtggtgaacgaacaactttcccttgatagggcaacattgcgcaaattcagagccctccttcaccagatctctcaaaccggcctggccaacaaaagctggggcaaggggaatataattagtagcatggagggctacgccaattacgtggccatggtgaagccagcactcggagcgcaattcaagcaaaccctggctaatctcctcgctcgcgatgacattaagcaggcggcgcgggctatgtggactggaactccagtgtctccggtacctattcctgcacccactcccacagcatcccccgcaaaggaggagacaccacctccggctggggacaagccatggtgggacgtgctgtga

SEQ ID NO: 13233 - RNA, 1506 nt, synthetic construct
  source 1..1506: mol_type = other RNA
atggccgaggggttaactcggcagcaactgtatgataggatccgggcttcaagtaaggaagaattcatacttgaggagatgacgagattggggttttggaccaaaaatacggcgatgccttctcccagcgaaatgctgataagacgcgagggcgaattgagacgggagcttaacaaattaatggaggaaaaacacaggtatcgtcatagggaacagatgctgaatgagatccgaaagcagcggatggaagccgcgaaggccaagcgagcagccactaagctgcggaatgaagagaagaggaaggaaaaagctgcaaagtgggcaattgagaaggaaaagaacattgtctacctcggcgaagaggtgagcgctgggttgaacaaggtgctgagtgacgaggctaaactgcgcgcagccggactcccaatttatcacgatggcgcagctctagccgaggccatgggtataacactgggaaaactgcgcttcctgtcttttgatcgcaaggtggctaccgtcacccactacaaacggttctacataccaaagaagagcggcggacggcgactgatttctgccccaatgccccagcttaaggccgcccagtattggatcttagagaatatcctctacaaggtaaaacacagtgatgcagcccatgggtttgttccagggaaatccatcgtcacaaatgcagctaaccacgtgggccaggatatcgtgattaatatcgatctccgtgacttcttcccgacagttgcgtataatagggtcaagggaatgttttgcaacttgggttactccgagcaggtgagcaccatcctggggctgttgtgtaccgagcctgaaatggaacccgtaaacctcgatggaaaagactaccatgtggccacatcagccagacatctacctcagggcgcaccctgcagtccagccattactaacatcatttgttataagctggaccgccgtttcgaaggactcgcgaggcgatttaattacacctacaccagatatgcagacgacatgacattttcagctaaggaggccgctgcgaacgacgctggcaagctaatttggggagtcaagcaagtggttaaggaggaggggttcgtcgtgcatcctgacaaactcaaagtgatgcgcaagggcgacaagagggaagttactggtgtggtagtcaacgagaaactgtcaatcgacagagagacacttcgcaaattcagggctctgctgcaccaaatttcggtgagcggaatcgaagggaaacagtgggggaaaggcaatatcgtgtctagcatcgagggctacataaactacgtccagatggtaaaaccggaagccggacaacagctgaaaaccaagtggcaggtgctccttggtagaactgatatcaagtcccagactagagcctcctctacgggccagattgtgattccccccgttgtgcctcctgcacaagattccggtgagacaggcgagaaaccatggtgggacgttatgtga

SEQ ID NO: 13234 - RNA, 1506 nt, synthetic construct
  source 1..1506: mol_type = other RNA
atggcagaggggttaactagacagcagctctatgacagaatcagaagttcaacgaaagaggaagtgattctcgaggaaatgacacgtctcgggttctggacccgtaaccaggcaatgcctgccccatcggaggtgcttatcaggagagaaagtgagctgcgacgggaactcaataagctggtggaggagcagcaaaggtacaggaataaggagaaaatactgagtgatttgagacagcagaggatggccgctgctaaagcaagacgcgccgagacaaagctacggaaggaggagaaacgcaaggaacgggcagcccagtgggccattgagaaggagaagaacattgtgtacctgggagaagacgtctccgcgggcctgaacaaggtggtaagcgatgaggaaaaactgaaagctgctggactgccagtttatcatgacggacttgcgttagcagccgcgatgggcatcactatcgggaagttacggtttctttccttcaaccgcaaagtggcaaacgtttcccactataagaggttctacatccccaaaaagagcgggggaaagcggcttatttccgctcccatgcctcagctgaaagccgcccagtactggattcttgagaatatcttgtacaaggtgaaactctctgaatctgcccatggcttcgtgccggggcggtctatcgtgacgaatgcaacacaccatgtcggacaggacatagtcatcaacattgatctcaaggatttcttccctaccatcgcctataagcgggtgaaaggtctgttttcaaaatttggatactcagaacaggtcgccaccatcttggctctcctgtgcaccgagccggaggtcgaacaagtagccctggacggccgtgaatatcacgtggctacaaccgagcggcatttgcctcagggtgctccatgtagcccagccatcactaatatcatttgctacaagctggataggcgcttcgagggactggctcgcagatttggctatgcatacactcgctatgcggacgatatgacttttagcgccaaggaggcagccggagataacgcaggtaaactgatttggggtgtgaaacagattgtcaaagaagaggggttcgttatacaccccgacaaactgaaagttatgagaaagggggacaaacgagaagtgacaggtgtagtggtcaacgaaaagttgtccatagaccgagaaaccctgaggaaatttcgcgccctgctacaccaaattagcgtgtcaggcctcgagggcaagcaatggggcaaggggagccttgtcaattctatcgagggctacatcaattacgtgcagatggttaagccagaagctggtcaacagttgaaggccaagtggcagctcctgctaggcagggaagacgtcaagacacaagtacgagccgctgccaccgcagcacccatattaattcctcccgttgctcctgcgcaggaagagccaaaagatggcgagaagccctggtgggatgttatgtga

SEQ ID NO: 13235 - RNA, 1509 nt, synthetic construct
  source 1..1509: mol_type = other RNA
atggctgagggccttacccgccagcagctctatgacagaattagagcctctacccgcgatgaggtgattctggaagagatgactcgtttgggcttctggaaaaaaaacaccctcatgccctccccatccgaagtgctgattcaccgggaggctgatttgactagggaactgaataaactgatggaagagaagcggcggtaccagaacagggagaagatgctcatcgagatgaggaagcaacgcatggcggccgctaaagccaaacgcgccgagacaaagctccgtaacgaggaaaagcgcaaagagaaagccgcccagtgggccgaacagaaggagaagcaaatagtctacctgggtgaggacgtgagccagggtctgaacaaaacagttagcgataccgagagattgacagccacaggccttccagtgttccatgacggggtagcccttgctgccgctatgggtatatctattggaaagttgaggtttcttgcatttaatcgtaaggtgggacacatcactcactacaaacgcttctacattcccaagaagtcaggaggcaaaagattgatttcagccccaatgcctcaactcaaggctacccaacactggatcctggagaacatactctataaagttcccaattccgacgcggctcatgggtttgtcccagggcggtcgatagtgactaatgcagtccaccatgtcgcacaggacattgtgatcaatatcgatctgagggacttcttccctaccatcgagtataagagagtgaaggggatgttctgcaagttaggctacagcgagcaggtggctacgattctggcactcctatgtaccgagcccgaagtagatcaggtggccctggacgggaaggattactatgtggcaaacacaaatcgacacctgcctcagggagccccttgtagcccagccatcactaatatcatttgcttcagactagacaggcgatttgaaggcctggcacgccgattcaactatacttatacgaggtacgcagacgacatgacattttccgcaaaggaaccggcggctgacgacgcaggcaaactgatctggggtgtgaaacaggtagttaaagaagaggggtttgttatccatcctgataagctcaaagtcatgcggaagggagacaagagggaagtaactgggatcgtggtcaatgataagctatctttagaccgggagacattacggaaatttagagctctgcttcatcagatcagtgtgagcggtcttacaggcaagcagtggggaaaggggaacatagtgtcaagtgttgaaggctacatcaactatgtcctgatggtcaaaccagaagcgggaaaacagctgaaggataagtggcggttgctcctgaatagagatgatatcaagacccaggttcgagccgctgcaacgcaatctgatgccccccctgccccctccagtagtaacgagaacaataccaccaacgacggcgaaaaaccgtggtgggatattctgtga

SEQ ID NO: 13236 - RNA, 1488 nt, synthetic construct
  source 1..1488: mol_type = other RNA
atgatgacgggcctgactcgacaagaactctacgaccgcattaggagttcaacgagagatgaggtgatcttagaggaaatgaagaggctgggcttttgggccaggtctaccggcgcaccctctctgtctgaaactcttataaggaaggaatctgagctacgccgtgagcttaacaaactgatggaggaaaaagctcggtatcggaacaaagaaaaaattctcaacgaccttcgcaagaaacggatgatggatgccaaggcaaagagagctgagacaaaacagaggaatgaagagaagagacgggaaaaagccgcagcctgggccgctgaaaaggaacgatccgtggtttatctcggagaagacgttagcgcagggctcaataaaaccttttcagatattacacgcctgagtgcggccggattgccaatcctgcatgacggagttgggttggccgcggctatgggaattactctgggaaagctcaggtttctttcctataacagaaaggtcgaagaggtgtcacactataagcggttctatctgccaaaaaaatccggcgggcgacgtctaataagtgcccctatgccccaattgaaagccgcccaatactgggtgttacagaacattctctataaaatccctggctctcagagcgcacatgggttcatccccgggaggagcatagtaaccaatgctcagcagcacgtgggtaaggatgtggtcatcaacatcgacctccgtgacttctttcctaccatcgtgtacaagagagtgaaggggatgttctgcaagctgggatacagcgagcagattgcaaccattctggccctgttatgtaccgagccggagcgggatcaagtaatgctggatggcaaagagtaccacgtcgctaacacaaaccgacacttacctcagggagccccttgcagccctgctatcaccaacattatatgttatcgcctggacaagcggtttgagggcctggcaaagaaattcaactacacttacactcgctacgcggatgacatgactttttcaacatccggagagactgctggtaaggctggccagctactgtgggcggttaagaaagtagtgaaggaggagggtttcacaatccatccagacaagctgaaagtcatgcggaagggggacaaaaaggaagttacgggcattgtcgtgaatgagaagatgagcctcgacagaaccacactgagaaagttccgcgccttgttgcaccaggtaagtgtgtccggtttcgccggcaagaagtgggggaatggtaatatcgtgtcctcgatggaaggttacatcaattacgtccagatggtcaaacccgagacaggcaaacagcttaaagacaagtttagactgctcctcaataggaaagatatcaaagcagatcttcccgaggctccgaaggaggttctgccagacacctctttgccagatcagaataacgataagccctggtgggacgtggtgtga

SEQ ID NO: 13237 - RNA, 1530 nt, synthetic construct
  source 1..1530: mol_type = other RNA
atgagcgcgggcttaacgcggcaggagctgtacgacaagattagggcttcctcaaaggaggaagtgattttggaagaaatggtccgcctgggcttctgggccaagaacgaatctgtccctagtgtgccagaaacattcattagaaaggagggggagttaaggcgcgagctgaacgaactcctttctgaacaagctaggtatcgcaataagcagcaggtgctgaccgatatgagaaaggcccgtatggccgccgcaaaagcaaaacgagccgaaaccaagaagaggaatgaagagaaacgtctccaacgcgctgcagcttggaaagaggagaaggaaaaaactatcgtctaccttggagaggatgtgtccgcagggttgaataagaccacctctgacgctgaacagctgcagaaattcggcctcccccttctaaatgatggtgctcagctggcagccgccatgggaattagcctgggcaagctgagatttctcgcgttcaatagaaaggttggaactgtaagtcactataaaagattctacctcccgaaaaaatcaggcggtaggcggttaatctccgccccaatgcctcagctcaaagctgcccaatactgggttttggagaacatcctatacaaggtaccaaattccgaatctgctcacggatttgttccgggtaaatcgattgtgacaaatgccagcaaccatgtgggccaggaggtggtgattaacatagacctcaaggacttttttcctacaatagagtacaagcgagtgaaaggcctctttatcaaactggggtattccgaacagattgccaccatcctggggcttctgtgcacggaacccgaagtcgaccaggtggcgctagacggcaaggagtacttcgtcgccaacacccccagacacttacctcagggtgcacccggtagcccagccataacaaacctcatctgttatggtctggacaaaaggttcgagggcctggcgaagcgttttggatacacttattcccggtatgcggatgacatgacttttagcacaaagggggaggccgctgataagatcgggcagctgctgtggagcgtgaagcaagttgtcaaagaggaggggttccacctgcatccagataagttgaaagtgatgaggaaaggtgacaagcgggaggttaccggcattgtggttaacgataagttgtctcttgaccgagagacactgcggaaattcagagccctcttgcatcagatcgataagactggcctggctaacaagcaatgggggaacggaaacatcatctcaagtgtcgagggctttgccaattatgtagcaatggtaaagcccgaggctggacgccagcttaaagataagatcaaagtgctgttcaatcgcgaggacataaaggcacaggctcgggcaatgatgagtggggccgcagtcaatggagccggaagcaccggatcaattgggggcgctgcagccaaggatgagcacatccctaaaaaagaagatggcaactggtgggacgtggtgtga

SEQ ID NO: 13238 - RNA, 1407 nt, synthetic construct
  source 1..1407: mol_type = other RNA
atgctattcaattatcgctactcaggcagcactcaggtctactcaaatgctacctccgccggcatctctttctcgccagatactcggcgggagccaaccttctttaacgagtacagaaacaagcaacaggtactgaccgatatgcgaaaagctagaatggcggcagccaaagcgaagcgagccgagacaaagaaacgtaatgaagaaaaaaggcagcaaagggccgcagtttgggcagaggaaaagagcaagtccattgtctacctgggagaggatgtctctgctggcttgaataagacatccagcaacacggaactcctccagagatttggactgccactcctccacgacgctgtgcaactgagcgctgccatgggtattacactgggtaaactgaggttcctggccttcgacaggaaagtaggtacgatctctcattataagaggttttatctgcccaagaaatcgggcgggaggagattaatctcagctcctatgccccagctaaaggcagcccagtactgggtcctggagaatatactctataaggtccccaatagcgaagctgcgcatgggtttgttccaggcaaatctattgtgacaaacgcaacgaatcacgtggggcaggacgtggtgattaacattgacctgaaggatttcttcccaactatcgagtataagcgtgtgaagggcctgttcataaagttggggtactccgaacagctggccaccatcctttgcttgctgtgcactgaacccgaggttgaccaggtggccctcgatggtcaggaatattttgtcgctaacaccccgcggcatcttcctcaaggagccccctcctctccagctattaccaatctcatatgttacggtctggacaagcgatttgaggggttggcaaagaaattcggatacacctacagccgctatgccgatgatatgacattttctaccaaaggagagcctgccgataaaatcggtcagttattgtggagtgtgaaacaggtggtgaaggaagagggcttccacctccaccccgacaagcttaaagtgatgcgcaaaggcggaaagcgggaggtgacaggaatcgttgtaaatgaaaagttaagtctcgaccgggatactttacgtaaatttcgggcactgctgcaccaaatcagtgtctccggccttgcgaacaaaaaatgggggaacgggaacattatcagttccattgaaggatttgctaactacgttgccatggtgaagcccgagacaggcagacttctgaaagacaagatcagacttctactgaatcgcgacgatataaagtcacaggcccgcaccttgatgactggcgcacctgccccggcaagcgagaagaaccctcctcagaagggggacgacaactggtggaatgtggtatga

SEQ ID NO: 13239 - RNA, 1503 nt, synthetic construct
  source 1..1503: mol_type = other RNA
atgaccgagcgcttgacccgacaggaaatctatgaccggattcgcgccacatctagggacgagtttatcctatcagaaatgaagaagttgggcttttggccttctgacgaagagaagccctccgtatcggaacagctgatcaaacacgagggcgagctgtccagagagttacaagaactaagccagaagcagcgaaagtttgataaccaacaagcaatgttggctgaaatgcgaaaagcccgcatggccgcggctaaaaaaaaacgcgttgagactaaggaaaagaacgaacagaagagaaaagataaagcagagcagtggaaacagcagaaacagaatgagatcgtgtatctgggcgaggacgtctcccacgagttaaacaacacagaagctgacacagctaaactggcccagtttggccttccgcactttgcagatgctctggcattagccaccgctatgaacatcagcctgggtaagctgagatttcttgcctataatcgcaaggtgtcaacaactactcattacaagaggttctatctagcgaaaaaaaccggcggcaagagactgatcagtgccccaatgcctaagctcaaagaggctcagtactggatcctggacaatatactctacaagttgaagaacacggatagcgctcacggtttcgtcccacagaggagtatcctcactaacgccagtaatcatattggccaggacgtggtaattaacatcgatctcaaagactttttcccctcaatcgattacaaacggatcaaagggctgttcgcagccctgggatatagcaaacaaatcgcctccatactggccctggtgtgtgcagaacccgatgtcgacatgattgacatagataagaagacctattacgtcgcacacacagagcggaaacttcctcagggggcccctacgtcaccagcgattaccaatctcatctgctacaagctcgatcaccggttcgaagggatcgcaaggaagtttaatttcaattacagtcggtatgcggatgacattactttttctgcaaagggagacggcaagaaactggtaggacaagtgctctgggccattcgccagattattgaatccgagggcttccagatccatccggacaagctcgccgtcatgcgtaaggggaggcaacaggaagttaccgggattgtcgtgaacgacaagccgggaatagataggaaggagctgagaaggttccgggcccttcttcatcagattgagctgaacggtaccgaggggaaatcttggagaaatggagtggatctggaaaatagcatgagaggttacgctagcttcgttgggatggttaagccagagcaaggaatccagttcaaggcccaattggaccagatattcggagtgcgtgctaaggtgaaacccgtgcctgctccagagatcaagatcgtgcctcccactattcaggatacaccacccaaacctgataacgacgaaaagccctggtgggagataatttga

SEQ ID NO: 13240 - RNA, 1503 nt, synthetic construct
  source 1..1503: mol_type = other RNA
atgtccgagaggttgactaggcaggaaatctacgatcggataagggcaacgtcacgcgacgagttcatacttagcgaaatgatcaagttgggcttttggcagtccgacgaagatcagccaaaggtgaccgaacaactgatccgccgtgaaggagagcttcatagagaattaaatgaactaacccagaaacaacgtagatacgacaaccagcaggccatgctggccgacatgcgaaaggcacgaatggaggccgcaaaaaaacggcggattgagacaaaagaaaagaacgagcagaagcgtaaggacaaagctgaacaatggaagaagacgcagcaatctacaattgtttacctcggggaggcggtgagcggcaatctgaacgacaccctggctgatacagccaagctcactcagttcggcctgccccattttgaagacgcactaggtctagctaatgccatgaacatgtctttaggaaaactgcggttcctggcctacaatcgaaaggtgtccacaacaactcactacaagcgcttctatctggcaaagaagagtgggggcaaacgcctgattagtgcgcctatgcccaagctgaaggaggctcagtactggatcctggagaacatcctttataaactcaaaagcaccgatagcgctcacgggttcgttccacagcggtctatcttaactaatgcccgaaatcacatcggccaagacgtcgtgataaacgtggacttgaaagattttttcccgagtatcgattataagcggataaagggactctttgctaaactggggtattcccagcagatcgcctctgtgcttgctttgatctgcagcgaaccagatgtcgacattgtcgatatagacaggaaaacctattatgtggcctctacagaaagaaaactgccacaaggtgctcccacctccccagccattactaacctcatctgttacaagctcgaccataggtttgagggcatcgcacaaaagtttaatttcaggtattcccgctacgccgatgacatcacatttagcgccaagggtgagggcgccaagcttgctggacaggttctgtgggccgtgaggcaggtaattgaggatgagggattccagattcacccggataagctcgccgttatgagaaagggcagtcagcacgcggtgactggaatcgtcgtcaatgagaaacctggaattgaccggaaggagctgcacagatttcgcgcattgctccatcagatagagctcaccgggaccgaaggtaaatcatggagaaacggcgtgaatctggagaactcaatgagagggtacgcaaacttcgtcactatggtaaagcccgaacaggggaacaaatttaaggctcaacttgatcgcattttcggcatcaggacaaaaagccagtcactgcctgtggtagagacgtcgattattccccccgcaattcaggcgacccctcctaaaccagagaataacgagaaaccttggtgggaaatcatttga

SEQ ID NO: 13241 - RNA, 1512 nt, synthetic construct
  source 1..1512: mol_type = other RNA
atgtccgaaagactgagcagacaacaactgtatgatcggattcgcgagacgtctaaagacgagtatattctgtccgaaatgaagaagctcggtttctggaagtcaaatgagactgagccccagatcagcgaacaacttattcagagagagggcgacctacacagagagttgaatgacttaagccaacagcagagacgatacgataaccagcaggccatgatcgccgacatgaggaaatcccggatggaagcgtccaaaaaaaagcagctcgaaactaaacaacgtaaccagcagaaacgaatcgaaaaggccgagaagtggaagacacaacagcagaatagcatcgtgtatcttggggaagaggtgtctggtggacttaactctacccagacagatatcgcaaaattgaactcattcggactgccgcactttactgatgtactggcactagcccaggccatgaagctgactctgggcaggctccgtttcttggcttacaatcgcaaagtgtctaccgtcagtcactacaaaaggttctatctgcctaagaagtccggaggaaagcgattaattagcgctcccatgcccatgctgaaagacgctcagtactggatactcgagcacatcttatataaggtcagtcccacagatctcgcccatggcttcgtacctaatcgctctattatgacaaacgcacagaaacacattggccaagatgtggtcataaacctcgacctgaaggattttttccccaccattgattacaagagggtaaagggcctgtttaataagttcggctattcagagcagattgccactattctggctctcatctgctccgagccagacgttgaattgctggaaatagatgggaagcagtactacaccgccaaatcagagagaaagcttccacagggagcacccacatcgcctgccattaccaaccttatatgttaccgcttggactgccggtttgagggcattgctaagaaatttgggtttcagtacagcaggtatgctgacgatttgacattcagcgcgaagggtgaaggtaaaaaacttgttggccagctactgtggagtgtgaaacaagtcataaccaatgaaggttttactctccatccagacaagatagccgtgatgcgcaaaggcagtcagcagaaggtgaccgggattgtcgtgaatgacaaggccgggatcgatcataaggagctgcataaattccgggcactgatccaccagatcggaaaaaccggcatcgctgggaagacgtggcggcaaggagtgaacctcgagaattccatgaggggctacgcagagttcgtgtcaatggtgaagccagagcaggggcagaaatttaagattgcgctggacaaagtttttggggttaaagtcaagagtgacaagcaagatatcccacagaacccgatcatcgagaacaaactgcctgaagagaagcctaagaacatcaacaaaaatgaagacggaaagtcttggtgggaagtgatctga

SEQ ID NO: 13242 - RNA, 1494 nt, synthetic construct
  source 1..1494: mol_type = other RNA
atgagtgagaggcttacccgtcagcagatttatgaccgcatccgtcagaccagtagggatgagtttattctgtccgaaatgaagcgactaggattttggcaaacagatgccaatcagcccaaactttctgaggccctgattgataaagagagggagctgtaccaagaactaaacgaattgtcccaaaagcagaggcgttacgctaataagcaggccatgttggctgaaatgcggaaaagcaggctggaagcctctaagaagcgcaggcaggagactaaagctaaaaacgaacagagaaggcaacagaaagctgaagcatggaaagtccaccaacagtactctattggttacctgggcgaaggggtcagcggagggctcaatcaaactcagagtaatccacagcagctcgctctgcttggactgccagacttccgcagtccattccagctggcacaggcgatgggagtatctctcgggcatctgagattcctggcatttaacagaacggtgtccaaaataagccactataagagattctacctgcctaagaagtccggtggcaaacggctcatttcagctcctatgcccctgctgaagaaggcccagtattggatcctcgaaaacatcctatataagatcccgtcaagcgaggccgcccacggctttgtccctaaaaaatcaatcctgagtaatgctcagaaccacactggccaggacattgtggtaaacatcgatctgaaggacttttttccaaccattacgtaccacagagtgaaggggttgtatcataagctcgggtatagcgagcagatcgccactatccttgcgttaatatgtaccgagcccgaggtggatattgtcaagatcgattcgcagatatactacacagccaagtccatacggaaacttcctcaaggtgcacccacctcccccgctattactaatttgatctgccatcggttggatctcagattccagggtctggcccaaaagttaggatttaactattcccggtacgctgatgacctgtcttttagcggcgcaagcgagggatccaaactcgttggtcagctgctctggtcaatccataagatcgttaaggacgaaggattcgttgtgcatccggagaagatagcagtgatgcgcaaagggacacaacagcgagtgaccggcatcattgtgaatgagaaggtgggcatcgatcgccaaatgcttcgaaagttcagagccttgatccaccacattgaacagtctggagtgcagggcaagacatggaacaatagtaaaaatctggaagcctcaatgcgcgggtacgttaacttcgtatcgatgataaagccagagcagggcgcgaagttcaagatgaaattagacgccatttttggccagaaagagaaaaccagcacatctcggcctatcaaagacattcccccgcccagcccacctttccaggactcaaacgacgacgataaagcatggtgggaggtggtctga

SEQ ID NO: 13243 - RNA, 1518 nt, synthetic construct
  source 1..1518: mol_type = other RNA
atggccgacaagcagcctacccggcaacagttatatgatcgcatcagagaatccaccaaagacgccgtggttctggaagagatgaagcgcctagggttctggcccaagggagagcaatctcccagcgttcccgaactcttaattaaccaagaagccgagctgaacaaggagtttaatcagctctttaaccagcagaggaggtatcagaataaggaggctgttctgcaggagatgcggatgaaaagaatggcagacgcaaaggcgaaacgtgaagccaacaaaaaaaagagagaacttcagcgacttgagaaggcagaagcttggaagaagaggaagactacagagatcatttatctgggcgaagatgtgagcgtcggactgaataacattgaggcaaacgtagcagccctccagaagtaccaactgccagcctttgccaatgaaacggagctggcacaagcgatgggcatcacgcttcccgatctgcgttttctggccttctcgaggaaggtgtcaaatatctcacactaccgcaaattctacctgcccaagaagtccgggggcaagcgtctgatcagtgctcctatgccacgcctgaaaaaaactcagtattgggtcttggagaacattttgaataaagtagccgtacacaccgcggtgcatggcttcactctgaaccggtcaatcctatctaacgccttaccacatgttggcaagaaagtagtccttaacattgacgttaaagactttttcccctctatccattacaagcgagtgaagggacttctccagcagttggggtacagcgagaaaatagcaactatcctcagtctgttgtgcaccgaggccgtgacggaggaggtggagatcgacggtaagaactacttcgtgcagaaaggaaatagggtgttacctcaaggggctcctacttctccggccatcacaaatattctctgctataaactcgatctgagactgcagggcctcgcagctaaacatcagtgtcagtacacccggtacgctgatgacgtgacattcagctggaatagcagtgatataaatgcccaacagatggtttggaggataaagaaaattctgtccgatgagggctttaccgtgcacccagataaaattagagtgatgcaccaaggtgcccggcaggaagtcaccgggattgtggttaatgaaaagcctgggatagacagaaataagctgcgaaaattccgcgccctattgcaccagctgcagaccaaggatgcagccgtcctgttgccgggagctgagtccccagcgaatgtggtcatcggttatgctaacttcgtgcgccaggtcaaacccgctcttggagcatttttcgctaagcagatcgaccagctctttcagacaggccggctccaatatgtggtgaaggaaacaccccctgccggtacaaacaacgacactcccccggctaaacctggcaatgacaaagaacctccaaagggggatgatgacaagccatggtggaacgtcgtctga

SEQ ID NO: 13244 - RNA, 1509 nt, synthetic construct
  source 1..1509: mol_type = other RNA
atgtttgattctaagcccacccgtcaacaactgtacgacaggatcagggaaagtagcaaggacgccgtggtactagaagaaatgaaaaggctgggcttctggtcaaaaaacgatcagtctcctactattcccgagctgcttatcaaacaagaggtcgagctgaacaaagagtttcagcagctctttaacaggcatcgccagtaccagaataaagaagcagttctgaaagagatgcggctgaagcgtatggctgaagcgaaggcaaaaagggaggctaataagaagaaacgcgagcagcagcggttcgagaaggctgaagcctggcgcaagcagaaggagactgagattatttatttgggcgaagaggtatctatcggtcttaatcacacggaatcaaatgtcgcagcactgcagaaacatcagctacctgtgtttgtcaatgagaacgagctggccttggcaatgggtgtaactctcaaagaactgagatttctcgccttcagcagaaaggtgtcgacagtgtctcattacaggaagttttacttacccaaaaagtccgggggaaaacgactcataagcgctcctatgcctagactgaagaagacgcagtattggatcctcgagaacatactcaacaaagttgccgttcatcaggccgtgcacggcttcacactgaatagatcaatcctgtccaacgcccagcttcacgtgggtaagaaggtcgttcttaacatcgacgttaaagacttcttcccctccattcacttcaaaagagtgaagggactactccagcagcttggatatgctgagaaaattgcgactatactggcgctcttatgcacagaagccgtgacggaggccgtggaaattgacgggaaggactactttgttcaaaaaggcaatcgggtgctgccacaaggggctcctacctccccagccataactaacattctttgttacaagttggacaagagattgcaaggcctggctaccaagcaccagtgccattacacccgatatgctgatgatgtgacattctcctggaacagcaatgatgtgaatgctcagcaaatggtatggcgcatcaaaaatatcctccaggacgagggtttcaccgtccacccggataaggtgcggatcatgcacaccgggacacgacaggaggtcaccggaatcgtggtgaatgaaaaattgggcatcgatcggaataagctgcgtcggttccgcgccttattgcaccaattacagacaaaggacgccgccgagctgatgcctggagtggaaagtcccgctaacgtggtgattggctatgcaaacttcgttaagatggtcaaaccagcgcagggcgccgcatttagcaaacagattgatcagctgtttcagtcaggccgcctccagtatctggtaaaggaaactccccccagtccagggaacaatggagtccctccaaccccaccgagccaacaggcagggaaggatgacgacaagccctggtggaacgtcgtctga

SEQ ID NO: 13245 - RNA, 1518 nt, synthetic construct
  source 1..1518: mol_type = other RNA
atggccgataataagttgacgagacagcagctttacgacaggatacgcgaatcaagcaaagatgccgtcgttctcgaggagatgaaacgcctgggtttctggcccaaaggagacgagagccccactatccccgagctgctgatcaacaaggaagcagccctgaacaaggagttccgagaactattcgaaaagcaccgtcagtatcagaataaggaagccgtgctaaaagagatgagattaaagagaatggcagcggcaaaggcgaagagagaggagacaaaaaaaaaaagagaacagcagcgcttcgagaaagcagcggcatggaaaaaacggaaggaaaccgaaattctctatctcggggaggacgtttccataggcctgaacaatatggcgggcaacgctgatgccttacataaacatcatctgcctgcctttgcgaacgaaaacgagcttgctgctgctatggggattgaacttaaagcactgcggttcttagcattcagtcgtaaagtgagtactgtatcacactatcgcaagttttatttgcctaagaagtctgggggaaagcggttgatcagtgctccaatgccacgtctgaagaaggtccaatactggatcctggagaacattctcaataaggtagccgtccaccaggccgtgcacggcttcacacttaatcggtcgatcatctccaacgcccaactccatgtgggcaagaaagttgtactgaaccttgatgtgaaggacttttttccgtccatacattttaaacgggtgaagggtcttctgcagcagttgggatacagcgagaagatcgctacaattctgagtctactctgcactgaggccgtgacagaagaagtggccctggacggcgggaactactttgttcagaagggaaatagggtattgccccaaggagccccgacgtctcccgcaatcaccaacatcttgtgttttaaactggacaaaaggctccagggcctggctacccgccatcaatgccactacacccgctacgccgacgatgtgaccttctcatggaactccactgacatcaatccacagcaaatggtgtggcggattaaaaagatactcgctgatgagggattcgccgtccaccccgataaaataagaatcatgcaccagggggctaggcaggaagtcactgggatcattgttaatgagaaactgggtattgacaggaacaagttgcgacaattccgagcccttctgcaccagttacaaacaaaggatgcctctgagctgatgcctggccaggtgagccctgccaatgccgtcattggctatgcaaacttcgtgaagatggtgaagccggctcagggcgccgcttttgcaaaggcaattgacaaactctttcagacaggtaggctccagtacctggtgaaggacgccccacccgtcctgaatggaaatccagctccttcccccagcccaacctctaatcctccagctaacaagggggatgataaaccttggtggaatgttaccggctga

SEQ ID NO: 13246 - RNA, 1509 nt, synthetic construct
  source 1..1509: mol_type = other RNA
atggctgataaccggaatatcagacaagagctctacgacagaatacgcgaatccagcaaggatgaggtggttttagaggaaatgaaacgtatgggcttttgggctaaagatgagaacgggcccactatccctgaattgctcatcaaaaaggaggtggagctgaacagggagctcaacaaattgtatgaagagaagcggaagtatcagaatcgagaggccgtgttgaaagagatgcgccttaaacgcatggcagaatcccggctgaagagagaggagaacaagaagaaaaaggagctggcacaccttgaaagggccgaggcctggaaaaagaaaaaggacacagccattatttacctgggtgagggagtgagtgtgggcctgaacaacaccgacaataacctggccgcactccaaaaacataacctgccagtcttcaataatgaaaatgagctggcaaacgccataggaatccccctgaaagaacttagattcctcagcttcaatcgcaaagtcagcactgtttcacattatcggaagttctacattcctaagaagtccggtggcaagcggctcatcagtgcccctatgccaagactgaaacaggtccagtattggctgctggaaaatatctttaacaagatagctgtgcatcccgcggttcacggtttcgctctgcatagatcaatcatttcaaatgcccaacctcacgtgggcaagtctgtggtagtaaatattgacgttaaagacttcttcccatctattcactataagagagtgaaagggctgttacagcagctgggctttgcagaaaaaatcgccgtgatcatggcactcctttgtacggaggctgtaacagaagaagtggagatcgatggcaggaattactttgtgcagaaagggaacagggtccttccacagggcgcccctacttctccagcgattacgaatatcctctgttacaagctggacaagcggctccagggactcgcgactcagacacagtgcagctttaccaggtacgctgatgatataacattctccttcaacaacgaaacaaccaatgctcagcagcttgtctggcgcatcaagaaagtgttagccgacgaaggatttaccgtccatcccgataaggtgaggatcatgcgcaagggagcctgccaagaagtcaccggagtggtggttaacgagaagttaggcatttctcgaaaaaaactacgtcagtttagggccgtattgcaccagctgaaaactaaagacgcagctgagctgaagtgggggcacgggaacttggcctccgcagttaccggttatgcaaactttgtcaagatgataaaacccgtgcagggggccgctctgcaaaataccattgtaacgttgctgcagaccaatcgactacagtacccgctagcggtcactagcagtaagaagaatattcagacacctcccgcccaaaacaacgacccatcggctaagaaggatgacgataagccgtggtggaatgttgtgtga

SEQ ID NO: 13247 - RNA, 1506 nt, synthetic construct
  source 1..1506: mol_type = other RNA
atggcgcacaaaaatatccgacaagaattatatgaccgaatcagggagagctccaaagacgaggttgtgttagaggagatgaagcgtatggggttttggagtaagaatgaagggggtcccgctgtgcctgaactcctgattaaaaaggagagcgagcttaataaggaactcaacaagctttacgaagaaaaacgccggtaccagaacagagaggctgtactgaaagaaatgcgccagaagcggatggccgaagcaaggcttaaacgggaagaaaacaagaaaaagaaggagcaggagaggttcaataaagctgaggcctggaaagagcagaaaaaaaaggagatcatatacttgggggaaggcgtgtccgtcggtctgaataacatagataataacttggctgccttacaaaaacacaacctccctgttttcaacaacgagaacgacctcgctaatgccatcggcatcccactgaaggagttacgtttccttagctataacagatccgtctcgaccgtgagccactatcggaagttttatattcccaagaagagcggagggaaaaggttgatctctgcccccatgcctagactaaaacaggttcagtattggatcctggaaaacatcctcaacaaggtggccgtgcatgccgcagtccatggatttgcccttcaacggtctattatttctaatgcacagccgcatgtaggaaaggaggtggtcctcaatgttgacgtcaaagacttctttcccagtattcactataagagggtgaagggcctgctgcagcatctgggatactcagagaaaatagcggtcatactggcactcctctgcacagaggcagttaccgaagaggtggccattgacggacggaactatttcgtgcagaaaggaaatcgcgtcttgccccaaggcgctcctacctcaccagccattacgaacatcctctgctaccaattggataagagactacagggcctggcaaacaaaggccagtgttcttttactcgctacgcagatgacatcaccttctcctttaatgatccaggtacaaatgcccagcagctggtttggagaatcaaaaaggtgctggcggacgaagggttcacagtccaccctgagaagattcgcatcatgcgcaaagggactcatcaggaagtaaccggtgttgtggtgaatgaaaagcttggcctgaatcgtaagcagctgagaagatttagggctgtactgcaccagctcaagacgaaggatgcggcagagctgaagtgggggaatgataacctagcttccgctgtaactggctacgcaaatttcgtgaagatggtgaagcctgctcaaggagccgccttgcagaaccgaattgccgccctgctgcaaactaataggctgcagtacgcaagtaccgtgacaggcgctcccaaaaagaaagatcccacaccaccggccaacaactcagccgatccaaagaaagaggacgacaagccatggtggaacgtggtctga

SEQ ID NO: 13248 - RNA, 1470 nt, synthetic construct
  source 1..1470: mol_type = other RNA
atgtttgataatcagcagacccgccagcagctgtatgatagaattcgtgagtctagccgcgatgaggtaattctggaggagatgaaacgcatgggtttctggggtaaaaaagatgctgagccatcactgcccgaacaactgatcaagcaggaaacagctctgagcaaagagcttaatgccctggtcgctcagcagcgcaaattccaagacaaggagaaaatgctgaaagaaatgcggatcaagaggatggccgaggccaagcagaagagggccgagaataagaaaaagcgagagcagcagcggttcgagaaagcagaagcctggaggaaaagaaggggtggagaaatcctgttcctaggcgaaatggtttcaactggcctgaacaatacaactaacaacaccgagtcgttgtccaagttcgggcttccggtctttcataatgaaaacgacctggccattgctatggggatttctttgagtgctctccgatttttagccttttcccgcaaagtttctaccgtgagtcactaccgaaagttctacctggcgaagaagtctggcgggaagaggcttatcagcgctccaatgccaaaactcaaaggagtacagtattggatcctacagaatatcctgcaaagagtgaatgtccacccctccgtacacggttttattgcaaatcactcgattctgaccaatgcccaacctcatatagggaaggaagtcgtcttgaatatcgatgtgaaggacttctttcccagcattcatttcaaacgggttaaggggatgcttcagcaactcggctacgctgaaaaaatagccacaatccttgcattgctctgcactgaagcagtaactgaagaggtggccatcgacggaaagacatacttcgtgcaaaagggcaacagagtgctccctcaaggagctcccaccagtccagcaataacaaccatactctgctataagctagataaaagactccagggcttagctgaccggcaccagtgtaactacacgagatatgccgacgacgtgacgttctccacgagccggactgagctgaacatgcagcagatggtctggcgtattaaaaagattttggcggatgaggggtttactgtgcatcctgataagatttctatcatgcgtaagggggcccaacagcaggtgaccggcatcgtggtgaaccagaaactcagtgttaaccgagagaagagacggaaactgagggctctgctccacaaccttgaaacaaagccgggcttcgttcccgtctggggacagaactcatctgcagcagccatcttgggctacgcccattttgtgaagatggtggatgcggagaaaggagaaaagtttaaggacaaggtgaggagcttaatcgcgcagggaaaactgtcactgacccagtccaacaacgaccgctccggtggcaatgcagggagcgacaagccttggtggaatgttacatga

SEQ ID NO: 13249 - RNA, 1464 nt, synthetic construct
  source 1..1464: mol_type = other RNA
atgtctgacaaccagaagacacgccaggagctgtatgatcgtatccgcgagagctccagagccgaagtgactctcgaggaaatgaagcgactgggcttctggtctaagaacgacaaggagccaaccctaccggaacagctcatcaagcaggaggccgccctagtgaaagaattgaatgcgctgaacgcccagaagcagaggttccagaacaaagaggctatgctcaaagaaatgcgaatcaagcggatggcggaagccaaaaagaagcgggaggagaacaagaaaaagcgggagcagcagcgctttgaacgagctgaggcctggaggaaaaggaagacgtctgaaatcatatacctcggagaactggtgtcaactgggctgaatgacgttacgaacgatacagccaaattatccacctacaacctgcctgtcttcaataatgagaacgatctggccgctgcaatggggatcacgctgtcacagttaaagtttctggctttttccaggaaagtgagcacagtgagccactaccggaagttttacctgagcaagaagtcgggagggaaaaggctgatctccgcccctatgcccagacttaaaaccgcgcaatattggattcttcaaaatatcctgcagcgtgtccctgctcaccctgccgttcacgggtttattcagcaacacagcattcttaccaatgccgccccccacgttggcaaagaagtagtgctgaatattgacgtgaaagacttcttccccagcatacattttaaaagggtgaagggtttactccagcaactgggatatgctgagaagttcgccgcaatcttggccctgctttgtaccgaagctgtgactgaggaaatcttcatggacggtaaaaactattttgttcagaaaggtaaccgggtcctcccacagggtgctccaacctcaccagctatcaccactctcctctgctacaagctggacaaaagactgcagggcttggcggataaacaccagtgcgcctacacaagatacgcggatgacattaccttcagtacttctaacgcacaattcaatgctcagcaaatggtctggcggattaagaaagtcttagccgatgagggctttgaggtccatcctgacaaaattgctatcatgagaaagtctaccagacagcatgtgactggaatagtcgtgaacaaaaaaatagcagtaagtcgcgataagagacgcaagtttcgcgctctacttcataatttggagacaaagccgggattcgtgccaacatggtcaaataacagtagtgggtttgcaatcctcggctatgcaaatttcatgaagatggtagaccccgtaaaggcatccaatgcattgcagaagttgcaaagccttattgcatccggcaagctgcccctgattgcagccgttaagcccgccagggagcaaggcgatgataaaccttggtggaacgtgacatga

SEQ ID NO: 13250 - RNA, 1644 nt, synthetic construct
  source 1..1644: mol_type = other RNA
atggcatatacctatcagtgtacctttcctggagctggtacctggtgtcacaatgggacgctcgtgcgtgtgtgtctggcactgataaacctggttaggggcagacacgagggagctgcgaccctctgccaaaacatgaattttttcagtccaatcatggcggacacacaccttacaaggcagcagatttatgaccggattcgagagagctctaaggatgaatatattctggaggaaatgaagcgccttggtttctggaaatccaaggaaagcagcagcatcgtaccagagttaatgatcaaaaaagagactggactccagcaagagctgaatcgcctctttgagcaaaaacggaaataccagaataaggaagccgttcttaaggaaatgagacagaaacggatggaggaggccaaacggaaacgggaagagactaaaaagaaacgcgagcaacagcgcgctgataaagccgccgcgtggcagaagaagaaggaaacatcgattctatacgctggcgagaacgtgagcgctggcatgaactcaactgagacaaagccagatatcctgcaaagatatgggttgcctttgtttaccgatgagctgagcttggcagccggccttggaataaccatcaacgagctcaggttcctgtccttctcgcgaatcgtctctaccgtaagccattacagaaagttctacctaccgaagaaatccggaggcaaacgcctgatcgctgccccaatgcagagattgaaagaagctcagtatcatgtcctggagcaagttcttaacaaggtggttctccatgatgcagccaacgggtttgtcaagaagagaagtatcgtgacaaacgcccaacagcatgtggggaagacattgctgcttaacctggacattaaggattttttcccgaccgtcgactacaagagggtcaagggcgtcttccgcaagctggggtacgcagaaaaaatttctaccctgctagccctgatatgcaccgaagctcccaccgacgaagtgtcaatagacggtaaaaactatttcgtacagaagggtaatagggttttaccacagggcgcccccacttctccagcactgacgaacatactattctacaagtgcgataagcgactgcaaggcttggctgccaagacagggtgcacatacacacgatacgccgacgatatctccttttccactaactccaataccctgaatcctcagcagttaatctggaggattaaacggatccttacagacgaaggctttacggttcaccccgagaagattcgggtgatgcgtcagagttctaaacaggaggtgacgggagtagtggtgaataaaaaactgaacatcgacaggaaaaagatgagacagtttagggcactcatccatactctcaagactaaaggacccgacgcgattcactggggacagagtcacccggcctacgctatccccggctatttgcagttcatcactatggtgaatcctgaaaaaggtgccctcctgaagaatgccctcacacctctgttagataaaattccaaagcctgtgcgtattacccagtcaccccagcccgggaagcccgatacttcaggggaagcacctaaggagggtggcgactggtggaatgtcgtgtga

SEQ ID NO: 13251 - RNA, 1524 nt, synthetic construct
  source 1..1524: mol_type = other RNA
atggccgacaacaggctgactcggcaacagatatacgatagaatccgttcttccagtaaggaaagctacatcctgtccgagatgaagaggttggggttctggtcagtgaaagacggtgcatcggcagtgagcgaggcactgataaataaggaggcaagtctggaaaaagagttaaaccagctcttggcccagaaccgcaaatttaataatcgcgaggcggtactgaaagagatgagactgaaaagaatggcagaagcccggcagaagcgtgaggaaaataagaagaagcgagagcagaaacgatacgaaaaagctgaagcctggcgagcccggaaacagcaggagatcttatatctgggcgagggagtgagtgccgggctacattatacggacaccaacgaagccttactctgcgaaaaagagcttccggttatcaccaccgagaagcaactcgctgagtacatggggatcgcgctgcaggagctgcactttctcgctttcagtaggcgggtttccaccgtaaaccactaccgcaagttctatcttcccaaaaagagcggagggaagcgcttgatcgctgcgcccatgccccgtctcaaaaactcccagtactggatccttaacaatatacttgctcgcattcctgtccacgctgccgcgaacggctttgtcgcagataaatcaatcgtgaccaatgccagaccacatctcgataaagaggtcgttatcaatatcgatgtcaaggacttctttccttctattcactttgctagagtgaagggtgtcttcgtgaagctgggttattcagagaagatagccactgtgctttccctgttgtgtaccgaaccagtgacacaagagatctcaattgatggacggaattacttcgtacagaaaggtcagagggtccttcctcaaggcgcccctggaagccctgtgattacgaatattctgtgccaccacctcgaccagaggatgcaaggggtggccgccaagcatcagtatacttatactcggtatgccgatgacattacattttctggcagcgaaaacaccctacatgcacaggctctgctatggcgaatcaagaagatcgttcaagaggagggattcacagtccaccccgacaaagttcatgtcatgaggaaaggcgcaagacaagaagtgacaggggttgttgtgaacaagcagctgggcatccagagagagaagctgaggcagttccgcgccctgctgcacaacattaaggtgaagggatgggaaaatgcacagtgggggaacggcaatattattagctctattctcggctacataaactacattaagatgatcgatccggcaaaggccgctgtgttccagcagcaagtgaatgtgttgtttcagcagcccggtttttctgctattcagcagcaagtccagccacaagcctccgcggctgctacaacacatgacccaaccactaatccccagcctgccccaggcaaaggaactgaaggcgacgaaaactggtggaaagtggtatga

SEQ ID NO: 13252 - RNA, 1515 nt, synthetic construct
  source 1..1515: mol_type = other RNA
atggccgataatagactcacgagacaacagatctatgaccgcatacgttctagctcaaaggaagagtacgtgagatcagaaatgttacggctcggcttttggaccgctaaatctggcaacactcagatcactgaggtgctgcttcaacaggaggcaaccctgacgaaggagcttaatcagcttatgcaagagcgaactaggtatcggaataaggaggccgttctgaaagaaatgcgcatgaagcgaatggcggaggccaggaggaagcgggaagaaactaaacagaaaagggagttgcagcggctggagaaagccgaggcatggaggaagcgtaaacaggacgagattgtctatctgggagagacagtcagtgctggcctccagcccggacagagtaacgaggcccttctcctgcagcggggtctacccgtatttcatactgagaaggagttggccgcagccgctggagtcgatctgcgagagctccgatttttgtgttaccaccgcaaagtgagtgcagttaaccactacagaaagtttctgcttccaaagaagtccggtgggcataggctcatatcggcgccaatgccacgcatcaagaaggtgcaatactgggtgttacaccagatcctgaataaagtgccgttgcatgccgcagccaacgggtttgcaaccggtaggtccattgtgaccaatgctcagccacacgtggggcgtcaggtagtgattaacgcagacgtgaaggatttcttccctagcatccacttcaaaagggtaaaaggcgtgttcgaaaaactgggctataatgaacggatcgctaccatcttggctctgctctgtactgaagcagtcacacaggaagtagtcattgacggcaagacatacttcgtacagaaaggatgccgcgttctgcctcagggagcccctggttcacccgcaatcaccaacatactatgctaccagttagataagcggctgcagggggtggctggcaaacaccagtaccaatatactagatacgccgacgacatcagcttttccggatccgagacaacactggctgctgaggccatggtctggagaattcgcaaaattctgcaggaagaagggttcaccgtgcatccagataaggtgcgaattatgagaaagggcgcccggcaggaggttacaggaattgttgtgaataagcaacccggtatccccagggagaagctgcgcagatttcgcgccctcctgcatcggatcaaaaccaagggctgggaaggggtccaatggggcgaaggcaatattgtgagcgcaatgcttgggtatgtgaacttcatcaagatggtcgaccccgttaaagccgccagattcgaaaaagagatagccttactagggcagctccctgggttcacggaagcgcagaagcaagtgcctttgacacccgcgccggaggctctgcaaaagccttctgacacaaaccctccatctgctccgaacaccggcgaaggagattggtggaaagttgtctga

SEQ ID NO: 13253 - RNA, 1524 nt, synthetic construct
  source 1..1524: mol_type = other RNA
atggctgataacagactgacccggcagcaaatttatgaccgtataagggaaacctcccgcgacgatttcatcctggaagaaatgaaaaggttggggttttggggaaggggccaagacgaccccagtgtgtcagagctcctgataaagaaagaagtcgagctaggaaaagaactcgataagctgctagccgagcagcggaaatatgataacaagcaggcagttctgaaggagatgcgaatgaagcggatggcagaagccaagcaaaaacgggccgacaataaaaagaaacgtgaagagcagcgctttaataaagctgaggcctggcgacagaaaaaggaaactgagattttctacctgggccaaggagtctcaggcggtttaaaccacactgagaacaatgtggttctcctccagcaaaagggcctgccggtgttttatgacgagcaagagctcgcatcagccgctggaatcgaacttaaagagctcaaatttctgagcttcagccgctccgtctctacggtgaaccactaccgaaaattctatctgccaaagaaatctggggggaaaagactgataagtgcccccatgcctagactcaagaagttacagtactggatcctgcacaatgtgctgcaaaaggtgacattgcacacagccgtacacggattcacaggcaagagatccattgttactaatgcacagcagcacattgcgaaggacgtggtcatcaacgccgatgtgaaagatttcttccctagcattcatataaagcgggtcaagggtatttttaaggcattgggatatagcgagaaaacagccactattctcgccctggtttgcactgagccagtcaccgaggaggtgatgatcgacggaaaaaactactttatccagaaaggcgaaagagtacttccacagggcgcaccaacctccccagctcttacgaacatcatctgttaccatttggataaacgcctgcaaggcgtggcgagcaagcatcagtacacatacacccgctatgctgatgacatcaccttctctgctactggccagcagttgaaggaggaggcactgctgtggagggtgaagaagattctgaaggaagaggggtttaatatccaccctgacaagatccgcatcatgcataaaggtacaaggcaggaggtgacaggggtagtggtgaataaaaagttatccctttcgaggcagaaactgagaaattttcgggccatgcttcacaatttaaagactaagggttacgcggatataaaaaccgggaataaggacattgcagctgttattctcgggtatctgaattacatcaagatgatcgatcccgtaaaggcgctccagtttcagcaacaggtcaaccagctattccagcagcccagtttccatcagcttttgaaggaacaggctgccgctcgtgctgccgttaagcctgtggaaaaaagcgccatgccctcaccggaatctaccacgcctcagcagggcaacggtaactggtggaacgtcaccgagtga

SEQ ID NO: 13254 - RNA, 1527 nt, synthetic construct
  source 1..1527: mol_type = other RNA
atggcagacaataggctcacacgacagcagatttatgatcgcatcagagagtccagcaaagaggaatacatactagaagacatgaagcggctggggttctggcagcgcaatgaagaagggccctccgtgcccgaactgttgatcaaacgtgagagtactttgaacaaagaacttaactctctgttggctgagaagagaaaatatcaaaacaaggaggccgtgctaaaagagatgcggatgaagagaatggctgaggctaagcaaaaaagggaggagaataaaaagaagcgagagcagcagcgctatgaaaaagcgcaagcgtggcgggctaagagagagactgaaatattcttcctgggggaaggcgtttccgcaggcctgcattatacagagtctaatctcgaagagttacagaagaaagcgctgcctgtttttgagaatgagatgcagcttgcaaacgcgatgggcattgccctcaaggaactgtcctttctgagctatagcaggagagtgtccgcagtctctcactaccagaagttttacctgcccaaaaagtcttcaggaaaacgcctcatttcagccccaatgccacgcttgaagaaggcccagcactggatcctacagcatatcttgtataaagtgcccgtccatgcccaagccaatggctttgtacctggcaaatctattgtttcaaatgcaaccccgcacatcggaaagaacgtggtggtgaatgccgacgtgaaggacttttttccctcaattaccttcaaacgggtgaaagctctctttgggaagctcggttacgccgacaaaattgcaacgatcctttcgctcctctgcacagaaagtgttaccgaagaggttatgctggatggtaagaagtatttcgtgcagaagggagagagggttctgccacagggagctcctaccagccctgccgtcacaaacatcttatgcttccggctggataaacgcctctccggcgtagcaaagaagttcggatgtggttacaccagatacgccgatgatattaccttctccggcacactgaacaacagtgacgcgagcaagattgtatggcacatcaagaaaatattgagtgaggagggcttaacgatccatccagacaagattcgagtaatgcagaaatcagagaggcaagaggtcactggggtggtcgtgaacaggcagctgtcggtcagtcgtgaaaagcttaggaacttcagagcacttctgcaccagctgaaaaaaaacgggcatgaaaatgccaagtggtctgagggaagccttagcaacgctatcgccggttacgctagctttattcgaatggtgaacccagctaaggccgaaaaattcatcaaggagatcagcgatatccgtcaaagtcaaacctggcagcacctgttactctccgaggccgccgcaatagctaagaaactgaatcagcagactctgccttctactccggctcctccacccgccaataataaccggaaggaagacggcgaatggtacaatgtcgtgtga

SEQ ID NO: 13255 - RNA, 1209 nt, synthetic construct
  source 1..1209: mol_type = other RNA
atggcagataatcaccttacccgccaacagatttacgaccgcattcgagaaagctctcgagatgagtacatactggaagagatgaaaaggctgggattctggaacaaaaacgagagctcgcccaccctacccgagctccttatcaagaaagaaagcaatcttcataaggaactgaacgcactcctggcggaaaagcagaagtttcagaatagggaggccctgttaaaggagatgaggctgaaacggatggaagccactaagttgaagcgggaggacaataagaagaaaaaggagaaggagcgcttcgaaaaaacaaccgcttggcggaagaagcaggagactgagattttttatctgggggaggaggtcagtgcaggccttcactatgctgagaataaccaccctctcctcaatcagaaagccttacctgtttttgagaacgagcagcaactggccctggccatgaactgtacggtcaaagagttggcgtttttggccttttctcgcagagtgtccgagttaacacactaccagaaattttatctgccaaagaaatcagggggcaagagactaatttccgccccaatgccgcgtctgaagaaagctcagcactggattttgcagactatactgtacaaaatccccctgcatactagtgctaatggttttgtgccgacaaaatcaatagtgagtaatgcatggcctcataccgggaagcaggtagtcatcaacatggatatcaaagacttcttcccctcaatctcttttaggagagtgcgcgcactcttcaaaaaccttggctattccgacaaaatcgctacaatcctggccctgctgtgcacggaagcaccaaccgagcaggttgaactcgatgggaagaagtacttcgtccaaaaaggtgaaagagtactccctcagggagcgccctcctcaccagctatcaccaatattctttgctaccggctcgacaagcggctagtgggagttgctaacaaattcaacggcacatataccaggtacgccgatgacataacaatttctggcagcttcgcccataacactgccaccaggatcgtgtggcaaatcaagaagatactgagcgaagaaggattcatcttgcaccctgagaagattcgtattatgcagcaatcccagagacaggaagtgactggtatcgtcgtgaatcaagaaatgagcgtgaaccgatga

SEQ ID NO: 13256 - RNA, 1443 nt, synthetic construct
  source 1..1443: mol_type = other RNA
atgcagagactaggattctggcctaagaacgataacgctcccacactgccagagcagcttattaaaaaagagggcgagctgcaacgcgagctctcaacactcctccaggaaaaacgtaagttcgaggataaagaggccatgctcgcgcagatgagaaagaagaggatggaggaggcaaagaagaagcgagaacaaacaaagcagaagagggaagctaaacgtatagagaaagccgaaaagtggaaggcatctaaagagaaagagatcatttatctcggggaaaaagttagcggcggattaaacgccaaggaaagcgatgtcccagccttagactccaagggtctgccgactttcaccgaagagacagagctggctcaggccatgggaataacgatttcacagctgaggttcttctgctaccaccggtcagtcgctaccaccactcactacaagcgcttcggcatcaagaagaagtctggaggcatgagaatcattagcgcacctatgcccaggctgaaagccgcccagtattgggtgtttcacaatgtactgaacaaactccgacaccatgaagcagcccacgggtttgtgcgggaacgttccatcttgtcgaacgccaaagaacatctgaataaagaggtggtggttaatatcgacctcaaagactttttcccttccatacatttcaaacgggtgaagggcttgtttcataaactgggctacagcgaaaagatcgctacgatcttttctctgctatgtactgaacccgacgtggaagaggtcgagctggatgcaaagacctatttcgtcgccaaggggaaaagagctcttcctcagggagcgccaacaagccccgccattaccaacctgctttgttacaaacttgactgccgattgcatggagtcgcgaaagctatggggctgtcttacaccaggtacgcagacgacatgactttttcaggcgatggcgaggcagcagccaaggttcagcagctactttggcgcttgcatagaatcattaaagacgagggctttacaatccatccaaagaagattcacgtgatgcgcaaaggtgccagacaggaagtgaccgggatagtcgtaaataagcaaccaggaattaaccggcagaccctgcatcggtttcgcgccttactgaataagatcgagaagaaggggatcgagggtaagaggtggcgcggagggaatgtcatcgcggaaatagcaggttatgccgagttcgtgagtatggttaaacctgctcagggcgtaaaatttaaggaccaagtgaggagaattctgcagcagcccgacgtgattgaacacctccaaaaagctcctttgcaagctgtgcacgcctcccacgctagtaaaccgatcaaggatactcacagtaacagcgatcggaatgagtccagtaagccctggtgggatgttctgtga

SEQ ID NO: 13257 - RNA, 1566 nt, synthetic construct
  source 1..1566: mol_type = other RNA
atgaatcagagtcagcccgcaactcggcaagaactgtatgagcggataagggaatcgagcaaaaacgaggtcatccgcagcgagatggaacgtttgggtttctggaatcccaatgctccagaacccaaggtcgcagatgactggctgaaagaatacgacaggctcaccaaagagttgagggagttgcggggaaaacaagagcggatgaataacagagacaccttactggccgacattagaaagaaaagaatggccgagtcacgcgagcgccagaaagagacaaagcttaggcgagaacgggagaggatagaaaaagcggagcgttggaagaaactaaaggaagaggacatcctataccttggggaggatgtgtccactcagctgaataagaaagaacccagaccagatctcctggccgaaagacagctcccaaactttgtgaacgccaaggcactcgctgcatctatggaagttccgatcggagagctgaagtttctcgcctataatcgtaaggtgagtaaggtatctcactacaaacgcttcttcatgaaaaagaagtcaggcgggcagaggttaatcagcgcccccatgccacggctgaaacgcttacagtactggatcctacactccatattgtacaagatacctgtccacgaatgtgtgcatggctttgtccctgaccgatccattaagaccaatgctgccccacacgttggccaggatgtggtggtgaacattgaccttaaagatttcttccctactgtctctcagtcccgggttcagggcctctttaacgctctgggctacagtaatcaaattagcacaatctttagccttctctgcacagagccggaggtgcagcaggccaaactggatggagaatcatggtttattcatcaaggagagcgccatctgcctcagggtgcaccaacgtcccctgcaatcaccaatctgatttgctatcgcctggactgccgaatcaagggggcgactgacaagctggggttcaattacacacgatatgctgacgacattacgctcagtgccagtggggaagccgtgagcgatatctgtagactgatctggcaggtgagaaagatcatcgaggaggagggctttaatttccaccccgataagtttagggtaatgcggaaaggtcgcaggcaggaagttaccggcttggtggtaaatgagacactttctatcaacagaaacaccctgagacgtttccgcgccctcctgcatcagattgagaaatcaggcatcgagggcaagtcgtggcaagggaactccgtcaaccttctgaacagcattcaggggtatgctgactttgtcgccatggtgcgacctgaaaagggtcagctgctgcaagctcgggtaaaggcaattaggatggtgcagaaacataagaggagagccaagcccgaggctaagcctaaaatacctgctccgctggttccaattaacaaagcgaacgaactttctcacgcgggatcagatcaaaccccaaagtctagctccggacccaagcccttctggaagaaactcttattctggttggattga

SEQ ID NO: 13258 - RNA, 1548 nt, synthetic construct
  source 1..1548: mol_type = other RNA
atggccgacccggacccgtcccagccttttaggcccctctcccgccaggagatatacgatgcgatcaaggcaaccagcaagcaggagttcattctggatgatatgatcaggttgggattctggatgcccgagcagggcaatcctgccgttccagacgcaataattcgacgcagaggagaactgaatagagaacttaacgagctactgcataagcaacggcggttcgagaatcgggaggctgctcttgcggcgcaccggaaaaaacgcatggccgagagtaaggttaggcagaaggaaacaaaggaaaggaatgctcgactgcggcaggaaaaagcagagcggtggagggagagaaagcagcgcgagattttgtatctgggtgaaggcgtctccgggggtctgtctgagctacagtctgtgcccgagcggctgtcacggcatcaacttccagatttcgcaaacgctgaaactctcgcgtcggcgatgggtattacactcggggagctgagttttttagccttccaccgcgaggtgtcaaaaacaacccactatagacgctttgccattcctaaaaagagtggcggcgagagaatcatcagcgcccctatgcctaggctgaaggctgctcagacctggatcctcgagaacttgctccagaaggtgagcgtgcacgatgccgcccacggctttgtacccgacaggagcattattacgaatgcctccaatcatataggcagagacatagttatcaacgtcgacctccaaaacttcttcccaagcgtgactcaagccagaacaaaaggcttgtttaagagtctgggatatagcgaacacatcgccaccatcttgagcctgttatgtacagagcctgagatggatactctggagctggacggtcagatttggcacgtggccatgggggggcgttttctgcctcaaggctctcccgcatctcccgccattacaaacatcttatgcagaaagtttgacgcacgcctttctggaatggcccggaaactaggcttcacttacacgcgttacgccgacgacgtcaccttctcagcaggcggagaaactgtggaaaagtataaaaccctcctgtggcgcgccaaggctattatccatgaagaaggcttcatcgtccatccggataagctgaggataatgcgccttgggtcacgacaagaggtgaccgggctgatagtgaacaaggctattggaattccacgagaagacctgcgtaggttccgagctgttctgcggcaggtagaacaggatggtccagcaggaaaaaggtggcacggctccgggcataatatccttgctgtcctcggagggtacgtaaactttatccatatggtgacccccgaaaaagctgcccccttacgtgagcgagtgcttgcactccagtccaaacacggatggcagcgggagatcagacacagacctagagccctcgcaccagaagctgggaatccagccgcaaggtctgctgatggtggcgggttctttaaatcgatcttgcgcaaactgggctttggaaagtga

SEQ ID NO: 13259 - RNA, 1503 nt, synthetic construct
  source 1..1503: mol_type = other RNA
atgagaaatagcacagagcggaggcaggagatctacgataagatcaaagcatcatctaagcaggagtatatcttgagcgaaatgaggcgcctcggcttttggaatgaagaggatctggactttgaagctgtcaatttgttctttaaacaggaatctgagctgtctgcaaaactccagaagcttctgagagaaaagcgtgtcatcgaagatcctgaagctttcttggccaagaaacaccaagagcggaaaatcgcttctaaagcttctcagaaagagactaaggaacgcagagagaagaccagattggagaaagccgaaaagtggagggtgagcaaagcaaaggatattgtgtacttgggagagaattactctcaccagctcaatgacaaaacttccgatgcatcacggctgaaagcgcaatccctccccgtgatgcatcacgctgaagacttagcactggccatgaagattagcatcggggagctcagatttctgtcatacagcaggaagaacagcaaaatctctcactacaaacgattccaggtcgccaaaaagacggggggatatcgcctaatttccgcaccaatgcctaagctgaaaaaaactcagcactggattttagaaaacatactgaacaacgtgcctgtacatgagaatgcccacggctgcgtgattggcaagtcaatcaaaacgaacgccattccccacgtgggtaaagacgttgttatcaatcaggacttcaaaaacttcttcccatccgtcacttacaacagaatcaaaggtgtctttaagtcccttgggtactcgaaccaggttgctacaattctgtctttattgtgcagtgaacccaagatccttgacataagtctcctgggagaggattattacgctcagcaaggagagcgatttctaccgcagggcagcccatgttcgcctgcaattacaaacatcctatgtaaaaagctggatcatcgcctttccggactggctaagaagtatggctttgaatacacccggtacgttgatgatattaccttctcatccaacaacaacaatttcaagaagattacccccctccttaagtattcccgttacatagtgaatagcgagaacttcaaactccatccagagaaactgcgagttatgaaacggaatgccaagcaggaagtcaccggggtggtagtgaacgaaaaagcgaacatcagcaagaaaagtctgaagaggtttcgtaccctgctgtttcaaatcgagaaggacggaatagagggtaagttctggaacaagagtgggaacgtgcttgcccaaatagacgggtacgccaatttcatttatcagatagaccaggacaagggcgtagtgtataagaagagggtcaatgccatcctggagacatataagtataaggagaatcatcgcagtaagtatatctcaaataccaataagggctccgcgagttcatttggccgcttcgtgaaaaaaattgccagcctctttcggaagtga

SEQ ID NO: 13260 - RNA, 1521 nt, synthetic construct
  source 1..1521: mol_type = other RNA
atgaggaacaattcaacagaacgccggcaggagatttatgataagatcaaggcctccagtaagcaggagtacatcctgagcgagatgaagcggctgggcttctggaatgaaggcgagttggacttcaaagcagtcaatactttctttaatgaggagcgggaactaagccagaagttacagaaactcctgaaggagaaaaaagtgattgaagatcctgaggcttttcttgccaagaaacaccaggaaaggaaactcgcctcaaaacaatcgcagaaagctactaaggaacgacgggagaaagagagactggaaaagaccgagagatggcgggttagtaaggaaaaggacataatctatctgggcgagaattactcccaccaactgaacgaacagatatctaataccgagcgacttaagagcaagaacctccctgtactgcataccgctgaggatctcgccaaggctatgaacatatccatcggagaactgagattcctttcattctccagaaagaacagtaagatttctcactacaaacgtttccagatggccaagaaaagcggcggataccgcctgatcagtgctcccatgcccaaattgaaaaaagctcaacattgggtgctggagtcagtactgaacatcgtgtctgtccatagcaatgcccacggttgcgtgattggacgcagcattaagacaaacgcagagccccacgtcggaaaggccgtcgtgatcaaccaggactttaaaaacttcttcccctctgtgacatatgcacgaattaaaggtgtatttcttgcgctggggtactccaaccaggtggctaccatttttagcttgctgtgcagcgaacctaagattctggatgtttcactattgggcgaagactattatgcgcaacgtggggaacgctttcttcctcagggcgccccaacttctcccgccattacgaacatattatgtgagaagctcgactttcgcctgaccggcctggcgaataaatacggcttcacatatactaggtatgtggacgacatcacgttctccgggacccatgactctttcgataaaatcacaccgctcctcaagtacagtcgttacgtagttaattccgagaactttaatcttcatcctgaaaagttgaggatcatgaagaggaatgcaaaacaagaggttacaggcgtggtggtcaacgaaaagaccaatatcccaaaaggggatctgaagaggtttcgggccctcttatttcagattgagaaggacggaattgaaggtaaatattggaccaaggggggaaatgtgctggcacagatagatggatatgctaattacatcttccagattgagccggagaagggggtcctatacaaaaagagagtgaatgtcatcttggagaagtataactacaaggaaaagcacaaagcaacttacgtgccaaaggtgctcgataaaagagagaaagccaacaagccagactccgttgggggtatctttaacaaaatcatgtcgttctttcgcaaatga

SEQ ID NO: 13261 - RNA, 1503 nt, synthetic construct
  source 1..1503: mol_type = other RNA
atgaaaaactccactgagaggcgacaggaaatctacgacaagataaaagcatcaagcaagcaggaatacatactctctgaaatgaagcggttggggttttggaatcaggaggagctggacttcgagtctgtgaacgcatttttcaaggaggagacagagttatctaagaaactgcaaggccttctcaaagaaaaaagggtgattgaagacccagaagcttttttggctaaaaagcatcaggaacggaagcttgctagcaagcagtcacagaaggaaaccaaggaaagaagagagaaggaacgactcgagaaagccgccaggtggaaaactagcaaggagaaagacatagtgtacctcggaagcgggtactccaacaatctcaataagaaggaatccgatgtgacacggctgaaaacacagcaattgccggttctcaatactgctgaggatcttgcaagtgccctggggatcacggtcggagagctacgctttctgagtttcacgcggaagaatagcaagatttcccactataaacggtttcagatgccaaagaaatcagggggctacagactgatttccgcacctatgcctaagctgaaaaaggctcagcattggatcctggagcatatcttaaataatgtcaaggtgcacgataacgcccacggctgcgtgatcggaaaatctattaagaccaatgcagtgcctcatatcggtaaagccgtcgtcgttaaccaggacttcaaaaattttttccccagcgtgacctataaccgtatcaagggggtctttatgagtttaggttacagtaaccaggttgcaaccatcctagcgcttctttgttcagagcccaagatcctcgatgtttcactgctgggcgaggactactatgcccaacgtggagagagatttcttccgcagggtagcccctgctcgcctgctattaccaacgtgttgtgtaggaaactcgatttccgcttgtccggcctggcgaaaaagtacgactttgactataccaggtatgtagatgatattaccttcagcggagacaaaaaatccctgcccaaaattacagctctgctgaagtatagtggcaaaatagtccgcgacgagaactttatgctccacccagaaaagctgagagtgatgaagaggaacgctaagcaagaagtgactggcgtggtggtcaacgagaaggccaatattgccaagacttctctgaagcgattccgcgccctcctgcacctgattgaaaaggaggggatcgaaggcaaatattggaataaggggggcaatgtattggcccagatcgatggttatgcaaacttcatctttcagattgatgaggttaagggtgcgatctataaggagcgcgtaaatgccatactggtaaaatacaactacaaggaggaacacatcaaacaatacgccccaaacgcgaaaaaaggaacatcgggattactatctggcttcattaaaaaggtgtcctctttcttcaagaaatga

SEQ ID NO: 13262 - RNA, 1503 nt, synthetic construct
  source 1..1503: mol_type = other RNA
atgaggaattcaactgagcgccgccaggaaatctatgataaaattaagggctcttccaaacaggagtacattctctctgagatgaaacggctgggattttggaacgagggcgatgtggactttgaagctgccaacgcctactttaaggaggaagccgagcttagtaaaaagttgcaagaacttctgaaggagaaaaggatcgtcggggatccagacgcgtttatcgccaggaaacacaaggagagaaagctcgcctccaagcaatcccagaaggagacaaaggagagacgggagaaagaacgcttagaaaaagcaaaacggtggaaagcaatcaaagaaaaagacatcatctacctgggaacaagctacagtaataacctcaacaagaaaatcagcaacgtggagaagcttcgaagccagaatttacccgtgttacagaccgctttggacctggcatcagctatgaatataaccattggcgaactccgctttctggcattttcaaggaaaaatagcaaaaccaaccattacaagagattcaaggtgcctaaaaaaacaggcgggtatcgccttattagtgcccccatgcccaagctcaagagagcccaacattggattctagaacacatcttgaatcatgtggtcattcacaagaacgctcacggaggtgttttgaagaaaagcattaagtcgaatgcgattccacacgtcgaaaaggccgtcgtgatcaaccaggactttaagaatttcttcccaacagtgacgttcaatagaatcaaaggagtcttcgtttcgtttgggtacagctctcaagtatccactatccttgcgctcctgtgctccgagcctaaaattcttgatgtggagctgctgggggaaaagtatttcgcccaacgaggagagaggtttctgcctcaggggagcccctgttcacctgctattacaaacattctatgcaagaagctggactaccgtctcaccggtctggccaaaaagtacggcttcgactacacccgatatgtggatgacataactttctcaggcgataagcattccttatctaagatcaccccactgctgaagtatagtcggtttatcgttaacgaggaaaatttcaaactgcatccggaaaaactgagagtcatgaaaaggaactctaagcaggaagtgaccggagttgttgtaaacgaaaaaccgaacatatcaaagaagagcctgaaacgttttaaggccctcctgtttcagatagagaaagacggcatagaggggaaattctggaacaagggtggaaatgtcttggcacagatcgatggctatgctaacttcatatatcagattgactctgagaagggtatgctctacaagaagcgggtgaaggcaatcctggattcctataattacaaggagaatcaccggaaagcttatgtattgaattcccagaagactgggattagcgtgggccgtctattcaagaaaatcacgagtttcttcaagaaatcttga

SEQ ID NO: 13263 - RNA, 1509 nt, synthetic construct
  source 1..1509: mol_type = other RNA
atgacggatagcaaagaaaggcgtcaggctatttacgacaaaatcaaggagtcttccaagaacgaattcattttatccgagatgaaacgcttgggtttttggtctgatgaaaacgtagacttcggagcggtcacaaagttcttcaaagacgagggggaactgtctaagaagatacaggagaagctccgtgataaaaacatcctggacaatcctgaagtctttatagcccaaaagcataaagagcggaaactagcctcgaagcagagacagaaagaaaccaaagagaagagggaaaaggtgaggcaggagaaggccgccaagtggcaagagtccaagaaatcagacataatctatcttggggaccagtactcccaccagcttaatcagaagctctcgctcgtggaacgcctgaaaagtcagggactaccagtgattcaaacagcagccgaattggccaagaacatgggagtgtcagtaggtgagctgcggtttctgacttactcacgcaagaacagcaaaatcagtcactataagcgatttaaggtgccaaagaaaagcggcggttatagactcatttctgctcctatgccccgcctgaagcaggctcaaacttggatccttgaggaagttctgaataaggttaaggtgcatgagagcgcgcatggctgcgtcacagggaaatctataaaaacaaacgccgagccacatgtggctaaagcagttgtcatcaatcaggatgtgaagaactttttcccctccattacctataacagaattaaaggcgtgttcctgtctctgggctattcacaccaggtcgccgtgatcttcgccctgctctgtagcgagccaaaaatagtggacattgatctcctcggtgaagattacttcgcgcagaagggggaaagatttttgccccagggaagcccttgtagtcccgctatcaccaatatcctgtgccgcaggctggattttcggctgactggcctggctaagaaatataaccttagctacacccgatacgtggatgatttgaccttcagctctactgagtaccctgaccactccgtagtgaccaaagtgctgaaatactcacgcctcattgtcaaggacgaaaattttaggctccacccggacaagctgagggtgatgaagaaaggagcccggcaagaggttacgggcgtggtcgtcaatgagaaacctaacgttagtaagaagacactgaagagatttcgtgcactattgtttcagatcgaaaaggatggaatcgaggggaaacagtggaacagaccagggaatgtattagcacaaattgacggcttcgctaatttcatttaccagatcaatcccgagaagggcgcacggtataaagcacaggttgccgttatcttagtgacacacaactacaaggagcttcataaaaaggctttcccccctaaaagtaacccgaccaacgagactccacaaaatcgattgtggtcccgggtcaagtccttctttaagaaaaattga

SEQ ID NO: 13264 - RNA, 1512 nt, synthetic construct
  source 1..1512: mol_type = other RNA
atgaaaaactcacaggaacgccggcaggagatttacgacaagatcaaggagagctcaaagcaggagtacattctcagcgagatgaagagactgggattctgggatgatcagcaggtggactttaaggaagcggaggccttctttaagttagaatcaggcttgagcaaagaactccaagttttgatcaaagagaagaacctgatcgacgaccccgccgctttcctcgccaaaaaacaccagaaaaggaaactaaagagcaagcagaaacaaagagagacaaaggaaaagcgggaactcctgcggctggagaaagccgagaaatggcagctgagcaaaaaggaggatatccggtatctgggagacggcttctctcatcaactcaacgatcagacgtcccaggtggatcgacttaagtccctggatctgcctcttttgaacaatgcaaaggaacttgcccaggcaatggacatccccatcggggaactgaggtttctttcgttttcgcgaaagaatgctcggctgagtcactacaaaagattcaagatgaagaagaagtcagggggttttagactcatctctgctcccatgcctcgcctgaagaatgcccagtattggatactcgaggagatccttaataagatagcggtccaccccctggctcatgggtgtgtgataggtaagagtatcaaaactaatgctgagccacacctccagaaagcagtggtgattaatcaggacttcaagaacttcttcccttccattacgcacaatagaatcaagggcatctttaagagcttcgggtattctgaacaattagccactatcttctcccttctatgctcagaacctaagattgtcgaggtgagcatgctgggagaagattacttcgcccagaggggtacccgatttttaccgcagggtgctccgacctcccccgctataactaacatcatctgcaagcagctggacttgagactgcatggcctggcaaaacattatggtttcgattatactcggtacgttgacgatataaccttttctgggaatcaagagcagctgccaaaaatcgcagcaattctcaagtactccaagaagattgtggaagacgaaaacttcacactgcacccagaaaaattgcgtattatgaaaaggagcgatcgccaagaggtgacaggcgtggtagtcaacgagaaaaccaatatcccaaaaaagaaccttaagcgctttcgtgcattgctctttcagatcgagaaagacgggattcaaggcaaggtctggaataaaaaggggaacattttagcccagattgacggctacgctaacttcatctatcagatagatacagagaaaggcattgcctacaagaagagggtcggactaattctgaaagcgcacggatataaggaggcccatcaatccaaatttggaaggcgcagtaaggattctagtacaagttggtttacctctctggtatccaaagttaaagacattttcggatctggcggcaaatga

SEQ ID NO: 13265 - RNA, 1452 nt, synthetic construct
  source 1..1452: mol_type = other RNA
atggataacagcgctaccaggaaacaggagatctacgacaaaattaaagagtcgtctaagcacgagttcattctaagcgaaatgaagcggctgggattttggggggatgacaatgtgaatttcgacaaggtgaatgatttcctgaaggaggagaatgctctgtctggcgatttgagtaagcttctcaagaaagagcggctcataaaagacacagatgcattcatagccaacaagcacaaggaacggaagaagctctccaaagaaaaacaaaaagaaaccaagctgaagagggaacagatcaggaaagagaaggcggaaaagtggcagcaaacgaagaaagaagacattacttatctgggggccgggtactcacatcagctgaacgacacccagatcgatgaggtccgactgaaagaagccggtttaccaatctaccacagcgttaaagacctggccgaggcaatgaagattaccgtgaatgagctgcggtttttggccttctccagaaagaactcccagattgaacattataagcgctttaaagtcgccaagaaaagtggcgggtatcgactcatttccgctcctatgccgaggttgaaaagagcccagcactttattctggagaatatcctgaacaaagtgatcgtacataacaaggcccatggttgtgttaaagaacgcagcattataagtaacgcaatgccccaccttaacaaagctgtggtaataaaccaggacttaaagaacttctttccatctgttacgtataaacgaatcaaaggggttttcaagtcattggggtatagcgagcagctggctgtcatcttctctctcttatgttctgagagtaaaatcctagacatttctcttcttggagaaaactacttcagcaagcgcggcgagagatttcttccccagggatcgccttgctcacctgcaattactaatatcttgtgccggaagatggattatagactagatggccttgcgaaaaaatacggtttcgactatagccgctacgtcgatgatacaacatttagtggcaaccacgaacaatttaagcatattacagccatcctcaagtatagcaagaaaatcatctccgaggaaaacttcaatctgcaccccgataagctcaagataatgaagcgcaatcagagacaggaggtgaccggcattgtggtcaatgagaaattgaatatcgacaagaagtcactgaaaaggtttcgtgccctgctgtaccaaatagagaaggagggcatcgctggaaaaacttggaatggaggcctcaacgtgctcgcagaaattgacggttacgcgaattacatctaccaagtggacaaggaaaaaggagccaaatacaaatcccaggtggctgatattctgaaggcacactcatataaggagtccaagggcatctttaataagatcaactccctgttcaagcgttga

SEQ ID NO: 13266 - RNA, 1506 nt, synthetic construct
  source 1..1506: mol_type = other RNA
atggataattccgcaactagaagacaggagatttatgacaagatcaaagagagttccaaggacgaatttattctctcggaaatgaagcggctcgggttttggggggataatgaggtggacttcgagaaggcaaacgcattccttaaagaagaaagggagctatcaaataacttaaccgccctggtgaagaaagaaagggcaattgaagacacagaagccttcattgccaataaacacaaggaacgcaaaaagctgtcaaaagaaaagcagaaggagactgcccttaagagagctctgatcaggaaagaaaaagctgctaaatggcagcaaaccaagaaggaggagatagtgtatataggggacgggtactcccaccagctcaatgataccgagacaaatgtggcccgactgaaggagaacgatctcccaatttacgagagcgcaaaagagcttgctgaagctatgaaaattacagtaaatgagctgaggttccttgccttttcgagaaagaactccaaaatccaccattataagcggttcaaggtggccaaaaagagcggcggctaccggctgatttcagcacccatgcctcggctgaagagagcccagcacttcattctggagaatattctgaataaagtgacggtccataagaaagcgcatggatgcgttaaggagcgctcaattgtcagcaatgcagaaatccatgtgaacaaagccgtcgttatcaaccaggacctccaaaattttttccccagcgttacctataaacggattaaaggcgtgtttaagagcctgggctatagtgagcagttggctgttatcttctctctactgtgcagcgagtcaaaaatcctagacctgagtttgctcggagagaactactttacacaacgcggcgatcgctttctgccccagggatctccttgttctcctgctataactaacatcttgtgtaggaaaatggactatcgacttgatggacttgctacaaagtatggatttacctattctcgttacgtggacgatactaccttctctggtaaccaggaacagtttaagtacatcaccgcgatcctgaaatacagcaagaagatcatcaaggaagaaaatttcaagttgcatccggataaattacgaataatgaaacggaacgagcgccaggaggtaactggtatcgttgtcaacgaaaagctgaacataaacaagaagtccttgaaacgtttcagggcgctcctcttccaaatagaaaaagagggtattcaagggaaaacgtggaacggcggtctgaatgtcttagccgagattgatggctacgcaaattatatctaccaggtggacaaaatcaagggagtgaaatacaagagtcaggtgtccgccatcctgaaggcccacagttacaaagagaatcacgtcgctaagtacgcgtctaactccacagaagccgccaacgagcacaaggtaccatccttctttaagaagatcatcagctttttcaagaagtga

SEQ ID NO: 13267 - RNA, 1581 nt, synthetic construct
  source 1..1581: mol_type = other RNA
atggtgccgatcagcctcgaactattcaatagcgtcttccgggttgtcagacgcgagcttaagtacatcctcctgctacctttttttgtgttcatgagcaattccacagaaagaaggcaagagatttatgacaaaatccggcaaagctctaagcacgaatatattctgtcagagatgaagagactgggcttttggggcgaggataatgtggatttcgaacaggtgaataagttcttcaatgatgagtccgaattgagcaaacagctgaacgaccttctccggaaagagaaatctattgaggacacagaagcatttattgctgctaagcatctggagagaaaacgcatttcaaaagagaaacagaaggagacgaaggaaaagagggagcagcaaagactggagaaggccaagcagtggcagctctcaaagctggaagatatcgtgtatctcggagaagggtattctcatcaacttaacgacaaaaccactgccgacgatttgctgaaacgccaggggctccccatcttgcactctgccaaagacgttgcaaaagccatgaacattacagtggcggaactgcgtttcctggcgtactcccggaagaacagcaagacatgccattacaagcgatttaaggtagccaaaaagtccggcggcttccgattaatctccgccccaatgccaaggttgaagaaagcgcagcacttcattctggaacacattctgaacaaggtaaccatgcatcccaaagctcatgggtgtgttctagagaagtcgatccttaccaacgcacttccacacgtgaataaggatgtggtcataaaccaggacttaaagaactttttccccagtataacttacaaaagaatcaagggtgtcttcaagagtatgggttacagcgaacaggtcagtgtgatatttgctctgctgtgctcagagcccaaaatcctcgacgtaacgctcctgggagagaactactttgcacagcagggcgataggttcctgccacaaggctccccttgtagtccagctctgtccaacatcatttgcaaaaagcttgattatcggctcgatggccttgcctctaagtacggattcatttattcccgatacgtcgatgacataaccttctcggggcctaaagctcagttttctaagatccccgccctgctgaaatacagtaacaaagtcgtgaaagccgagaattttattttacaccctgagaagctccgcttgatgaaacgtcatcagaggcaggaagtgaccggggtagtggtgaacgagaaaccgaacattaataagaagagcttgaagcggtttcgcgcattgatctatcagatagaaaaggacggaatcgagggtaaaacttggaatggtggactgaatgttctggcagaaatcgacgggtacgccaatttcatctaccagataaacaaggagaagggcaagccttataaagagagggttgcttcaattttagttgcccacaattacaaggaggcacacaagcaaaaatatgtgaaagctccccccaaaaaagaaggattcatcaagaagctcttttcttggtttaagttgtga

SEQ ID NO: 13268 - RNA, 1515 nt, synthetic construct
  source 1..1515: mol_type = other RNA
atgtcaaatagcacagaacggagacaagaaatatatgataagattcggcaaagctcaaagcaggagtacattatatctgagatgaaacgcctggggttctggggggaagacaatgtggatttcgataaagttgacaggtttttcaagaaggagtccgagctgtcaaaacagctccacgatctgctcaaaaaagagaaatcggttgaagacactgaagcatttatcgctgctaaacatatagagcgcaagcggattagtaaagaaaaacagaaggagacgaaggagaaacgagctttggagcggatcgaaaaagccaaacgatggcagctgttgaagaacgaggacatcatttatcttggggaaggttactctcatcagttaaatgataagaacacagccaccgacctgctgaaagcccagggtttgcctgttctagaaagcgctaatgatatcgccaaagctatgaaaatttctctgggcgagctgcgttttttggcgtatagccgaaagaactccaagacatctcattacaagaggttcaaagtcgctaaaaaatctggaggtcacagactgatcagcgcccctatgcctaggctcaaaaaggctcagcactacattctcgagcacatcctgaataagatcaccatgcacccaaaggcacacgggtgtgttcttgaaaagagtatactctctaacgcactaccacacgtaaacaaagatgtcgtgatcaatcaggacctgaagaatttttttcccagtattacctacactcgcataaagggagtatttaaggcaatgggctacagcgagcaggtgtcaatcattttcgcacttctgtgctccgaacccaaaatcctcgacatctccctgcttggagaacattatttcgcacaacagggtcaccgcttcttacctcagggatctccatgtagccccgccatcactaatatcatttgcaagaagatggactatagattggatggactgggctccaagtacggatttacctactcgagatatgtggatgatattacattttccggggacaaaaaccagttctcaaagattaccgccctcctaaagtactccaaaaaaattgtcactagtgagaactttacgctgcatccggacaaattgcggattatgaagaggcatcagagacaagaggtcacaggcgtcgtggtgaacgagaagcccaacatcaataaggtgagcttaaagaggtttcgtgctctgatatatcaaatcgaaaaggacggcattaagggaaagacttggaatggcggggcaaacgtgcttgccgaaattgagggctacgccaacttcatctttcagatcgaccaggaaaaaggcaggggcttcaaggagcgcgtggcgaagatcctcgcgcaacacaactacatcgagaagcatatagtgacctatgccaaggagaaggtagtggtcgccacctccagtgacgccaaacccaaggatacattcctgaaaaagctcttcagcatcttcaagaaatga

SEQ ID NO: 13269 - RNA, 1542 nt, synthetic construct
  source 1..1542: mol_type = other RNA
atgtatgaaggaaataagatccatcttatcgccacatttttcatcccctacacaatggccgacagcgcaactcgacgccaggaaatttatgacaagatcaaggagagctctaaagaccagtacatcttggaagaaatgaagagactagggttctggaacgagggacaggtcgactttgaaaccgtgaatcagtattttaaggaagagtctgaactgtcccagcagctgcaaaaacttttgcgggagaagagactggtcgagaaccccgaggcctttctggcacaaaaacacaaagagcgcaaactggcttcaaaacagtctcagaaggagacaaaggagaagagagagaagctacgacaggaaaaggcagatagatggaaggaaagcaaggaaaaggatatactcttcctgggggccggatactcgcacacccttcacgacaagtcaaccaagcaggatcgcttacaacaagagaaactgccggttctccagaacgccgaggatgtagcaaaggctatggacatttcgataggccaactgaggtttctgtcctttagtcggaaaaactctaagatcaaccactacaaacgatttcagatcccaaagaaaactggtggctttaggtacatatccgcacctcagccaaaactcaaaaaagctcagcattggatcttagagaacatcctgaataaggtgactatgcaccctcaagcgcatggctgtgtgatcggtaaaagcatcaaaacgaatgccatccctcacgtggcgaaggatgtagtcatcaatcaggacctcaaaaatttctttccctccattgtttacccccgcattaaaggggtgttccaaagtctggggtacagcgaccaggtcgccacaattttcgctctcctttgttcagagccgaaaatagttgagatttccgttctgggcgaggattactatgctcagcggggtgaaagattcttgccccagggctcaccttgcagcccagccattactaacattatatgccgtaagttggattaccggcttgacggtctagccagaaagtatggattctcctatacaaggtacgtggacgatttgacgttcagcggcgaaaaggaccaatatgcacatatcactaatatgctgaagtacagtcgcagggtcgtgaaggaagaaaatttcaccctccatccagacaaactgagggttatgaaaaagggagtgaggcaggaagtgaccggcgtggtggtgaatgagaagccaaacattgacaaaaaatctctgaagcggttccgggccttactgtatcagattgagaaggatggcctcaaagacaaggtatggaccgggaaggcggatcttttgtcccaaattcacgggtacgctaattttatcaaccagatagatcaggagaaaggcaaaaagtataaggagaaggtcaacatcattctcgagaggtataactacaaagataaccaccgcaaacagtatgtgaagacctttgtcaaacctaagggactgatgagtaaactccgttctttcttcagaaagtga

SEQ ID NO: 13270 - RNA, 1497 nt, synthetic construct
  source 1..1497: mol_type = other RNA
atggctgatataagacagcagctgtatgaccgcattaaagccagcactaaagagtccgttatcctggaggaaatgaaacgtcttgggttctggaaacaggaaaccggcgttcccagcctacctgaacaattaatcctccaggaagcagacctcacgaaggaattgcaatctctgcttgagcagcaaagaaagtaccagaacaaggagcaggcactgaaagagatgaggaaggctcgcttagagaagtcgaaactgaaaagagaggaaaacaagaagctaagaaagcagaaacgggaggaaaaagccgctcggtggaaggccacccaggaaacagatattatctacctcggggaggatgtgagtaaaggtctgaacaacaaagagacagatgtcgccaagatcaatacccatcagttgccaggcattacgactgtcgaagagcttgccaaagctatgaatatctctgtgggaacagtccgatacctttcctataaccggatcatttcaaagactacgcactacaagagattttacatacccaagaaaaccggcggaaagcggctgatctcaactcccatgccaaagttgaagcgagctcagtactggattctcgagaacatcctggaaaagattgccattcaggacagcgcgcatggcttcgtgaaaaagaagagtattgtgagtaatgctttgccccatgtaaaggctgaggtggtagtcaatatcgacatgaaagatttctttcccaccattacttaccctagggtgaagggagtcttccaatccttcggatattccgaacagatcgcgacaatcctggccctcatgtgtaccgaggctgaatgcgatcaaatcgatctggacggcataacctactatgcggcaggtttagagaggtttctgcctcaaggcgcgccaacatcaccagcccttaccaatatcatatgccgtaaattggatgcacgcctgaaggggattgccacaaagttcaacttcaactatacaaggtatgccgatgacctgaccttttcagcctccggggaagcaactgcccacctcaagacactcatggggtttattaaacgcatcatcaaggaggagaatcttcacatacacccggacaaggtgagggtactgcgtaagggggcccggaaggaagtgaccggtatcgttgtgaatgaccgccccgctgtcaacgcaaaggagctagaccgatttcgcgctctgctgtttcagatagagaaggacggcctcgatggtaagcattggaaaggatctaataacctgctggcaagcattaagggatatgcaaatttcgtgctgatggtggacccaatcaaaggcaaacctctcatggaaagagttagtaaaattttgagcactcacgagttcaagcatgtgatccggcacaaaccgaaatctttactcgccaatgagccagagaaacctaaaaacaccgaggaacagagcaaaaagccttggtggaggttttggtga

SEQ ID NO: 13271 - RNA, 1488 nt, synthetic construct
  source 1..1488: mol_type = other RNA
atggcagacattcgtcagcagctctatgaccgcattaaagcgagcacaaaagacagcgtgatactggaagagatgaagcgtctcggcttttggaagagggatgtggggatgccatctttgtcagagcaaatcatcctcaaagaggcagacctgactaaggagctgaatgcacttctagagcaacagcggaggtatcagaacaaagaacaggctttgaaggagatgagaaagtctcgtttggagcagagcagagccaaaagggaagagaataaaaagcgaagaaagcagaagcgagaggagaaggcagcccgctggaaagcatcaaaggaaacagatatcatctatctgggagacaatgtgtcgcaggggttgaataacaaggaaacagaccccgcgaaattaacccaacaccagcagccccttgttaccacagtcgaggacctggctaaggccatgaatgtctcagtggggacactgagatacctggcttacaaccgcataatctccaagactacgcactacaagcgcttttatatccctaaaaagaccggcggtaaaaggctgatttccaccccgatgcctaaactgaagcaggcccaatattggctgctggaaaatatgctgaacaaagtcgccacccacgacgcagctcatggctttgtgaggcagaggagcattgttagcaacgccctaccccatgttggggccgaggtggtaatcaacattgatatgaaggacttcttcccaacaatcacttatccccgggtgaaaggtgtgttccgctcctttggctacagtgagcagatagccaccattctggctctcatttgcacggaaccagatgtggatcagatagaattagacggccaaacatactacgctgcgggatccgaacgcctactgccacaaggtgcacctacctctcccgccctcactaacatcatttgtcggaaactggacgcccgacttaaagggattgccacaaagttaggctttaactacaccagatacgctgacgatctaactttcagtgcttcaggagaggccgtaacgcatgtgaaaactctgatgggattcgtgaagaaggtggtcaaggaagagaagctggtcattcaccctgataaaattcggatcctccggaagggtgcacggaaggaagtgactggaatcgttgtcaatgataagccggctgtgaatgccaaggagctcgatagattcagagcgctcctcttccaaatcgaaaaggatggaccacagggcaaacactggaacaattctcctaatcttttggcttccatcaaaggctttgctaacttcgttgcccaggtcgatcctgtgaaagggaagccacttgtagagagggtaaacgccatattggttacccatcagttcaagcacaccatcaagcataaaagcaaagcacaacaggccaagcaggaggcggaacagaagcagaaaagtaaaaaaccctggtggaagttttggtga

SEQ ID NO: 13272 - RNA, 1503 nt, synthetic construct
  source 1..1503: mol_type = other RNA
atggccgatatccggcagcagctgtacgaccgaataaaggcctcaactaaagagagcgtcatcctggaagaaatgaagaggctgggcttctggaagaaagaagaaggcattccgtccctaagtgaacaactgatagtgaaggaggccgacctgaccaaggagctgaaagaactcctggaacagcagcgaaagtacgagaacagggaagccgcacttaaggaaatgcgtaaggccaggatggcccagtctagagcaaagagagaggaaaataagcagctccgcaagcagaagcgtgaggccaaggcagctcgctggaaagatagtaaggaaaaggatatactctacctaggcgaggacgtgtccaaagggctcaacaacaaggagtctgaccttacaaaattagcaacctacggtttaccagttattcatcacgcagaggccctcgcccaagccatgcagactacaatcggaaacctgcgccacctagcatatcatcggattatatccaaaaccacccattataaacggttctacatacccaagaaaacaggtgggaaaagactcatcagcacgcccatgcctaaactcaaacaggctcagtattggatcctggagaacattttgaacaaggttacccttcacgacgcggctcacggcttcgtcaaaacacgctccattgtgagtaatgctcaaccccatgtgaaagctgatgtagtcattaatatcgacctcaaggatttctttccaagtatcacatacgtgagggccaagggcgtttttaagtcattcggttatagcgagcaagtggctactattttcgccttgttatgtactgagccagagtgcgaccagatcgcaatcgatggcgtgacttactatgccgcttccatggaaaggtttcttcctcaaggagccccgacctcccctgcgattacaaacattatctgcaggaagctggacgctcgtctgcggggaatcgcaacgaagttgaatttcacgtacaccagatatgccgatgaccttacctttagcgcttctggtgatgcagctgctggcactcggaccctgttggggttcgtaaagaagatcattaaggaggagaaattgaacatccaccctgacaagtttcgagtgcttcggaaaggagctagaaaagaggtgaccggaattgtcgttaacgagaagcccgcggtgaatgccaaagaattggatcgctttcgcgccctcctgttccagattgagaaagatggcatagccggcaagcattggaacaattcaacaaatctgctggcttcgatgaaggggtatgcctcttttgtggccatggtcgacgctgcgaaggggaaacctctggtagaaagagtgaatgccatcctggcagcgaatcagttcaagcacgtcatcaggcacaaaagcaaagccatgagagataaagagactgcacaggcacccaaggggtcaggaagctctgacgcgaaaaaaccatggtggaagttttggtga

SEQ ID NO: 13273 - RNA, 1512 nt, synthetic construct
  source 1..1512: mol_type = other RNA
atggtgggatcgcagaatacacggcagcagctgtacgatcgcatcaaagctagcactaaagaagccgtcattctcgaggagatgaaaaggctagggttttggaagtccgaggaaggtatgccctctcttccagagctgattattgaaaaagaggccgtgcttataaaagaagtccgcgaactggtggagcagcagcgcaaatacaagaacaaggaagaggccctcaaggaggtacgaaaactccgtttggagaaatcaaaacttaagagggaggagaacaagaagacgagaaagcagaagcgggaagagaaggcagcgcattggaaggagcgcaaagaaaaagacattctgtaccttggggagaaagtttctaaaggcctgaacaacaaggagagcgacttagcaaagctgacctctctgcaactgcccgtactccaaaatgctgaagatattgctctagctatggggattccagtgggccaagtgaggtttctctcattccacaggattgtgtccaagacaactcactatcgtcacttttacatccctaagaaaaccggcggtaagcggctcatttcaacccccatgcctcgactgaaatccgctcagtattgggtactgacgaatgtcctcgacaagatcctgatacatgatgcggcccacggctttgtcagaaagagatcaatcgtgagtaacgctctgcctcatatcaaagccgaagtcgtgatcaatatcgacttaaaggacttctttcccagcatcagctacatcagagtgaaaggcttgttccagagtttcggctacagtgaacaggtggcaacgattttgggtctgatatgcaccgagccggagagcgatgaaatagagcttgatggcgagacatattttgccgccaacggagagcggttcctacctcaaggagcgcccaccagtccagccatcactaatatcatttgtcgcaagcttgacgttcggctgaagggaatcgcctccaagctcaatttcaactacacccggtatgcggacgatttaacattctccgcctctggcgagtcagccgctagcactaaaaccttactggggtttgttaagaagattatcaaggaggagaacctgaacatccatcccgataagctgagggtcctgcgaaagggggccagaaaggaagtgactgggatcgtcgttaatgacaaaccaagtgttaacgcaaaagaactcgacaggtttagagcattgttgttccagatagagaaggatggaatcggcggaaagcattggaagaacagcaacaatctgttggcatccatgaaaggttatgcctctttcgtagccatggtgaatccggaaaaggggaacccaataaaggaacgtgtgaataagattctcgccgctaaccagttcactcacgttattaagcacaagtccaaagctatgatcgcaaaagacgcagcaaaaaatacaaataccgcttctacaagcgaagtgaaaaaaccttggtggaaattttggtga

SEQ ID NO: 13274 - RNA, 1572 nt, synthetic construct
  source 1..1572: mol_type = other RNA
atgactaagaatatcctatatacgaccatcttctatacacctatggcaaataccgaaaactcccagccgactagacagcagctctatgagcggattaagtcatcaggacgtaacgcggtgatcctggaggaaatgcagaggctgggcttttggaaatccgacgaaggtgcttctgttattcctgagatgcttatacataaggaggctgatttgatcaaagagctcaataagctgcttcaacaacaacgcatttatcagaatcgcgaggaagctttaaagaaggtcaggcaggctaggttagagcagagccggaagaagcgcgaggaaaataaaattctccgaaaacagaagagagaagctaaggctgcgagatggaaagaactccgtgacaagaatattatatacctgggcgagaaggtgtccaagggcttaaacaaccagattagcgagaacagtaagctcctaaagtaccagctccccgtcctgcagacagccgaagaactgtctgcggccatgaagatcacaataggggaattgagatttcttagctataaccgtacgatttccaaaatcaaccactataagcggttctatatccctaaaaaaaccggggggaaacggctcatctctaccccgatgcccaggttgaagaaagcccagcactggatactcgaaaacattctgaacaagatcgaccccacagagtcagcccatggcttcgtgaagaagaaaagtattgtgagcaatgcacttccacacgtaaaggctgacgtcgttgtgaatattgacctgaaagacttttttccctccatcaactacagacgggtgaaaggcttgttcatcgcactgggttacagcgaacagatttctactatcttcgccctgatatgcacagagcccgattgtgatcaggtcgagttagatggcgaaacttactacgcagcgggaagtgaccgcttcctcccacaaggtgccccaacgagcccagctatcaccaacctgatatgccgaaagctggaccttaggctgaagggaatcgcatcgaagcttaattttaattacactcgctacgccgatgacctcacctttagtgcctccggagtagcaacatctaacactagtacacttctggggtttgtgaaaaagataatcaaagacgagaagctgtacatcaaccccgataagctgagagtgcaaagaaagggcgccaggaaagaggtaactgggattgtcgtgaatgataaaccatcagtttgtcgcaaggagctggataagttccgagccctactgcatcagattgaaaaagagggaaccatcaaaggcaagcactggaataattccaacaatctgttggcaagcattaaagggtacgccaatttcgttaagatggtgaatcctgagaaaggaaaacctttggaggaaagggtgaagaaaatcctggaggcccaccggtttaaacacgtgatcaagcataaaccgaagaaacagtctgccaccaccaacgtcgttgattcaaagcctgctaaccaaccagaagcagagaacaaaaagccctggtggaaattctggtga

SEQ ID NO: 13275 - RNA, 1497 nt, synthetic construct
  source 1..1497: mol_type = other RNA
atggctgattcccagagtacaagacagcagctgtacgaccgtataaagaattcgtcaaaggacgctgtagtgctggaggagatgaagcgcctagggttctgggccaagaacgagagtgccccctcgttgccagagatcctgattcaaaaagaggcagcccttgtccaggagctgaggcaactgaccgagcaacagcaaaaactgaaagacaaacaacaactcctgaaggaggtccgcaaagcgcggctggaaaaaagcagagcaaagcgtgaagaaaacaagaaattgaggaaggaagcacgagaggccaaggccgcccgttggaaagagaagaaggagaaggatattgtctaccttggcgccaacgtgagcggaggactgtcacatactgccagcgacgcgacccttttaggcaagcaccagctccccatctggaactctgtggaagaacttgcaagggacatgaaggtgaaagtgggagaactccggttcctggggtttaatcgcgctgtgtcaaaggttaaccactataagaggttttacattccaaagaagactggcggtaaaagactcatctccgccccgatgccgcggttaaagacagcacagacatggatcttggagactattctgaataaggttgcccctagcgagcaggcccatggttttgtcctgaagcggtccatcgtatccaacgctttacctcacgtgaaggctgatgttgtcataaacattgaccttaaggacttctttcccagtattcattatccacgcgtgaagggcgttttccagagcctgggctattctgagcagctcgctacactcttcggcttgatatgtaccgagcccgactgcgacactgtggagctggatgggacgacatactacgtgtctaattctgaacgctttttgccacagggagctcctacttcacccgccattaccaatattctatgcagaaagctggatgctcgactcaaggggatctctaccaaattaaacttcacctatacaaggtacgctgacgatctcacttttagcacctccggcgagcatgtcaacaaaaccaaaacactcttgggattcatcaaaaaaatcatccgggaagaaggtctggtgatccatcccgataaattgagagtccagagaaagggtgctaggaaggaagttaccggcctggtagtgaatgataaaccttctatagcagcaaaggaactggataaattccgagcccttatttatcagatagagaaggacaaaacgctgcagggaaaacactggaagaattccccccacctgctcgcaagcatgaaggggtacgcaaatttcgtggcgatggtggatccagcgaagggcaagccactggtccttcgggtgaacaaaatcctagacgaacacgggtataaacacgttatcaaacacaagcctaaaccaaaagtcgtggccgccagtgagcagcctgtacctgccaaaaagccctggtggaaattttggtga

SEQ ID NO: 13276 - RNA, 1515 nt, synthetic construct
  source 1..1515: mol_type = other RNA
atggctgataacagccaggtaacacgccagcagctctatgatcgcattaaggctagtactcgcgattcagtcatcctcgaagaaatgaagcgtctggggttctggaagaaagacgacgggattccatccctgccagagatactgatcacaaaagagtccatactgacacaggaactacatgtgctattggaccagcagaggaaatataaaaataaggaggaggcccttaaagaaatccgcaaagcaagactagaacaatctcgactgaaaagagaggagaacaaaaagcttaggaagcagaaacgcgaagctaaagccgctcagtggaaggagcggaaagagaaagatattatatacctcggagaggacgtttctaaggggttgaataataaggccagcgatttgaccaagctcgctacctatcagctgcctgaaatgcacatggccgatgagcttgccaacgcaatgggcatcactgtgggtgagcttagatttttggcctataataggaccgtcagcaaaattaaccactacaagcggttttacatccctaaaaagaccggcggtaagagactcatctcaacacccatgccccgattgaaaaaagcccagcattggatcctggaaaacattttgaacaaagtgtcgattgacgaccatgctcacggattcgtgatgaagcgctctattgtcaccaatgccctgccccacgttaaggcagaggtggtgattaacatcgacctgaaggatttcttccctaccatatcctatcagagagtgaaggggctgtaccgtagtcttggctactcagagcaactgtccacgatcttcggcctgatcagcacggagtccgaatgtgaccaaatcgaactcgacggcgaaatctactacgcggccggaattgaccggtttcttcctcagggagcccctactagcccagccatcactaatataatctgccgaaagctcgatgcgaggttaaagggcattgcctctaagctcaattttgcctataccaggtacgccgacgacctgaccttcagcgcaagtggtgaaaacgtcaacaataccaagaccctgttagggtttatcaagagaatcatcaaggaggagaacctgactatacacccggataaattccgggtcctgcggaaaggggctcggaaagaagtgactggagtgatcgtaaatgataaacccgctgtgaatgcaaaggagctggacagattcagggcattactctttcagattgagaaagatggtacactggagggcaaacattggaagaatagtccaaacctgctcgcctcaataaaaggatatgcgtcttttgtggctatggttgatcccattaaaggcaagcctttcgtagaaaggactaacaagattttagagacacacggctttaagcatattatcaagcacaaaccgaagccaccccagacagctgcagcggttcaaacggaagagcaagcagcccagaagaagaagccatggtggaagttctgggcatga

SEQ ID NO: 13277 - RNA, 1506 nt, synthetic construct
  source 1..1506: mol_type = other RNA
atgtcgaaccagccgaatagacaacaactgtacgaccggattaaggcatctactcgtgatgctgtgatcctcgaggagatgaaacgatttggcttttggaaaaaggacgaagctcagtctatagtgccagaaactcttatcgagaaggaagctgcgttgaccagggagttacgggacctcttagagaagcagcagaggttccagaaccgagagcaggcccttatagaggttcgaagagctcggctggaggcatccaagaaaaagcgtgccgaaaacaagttgttacggaaacagcagaaggagcagaaagccgcacgttggaaagagaagaaggagaaggaaatcatttacctcggggaagacgtgtctcccggactgaacaatgtcagcgctaaccccgataatctaaataagcagaagttacccgtcatcgccaacgccgaagagctggcgaaagccatgaagacaactgtcgcagaactaaggttcctggcctatcatcgcacagtgagtaaaacaacccactatcagcgcttctatatccctaaaaagacagggggcaaaagattgatctcaactccaatgcccaggctgaagtccgcccaacactgggtgctcgagaacattctggagctcccggagattaaagacacagcacatggttttgttaagaagcgctctatcgttagcaacgcggtgccccatctcaaggctgaggtcgtgattaatgtcgatctgaaggacttcttccctagcattgactacaaaagagtgaagggtctatttatctcattgggatattcagaacagattgctatcatccttggcttgctctgcaccgaacccgagagcgaccagatcgagctggatgggcaaaaatactatgtagccggcactgaaagattcctgcctcaaggcgctccaacctcacctgctataacaaatctgatttgtcggaaacttgatgcccggctcattgggataagtaaaaagttgggatttacgtacacccgctatgccgatgacctgaccttctctgcaagtggcgaggcagtaaagagcgttaaaacccttatggggttcattaggaaaatcgtgaaggacgaaaatctgaacatacacccagataagctcaggattctgcgcaagggatccagaaaggaagtgacgggtatcgtggtgaatgacaaaccagccattaacagcaaagaactcgaccgctttcgggccctgctgtttcaaatcgagaaagatggaatcgcggggaaacactggaaaaattcccctcaccttctgccttccattaagggatacgtgaactttatcagtatggtagatcaggagaagggcaaagccctgaaagttagggtcgatgcaatactgcagaagcacggctacaagcatgaaattagacataagtccaagcaacagatcgccaaggaacaggagcgaatcgaagctgaggcagtccaccagaaaaagaaaccatggtggaaattctggtga

SEQ ID NO: 13278 - RNA, 1512 nt, synthetic construct
  source 1..1512: mol_type = other RNA
atgaccagacaggaaatctacgacaggattaagaatagtaccaaggatgcagttattttggaagagatgaagaaactgggattttggaaagaagacggagctgccgccagtgttcccgagcagctgattcttagggaagccagtttaagaaaagacctgaacgagctgttgcagaaacagagaaactaccaaaatcgggacctggcactgaaggatatgagggccgctcgcatggaagcaagccgcaagaagcaggctgagaacaaactgctcagaaaagaaaaggctgagaagaaggcagcagcctggaaggagaaaaaacaaaaagatatcacgtacctcggggaagccgtgtctacagggttgaacaatgctgaagctaatacagaaaagctgcaaaaatcaggcttgcccctgatcgagtcagcggagaaattggcagccttgatgcagatttctatttccgagcttaggtttgtggcttataatcgagtcgtttccgagataacacactacaagaagttccagctccctaaaaaaaccggtgggtttcgcacaataagcgccccactcccacgtctcaaatcagctcagcattggatcttacaggagatcctgaacaaactgcctgtgcacgccgcggcacatggcttcgtgaccaaaaggtccattgtctcgaatgccaaggagcatctgcagaacaacctccttatcaacatagatcttaaagacttcttcccgtccatccattacccacgggtaaaaggattctttaaggctatagggtactcagagcaagtagcgactattttcgcgctgatttgcactgaatccgaggtggatgagatagagctcgataagaaaacctattatgtgaaatctggggatcgcagtctgcctcagggtgctcccactagccctgccatcacaaatctactgtgtcgtagacttgacgcccggtttgccggcttagcaaagaaatacggctttgtttacacccggtatgccgacgacctgtcatttagcgcgcccgaagaaaagaaggaggaattcaagaagtttattggtttcgtgaagaagactattaaggctgagaattttactctgcacccagataagttcaaagtgttaaggaaaggagcccgacgggaggtaacaggtatcgtcgtcaatcagaagctatccgtttccagcgacaaagtgaagaagtttcgagccctgctgttccagatcgagaaggacggcattgccgggaagcactggaacggatctaccacactacttgctagtatcaagggctatgctagcttcatctatcaagtcgaccctgtcaagggcaaaccgatgctcgagcgcgtgaacaaaatactcgtggctaacgcattcaagcacatcatcgtgcacaagtctaaggcacagaaagaaaaagaagcacccaagaaacaggccggaatcggcgccagcacgaaaactacctctgatacgaagaagccatggtggaagatttggtga

SEQ ID NO: 13279 - RNA, 1437 nt, synthetic construct
  source 1..1437: mol_type = other RNA
atgaaaaagtttggattttggaacgaaacagaaggacagtcctccctgcccgaacaactgatcatgcaggaggcacggcttagtaaagagttatacgacttgctggagaaacagcgaaagtaccaggatcgggagaaggccctcaaggaaatgaggacagcgcgtctgcagaagagccgcgagaagatagcagagaataagagattgagaaaggagaagaaagaacaacgggcgcaggattggaagaactcgaagcagaaggatatcatttatctcggcccaacagtgtcaaaagggctccagcagacggccgacggagaaagcgataaactgaagcagaagcaactacccttgatccatacagccgaggagctggcatcccagatgggcatcggcattggcgaactgcgcttcctgtcttataaccgtccggtttcaaccgtctctcactatcggcagtttcagatgcctaagaaaaccgggggtttccggaaaatttctgccccaatgcctaaattgaaagaggcccagcattggatcttacactacattctgaataagctgcctgtccacgaaaacgcccacgggttcactcttcgaaagagtatcgtgaccaatgctcaacctcatctccagaaggtgctcttaatcaacatcgacctcaaggacttttttccaagcatccattatcccagagtcaaaggtatgttcaggggcatgggttacaatgagaagatagctacacttcttgctctcatatgcacggaaagcgagactgacgaggttgaactggacgggaagaaatatttcgtgaaatcagggaatagagcactgccgcaaggagctccgacttccccagccattacaaactatctttgccgcaggctggatgctcgactgtccggtctagcgaggaaatatcacttcacttacacccgttacgctgatgatatgaccttcagtttcagcgccgatcaacaagatagtatcaaaacctgtatcggattcatcaaaaagacgattcgcactgaaaactttaacatacacccagacaagttcaaagtgctgaggaaaggcgcacgccatgaagtcaccggagttgtggtgaacaataagctctcagtggacagcaagaaactgaaaaagtttagggccactttgtaccagattgagaagcatgggttgcagggcaagcactggaaccactcccataatctgcttgcctctctaaagggctacgctaactttattaatcaggtagacccagtcaagggcaagatatataccgagagagtaagaaaaatcctggaccagtaccagtaccggcacgagattattttcaaacccaagcccaagccatctcctctcaaagaaatccccaatcctattcctgcccccgaggcaaaaacacgcaagccctggtggaaattttggtga

SEQ ID NO: 13280 - RNA, 1296 nt, synthetic construct
  source 1..1296: mol_type = other RNA
attgcacgcaaggaaaaaatagaggcagccgccaaggcttgggccaggaaaaaagagaaagagatcgtgtaccttggcgaaaacgtttccgctggactgaacaacctgcaggactcggatgcagagcggctaaagaagaacaatctcacggatatagccagcgcagaacagctcgctgcccttatgaaaatcgagatgggtcagttacgcttcctaagttatcatagagcagtctcccgggtcagtcactacaagaagtttacaattcccaagaagaccggtggcgttagaacaatttctgctccgatgcccaaattgaaaaccgctcagcactggatcctggagaatatcctcgataaaattctcctgcatgacgcggctcacggatttgtgaataagaagtctatcgtgactaacgcaactccccatctcaagtcagaggtggtcatcaacattgatctgaaggacttcttcccttctgttcactacccacgagtgaagggtatgtttcggaaattggggtataatgaggccatctctacgatcttcagcctgatatgtactgaggctgaacaagacgaagtggaaattgacggcgtaaaatattacgtgaaggatggaaacaggaagttaccacagggagctcctacctcaccggcaattaccaacatcatttgcagaaaaatggatgcccgcttcactgggcttagcaagaagtatggctttgcttacacaagatatgctgatgacttaactttcagtgcctcgggcgacgctctcttgaaactgaagcaattcattgccctggtgaagaaggtcatctcctccgaaaggttcactcttcaccctgataagtttaaagtcatgcggaaaggcgcgaggaaagaagtgacagggatcgttgtgaatgaaaaacccgcgatagagaagaagaaactgaagaaattccgagccctcctgtttcagattgagaaagaggggtcaattgcaggaaagaagtggggtaatagcaagaatttgctggccgccataaaagggtacagcaatttcatcaacatggtagaccctgtgaaaggcaaaagcctgatcgaccgtgccaacaagattctggagcagcataagtttgcccacgtgatcgtacataaggccaaacctaaagtcgaacccgtcgttatccagaaaacgaccagtaccgtgtcacaatcccagtacgtgagcacaacaaccgcggcaacacagcaagtagccccagagaagaccgactctaagaagccatggtggaagttttggtcctga

SEQ ID NO: 13281 - RNA, 1506 nt, synthetic construct
  source 1..1506: mol_type = other RNA
atggccaaccagtctaaaccgaccagacagcaactgtacgacaggatcagacagagctcccgcgatgaggtggtcctggaggaaatgaagaaactcggattttggcctgacggggagggagcccccagtttacccgaacaggtgatccgtagagagggggaactgagcagggagctgggtgatatgctggtacagcagcgcagatattcagatcgggagcagatgctcaaggaaattagacagcaacggatggaggcttcccgacagaaacaaaaggaaaacaaggaaagacggcgacaggagaggcagcagcgtgcagagcagtggaaggcaaggcaggaaaaggagatcttgtaccttggcgaaggggttagcgctggtctgggcgaatctgataacgacgcggctaagttgcggctgaatggactccctgactttattgatatagaatcactggcgcgcgccatggagatcgatgtagcatctcttcgcttcctggcttactccaggcaggtttccaaagtgagccactacaagcggttttacatacagaagaaaaccggaggaaggcgtatgattagtgctcctatgccccggctaaagcaagcccagcagtggattctcttacacattctggagaatgtcaaggtcaacggtgccgcccatggcttcgttttaaataggagcatcgttacaaacgccctgcctcacttgcagccagacctgcttgtgaatttggatttgaaggacttcttccccaccgtaacttacaaacgaatcaagggagtgttcagatcgctcgggtatagcgagaaggtggcttctatttttggcctcatctgtacagagcctgatattactgaggcagagatggacggtcgaacctattttatagcatccggagaaagattcctcccacagggcgctccaactagtcccgccctgaccaatattctctgcaggaggctggacgtcagactcaaagggctggcgcgaaagtacggcttcacatacacacgctatgctgacgatttatcattctcagctcgcggggagggcaaagagaatcttacgaaacttctggggaacgtccgcagaatcataaaagacgaaggctttgtgatccacccagacaagctccgggtgatgcggaagggcagtaggcaggaagtgacgggcgttgtcgtgaatcaaaaactgaacgtctgccggaagaaagtgcgcaactttaaagccctactattccaaatcgaaaaggatggcatcgagggtaagagctggcagggatcctctgacaacctgctggccgtgataaaggggtatgcacattatattgccatggtgaatcccgtacagggtaagcccttggcggagcgtgtggaagcaattcttaagaaacatcactatcgccacatcatcaaacatccagccaagaaacctttcatgcaagcagccgccgaggaggaacctcaaccaaaaaaaaaaccgtggtggaagttttggtga

SEQ ID NO: 13282 - RNA, 1542 nt, synthetic construct
  source 1..1542: mol_type = other RNA
atggctgatagctcactcaaccgccgtcaggagctgtatgacaggatcagatcttcaagcaaagatcaggtcatattggaggagatgcagaaaatgggcttttggccagacgattcagaggaacctagcgtgccagcgttgtattttaagagagagctagagctatcccaggaactgagagacttagtcataaagcaccgccgttttgacgaccaggcaaagatgctggagcacatccggagggagcgcatggccgagagtcggaaaaagcaaaaagaaaccaaacagcgcagaaggcaagagaggcttgcccgggccgaagcttggaaacagcgcaaagcctctgaaattctgtatttgggcgaaggagtcagtcagggactgcagggggctacacccaaccgagcaagactgacacagcatggccttaccgacattgcttccgtggaagccctggccttggccatgggtatgacagtgggtaagctgagattcctggcctacaatcgagaaatctccagagtctcccattatattagattccacctaccgaagaagagggggggtactcgtctcatttccgccccaaagccaggcctcaaatctgcccagtactgggtgctccagcatattctggaccggatcgaacttcatgatgctgcacatgggttcagaaaggctcgctctattgttacgaatgccaagccccaccttggggcagatctggttgtgaacattgatttgaaggacttctttccaaccgtgaactaccggcgcgttaaaggcctgtttgggggcctggggtactccgagagaatatctacggtgcttgggctgctctgtaccgagcccgatgtcgatgtagtggagctggatggcgagacatggtacgttgctaagggcgaaaggcacttacctcagggagccccctgctcacctgcgataaccaatatcatgtgcaggcgacttgacgctcgaatgcgcggacttgctcaaaaatacggttttgtatatagcaggtatgctgacgatatgacatttagcgcaagtggcgattcgaggaagttattaatgactctgctcggaaatgtgcggcggatcttgaaggacgagaatttcaagctgcaccctgacaagctccgtatcatgcgcaaaggagcacaaaaagaggtaactggcatcattgtcaatgaaaagctcaatgtgagcaggaagaagctcaaaaagtttcgggccctgatcttccagatcgagaaagacggcccagaaggtaaaacctgggaaggcgcgcgagatttgctgcccgccatctgggggtacgcaaacttcatcaaaatggttaaccccgacaaaggggctgagttcgttgcccgggtcaaggccatcttcgatcacctgggcgagactccgccagtaaaacccgtggtggcacaacctgacggaagcgaagtggaagtggaaattctccagggaagtgacgaggatgaggcacctggtgcgactggaaacgaccctgataagccctggtggaagatttggtga

SEQ ID NO: 13283 - RNA, 1458 nt, synthetic construct
  source 1..1458: mol_type = other RNA
atgtttgagggcttccgagactctcactttcccctgaacgatatgagtaacacagagaactcccaagactcacggttaagtcgccagcagatctatgatcggattcgcgcaacctctaaacaggaatacatactgtcagaaatggtgcgactgggattctggccagattcccaggacgctcctacactgcctgaacagctcatacgccgtgagggagagctgacccgggagttgacggagctgctggaaaaacagagaaagttcgacaatcgggaacaaatgttcaaggagatgaggaagaagagattggaagagtcccaccagaaacaagcagagacaaaagaacggcggcagagagaacgcgatgaacgtgctcgaagatggaaggaactaaaggcacaggacataggatatctaggtgatggcgtcagcggcgggcttcagaataaggaacattccgcagagaggctggcccagaacaacctgcctgcctttgctagcgtggccgagctcgttcaggcaatggggatctccgtgggggagttgaggttcctgacgtttcagagggacgtcagcaaagtgagccattacaaacgcttctacatgccgaaaaaatctgggggaatgcggctcattagtgcgcccatgccacgattaaaagccgcccagcactgggtgctcgaacacctcttgcagactgtgccacttcatcccgctgcgcgaggttttagatcgggggagtcgatcgtcaccaatgctgccccacacgtgggaagggacgttgttatcaatctggacgttaaggactttttccccaccgtcagctacccccgggtgaaaggagtgtttcgcgggctcggctacagtgaacagctggccacaatttttgcactgctctgtaccgagcctgacgtagatgctttggaactggacggcgagacttattatgtcgtggctagcggaagacatctaccacagggtgccccgacctctcctgccttaacaaatatcctgtgcaggaggcttgattcccggctttccgggatggctcaaaaaatgggtttcgcgtatactcgctacgcggatgatatgaccttttcaggcactgaggacacgctgcagaatcttactaaactgttgtggagggctaagaagattatcagcgatgaagggttcgtcgtacaccctggcaagctccgaatcatgaggtctggctcaagacaggaggttactggtattgtggtgaacgagcaaatgaccttggagagaggcaccctccgcaacttcagagccctgctcttccaaattgagaaggatggccttcggggcaagacatggaagggccgcgaacttacacccgcatctctgcgtgggctcgcccattacatcgtcatggtgaatccccaaaagggaaggccactgctagagcgtgtaaacgccttactgagacaggcctga

SEQ ID NO: 13284 - RNA, 1401 nt, synthetic construct
  source 1..1401: mol_type = other RNA
atgaatgattcagaggactccagagctgtccgccagcaaatatatgaccgtatccgacagtcgtcgcatgatgagtatattctcgatgagatgatcaggcttgggttctggagtagcgacaaagacgctccctctgttcccgaacaactcattagaaaagaggctgaactctctcgagaactgagggaccttttgaagaagcaacggcgtttcgaaaatcggaagaaaatgctgaaagaaatgagaaccaagaggcttgccgagtctaggaagaaacaacaggaaactaaggagagaaaaaaacgggaaagggatgagaaagcccggcagtggcagcagaagaaggctactgcgatcttctacctcggtgaaggcgtatccgctgggctgaaccagaaggagctactgaccgagcggctgaaccagtacaatctgcccgtttttactagcgtggaggcccttgcacaagcaatggagattagtgtgggcgagttgcgctttttaacctttcaccggaaggtgagcaagaccacacattatcagcgcttctacatgcccaagaaaagcgggggagtgcgcttgatctccgccccaatgcctagattaaagcacgcacagtactgggtgtttcataatatccttcagcagatcccgctgcattccgcaggccacggttttagacccgcccacagcatagtttctaacgcagagccgcaccaaggtcaggacattgtgatcaatatggatctccgagatttctttccatctatctcatacaagaggatcaagggcctatttcacgccctggggtactcagaacagattgcgacaattctcgggttactgtgcacagaacctgagatcgatcaggtggagctagatggagagacgtattacgtggccaactcagaaagacatctgcctcaaggcgcgccaacctccccagctctcacgagtatattatgtcggagactggactccaggctgcaaggcatggccgataaattgggcttcgcatatacacgctatgcagacgaccttaccttctccgcctctggtgaaaccgcccgacagttcacacagctgctctggcaggctcgcaaaattatcgaggacgaaggatttgttctgcatccagagaaactgaggattatgcggaagggcagcagacaggaggtcactgggatagtcgtcaacgaaaagctgagcgtgaaccgaaaaactttgaaaaatttccgtgccctcctgttccacatagagaaggacggacttgacggaaagcactggaaaggacagcctgtaagtttggctttcctgaaaggctttgccaactacgtaaagatggtcgatcctgataaggggcgccccctcctggacaggattaataagctgatcgtgtga

SEQ ID NO: 13285 - RNA, 1515 nt, synthetic construct
  source 1..1515: mol_type = other RNA
atgaccgatacggatacgagtcgactgaccaggcaacagttgtatgatcgaatccgcgagagtagcaaagatgaatacattctcgaggaaatgattcggatcggcttctggccttccgggaaagatgcccctactctgccagagcaggtgattcggcgtgaaggcgagttgactagggaactcgatgacctcctgaggaaacagagacgctacgagaacaaggagctgatgctcagagagatgcgaaaagccagaatggctgagtcacgccgtaaacaggcggagacaaaggctcgtcgtgaagaagaaaggcaggctagagccgagagatggcaggacatcaagacaagagaaatactttggcttggccacggagtttcagggggtctgaatcggagaacctctgatgttggcaagctggcacaaaacgggctcccgcattatgatgacgtcaaggccttggctaaggcaattggtattcccgtaggcgaactgaggttcctcgccttttccaggaagacctccaaaatctcccattacagacggttctttataccaaagaagagaggcggaagacggctgatctcggctcccatgccacgcctgaaagctctgcaatacttcgtgcttgagaatatcctggcgaagatccctccgcataaagccgcgcatggatttctgccaggacacagcatcgtgacaaatgcggtgccccacgttggcaaggacgtcgtgattaatttggacttgaaggacttctttccgactattagttatccacgggtaaagggtctgttccggagcctgggatactccgaacagcaggcaacgctcttcggactaatatgcaccgagcccgacacagatgcagtcgaactggatggcgagacttactttgtcgctcgaagcgaacggcacctaccccaaggagcacccacaagccccgccatttctaatctgatcttcaggaaagcagatcgcagacttcaaggggtggccgaccagctgggctttgcctacacacggtatgctgacgaccttaccttttctgcctcaggagatgccgcagaagctttaaccaggctcctatggggagtgcggcagatcgtgaaggatgagggctttgttcttcaccctgacaaattacgcgttatgaaaaagggggcccgacaggaggtgactggtatagtggtaaacgaaaagctcaatatcagtcgcaagagcctcagaaacttccgagccctgctgttccagatcgagaaggacgggtttgagggcaaacgctggaacggcgcaaaaaacttacctccagtgatatgggggtatgccaactatgtggctatggtcaatccagaaaagggtaaacccctggtcgcccagaccgaccgcatttttaggaagtaccggattaggaaatctgacatcaggcctgacttagcacgcaaagccgccttggctaagaaaggggagacttcaggggcagacgaggagaagccttggtggaagttctggtga

SEQ ID NO: 13286 - RNA, 1818 nt, synthetic construct
  source 1..1818: mol_type = other RNA
atgtccaacgagcagcagaacgacagtccaattcaggatccatctcctaagctcacccgacaagaattgtatgatagggttaggcgggtaggcaaagacgaatacattctttccgaaatgatacgcctgggcttctggaaaagagacgccaataaaccctcactgacagacactttcctccagaaaaggagcgccctgcaaagtagactccgggaactgtcgaaggaaaatgcactgtattccgaccctgaaaaggcccttaaggccctgcatgaagagcggaagaaggctgcattggagaagagagagttaaccaagatcgaacgcaatactgcccggtaccagagggcattcgcttggtataccaagcagcagacaagctttacatacctgggtgataacgtgagtgctgggctggaagacaaaaccagcgacgaggaaaaactagtgagccaggccctgccagtgtttgacaatgcgggcgccgtcgcagacgctatgggaataagcacctcagagcttcgatttctctgctatcagaaggatgtcagcactatctcacattaccaggacttcaccatcaataagaagtctggcggggtacggacaatctccgccccaatgcccaggatgaaaagatcccagtattggctcctagacaatgtgctgaacaaattggcaatccacgatgcggcacacggttttgtgtctgggaagagtatcgtttctaatgcacaacctcacgtgaaaaagcaagtggtgattaacctagacatgaaagatttcttcccttcagttagctacaagcgtgttaagggcatgttcattaatctgggttactccgaggaactggccacgacgttcgctctactcgcaacgaagcgagaaactcaagcccttgagatggatggtaaaacttggcacgtagccgtcggcgagagagtgttgcctcagggttccccatgttcacctgctatcacaaacgtgctttgccgtcgcctcgatgctcgcttgctggggatggctgagaaactgggctttacctacactaggtatgcagacgatcttacgtttagcagtgatgatgccagtaaggtgcaggccctcctctggagatcgaagcaaattgtgtcaagcgagggctttgtgatacaccccgataagacacgcgtcatgcgaaggcaccaaaaacaggaggtcacaggggttgtagtcaacgacggcctgagcgtggagagaaaaaccctcaaaaggttccgtgccgtcctgcgccatgtggagatggatggacccgaaaacaaacactggggctctggagagttattccagtctctggcagggtatgcgaattttgtggcaatggttaatccagagaagggaatcccgttacagaaagcggtcgtacacctgaagcgacagcataacatcccgacccccgcgggaaagatctctgctctcaacaagaagttatttcggattaaagccgccaaaggagaagctccccgcgaaacctggtggcagcctatgataaaacccgctccagagttggagttcactccggcccagattcagcataagaagagggaagccatggccgagcagcggcaactgagtgacgcatcctccgggacacagactgaggatgttgacaacaccgcttctgagtctgggaagaagaaacggggaattggattctggatatttgccgtgatcttttcacccatcattctgttggtcgccatcagcagaacatccaccacagctaaaatcgcgctggccgcttccattcttttctggatgtactacttctttatgtga

SEQ ID NO: 13287 - RNA, 1818 nt, synthetic construct
  source 1..1818: mol_type = other RNA
atgagcaacgagcatcagagtgactcccccatccaggatccttcgcccaaactcacaagacaagagctgtacgaccgcgtcaggcgtgtgggtaaggacgaatacatcctcaatgagatgatcagactggggttttggaagaaaaacactgataaaccgaacttaactgatacattcatggagaagcgcgcttccctcagggctcgacttcgggaactgtccgccgagaatgccttgtattccgatcctgaaaaagctctgaaagcactacatgatgagcggaagaaagctgcattagagaagagggagctcaccaagctcaagaaaaacacagccaggtacaagaaagcgtttagttggtacatgaagcagcaagatacattcacttaccttggcgaaaacgtcagcgcgggtttggacgacaagacctccgacgaggagaaactgatttcacaagaaatacccgtgtttgagaacgcaggcgcagtagctgatgctatgggtgtgtccactagtgagttgcgatttctctgttatcagaaagatgtgagcaccatttcacattaccaggacttcgccatcaccaagaagagcgggggcgtgcgtaccatttcagccccaatgccacgtatgaagagggctcagtactggcttctggataatgtgctgaataaactcgccgtgcacgacgccgcacacggattcgtaagctcacgaagtattgtctctaatgccgaacctcatacaaaaaaacgcgtggtaatcaacctggacatgaaggacttcttcccaagcgtgagctataagcgcgttaaaggaatgttcaaacagctggggtactcagaagaattagctactacctttgccctcctgaccaccaagccagctaccgaagccctcgacatggatggtaaaacgtggcacgtggcggtcggcgagagaacactaccacaggggtcgccctgctctcccgcaataaccaatgtgctgtgtagacgattggacgccagacttaaaggcatggccgagaaactcggatttacttatacccgctatgctgacgaccttacattttccaacgacgacgatagtcaggtgcaggccctgctgtggcgctgcaagcagatcgtgtcctctgagggattcgtaatccaccccgataagacccgggtgatgaggcggcaccagaagcaagaagtgaccggcgttgttgtcaacgacggattgtccgtcgaaagaaagacactgaagagattccgggcggttctgaaacacgttgagctagatggcccagagaacaagcactggggaagcggggagctttttcagtctatggcagggtacgccaattttgttgcgatggtgaacccggagaagggcatccctttgcaaaaggctgtgattcatcttaagcggcagtatgatattcctactccgagcggtaagatctcagcgctgaataagaagctgttcaggatgaaagcagccaaaggagaaactccaagagatacgtggtggcaacctcccataaagccagcccccgagttagaactgacgcccgcccagctggaacataaaaaacgggaagccattgcagagcagaagaggcactctggcacgcctacagactcaaaaactgagacacagaatagcgatgccactgacagtgaaaagaagaaacgcgggatcggcttttggatattcgctatcgtcttttctcctataatcctgattgtcgccatggctcgggcatctaccacagcaaagattgcattcgctgcctctttgttcttctgggtctactatttctttatgtga

SEQ ID NO: 13288 - RNA, 1818 nt, synthetic construct
  source 1..1818: mol_type = other RNA
atgagcaattctcacagtaatccacaaactcatgagccgacacaagatcctagccccaagctgaccaggcagcaaatatatgatcggattcgcgagtcctctaaagatgaatacattctcagcgagatgactcgcctaggtttttggaaacctggggattctaagccatctctcgccgaacagttcgtgaataagagggcctcactgatggccagactgcatgggctatcacagctggacaaaagatacagtgatccagagaaagccctggcagaaatgcataaggctaggaagctggccgcactggagaaaagggaacaaacacgcatagcccggaatcgagcagcttttgaacaggcactggcttggtaccagcgtcagaagaaacagttcacttttctgggcgagagcgtcagtgctggcctatcccagaaggcatccgaccccttacgactctcaaccagacacctcattcattttcagtcagtcgaagatgtggccaggcaaatggacatcagtaccgccgaactccgattcctttgttaccgtaaggaggtcagcactgttactcactatcaggaattcgagttacccaagaaatcgggtggaacacgggtgatctctgcccccatgccgcgaatgaaacgggcccagtattggcttctggactatgtgcttaaccttttgcctgtccatgatgccgcgcatggattcgtgccagggagatctatcgtgactaacgcccagcctcacgttggcaaggccgtagtgattaacctcgacctgaaggacttttttccctcgatcacctatcggcgggtgaaggggttgttcggaaagctgggttacagtgaggagctggccacaacattcgccctgttggctaccaagccagtcactcaggcggtagagatggacggcaggacctggcacgttgctcaaggagagcacgtgctcccacagggttccccatgctcccctatgattactaacgtactgtgtaggcgcatggatgcccgattacaaggtatggcagataagcttggatttacctacacaaggtatgccgacgacctaacatttagctcacaggacgctggcaaagtgcaatccctgctgtggcgctgcaagcagatcgtcacggacgagggctttgtggtgcaccctgaaaagacgcgcgtcattcgcagacatcagcgccaggaggtgacgggggtggttgtgaacgacagattgagcgtagatcgtgcaaccctcaaacgttttcgggcagtattacagcaagtcgccctggacggaccagaaggcaaaacctggggcgccggcgaattattccagagcctggcgggctacgcaaattttgtggcgatggtgaaccctgaaaaaggtcttcctctgcagaaacaggtcctgcacctcaagcggcagtacgggtttacagttcccaagggaaagataggagagttgaataagaggctgttcagacttaaagttgctagagggcagaaaccccggacacactggtggcagccggaagaaaaacctatgccggtgctcgctctgacccccaaacaaaggcaggaggagctcgagcagaagagagcagttgtgcccaagaaggaggctagcgtgtcagatgtcgagcctgaagaaaccgaggccgcgtccgatgaggtcaagttgtctccattcgcttgggtgatggtagttgctgtcatgcccttcgctcttttgtggatgttcatcaaggcacccattaaatccaaattgtgggttctgggcatcggggcagtgatctattggctcttcttcagttga

SEQ ID NO: 13289 - RNA, 1812 nt, synthetic construct
  source 1..1812: mol_type = other RNA
atgagtgactctaacaaacatcaatccgctgagacagtccaggaccccagcccaaaacttactaggcaacagatatatgataggattcgtcagtcatcaaaggacgattacatcttacgcgaaatgatccggctggggttctggaaatccgacaaggaccagccctccttgacagagaggtttgtggcgaaacgcacagctctcatcacccggctgcggactttgacccaactcgataggctttatagcgaccccgagaaggcactagctgccatgcacaaagctcgaaaaaaggccgcactggagaagagagagcagaccagaatcgcacggaatcagacaagatttgagaaggctctggcatggtaccagcgccagcgagaggccttcacctttctgggcgaatccgtatccgggggattggcccgcaagactagcgatcccttgcggctttctcgatatcagcttatgcacttccagtctgttgcagaggtcgccggctcaatggctatacctatgtctgagctccggttcctgtgttaccgaaaggaagtttctcctgttagccattaccaggattttgaagtagctaagaagtccggaggtaccagaatcattagcgcacctatgccacgcatgaaacgagcgcagtactggctactggatgccgttctgaccaggatcccggtgcacgatgccgcgcatggattcgtcccggagagaagtatcgttagcaacgcccggcctcatgttggaaaggccgtcgtgatcaacctggacctcaaggatttcttccccaccatttcgtacaggagagtgaagggcatgtttcaccagctaggttactccgaagagttagcaacaaccttcgcgctgattgctactaaacctgtcacgcaggccgtggaaatggacggcaagatttggcacgtcgcacagggcgagcacgtactgcctcagggctctccctgtagccctgcgatttccaatctgctgtgccgcagaatggacgctagactgcagggtatggccgataagttgggctttacatatactaggtacgccgacgacctcacgttcagtagcgatgacgtgtccaaagtacaaagcttattatggcgatgcaagcagatagtggccgatgagggattcgtcgtgcaccctgagaaaacccgtgtgatgaggcgccaccaaaggcaagaggtgactggcgtggtggtaaatgatgggctgtctgtggaacgtaaaaccctgaaacagttcagggcagtgctgcggcaggtggaactcgatggacccgctgggaaacaatgggggaaaggggaactgtttcagtcactggcgggatatgccaactttgtcgctatggtcaaccccgaaaaggggattccattgcagaagcaggtagtgcgcctcaaaagacagtacggattttcagtgcctaaggggaagatgggcgaacttaataaacgtctttttcggctgaaggtggccaggggtgagtcgccaagaagtcgctggtggcaaccacatgaaaagccagccccggaattggctctgacccagcaacagaaggccgcacaacggcaggcagccaaagcagactccgtcagtccacaggtcgttacacccgccgctaccagtgagactgactcagagacagacccaacagccttcagccccatgatgtgggtgatgatgatgttaactcttccatttgctctcctctggatgctcgtgacggcctcatggaaaacgaagctctgggttctctctctaggctatgtgctgtattggctgttctttggttga

SEQ ID NO: 13290 - RNA, 1824 nt, synthetic construct
  source 1..1824: mol_type = other RNA
atgcgcaattccgacccctcacagaataacagcaacaacaacaataattccgttctgccccccgaaccttctcccaaacttaccagacagcagatttacgacagaataaggcagtcctctaaagacgagtacatcctgtctgaaatgatccgcctgggcttctggcagaaagacaggactaagccatctatcgccgaaaaattcatcgagaagcgatcagccctactgtccagactgagagagctgacacgtctgaacaggctgtatcaggatccagagaaggctctcctcgccctgcataaaacacgcaagaaagctgccttggaaaagcgggagcagattagaataaaccacaaccttgcacgttacgaaaaagcgcttaggtggcataagaagcaacagacccattttacttatctaggcgatgccggatacggagataaggcactgactgcaggcctgcaacagacgacgtgcgatacagcgaggttaacggcgcacggtttacccgcgtttagccacgtcggggagctcgcagacgcaatgggaatcagcactagcgagctgcgtttcctctgctaccagaaagacgtgagtacagtcagccactaccagcatttcgcactgagcaaaaaaaccggcgggacccgactgatatccgctcccatgccgagaatgaagagggcacagtattggctgctcgacaatgtgttaaatcttctgccaatccacgatgccgctcatggatttatccagggtaggagcatcgtaactaatgccaaaccccacactaataagcaagttgtgatcaaccttgatctcaaggactttttcccaagtattacttatccccgggtcaaggggatctttaagcaatctggctattccgaagccctggccactaccttcgccctgatcgcaaccaagagtgacacccaggccgttgagatggatgggcagacataccatattgctaacggcaagcgcgagctacctcaagggtcgccatgtagcccggcgataaccaacgtcctgtgtagacggctagacgcacgactccaggggatggctcacaaactgggtttcacctatacacgatatgccgacgatctcacattttcaagtgacgagacagataaaatacagtacgtcttatggcgctgccagcggattgttactgatgagggatttaccctccatccggataagacacgggtgatgcggaaacaccagaagcaagaggtaacaggcatcgtggtgaatgacggtttgtctgtggaccgccctacccttaaacgatttagagcagtcgttcgccaaattgagcttgatggacactatggaaagcattgggggactggagagctgtttcagtcgttgaccgggtacgccaactttgtggctatggtggcaccagaaaagggcattcctttgcagaagcaggtggctcacttgaagaggcagtacaacattcccgtggctgccggtaaaattacggccctcaataagagactcttccggttaaaagcagccaagggcgaggctccacgggaagcttggtggcaacctgccgaaaaacccgctcctgtccttgccctgacccaacagcagatggatgcccagaagcaacaggcaaggcaggccgcgaaggccaaccaagctaatacacatagtgcccacccagaaatggctcctgaccacacgaaccctgctttcatctcaggtggcaacgaaacaaataccgcctcccctaatcgcttcggctcaccagtagtgtggaccgtggttgtggtactgctcttgttgaaaattttcgtgtactga

SEQ ID NO: 13291 - RNA, 1899 nt, synthetic construct
  source 1..1899: mol_type = other RNA
atgagcgacagcagctcccaaagcacatcccggagtaactcatcaaacgctagccatcaggaggcctcggtgactgattctgcaccaaaacttaccaggcagcagatatatgaccgaattcgcgaatcctctaaagatgaatacattctccaggaaatgatccggctgggcttttggaacaaggatgacgaacagcctagtctcactcaggagtttatcgagcgcagatccgagctcaccagaaagctgcgcgagctttctgatctcgactccctctacgcagaccccgagaaggctttggaagctctccacaaggagagaaaaaaagccgcgctggaaaagagggaacagacaaggcaggccctaaaccagaagcgttatgatcgtgctctcgcatggtacaaccagcaaaaggagactttcacttggctgggggacgatgtgagtctgggattgaagaataaagaaaatgatgatggccggctggaggagagggagctgccaacatttgagaacattgctgccctagcgggggccatgggcatctcagttagcgagttaaggtttttggcgtatcagaaggatgtgtcaaacgtctctcattaccagcgattctcaatcgctaagaagactggcggactccggcacatttccgcaccaatgcctcggttaaaaagagctcaatattggttgctggacaacatcctggctaaactttctgtgcacgacgccgcccacggttttgtgaccggtcgctcaatagtttccaacgcccaaccccacgtcggcaaagccgttgtcatcaatatggatctgaaggacttcttcccgtccatcagctacaagagggtaaagggactgttccagtcccaagggtacagcgaggagcttgccacagtgttcgggcttctcaccactgagtccgagacacaggagctggagatggatggccaaacctggttcgtggctcagggagaaagaagactgccccagggttctccctgcagtccagcaattacaaatgttatgtgccggcggttagacgcacgtctgcagggtatggcggataaactggggttcgcctatacccgctatgctgacgacctgaccttcagtacggattcggccgaaaaagcccaggcactcttgtggcgagccaaacaaatagtggtgtcagaagggtttaccctccaccctgacaagacgagagttatgcgcaggcaccaaaaacaggaagtaaccggtgtggtggtcaatgagaaattgagcatagaccgaaagaccttgaagagatttcgcgcaacactgaagcagattgagttggacggacccgatgggaagcattggggtgcaggagaactgtttgcctctatggagggctatgcgaatttcgtcgcaatggtggacgccgaaaaggggattccattacagaagacactggtacacctgaaacgtcagcatggggtgacaacgaaacatggaaaagtgaccgagcttaataaaaggctgctgagagtcaaagcagccaatggcgaaaaccccaaggaaggatggtggcaacccgaagagaagccggcccctgaacttgagctcacgccaaatcaaatcgctgagcgaaagagggctattaaaaggcaacggaatcaggaacagcgcgagaatcagggcgctaactctgaatggcaggatgcagacttcaaccaggacaatgaggccaaccagggcgatggctggagtgacctagaaagcgatgctaaaaagaaatggactactcgggagtacatcctaggactgctctttcttcctatcgttctggtaatgctttttttcaaggccccttggaatattaagtgtatcgtcgtgggcgtcttatggctgctgtacttgtacctgaactga

SEQ ID NO: 13292 - RNA, 1851 nt, synthetic construct
  source 1..1851: mol_type = other RNA
atgagtgatacctctcaccactcaagccaaagtgacagccaggaggctacactgtcggattccgcccccaagctgacgcgacaagagatctacgatcggatcagggaaacttcaaaggacgagtatattctgcaggagatgatacgactcggcttctgggacaaagacgaggagcaacccaatcttacacaggaattcattgaacgccgagccgagctgatgcgtaagatgagagagctctcacagttggattcactctattccgaccccgaaaaggccttggaagctcttcataaggaaagaaagaaggcggccctcgagaaaagagagcaaacacgccaggccaggaatcaggagcggtacgagcgcgctctggcttggtatcacaaacagaaagagagctttacgtggctcggggacgatgtctcactcggacttgtgaacaaggaatccgacgctggaaaattagagaatcaggacctcccccattttgaaaacatcgcctccctcgcccaggctatggggatttccgtgagtgagctgcggttcctcgcctaccagaaagatgtcagcaatgtgtcccattaccagaggttcactatagcgaagaagagcgggggtgaaagacacatctctgctccaatgcctcggctcaaacgcgctcagtactggttactggacaatgtgctcgagaaactgaccgtccaccaggccgcacatggttttgtgtctggcaagagtatagttacaaacgcccagccccacgtcgggaaggctgttgttatcaacatggaccttaaagatttctttccaagcattagctacaaaagggtgaaaggtctgtttcgtgcccaaggatactctgaagagctggctacagtcttcggtcttttgaccaccgagccagaagtgcaagaattggaaatggatggcaaaacctggttcgtagcccagggagagcgccgattaccacagggctccccctgtagcccagccatcaccaacgccctatgccgaaggctagacgcacgcttgcaggggatggcagacaaactggggtttacgtactccagatatgcagacgacctcacattttccacagacgagcctgataaggttcaaagtctgttgtggagggccaagcaaatcgtgagtgatgaagggtttactctgcatcccgaaaagacaagggtgatgcggagacatcagaagcaggaagtgaccggcgtcgtggtcaacgacaaactgtctgttgataggaagaccttgaaacgttttagggccgtgctgaagcagattgagttggacggtccagagggaaagacatggggagcgggcgatctattccgctctctggaaggctatgccaatttcgtcgccatggttgatcctgagaagggaattccacttcagaagactctggtgcaccttaaaagacagtacggcattcagactaaacacggcaaggtcactgcacttaataaacggctgcttcgggcaaaggcagcgaaaggcgaagcgtcaagagagaattggtggcagcctgaagagaagcctgagccggagctggaactgactcccaaccagaaggcagaacaaaaacgggcagagcagtcggcacgtagggcagagcaaagagccaacaccgagagccagaacgtagaatctgagcagggagatggctgggacgagctggattctgatgctaacaaggtttggacccctcgggaatatgtgctggtgactctgatgttacctctggtgctgatccacctcttcttccgcgctccgtggaatgtaaagtgcatcgtggtaggggtattatggctattgtacctgtatctgacctga

SEQ ID NO: 13293 - RNA, 1779 nt, synthetic construct
  source 1..1779: mol_type = other RNA
atgagtgagtcaagcacaaaactcactaggcaagagatttacgataagatacgcaaaagctccaaagaagaatacatcctggatgagatgaaaaggctggggttctggcgcaacgatgaagagcaacccaatctgacccaagaatttgtcgagaaaagagcacagctgatggcacagctgcgggaattgagctcccaggacgagctttatagtgacccagagaaggccctggcacatctgcaccaggaacggaagaaggcagctcttgaaaaacgtgaacaggttagacagactcggaacaaaactcgatacgaaaatgctttgaattggtatcagaagcagcagaaggaaataacctatctgggagagaaattctctgccggcttgagtgagaagattagtgacaagtctaaactcactagccagggtctgccttattttgccgatagccaggcccttgctcagggcatgggcatctccataggagagctaagatttctgtgttaccaaaaggaggtgtctcaaacaagccattacaagaagtttgcaatagagaagaagaccgggggcaagaggcacatctctgcccccatgcctcgtctcaaacgggcacagtattggctgttggaaaatgtgcttgcacctgttaaactgcactcagcggcacacgggtttgttccgggaaggagcatcttatctaacgctcttccccacatcaacaagggggtggtagtgaattttgatctaaaagacttcttcccatctatctcctatgctcgcgtgaaggggctcttctgcaagcagggctattccgaagaactgggcaccctctttgccctcttagctacagagccagatacagaggctgtggccatggacggtcagatttggcatattgaccagggaccccggattctgcctcaaggagccccttgctccccagccatcacaaacatcctatgtcgcagattggacgcaaggctggccggtatggctgagaagctaggcttcgcgtacacgcgatatgcagatgacctctcttttagttctgatgagcctaacaaagtgcagtccctgctctggcgcgtaaaacagatcgttacgtcggagggattcttgctgcacccagacaagacgaaagttatgcgccggcaccagaagcaagaggtgaccggcgtcgtcgtgaatgagaaggcctcagtagaccgaaagacactgaaaagattcagggctatcctccatcaaatcgacctctacgggcctgaggggaaatcctggggtccaggcgccctttttcctagcctcgaaggatatgccaacttcgtcgccatgctggatgcccaaaaggggattcccttacagaagcagctggtgcatatcaaaagaaagtacggcgtgaaaacccggtcgtcaaaagtcacccagctgaacaagagacttatgcgagtcaaagccgggttgggcgaagctccccgtgagaattggtggcagcccgcggagaagccagaaccgattttagagcttactcccaagcagcaagccgcccagaagcaggccaggaaggtgaccggaccagtcgagcaggaatacgcggagagtgcttcagagcaaaatccccagtcagaggcagaagaagacactaaactgtccacaaaggattacatattcattggcttgttcatgccgatcgctttagcgcagatgatttacaaagctagctggaaaaccaagatcaaactcatggtggtaggaactattatttggctgctgtttggttga

SEQ ID NO: 13294 - RNA, 1710 nt, synthetic construct
  source 1..1710: mol_type = other RNA
atgagcgaatctccaaaattgacaagacagcaactatacgagcggatccgcgagacgagcaaagaagaggtgatcctggcagaaatgatccgtctcggattttgggatggcgagcagaaaaaacctgaccttaccgcagaatttatcgcgcaacgagcagctttggagaagagactggccgaacttgggcaacagcagcaactctattcagatccccagaaggcattaagggagctccacaaggccaggaagaaggccgccctcgagaaacgggaacagactagaattgcccgaaaccaagcacgctatgagagagcacagcagtggcatcagaagcaacagtccgaaatttcttggctgggggaaggcttttcctttggcctctctgatacgacacagaatgaggcaaggctgaaacagcagaatctgccgttgttagctgattcccagaccctggctaccctgatgggcatcaccattaatgaacttcgttttctgtgcttccaaaaggacgtttcccgtattaaccattaccgcagattcagtctgctgaaaaagtcagggggggagcgactgatatcggcacccatgcctcgccttaaaagggcccaatactggatattggagaacatcctcaacagagttaaactgcacgatgccgcgcacggattcgtagccggaagatccatccttacgaacgccctccctcatgtgggtcgcgctgtcgtcattaatctagatatggagaactttttccctacagttagctatcgccgagtgaagggcctgttccgacagctggggtatggagaacaaattgccaccgagctagccctgttgactactgagccagaaaccgagcaggtagtgctagacggtgaaaattggtttgtgcagcagggagagagattcttgccacagggagctccgtctagccccgccataagcaacataatctgtaggagactggacagccggttacacgcgatggctcacaagcttggcttcgcttacacaaggtatgccgacgacatgacctttagttgtgccgacaaccgtgggaatgtccagcagctcctgtggcggtgcaaacagattgtgcaggacgaggggttccgcgttcatccccagaagactcgggtcatgaggaaacctcagcagcaacaggtgaccggaatcgtggtaaatgagaagccttccctcgatagaaagactctcaagcggtttcgcgcactgctgttccagatcgccaaggacggtatggaagggaaacggtggggccccggagaattgatggcctctatcgagggttacgccaatttcgttgccttagtcgctcccggcaagggtattcccctccagaaacaggtgacagatatcaaaaggcagtacggctatgctacacagcctggcaggataactgcactgaacaagaagctttttcgcgctaaggctgctcggggtgaatccccaagggactcgtggtggcaagcacaaggcccgagtgcgccagagctcgagcaaaccgccctgcagaagcaggctcttaggcgagcggcttcagccgcggaagatgtgccaagcgctgcaaagaacgcctctgtgcccgatgacttcgcagagacaccccctgagcggccaaaaaaaagttcacggttatggtggtggttcctggccttcgtggtctacctgatttttagatgggcctga

SEQ ID NO: 13295 - RNA, 1704 nt, synthetic construct
  source 1..1704: mol_type = other RNA
atgagcgagacacccaagttgacacggcaacagatctatgagcgcatccgcgaaactagcaaggaagagtacattcaggcagagatgatccggctcggattttgggatgcaacgcaagagaagcctgacttgacgactgagttcattacaaggcgcgcggctcttgagaagcaactggccgagcttgggagaaaacagcagctctacagcgatccccaaaaggctctccgggaattgcataaagcccgcaagaaagcggccctcgagaagagagaacagacccggatcgcccgaaacaaagcacgctatgagcgtgcccagcagtggcacgaaaagcagcgctcagaaatcacctatttaggcgcaggctattcatttgggcttgacgagacaacccatgatgacgctaggctgcagcagcaccacctcccccagttagctaattcccaggccctagccacggccatgggcatcactctgaatgagctaaggttcctttgtttccagaaggaagtgtctcggattaaccactacaggcgcttttccctcatgaagaagaacggtggacagcggctaatctccgcaccgatgcctcggctgaaaagagcccagtactggattctggagaatatcctgaacagagtgcccctgcacgatgccgcgcatggcttcgtaaccggccgtagcatactatctaacgccctgccacatgtgaaccaggctattgtcgtgaaccttgatatggagaattttttccccacagtgaattacaggagagtgaagggtgtttttagacaattggggtatagtgagcagattgcaaccgaactggccttattgacaacagaacctgaggccgagcaggtggttctggacggggaaaattggtttgtgcagcagggagaacgatttctgccccaaggggcaccatcttccccagccctgtcgaatataatatgtcgaaggctggatagtcggatgcatggaatggctaacaagttggggtttacttataccaggtacgctgacgacatgacattctcttgcgccgacaaaagcgccaacgtccagcagctgctgtggcgctgcaaacaaattgtgcaggacgagggctttagacttcacagcgagaagaccagggtaatgagaaagccccagaagcaagaagttactggcattgtcgtcaatgaaaagccttccctggatcgtaagactctcaaacggtttagggcgctgctgttccaaattgctaaggatggtatcgaaggaaaaagatggggcgccggagagcttatggcctctttggaagggtacgcaaacttcgtagcccaggtggcgcccgataagggcatcccactccagaaacaggtcacggatctgaaacgacgcttcggttatgccacccgtcctggacgaattaccgcactcaataaaactctcttccgggctaaagctgcacgaggcgaagcgccgagagacaactggtggcaggctcagggtccaagtgcaccagttttagagctgacaatgcagcaaaagcaggccatgcgcagaccggtttcagtgaccagtccaacttcccctaataacgacacacctcggaccgtgaatgccgacgcacctgctcaccaacccgctaggacctcagtcaaatggtggataatcctcatcgctataatcctgtacttcctgatgaggaaatga

SEQ ID NO: 13296 - RNA, 1611 nt, synthetic construct
  source 1..1611: mol_type = other RNA
atgagtgagtctccaaaactgacccggcaacagatctacgagcggatccgcgaaacttctaaggaggagtacatacttgcggagatgatcagacttgggttctgggacgcctcccaggaaaagcctgacctgacagcagagttcatcgcggaaagggctgccttgcagaagaaactagccagtttaggtgagcgccagaggctgtacgacgatccccagaaggctttgagagagctgcataagacccggaagaaagctgctcttgagaaacgcgagcagacacgcatagcgaggaatcaggccagatacgaacgggcccagaggtggcaccagacacagcaaagcactatcacctggttgggagagggctactcgttcggactcgacgatacaacacacaatgaagcacgcctggcacaacagaacctgcctccattggccgatagtcaggctttggccagcgccatgggcattacgctaaatgaattacgcttcctctgttttcagaaagccgtcagccgtgtcaatcattatcggcgattctctatcgctaagaagtctggcggcgagcgatttatttcagcaccgatgccaagaatgaaaagggctcagtattggatcctcgagaacatactgaatcgcgttgcactgcacgatgccgcacatggctttgtggctggccggagcatactgaccaacgccctgccccatgtcaaccgtgcaattgtggtgaacctggatatggagaacttctttcccaccgtgtcatacagacgggtgaaaggcctgttccggcagttagggtacgccgagcagctggcaaccgaactggctcttctgactaccgagcccgaggccgaacaagtcgcgcttgacggagaaaactggttcattcagcaaggtgaacgcaccctgcctcagggagctccatcttcaccagcaatctccaatatcatttgcaggagactcgatagccggctccacgcgatggctcagaaactaggctttacgtatactcgctatgccgatgacatgacattttcatccgcagacaaaaccgccaacgttcaacagctgctttggaggtgcaaacagatcgttaatgatgagggttttagactccacccggagaagactcgagtgatgagaaagccgcagaaacaagaagtaactgggattgttgtaaatgagaagccatccgtggaccgtaagacattgaagaggttccgtgctttattgtttcagatcgccaaggacggcacacaagggaaacgatggggagcgggagaactcatggccagcctggaagggtacgctaacttcgtcgccctcattgctcccgagaaaggcattcctctgcagaagcaggtgactgaccttaagcggcagtatggttatgtgacgcagcccgggagaattaccgccctgaacaagaagctctttagagccagagctgccaggggagaggcacctagggaaaaatggtggcaggcacaagggccagcagctcctgtactcgaacagaccccccagcaaaagcagcccgcacctcaaccagcccctgtgtcctcccagcccgaacctcaaagtttcgccgcccgaaggggttga

SEQ ID NO: 13297 - RNA, 1701 nt, synthetic construct
  source 1..1701: mol_type = other RNA
atgagcgagtccagtaagctaacccgtcagcagatatacgagaggattagggaaacttccaaggaggagtatattctggccgagatgatacgtttggggttctgggatgagacacaagataagcccgcgctcactgcagaattcattgcccaacgtgctgcattacagaagcagctcgccgagctcggacagaaacagcgcctgtatgacgatccacaaaaggctttaagggagctccacaagactcgaaaaaaagctgccctggaaaagagggaacagacaaggatagcaagaaatgaggcacggtacgcgcgcgcactgcaatggcaccagaagcagcaggccgaaatcacctggctcggcgaaggtgttagctttggattggccgatactgcccacaatgaagcacggcttcaggcccagaagttaccactcctggccgactcacaagctctggcatccgccatgggaattacgattaatgaactcaggtttctgtgcttccaaaaaaatgttagcagagtgaaccattatcggcgcttctctctggccaaaaaaaatggtggggagcgcctcatcagtgcccctatgccccgcatgaagcgagctcagtactggattctggaaaacatcctgaatcgtgtcaagttgcatgaggccgcccacgggttcgtaactggtcgcagtatcttgtctaacgctcttccgcacgtaaatcaagcgatcgtggtcaaccttgatatggagaacttctttcctaccgtgaactatagaagggtcaaaggcctgttcagacagctcggctacgccgagcagctggctactgagttggcactgttgaccaccgaacctgaggtgacgcaggtcgcccttgacggcgagacatggttcgtacaggaggacgccagatttcttccccaaggcgcgccaacatcaccagctatcagcaatataatctgtcgccggctggattcacggctgcaagcgatggcacagaaactcgggtttgtgtacacgagatatgcggatgacatgaccttttcttgcgcccagccctccgccaacgttcaacagctcctatggaggtgtaagcaaatcgtgcaggacgagggcttcaagatccatcccgagaagacacgcgtgatgcggaaaccccagaagcaggaggtgaccggcattgtggtgaatgagaagccgtctgtcgataggaaaaccctgaagaggtttagagctcttttattccagattgccaaggacggcatggaagggaagcggtggggatccggggaactgatggccagcttagaagggtatgctaactttgtcgccatggtggcgcctgaaaaaggaatagtgctgcagaaacaggtcactgacttgaagcggcagtacggttacaccactcagccaggacgaattaccgccctgaacaaacagctgtttcgagctaaggctgctagaggcgaaagcccccgagacaactggtggcaggcacaagaagctcctcctccagtacttgaacagacagcccaacagcaggcaacacagaaagccaccagttcggcaacagaggctctacatttcgatgcacagcctgagacacacgcaggacaggtgcccgacaaatcaagatctccactgcggttcttttgggttctgatcctcgttcttctaatcatgatcctggctagaatgttttga

SEQ ID NO: 13298 - RNA, 1764 nt, synthetic construct
  source 1..1764: mol_type = other RNA
atgtcggaagagaagaagctcacacggcaggagatttaccagcgaatccgagagacttccaaggacgagtatatactttctgaaatggtacgtttaggcttttggcctgataattcggagaaacctaccctctctgaggcgtttatcaagaagcgcactgagctgcaagcggcactgagggaactgggacagcaacagatgctatactctgaccccgaaaaggctctgaaggaaatgcacaaacagagaaagcaagccgctctcgctaagagagaggagacaaggagaaagaggaatgaggagcgcttccagagggctcagcattggagagaggtgcaggcacatcaaattacctacttaggcgagggggtgagcggaggccttgaagacgcgaccgccgatgaggccagacttcggagccagaatctgcccataattaatgccgcagaggagctcgcaactgcgatgggtgtgactctcaacgagctgcgattcctggcttattcaaaagaagtgtctaagctgagccactaccagcagttcgcaatcgcaaagaagaccggtggtgtccgcgaaataagcgctcccatgcctaggatgaagcgcgctcagtattgggtcctggataacatattggcaccactcacactgcacgaggccgcccacggattcgtggtcgaacggtccatcgtgtcaaatgcccagccgcatgtcggcaaggacgtggttattaacctcgacttgaaagatttcttccccactgtaagctatgctagaattaaaggcgcctttcggcacttggggtactccgagcagatcgcaacaattctgggactgttatgctcacagcccaagactcaggaagttgaaatggatggccagaaatggtttgtcagcgaaggggaacggttcttaccccaaggagctcccacgagtccggccatctccaacgtcatctgccgaaaactcgacagacggctacagtccatggctgcgaagctgggctttacgtatacgagatacgccgacgacgttaccttcagtgctgacgggaaatccgacgatgatgtcaagcgacttctttggaggtgtcgctctatcattaaggacgagggcttcgtcgtgcacccagacaaaacccgtatcatgagaaaacatcggcgtcaagaggtaaccggggtcgtggttaacgacaaggcctctgtggagaggaaacagctgaagaggtttcgggctttgctgttccaaatcgatcgcgatggtcctgcgggaaaatcatggggtcgcggggagctgtttgcggcaatagatggttttgccaactacgttgccatggtaaatccagttaaaggagtgcctcttcagcaaaaagtggcccaactgaagctgaagtatggagtgaaggttaagcctagtagggtgttggccctgaacaagaaacgtatgaggctcaaagctgccaaaggggaagccccaagagaagattggtggcaggctcaggcatccgctgcacctgaattggagaaaaccgccgaacaggtgaaggaagaacgcaaggcagagaaagccgagcagcagacacaggccgtacccgctgcctcaagtgcagatccggcccctgtgcggacaagcacaccagtgcagagccagcagcaagcacaacccagtgctccagccccagagggcgaatcccatgccaaaaccgggtggatcatgctagctattggcattcttatctacctggccatgaaaatgctcggctga

SEQ ID NO: 13299 - RNA, 1728 nt, synthetic construct
  source 1..1728: mol_type = other RNA
atgtcagatgggaacaaacttaccagacagcagctatatcagagaatacgggaaacctctaaagacgaatacatcctttctgaaatgaagcgcttgggcttctggcccgaagatagcgacaaaccttctctagccgaggaattcattaatgagaagagcgagatttccaagaaactgcgtgagctggggcaaaagcagggtttgtattccgaccctgaggccgctctgaaggagttacacaaacaacgcaagaagcaggcgttggagcgacgggagcaaaagcgtcaggagaggaatcaagcacgctacgatagggccagtcggtggtataccacccagcagaagctcatcacatatgtgggcgaccacttctcaaagtccttaaacaacgtggaatcccacgaggataagcttaaacagcaagggctccctgtcctccactcttcaaaagatctggcaggcgccatgggaatcacgctcaatgagttgaggtttctggcataccagaaagacgtttccgcagtaaaccattaccagcatttcgagatcctcaagaagaccggcggatcacggctgatttcagcacccatgccccgcctgaagagggctcagtactgggtgctggctaatgtcctggaaccgctgagcattcatgacgcggcacacgggtttgtgccaaaaagatccattgtaagcaatgccatccctcacgtggggaaggacattgtcatcaacctggatttgaaggacttttttccgactgtgacctacccccgaatcaagggggtatttcacactctgggatacagcgagcacctagccactattctgggattactctgtactcagtctaacatccaggaagtggagctggacggccaaacctggtttgtgggcaatggagagaggtacttgccacagggggcccccactagcccaaacttaacgaacatactttgcagaaaactggacgccagactcaatggcatggccgagaaacttggattcacatataccaggtatgcagatgacctgacatttagcagtgatagtaaggacgaacagcaggtcaagaagcttctgtggcgctgtagaaaaatagtccaggatgagggtttcgtgatccatcccaaaaaaacccgaatcatgcgacgtcataaaaagcaggaagtgacaggcatcaccgtgaacgataagatgggcgttgataagaagaccctcaaacggttccgcgcggtgttatttcaaattgacaaggacggtccagatgggaagacttgggggaatggtgatatcttctgcgccatcgacggttacgctaactacgtggccatggtttcgcccgataaaggcattgctttgcagcaacaagtagctcatataaaaaggaagtatggagtgaacgttaagaaaggcaaggttctgtcgctcaataagaagctactgagacttaaagccgctgctggagaacatccacggcaggagtggtggcaggctctcccacctgcgaaacctgaaaaagagaagacggccgaagaaattaaacaatctaaggtcacagaccagcaggagaaaagtaaggaccgggataataaaaaccactggacacaggccaatacaaacctgtcccaggatgacaagaaagttagttccacaggctacaatatgctgaaaatattcctcttcgtcactgcactggctatcgcctatagctttctgaagaactga

SEQ ID NO: 13300 - RNA, 1725 nt, synthetic construct
  source 1..1725: mol_type = other RNA
atgagcgcttcctctccaggaaagctaactcgtcagcagctctacgacttaattcgcgaatccagcaaagatgaatacatactcagcgagatgatcagactgggctactggaacgaggacagtgggaagccgagcttgcccgctgaattgattgctcggaaaggggagctagagcgggaattccaggcccttctgaaaaagcaacagcagtaccaagatccgcagaaggcgcttaaagagctgcataagcagcgaaaggcagaagcactgaagcggcgcgaagagacgaaacagaataataacgaggctcggtatcagcgtgccgtgaattggcataacaaaaaccaagccgagataacctacctgggcgaggatttctcggcgggcctacagggttcatttaccgacagagaaaggctgactaaccaagaactgccagtgatagactccagtctcgcattggccaaggccatggggatttctattaatgagctccgctttctttcctttggccgcaagacatctaaaactacacattaccagcagtttcttatagagaaaaagacaggaggcacacggcgaatttctgcccccatgcctaggctcaaacggctccaatactggatcctgggaaacattctggaaaaactgccactgcacgacactgcccacggctttgtggcgcaaagatccatagtcaccaatgccaagcctcacgtcggagccgacgtagtggtcaacatggatttaaaggactttttccccacagtgacttataagcggatcaagggactcttttgcaagcttgggtatagcgaacaggtcgccaccgtacttgccctgttatgttctgagcccgaaattgacgaagtagagttggatggtgagactttctacgttgctaggggagagcgatatttgccccagggagcccctacatccccagcaatcagcaatttactctgcagaaatctggacaggcgtgtgttcggcgcgagtaaaaagctggatttcacctatactaggtatgccgatgacctaaccttcagtgggaccagaaagtctgcacaccagttaaggaagttgctgtggagagtggaacagatcgttatcgacgagggcttcgtggtgcacccagataaaacccgcattatgaggaagaatgcccggcaggaggtgacaggcctggttgtcaaccagaagttgagcgttgatagaaagacactgaaacaattccgcgctctgctgtttcagattgaaaaagatgggatcgagggaaaggtctgggggaaggggcagctgatcccgtcaatcgagggttatgccaactttgtagctatggtgaatcctgagaaaggcctcgcactccagaaacgagttactcagattaagaagcagtacggattcgaggtcaaaccaggtaaactggccgctctgaacaagaagattatgcgcgtgaaagctaccagaggcgaggcgcctagggaagactggtggcaggcagagcctaaaccctcacccgtgaaggagaataccgcagaacagctgaaagcccagaagaaagcaaaggcaatcgagaagaaagaagctgaacaatcattgcctgaacattccaccaacgagcaacgagagattgaaaacacggaggatacaaataacatcggtacgctgatgatctacatagctatcggcctccttcttatcgtgatcttcctcgggtcgtga

SEQ ID NO: 13301 - RNA, 1704 nt, synthetic construct
  source 1..1704: mol_type = other RNA
atgcaaactagcgctccagggaagctgactaggcagcagctgtacgacctcattaaacagagcagtaaagacgggtatatcctgaaagaaatgatccgtcttggcttttggaacgaaacgacaggcaaaccttccctgacccaggaatttattaccagaaaaggggaactcgagaagcaatattctcagttgctgtcactgcaccacaagtatcagagcacagagtctctgctgaaagatttccacaaacagcgcaaagccaaggcactcttgaacagggaggagacaaaattgaagaacaagcaaatcaagttcgaaaaggcccagaactggtttaagcgaaatttaaccgagatcttatacctcggagaaaatgtgagcgctggtctgaatgggaagtttacggaccatgacaagctgaagtcaaattcgctgcctgttatagaaaactttgagacattggcacagtccattggcgtatctgtgagcgaaatacgcttcctgtcctatgatagaaaggtgagtaaagtttcccattaccagcaattcctcatcgccaaaaaaacaggtgggacgcgaaagatttccgcgccaatgccccgtctaaaacatgtgcagtactggattcttaccaacatcttagaaaaggtggcgatacacgattccgcccacggtttcgttaccggaaagtcaatcgtcacaaatgctaagccacacgtaggtgctgatgtggtcatcaacatggacttggaaaacttctttcccacagtcaactacaaacggattaagggcgtgttctgcaatttaggatacagcgagaagattagcaccgtgctggctcttctgtgctctgagtcggataactgtgaggtcgtcctcgatggccaaacttattataggaatcagggggaacgagtacttcctcagggagcacctacatcccccgctttgaccaatatactgtgtcggaagttggataggcggatgttgggcatgtccgataagctcgggttcaagtatactagatacgcagacgacctaaccttcagtagttcacagcagaccgcccataacctgcagaagcttttctggcgcgtgaaccagattatccccgatgagggctttattctgcaccccgacaagacccgcgtgatgcgcagaaataataaacaggaggtgactggagtagtcgtgaatgagaagctgagtgtggatcggaaaaccctaaagaaatttcgggccctgctgtttcagattaacaaggacggagtgggcgacaagacatggggcaaaggggcactgattccatctatcgagggatacgccaattttgtctatatggtgaacccgattaaaggcgttgccttacagaaagccgttgtgctcatcaaacaaaaatacggcatgccagttaagcctcacaaactctcactcctgaacaagaagcttatgaggctcaaagctaaggagggactcctgcccaagaaggattggtggatccctaaacagaagactactccccttgtcgaacttactcagaaacaaaatgaggaggccaagatcgagcataaacagcagatcacggacgacaatagaaacgtcaatatactaaccccgcaatctgacaaaccaaagagctacggttatgttttttacgtgatagcggtggtaattttcatcctgttccaaatcttcaacaagtga

SEQ ID NO: 13302 - RNA, 1782 nt, synthetic construct
  source 1..1782: mol_type = other RNA
atgtctgaccagcagtctacaccagcatccccctcccggcttactaggcaacagctgtacgatcgtattcgcgagagtagcaaggacgaatatatcctggcagaaatgaaaaggttgggcttttgggatgcctcagaggatcggccttctctgagcgagtccctcatcatcaagcaaggagaactcgaacgcgaactccgagagctgttggctaaacagcgacagctcaagaatccagaaaaagccttaaaggccatgcacaagcagaggatgaaagaagcacgcgataaacgggaggtaactcggcagcatcaggccgaggagcgctatcagcggagtctggcttggtacaacaaatctcaacaaaccctgagctatctgggcgagaaagtgagttcaagactggattccgtcgaggcacagcaagcgagattattggacaaccacctgcctattattaaaagctatctacagctggccaccatgatgggagtctctctggcggaattgagattcttggcatttagcaggaatgtgagccaggtgtctcactatcaacactttctcctgccaaagaagaatggagggacgagacttataagcgcacctatgccgagactgaagcgtgttcagtactgggtgcaggctaatatactagagtcggtggctctccacgacgccgcacatgggtttgtgaccaagagatcaatagtctccaatgccgaacctcacgttgggaaggctgtagtgatcaatatggaccttgcggacttctttccgacaatcagttatccccgtgtgaaaggcgtcttctcccacctgggatacggcgaaggtattgccacggttctggcccttattacaaccgcacagactgtcacacccgtggagctggacggcaagcagtactttgttggtcagggtgtccggcatctgccacaaggagcccccagttccccagccctcaccaacattatctgcagacgcctggacaagaggattcttggaacggcgcaaaaactggggttcgcttacaccaggtatgccgacgatctgagtttctcctctgagcagggtgaaccggccaaggtgaggcagcttttgtggcgaatcaaacgcatcgtcaaagaagaggggtttgccgtgcacccaaacaaaactagggtaatgtaccggcataagcggcaagaggtgaccggtgtggtagtaaacgacaaacccagcgttgacagaaggacattgaaacgctttagagctttactgttccagatcgaaaaggatgggatcactgggaagtcttgggggacaaagtcaggcaaagagtccgcggccctaattccatcaatcgatggctacgctaactacgtggctatggtgtcgcccgaaaaaggcgtcaaactgcagcaacaggtggcaaaaatcaagcagcagcaaggattccaggttagccccaagcgcgttatggcacttaatcgaaagctcttcaagcaaaaggccatgaaaggcgaggcccctcgagactcatggtggcaacctgctgaaaagcagcctccagtcaaggagctcacatcactccagttagaagctgagaagcaacaggagaaggttgagtgtagcgccgagcagcaggctgataagaaacagcctctggtggagcaggtgcagcctcccgtccagattcatactaagcccaagacccagcagttccagttcgataaacaccattactgggtgattttctggatcggcctacttctcctcttactgatgatatttaactga

SEQ ID NO: 13303 - RNA, 1770 nt, synthetic construct
  source 1..1770: mol_type = other RNA
atgtctgagattagccctggaaaactgacacggcagcagctgtatgatcgcattagggaatcttccaaagacgaatacatactggaagaaatgaagcgcttaggattctgggacgagagtgagcaacctccagaggccgaagagttgattaaagagaaggctagactgcgcaaagaactcaacaagctgctgagaaataaaagactgatggatgaccctgagaaggcgctggagcttatgcacaaagagcggaagaagaaagccctggagaagcggaaagaaaccaagaaagagcggattaagtccgcctacgagcgagcattgaactggtttaagcttaaccagaaagagatcacctacttaggtgagaacacaaaaattgagatctcacagacagaaacaaacgagcaaaagctgaaccagcagaatctgcccaagtttgtcgaaagctctgagctggctgaagccatgggcctgtgcttgtcagagcttaggtttttaacctacactcgagacgttagcaaagtgactcattatcagaggttttccctagtgaaaaagagcggaggcgtaagacacatatccgcccctatgccacgtctgaaacgcatacagtattgggtgaaaaccaacatcctcgatacgctgccacttcacgactgcgcgcacggcttcgtgaaggagcgtagtatcgtttccaatgccgcaccacatatcggacagtccattgtcatcaacatggacctcaaggattttttccccactattacttataagagggtcaaaggactgttccaacagctcggctacaacgagaagatctccattctatttgcactcctgactacagaaccccactgtgatgagctcagcctagacaccgaaacatactacgtggcccaaggcaagaggctacttcctcaaggcgctccgacttcacccgctatcgcgaatctgatctgccgcagactcgaccggcgaattagtgattgtgcaaagaagctggggtttgaatatacaagatacgctgacgatcttaccttcagcattaaggacaatgattcagacaaggtgcggaagcttctgtggagagtcaaagctatcattaaggacgaaggtttcaatttacatcctgaaaaaacacggattatgaggagtcaccagcagcaggaggttactggtatagtggtcaatgaaaagatcaacctctcgaggaaaaaactgaagcgcttgcgcgccactctcttccagatcgaaaaagacgggttcagcggtaaaaattgggatgattccaaggatatcctgagaagtctgaccggattcgtgaattactatgcaatggtcgaccccgctaagagcgtgaagtacaaggagcaactaaagagaatcattcaaaagcatccgtatgagatctccaaaacgccctttatcggcaagctcaagaaatctgtattcattgaaaagagcaagcaggggttgtccccttgggacgactggtggcagcccgttgaaaaaacggagccagagctcattcttcccaaggaaaatgagaaacaggattcacgacggaaagcaaccgatagtatcgaatctacctcttcgtctcagtcaaacagggggagtacccgaaacaggtcttcagagctcccagagcttatagggaaagggttctttacagtgaccttgataataatcgccgtagccttggctaaggtgagcccactgatcttgctgttagccggctatctgatctaccgtctctggaaatga

SEQ ID NO: 13304 - RNA, 1671 nt, synthetic construct
  source 1..1671: mol_type = other RNA
atgtctcaactgacccggcagcaactgtacgataagattaaggaaacaagcaaagacgaatacatcctgtccgagatgcaaagactgggatattggaaggaggatgctcagcccacgctcgctgcctctctcattaagaggcgtggcgacctgcagagacagatcaatgcgcttagcagccagattacagatccccaggccgcactgaaagctatacaccaggagaggatggcagccgccagacagcagagaatagacacgaaggtgaaacgcgaagttgatcgttatcaccgagcacaggcttggcatgagaagcagcagaaccacatccattatctaggggatgcagctggattcaaaccctctgctgctgccgacgtctcggacgcagaacggttaaacagtcttggattgcccgtttattccaacgccgcagagttagcggcggggatgggaataactctcaacgagttacgatttctgacatatagcaatcaggttagtcgcgtatgccactaccagcactttgctatgcagaaaaagagcggcggtactcgcttgatttctgcccccatgcctagattaaagaggcttcagtactgggtcctcgataatatcctccaacctctcgagctgactgagcaagctcacggtttcgtgaccggccgctccattgtctccaatgcccagccgcacctggctcagaaggtagttatcaatatggacctgaaggacttcttcccaaccgtgacttacccaagaattaagggcacttttgcgcagctaggctataacaacgaagtcgcaagcctgctggcactcttgtgctccgaagccgatactcagacggtggagatggatgggcagcggtactacttaaattccacgtcaaggcgtcttcctcagggcgccccaacctcacctgccttgtcaaatgttatttgtaggaccctggacaagaggctacaaggcctcgcgacaaaacacggctttgcctacacaaggtatgccgacgacctgaccttctctggaacagacactgcggcagtgcctgctctcctgtacggtgctaaagcaaccgtgaccgcagaaggatttaacgtgcatcctgacaaaacacgcatcatgaaacaagggtctaagcaggaggtcacagggattgtggtcaatcagcacctgtccgtggataacaaaaagctgaagcaattcagagccctgctatttcagattgataaagacgggtacggggacaagtcgtggggcaatggatacaacatcttggcctcaataaaaagctatgcccattatgtacgcatggtcaaccctgaaaaaggttcacaattcctgcagcagatcgccgctatccaacagaagcatggaaagcccaacgtggccatgaagttcagtactacccagtttcgggaacgagccgctcaaggtaaacttccactggatgcaatgcatgtggcccccatcaagccggctcccacattggacgatacaatccagcatcgggatgttctgccacaggtggaggccgcactcggccttagtgtgcctgaagccgtagaaaccgagccagagtctacccccgccactaccccggagacaccaaatcaaccacaggggctggtgagcacccttatgtccttgctccggggcaaaagttga

SEQ ID NO: 13305 - RNA, 1680 nt, synthetic construct
  source 1..1680: mol_type = other RNA
atgacgaaccttacccgacagcagatctacgaccaaataaaagctactagtaaggaacagttcattctctctgagatgcagcgactggggtattggccaaaccccgaggcacccacactccactcagagctgatcaaaaggaagacccagctgcagcagggcatccgggagctctcacagcaggttgacgatcctcaggccgctcttaaacagcttcataagacacgcatggcagaggccttggccaaaagagagcaaacgaagatcaacagggaactgaaacggtacgaaaaagctttaagctggcatgagaggcggcaaaatcagctagactatctgggggatgccgcagggtataagccctcccccaacccacaggacagccattcacaaactttactgcactaccatttgcctgtctgttccacaggcaaagagctggccgcgcttatgggggtgactctaaacgagctcagatttctgacttacaccaatcaggtatctacagtacagcattatcagcaatttgccttagctaaaaagactggcggaactagactcatttccgctccaatgcctcggctgaagaggctgcagtattggatactggagcaggtgctccagccactagcactaaccgatcaggcccatggtttcgtccagggcagaagtatcgtgacaaatgcccggccgcacttgggccaagccgtagttatcaacctggatctcaaagacttctttccaacgattacttatccccgcatcaagggggtcttcgaacagctgggttacaaccacgagattgcaaccctgtttgctctgttgtgctcagaaccaattacacagacagtggagctggacgggcagcgctactatctggcacaaaatcctcgtagactgcctcagggggcgccaacctctccttacctcagcaatttaattaccagacagcttgataagagactgcagggactcgctcagaaatacggttttgtgtacacaaggtacgctgacgatctgactttctccagcgccagtaccgaagctcccacttgcggtcttctccactggattaaggccatcgtgcaggaagaaggcttccaactgcatcctgataaaaccaggataatgcacaagggccgacgacaggaggtgaccggattggtcgtgaaccagcagttgaatatcgagcgccaaaccttgaagcaatttcgcgcactcctgttccaaatccagaaagatggctatgtgggcaagagctggggaaagaatcgcaacctgcttgcctccataaagtcctacgcccactatgtgcggatggttaatccggtgaaaggtgaacagttcctgcagcagattgccgtgattcagcagacgcacggcgtccccgctcaaacccttaagtactccacacaagactttcgtcaacgttctgcccagggacagctgcctcttgctaccatgcaaatcgcccaggcatctcacaagccccagctcgaggacataattcagtatagcgaagtcatcgaacaaatccgggcggagctaaagttagcaccgccccagacaagcttgaataccgagacaagtcctccatacccaccccctatctcagaaccggcgtctctgattcacaacgttatctcgttgttcagtggactctttaggggaaaactgtga

SEQ ID NO: 13306 - RNA, 1731 nt, synthetic construct
  source 1..1731: mol_type = other RNA
atgacccagttgtccaggcaagaactgtatgacaagatcaaggagacatctaaggacgagtacattctgtcggaaatgcagcgcctaggttactggaaggaaggggagaaaccctccgttgcagagacattaatcaagaaaaaggcagagcttcagactgagatcaataaattgtctcgggaaattaaggatcccaaagaagcactgaaggctatacataagcagcgcatggcggaagcaaggcagagaaggattgatactaaagttaagcaagagttgaagcgattcaagagtgctgaagaatggcacaagcgaaaacagaacaagatcgaatacctgggtaacgcatgcagcaccaacagcaaaagtgatgagactgctaagaataccaattcggataaacttcgcctgcatcagctgccgacctgttccaccgcaattcagctcgccgaggccatagccatcaccctgaacgagctaagatttctgtgttacaccaacgaggtttccaaaattacacactaccagcgctttggtatccataaaaagaccggaggggtcagacttatcagcgccccaatgccgaggctgaagcgtcttcaatactgggtccttgacaacattctccagaaaattccactctccaacaatgctcatggattcgtgcccctgcggtcaatcgtgactaatgcgcaacctcacgtaggcaagaaagtggtgatcaacatggatctgaaagactttttcccaaccgtggggtatccgcggattaaaggactgttcgccaaccaggggtacggcgaggaagtgtcaatactgctcgctctcatctgcagcgaacctgacacgcagacagtcgagatggatgggcaacggtactatatacacagcaaggagaggttcctcccacaaggagcgcctacttcacccgccatctctaatatcatttgctaccgtatggataaacggctgcagggcctggccaaaaagtatggctttgtctatacccgctacgctgatgacctgaccttttccagtcaggacatcgataagattatgcccctcctgaactgggtcaaagccacggtaacggaggagggcttcgttgtgcacccagagaaaacacgcataatgcaccaaggcgtgcggcaggaagtcactggaattgtagtgaatgagcagctctccgtaaatagaaagcaccttaaacagttccgtgctctactctttcaaatcaaaaaggacggatatggaaacaaaaagtgggggaagggcggatctctattgcccacattaaagggctatgcgcatttcgtcaagatggtgaaccctttgaagggacagcagttcttgactcagatccaggagataatccaactgcacgggtatccaaatgagacgcctaaacagggtaggtcaacaagtgactttagaaaagccgcagcccagggcaagcttcctttgggtagcatgcaggttgcccaacccactctgccccccgatattaataaaatgatccagcacagagacgtgctcgacctcgtgcgagaggaattaggcctgccagccttagaggaccctaagcagaagaaggaaacagggagttctgataaacctatggtgcagccactgacagctgaggacgaaaacagatcccatgtgaacgaaaatgacattaattcaagcggctttttctctaggatcaagagcctgtttgggggcgataagtga

SEQ ID NO: 13307 - RNA, 1689 nt, synthetic construct
  source 1..1689: mol_type = other RNA
atgacgcagctgtcccggcaggagctgtatgacaagattaaagagacttccaaggacgagtacatcctttctgaaatgaagcgactgggttactggaaagagggtgacaagccatccgtcgccgcaacccttattaaacgcaagactgagctccagacagaaatttacaaactcagcagggagatcaaggatcctaaggcagctcttcaggccattcataaacagaggatggcggaagccagacaaagaagagtcgacacaaaggtggcgtatgagttgagacgttaccaacgtgcgaccgattggtatcagagaaagctctctacaattgactatctgggatcagcatgcgtgttaactcaggagaagaagcagaaaatcaaagtgctggataccgcaaaacttgctcgctaccagctcccgaatataagcacagctaaagagttggccgaacagatgggagtgacactaaatgagctccgatttctgtgctacactaacgaagtttccaagataactcactatcaaaggttcggcatacataagaagaccggtgggacccggatgatttctgctcctatgcccaggttgaagcgcctgcagtattgggtgctggataatctcttacaaaagattccgctagctgagcaggcccacggatttgtccccagtaaaagtatcgtcaccaacgctaaacctcatattgggaagaaagtagtcattaacatggacctgaagaatttctttccgactgtttcatacccccgtataaaaggggtgtttctgtctcaggggtacaatgatgaagtagccacattgtttgcactgatctgttctgagccagagacacagacagttgaaatggatggacagcggtactatattcactccaagcaacggtaccttccccagggtgctcccacctcccccaacataagcaatatcatctgttacaaactggataagcggctgcagggcctagccaacaagtacggcttcgtgtacaccagatatgccgatgatatgacgtttagcagcaacgacgcgtccaaggttaaagcactcctaaactgggtgaaggccacagtgaccgaagaagggttcatcatccaccccgaaaaaacgaggatcatgcatcagggggctaggcaagaggtgaccggccttgtggtgaatgaaaagctcagtgtgtcacgaaagcagttgaaacagtttcgggcactgctctatcaaatcaagaaggatgggtatgacggcaaacagtggggtaaaggcggcagcttgctgccaaccatcaaaggattcgcgcacttcgtaaaaatggtcaatgccgaaaagggagagaagttcctggcaaacattaaggagattatagatctgcacggctatcctgacgccgataagaaacagaacaaaacttctgacgactttcgcaaggctgccgctcagggaaagctgcctctgaacagtatgaggatcgccactgctcctccaccaccagacatcaataccatgatccaaaacactgacgttttggatctggtccgcaaagagctgggtcttagcgaaaacaaccctgaaacgaccaatgacacagccatctcatcggcccaaagtgaagacaatagagaggagggctcagccggcttcttagcacgcttaaagacattcctcgggggagagaaatga

SEQ ID NO: 13308 - RNA, 1587 nt, synthetic construct
  source 1..1587: mol_type = other RNA
atgggcttgtctcgtcaggaactgtacgagcaaattaaggccagtagtaaggaggggtacatattagccgagatgcagaggctgggattttggactgagtcagagccacaacccgcccgcgaactgatcgctagaaaggcagaaatccaacaggaaatcgcgagcctcagtgcgaagatcaaggatcccgaagcagctctaaagctgattcataagcagcgaatggctgcggctctggaaaaacgacttcagactcgcatcaagcgcgagcttaagcggtttcagtcagcccatctgcaccatcaaaacaagcagaagaagcttataacactcggtgacgccgcacattttgggcctaagcaacaggccacccagtcagaaaaattgcaggcctataagctgcctgaaattgatacagccctggagctggccgaacacgcagggattaccctcaacgagttaagattcctgacgtactctcgtcgtgtgtccaaattatcccactatcagcggtttgaaatggcaaaaaaaactggcggcactagactgatttctgctcctatgccacgcctgaaacgattacagtactggattcttgagcacatccttaatccactccctgtaacccctgccgcacacgggtttgtccctcagaagggcatactgtccaatgccaggccccacatcgggaaaaaagtggtcatcaacctggacttgaaggacttctttcccacaatctcctaccctcgcgtgaagggcttgtttctgagcttggggtatggaaatgaggtcgctacgttgctcagccttctgtgtacagaggccgagagtcagcaggtggagatcgacgggcaaagatacttcattgcagcggaccagcggagacttcctcagggcagtccctgctcacccgctattagcaaccagatctgtaaaaggctggacaaacgacttgctggactggcgcagaagtggaattttgcttatactaggtatgcagatgacctaaccttcagcgccgatagctcacagtatctgggagccctgttcaaaggactccggcagatattgaaagccgagggtttcgttctccacccggacaagaccaggatcatgcatcagggtgcccggcaagaagtcaccggcctcgtggtgaaccaaggcctgtccgtgagcgcgtccactctaaagcgcttcagggctctcctgttccaactcgataaggacgggctcaacggtaagacatgggctggacactcctcgaccgagcccggattcttagaaagactgcagggcttcgcacagtacattcggatggtccagcccgagaagggccaaaaactctgcgctcatctgcaggccattaggcagaaatacccggatacaggcctactctctgcccactctaccctgccaaaaggcaaaaaaacggcctttcggcagaaatctgcaaatgcagagctgccgttgccaggtcagagggttgccccagtacccccaccaccaagactggccgagacaatacttgatagaggaatcttggcagaggttgaagccgcttggcaggctcagggagggcaagtgtga

SEQ ID NO: 13309 - RNA, 1665 nt, synthetic construct
  source 1..1665: mol_type = other RNA
atgcagttactcagtatccttgaccagttggggtttgggctgtcgtctcccaagcttaaagtggtcttcttttgcctgaacctgctcccaatgagcgaccacaggatgacccgacagcagatctacgacaggatccgccaaaccagcaaggaggagtatatcttagaggaaatgaagcgtctgggtttctgggacacgacagaggaggccccaaaaatttcagaagagctcatccaaaagaagggtgcactccggagggaactccgcgaacttatggaaaaacagcggatgttccgcgacaaagagcggatgttggcagaaatgagaaagaaacgaatggcagacgcactggccagaagggaagagactaaggagagaaggaaagcagaaaaggaggcacgcgccaaagcctggcaggagaagaaagagcggtctatcgtgttcctgggcaaagactatagcgcagggctgtcggaagaagaagccgatttggcgaaactggccgctctgaatttgcctgcgtttaaggacatcaaagaactggcagaggctatggacatttctgtgggccgcctgcgttatctgtgctttcagagaaagttgtcaaccgtgagccattatgaacgcttttacctggctaagaaaaccggtggaaagaggctcatttccgcccctagaccgatgcttaagaacgctcaatactggctgctggagaatgtgctggcccggcttgaaatgcatgaggctgcacatgggtttgttcctgaacggtccattgtctctaacgccaaactgcacgaaaagaaggagctcgtaatcaacatggacctaaaagatttcttccccacggtgacatacccacgagtgaaaggcatgttcaaaggactgggatactccgagcagcaatccataatctttgcgttactcactacagagcctgaggtggaccaggtcgaaatcgatggccaactgtactatgctcagaaaggcgagcgctatctaccacaaggggctcccacttccccggctatcacaaactggttgtgtagacggatggaccgccgattcgagggggttgccaaaaagctcggctggacatacagtaggtacgctgatgatttgagcttttctgctaatgacacctcaaatataagccgaataatatggcaggcccaacagatcatacaggatgagggatttgtgattcacccaaagaagttaaagattatgaggaagggccggagacaagaggtgaccggccttactgttaatgagcaggttgcagtcgatagaaagaccctgaagaagttccgggcttgtctccacactattgagacaaagggctatcaggctgctgaatggggacaggggttcatcctcgcgagtattaagggtttcgccaactatgtcagaatggtgcaggccgagaagggacaggccctgtgcgaacaggtagatcgtattctagcaaaggaggagaataaacaggcctggaaagcctacttcgctaaccctagtaggaagaagtacgcctacgaagcccagaaacagcaggccaccattgaagccaatgcagtagattttggctcttcaggacttgcggaatccctaactcccgtcgatccccaacagaaagatgaggagcagtggtggagcctgtggtga

SEQ ID NO: 13310 - RNA, 1503 nt, synthetic construct
  source 1..1503: mol_type = other RNA
atgactcgccaggagatctgggaccgcatcaaagagctgggcggacgggacgagttcattctccacgagatgaaaaggcttgggttctgggatgtgagcgagggcgttcctcagttatccgagagtctgcgtgagcagcgaaaatctctggaaggcgagctgaaagaagccctgcagcagcaggccgtatataagaacaagaagaagatgttacgggacatgcgccagaaacgcatggctgaggccaaggccaggcgggttgaaaccaaagaaagaagggagcgccaaagggccgagaaggctgcagcctgggctgaagcccagcagcaagacattggttggttagggccggctgtgtccgctggtcttcagcagaaagaaagcaacgtcccccagctggaatcattcgggcttccagtgtttaatggggttaaggggctcgctgaggctatgaatctgcccctgaatgaactccgattcctggcttttgaccgtcaagtgtcaagaacatgtcactatcagagattcaaagtcgcaaagaaaacagggggattccgggagattagcgcccctgctcccaggctgaagaaagcccaacactggattttggatcatttgctgtacaagctccagctacacgaggcggcacacggttttgtgccacagcggtcaatactgtccaatgcactcccacatgtgggcgcacaggtggttataaacatggacgttaaggatttctttccgtctgttagctatcgacgggtcaaaggcgtgttccaaagcctaggctactccgaacaactggcaaccatactcggtctaatttgcacagaacctcaaactgacgaagtgaccttggatggacaaaggtttttcgtggctaagggagatagacgacttccccaaggcgcccccacttctcctgcaatcactaacattctgtgccggggattggatcggagattcgaaggaatggccaaagcactgggatggacatacacgcgctacgccgatgacctgacatttagtaagaaggccaccgatgctagagacgtgaatagagtcctctggcaggcaaggcagatcgtagagaatgagggatttgtattgcatcccgataaaatcaaagttatgagaaaagggacccgacaggaggtgaccggggtggtagtcaatgagaaaccaaatgtgtctcgtgccaagctcaagcagtttagggccgtgttgcataggatcgagacgcagggtctttccgcggctgatttcggcaaaggtcaggtcctggaaagtatccagggctttgccaactacgtctggatgattaacccagagaagggcgcggctctgaaggcccaggtcaagaacatcctcgccaaacccgaattacaacaggtgctggcacagaagaacacttatcctgaaaagggcaaggtggcgatctttacaccttacaaggacaaggaggtccagccactttcgaccgactggtggcgcctctggtga

SEQ ID NO: 13311 - RNA, 1554 nt, synthetic construct
  source 1..1554: mol_type = other RNA
atgaccaggcaggaactgtacgacgagatcaagaaaactagcaaagattcctacatactctctgagatgaaacgacttggattttgggacagcgcaaaaccaaaggtagctcaggagctcattgaaaagaaaactgcccttcagaaagagttgaatggcttatctaccaaaattaggaatcccgaagccgtcataaaagacattcacaaacagcgcatggcagacgccctccttcgccgagaagaaaccaaggcaaagaaggaaaagatctttcaggagaacctagccaaacgccaagagaaaaagaacagtgagctgggcttcatcggccatgctttcatggctgatctcgacgagaaggagtcgaatcagaagctactgaacgagaacaacctgttcttgattaaagatgcgaaagatctggcctcaaaaatgggcattacgctgaaggagctgagatttcttacacacacacagaagctgtctaacagaacagattacgtgcacttcaagatggttaagaaaagtgggggttttcgggagatctctgcgccaaagccgcagctgaaaagactgcagtactggatcctagaaaacatcctgaacaaggtggccgtaagcaacgaggcacatggatttgttgctaagcgtagcatcgtgtccaatgctaagccacatctgcagaaagctctggtgattaattgcgatctcgaaaatttctttcccacactgtcctatgcccgggtcaaaggcctgtttaaatctctcgggtactccgtggagcttgccactatcttggcgatattgaccaccgaagcagaacaaaaagaggttctgttagatggtgagaagctgtatttatatacagggaagaggtacctgccccagggatcgcctgcttcacctatgattaccaatctcatttgtcgcaaattagacaaacggatgagtggaatctcaaagtccttagacttcaactacacccggtatgctgacgatatgactttctcctcagacacttacctcaacatcaacaagatgatgttctggatcaaggggattgtgaaagaagaaggatttatacttcaccccaaaaaaaccaagattatgaagaaaggtgctagacacgaagtgactggcatagtggtgaatgagaagttgtccgtgaaccgtaaaaatctgaagaagttcagggccctattgtatcagatcgaggagtctggtctggaaggcaaacggtggcagggaaaatccgagaatctcatggcaagcgtgtgggggtatgccaattttatcaatatggtagaccctgagaagggggcgaagtacaagaaacaagttgaagtccttttggagaagtatccactgggcaacctgggatcaagcagcggggaatttagggccaagagcgccaagggcgagcaaccctgggaaagtaaggtccaggagatcgaggcaaagacactcgaacctgaaatgcaggtgaaggaagtcgccgagcaaaaggagacgccgtctttcgtcaataacattctcagtatgttcagaaagtga

SEQ ID NO: 13312 - RNA, 1563 nt, synthetic construct
  source 1..1563: mol_type = other RNA
atgacccgacaggagctgtatgatgagatcaagaaaacatcgaaagatagttacatcctgacagagatgaaacgcctgggtttctgggacaacgctaaaccaaaaatgcctgaagagcttatagagaagaaaaccgagctgcagcacgagcttaaccagctctcaaccaagatcaaaaatcccgctagcgttattaaggaaatacacaagcagcgaatggctgacgccctcgttcggagggaagagacgaaagccaaacgtgaggcacaggcgcagaaaaaggctaaggaacgggcagagaaaaaggaaaataagctcggcttcatagggcattcgtttattcatgacgacgaaacctccgctaagctagaactgctggttaccaacaaccttttcttaataaaggacgcaaaggatctggcaaataagatggggattgacctcaaggccctacggtttttaacctacacccagaaactctcaaggcaatccaactacgttcacttcaagatggctaaaaagacgggaggattcagggaaattagtgccccgaaaccccagctgaagaggctgcagtactggatccttgagaatatcttgaacaaagtggcagtccatgagaaggcacatgggttcgtgacaaacaagagcattatgtccaatgctcagccgcatattgggaaggccgtagttatcaattgcgatctcgagaacttctttcctacattggactatggaagagtcaaaggcctcttcaaatctctaggttactctgctgaggtggccacaatcctcgctatcttgactaccgaagcccaacaaaaagaggtgactctcgatggcgagaagctttacttatacaccggcaagagatacctaccccaaggatctcctgcctcccctatgatcactaaccttatatgtcgcaaactcgataagcgtatgtcaggcatcgcggactccttggcgtttacttatactaggtatgccgacgacatgacttttagcgccaccgcctatcagaacattaataagatgatgttctggatcaagaaggtgactaaggaagagggtttcatcttacacagcaagaagacaaaaattatgaagaaaggggcatgccacgaggtcacagggattgtggtcaatgaaaaactctctgtaaatcggaaagagctgaaaaagtttagagctctgctgtaccagatcgaacagcacgggttggaaggtaaaagctggcagggaaaaacagagaatttgatggcaagcgtgctgggctatgccaatttcattaatatggtggatccagtgaagggcgccgactatctgaagagagtgaaggccctgctgcagaaataccccatgccttcactgggcctgtctgataagacctttcgcattaaatccgcggagggcaagcaaccctgggagtctaagccagtatttcttgtcacagaagagacgcgcgtggtcagcagtaaagaactgggagaagaggcctccaagacgactctggaaaacccaagttttctgaacaacatcttggatatgtttagaaagtga

SEQ ID NO: 13313 - RNA, 1566 nt, synthetic construct
  source 1..1566: mol_type = other RNA
atgaccaggcaagaactctatgacgagataaaaaagacttccaaggactcatacatcctcagcgaaatgaaaagactcggcttttggaataatagcaagcctaaagttgccacagagctgatagagaagaagaccaaactgcagcaagagctaaatcagctctctactaagattaagaatccagaagctgtgatcaaggacattcacaagcagcgaatggccgacgcgctggtgcgaagagaggagactaaggccaagagggaagcaaaggagcaggaggcaataaagaataggcgcgagaagaaggagaataacattgggtttatcggaggcagttttatttcagatattaacgagcaagaggctaatacagaattactgaaaagcaacaacctatttctcattaaagacagcagagacttggcgaacaagatgggcatcaatcttaaacagctcagattcttgacctacacccagaagttaagcaacagaacggactatgtacgtttcaagatggccaagaagaccgggggctttagggaaatttcggcaccaaagcctaaactgaaacgattgcagtactggatccttgacaatatcctaaacaaagtggaggtcagtgagcaaacccatgggttcgtcgttaaaaggtcaatcatctcaaacgcaacaccccatattaatcgcgccgttgtgataaactgcgatctgcagaatttctttcccaccctgtcctacccgcgggtcaaaggactgttcaaaagcctggggtactctgctgaaattgctacaatccttgccatattgaccaccgaagccgaacagaaagaggtggtgctggatggtgaaaagctgtatctgtatactggaaagcggtatctgccccaaggctcccccgcaagtcctatgatcactaatcttatctgtcgtaagatggataaacggatgcagggcatagccactacactgaactttacatacacccgctacgctgatgatatgacattctctgcgaacgaataccccaacatcaataagatgctctattgggtaaaaggtatcaccaaggaggagggcttcactctgcacccagagaaaacacgcattatgaaaaagggttcctgccaggaggtaaccggagtggtggtgaatgagaaggcctctgtcaacaagaaggagctgaaaaaattccgggcacttttataccagatcgaacaaacaggaattgaggggaagagttggcacggcaaatctgaaaatctggtcgccgtcatttggggatatgcaaacttcatcaagatggtggactccgaaaagggggctaaatatatggctcaggtgaaagctatcatggaaaaatacccttctttgaacattacctccacaacgaacgaatttcgggtcaagagcgccaaaggcgagcagccgtgggaagatgagatcatagaagaaatcgaagaggtgacggaggtagtgacggatcagactaaaactaacgttcaggagaaagaggttcctaccacaccatcgtacattaacaacatcctcaatatgttccgcaagtga

SEQ ID NO: 13314 - RNA, 1890 nt, synthetic construct
  source 1..1890: mol_type = other RNA
atgtttaattctgcacctggccagttaaccaggcaggagctttatgataaaatacgcgaaaccagcaaggacgagtacattctggcggagatgaagcgactggggttctgggaatctgacgatgacaagcctgaggtgcccgagactataattaagaggcgtggcgagctgcagcgccagcttaatgacctgcttaagcagcagagactctacagcgatccggaggaagccttaaaggctttgagaaaagaacgaatgcaggcggccctgcagaaacgcgtcgaaacccggaagaagaaggcagacgaacgccatgagagggccttgacctggcatgagaaacagcagcacacaataagttggcttggtgaagctgtatccctgggactgacggccccaacagcagacagtaatgcctctcaccaagggtccactacgtctctctcaagcgaccaagccgtgtcagcccatggcgcaaatactcaaaacgaagccgtaaataatgcctccggcatgaaacaccaggatctccccaccttcgacaaccacaaggctctggctgaaagcatcggcataactctgaacgaactcagatttctctccttccagaggagtaccagcaaggtgtcacactatcagcactttcagatcgccaagaaaacaggcggatttcgagagatcagtgccccgatgccaaggctgaaaagagcccagtattgggtgttggacaatatcctatgccacgtgcctctgcatgaggcagcacatgggttcgttgccggacgcagtatcctaactaatgcaaaaccacatgtgggccaggctgtcgtcgtaaacctcgatttgcagaacttcttccccacgatttcgtatcggcgcatcaaaggcctattccacaaaatgggatatgacgagagcatcgcgaccgttttagctttgctctgctctgaggccgatacccaaaagatggaattggatggggagcaatggtttgtgcagcagggagagcaacacctaccccagggggctccaacttctcccacaatttccaatattatttgtcgctccttagacgtccgcctgcagggccttgccaaaaagcacggcttcaactacagtcggtacgcagacgatatgaccttctcaggggataagacagctagagagtcactgcgcaagctgctgtggggggttcaagccatcgtggctgatgagggtttcatcctccatcccgataaaacaaggattatgaacaaaggtcagcagcaagaagtgacaggaatcgtggtcaacgattaccctagcatcgatcggaagaccttgagaaggttcagagcactcctgcaccaggtggagcagactggcatccaagggaagagctggaacggtgtttcagagccagaacatctgctgaggtccatgctgggcttttctaatttcgtggctatggttctccccgagaagggcgaggcttttaagcagcaagcaaaagccctgtacgaaaagcactctaacaaagtaggtacaaaaacaattggacagctgcgaaaggccgaatttcgaaaacgggctgctgctggtcaagcaccctgggagagctggaaggaggccccagttaaaatcgcgccagtccgtgagaagactgtggatgagcttcaggaagagcggaaccaggtgctcgccgaaagacgtgaggcgaaaaaaattgaaaaggaacaacaggatcggcagcgttcacggaggggagggtttcctggcgcaagtagatccgactcccggagagaagacgacaggtggaatcttcctgaggactcctcgggagacaacggtcctaacgtcatcattcggtttttagggttcatagggagcctgtttaccggaaagaagtga

SEQ ID NO: 13315 - RNA, 1680 nt, synthetic construct
  source 1..1680: mol_type = other RNA
atgagtaatagcaattctcgccagcagtggtatgacagaataagggcatccagtaaggatgcggtgatccttgccgaaatgaaaaggctgggattttggcaggacactgatgttccaaccctttccgagacaatcattcagcgtcgttccgagctacagtctgaactgagtagattatatcatcagaagaatctgtaccaacaccccgaacaggctctaaaagccatgaggaagcaacgcatgcagaaggcacgtgagcaacgcgctctgacgcaacgcaagcaggccgagctgagacaacagcgagccaggaactggtatgaacagcatcagaacggcattgtgtggctgggggaagggatttctgccggtctgcaggacctttccagtgacatcgaacgccttcaggctcacgacttgccagtgctgcattcccctaagatgctcgcggaggccatgggcataaccctcaacgaacttagattcttggcgtaccaacggaagaccagccggattaaccattaccagcggttccagattgtgaaaaagactgggggtttgcgggacatcgcggcacctatgccacggttgaaacgcgtgcagtactggctgctggacaatattctccacaagctggctttgcacaatgccgctcatgggttcgtgctcggacgaagcatcatttctaacgcacagcctcacacagccaaggcactggtcatcaatctggatctggagaatttcttcccgtccatcagatacgcccgtgtcaaggggctctttaaaagcttaggttatagcgaaagcctcgctacagttctggggctcctttgtactgaggccgcagtggatgagataatcctcgatggcgagacgtggttcgtcatgagaggtgagcgacacctaccccagggcgcacctacaagtcctatgatttcaaacctcctcactcgaagcttagatagaaggctgcagggaatcgctaccaagtatggctacgcttacactaggtacgctgacgatcttagcttctcgtgcgagaaaccatataccgccaatgtaaccaggcttctgtgggccgtacggcagacggtgcaggaagaaggctttaaactccatccagacaagacacggttgatgcaccagggacgcagacaggaggtcaccggactagtggtgaaccaacacctctcacttgagaggaaaacattgcggcgattcagggcactactgcaacagatcgagcacaccggctggcagggaaagcactggaacggcgtaactgacccgatcaggctgcagcagtttgtttggggctatgcacattttgtggctatggttctgccagataaaggtgcgcagtttaaagcccagctgaacagaatccagcacatacattttggcggggtagtcaacaaaaaataccagtcagctcagaattccaaggcccagttccgcgtcttatcagctaaagcacaagcccccctcgtctcgtggaagcaagcacaagcccgccccctggttctgctggaaacaatccaacagcccttagcccaaacccagcacgagcccgtggagcaagccgcttctgggattattgaacagcagtctgccgttactgaggtgaagcaggcacctctggctggattggtggcctggctgagatcattgctgcggtga

SEQ ID NO: 13316 - RNA, 1905 nt, synthetic construct
  source 1..1905: mol_type = other RNA
atgtccgaacgtactcccactagggcggagctgttagcccggattgcccagtcctctaaagacgccgtggtattagcagaaatgcaacgcctcggtttctggccaaaagatactacgcaaccgaccttagaggccgctctaatagagcgtgaggccgaactggcccaggcactcaatggcctgcaagaggaactgcgggtcaagggggatccacaagccgccctgaaggccatgcggcaagaaagaatggccagagccagagagcaacgcgaggcccacgcacaggcaagggaacagcaacgctacgagcgggcccttcggtggcatcaagccagaacacagcaggccggcttccttgggctaggggtcagtggtggactccaggcagaagctgaccccgcagcatgtgctgcccgactcgagaggcatggcctgccagtcctgaatacagctctcgaactggcggaggctatgggcctgtccgttcccgaactgaagtttctgtgcttccaccgggaggtagccacgacgactcactaccgtagatttaaccttccaaaaaagaccggcggagtcaggacaattagcgcccccatgcctagactgaagagagcgcagtattgggtgttggaccaggtccttgctaaagtagcctgtcatgaagccgcgcatgggtttgtgcctggtcgtagcatcgttagcaatgctgctccccactgcgggcaggcagtggttataaacctggacctgaaagactttttcccatcaattcacttccctaggatcaaaggtgtgtttaaagggctcgggtatggcgaagcagtggcttccatgctcgcgctcctatgtagcgagaacgcctgcgatgagctagaggttgatggagagcgcttttttgtcggaggaaagggtcgagacagggttttgccccagggagcccctacctcccctatgctgaccaacatattgtgccgtaagctagaccggcgcttgcaggggcttgcacagaagctgggattcacatacaccaggtacgcagacgatctcaccttcagtgctagtgatgaaggggcggcgagggtaggcagtctccttcgacaggtgcaccatgtccttcgatcggaaggcttcacaccgcatccagataagcagcgggttatgagacaaggggccaggcaggaggtcacaggcgtggtagtgaatgcaaagccctccgtgtctcgcacagaacgcagaaagttgagagcagccttgcacagggctaacacccagggcctcggtgctgctacttggcagggacagcccgctaccaatgaggtgctgaccggctatgcccgcttcgtgcgcatggtgtcagctcagcagggccagccgttactgcagcaggcactggccctgccttctgctaaaaccgccgcaactgccgcccgaggcaactcatttagacagagggccactcaaggtcaggcccccttgaggcagcaaggtggggagtggtggcaggtcatcccacctccagtgccccagttagctctgacagcgggacagatcaaggccgcccggcaagagcgactgaacgcagaaagagctgcgcgacagagcgcacttcaggcccaaaggttggccgacggcaattcaagcgcttctcggcctagcgcagctagcactggcgcttctgcagcagagcacacggagcaccagaataccgctgctcctgtggcttggtggcgcttcttcttccagctgtttatcatcattaagcttgcagcctcctttaaatctgccctcgtgttgatgctgggcgccctgatcctcggacaggcactgatgacacgctcactcgggtggggacggtttgcgctgaccgtgattgttctcgctctggtgggaagtctgttacggtga

SEQ ID NO: 13317 - RNA, 1902 nt, synthetic construct
  source 1..1902: mol_type = other RNA
atgacagagagaacccccactagagccgagctcctggccaggattgccctatctagcaaagatgcagttgtgctggcagaaatgcagcgcctaggcttttggcctaaggatgccgctcagccaaccctcgagtccgcactgatccagcgagaagctgaacttcagcaggcgctgaatgaattgcaggacgaacttcgggtcaagggagatccacaggcggccctgcaagctatgcggcaggcaaggatggcccgagctagggagcaacgggaggctcatgctcaggtacgggagaaggctcgctatgagcgagctttacgctggcaccaggcgagagacacggaagtgggatttctggggctgggcgttagtgggggtttgcaggccgatgctgaccctgccgggacaacagctagactggtgaggagcgggttgccagcacttagcaccccgctggaactagctcaggccatgggcttaggcctccctgagttgaagtttttgtgtttccatcgagaagttgcccggaccactcattaccgccgcttcgacttgccaaagaaaacagggggcgtcagaacaatctccgctcccatgcctaggctcaagcgagcccagtactgggtactggaccagatcctggtgaaagttccttgtcacgacgccgcacatggcttcatgccgggacgcagcatcgtgagcaatgcagcgccacattgcgcccaagccgtggtcattaacctcgatttgaaggacttttttcctagcatccacttcccccgtataaaaggagtatttcagggtctgggctatggtgaggccgtggcatcgttgctggccctcctgtgctcggaaaacgtgtgtgacgaactggaggtcgatggcgagcgatttttcgtcggcgggaagggtcgtgaacgggtcctaccccaaggcgcccctacatcaccaatgctcactaatattctgtgccgtaaactggaccggcgtttacagggcctggctgacaaactgggctttacatacaccagatatgctgatgacctcaccttctcagccagtgaggaaggtgctactagagtggggtccctgctgcggcaagtgcaccacgtgctgcgttcagagggcttcacaccccacccggacaagcagcgggttatgcgccagggtgctcgccaagaggttactggcgtcgtggtgaacgcaaagccctccgtgtccaggaccgagcgacggaaactgagggctgccctgcaccgcgcaaagactcagggactggccgctgccacttggcaaggtcaggctgcctctagagatgtgttggtaggctacgccaggtttgtgagaatggtcagtgctccccaaggccaggcactccttcaacaggccctcgcgttaccgggaacggctccttctgcagcggctgcaagagcggatgccttcagggtcatggcggccaaaggacaggcaccccagaggagacaaggagcatggtggcagcccacccctcctccattacctcagctggcccttacagcccagcaggttaaaaccgcccgccaggagaggcttaatgccgagcgggctgcacgccaagcagccaaaagacccgcagctcccgcccaaggaagggatgcaaacacccaggccccagggatgagtcacacgcagggacacaccccagatgcccccacaacttcagcaccaccagtatcttggtggagattcttcctccagctgtttattctcatccgggttgcggtggggttgaagagcgccctcttcctgatgctgggggctctttgcctggggcatgcgctcatgactcggaggcagggatggattagatttgcactaaccctcgtgatacttgccgtgttatcctctttcacgaagctttga

SEQ ID NO: 13318 - RNA, 1905 nt, synthetic construct
  source 1..1905: mol_type = other RNA
atgtctgagcgcgtgcccacacgggctgagttattggcccgcatagccctcagcagcaaggacgccgtcgtcctgtctgagatgcagaggctcgggttctggccgcagaatgcaacccagccgactatagaggcggccctgatagaaagagaggtggaactgcagaaagcccttagcgagctccaagatgagctgagagtaaagggcgacccccaggctgcactgcaggcaatgcggaaggaacgaatggccagggccagagaacaaagggaagccaatgctcaggctagagagcgtcaacggcacgagcgcgcaatgcggtggcatgaagcccggaaaaccgaggccgggtatttgggggacggtgtgagtgggggcctacaggtcgatgctgaggcagccgcagtcaaggccagactgcagtcacggaatttgcctgccctatctaccccccttgaactcgcgcaagcgatggggctgaccttgcccgagctcaaatttctctgcttccaccgggaggttgcccgtactacccattaccggcgattttccttaccaaagaagacaggcggcgttcggacaatctccgccccaatgccccggttaaaacgcgcccagtattgggtgctagataacttactcgcaaaggtgccatgccacgacgccgctcatggcttccttcctggccgctccattgttactaatgctgctccccattgtgcaaaggcggtcgtcataaatctggaccttaaggactttttcccatctatccactttccacggattaagggagtctttcagggactgggttacggagaaagcgtagcttcacttcttgcactgctgtgctcggagaacgcctgtgacgagctcgaagtggatggggaaaggttcttcgtaggcggcaaagggcgagatcgcgttcttccccagggagccccaacctcccctatgctcacaaacattctgtgtcgtaagttggatcgccgtctgcagggcctggcctctaagctgggattcgcctacactcgatacgctgacgatctgactttttcagcccctgctgagtcagccgataaggtgggccggttattgcgccaggttcaccatgtgttgcacgacgaggggttcaccccgcaccctgacaagcagagggtgatgcgaaggggagccaggcaggaagtgacgggtgttgttgtgaacgctaaaccgagcgtgagccgagaggagaggagaaaactgcgcgcggctctccacagagctggtcagcagggtgtagaagccgccacgtggcagggacatgctgccactcgcgacgttctcgtcggttatgcgaggtttgtgaaaatggtggatgctcgacagggccaacctctgcttcagcaagctctggctcttcccggagcaaacgccagtttggcagccggtaagccagatgtgttcaggattcaggctgcaaagggagaagcccccgcaagaaaacaaggagcgtggtggcagccagcacctagtccagagcctcaactggcactgacagcaatgcagatcaaaaccgccaggcaggaacgtctgaacgccgaacgcgcagccagaaatgaggctaaaaggcaggagcaaatcgccagaggggaggctcccgctcctagaagaccccaacccagcgctgaagcaatggcatccgcggcgcaaatgacaggcgccgtccacaagccaattgcgtggtggagatacgctatccagctcgtcatcgtgatcaggctggctgtaggcctgaaatcccctctggtcttcatgttgggcatgctgtgggtgggatatgccgtgatgacgcgccagctagggtggtggcggtttgcaattgcaatcctgggcatcgccattctagggagtgtgctcaacgtgtga

SEQ ID NO: 13319 - RNA, 1887 nt, synthetic construct
  source 1..1887: mol_type = other RNA
atgtcagagaggatgccgacgcgcgcggaattgctggctcgcatcgcagcctcttccaaggaggacgtcgtgctcgccgagatgcgaaggttgggctactggcccggcgaagcaggtcaaccagtgatccaggcggccttgctcgaacgtgaagctgagctgcagcaggctctgtcggcgctgcaggaggagttgcgggttaaaggtgatcctcaggctgcccttcaagcgatgaggcgcgagcgcatggcacaggcacgagaacagagggaggctagggctcaggcccgagaaagggaaaggtatgagcgtgccctgagatggcatgagcgcagaaaaatggaggcaggctacttaggcccaggagtttctggtgggctgggggcagaagtcgacccagaggctgtgaaagccagattagccgcagcaggactccccgcccttacaaccccttcagagttggctcaggccatgggactcagtctgcctgagctcagattcctgtgcttccaccgcgaagtggccagaacaacccattatcgacggttccagctaccaaaaaagactggaggggtgaggactatctcctctccgatgccccggctgaaacgggctcagtattgggtcctggataacctgctggcaaaggtgccatcccatgcagccgcccatggtttcctgccaggaaggagcatcgtgagcaacgctgctcctcactgcggacaggacgtggtgattaatcttgacctcaaggacttctttcccagcatacacttcccccgcataaagggcgttttcagagggctcggctacggcgatgcggtagcctcactgctagccctgctgtgtagcgagaatgtctgtgacgagctctctgtggatggcgagcggttctttgtggggggaaaaggccgggagcgtgtcctacctcaaggcgctccaaccagtccgatgctcaccaacctcctgtgccgcaagttagacagacgtctgcagggcttggccttgaaactgggcttttcttacactcggtatgccgatgacttatccttttccgccgctggtgatgccgctcagcgtgtagggcgtctacttcgacaggtgcaccatgttctgcgggacgaggggtttactccccacccagataagcagagggtaatgcggcggggagcaagacaggaagtaaccggagtggtcgtgaatgacaagcccagcgtgtctagagccgcacggagacagctacgagctgcgctgcacagagccggcagacagggtgttcaagccgccacctggcaaggcgaagcagccacacgcgacgtgctggtgggctatgcacgatttgttcacatggtgaacgccgcgcaagggcagcccttacttaagcaggcccttgcgctgcctggagcaagttcacacgctcccaggcctgatgcattcagagcccaggccgtgaagggagtagcacctgctcggaggagtggtccctggtgggaagtcgtccccgctccagagcctcagctggcactcacagcagggcagatgcaagccgcccgccaagcaaggctcaatgctgaaagggctcagaggagcggaaaacccgccgtggccccatcagctcaacctgctactgcgacgccaggagcacgaccggttgccagacctgcgcctgttgccgaacaacccgtgccgtggaaacggtacgggctccaggtctttgggtacgcatttatggctcttgtgctgcattccgccgcttttttgttccttgccctgatttggcactcccagagtctgaagaagcgcgatctgggctggggtcggtttgggctgggggtattcgtcttaagcattgttgccgtcatgcttaagggcttgctcgctcgctga

SEQ ID NO: 13320 - RNA, 1917 nt, synthetic construct
  source 1..1917: mol_type = other RNA
atgtctgatagaatccctacgcgggcggagctcatcgcgcgtattatgctctcgtccaaggatgctgtcgtgttagccgagatgcagcgcttgggtttttggcctgccgacgccgggaaaccaactcttgaatcagcgctgattcagagggaggtggagttggaacaggcactgcaggggctctacgcccagcttagggttaagggggaccccgaagccgcactgaaggccatgagagaggagcgtatggcacgagcccgggagcaaagagaggccaccgctcaggctcgagaaagacggcggtttgagcgcgctttacggtggcacgaggctcggaagaccgacattggctatctcggagcgggagtgtccggtggactgcaaccacctcctgctgctgctcccgcaaggaccctgcagccaggtctaccgccattggcctctcccctggagctagcccaggctatgggcatcgcccttggcgagcttaaatttctggggtttcatcgcgaagtggcccgcagcacacattatcggaggtttaccctccccaaaaaaacagggggagagcgcacgatctcagcccctatgccgcgcttgaagcgggctcagtattgggtcctggataatatcctcgctaaggtcccatgccacgacgcagctcacggtttcttgcccgggcgctctattgtaacaaatgcggcgcctcactgcgcaagggccgttgttatcaacctggatctcaaagatttctttcccagcattggctatcccaggattaagggcgtgttccagggactcggctacgacgaacgcgtagccggcgtcctggctctcctgtgtagcgaaaatgcatgcgacgagctggaggtggacggcgaacggttcttcgtgggtgggaaggggagggatcgggtgttgcctcagggtgcgccaacatcccccatgttgactaacatactgtgtagaaaactggaccgccgactacagggcctagcagataagatggggtacacgtacaccaggtatgccgacgacctgacttttagtgcaccacccgaagctgccgaccgtgtaggtcgcctgctgaggcaagtcgatcatgtgctgcatgacgaggggttcactccgcacccggataagcagagagtgatgagggccggatcacgacaggaagtcaccggggtggttgtcaatcagaaacccagtgtctccagggatgaaaggcggcgcctgagagcagccctgcacaatgctcagagaaacggaatcgaagcagctacctggcagggcaggcctgctacacgagaaactcttgtgggatatgctcgattcgtacagatggttgacgcccaccagggagccggcctttttgcccaagctcttgccctgccaggaggggctcatgccgctagacctgccagagcaggcgccttcagaagatctgcggcccagggccaggctccagctttagcacgtggagcctggtggcaaccagccgaaagacctgcgccacgcttagcacagaccgccggtcagatgaaggccgccagacaggaacggttaaacgctgagcgagccgagcgtaacgctgcagccaaacccgcacgagatgccgcaagagaggaggcgcggaggcatgagcagcaagagagaagggcagcacaacgggccgccgcagaaactgctcggcaaagcctccgccagcaacccgcacttacatggcgacactggctccaatacgcaatccagctctacatagtgataagagtagccaccggaatgaagagtgctgtcgtgttcgccgcaggaatggcctgggtgggctacagcatgatgacaaggaaaactggctggctgcgtttcatcgttgccatggttgtgatcgcgctggtgggcgctatgattcgcctgtga

SEQ ID NO: 13321 - RNA, 1887 nt, synthetic construct
  source 1..1887: mol_type = other RNA
atgagcgccccgcagccaactagggccgaactgttggagagattgcgaaagtccagcaaggacgctgtgatactcgaggaaatgcagcgactgggcttttggccggcaggctctggagctcccacagttgaagaggcaatgatccagcgcgaggtcgaactcgcaaaggccctggaacaggtgagaagccagctgggcacacgtaccgatcctgagtctgcccttaaacagatgcgcaaggaacgaatggcggaggctagagctcgcagggaggccaacgcccaagcgagagaacagcggaggctcgataatgcgctccggtggcacgagaggtccggacaagagattgcctatttgggcgaccaggtgtcagccgggttgtatcccggtcacgcagctgtgaggccagagaggttagcgcggcatggcctccctctcttcgaaacccccctgcagttagcaaccgccatgggagtcccactcgccgagctgaagtttctggggtttcaccgagaggtggcaaggacgtcacactatcgtcggttccgcctgccaaagaaaaccgggggcgagagaactataagcgcacccatgcctaggctcaagagggctcagtactgggtgctagataatattctggcaagggttccagtccatgcggcagctcatgggttcgtcccgggacgaagcatcactagtaacgccgctccacattgcggccaagccgtcgtaatcaacctggacctgaaagacttctttcctggcgtggcctttcctcggatccggggtgtcttcaggggccttgggtacggggaggacgttgccactgttctcgcccttctatgctctgagaaccccgccgatgagcttgtggtggacggcgagctattcttcgtggggcgtaagggacgcgaccggacgttaccacagggagcccctaccagtcccatgctgacaaatgtactgtgtcgcaagctggatagacggcttcagggtcttgccgggcgctttgggtttgcttacacacgctacgccgatgacttaacctttagtgctccaccagagggctctgcatctgtcggcaggctgcttaggcaggttcaccacatcctgcatgatgaagggttcacaccgcaccctgacaagcagcgggtaatgagatccggcgcgcggcaagaagtgacgggagttgtggtgaacagagaaccctcagtggcccggagctcaaggagacgcctcagagccgcattgcaccgagctcagaaaagcggcgtcgcccaagcacactgggaaggtgctcccgccaatgccggccaactacagggccatgcccaatttgtgcgctccgtgaatgcccgtcagggtgcaccgctcgtagcacaggcacgaatgctggtgcggtcacctcatacactggcggcagctggttcgggtgctgcgtttcggcaaagagcagccgctggtcaggctcccatgaggccaggagatcgcgcctggtggagtcctgctgctaaagcggccccccaactccagctgactcaggagcagaaaaaagccgaacgagccgaacgacgggctagacggcgtgacgaggctagagctgcagctcaacccgccaggggtgaaagagctgctggagccggacctggccctttcactaccccacccgagattcccattagctggtggcgcttcgggttccagctgttctttgtcctgtggttcgcatccgcaacccgctcttccttggtgtttatggggggagcggcctggttcgggtggagtttagcccagagacgccagggatggcctcgttttctgctgggaatgttgattgtcttccttgcctccgttgtaatccagggcttctggaggcacagatattga

SEQ ID NO: 13322 - RNA, 1866 nt, synthetic construct
  source 1..1866: mol_type = other RNA
atgagcgagcgggtgccgacgcgcgcagaattactggctagaattcaggcctcaagcaaagacgctgtggtgctggctgagatgcagaggcttggtttctggccagccggctctggcactcctactctcgaagcggctctgattgagcgggaagtcgaactgactaaggcgctggacggtctacacgccgagcttagagtgaagggtgaccctgaggccgctcttctggctatgagaaaagagaggatggctcaagcaagagagcgccgagaggcaacagcccaagccagggaacaacgccggtttgagcgggctcagcgctggcatgaggctcgaaagaccgacgctggatatctgggagccggcgtgagtgctggccttcaagctcctgctgccgaaggaagggcattggcccccggactaccacctttggcatcccccctggccttagcgcaggcaatggggatcgccctcccggaactgaagttcctgtgtttccatcgagaggtcgctcgcacaacccattaccgccggttcacccttcccaaaaagaccggtggagagcgtacgatctccgccccaatgccccgtttaaagagggcccagtattgggtactcgacaacgtgctcgccaaagtcccactccacggggcagcccacggatttgttcctggcagatccattgtgtctaatgccgcacctcacaccggcaaagcagttgttatcaacctggacctcaaggacttctttccgtccgttacatatccccggataaaaggggtgttccgagccctgggctatggggagcatgtggcgactacattggctctcctgtgcagcgaaaatgcggccgatgagctggaggtcgacggggaacggttcttcgtcggcggaaaggggcgggatagagtgcttccccaaggggctccaaccagtcccatgctcaccaacatactctgccgcaggctggatcgccgtttgaagggcctggccgcaaagctgggctttacctacacccgatacgcggacgatctgaccttctctgctgcacctgagggtacaacacaggtcggccagctgctcagaagggtacaccacgtgttgagggacgagggattcacccctcacccggataagcagcgcgtcatgcgggcctcaagcaggcaggaggtgactggcatcgttgtcaacgagaagcctagcgtctcccgaacagagagaaggcgtctacgcgccgcgttgcatacagcccagcggaaaggactggaagcggcaacatggcagggacagcccgcaacgagagataccctggtggggtacgctagatttgttcagatggtagatgccaggcaaggcgcagccttacttccccgcgctctagccttacccgggtcagcagctgccgttagtccatttccatcaagatttaggcggcaggctgctaagggcgaagcccctacactggccagtgggacttggtggcaacccgccgaaccagcagctccaactcttgctctgaccgcgggccaggtcaaagctgctagacaggaacggttgaatgcagaaagagccgcacgcagggccgatgctgaagcagaagtggagcggatgtccgcaacagaggatgtagcccacggtgaggatgcagacgacactcctactacggcacagccacccatccgatggtggtcgctggcgattcagttttttttggtggtgcagctcgcctctggtgccaaaagcgccatagtttttaccctgggaatcgcctggctcgtgttctctttggtgactcgtaaaaccggctggtggaggttcgtgtttgccatgatgtgtatcctggccattgtagccgggctcaagtga

SEQ ID NO: 13323 - RNA, 1974 nt, synthetic construct
  source 1..1974: mol_type = other RNA
atgagcgacagggtcctgactagagcggaaattatcgagaggatccgggcgtccagcaaagacgccgtggtgctggaagagatgcagcgaatgggcttttggccagccggtgacggaaaacccggcattgaggcagcccttatcgaacgagaaattgaactgactagagctctggacgaggttcaggcaactttgcgcacgcacagcgaccctgaagccgctatgaaggcgatgcgggagcagagaatggcagagagtagagccagacgggaggctacagcgcaggctagggagcagcgaaggcacgagagggccttacggtggcatgctgcgcgcagaaccgacgcaggttacctgggcgctggagtgagcggcggattgcagtctccggctgctgatgccatacacactaccgacgccaccggagtcacaggggaaccaggagcaaagccaagggcactgctggatggactcccagctctggcaaccccactggatctagccggtgccatggggttgactctgcctgaactcaagtttctctgcttccaccgtgaagtcgcacggacgacccactaccgcaggtttctattgcctaagaaaacagggggccagagaacaatatctgccccgatgccgcgactcaaacgggcacagtattgggtactcgatcaactgttagcgaaggttccgtgccatgcagccgcccatggtttccttcccggtcgagggatcgtgagcaacgcagcccctcatacgggtcgtgccgtagtcatcaacttagacattcaggatttctttcccacaatcacgttcccccggatcaaaggcgtgttccgagggttgggctatgacgagcgtgtggcaacaatgttggccctcctttgttccgagaacccctgtgatgaactggaggtggatggagagcggtttttcgtcggcggcaaggggcgtgatagagtcttgccacagggcgctcctacatcccccatgctcactaatgtattatgccgcaagatggaccgtcgtctgcagggactagccgacaaactggggtttacctacacccgctatgcagacgacctgacatttagtgcttctggcgagggggctgccaaagtcggcaccttgctccggcaggctcgacacgttctcctggacgaggggttcacaccccatcctgataagcagcgcgtaatgcgcgcaggatctcgccaagaggtgaccggcgttgtggtgaatgagaaaccttccgtctcacgcgaagagcggagaaagctgagggcagcccttcacaaggcgacgagagatggggttgaagccgccacatggcatggccaccctgccacaagggaggtgctagtcggatacggcaggtttgtggcgatggttgataggcaacaaggggccaccctgctgaagcaagcactggcccttcccggcggaagtgccaagaaaagatcggcatttggcgccctctttcgaaagaaagccgctgaaggtgaggccccaactctggccaggggagcatggtggcaaccagccgatcggcctgaaccagtgctgcagcagactgctgcccagattagagcggcccggcaggaaagaattaatgccgctagaaccgaacgcaggggaggagcagctccaaagcccgaccagtaccaacaacgccgccaggagcagtcaaaccgcgcagcagagaatgctgctaggtggagcgccgctacttccgctgcctctggtgctgctcctagggctggacaccccattaactggggcttatatgcccggcagttcggggtgatgacccttgcggccttccttatagccagttggctcgtgttcttcggcggtctggctcacctcgcactgagaatcaaaactcggtcaaccgggtggggggagttctggatcggcctgatccttctcatagcggctgccgtgaagttctttccccattcaaccgcatga

SEQ ID NO: 13324 - RNA, 1917 nt, synthetic construct
  source 1..1917: mol_type = other RNA
atgtccgacagggtcccaacaagggctgaaatcgtggaacgaatcagggcttccagcaaggacgcttttgtgttggaggagatgcagcggcttggattctggcccgcaggagaaggcaagccgtccatcgaggcggccctcatacagcgggagctcgagttgatgaaggcgctggaggatatgcagcaggaattacgctcacactctgaccctgaagcagccctaaaacgtatgcgcgaggaacgacttgcccaagctcgggccaagcgggaagccactgctcaagcgagagagcaaaggaggcacgagcgggccctaagatggcatgaggcccgcaaaacagatgccggatatctgggcgagggagttagtggagggcttcgcccagcagctgctggtgctcctgcaaggcctctggcagatgggttacccaccctggccacccccttggaacttgcccgtgcgatgggcttaaccctgccagagctcaaattcctgtgtttccacagagaggtggcacggactagtcactaccgacgcttcctcctgccaaaaaagactggagggcagcgtacgatttcagctcccatgccgagactgaagcgggcccagtactgggtacttgaccaggtccttgccaaagttccaagccacgccgcggctcatggttttcttcccgggcgcagtatcgtcaccaatgccacgccccatgcgggcagggaagtcgtaataaacctggacattcaggactttttccccacaataaccttcccacggatcaaaggcgtattcagagggctcggctatgacgagagggtggctactatgctggcccttctgtgttcggagaatccgtgcgacgagctggaagtcgacggggagagattttttgtgggcgggaagggtcgcgacagggtgttacctcagggggcacccacctcccctatgctgactaacgttctgtgcagaaaaatggaccggcggctccaaggcatcgcggacaagttaggatttgcatacacccggtatgctgatgacctcaccttcagcgcatctggcgaaggggccggtcaagtgggtacactcctgagacaagtgcgacacgtcctgaaggatgaggggttcacgcctcacccggacaaacagcgagtgatgcgggccggctctagacaggaggttacaggcgtcgtggtgaacgataaaccctcagtgagcagagaggagcgtcgaaagttacgcgccgcgcttcacaaggcgtccagggaaggggtcgaagccgctacatggcagggccagcctgccactagggaggtactcgttgggtacggacggtttgtggccatggtcgatcgagaacagggggcccccctactcaagcaggctctagcactgccaggtggtgcagctaagcggcgtagcgcgtttggcgccctgtttcgccaaaaagctgctgccggagaagcccccgttttggctcgaggcgcttggtggcaaccagccgaacctccagagcctgtgctgcagcagaccgcaggccagatcaaggccgctcgccaagccaggctcaacgatgaaagaacagcacgtagggggggaaaaccacccgcaccttcacgcgccgatcagagaagggcagaacaggcccagagactggctgatcatgaggcacagcgcgccgcaagaagatctgcaggtgctgctccaggagcagccggagcagatagaccttggctcttgtatgtgaaacagtttgccttgctgctaggaattgctgccggattgaagagcgagctgattctgtacgccggcgtgattcatttgttgctgcgcattaagagtcgggatcgcggttggtgggagttctggctcggcatcggcctgctggttctggtgaatgccctcctgttcaggaggtga

SEQ ID NO: 13325 - RNA, 1944 nt, synthetic construct
  source 1..1944: mol_type = other RNA
atgactgagaggatgccgacaagagcagacttgatcgaaaggataaggacgtcgtccaaggacgcagtggtgctccaggagatgcagagactggggttctggccgcaaggcgaggcacaacctacccttgaggcagccttgattgagcgtgaggcagaggtcacccaggccttgcaaggtctgcaggagcggctgcgagtgattcagaaccctgaagcggctctgcaggcaatgcggaagcagcgcatgcaggaaagcctcatacgccgcgaagccgccgcgcaattgagagaacagcgccggcacgagcgagccttacgatggcacgaggctcgcaaaacccaggtgccttatctgggtgctggagtctccggggggctgagtctgccaactgctcaggcccccgctcgtgctctacaagccggtctgccctcactcgatactcccatggccttggcccaagcgatgggcttgaccctcccggagctgaagtttcttaccttccatagggaggttgccagaacgcatcactacaggcgcttcctattgcccaagaagactgggggacatcgtaccatcagcgcacctatgccacgcttaaaacgggcccagtattgggtgcttgacaatgtgttagcccaggtcccctgtcatgcagccgcacacggcttccttccagggagatctatcctcacaaacgccaagccccatgtggggcaggatgtggtgatcaatctcgatattcagaacttcttccccaccatcacatttcctcgcatcaagggggtatttcagggtctgggataccccgaaccagtagcaactatgctcgccctactttgctctgaaaatccatgtgacgagctggtagtggacggcgaagccttttttgtcgggggcaagggcagagacagggtgcttccacagggcgccccgacatctcccatgctgacaaacgttttgtgccgacgtatggaccggcgtcttcagggcctggcccacaaactggggttcacctacactagatacgccgatgatcttacattttcagggtctggagaggctgcagccctggttggcaaattgctgcggcaggtcagacacgtgctcaaggacgaaggctttacccctcatccagccaaacagcacgttatgcgggctggcgcaaggcagcaggttacaggcgtcgtcgtgaacgatcagcctagcgtaagtcgacaggaacggcgcaagctgagagctgcgctgcatagggcacgccatcagggcatggaagctgccacatggcacgaccaaccagccacccgggaggtattactgggctatagtcgattcgtcgcgatggttgatgccgcccaaggcgctcccctgattgcacaggctatgagattacccggaccagccgctcctccaagaagcggagatgccgccgcgtttcggactaaatcagccgagggtcaagccccccaactgaagcgcggatcctggtggcaacctgccgaaaggcccgcaccagttctccagctcaccgatgcgcagaggaaagacgccaggagggacaagagagcggctgccctagggcaacctagccctgctgctgtgggaggagctccctctcgagctgcagtggcgagtgccggtcttgcaggcactcctgttccaggggccacaggaggtgcaagcgctgcttcagctaggggagcagctgatgcggctcaccccgcaaatgcaacgaaactcccaccgcctccttgggcccagtatggatttcagtccagcctgctgctgttcctgtggattgctggtgtgtcctcctttgtggtggtcgggggattcgcacacatggccttccggttcaagaaaagagagggcggatggaatggcttttggaccggtctgggggtgctactcctcatccagtggctcgtccgggctctgacgtga

SEQ ID NO: 13326 - RNA, 1872 nt, synthetic construct
  source 1..1872: mol_type = other RNA
atgacagccaggcagcccactagagctgagctgattgagcggatcgccgcgtcctccaaagatgctgtcgtgctggacgagatgcgcagatttgggttctggcctgccgacgcaggcaagccatctgtcgaggctgccctgattgagcgtgaggcagagctggtccaggccctgaatcgactccaggcagtggtgagagagcgtggtgaccccgtagccgctctcaaggctatgcgcaaagcccggatggctcaagctcgggaacgtcgagagacgaccgcccaggcacgcgaacagaaacgacacgaaagggcgctcagatggcatgcggcaagggctagtcacgccgggtacctgggacaaggtgtgtcgggcggtctacaggctcctacagacgcggaagctgctttggccaggctccgcgaaggagggctcccattgttggccacaccgcaagctctcgccgaggctatgggcctgtctgtgccagagctgaagttcctgtcattccatcgagaggtggcaagagtgactcactatcgccgctttgcactacccaaaaaaaccggcggtgaacgcattatatctgctccaatgccccggctgaagcgggcacagtattgggtgctcgacaatgtcctagcaaaggtcccctgtcacgccgccgcacatgggtttctccccggaaggagcatcgtaactaacgcagccccacacgcaggccaaggtgtggtgatcaacctggatctgaaagatttctttccaggggtggcctaccccagaatcaagggcgtgttcgccgcccttggctaccctgaggctgtagcaactgtgctggcactgctgtgcagtgagaacgtaagcgacacccttgaggtcgatggggaaccgttccacgtaggcggaacggcccgtgaacgggttttgccgcaaggcgccccaacaagcccaatgttaacaaatatattgtgccgtcggctcgatcgacgccttcagggcttagctgccaagctgggctttcgctataccagatacgcagatgacttgactttttccgctagcggggatggtgaggcgcttgtcggacggttgctgcggcaggtgcaccatgttctcaaggacgagggattcactccacatccagataaacagcacgtgatgaggaggggggcgagacaggaggttaccggagtggtggtgaatgatgggcctagcgtttccaggacacagagacgggcgttaagggccgccctgcatagagcaggtacagcgggtggcgggcaagctacatggaacggaactcccgcctcacgggacacgctgcttggacaggctcagttcgtgagaatggtgaacgcaacacagggaggcaagctggtcacagccgctagggcccttccggttggtggagaagccgttaggccccgggctgctgacacctttagacaacgctcagccagaggcgaagcccccttacgggcagaaggggcatggtgggttcctgcccctaggcctgtgcctcagctgcagctgaccgcaggccagattcaagcgcagaggcaggccgctagacaggcacgacagcaagccgctcgagctacggaacctgcccctgctgcaaccgaaaccgccaccgagactgctaccgccgaaggagacacaccagtccttacccctccccaggttgccgtaccctgggtgacttttggaatccaggccggcttaatgatgctcgtcgccgcgagatctggatccgcactggcccttctgctggcaagtggctggttgggctatgccctactccgcaggaagttcgggtggctgaggtacgctgttgcccttgcggtcctcacccgcctgaccttggggtga

SEQ ID NO: 13327 - RNA, 1923 nt, synthetic construct
  source 1..1923: mol_type = other RNA
atgtcgggagagagacagcccaccagggccgagttgatcgcgaggattgccgccagttccaaggatgccgtcgtgctcaaagagatgcagagaagtggcttttggcctgctgatgccgccgcccctacagttgaagcagccctaatacagcgcgaggccgagctagtgcaggtcctcaacaagctgcaggccgaactgcgggagaagggagatcctcagggggccctgaaggcaatgagacagcagagaatggctgaggctcgtgaacgtcgcgaggccactgcccaaaagctggagagggagagatacgaaagggcagttcagtggagggagcggagccgtcacgagatcgggtacctcggccagggggtttctgcagggttgcaggctcgtgctgacaacgcggggagccacgaaaagcttcaaagagagggcctgcccctcttagacacaccccaggccctggcagacgctatgggagttccagtagcagaactgcgttttctcgccttccaccgcgaagtggcccgcactcagcactatcgacgcttctcactgcccaaaaagaccggcggtgttcggaccatcagtgccccgatgccacgattgaagagagcccagtactgggtccttgataatttgctcgccaaagtaccggtgcacgcggctgctcatgggttcctgccaggaaagtctattgtgagcaatgccgcgccacatgtaggacaagccgtcgtcatcaatctggatctaaaggacttctttccttccgtcagcttcccccggattaagggagtgtttcgagcattgggatatggcgaagccacggctacccttcttgctttgctgtgctccgagaatgtgtgcgatgaactgcaagtggatggggagcgcttctttgtgggtcgcactgcccgggagagggttttgccacaaggggctcccaccagcccaatgctcacaaacatcctctgtcggacgcttgataagaggctccagggcatagccacaaagcttggatttacgtatacccggtacgccgacgacctgtccttcagcgcttcaggtaacgctgccggcctcacagggcgactcttgagacaggtgcatcacattctgaaagccgagggttttactcctcatccggacaaacagcacgtcatgcatgcaggtagacggcaagaagtgaccggcgtggtagtgaaccagcagccggcagtctcacgggagcagagaagagctctccgcgcggctctgcatcgggctaagcataaagggctggacgccgcaacatggcaaggcgagcctgctgcgaggaacgtgctgcttggctatgcacagttcgtcgccatggtgaatgcacgccacggtgccccgctccttgctcaagcaaaagcccttccctctgcagccactccagcagccaaagtgcccccttcacagttcaggcagcatgccgcagctggtaaggcacctcctcgagcgaatggcctgtggtggcaacctgcccccaaacctgaacccgtgctgctgaaaactgcggggcagatcaaagcagaaaggagagcccacctggccgctcaaagggcagagagagacgcggcccgcaaagctgcggaaatagcctcttccccccggagggctttacgagcagcgatgcaggctgcggctgcagctccagctccagaaggcggagcacctcaggaaacccacgccccactgctgccactgattcggtggcccttagttattgcacaggccgccctattggtatacttaagtgtcaagctgaaatcccccggcctctttttagctggcggactgtggctaggctggcgagtgatgaggcgcaagtttggatggccatcttacttcctggctctgttcgttatcggctttgtggcagggatcctgcacttatga

SEQ ID NO: 13328 - RNA, 1893 nt, synthetic construct
  source 1..1893: mol_type = other RNA
atgtctgaccgacagccaaccagggctgaattgatcgcgcggatcgctgctagtactaaggatgccgtggtgctccaggaaatgcagcggctaggcttctggccccagggttctggcgagcctggaattgaggccgctctgatcgaacgggaggctgcactggtgcagcgcttgaacgccctgcaggcggagttaaagattgtgggtgatccccaggcagccctgcaagctatgaggagagagcgtatggctgcagccaaagctcggagagaggccaccgcacaggctagagagcaacggcgccacgaacgagcactgcaatggctggaacgctcccgcgacgcaataggccatctggggcacggcgttagcgcaggtctttcccctcagcccctcgaagccgacgataggcgacgcctggaggccactggtcttccgtgtattgatactcctctcgctttggcccaggcgatgggtataggggtagccgagcttaagtttctttgcttccaccgtgaggttgcgcgcacccagcattatcgtaggtttgggatccctaagaagaccgggggagtccggacgatttctgcgcctatgccacgcctcaagcgagcccagtattgggtcttggacgcccttcttgccaaggtccccctccacgctgctgcccatggcttcgttcctgggcgttccatagtcagcaacgcggcaccccatgctgggagagacttggtgatcaacctggatctgaaggacttcttccccagcatcacgttcgccaggattaaaggggtgttccggcgcctgggataccctgagcagatagcaactctgttgggactcctttgctctgagaatgtgtgtgacgagctgcaggtggatggagagagattttacgtgggccgtaccgccagagaacgcgtcttgccgcaaggggcaccaaccagtcccatgctgacaaatattctgtgccgacggctggatagaagattgcagggcgttgcggccaagttgggctttacatacactcggtatgctgacgatctaaccttctctgcctgtggcgaggctgctggtaggagcgataggctcctccggcaggtccactttatcttaagggatgagggcttcaccccacatcctgacaaacaacgggtgatgcgggctgcctcccgacaggaagtgacagggatcgtagtcaatgagcggccgggcgtgagcagagaacagagacgtgcactgagggcggcattacaccgggcccagcaaaaaggaatggaagctgccacttggcaaggccagccggctaggaaggacgtgctggtgggatttgctcaattcgttgccatggttcagcccgcgcaaggacaggccttactcgctagggccaaagcactgccagccaccggaacaaaagctgccgccgcagccccatcaaggtttagagagttcgccggacagggaaaggcaccgccaagagctgctgggccttggtgggaacctgccccaaaacccctccccgttctgcagaagacggcaggccagctgcgagaggaacgcagagccaggctggccgaagctagagcgttacgagaaggtagacctcctcgcactgctgccaccccaacagcaccttcggcctccggtagccccccatcaagtgccacagcacccacaggcccaaatgcaaaagccggacccgtcaactgggacgcctggctactccagctgggcatgatggtgctgatgagtgtgcgcctgcactcagcggtctttttcctactgggggcaatttggatgggatcaaggcttgtgcgcaggcggtttgggtggccatcctttatcgccgtacttctcgccgtaggcctcgcagcagagtggctgaaaccctga

SEQ ID NO: 13329 - RNA, 2016 nt, synthetic construct
  source 1..2016: mol_type = other RNA
atgagcaaccctcagcccacccgtgccgagattttcgagagaatcaagcagtcctctaagcaagaagttatcctcgaagagatgcaacgactcggcttttggcccaggtccgaaggacagccggaagtggctgctgacctaattcagcgggaaggggaactgcaacgagagctcgcggaattgaataagaagctggcggtaaagcggaaccctgagcgcgctttacgcgaaatgaggaagcagaggatgaaagacgccagagacaagagagaggtcaccaaacgagctcaggcccaacagcgttatgacaaggccctgctttggcacgaaaaaagggcatctcacgttgcttatctgggccccggcgtgagcgcatccttgcatgagaactcttctgctacccaggagcagggcgataagggcaaacccaaacgtgccagagatagggccgtgcccgatcttcagcgactcaccctgaacggtcttcccgcacttatttccgctgcccagctggcagaatctatgggcgtttctgtagccgagttaagattcctctcttttcaccgagaggtcgcccgaacgaaccactatcacagctttacactgcccaagaagactggtggggaaagactcatatcggctcctatgccgcggctcaaacgcgcacagtactgggtgcttgataacgtactggcaaagatgcccgcgcacgatgccgcccatgggtttttagcggggaggtccatcataagcaacgctaaacctcacgccggacaggatgtcgttattaatctggacgtgaaggactttttcccctcaatagcttttgggcgcatcaagggggtgtttaggcagctggggtatggcgagagtattgccacagtgttcgccctcttgtgctccgagaatcgtgcgcaggcctggcaagtcgacggtgagaggctgttcgtaggaggaaaggctcgcgagagggtgttaccgcagggagcacccacttcacctatgctgaccaacctgctgtgtcgcagaatggaccggcggctgttaggactggctaaacagctcggcttcgtttacaccagatatgccgacgacctaaccttcagcgcctcaggcgaacccgcaagggataatgtgggcaaactcctgagcagggtgcggtggatcctacgggacgaaggatttacccctcatccggataaagagcgggtgatgaggaaaggccggcggcaagaggtgactggattggtcgtcaattccgatacgcccagtgttagccgagagactcgccgcagactgagagccgcactacatcgcgcgtcccagccagatgccgcctcaaagccagcacattggcagggtcacactgcccagcctagtcagcttctggggctggctaccttcgtccaccagatcgaccccaaacagggcaaaacgctcctggccgatgctcagcagctcatgcgcagcccaatcgacagagccaacgacgcagcgaagagtgctagcagggcagatgcagcccagcagtcattccgagtactggccgcagccggaaagcctccagtcttggcagatggcaaaaattggtggcagcctgcaccacccgcaacacctgtgctggagaagacagatcagcagcggagagaagagcgtcaggctactagacgtcaacaggcagcggccgcagctccaccaccaagttcaacaagaaggaacgagaggccacaacaagccgcccatgaacaacagggcgacgcccagcctcaaaatgaggcccctccacgctttgaccctgaccaatacgctccgccaccacggaatgtcatgacttactgggcccaaatcgctatcagttttttccttgggtcgattctccataatcggttgattacaattttcgcgatggtggctgtgatagctttgtactacatgcggcgccagcgctgggatgttttcatggggatcctggtggtggctacacttctgggttacttggtgagaggtatgggatga

SEQ ID NO: 13330 - RNA, 2022 nt, synthetic construct
  source 1..2022: mol_type = other RNA
atgtcgaacccacagccgacccgcgcagaaatctacgaacggatttcacagtcctccaagcaggaggtcatactcgaagagatgcagcggcttggcttctgggccaaggatagcgggcagccccaactggcagaagaactcatccgtcgtgaaggcgagctgcagagggagctgtctgagctgcacaaacagctagctgtcagacgtgacccagagcgggccctgagagagatgcggaaacaaagaatgaaggacgctagggacaagagagaggttactaaacgggcccaggctcagcagcgttatgaaaaggcactcgcttggcacgacaagcgggcaactcacgtgggttacctgggaccaggtgtatcagccagtctgcaggatgccgacgagcctatcgctcagagcgataaaaaaccgaagcgagcacgagatcgagcagtgccagatctgacgaggttagctgtcaatggcttacctgccctgacctcagccgctcagctcgcacagagcatgggggtcagtgtagcggaactgagatttcttagctttcaccgggaagtggccaggtcccaccactaccactcattcacactccccaagaagacaggtggagagcgccttattagtgcccctatgccgagacttaagcgtgcgcagtattgggtgctggataacgtgctcgcaaagatgcctgcacacgatgctgcgcatggctttctcgccggccggagtatcatctccaatgccaaacctcatgccgggcaggacgtcgtgatcaatctcgacgttaaggatttttttccctccattgcattcgggcggatcaaaggcgtctttagacagttgggttatggcgagaaaattgccacagtgttcgcactcctgtgttcggaaaacagggcccaagtgtggcaggtggatggcgagaagctgttcgtcggggggaaggcacgagagagagtcttgccccagggagccccaacatctcccatgttaactaatcttctatgcaggcgaatggataggagattgcaaggcttggctgctcagctcggattcgtttatacacgatacgccgatgatctaaccttctccgcatcaggcgaggcggcccatgacaatgtgggcaggctgctcggtcgtgttaggtggatactgcgcgatgagggctttactcctcatccagacaaggaacgggtgatgcgcaaaggtaggcgacaggaagtgaccggactcgtagtaaacggggacacgccaagcgtctctcgcgagacaaggcggagactgagggcagccctgcatagggctagccaacctggcgctgctgcgaaacctgcgcattgggaaggtcatgccgcccagccctctcagctgttggggttggctacttttgtgcaccagattgacgccaggcaagggaagcctctgcttgccagcgcacaacagcttatgcgcaatcctatcgacagggccaacgacgcactgctggctgcatcccgagccgatcgcgcaacaactaccaacgccggagatttccgccgcttatctgctgcaggacatccccccgtgagagctgacggcaaaacctggtggcaaccagccgagccgtcagctccagtgctggaaaagaccgaccagcagagacgcgaggaccggaaagccgcgagacaaagcgctcagccacagccccagcttcagctgcagccccaaaccgggggaaacgcgaatggaaccgccagaacgagccagtccggaaatagacagcagaacgcttctcagactgccccccaatctgaccctcccaaggagcggggcacacggaacatgatggtgtattgggcccaaattgccatcacctttttcctaggcagtattctccacaaccggttaatcaccatattcgctatggtagccgtcattgctttgtactacatgcgcaaacaacgctgggacgtgttcatggggatactggtggttgcgactttgctggggtacctggttcgcggagttggatga

SEQ ID NO: 13331 - RNA, 2037 nt, synthetic construct
  source 1..2037: mol_type = other RNA
atgagcaacccacagcctactagagccgagatctacgagagaatagcgcagtctagtaagcaggaggtcattctcgacgaaatgcagcgcctgggcttttggcccaaagccgaaggccagccacaactggccgcagagctgattcaccgtgagggcgagctccagcgggagctttctgaattgaaccagcagctgggagttcggagagatccagagagggcgttgagggaaatgcgcaagcagaggatgaagaacgctcgggagaaacgtgagacaaccaaaagggaacaggctaagaagagacacgagcgcgctcttgcatggcacgcaagacgtgcttcccatgtcggttatttgggacctggagtgtctgctgcactcgttgacgggccactcacccagcaagaacaggaacagaccagcaggcgaacgagggaccgagccatcccagatttgcctagactcgcccggcatggtctacccgcattatccagcgccgcacagttggctgagagcatgggcgtctctgtggcagagctgcgctttcttagtttccatcgcgaagtggctcgcacacaccactatcactccttcacactccccaaaaaaacaggtggcgagcgcctcatctcggccccaatgcctaggctgaagcgggctcagtactgggtactggataacgtgctgaataaaatacccgcccatgaagccgcccacggtttcttagctggccggtctatcataagtaatgctgctcctcacgcgggacaggatgtggttatcaacctggacgtgaaggatttctttccaagcattgccttcgccaggattaagggagtgttcaggcagttgggttatggtgaaggcgtggcaacagttctggccctgctgtgctcagaaaaccgggcgcaagcctggcaggtcgatggagagaggctgttcgtagggggcaaagcgcgtgaaagagtgttgccccaaggcgcccctacatccccaatggtcaccaatctgctttgtcgtcgtatggatcggcggctacaggggctcgctagacagctggggttcgtgtacaccagatacgccgatgacctgacgttttctgcatcgggcgaagccgctagagatcatgtggggaagctgctgggccgggtcagatggattctccgcgacgagggctttaccccgcatcccgataaggagcgggtaatgcgaaaaggcagacgccaagaagtgactggactggtggtcaacggcccttcacccagcgtgagtcgcaagactaggcggcgattgagggccgccctgcatagagcctcaaggagtgctgcagacgcaagtacctccactcaggctcattggcagggacagcaggcgcaaccgagccagttactggggctcgcccagttcgtgcaccagattaatgccagacaagggcgccaactcctagccgacgcccagcaactgatgcggtcccctcttgaccgggccaatgacgccttgctagcggcctccaggcaggatcagagaagcgcaagcagctcctcacccgcatcttttcgcgcattagctgcagcgggaagggctcccgttcgaaccaatggcgagccttggtggcaacctgctgccgctcttgagcccgtgctcgagcagactgacttacagaggcgagaagctcgccaacttgcccgacacggggcctcaagtgcgtctggagcctcctctaataggagatcctccagtgacagccactttgggagaggaccgcagtcagggtcatccaggcaagaggatcaggggaacgcctctggtcgctttagcttcgacgacgcagcaggacgggacgatcaaggagctagcaaagacaagccagcaggccgactcggtacgtattggatgcagatggttatttgcttcgttatgggctcaatcctgcacaatcgcctgatcactatttttgcaatgatcgctgtcatcgtactttactacatgcgacggcagagatgggatgtgtttatgggggtactggtcggcctgtga

SEQ ID NO: 13332 - RNA, 2022 nt, synthetic construct
  source 1..2022: mol_type = other RNA
atgtcggctccacagcccacacgggcagagatttacgaccgcatcaagacttcgtccaaacaggaggtgatactcgaagagatgcagcgcatgggcttttggccgcagggggaaggggaacctcaagtcgcagcggaccttattcagcgagagggtgagctacagcgggagatgtctgagttgagagagcagcttgcagtccgcaggaatccagaacgggcactgagagaaatgcgaaagcagcgcatgaagcaggccagggaccaacgcgaggaaaccaggcgtagacacgcccaggagagacacgacaaagccctggcctggcatgggacaagagcctctcacatggggtaccttggacccggagtctctgccgctctacacgctcccggacaagatggcagtgccgacggtgcctcaggacgcaaacctgcaagggagagaagcgctccagatctccggcggctagccctgaacggattacccgccctgacaagtggagcacagcttgcagaagctatgggggttagtgtggctgagctgaggttcctgtctttccatagagaagttgcccggacccatcactatcattcctttacactccctaagaagacagggggcgagagacagataagcgctcccatgccccggctgaagagagctcagtactgggtgctggacaatgtcctggcaaagatgcccgcccacgatgctgcccacgggtttctggccggcagatccattgtgagtaatgcaaggccccacgctggccaggatgtagttatcaacctggacgtgaaggatttcttcccctcaatcgcttttggcaggatcaagggggtctttcgccagctgggctacggcgagggaattgcgactgttctcgccctgctttgctccgagaatagggcccaggcctggtccgtggacggtgaaaggctgttcgtgggcggtaaagcacgagaacgagtgttacctcagggggcgccgacctctccaatgttaaccaacctgttatgccgcagactggatcggaggttgcagggcctggcggcacaattgggcttcgcgtatacgcgctatgccgacgacctcacctttagcgccagcggcgacgcagcacgtgatcatgtcggcaagctcttgtcccgcgtgcgttggatactgcacgacgaaggcttcactcctcatccggataaagagagggtgatgcgtaaggggcgtaggcaagaggtaactggtttggtcgtcaacggaagtcagcccggcgtgagcagacagatgcggcgaaaacttagagcagcgctacaccgagcatcccacgccgctcctggagatgcaccagctgcccattggcaggggcaggctgctcaaccctcacaactgctgggacttgctcagttcgttcagcaggtggacgcccaacaaggaaaagccctgctggcgtccgccagacaactcgtaagggatccagtggcccgggtaaatgacgctctccgggaagcagccgctgaagaccgacttgcagccgcgtcagaggccgctgtttcctttcgccaggccgctgccagtggtcgttcacctgtgagggcgaatggggagggctggtggcaacctgaacagaaagccgccccagtgctggaacagaccgatcagcagagacgagaagcccggcagcaagctaggcggcaatctcttgcagctgcctcacccgcgagcccagagactgcacctgggaacggtgctcgcagagtccagggtgttcctgcagagggcgtgtctccggctcagcctggtaaagccccagaggcttctggactcccaccagtccgacggatgctcaggtactggagccagatgggactgtgttttctgctcggaagcattctccataacagattgatcacgattttcgccatggtgatggtgatcgccttgtattatatgcgcaagcagcggtgggatctgttcgcaggcgttctcgtgatcgccaccttgttagggtacctagtacgcagctga

SEQ ID NO: 13333 - RNA, 2010 nt, synthetic construct
  source 1..2010: mol_type = other RNA
atgtcgcagcctcagcccactagagccgaaatctacgagcgcattaaagccagctctaaacaggaggtaatcctggaggaaatgcagcgcctcggcttttggcccaaagacgagggacaaccgcagttggccgctgcccatatccagagggaaggcgaactacagcgggaactggccgaactgcgacagcagatcgccgtgagacagaatcctgagcgggctctgcgccagatgagaaaggagcggatgcagaaggcgttggcccagagggaagagactaagcggcgccaggcccaggagcgacatgacaaggccctcgcctggcatgctaggaggtctacccacgttggctaccttgggcccggggtcagtgctgcactccaagacgccgcgagagacggaaccgagcgtaggcaagccgatccccaacgccttgccagacacggactccctcagctcgccgatgccgcacagttagcccaggcaatgggaataactgtggccgagcttcgcttcctagggtttcacagagaggtggcgaggacacatcattatcatagctttaccctgcccaaaaagacaggaggcgagcgccttatatcagccccaatgcccagactcaagagagcccagtattgggttctggataacatcctggctaaagtgcctgcacacgatgcagcacacgggtttctggccggccgtagtatcgtgagtaatgctgcgccgcacgcaggacacgacgtggttataaacctggacgtcaaggatttcttccctagcatcgcatttggcaggatcaaaggggtgttcagacacctgggctacggcgaggccatggccactttgctcgctctcttgtgttccgagaacagggcccaagcctggcaggtggacggagagaaattgtttgtagggggaaaggcccgagagagagtgctgccacaaggcgcccccacctctccaatgctgacgaacttgctctgcaggcgcctagatcggcgactcctgggcttagcccgacagcttgggttcgtgtatacccggtacgccgatgacctgacgttctctgcgtcgggagaagctgccagggacaacgtcggacgactgctgggtcgggtgagatggattctccgggatgaaggtttcacaccccatcccgataaagaaagagtcatgcgcaaggggcggaggcaggaagttacagggcttgtcgtgaacgcagacaagcctggtgtgtctcgccagaccagacgccgtctgagagcagcgcttcaccgcgctacccaagcaggcaccggcttaccaggccagtccgtacagcctgcccaagtcccccactggcagggacaaccagcccatgcttcacagctgttggggatggcccagttcgtccaccaggtggacccagttcagggcggtcccctattggcacaagcccggcagctcacacgtagccccgttgaccgggcgaatgacgcactgctggaggcatcaaggcaggatcgagcagctgctagggctaaaccccctgccaatgctactttccggaggttggctgccggtggtcaagctccagcgttagccagcggcaagccatggtggcaaccagcagccccagcagctcctgtgctggagaagactgatcagcagcggcgggaacagagacaggaggaacggcaagcggctaggcaagctgcaggtccggctccaggagcagcttccacactgccagctgcaagcacatcccctagcccttcacctagtcctgctgctcccgatccgaatccaccggcttccaagcgtcctcccatggctgggctgcttacttattgggcgcagattgtcatttgctttctccttggtacggtatttcaggcccgtctgatcaccttaattggcattgtgctggtggtgattctgcgctacaggagaatacagcgctgggacgtcttcggagccgcaatggtcgtggcagtactggttggcctcgggttacgactgtcctga

SEQ ID NO: 13334 - RNA, 1896 nt, synthetic construct
  source 1..1896: mol_type = other RNA
atgtctcagccccagcccacccgcgctgagatatatgaaaggatcaaggcctcctccaagcaggaggtcatcctggaggagatgcagaggctcggcttctggcctaagggtgagggtcagccacagctcgctgctgcccacatccagcgggaaggcgagctgcagcgcgaattggcagagcttaggcagcagatcgccgtgagacagaaccccgaaagagctctgcgccagatgaggaaagaacggatgcagaaagctcttgcacaacgggaagagacaaaacgtcggcaggcccaggagcgtcacgataaagccctcgcatggcatgcccggcgttcgactcacgtgggataccttgggccaggcgtaagcgccgccttacaagatgcagcgcgcgacggtactgaacgacgccaagcggatccccaacggttagctcggcacggcctgccacagttagcggatgcggcccagttagcccaggccatggggattacagtggccgagctgcggttcctcgggttccacagagaggttgcccgaacacaccactaccatagcttcaccctgcccaaaaagaccggcggcgaaaggctcatctcagctccaatgcctaggctgaagcgcgctcagtactgggtgcttgacaatatcttggccaaggttcccgctcatgacgcagcccatggattcctggcgggacggagtattgtgagcaatgccgctccgcatgccggacacgacgtcgttataaacctggatgtaaaggactttttccctagcatcgccttcggacgcattaaaggcgtgtttcgacacctcggctatggcgaggcgatggccacccttctggctctgctgtgctccgagaaccgcgctcaagcatggcaagtagacggcgagaagttgtttgtcggggggaaggcgagagaacgcgtgttgccacagggtgcgcccacgtctccaatgctgactaatctcctttgtagaaggctggaccgtagactactgggcctggcaaggcagttggggtttgtgtatacacgctacgccgacgacctgacatttagcgctagtggcgaagccgcccgtgataacgtgggaaggctcctgggacgagttaggtggattctgcgcgacgaaggcttcaccccacacccggacaaagagcgagttatgagaaaggggagacggcaagaagtcacgggcctggtggtcaatgccgataagcctggggtgtctagacagacgagacgacgcctacgcgccgccttgcacagagcaacccaggctggtactggtctgccgggcctacctggacagagcgtacagcctgctcaggcaccccactggcaaggccagccagcacatgcatctcagctcctcgggatggcccagtttgtgcatcaggtcgatcctgtgcaggggggccccttgctagctcaagccagacaactcactaggagtcccgtcgatcgggccaacgacgcactgctggaggcatccaggcaggatagagcagccgcacgtgccaaaccccctcaaactccacgatcaggtgcgtggcagcctgctgggagacatcttaggtggccagctgcatctcatggaggaagccgaccccaccctcaaaggccgtgctggaggcgacctaccagttcaggggcaagtagcgctaggaggaatggtcgcccaccagggaggcggttagccttgccaccggcatcacaggctccctgccctagacaccggcccttacaccggcatcggcaccatcgaccccatcggacacgcattagacctcaccgtaaaggaaggcggtggcctgcatgctccccaaccggaagacgctcaagatccgcttcttgttgggccccgtgttccagacccggatga

SEQ ID NO: 13335 - RNA, 1983 nt, synthetic construct
  source 1..1983: mol_type = other RNA
atgtcccagccgcagcccacaagggcggagatttacgagaggataaaggcgtcctctaagcaggaggtgatcctggaagagatgcagcggttgggcttttggccgaagggcgagggtcaaccacaactcgcagccgcccacattcagagagagggcgagctccacagagaactcgccgaactgcgaaggcagcttgctgtgcgacaggaccccgagcgtgctctaagacagatgcgcaaggaacgcatgcagaaagcgctggccaggagggaggaaactagaagacgccaggcccgggaaaggcatgacaaagccctggcctggcacgcacgaagggatacacacgtgggatacctgggccctggagtatcagccggactgcacgagccccgcgatgaagctcaacagcctgcagctagagatcgccggcaggcagatccccagcgattagcccgacacggcctacctgagttggccgacgcagctcagctagcgaccgccatgggcatcaccgttgcagaactccgttttctgggcttccacagggaggtggcgcgaacccatcattatcacagcttcacactgcccaagaaaacaggcgggcagcgcctgatctctgcccctatgccccggttaaagcgcgcccagtactgggtgttggataatatactcgccaaagtccccgcccatgacgccgcacatggcttcttggccggtcgttccatcgtgtcgaacgctgccccccatgcaggccacgatgtggtcatcaacttagacgtcaaagacttctttccctccattgcctttgggcggatcaaaggcgtctttcgccaactcggctacggtgaggctatggccaccctcctggccctcctgtgctcagaaaatagagcacaggcatggcaggttgacggggagaagctgtttgtaggggggaaggcgagggagagagtcctcccacagggagccccaacttctcccatgctgacgaacctgctgtgccggaggctggacagacggctgcttggattggctcgtcagcttggattcacttatacccggtatgccgatgatttaacgtttagcgcctcaggacaggctgcccaagaccacgtgggcaggcttctggggagagtgcggtggattctccgggacgaaggtttcacacctcaccctgacaaagaaagagtcatgcgcaggggtcggaggcaagaggtgactggcctggtcgtgaacggagagcagcctggggttagccgcgagactcggagaaggttgcgggcagcattacacagagctgctcaggcagttcccgggcaacggccacattggcaagggcatgccgcgcagcccagtcagttgctgggccttgctcagttcgtgcatcaggttagaccggcccaaggaggggctcttctccgacaagcgcgacaactattaaggagccctctggagcgcgctaatgaagccctgatcgaggcgagtagacaggatagagcacgcgcccccgaagcccaagctttcaggcagagagcagctgctggtcaggcacctgcactcgccagcggaaagccatggtggcagccagctgcaccagcagctcctgtgctcgagaagaccgatcagcagcgccgggaagagcgtcaagagcagcgccagcagcagaggcaggaacagcagcaggctgccagagcacaagcacacgctgccgctgcaccagctcctcaagctgcgagtgccccagcccttccacaagaacctgctccacctcccccggccaagtctgctctgccaggacttctgacatattgggcccagattattatatgtttcgtcctgggtactgtgtttcagacgcggctggtaaccctaattggcatcgttttgaccgtgatactcaaatggcgacgcctgcagcgttgggacgtgttcgccggagccatggtaatcgcggtcctgctggggcttgtgttgaaaccgtga

SEQ ID NO: 13336 - RNA, 2073 nt, synthetic construct
  source 1..2073: mol_type = other RNA
atgcggtgttctaccttctggagactgctgatcgggagtactgccgccgccaccaaggaaggacgcatgtcacagcagagcacaagtcgggctctaacccgggcagaaatctatgaacgtatcaaagcatctagccggcaggaagtgattctggaggagatgcaacgcctgggattctggccgaaagccgatggggagccgagactggcagctgagcacatcgaacgagaggcccacctccagcgcgagttagcagagctgagagcccagatcgcagtaagagagaatcccgaaagagccctccgccagatgagaaaacagcgaatgcagcaggcccttgcgcagcgcgaggaaactaagagacagcaggccagactgcggcacgaaaaggcattggattggcatgcccggagggcgacacatgtgggttatctcgggcctggcgtgtcagccgcattgtcacctgctgctagccagggaagccccgctaggaaagctgcattgacggacgcccctaagcttataggctctggtctgccagtcctagaatcagccgctcagatggcccaagccatgggcgtcactgtggccgaactgcggtttctttcctttcatagggaagtcgcccgtagccaccattaccacagtttcaccctgcccaaaaaaaccgggggccaacggctaattagcgctccaatgcctaggctcaagagagcccagtactgggtcctcgataatatactgggtagagtgcctgcgcatgaggccgcacacggctttcttgcaggccggtctatcctcagtaacgcccttccccacctcgggagagacgtcgttatcaacctggatgttcgggacttcttcccctccatttcctttgcccgtattaagggagtgttcgttcgcctcggctacggagaggcagtggcgacagtgctggcactgttgtgttctgagaaccgggcgcaggcttggcaagtagacggcgaaaggttgttcattggtggaaaggctagggaacgagtactcccacagggggcacccacctcgcctatgttaactaacctgttgtgcagaaggttagaccgccgcctgcaagggttagccagccagctgggctttgcgtatacccgttacgctgacgacctcacctttagtgcttccggtgaggcggctagggacaatgtgggcaggttgctgggccgagttcgctggattctgagggatgaagggttcacaccacaccctgagaaggagcgcgtcatgaggaaggggcgtcgccaagaggttacgggggtcgtggtgaacaacgctcagccagggtcttcgaggcagatgagaaaacagctgcgcgctgccttacaccaagcagctcgacatggggccggtgcctctgataagccagcccactggcagggacagacagcacaggtcagccagctgctgggactagcccagtttgtgcatcagatcaatcccagacagggactcgcgctcgtcgaacaagcccggtccttaggaaagggcccgctggagtccgctaatcaagccctcacgcaggcggcaagggaggatagggagcgcaaggctgcctctgctgggtttcgtaggagcgcggcccaaggtcaagctccagtgcgagcgaatggtcagccctggtggcaacctgcaccggcagaaccccctgttttggagcagactgaccagcagaggagggagctacgacagcaggccagaagagagatgcactccctccaggcaggatcctccgcccaagcagcttcaggcgagcgagctatggcagaaggaccaactcctgcccccgctgtacagagtcaagccgcccatgagactgccccaccaacatcaggccccgctcttcggcgccttctgacctactgggcccaaattgtggtgtgcttcgtgctgggcaacctgttgcacacaagagtggtaaccctggtgggcatagcccttgtcgtggttctgtattaccggcggaaacagggttggggacttttcttcgctgctatggtgctggcagtcctcgttggcatggtgtttaaacagtga

SEQ ID NO: 13337 - RNA, 2025 nt, synthetic construct
  source 1..2025: mol_type = other RNA
atgagcacaccccagcctagcagggcccagatatacgaacggattaaagcctcctccaaacaggaggtggtcctggaggagatgcagcgcatgggcttttggcctaaggatgccggccagccacaacccgcagcagaactgatccagcgcgaaggagaactgcagcgcgagctgcagacactgagaaaccagttcgccgccaggaaggatccagagagggccctcagagaaatgcgtaagcagcgaatgcaggcagccagaacacagcgcgaagccacaaaacgcaagcaggctcaacagcgacacgacaaggctctggcctggcatcgggagagggcaacgcacatcgggtacttgggccccggcatcagtgcagggctacagacccctgcacaggacgaagccgctgttaaatcaacctccgaacgccaaagaagaggcccagatatggccaggcttgcacggcacggacttcccgagctgacttcaggggcccagttagctgaagctatgggcgtctccgtcgctgagctccggttcctttccttccacagggaggtcgctcgctctcaccattatcacagctttactctgcccaagaagacgggcggtgagcgcctgattagtgcgccaatgccacggctgaagagagcacagtactgggtgcttgaccaggtcttggccaaaatccctgcccatgacgccgcccacggattcctagcaggccgaagcatcatcagtaatgcgcagcctcatactgggcaggatgtggttattaacctggatgtaaaggactttttcccttctatagcatttggtcggataaagggggtgtttcgccagttggggtatggggagtctgtggcatctgtgttagccctgctgtgctcagagaacagggcccaagcctggttagtggacggcgagcgattattcgtaggcggcaaggcacgagaacgggttctgcctcaaggcgcgcccactagcccaatgttgaccaatctcctctgtaggagactggataggcgtctacaaggtctggctgcccagctcggctttgcttatacacgctacgccgacgacctcacatttagcgcctcaggagaggccgctcaggaacgtgttggtgcgttgctgcggcgtgtccggtggattctcagggacgagggattcaccccgcacccggacaaagagcgggtgatgaggaagggacgacggcaggaggtaaccggattggtggtgaacggtgccgccccctctgtgtccagacagaccagacgccaactccgagccgcgctgcatcaggctactcaagccggctctgctagtgccgccgttgcacctcattggcagggtcaggccgtgcaaccaagccagctgcttgggctagcgcagtttgttcaccaggtcgacgccaagcaaggacaggctcttctggcttccgcgcaacagctggcagcagtacccggtgcgcgcgtaaaccaggacttggctgatgctgctgcaagggataggcgcgcagctacaaggccgcttcctttcagacaggcagcggctgccgcacaagctccagtgagagccaatgggcaggcctggtggcagccagaagagaaagctgctcccgtgctggaacacaccgatcagcaacgtaaagagcaaaggcagcagttgcgtagagaggccgcagctgctcaaaccccagatgcggcatggggacgggctgaaccccataatagatcagcggaaagaaactccagtcaagagcctgctagccatgtcgcaccgaatcgagcatcgtcaagagccaacaaagggaaacctgctacgccacggagcctccccaggcttggaatgcacatcctgctcggcatcgcccaggggatgtctctgaataagcccctgatcaccgtgttcgccctcgccctcgccattactctctattacatgaaaaagcagcggtggggaatcttcattggcttagtcctggttgtgtcgtggcttgtgattgggtttactgcctactga

SEQ ID NO: 13338 - RNA, 1998 nt, synthetic construct
  source 1..1998: mol_type = other RNA
atggcggccccggctccgacaagagcagagttgctcgagcggatacgcgccagttctaaggacgccgttgttctggccgagatgcagagattgggcttttggcccagagacgaagccagaccggctccagccacagagctgatcgaacgcgaggccgctctcatgcgcgaattgggggagctccaagccgagctccacctacgaggtgatcccgagaaagccctccgggccatgaggcaggaaagattagcggcggcacgggctcaacgagacagtcgagcccgggagagagcccagcgacagtacgaacgggcccagcagtggcatgcccaacggcaacagcgcattgggtacctgggagccggggtttccgcaggactggaacgacccgcggatagacccgctgctcatgtcccactgcgcgctggacgctctgagcgactggctaggcacggactgccggcacttgacagcccacaagctcttgcccgggccatgggtgtagcattgggggagctgcgctttctcagcttccaccgcgaggtgggacgtcacacccactacagacgcttcacactgcctaaaaagtccgggggggaaaggctcatcagtgcccccatgcctcgtctcaaaagagcccagtattgggtcttggataatatcttggcaaaggtgcccgctcacgacgccgcacacggattcctacctggcaggagcgtcgtcggaaacgcccagccacattgcggccaggaagtggtagtgaatctggacgtcaaagacttcttccccagcataggttttggcagaattaaaggcgtgtttacgcatctggggtacgccgaacctgttgccaccgttctagccctgttatgtagcgagaaccgggccgatgaacttcaggtggatggcgagaggtggtttgtgggcggggcagcaggccaaagggtgttaccacaaggggcgcccacatcccccatgctcactaacctgctctgcagaagacttgaccgtcggctggccggcctcgctagaactctgggatttgcctatacccgatatgcggatgatctgtccttttcggcttctggagaggccgcacaacgcgtcggccctttgctaaggcgagtgcggtggatcttacgcgacgaagggttcgagccccaccctgacaaggaacgggtgatgaggaagggcgccagacaggaagtgactgggatcgtagtcaacgcggcccagccaggcgtgtctcgtcaatcacggcgcgctctaagggcagcgctgcatagggctagaaccgcaggtgcgggtccagctcactggcaaggtgagcccgcctcacgggagaggttgcttggctacgcccatttcgtgcagggggtaaacgaagcccagggtagggctctcgtccgagctgctgaagcccttcctctggccagcagggctgcagcatctcctgctgcagctcccggaactgcagcgggtgattttcgcattcgggcagcacaaggagaggctccagtgcgcgcccaaggaccttggtggcaaccagcctcaccccctgctccagtaaggcagagaactgatggggagattcgggaggccagggctgctcagcgacaagcagcagcggaagccaggcgtgcagctcaagcaggagcagcggttgcagcaccagctggacggagtggcaatggcagcccagctaggtcaggagctcctgcctcagttgataccgcccgtcaagctcggaatgctcgcgctgcaggcaggggtagaaaggccgacgcatctccgaggagccgcaagacctattggctgcagttattcgtggtgtggcttgcaggcacgttgtcggggtccgggtttgtgacagtgttcggcctgatctacctgcttggcgcctattgggcccggcaccagagatggtcccatttctccctggccatgctggccatcctcgttctggtccctgtgctgcgtagtattggcatactgtga

SEQ ID NO: 13339 - RNA, 2127 nt, synthetic construct
  source 1..2127: mol_type = other RNA
atggcagccccacagcctactcgggcagaactgatagaacggatcagggcctccagcaaagacgctgttgtcctggcagagatgcagcggttagggttctggcccggtggcgaatcacaacccgaaccggccgccgagttgatagagagggaggccgctcttataagagaactgggcgagctgcaggccgagttgcagttgaagggcgaccccgacaaggctctcagagccatgagacaggaaaggctggcagctgcccgagcccagagggaaagcaaggccagggagcgcgcccaacgccaatatgagcgggctctgcagtggcacgcacagaggcaacagcggatcgggtacctcggggctggtgtgtcagcagggctggagaggccagatggccaagcagcgcatgcccctctacgaccagctcgaccggaacgcctggcacaacacgggttacccgcccttgagcaccctcaggctcttgcgttggcaatgggcatcgaactgggcgagctccgctttctgagcttccacagggaggtggcgcgccatacgcactaccgacgctttaccctgccgaagaagagtggaggtgaacgccagattagcgctcccatgcctaggctaaagcgggcccagtactgggtgctggacaatatcctggccaaggtgccaactcatgacgccgcccatggctttctgcctggcagaagtattgttggtaacgctctgcctcattgcgcccaggacgtggtcatcaatctcgatgtcaaggatttcttccctagcattggctttggccgcattaagggcgtatttatgcgcctgggatacggcgagccagttgccacagtgttggccctcctctgctcagaaaaccgggctgacgaactgcaggtggacggtgagcggtggttcgtcggaggcacagctgggcagcgtctccttccgcagggagctcctaccagtcccatgctaacgaatctgttgtgtaggagactggaccgtcgactcactggcttggcccaggcattagggttcaactatacccggtatgcagacgatctgagtttttctgccagcggggatgccgcgcaaagagttggctctcttctccggcgtgtccgctggaccctgcgagatgaaggattcgaaccccaccccgataaagagagggtgatgcgcaaaggagcgcgccaggaggtcacagggattgtggtcaacgcccctcagcccggagtttcccgtcagtctcgcagggcccttagagccgcacttcatcgctcccacgccgagggacctgaccaagcacactggcaaggtcagtccgcctcacgggagcgtctgcttgggtacgcccacttcgtgcagggcgtgaatgaagaccaaggccgggcccttgtaatggccgcggaagctctgcccttagcttcccgagccgccgatggagtaggtgcagctgccgatgtcgacgctgttggtgcagatgctgccgcagccgcgactgacgcaaccacaccagccgctgcagtagggggctctagagccttagatgctgcagctgcggcagccggcacaacaatggcgatcgggctctttaaagccggaaaagccgacttcagagctcgggctgctcaaggattggcccccgttagggtggatggcccatggtggcaacctgctccgcctccacagccagtgcggcaacgaaccgacggagagatccgtgaggcaagagcggctagacgacaagccgctgcggaggctagaagagcagcacaacctggtgccgcagcacccgcaaatgccaggcatccaacccaggccggagcaagggcacaagccactgtggatgctgcccgtcaggcgagaagagggggaccaacagctccaggagccgatgaccggacggctgatgcagccaaaccccccaggagcgcgaaaacttattggatgcagctgttcgtggtatggctagctggctcttttaccagaaacggtctggtgaccgtgctggggttgatttacctcctcgggacctattggatgagacatcagcggtggtcccactttgccatcgccatggctgcgattgtcgctctagctactctcatgaggtcgctgtga

SEQ ID NO: 13340 - RNA, 2130 nt, synthetic construct
  source 1..2130: mol_type = other RNA
atgtctgctccgcagccaacaagggccgagttgctggaaaggatccgcgcatccagcaaggacgccgttgtgctggctgaaatgcaacgcctcggtttttggcctcagggcgagggagagcccaggttagctgctgagctgatagagagggaggccgaactgtctcagcagctcaatgccctgaggcaggaagcagcccagtatgccgaccctgagcaggcgcttaggcgcatgcgaagagagaggatggctgctgcacgggcccaaagggaagcgactcggcgacaacgtcacgaggcccgtcatgagcgggcactggcatggcacgcagaaagggatcgtcatatcggctggcttggagagggggttagcgctgccctccaacctgtggcacgcttacccgctgaccctgctccacgcagtgcccaaccaagtgccgaccaggctgacccctctgccaatgccgaacatgctgccgaaccagcaggtcaagcccgcgcagctacagctgatagaggtggggccgctagagcttcaaccccacgcaccgataggttggctcggcacgatctgcctctcctgactgatgcgcctgccttggccgacgcgatgggaatcggtgttcgtgagctccgtttcctggccacacaccgcgaggtgagcaggtccacgcattaccaaagattcaccgtcccgaaaaaaaccgggggcgagcggttgatttccgccccaatgcctcggctcaaacgcgcacagtactgggttctcgataatatccttgctaaggtgccggtccatgccgcggcccatggattcctacccggacacggaatcgtaggaaacgcacgaccccacgctgaccaggatgtcgtcattaacctggacctgcaggacttttttccctcagtgggccttccccgagtgaagggcgtcttccagcacctcgggtacggcgaagctgtggctacagtgctcgcccttctttgcaccgaggccagggccgacactctgaggatcgacggtgagacagtccacattgccggccgagccagggatcgggtgttaccacagggggccccttccagccctcagttgactaacatcctgtgtagacgtctggacagacgcttggcggccttagccgcaaccttgggcttcgcttataccagatatgcggacgacctatcctttagcgcctctggcgaagctgccgacagagtgggcgagttactgcggcgagccaggtggatagtgcgggacgaagggtttaccccccatccgacgaagcaggccgtgatgaggagagggagacagcagaccgtcaccgggctagtggttaacggcgcggctccgtcagtgtctagacggcagagacgccgattacgagccgccttgcatcgcgcccacacacagggtcttgctcaggcgcactggcagcagcagcccgttactcgtgcgcagctcattggctgggctcagtttgtgcaccaagtacagccagcacaggcgggcgccctgctttctcaagctcaggccctactacccgcagcacacgaagcgagcgccgctacagtgaatgccctcgcccaggcagcatcagccagaccagctggtggagggcgcctgagttttcgcgcagctgcagcacaagggcagaccccacccttagcatcggggaggtggtggcagattgcgcctaggcccacaccagtgcgagtgctgaccgatcaggagagacgggaacaaagacaagctagaagagccgctcaagcagccgccgctgaaccagcaactactgccgcaggagtgggccctgctggagctagacctggacagggcggtaggcggttgtccgatcccagaacggaggatgcaggacgggcaggtgtaccagcccccgatggacatgcccctcagagtcgcactcggcggcgacttggcacgtacgtcctccagctgatggcagcatggggcctcggcaacgttgtattccacgatcggctgttcacacaggtcgccctcgtaatgctggttttcctgtatctgatgcgccggcaaagttgggctctttggggggggacaatgctgttggctgcgctggtcgcatggagcctgcggttcctggggtga

SEQ ID NO: 13341 - RNA, 1923 nt, synthetic construct
  source 1..1923: mol_type = other RNA
atgctggcttttagagtgcgactacccgctgggagtcttcccatgtctgctccaccccccacaagtatgacaaggcaagagctgtatgagcggctacggactgccacaagagaggaggttactctgagcgaaatgcagaggctcggattttggcccaaggacgatcccggtgtgactgccgcacaggcgctgattcagcgggaagccgagttgtctagggccctcagagagctgtcttccgaactgcggggtaccgaagaccctgccctcgcactaaaggccatgcgcaaagagcgaatggctaaggcgagagctcggcgagaagagacgaaacagaggagcgcccgggagcggtttgaaagggccagtgcatggcatcatcgccacgccggggagatcctttacctgggggaagaagtttcagccggcctgaatgaggcaaggtccgatggcgacaagttggcacgcgctgccttacccgctctccatgacgctagggaattggcccaggccatgggcctgtcgctgcaagaactgcggttcttagctttcgacaggcgggcctctcgcatctcacactacagacgcttcgccatgccaaagaagactggcggcgagcggattatttctgcccccatgccacgactcaagcgctcccagtattgggttcttgacaacgtgctcgcacgcgctcctgtacatccggctgcccacggttttctcaaaggtaggtccatagtgagcaatgctgctccccacgttgcacaggcagtggtgatcaacgtggatcttaaagacttcttcccttccattgatatgcggcgggtagccggcgttttcggacagctgggctattctaaacaggtggccactacactggcccttctctgcaccgaggcagctaccgaacaagtcagcgtcgacggggagacatttttcgtggcgaggggagcacgagtcctcccacaaggagcgccaacaagccctgcactgaccaatattctctgtcgaagattggatgcccgcctccagggtgccgcagcaaagttagggttctcctatacccgatacgctgacgatctcacctttagcggccctgaggcgacacgcaagttagccgggaaactgctctggcgtgtaaggcagatcgtggcggacgaagggttcactccccacccccacaagcagcatgttatgcgtgcctcccagcgccagtccgttacagggatcgtcgtgaacgagaagcccacgatagagcgcgacaccctaagaagattcagagccactctgtttcaggtggaaaaggatggaccggctgggcggcaatggaacggcaaccctaatgtgctagccgccttggagggctacgcccagttcattaggatggtggacccagcgaaaggagcccctctgctggcaagagtgcgtgcagcgcgagagagatggtcagatgccccagccgccagtcttccaggacctgcaagaagaggaggcgattttcgtgcattatcagcccagggaaaagccccctgggagggcttttggcaagctgctccacctgccccaccggttctggaacagacccaggaacaagtaaccctggctaagaaagaaacaaggcgctgggctagtgtcgctcctgtggtcgagccatctgcggcagccgcagatgtcgcaaccgatgctgtagaggacggacctcaagtgcgggctccgtggagagcattgttatcacagtttttgatcgccctggtcctcgctctgacttaccgcacgccattgccggtcgccggcatactgctgcttagcaggaccagcaggagagacggtcgtcctcactggacgaggttcatctgcgctatggtgctgttggtcgcgcttgcagacgtgctgcacagatgggatctggggctgctttcgtga

SEQ ID NO: 13342 - RNA, 1845 nt, synthetic construct
  source 1..1845: mol_type = other RNA
atgaacgccaagtcaccagcgtcaatgtcccgccaggacctgtacgagaggctccggacctctagtcgcgaggaagtcaccctcgcagaaatgcagcgattgggcttctggcctgccaatgcggcaggtcgtcctgacgtggaagaactcatccgtcgcgaagcggagctgtcttccgccctacgcgaattgggctcagagctgagagctgtcgaagatcctgctgtggcactgagagctatgcgcaaggagcggatggctaaggccaaagcacggagagagacgaggcagaggagagcgagggagcgattcgagcgagcctctgcctggcatcagagacacgccagcgagattttgtatttgggcgagggagtgtctgctggcctaaacgacacacattccgacggggatagattagcccgggccgcgttaccacctcttaacgacgctagggagctggctcaggcaatgggactcactctgcaggagctgcgttttctggcattcgacaggcgggtgtcaaggataagccactatagacggtttgctatgccaaagaagacaggaggcgaacgcattatctctgcacccatgccgcgtctcaagcgaagtcagtactgggtcctcgataatgttctggccagagcaccagtccatcctgcggcacatggtttcctggcaggtcggagtatcgtgtctaatgctgctccccacgctggcagagcagttgtggtgaacgtagatctgaaagactttttcccgagcatcgacatgcgaagggtggccggtgtcttcgggcaacttggctattccaagcaagttgccaccactctggctctattatgcactgagtcggccaccgaggaggtcagtgtggatggggaaacgtttcacgtagcttacggaccgagagttttgccccagggagcacctacaagccctgctcttaccaatattctgtgtcggaggttagacgccaggctgcaaggcgccgctgccaaactgggattcgcgtacacaaggtatgcggatgatttgacatttagcgggactggggagtcaaggaaactggccggaaagctgctgtggagagtgcggcagatcgtgatcgacgagggctttaccccccaccccgacaaacagcacgtgatgcgcgactcccagaggcagtccgtcactggcatagtggtaaacgaaaagccgaccattgaccggcctactctgcgcagatttcgggccaccttgtttcaggtggagaaagacggccccgatgggaaggcctggaacggaaacacgaatgtgcttgccgcattagaagggtacgcccagttcgtacgaatggtggatcccgccaaaggtggcccacttctccagcgcgtcagggcagcaagagagcgttggagcactcctgctgggaccccagccgcaacacatagtacaggggactttcgggcccttagcgcgcagggtaaagctccctggcctggattctggcaagctggaccagctcccgccccagttgtcgagaaaacccaagtgcaggtcacactggccaaaaaggctgtccagcaagaacaaaaggaacgcgttgccgccctggcagatgcacaacccgatacgatgctggaagccccaccacaggcactgttgccctggagggctctactcccccagttcgttacagcctttctgttggccctcacttaccgaacccctctgccactcgctgggatgcttctcctggcccggaagtcccgtcgagatggtcggcttggctggggacgcttccttggcgtgatggttgccgtagtggtgctgcacgggctcctcagacgctggaattga

SEQ ID NO: 13343 - RNA, 1839 nt, synthetic construct
  source 1..1839: mol_type = other RNA
atgtctgataacactcccgcgcccatgacacgagctgcactgtacgctagactcagaacgcagagcagagaggaagttacactggctgaaatgcagcgtctcgggttctggcctgaaaacgatccgggaaaagccgtggcagagcagctgatccagcgtgaatcggagctggttcgggccttgcgcgagttgggctccgacctaagggtcgctgaggatcctgccttagccctgaaggccatgcataaggagagaaaagcaaaggctcgggcgcgccgagaagagacacgagagaggcgagcacgcgagcggtttgaaagggccaacgcatggcatcaacgcagggccggggaaattttgtacttgggacagggcgttagcgctggcctaggtgaggccaggtcagatgccgacaagcttgcccgagcagcactcccggccatgcacgatgcgaaggacctggcacaagccatggggctgtctctcccagaattgcggttcttggcttttgacaggcgcgtgtcgcgtatctctcattacagaaggttcgccgtgccaaaaaaaactggcggggagcgaataatctctgccccaatgccgagactgaagagggggcagtattgggtgcttgacaatctgttagcaagggcggccgttcatcccgctgcccatggattcagagctggaagaagcatagtcacaaacgctggtcctcacgtaggccgggcggtagtgatcaatgtggacctcaaagatttttttccctccattggcatgcagcgggtggccggtgtcttccgtcagttgggatattcaaaacagattgctaccatccttgcactgctgtgcactgaaagcgcaactgagcaggtgtcaattgacggagagacattccacgtcgcacacgggcccagagtcttgcctcagggtgctcccacttctcccgccctaaccaacatactgtgccgccgcctggacgcaaggttagagggagccgctgctaagctggggttcgcctacacaaggtatgccgacgacctgacattcagtggtggggaggaaacccggcgactagccggaaagctcctctggcgtgtgaggcaaatcgtggctgacgagggctttaccccacatcccgacaagcagcacgtgatgagggatagccaacggcaaggcgtcaccggcatcgtggttaatgagaagcctgctgtggaccgcactaccctgcggaggttcagagccacgctgtttcaggtcgaacgggatggccctgctgggaaggcgtggaacggcaatgccaatgtgctggctgctctggagggctacgcacagttcattaggatggtggatccagcaaagggcaccccactcttagctcgtgttcgggcggcgagagaacgctggagcgataccggatcacctgctgtgaccgtggccaaagccattagtgctgggaacttccgcgcccttagtgcccaagggaaggctccttggccaggattttggcaagctggcatggcgccagcccctgtactcgaaaaaacacaggaacaggtcgtagcaatgaaaaaggaggcacggcagcttgcacgatcccacgcagcgactagtcccacacccggtggcaaagcccgcaatgcacggtccctttggcacgccctcctcctgcagattctgatcgcctgttttttagccatcgcttttcggtccccatggccgatcattgccatgcttgctctgttctacctttccagaagagatcgcagcgcctattggaccagatttataggtattcagacgctggccgtcgcaggaatgctggccctcatgaaacactga

SEQ ID NO: 13344 - RNA, 1872 nt, synthetic construct
  source 1..1872: mol_type = other RNA
atgagtgactacccaactagtacgcgcgaggccttgtacgccagaattagggccagctccaggacggaggtcactctggaggaaatgaagcggctgggcttctggccagaagatgacaccagcctcgctgaggctgagcaactcattaaacgggaagccgaattgcagcaggcgttgtctgccctgggccgagaactgcgggaggttgaggatcccgccctcgctctcaaacggatgcgaaaagagcggatggccagggccaaggcgaagagagaagaaacacgacagagacgggctagagaaaggcacgaacgcgcgttagcatggcatgcaaggcgggccaaggagttgctgtacctgggggccggagtatctgcggggctgaacgaagcccgttccgatgcggatagactcgcccggcttagcctgccctcaatgcacgacgcacaggatctcgctaatgccatgggccttagcctggaggagctgaggttcctcgcatttgaaaggcgcgtgtcaaggattagccactatcggcgctttgcaatgcctaagaaagccggtggtgtgcgaatcatctccgcgcccatgcctaggctcaaaagggcccagtattgggtgcttgataatgtgcttgctagagctccggtccatccagccgctcacggctttctggctggtcggtcgattgtaagcaacgcagccccccatgtgggacaggctgtcgtcatcaatgtcgacctaaaagacttctttccttccatcgccctgccgagggttagaggcgtctttcgccagctcggctacggaaagcaggtggccacaactctggctctactatgcaccgagtcagcaaccgaaacggtgcaagttgacggagagacattccacgtagcccacggaccacgtgtgctccctcaaggggcaccgacatctcccgcattgacaaacatcctctgtcgccgccttgatgcaagattacagggcgctgcggctcggctagggtttcgttacaccaggtacgccgatgatttgacattcagtggcgacgagagtgtgcgtaagctggcagcaaaattgctgtggcgcgtgcggcagatagttatcgacgagggttttactccccatccagacaagcaacacgtaatgcgttctcacgcaaggcagtccgttaccggcattgtcgtgaacgagaagccggcagtagatcgagacacccttcgcagattcagagcggtcctgttccaggtcgagaaagacggacccgccgggaaacagtggaatgggaacgacaacgttctggccgccctggagggctatgcgcattttatacgcatggtggatgtggaaaagggggccccccttttggccagagtgagagccgctcgggctcgatggaatggtgatgctgctgctcccgatgccgtagctcgacgggctggtggacagttcagaatgttagccgctcaagggaaagcaccctggcctggcttctggcaagctgggactccacctgcccctgtgcttgagaagactcaggaacaggtgaagaccgaacgcacattagctagagaggaggcccgaccacgcaaggcagctgcatcaccagtgcctgcagacgacgcaattgcccggagggcagaaagaaccgctaggcgcaatccactcttaatcggaggcggccgaatgacctggtatgccgttgccctccagggagttgtcgcactgttgctgtccaggaagcttgactctaacactcccattctggccatgctggctctgtactggctaagcgtcagatataggcgtatgctgtgggtgcctttcatcgtggtgatgctgctgatatgggcggtgctggcccctcgctga

SEQ ID NO: 13345 - RNA, 1812 nt, synthetic construct
  source 1..1812: mol_type = other RNA
atgtatgagcgggtacgtgcaagcagccgggaggaagtgacactcgccgagatgcagcgccttgggttctggcccgctaacgatcctgggcttgctgcggccgaagaactgattcgcagggaagctgagctctctcaggccctgcgggccttaggcacagatgtgaggatagccgaagacccagtgctggcattgaaggccatgagaaaagagcggatggccaaggcacgcgcgagaagagaggaaacccgccagcgaagagcacgagaacggttcgaacgcgcatccgcctggcaccgaagacaggcttgcgagattctgtacttgggggaaggtgtcagtgctggcctaaatgaatcaagatccaatgttgacaagttagcccgtgccgccttaccagccctcgacgatgcccaagacctggccagagcaatggggctgacacttcaagagctacgctttttggcattcgaccgtcgggtgtcacgtataacccactataggcggttcgccctgccaaaaaaaaccggaggcgagagaatcatttccgcaccaatgccccgtcttaagcgggcccagtactgggtactggataagctgttagcgcatgcccccgtgcatcctgcggctcatggcttcctgaggggacgatccatagtgtccaatgccgctccacacgtaggccaggccgtcgttatcaacctcgatttgaaggacttttttccgagtatcggcatgcccaggatcaggggtgtgtttactcagctcggttatagtaagcaggtggctacaacgctggcactcctctgtaccgaggctgccactgaggaggtgagcgtagatggggaaactttccacgtcgcacatggaccgcgggttctgccccaaggagctccatcttcacctgctctgactaacctgctgtgcaggaggctcgacgctagacttcagggagctgcggcgaaactgggattcgcctatactcggtacgccgacgacctcactttctcgggtggcgaggcaacgaggaagcttgccgggaaactcctgtggagagttaagcaaattgtgatcgatgagggatttaccccacaccccgacaaacagcatgtcatgcgggattcccagcgccaaagcgtgaccggactggtggtgaatgcgaagcctagcttggagcgcgataccctgaggcgctttagggccacactctttcaggtcgagaaagacggccctgatgggaaggcatggaacgggaacacaaacgtgttggcagctctggagggctacgccaattttgtgcgcatggtcgaccccgcaaaaggcactccgctattagcacgggtcagggccgccagagagagatggacaggtgtgccacaggcccacagagctccgtctctgagtaaaaggagctctgactttcgggctctttctgctcagggcaaggcgccctgggaaggtttctggcaagcagctgctcccccacccccagaactggagcgtaccgcagagcagctggcccaggataagaaagcagcgcgaagacaacgccccgcctcaccagctgctgaaccttctggcgacctgggggtggttgatgttcctgccacccctgggttgcctcccgttccttggtcggctatcggcgtccagttgggactggccctagcctacggcattgatcagggaaagctcctgcccctcgcattcacggtcggattggcttttatggcctggcgagacagggaccctcactggcttcgcttcgggggtgtaatcgtgctgatggtccttctcagcgtgctacgatga

SEQ ID NO: 13346 - RNA, 1929 nt, synthetic construct
  source 1..1929: mol_type = other RNA
atgacctcacctaccccctcgccctccgaactaacacgggctcaactgtatgagcggatcagagcctccagcaaagaggaggtggtgcttactgagatgcagagacttggcttctggccagccgatagcggtaagccctcagtggaatccgcactgattaggagagaagctgaactgactcaggcgctgcagaggctcgggtctgagctccatcacctgcagaacccggaagctgccctgcgtatgctccgcaaagaacgtatggccaaggccaaggctcgcagagaggagacacgccagaagagagctctggttcgattcgagaaggctcaagcttggcgacagagacgggagcacgaggtgttgtaccttggcgccggtgtttctggaggtctgagtagggccgactcagatgctggcaaacttgcaggcttggccatgccagtcctccacaaagcagacgacctggctcaggccatgggaataaccctctccgaactgcggttccttgcatttgaacgcagagtgagccgcatctcacactacagacggtttgccatgccaaagaaaacaggcggggaacgtatcattagcgctcccatgcctaggcttaaacgcgcccagtattgggtcctcgacaatgtccttgctagggcaccgctacaccaggccgcacatgggtttgtgcctggccgttctattgtcagtaacgctgccccccacgttggccaagcggtagtgatcaacctggacttgaaggacttcttcccctccattggaatgccacgcattaagggcgtcttcgcccaattgggatactccgagcagctggccaccgtcttggccctactctgcaccgaagcccccacggataaagtgcggatagatggggagagatttttcgtcgcacacggatctagggctttaccccaaggagccccttcctcgcccgccttaactaacatactctgtcgtagactggacgcaagactccaggcctgtgcggccaagctcggcttcaagtatactcggtatgcagatgatctgactttctctggcgatgccgacgcgcggaagttagccggtaagctgctctggagggcgaagcagatcgtcattgacgaggggttcacgccccatccagataagcaacatgtgatgagggatgcccaacggcagatggtcaccggaatcgtggtgaaccagaaaccttccttggagcgcgagacactgaggcgctttagggctacattgtttcagctggagaaagatggtcctgagggcaaacaatggaatggtaatacgaatgtgatcgatgccctggaaggatacgcgcagtttatccgaatggtggacccagtcaaaggcctgccccttctggttcgagtacgcgccgctcgagcaagatggggagctgcaggaattgacatgaagctgatgcagagcaagcggtctagcgcttttcgagccctgtcagcacagggcaaagctccttgggatgggtggtggcaggctactctggccagtgcacctgttctggagaagaccgcggctcagctggccgtggaaaagaaggaacggaaggccgctgaggcaccaactgtacctcccgcaccagtgaatatgaaaaaaccggcagctgcacagacccccgttgccacacctgccgcagctgttcatgcacctccggccagtgacgccaccgcaaacccagcaccaggggctaaaccagacggggacaataacttccaggtagcgattgcggtacaggtggctctcatatgcgcattcgccttggccacccagagggttttaccgagtgcgtgcatggccgtgatcgtgttacaaagcgccatgctaaggaaacctcggtgggggtggtttctctttatcattcttatctggagcgctgtgacactgaagtggtga

SEQ ID NO: 13347 - RNA, 1896 nt, synthetic construct
  source 1..1896: mol_type = other RNA
atgtcagccaccgaatcgaagcccatcacgacccgcgccgaactgatggagcgtctgaggtcgtcttcccgacaggaggtcgttttgggcgagatgcagagacttggtttttggcccgccaacaaaggggagcccactgagctcgaggaagttgtacgccgggaagcagagctgagttccaccctgaaccgtctttctcaagagctccggacaatccaggaccccgaagccgctctgaaagctatgaggaaggagaggctggcaaaagcaaggcagaggcgggaagagacacgactgcgcagggcacaggagagattcgatagggccactgcttggcaccgcaggcgatccaccgagctgctgtacctgggcgagggtgtgtcagcaggcctgaatcaggccgaaagtgatgccggaaagctcgctcgatggtctttaccagtgatgaacaacgcctcagaattagcagcggccatgggcgtgacactgcctgagcttcggttcttaagctttgaaaggcgagtgagcagaatctcccattaccgcagatttgcgatgcccaagaaaactggcggtgagaggataattagcgccccaatgccgcgggtaaaacggctccaatactgggtgcttgataacatcctcgctaaagtccctctgcacagcgccgcacatggcttcgttcctggtagatccatagtatcaaatgcgcagccacatgtggggaaagctgtggtgatcaacctcgacctgaagaattttttcccttcaattgccctgcctcggattaagggggtcttccgggaactgggatacagtgatcagttggctaccacactggggttgatttgtaccgagacgccaacagaggaggtatctgtggacggggaaaagttctttgtggctaccggagaacgcgctttgccccagggtgctccaagcagtcctgccctcacaaatatcctgtgccgccggttagacgcccgtgttcagtcctgcgccgccaagctcgggtttatatatacacgttacgccgacgacctaacattctctggcgatgcagcagcgagaaagctggccggaaagctgctctggcgagttaagcaaattatcgccgacgagggattcacgccccacccagaaaagcagcacgtcatgtcactttctcagtgccagagtgttactgggatcgttgtgaataaaaagctcagcctggatagggatactcttcggcgcttccgggccaccctctttcaagttgaaaaggatggccccgccgggaaacagtggaatgggaacgagaatgtgattgacgccctcgtgggatatgcccagttcataaaaatggtggatgcagagcgcggagctccattgcttcagaaggcccgcatggtcagacagaaatggaacactgaggctccggtggtgagcgaagctgcggcaagagccagttccgggtttaggaagctatccgcacaaggcaaagagccttgggccgggttttggcaagctgccggaagcccagctccggtcttggagaaaacccagcaacagctgaaggaagagaagctcgctaaaagagaaaagcctgcggaaaagcccaaagcagctgctcacgccgacggacaggcagctagacagcagggcgtgactgcatctcctggaacccaagcacctgcacaaggcggccgcggtatgttcgcaggacgaccatgggtgtccattatcattcaggtgtatttcgcctttaccctgtgtctgaatttccgtactccgttgccccttgtcgtcgccatcgtactgggctatcaggcgtggagagactacagcggtcattggctacggtattttggcgcgatggccgtcgctgtggtcttaggcttgtggctaagatga

SEQ ID NO: 13348 - RNA, 1878 nt, synthetic construct
  source 1..1878: mol_type = other RNA
atgtccgccaccgagagcaagcccattactacgcgggccgagctgatggaacgcctgagaaatagcagcaggcaggaggtggtgctgggcgagatgcaacggctcggattttggcccgctaacactggccaaccgacagaattggaagaggtcgtgaagcgcgaggctgagctaagtggcgccttacagcggctggggcaggaactgagaactatccaggatcccgaacaggctctgaaggcaatgcgtaaggagcgactgtctaaggccaggcagcgtcgggaggaaacacgtctcaaacgggcccgggagagattcgaacgggcaacggcctggcataggcgacagtccactgagctcctttacctgggagagggtgtaagcgccggacttaaccacgcagagagcaatgcggaaaaattggccaggtggtctttgcctgccatgaataatgccagcgagctcgcaaccgctatgggaattacattgcctgagctcaggtttctgtcattcgagagacgcgtttcccggatctcccactacagacgcttcgcaatgcccaaaaagaccggcggcgaacgaataatctctgccccaatgccccgcgtaaagaggctgcagtactgggtgctagacaatatccttgctaaggtgccacttcatcctgcggctcatgggttcatcccagggcgcagtatagtctcaaacgctcagccacacgtcggaaaagctgtggtgattaacctggacctaaaaaacttctttccctccgttaacctgcctcggatcaaaggcgtattccgcgaactgggttattcagagcagctggcaagcacacttggcctgatttgtaccgaaacacccgtggaggaggtttcggttgatggcgaaaagttctttgtggccaccggagagcgcgcattgcctcaaggggctccctcctcacctgccctgactaatatcttatgccgcagattagacgcccgcgcgcagtcgtgtgccgctaaactgggttttacatacaccaggtacgcagacgatctgacattctccggcgatgccgctgctcgaaaactcgcgggcaaactcctgtggagggtgaagcaaatcattgcagacgagggctttaccccccaccccgagaaacagcacgtgatgtctgatgcgcattgccagagcgttactggaatcgtggtaaataagaagctcagtctcgatagaggtaccctccgtaggtttagggccactctttttcaggtggagaaggacggtcccgccggaaagcagtggaacgggaacgacaacgtcattgacgcgctggaagggtatgcccaattcattaaaatggtcgatgcggacaagggggcacctttgttacagcaagtgcgggccgcaagagccaagtggattagtccggctcctgcggcttcagtaaccgccgtgaggcgttcctctggcttccgagcgctgagtgcgcaggggaaggaaccgtgggctggattttggcaagctgctgccgctccagcccccatgttagaaaagacgcagcagcagctggcactcgaaaaagccggagctggccgaaaagcagctgccccagcctctgccccatcaagaccagcagctagagcagccgcagaagctccagctagcgcaccggtccaaggtggtagggggaccttcactgggcggccttgggttgctgtgataatacaggtctatttcgccatcacattgtgcctaaatttccggacccctctgccttttgtggtggccgtcgtccttgccgtgttggcatggcgcaactactctgccaaatggccaagatatttcggagccatgtttgcagcagttctcgccggcgtccttctgagatga

SEQ ID NO: 13349 - RNA, 1914 nt, synthetic construct
  source 1..1914: mol_type = other RNA
atgtctgccacagagtcaaagccaatcaccacaagagcagagctgatggagcgcctcagaacatccagcagacaggaagttgtgctcgaagagatgcagcgactgggattctggcctagcggtaccggacagccctccgaactcgagcagctcgtgcaacgggaggcagagctctcctcagcgttgttaaagctcgggcaggaactgaggaccgttcaggatccagaagctgctctgaaagctatgcgcaaagagcgcttgacgaaggccagggcgagacgagaggaaacgcgccaaaggagggcccgggaaaggtttgagagagccactgcttggcaccagcgaaggagtactgagctgctgtacctgggagagggggtgtcagccggactgaatcaggcggaaggagatgcagagaaactggctcggtggtcccttcccgctctgcacaacgcccaggagttggcctctgctatgggtgtcaccctccccgaacttaggttcctatcctttgagaggagagtaagccggatttcacattatagacgttttgccatgcccaagaagagtgggggagaacgcatcatctcagcccccatgcctcgggtgaaacggctgcagtactgggtgcttgataatatcctggccaaggtgccacttcacccagccgcccatggctttgtacctggccggtccatcgtctctaacgcccagcctcatgtcgggaaagccgtggtggtcaatcttgacctgaagaacttcttcccgagcattggtctacctcgcataaaagggatattccgtgagctggggtatagcgagcaactggctactaccctaggcctgctgtgcactgaaaccccctctgaagaggtgagtgtggatggggagaagttcttcgttgccacaggcgagagggctttgccacaaggcgcaccctcttcgcctgctctcacaaacatcctgtgccggagattagacgcccgagtgcagagttgcgcggcgaagctgggcttcacatataccaggtacgccgacgaccttacctttagtggcgatgcggcagctcgtaaacttgcgggcaagttactatggcgggttaaacagattatcgccgatgagggctttacgccgcatcccgaaaagcagcacgttatgggtgccggccattgtcagtcggtgactggcatcgtggtcaatcaaaagctgtcccttgagcgggaaaccttgcgccgcttccgagcaaccctgtttcaggtagagaaggacggaccggccggtaagcagtggaacgggaatgccaatgtgattgatgctctggaaggctacgcccagttcattcgaatggtcgacgcagaaaaaggtgcacccttgctccaaagagtcagggcagcacgtgcaagatggattgcccaggcacaggacggaggcgaacaagccgcacggcgaagctccggatttcgcgctctcagcgcccaggggaaagagccttgggcaggtttttggcaagcccaagctcccgcagcccctgagttggaaaagactcagcagcaggtaaagcaggagaaattagaacaccgccaggcccagaaggctaaacccgcttcaggaaggccagctgttgcagcgggggctggaccttctgcaagagcgacaagacggcaagctcctgaggctccaccagccgaacaagaagagccctacaaatttagcgacagaccgtggttagggattctgatacagctgtatctggccttcagcctctgtcgtttgtaccacactccacttcctctcgtgttcgctgtgatgctggctataccagcctggcggaactatagggcatattggctgcgctacttttcttacatgtgtctggccgtcttactcggcatcgtcctcaggaagctattgtga

SEQ ID NO: 13350 - RNA, 1668 nt, synthetic construct
  source 1..1668: mol_type = other RNA
atgagaaggcagcgcctccaagctgcccggcaacgaagggaggcaacacgccaagccagagcacaggcccggtacgaacgtgcacgatcctggcatgagcgcagacagcactcagtgctctatttaggtcagggcgtcagcggcgggcttcagcattctgataatcagccagagaggctggcacggtggcaactgcctcagccagccaacccacagcagctggcccagctgatgggcgtgtctgtcgccgagctacgctttctcgcctatgaccgggcagttgctcgggtgtcgcactacagatcctttgacctgcccaaaaagtctggggggttaaggcgcatctccgctcccatgccgagactcaaaaggctgcagtattggcttctggataatatccttagcaaggtgcctgtgcacgacgccgcacatggattcaggcccggtagatcgatctgcagtaatgcccagcctcacgtaggtaaggccgtggtcatcaatctcgatctgcaggacttcttcccctcaatagcttacccacgcatcaagggggtctttagggccctcggctactctgagcagctggccagtatcatgggactcctatgtacccagcggccaacgcaagcggtccaactcgatggccagacataccacattgcgactggcgctagacacctcccccagggagctccaagctcaccagctttaacaaacatcttatgccgtcgattggacaggcgcttgcatggcatggcagccaagctggggttcgcatataccagatacgccgatgatctgtctttctctgcggacgccccagcccagcacttagttggcaaactgctgtggcgagctcgtcagattattgccgatgagggctttacccttcaccctgataagttgcatgtgatgcgtagcgctcggagacagcaggtcaccgggttggtcgtaaatgccaagccttccattgaccggagcacttttaagagattccgggctaccgtgttccaggtggaaaaagacggcccccagggaaagagctggaacgggaacgacaacgtgctggacgccctgctgggatatgctcacttcctgcatatggtagatcctcaacgcggacagccctggctgcagagggttcaagccctcagggttgcggctcaggcacctgcacagagccagccaagtcccgaaccgcagcagatattggaactggaatccgccgcaaaagccagccaagccgggagaggtcgatccgcttttaggagggcatcagcccaaggacaggcaccgtgggcccattggtggcaacctgcccaaccacccgcacctgtgctggaacccacggaagcgcagcgacaggctcagaggcaagcgcagagacgacagcaagcccaggctgcgttacctactgctgcacagccacaacgccagggtgcgctagagcctcaacagcccccagaggaggcccagcacgctagtcagcgtaacccccgcatgcttctcgagcagacactcgctctgctcgttttgctttttatgcttcggaaaccgtccctgctgctactgggactgctgattcacctcgcataccatttgttgcaccggtcaagttggtggctttttctgcccctattgctggcttcccttctggtgcctttctga

SEQ ID NO: 13351 - RNA, 1884 nt, synthetic construct
  source 1..1884: mol_type = other RNA
atgagccagcccagccagagcaacccaaatcagagcaactctgcccagccccccaattcaagggaggcgattctccaaaggatgaggaactctagtaaagatgaggtcatattagaagagatgcgccgacagggattctggccgaaggacgaacccagtccagaacaagccgctgcactcgcgctcatcgagcgcgaaggggagttggtacgtgccctgcatgacctttcgcagcagttacatcaggtggaggagccccaggctgcgttaaaggcaatgagaaaagagaggatgcgtctcgcacgggagaagcgggaggtaaccagaagacagcaggcccagcgccggtatgacagagctctggcctggcacactcagcagcaaaacgatataacatacctgggggaggatgtgagccagggtctggccgatcctcgctccgatgaggcgagactggctagcaagggactaccacatttctcctccgtggctgctctggctcaagccatgggagtaaccgttgccgaactccggttccttagtttcagccggaacgtcacaagaatctcccactacagacgctttacggtgcctaagaagactggcggtgttagactaatttccgcaccaatgccacgactgaagaggcttcagtactggatcctggagcagatactgttaaagctgccggtgcatgctgcagcacagggcttcgtggccggaaggtctatagtgtcaaatgctaccccccacacaggacaagctgtggtggtgaacttcgacctgcaagacttttttccctccatccactggcaacgggtttccgggttgtttcagtctatggggtacagtaaacagctcgctaccatcctcgccctgatttgtagcgaaacaccatgcgatgaagttgctgtcgacggcgcacactatttcgttcaaaccggtgtgaggaggctccctcagggagctccctcgagtcctgcgctcactaatctgctatgccgacgcctggacacacggttgagcgcgttagctcaacgactgggctttaggtataccaggtatgctgacgacatgaccttttccgccgctgatgactcacagcttcctcgtttgctctggcaggcgaagagagtgattcgggaagaaggcttcacgttgcatccagataagcagaaagtgatgcgccgccacgcccgtcaagaggttactggcattgtcgtcaaccagaggcccgccgtttgtcgagagacgctgcgacggttcagagccgtgttgttccaggtcgagcaaactggcccgactggcaagcattggaacgggaatgaaaacgtgctggcagccctggcaggctacgcacagttcattgtgatggtcgacgccgaaaaaggaagacctcttctcgccagagtccacgcagcacagctgaaatggtccgctccggaagctgccaggtcttcatattatcgggactttcggaccgcctcatcaaaaggtatcgcccctaagggtatcacccagatggcacaacgtgcgatcccaatcatcgagctaacacaggagcagcaccaacaagccaagcagagtgctcagcagcccaattctcagcgggccgtcattcctgccgatcccgatgtcgttctgttggaacagcagcaagcaccacctctcgccgcacacgcaaatacacctgtatctatttaccttcagattgccgccgcctttctggccctgatgctgattgggctgctgagctcaaattaccttcttagtgccgggtccatcgtgtgggtgtggtactgcatgcagaaacgcaaattttcttggtggggctttgtgctcgtgttgatcgtatgtcgctggctgtggcagcagatcgagtga

SEQ ID NO: 13352 - RNA, 1917 nt, synthetic construct
  source 1..1917: mol_type = other RNA
atgagcaatgctacccagacctcacgcgaggctgtgttggcccggatacaggcttcttcaaaggacagtgtcatcctggaggagatgcaacggttgggcttctggcctgctgggtctgggactccagaccagcaacgagcaaccgaactgatctcgcaggaacaggccttgctctccgagctgagagaactaaaccaaaaactttctatagccaaggacccagtcgctgcactgaaggctctcaacaagcagcgcatggccgaggccaaagctagaagggagcagactcgcctggcagcagcccaaaggcgctatgaaaaggcggccgcatggcacgctcgaagagctctggacattgggtacctgggtgaaggtgtctcccagtccttgagcgatgctcgaactgatccacatcgtctcgccgctagggagttgcccgtgctcgactcacccaaggtgcttgctgacgccatgggcatcaccgtggaggaactgaggttccttacgtttcaccggtccgtgtctcggatctcgcactaccggagatttggtatccctaagaagaccggaggactgagaatgatctccgctccgatgcccagactgaaaagggcccaatactgggtgcttgacagggtgctcgcaaaactgcctgttcacgatgcagcgcacggtttcgtgcctggcaggagcatcgttagtaacgcaactcctcacgcaggccaggccgtggtcgtgaatttcgatctcaaagatttctttccatccatctcctatcagagggtacggggcctgttccaaacattcgggtactctaggcagctggcaactttgtttgccatgatctgcacagagctgccgactgacgaagtgtctattgacggccttcatttccacgtccagaacggcgagcgtcatttacctcaaggggccccctgcagccccaccattaccaatctgctgtgtcgaagattagatacgagattagctggactggccaaaaggctgggattcatatacaccaggtatgcagacgatatgacattcagcgccgatgccgcgagtgccgggaacttaccccgtctcctatggcaggtgaagcgcatcattgccgaggaggggttcacacttcatcccgacaaacaacgaataatgagaaactccgcgcgccaggaggtaacgggagtcgttgtaaaccaccatcccacagtctgtagagagactttaagacggtttcgtgccacactgtaccaggttgaaaaggacggcccccaaggaaaagcctggaacggaaacggcgacgtcttgaatgccctggctggatacgcacgctttgtgaagatggtggatcctgccaagggcggaccactttgcgctaaggtagctgctgttcaggccaagtggggggataatgcctcacagccacggggccagtattatcgcctctttcgcgaagcaagcgtggccggtaaagccctcccgagccatcaatggcaggctaagcggcagcctgcacctaccctcgagaaaaccgccacgcaactccagcaggagaaacaggcaactcgccaggctgagtctgatcaggctgccgcagttgcggcagaaaccattgccagcgcggcggcactaccaacaacacacacccagagtggggaactgattgaacggaatgctgtgagcgcggatgccattcccccaaacgttcatgaagacgtcccagcatcagtttacctacagctggctatgcagttcgtgttgatgctggtgtcaggacttttgacaggcaatgtgctcatggccatggccagtgtcggttggatgtggtttggctttaaaaggagacgggccaattggtggctgtggctgggggtatattttgcgtgtcgactgctatggcgtctcactacagcctga

SEQ ID NO: 13353 - RNA, 1875 nt, synthetic construct
  source 1..1875: mol_type = other RNA
atgtccgatgctgcccaaacaagccgagaggccgtcattgcacggatcagaaacagttccaaggacgctgtggttctggaagagatgcgcaggcttggtttttggcctcaggggcaagccagtcccggtgaaggagaggttgccgccctcatcgaacaggaagccgccctcatccaggagctccagcagatcaaccgtaatctggcgagagtgagggacccgcaagcagccctcctggagatgaaaaaggagagaatggcggcggcaaaaaggcgacgcgaagaaactcgccagcggcacgcacagttacgctatcaacgggccactgcctggcacgcaaggatgcagcaggacattgtataccttggcgccggagtgagcgctggactcgatgacgcacggcacgacaccgctaggctagcctccaagcaactacccctccttgacggccctcaagctttggcagccgccatgggcgtacctcttgccgagcttcgtttcctggcctatcaccgatctgtgagccgcatcagccattaccgcagattcgggattgcgaaaaagaccggaggagtgcggctcatatcggcccccatgccacgcttaaagagagcccagtattgggtgttggacaggatcctcgcaagactccccttgcacgaggcagcccatgggtttgtccctgggagaagcattgtggggaacgctctgcctcatgtgggacgtgctgtcgtccttaacctggacttgcagaatttttttcccagtattgcataccccagagttaggggtctgttccagtcattcggctattcacgccagatggccaccctgctggccctgatatgtactgaaacccccagcgaggaagtggagctggacggaaataggtatcatgtgcagaccggtgaacgttgtctgccccaaggcgccccatctagtcccgcaatcacgaatctgctctgcaggcggttggataaacggctcacagcaacagcagccaagctagggttctcctacacccgctacgccgatgatatgaccttctctgccgatgccccacaggcagatgggctggctaggttgctgtggcgggtgaagagaatcattgctgatgaggggttcaccttgcaccccgataaacagaggatcatgagggctgcctctcgtcaggaggtgactggcgttgtggtgaaccggcagccggctatttgccgggatacattaagaagatttcgggccacaatgtttcaggtggaaaaggatgggccacttggcaaacagtggaacggaaattcgaacgtaatcgcagcactggagggatacgcccgctttattgctatggtagacccagccaaaggcgagccactgtgccagagagcggctctactccgagcgaagtggggttcagtcctcccagcgcctgcctctactggctatagaagggctttcagagctgcttccgctgaagggaggcagacccccggacgaatctggctgcctgctgagaggccggttccacagctggagcagacggaccaacagcagcgcgagcaacgagccgcagctcgagaagcagcccagccttccccagtccctcagacgacagcgtcacgggctaatgctactccgcccgcggcacaacctcaaggcgctaatcctgcagcaataggctgggtgcagcagtactatggtctgctagccgtcggccagtttatggcccttttggctatcggcgttcttggccgcttctggctcctgccactgtgtgggttagtcttgatgctgtacgccctgcggacacggcacattagcggctggcacttcgcgctggctttagtggtcggtatactgtttgacggagttctgcattga

SEQ ID NO: 13354 - RNA, 1908 nt, synthetic construct
  source 1..1908: mol_type = other RNA
atgtcgtaccaggagactcccgagctgcaggccttaagggagcgtatacgcgcaagtaccaaagacgccgtcgtactggaggaaatgcgacgcctgggttactggcctaaagatgaggctatcccagactcaagagatgccgcatccgagattgggcaaatcatccaacgcgaaggcgagcttgtgggggaactgcacaagatggcacaggatctacacagactgtccgatccgcagcaggccctgcaggagatgcgcaagcaacgtatggccgccgcgagagctaaacgcgaggagactcggaggcggcatgccgaagaacgccaccaaagagctgccgcctggcacgctcaacgacagaagagtattgcctggctcggtgaagaagtcagcacaggattggccgatgttaggacagacgcggctcggcttcacgcaaaatcactgcctgttatcgagagtataggggagttagcccgcttaatgggcgtaccactggccgagttaagatttttggggtatcagagatcagtatctcgcattaaccactaccacaggtttggaattgccaaaaagacagggggcgtgcgagtgatctctgcccctatgcccaggatgaagcgagcccagtattgggtgctggataagctcctggtgtcccagcccgtgtccgctagtgcgcatggtttcgtgcctggcaaatccatagttgacaatgcccgggtgcatgccggacatgacgtcgttattaatttcgacctgaaggacttcttcccaagcatccattaccccagggtgaaaggcctgttttcctctttcggctattcagatagcgttgctacactactggccctgctgtgcaccgaggcacctacagaaaccgtcgagatggatgggcagcgctaccatgtccagaccggtcctagatgtcttccccagggggcacccacctctcctgcaattaccaaccttctgtgtcgtaagctcgatagacggctcgaggggagcgccaaaaaactcggcttcagctataccaggtatgctgatgatatgaccttcagcgcacccgcagaggccaggtccaaactcggacagatgctctggtgcgccaagcaaatcattgctgacgaggggttcattttgcatcccgacaaacagcgggtaatgcacgcaggtagacgccaggaggtgacaggactcgtcgttaatgaacggccggcggtcccgagggaaacattgcgtcggtttagggcgactctctttcaggtggaaaaggacggcccagagggcaaatcatggaacggaaatggaaatgtgatcgcagcacttgacggctatgcgaggtttatctacatggtggatgccgacaagggagccccgttgctggctagaatcgcccagctgaaggaaagatggtctggagcacccgtccgaaaggcacccggcttgctgtcaggacctgcatttcggcgagcagcaggtgaagggaaggctcctcgggagaactggtggactcccgctgaacaagcggccccagtcgttgagaagactgaccaacagagggctgaagaccgagcagcggccaaagccgcaatccggttgcagaaggctgaagcccaggccactgctgctccagcatccagcgaacaagcggaaacggctccaccacctgctagcctcgctccagaggaggccgctaaagctagagcccttagtgccagcgactctattcagatcctcatccagtcgattgtgatggtgctagctggtctggtgacgcacaactacctggtacttctaggcgccgtggtttggttctttctgtctatgagtaagcgtaagcggtacaactggcttatatgggccgtggtgtatatagcttgccgcatcctgggcggcgtccactga

SEQ ID NO: 13355 - RNA, 2004 nt, synthetic construct
  source 1..2004: mol_type = other RNA
atgacacagaacaaacagtcggcgagcgtgacctctccacccttgtcccaaatgacacgcgacgaactgtatgcccacgtccggacaactaccaaggacgctgtagtgctgcaagaaatgagacggcttgggttctggccagccgataccgggaagcccagtgtgaccgaagagctaattcagagggaagcacagctgagttctatgcttcgcgaactgacctcccaattgcagcacgtccacgatccaaaggcggctctgagggatatgaggaaacagcgcatggctgctgcaaaagagaagagagagcagactcgacaaaagcacgctcagctccgtcatgcaaaggccctggcctggcaggagaaacgccagaacgacatcgggtacttgggcgaggcagtcagttcaggattaaactacaccactacagacatcgagaaactcgcccgttatcagctccccgtgctgcaaaaggctcccgaactcgccactgctcttggaatacccctggccgagctgaggtttatgtcatttcaacgtaaagtctcccaggtgtctcactaccagcggttctccatcccaaaaaagaccggtggactacggtacatttctgcccccatgccgagactgaagcgctgtcagtattgggttctggatcacatactctcaaaggtgccatgtcatccggccgcccatggcttcctgcctcaacactccatcctgagcaatgcccttcctcatgtcgggcaggccgtagtcataaacctggatttgaaggatttcttccctagtatcgagtatgctcgggtcaagggagtcttcaaaagtctgggatacggcgaccagatcgcaacacttctgggcctgctctgcacagaacaggcttccgaggaggttagagttgacactcagagatactttgtcgcgggtaaaaagaggtctttaccccaaggcgccccctcctcccctatgatcaccaatattctctgccacggtttggacaaacgactccatgccgccgccagtaagcttggatttgtatacaccaggtatgcggatgatctcacgttttcctctaaacaaaaggagaggccccctgtgggaaaactgctgtggagagtgaagcagataatcgccgacgaaggcttcacactccatcccgataagcagagaataatgagacacagccaaaagcaagaagtgaccggcattgttgtgaatcacagcccgactatcgacgccaggacactacatcgatttagggccactttgcacaaggtcgaaaaaaacggcccagctggctaccactggaacgggaataccgatgtacttagcgcattagaagggtatgctcgatacatctgtatggtcaaccccgccaaaggtcagccctggttgcagcgggtgaagcaactgcgggtggtttatgcagcacctacctcagtaccagctcatagcgcccggccacctcgcttatcgctacgacagcaggtggcagctggaaatacgccgctgagagccaatggcaaggactggtggcaggtgaaggaagctgccgtgcccgtgcttgagctgacggctcagcagcttgccgagcagaagcaggcagagaaacaggccgagaagcaggcgctcaaagaggcaaagcaggggaaagacacccaagctaaggcaccagtgagagagaatcaaacacagagctacgcacagcggcaggttgttactcctcagcctgtaagggcaaacgcttcaaaacgcaatcgtgacgatgccgcacctgtctccgacgaacagcctgtggtcttcaaactgcgaccaattccttggtggagcattttgctccagttcgtggcgtgcattatggttacaatcagcctgcgctcaatttttccagtgacgttaggtttgagcctgctcgcgatttctatcatcactcgccggtctatgatggtgtgggtgatggtggtgctggttctaagtgttctgctcattaactcatga

SEQ ID NO: 13356 - RNA, 1977 nt, synthetic construct
  source 1..1977: mol_type = other RNA
atgacccagcaacagcagtctgcccccgttaaaccactgagccagatgacaagggatgaactgtacgcgcacttacgtactactaccaaggacgctgtcgtgttacaggagatgaggaggctcggattttggcctgccgataccggtaagccaacgctgactgatgaaataattacccgggaggcggaactctcaacaaccctcagagccctctcagaacagcttcacagagtgcaggatccgaaggccgcactgagggaaatgaggaggcagcggatggcggctgccaaagagaaacgcgaacaaactagacagaaacacgcccaactgcgctacgctaaggccctggcctggcaggagaaacgcaaaaccgacatagtgtacctgggggaaggtgtctccggaggactgaactatacagccaccaacactgacaagcttgcccgccatcagttgcccctgctgcaatccgcctcagagcttgccactgcaataggaatcccccttgcggagctgagattcatgtcgttccagcgacaagtgtcccaggtatcccactaccagcgttttgctattcccaaaaaaacagggggtcagaggatcataagtgctccaatgcccagattaaagcggtgtcagtactgggtattagaccatattctcgctaaggtcccctgtcaccccgccgctcatggattcttgccacaacattctattctgagtaatgccactccacacgtaggacaagccgtggtgatcaatcttgacctgaaggattttttcccgagcattgactatcagcgggtgaaaggcgtgttcaagagcctgggatatggggatcacatcgcaaccgtgttgggcctgttgtgcacagagcaggccagtgaagaggtgcgcgtggaccgtcagaagtattatgtcgccggcaagaagcgatccttgcctcaaggtgccccctccagcccaatgatcacgaatatactttgccatacccttgacaagcggcttcatgcagccgccactaagctcgggtttgtgtacaccagatatgcagacgacctcacctttagttctaaacagaaggagcgacctccagtggggaagctcctgtggagagttaagcaaatcattgccgacgagggttttaccctgcacccagacaagcaacggattatgcgctacagccagaagcaggaggtaacaggcatcgtggtcaaccactctccaaccattgatgcaaagacattacacaggttcagggccacggtccaccaggttgaaaaaaaaggccctgctggcctgcattggaatggaaacaccgacgtgctagcagctctggaaggctacgctcggtatatctgtatggtcaaccccgcaaagggccagccttggctgcagaaaatcaagcagctgcgggctcagcatgctgcacctgcagtgactagacccacacgaccctctctgcgccaacagctcgctgaagggaagactcctgagcgggccaacgggcaggattggtggcagattaaggagcccgccgcaccagtcctggagctaacgacacagcaggttgcggaagcaaaaaaagctttgaaacaagaggccgtacaagctacaaaagctgccaaggccagcagacagggtacagctacccctgattatggccgacagcagacagcgggcagaacagctccggtgaatttgaatgtttcagcagggaacaccaggcctggacaagcagatgatgggaatcagacttacaacgcaacggagcagagcaaactcaacaacaagcgtaatgctcgcctgttcgcaatcctatttcagctcttcctctgcgtcttcttcaccctgcagctgaaaagtctctacccggtcatcctaggcctacctttgcttgcgctctctattatctccggccgctcaaaatttatgtggatcatgttggtgctggttgcctgcgttctgtttcggtga

SEQ ID NO: 13357 - RNA, 1956 nt, synthetic construct
  source 1..1956: mol_type = other RNA
atgacgcagcagcaacaacccagtgcccaatcagcttccgataagccgcttagccagatgacacgcgacgagctctatgcacatctacggaccacaaccaaggatgcagtcgttctccaagagatgagaaggctagggttctggcccgctgactccgggaagccttctgtcacagatgagcttatcacacgcgaaagccagctcattaacgaactgaacactttgacagacaagctgcgacgtgtccaagacccaaaggcagcccttcgagatatgcgaaaacagaggatggctgccgctaaggagaagcgggaattgaccaaacaaaagcacgcacaacttagacacgcccgagccctcgcctggcaggaaaaaagacagaatgacatcggttatctaggggaaggcgtctcaaccggcttaaactatactagtacaaataccgacaagttggcccggtatcagctgcctgctctgcagaagtccctggatctcgcaactgccatagggatccccctcgccgaactgcgctttatgtcttttcagaggaaagtatcgcaggtatcacattaccagcgctttgccattcctaagaaaactggcggacagcgcttcatatctgccccaatgccccggcttaagcgctgtcagtactgggtcctcgatcatattctagcaaaagtaccatgccatccagccgcccacgggtttttgccgcagcactccatccttagtaacgcgttacctcatgtaggtcaggccgttgtcatcaacttggacctcaaagacttttttccctctatcgaatacccacgagtgaaaggtgtgttcaagtcactgggctacggggatcaaatcgctactctgctgggcctgctctgcactgagcaggccacggaagaggtgagggttgacaaacaaaagtacttcgtggccggtaagaaaaggtcgcttccccagggcgctcctagtagccctatgatcaccaatattttgtgccacacactggataagagactccatacggcagccacaaagctgggatttgtgtacacgcgctacgccgatgatctgactttttccagcaaacagaaggaaagacctccagttggtaaattactgtggcgggtcaagcagataattgcagacgagggcttcatcctgcaccccgacaagcagcacattatgaggcacagccagaaacaggaggtgactggaatagttgtcaatcacagccctaccatcgacgctaaaacattgcatcggttccgtgccactctgcaccaggtcgagaagaatggaccggcgggataccactggaacggaaacaccgacgtgctcggcgccttggaaggatacgcacgttatgtgtgtatggtgaaccccgtgaaggggcagccatggctgcagagaattaaagccttacgggcgaggtatgctccacagtacgcgacccagtcagcaacacaccccgctaggcctaccctgagacagcaagtggcctctggcaagaccccccagagggctaatggaaaggattggtggcaagtgcaggaggctgcggcaccagttctcgagcaaacagcccagcagattgctgaggagaaaaaggtggtgcgccaggccgagaaagaagagaagaaggccgctgccatgccgcaatccgtgcaaccagacgttgctggaaataccggcaaccaggcggcaaataccgcgaatcccgcaaacaccgaaaacctgaccgccgctgagaaaaataaactgaacaaacggctttatgggacgctcgggagagtgttccaggtgctgttgtgtgcaatcttcagcgcttccctccattcactatatcctctgactttcggcatcgctctggtggcactgagcctgatttctggcagatccagtttagtatgggtgatggtcatgctggtcctgagcgtggttctgctttcttga

SEQ ID NO: 13358 - RNA, 1926 nt, synthetic construct
  source 1..1926: mol_type = other RNA
atgactatgcagtctcccgcctcgtcatctagcattcctgacagcgcgctgacccgggaggagctttatgagaggataaggaaaagctcaaagcaagaggtcgtactggaagagatgcagagactcggattctggccgcgcgacgcagcacaacctaccgttgaggagcagttgatccggcgggaaggcgaacttcagaccgccctgtcaaagctgggatccgagctgcggggtatagaggatcgggatcgtgccctcaaaataatgagaaaagaacgcatggcccgcgcccgtgaaagaagggaggaaactcgtcagagagctgcccagggtagacatgctcgggccgttgcctggcacgaaaggaggcagcgagaactgctatacgtaggcgatggagtgagcggcggccttaacgacgcacattctgattcccaggcccttgcccgcaatgcactgcctgctctggatcacgtttccgacctggctcaggcaatggggattgggctgggagaattaagatttttggcctggcaccgggaggtgtcatccgtgtcgcattatcagcgttttaccatgcccaagaaaagtgggggtgaacgccacatcagcgcccccatgccaagactcaagagggcccagtattgggtcttggacaatatcctggccaagatgcctgttcacgaagctgcccacggcttcatgcccggaaggtccattcttacaaatgccgcgcctcacgttggcagggatgtggtgattaacttggacttgaaggactttttcccctctattggaatgagacgggtccgcggcgtctttcgacaactcggctacagttcccaggtcgcaagtctgctagcactcgtctgcacggaggccccaaccgatgaggtacagctggatggtaatagatatttcgtagcccgcggcgacagagtgttgcctcaaggcgccccgacttctccgatgatcacaaacctgctgtgtaggcgcctcgatgccaggttatcagctagtgccgccaaactcggcttccggtacacacgatacgcggatgaccttaccttcagcgccgggcctgagcactccagagataccgccaaattactgtggcgggctaaacagatcgtcgccagtgagggactgacactgcatcctgacaagcagcaagtcatgcgaaaacaccggcagcagcatgtcacggggatcgtggtgaacgataaactttccgtagacagagacactttgcgaaggtttcgtgctgtgctacaccaggctgagcgcaatggtctgcagggactgcagtggaatgggaactcagacgtgatcggggctctcaggggctacgcgaatttcattgccatgacggacgctgcacgcggggaaccttacttacagcgcgtgcgagccctcgcggccaaacatgaaggtggggctgcacccaagactcaggctagtcaacggaggctcggcgctggcgagtttaggaagcagagcgctgcagggaaggcaccatggccagcttggtggcaacccgcagaagcagcagctcccgtgcttgaaaagacagccgagcagatagctgaggagaaaaaggcacagagagaggccgctcgaccacagcccgttgctgcatctcccgctccagccagagcaccagccacagcacaaccggctgccgctccagcagctaagcaagcgccaggcgccctgagtcagatcggatgggtggcgtccatgatgctgcaggcgctatatgtggttagcgtcttcctgagcggcacctcacctctcatctggctgatgactggaggggtggcaatcggaaactttgtgcaacgcaagtctggttggctccggttcatcgtggccatttttattagctccgcgttagctagcttggtgcattctatgaagaactga

SEQ ID NO: 13359 - RNA, 1980 nt, synthetic construct
  source 1..1980: mol_type = other RNA
atgcaaccacccgcgtcatcttcatcagtgcccgatagcgcacttaccagggagcagttgtatgaaagactgagggggagcagcaagcaggaggtcatccttgaagaaatgcagagactggggttttggcctcaggatgcagctcagcccacagtggagtctcagctgatccgccgggaaagtgagctccaaaccgcactgggcaaactaggggaggaactgaggggtataagcgaccgagataaggccttgaaaatgatgagaaaagaaagaatggccaaggcgcgcgaacgtagggaggagactcggcaaaggctcgcgcaagggcggcatgcaagagcattggcctggcatgagcggcaccagcgagaactactgtatgtaggcgatggtgtaagcggtgggctgaacgaggcccaatccgactctcaggcgctggcgagaaatgctctccctgccctgaatcatgctggcgaccttgccggcgccatgggaattgacctaggggagttacggtttcttgcatggcaccgcgaggtggccaacgtgtcccactaccagcgcttcactatcgccaaaaaatcaggaggcgagcggcatatctccgcccccatgcctaggttgaagcgggcacagtactgggtccttgacaacatcctcgcaaaaatgccggtccacgaggccgtccatgggttcctcccaggaaggtcaattctgacgaatgccgtgccccatgttggccaggatgtggtgattaacttggacctgaaagactttttcccttccataggaatgagacgagtgcgcggggtgttccgacagcttgggtacagcagccaggtggcttcgctcctggcccttgtgtgcacagaagcaccgacagacgaggtacagttggacggccgacggtattttgtcgctcgtggagaacgcgttttaccccagggagcccctacatcccctatgctgactaacctgttgtgtaggcgattagatgcgaggctcgccgcctctgccgccaaacttggcttccgctatactaggtacgccgatgatctcagttttagtgcagactctcagcactcacgggacacggggaagttgctgtggcgcgtaaagcagatcgtggcatccgagggtctgacagtccaccctgacaagcagcaagtgatgaggaaacatcagcagcagcacgttaccggtatagttgtaaacgataagctgagtttggaccgggacaccctcagacgctttagagctgtgctgcacctcgctgaaagacagggcccccaggggctgcaatggaatggcaatgtggatgtgattggcgctctgcgtggatatgccaacttcatcgcgatgaccgatgcagctaggggagccccgtacttacagagagtgagggcgctcgcagccaaacacaagggctctgccatgactaccccaatcgcccccgcaagccctgttgcctcacagcagccgcaacggcaagtggccccagaccagtttaggaaacagtctgctgcaggtcaggctccctggccagcttggtggcaacctgcccaagcttccgcccctgtcctcgaaaaaaccgccgaacagctggctgcagagaagaaggcaaagcgagatgccgagagagctgaggcagctgctaaggctgctgcagccacagccgctagtgctcctgtaccacgtgctgctgcggctccagctgttgcgccatcgtccccagaagcacccaccccagaggcacccaagcgtctggagagtcagttcgtcctgactgtgagcctcatgctgcagagcgcctacgttgttatgtctctccttacaagccgctcccttgtggtgctactgcccgtcggagccattgtcattggcaattggatccaacgcaagtccggttggatgagattcctgattgtgctgatcgccgcctctggactaagtggcctggtccggcacttaacgcagtga

SEQ ID NO: 13360 - RNA, 1941 nt, synthetic construct
  source 1..1941: mol_type = other RNA
atgcagtcacccccagcatcttccatcccggattctgccctcactcgggaacagctgtacgagagaatccgaaaagggtccaagcaggaggtgatcctcgaggaaatgcagcggctgggtttttggccacaggaggctgcccagccaacagtggaggttcagctaattcggcgggagggcgaactccaggcagccttatccaaactgggagacgagttaaggggcattgaggatcgggacaaagctctcaaaaccatgcgtaaagaaaggatggccaaggcccgagagcgcagggaagaaacacggcagcgactcgcccaggacagacatgcacgggctatagcttggcatgagcggcgacagagagagctcctgtatgtgggtgaaggagtgtctggtggcctcggcgaggcccaaagtgatgccgaggtcctcgcacgcaatgcgctaccggctcttcatcacgctggcgatcttgcccaggccatgggaatcgggctgggagagctcagatttttggcctggcacagggacgtcgcaaacgtctcgcactaccagagattcaccatcgccaagaagtcgggcggcgagcgacacatttctgctcctatgccccgcatgaagcgcgcccagtactgggtcctggacaatatcttggcaaaaatgccagtgcacgatgctgtgcatggttttctgccggggaggagcattttaaccaacgccgctcctcatgttggccaggacgtggtcatcaacctggacctgaaggacttcttcccttccatcggcatgaggagagtccgtggcgtgttcagacagttggggtacagcagccaagtggccagtctcctggcgctcgtttgtacggaggcccctaccgatgaagtgcagctagacggccggagatacttcgtggcacgaggggaacgggtgttgccacaaggcgccccaacttcccccatgctaactaatttgctgtgccgcaggttagatgcgaggctggccgcgagtgcagctaaactgggctttaggtacacccgttatgcggacgacctttcttttagcgccggtcccgctcacagcagagatacagctaagttgttgtggagggtgaagcagatagttgcttctgaggggctgactgtccaccccgataagcagcaggtaatgaggcgccaccgccaacagcacgttacgggaatcgtggtaaacgataagcttagcctggaccgcgacacaatgcgcaggtttagggcagtgctgcatcaggccgaaagccgaggccctcaaggtctgcgttggaatggaaactccgatgttattggggcccttcgggggtatgctaattttattgcaatgactgacgcggcacgcggagccccatatgtagagcgcgtaagagccctggccgccaagcatggcgatgggaaggctacggctcccgcagtgcagcagacccaaccttcacagagaagtctgcccgcagggcagttccgcaaacagagtgcagcgggccaagcaccttggccagagtggtggcaacctgcacaagcccccgctcccattcttgagaaaaccgccgaacagatagccgaagaaaagaaagctcagagagaagcagcacgggctcaagcggcacctcctgctgtagcacgtcccgctcagacacagcaagctcccgccgctcaacctgctgccactacatccactccagccgcgccaggagcgctttcacacattggttggatcgccagcatgatgttccaggccctgtatgtggtgacaaccttcctggcagggtccagcccgctcatctggctgcttaccggaggagttttcataagtaacttcctgaggagaaagtctggatggggagggtttctggccgccgttgtcgtgtcatccgctgtcgcctcattagtccattcaatgcggaaatga

SEQ ID NO: 13361 - RNA, 1929 nt, synthetic construct
  source 1..1929: mol_type = other RNA
atgaccccacccagtccgtcctctgtcccagactcggccctgactcgggagcagttgtacgaaaggatcagagccagctccaagcaggaggtggtacttgaagaaatgcagcgtctcggtttctggccccgtgacaccgcacagcctactgtggaagcccagctgattcggcgcgaaggggagctgcaaaccgcccttagggacctgggcgatgagctgcggggcattgaggacagggagacagcactgaaaagcatgcggaaagagcggatggctcgagctagagaaagaagggaggagactagacaacggttagctcagcagcgacatgctcgcgccctcgattggcatggtagacgccagagggagctgctatatctgggcgagggcgtgtctggcggccttaatgaggcgcgcagtgacgagcaatccctggccagacatgcactccctgctctccacgatgctaccgatttggcacgcgccatgggtctggaactaggggagttgcgctttctggcctggcaccgcgaagtcgccagggtatcgcattatcagcggttcaccgtccccaaaaaaacaggaggggagaggcgtatatctgccccaatgcctaggctcaagcgggcacagtactgggtgttggacaacgttctggcgaaagtgcccgttcacgaggctgtgcacggcttccttcccggacgtagcattctttccaacgcggcaccacacgttggccaggctgtggtcgttaatctggacctgcaggatttcttcccttcaattggcctcagacgggtgaggggcgtatttaggcagctcggatatagcccccaggtggcaactctgttcgctctcctagcgaccgaggccccaaccgatgaggtggaactggacggcgaaaggtacgtcgtagcgaggggggagcgagtccttcctcagggtgcacccacgtcaccaatgcttacaaatgtcctgtgtcggagacttgatgctcgcttggccgcctgcgctgctagactcggtttccggtacactagatacgccgatgacctctcattttcagcggatgctgagcatgggagagacgttggaaaactgttatggcgcgccaagcagatcgtggcatctgaagggtttgtggtccatccggacaagcagcaggtgatgcgccggcaccagcagcaacacgttacgggcatcgtggtgaacgacaagttatctacagaccgagacacactgcgtaggtttagagccgtcctgcaccaagctgaaagacacgggcctcaagggctgcactggaacggtcaacacgatctcgtggcggccttacgcgggtacgccaattttatcgccatggctgatccagccagggccgaaccatacttacggcgcgtaaaggccttggcagcgaaacatgctagtgctccggcaacagccgccacacccgcaagagctcccttgcctgccggacatttcagacgccagagtgccgctggactcgcacctctgccgacttggtggcaacctgccagagccccagagccagtcttggagaaaacccccgagcagattgcagctgaaaagaaggctaagcgagaggcagaacgagaacggcagcgggcccaggaagagccacaacgagtggagcaagcccctcccaggaccgcagaacctgcagcagcaccccagacagcgaagccccgatccactctgagcctgctaggcctatgggttagcatcgcaatacagggaacctatgtgctgggatttctcctgagcttgcgagatgcttggcttatcgggctgatgacgggagccatctgggttgccaacatctatcagaggaaggctggctggatgcgctttttcatagccctcattgccggttctggactgtccgccgtgttacgtaaaatgtggtcctga

SEQ ID NO: 13362 - RNA, 1908 nt, synthetic construct
  source 1..1908: mol_type = other RNA
atgctgacaatgactgccaactcaacaacgccagcgaagcccctgagccaaatgacccgggacgagctctacgcccacgtacggtcacagggaaaggatctgatcgttctgagggaaatgcagaggctgggttattggccacaatcgaccgatatacccgcccccgaagaggagttgttggagcgtgagaaatttctgacacagagactcttggacatgcagtcagagctggctaagatttccgatccagagaaagcactccgcctgcttcagagagagcggatggatgctgcacgcgaaagaagggagcagacccgcagagaaaagatcaaacagagatacgagaaagcgcaagccttttggcaacgccgacagaccgggattgactatattggcgaagacctgagtgccgggttagttcagcagcagagcaacgtgcagagactgcagcagtacggacttcccgagttccacgatgctgcaggtttagcttctttcctgaatatcagcttgcctgagctccggtttttgtctttccagaggaaggtgagtcgctattcccattaccagtacttctcccttaagaaaaaaaccggcggactccgtgagatcgccgctcctatgccacgaattaagagagtacagtaccgaattctggacgccctgctccagaaggtccccgtgcacgatgcggcccatggattcgtcggcggtaagagcgtgctaagcaatgccatcccccacacgggccaggcaatcgtgattaacctggacgtcaaggacttttttcctagtgtaggctggaggcgagtgaaggggatcttccgtcagcttgggtactctgaacaggcagcaacactgctcagtatgctgtgcacagagctgccagtcagccccgttaaaatcgatggccaacagtggctggttgccagggctgacagaaggctgccacagggtgcgcctacctcacctgctctgactaacttgctgtgtttcgggatggacaagcgccttcagcagctcgcccaacggcttgggttccggtataccaggtatgctgacgacttaactttctcagctgcagagcctaaagcccctgtggggaagctgttgtggcgagtgtctaaacttatgacggccgaaggctttactttgcatcccgacaagcagagagtcatgcgtgcgcaccagcgccaagaagtcacgggcatagtggtgaatcagcatccctccctgaaccgagatacattgcaccgctttcgtagtctcctgaacaagctcgaaaaacagggacctgccggactccactggaatgggaacaccgatgtgctcagagctgccgaaggattcgctagatacttaatgatggtgcaaccctctaaaggtgctgtcgcactgcagagggtccaccggttgaaaaagcaatggtccggagctccagccttcaccggcggaaacgtgtggaggaagacagcagcggacgggggcgttccactacgcaaaaatggcgcccagtggtggaaagcaagcacaactccggctccggttcaggagaagacagatctacaacgcagagaacagcggatgcaagaaaaacacgcacagctggccccagacgcatctaatgatgctgccctgccagagaataggcaggcggcccctgtgaatcatactacccaaaacgccggagctaatcaatccgttagcaagctccccccggtgatatccgcagggacaatgattgccgatttaatcgcaggcctaaccctttccattctcatgggcgtagccactccgctgctgttaaccctgctgtcgttctatgccacttttcggtttcggcggaactttaggcctctgctcctcggtgtgttgatccttcttctaatactacatgtcatgaagtga

SEQ ID NO: 13363 - RNA, 1917 nt, synthetic construct
  source 1..1917: mol_type = other RNA
atgactgctaattccacatcaagcgccaaacccctgtctcagatgactagagacgaactctacgcccacgtaagcgcccaaggaaaggacctggtggtgctccgcgaaatgcagcgactaggctattggccgcagcaacaggatatccctgccccggaacaggccctactggagagggaacaggtgctgaccaaacgcctgcgtgatatgcagagtgagcttgcccagatttctgatcccgaaaaagcgctcaggatgcttcagagagaaagaatgcaggcagcgcgggaacagcgagagcagacaaagcgccagcatgcacaaaggagatttgagaaagcccacgccgtctggcagaggcgacagactgacattgattacatcggggacaacctttcagctggtctgctccagcgaacaagcgacacgcaacgcctccagagacacgggttgccagaaatccatgatgcagccgggcttgctgctttcctggggattagcctgcacgagctgagatttttgtcattccaacgacgggtatcacggtactcgcactatcagtatttttccctgaagaagaagaccggcggacttcgcgaaatagccgccccaatgccccggatcaaacgtgttcagtatcgcattctggatgctcttttgcagaaggtccccgtccatgacgctgcccacggattcgtgtacgggaaaagcgtgttgtccaacgcacagccccacacgggaaaggcagtggtgataaacttggacgttaaagatttctttcctagcgtgggatggcgcagagtgaaaggaatcttcaggcagctgggctacagcgagcaggtcgctaccctgctatctatgctgtgtacagagctccctgtgtcaccggtggatatcgatggccaaagatggttagttgctcgtgccgataggagactcccacagggggctcctacctcccctgctctgactaatctgctgtgcttcggaatggaccaacgccttcagaagctggcacaacggttaggttttcagtatagtcgttacgccgacgacctgacattttccgctgcggaccccaaagcccctgtgggtaaactgctgtggcgggtccagcaaaggatgacagctgaagggttcacgctccatcctgaaaagcagcgagtcatgcgtgctcaccagcgccaagaagtcaccggcatagtggttaatcagcaccccgccctcaaccgggagacattgcatcggttccgggctctgctgaataaactcgagaagcatggcccagccggactgcactggaacgggaatagcgacgtacttagagcggcagaggggtttgcacgatacctgatgatggtccaacccagcaagggcgcaccagccctacagaggatccataggatgaagcagcaatggggagccgctgctgcaggaactgccaatgtcttgtggaggaagattgccgcggatggcggtgtacctccacggtcagagggtcaggcgtggtggagtgcagccttaccacctgagccggttcctgagctgactgacctgcagagaagggagcaaagacgccaacccgctggcaccgaaaaaatttctgagcccgtgtctcagtcccggtcaggcaccgactacgatgccggttctccagacgcagcccctgcacaggtgtttccagagaacgctgagcagacctctatgaacttgagtaagctcccaccaagtgtgtccgcgggcactatgctcaccgatttgattgccggcctggttctgtcgatccttttaaagggcgccctgcccctcatgatgagtctcctcagcttatatgcctccttcaggtggaagcgctccttccggcccctattggcactggcatttgtgctgctttggctctggcatttatctaggtga

SEQ ID NO: 13364 - RNA, 1821 nt, synthetic construct
  source 1..1821: mol_type = other RNA
atgactgtccgtccaggatcgctcacccgccagcagctgtatgacagaattagggagtccagcaaagatgaggtggtgctcgaggaaatgattcgcctgggctattggcccgatggtgtcgaccagcctaatctgccggacgaccttatccgaagacgcggcgagattactagagaaatctcagatctgcatcgccgtgaagctctctggcgcgatcctgaagctgccctcaaggccatgcacaaacgaagaaaaaaggcggccctagtgcgaagagccgaaacgcggttaaggggcgcaagggaccggcatgagagagccttagcctggcacgagcggagaaagactgagatactctatttgggggaaggcgtgagtgccggactgtctgcccaagaggcagcacccgtgtctcctgctaacgggttaccacccttagctagcccagccgcattagcacgggcgatcggcattagcctgggtgaattgcgattcctggcctacgaccgggccctgacatcagtatcccattatcagcggttcacgattcccaagaagacaggaggcgtccgggcaatatctgctcccatgccgagacttaaacgcgcgcagtactgggtacttgacgtggtcctggctcaagtgcccgtgcatgaagccgcgcacggctttgtcccaggcaggagtatcctgaccaatgccgcagcccatgttgggagggacgtcgtggtaaacctcgatttgaaagatttttttccctctctggactaccgccgcattaagggtaagttcaggggcctcggctatgctgagccagtcgccacagtgctcgcgctgctgtgtaccgagcccgacgttgacgccgtcgaaatagatggtcagcagctctacgccgcccgtggacctcgaagactaccgcagggtgctccaacatcccccgcactgacaaacctcgtatgcacacggctcgatgcccgcctttcaggactggccaggagcctgggatttgcctacactcggtacgccgacgatatgaccttctccgccagtggcgaagccgctgccaaagtggggccgttgctgaagtacgtacacgagatcgttgcgaaggaagggtttaccgtccaccccgacaaaactagagtcatgcgtcggggaagacaccaggaggtgaccggactgaccgtgaatgagcgggtggctgttccccgggagacgcttaggagatttagggccctcctgcacggcatcgagcgacatggccccatcggaaggcgttggggtcgatccgcagatggggctgtgctaggggctgccttggggttcgcacgcttcgtgcgcatggtcactccggaagtggggacccctctagttgcccgagcaagaagcctggctgagaggcacgggacacaacccgaacaagctcgccccagggtagcagccttccgtgaacggtcagcgcaaggcgtcccacctcgagagggtggatgggtgccagctgagcctccagtgcctcatcctgatccattgctggttcaggctgaggctgctcaagcagaggcggctaggagggccgaaggagctgcagataggagagtggtgcctcctattggtaggcagcccccagcacctcaacctgtgagcggccaggcaaccgacgatgcagacgcagctggcatgcggccatggatggttgttgtgggcgtcttcgttctgttccaggcagcggccttgttgcacccaggactggggctgtttgtgcttgctgccgcccttactatcggacttagaagatggctgcgccggagacgcgggaagtga

SEQ ID NO: 13365 - RNA, 1809 nt, synthetic construct
  source 1..1809: mol_type = other RNA
atgagtgtccaaccaggcagcttaaccagacagcagctctacgatcgcattcgggagtcctccaaagacgaggtcgtgctggaggaaatgattcgcctggggtactggcccgctggaaaagatcagcccaatctcccggaggaagtgattaggcgacggggcgaactagcccgggagttaacagagctccatagatctgctgctctctggacaaacccggatgcagctctcaaagccatgcacaagaggcggaagaaagcggccctggaacgccggagggaaaccaagctgaacggagcccgaggccgacacgaaagagccctcgcatggcatggccgccgtaatcgggaaatcctctacctgggcgaaggcgtatctgctggtctgtcgggcggtgatgctggcgcatctagagccgacgggctgccagagttggccagtccaggtgctgttgctgaggctatggggatcggcctgggcgaactgagatttcttgcctatgatagggcactggctaccgtgtcccattaccagaggttcaccatccccaagaagactggcggtcttcgcgccatctcagcccccatgcccagactaaagcgggcccagtactggatcctggacgcggtccttgctcacgctggaatccatgacgccgcccacggtttcgttcccggtaggagcattcttaccaacgccgcactgcacgtcggcagagacgttgttgtaaacctggacctcaaggacttctttccgaccctcgactaccgcaggatcaaaggcaagttccgcggattggggtatgccgagccagtagcaacagtcctcgccttgctgtgtacagagcctgacgttgatgaggtggagatcgacggacagcggttgtatgccgcaagagggccaaggcgacttccacaaggagcaccgacgtcccccgccctaaccaatctcgtatgcactcggctggacgcacgcttgactgggcttgccgccagcctaggcttcacctatacacggtatgccgatgatatgacgttttcagccagtggcgaggccgcgggtaaaactggggctctcctgaagtacgtgcacgagattgtcgctggagagggcttcacggtgcaccccgacaagactcgagtgatgcgcagggggaggcaccaagaggtgacaggactcaccgtgaatgagagggttgcagtgcccagagagactctgcggagattcagggctctgctgcacggcatcgaaggtcatggacctgctggccggcgatggggtagaagcgaaggacaggccgtgttaggagctgctctggggtttgccaggttcgtgcgaatggtgacaccagaagctggggctcctcttgtggcgcaggcacgtagactggccgagactcatggagcaccccagcagagtgctcaacctcgcattaccccctttcgcgcacaaagcgccagaggggttccccctcgagaaggctggtggtcacctgcggaacgccctcctcctcagccagaccctatactgttagaggcggaacggcccgcgatttctgcaccagggagaagcgggctgccttccataggacgtcgcccagcgcctcctccagatcagccaaggccaggatctccccctgggggtgatatcgaagaggatacaccattgaaaccctggatggcagtgttaggcgtctttgtcctgtttcaggccggagccattgtccatccggtgatcgggctgctggtacttgcagcagccttggtgatagccataaggcgttggttgagacgtaggcgtcggcggtga

SEQ ID NO: 13366 - RNA, 1821 nt, synthetic construct
  source 1..1821: mol_type = other RNA
atgtcagcacagcccgggagcttgaccaggcagcagctctacgacagaattcgcgagagctcgaaggatgaggttgtgctggaagagatgatccggctgggatattggcctgagggcgccgatcagccaaacttacccgaggatttgattcgacgcagaggcgaaatcagtcgggccatcaccgatcttcataggcgcgaggccctgtggaggaatccagatgccgccctcaaggagatgcacagacggcgcaaaaaagcagctctcaaaagacgcagggaaaccaaattgcgtaatgcccagggacggcacgaacgagccctagcatggcacgccaggagggacgacgagctgctgtatttgggagaaggggtgagtgccggcttgtctcgaccggctcatcccgcacgcgaaccaacgccaggtcttccggcactggcgtctcctaaggtgctggctcaggcaatgggaatcagtctgaacgagctgagattcctcgcttacgatcgtgcactcgccacagtgagccactatcagaggtttactatcccaaagaaagccgggggcctccgtactatctctgcgccaatgccccgccttaagcgggctcagtattgggtgctagacgccctattagcgcgcgcccccgttcatgaagccgcacatggtttcgtgcccggtcggtcgatagtaaccaatgctggcgcccatgtcgggagagacgtggtcgttaacctcgaccttaaggatttctttccttcactcgactaccgtcggattaaggggaagttcagagggctaggctatgccgaaccggtggccacagtccttgcgctcatctgcacagagcccgacgtagacgctgtggagatagatggtcagaccctgtacgcagccagagggcctaggagactccctcaaggcgcccctacttctcccgcattgactaacctggtctgtacccggctggacgcccgattatccggactcgcgaggagcctggggtttacttacacccgctacgccgatgacctgacattctccgcctccggagaggcatccggtaaggtgggagcccttctgaaatacgttcacgagattgtggctgcggagggatttaccgttcatcctgacaaaacaagggtcatgaggcggggtcgtcatcaggaggtgacgggactgacagtgaacgagagagtcgccgtaccccgcgaaacgttacgccggtttcgcgccttactgcacggcctggaaagacacggccctacaggcaggaggtggggaggatcaggggagaatggcgtgttgcgagccgctctgggcttcgctcactttgttaggatggtgaccccagacgctggtgctcctctcgttgcccgggcacaagcccttgccgaacctaatggcgtgcaagttcctgcagcccgccccagaatgagcgagttcagagccagagctgcgaggggggtagagccacttcctcggtggtgggagtctgccgctcgacctgtgccagaacccgatcccattctggcgcaagctgcagctgaagctgccgctccagcaagacgagcaactccatccgggcggagtttcgtgccagtgattggccgctccagcgctcccagctcagtagacccggcaccagcaccccaagtggatccggaagccgcgcctatgaagccctggatggtggcactgggggtattcgtcctgtttcaggctggcgtcgtcatccacccagtcataggaatcctggtcctggctgctgctctcctgattggccttcgtcggtggttgaggagacggcgagatcagtga

SEQ ID NO: 13367 - RNA, 1899 nt, synthetic construct
  source 1..1899: mol_type = other RNA
atgtctcagcagccaggcagtctaaccagacagcagctgtatgatcgaattcgggagtcatctaaggacgaggtgattctggaagagatgatcaggcttgggttctggccagacggagaggcccaacccaatcctcccgacgacctgatccgtcgaaggggcgaaattgcacgggccttagcggatctgcatcggcgcgaagcagcctggagagatccggaggccgcccttaaggagatgcatcggcgccggaaaactgccgccctggagagaaggcgcgaaacccgtctcagaaacgctcgcgatcgccatgctcgagcacaggcctggcacgcacggagagaagccgagattctgcacctaggtgatggggtaagcgccggcctgagcgctggtcttgcacatgccgcccctgatgccggaacgccagctagagggccagcaccaggcttacccccccttgctagcccgaaagccctcgcagaggccatgggaatcggcctgggggagctacgcttcctggcctacgacagggccctatcaacggtgtcacactacaggcgctttacaataccgaagaaagcggggggactccgtagaatcagcgccccaatgcctcgcttgaagcgcgctcagtactggattctggacgcccttctcgctcatgcaccggtgcatcccgccgcacacggtttcgtgcctggcagatccattgtgactaacgcggctgcgcacgttggcagagatgtggtcgtaaatctggacctgaaagacttttttcccagtttggactatagacggataaagggcaaattccggggactcggatacgctgaaccggtcgctaccgtgttagcgctcctgtgtacagaacccgacgtagacgcggtggagatcgacggggctcgtctatatgctgcccggggaccacgtcgattacctcagggggctcccacaagtcctgcgctcaccaacttggtctgcactcgcctggacgcaaggctctccggcttggcaggctccctgggatttacatatacgcggtacgccgacgacttgactttctcggccagcggggaggctgctggtaaagttggggccctcctcaagtacgttcacgctatcgttgccggcgaggggttcacagtgcacccggataagacccgggtcatgaggcgcggaaggcaccaagaagtgacaggcctgactgttaatgaacgggtgggtgtgccccgagagactctccgacgatttagagccctgctccacggactggagcgccatggtccagtcggtcgtaggtggggagccgcaggtgaagcgggagtcttacgggccgcagtcgggtttgcccagttcgtgcgcatggtcacccccgagacaggagctcctcttctggcaagggcacgcgctctcgcggatcgacatgcagatcgcccatctgccaggccaggtgccagaccactgccagattttagagccaggtccgcccggggtgaagtgcctttggctaggtggtgggcacctgctcctcgacctgctcctgagcccgatcccatcctggccgaggctgaagcagcagctgcgagagaggccgaggaggctgcagctagagctgcagctagggccgcagcacccgtaccaggaagatctggggtgcccgtatccggcagacctcgtttgggcgcgccagaacctaccgctagggcagaagttgcccccgataccggagcggaacccgacgatgcccccatgaagccttggaaggtgatcctgggcatattcgttctgttccaagccgctgccctcttgcatccagcccttgggttgctggtgcttgccgtcgccctgttactgggcctgcgaagactgcttcggcggtggaggaggcggaggtga

SEQ ID NO: 13368 - RNA, 1815 nt, synthetic construct
  source 1..1815: mol_type = other RNA
atgtcgcctcagcccggatcactgacgcgccaacagctgtacgacaggatccgcgagagcagcaaagacgaagtcatcctggaagaaatgatccggctcgggttctggccggatggagcagagcagcccaatccgcccgaggacctgatccggagaagaggcgaaatcgcacgggctctggcagatctgcaccgcagggaggctgcttggagggatcccgaggctgccctgaaagagatgcaccgccggcgtaagaccgctgccttggaacgccggagggagacaaaactgcgcaatgctagagatcgccatgcccgtgcacaggcatggcacgcacgaagagaagctgaaattctgcaccttgggggaggcgtcagtgctgggttggccaatgctgatgccccagccaggggtccagcacctggacttcctgccctggccagcccaaaagcccttgccgaggccatggggattgggttgggagagctgcgcttcctcgcatacgacagagctctctctgctgtctcacactacagatgctttactattcccaagaaggctggcgggctaaggcgcattagcgctccgatgcccagactcaaacgagcgcagtactggattctggacgccctcttggcccacgtcccagtgcatggagccgcacatggcttcgtccctggcaggtccatagtaactaacgccgccgcgcacgttggacgggatgtagtcgtgaacctcgacctgaaagacttctttccatctttggactatcggcggatcaaggggaagttcagggggctgggttatgcagagcccgtggccacggtgttggcgcttctttgcactgagcccgacgttgacgccgttgagatcgacggagctaggctctatgccgctaggggtccccgtcggttaccccaaggagctccaacttcccccgccctgactaacttagtatgtaccagacttgacgcaaggcttacaggcttggccgcgtccctcgggtttacatacacgcgctatgcggatgatctgacattctccgccagtggcgctgccgcaggaaaagtgggtgccctgctgaagtacgtgcacgccatagtggccggcgagggtttcaccgtgcatccggacaagacccgtgtgatgcgtcgcgggagacaccaggaagtgaccggcctgaccgtgaacgagagagtaggcgtgccacgcgagactctgaggagattccgggctctgctccatggcctggatcggcatggacctgccggtaggagatggggagctgcaggggaaggagatgttctcagagccgcggtgggatttgcccagtttgtgcgaatggttacccctgagacaggcgccccattagtcgcccaagcaagggccctagccgataggcatggcttgcggcctgcagtgcgacctcagcctgactttcgtgcccgatctgctcggggggcaatgccattagcgcgatggtgggcacctgctccacgacctgctccagaacctgaccccatactcgccgaggcagaagcagctgcagctccagtgcccggtcgaagtggcgttcctgcatctggccggcctcgcttcggtacacccgaacctgttgccccagcgcaagctgcgccaggtaccgttgccgaagccgatgatgcgcccatgaagccctggaaggtggtcttaggggtgtttgtgctttttcaggccggcgctctacttcacccggcactaggcctcctggtcctcgtcgtggcgctggtactgggcctgaggagattgctgcgcaggtggcggagacgaagatga

SEQ ID NO: 13369 - RNA, 1806 nt, synthetic construct
  source 1..1806: mol_type = other RNA
atgtccgctcagccgggaagcctgaccagacaacagctctacgatcggattcgcgaatcatcaaaggatgaggtggtgctggaagaaatgatccggttgggctattggcccgatggggcagaccagccaaatctgagcgacgatctcatcaggcgccgaggagagataacccgagctctcggggacctccataggcgtgaagcactgtggagggaccccgacgctgctctcaaggagatgcaccggcgccgcaagaaagccgctctggagagacggcgggaaactaagctatgcaatgcccgagataggcacgccagagcgctcgcttggcatgcaaggcgagatgacgagctgttgtatctcggagaggacgtgagcgccggactgagtgcagcagccgaaggtcgggagcctttggccggactgcctgtgctggcggatcccaaagccgtggcccaagcgatggggatctccatggccgagctgcggtttctcgcctacgaccgagctcttgccactgtcagccattacaggcgtttcaccatccctaagaaaaccggcggtctgcgcacgatatcggcgcctatgcctcggctgaagagagctcagtactgggtgctggacgcagtgttgacacacgctcccactcatgaggccgctcatggattcgtccccggcaggtccatcgtcactaacgcttctgcacacgtcggccaggacgtggtcgtgaacctggaccttaaagactttttcccgtctcttgactacagacgcatcaaggggaagttccgcgggctgggatatgcagagcctgttgcgaccgtgctggcgttaatttgcaccgagccggacgtggatgcagtggagctggatgggcagtctctttacgccgcaagaggtccacgcagactaccccaaggagcaccgtcctcccctgcgttaactaaccttatctgtaccagactagacgcacgtctgagcggtctgggcaggaatttaggcttcacatatacacggtatgccgatgacctaacattttcagcaagtggcgctgccgccgccaaagttggagctcttctggcccacgtccacgagattgtagccgccgaggggttcacagtgcaccctgacaaaacgcgtgtaatgcggagagggcggcaccaggaagtaaccggcttgactgtcaacgagagggtaggcgtcccaagggagactttgcgccgcttcagagccctccttcacggcttagagcggcatggacccgctggtagagcttggggaagaagcggggaagatggggtactccgagccgccttagggtttgcccgctttgttagaatggtgacacctgaggttggcgctcctctcgtcgctcgagccaaagccttggccgaacgtgatggtgtgcccgcgactgcaataaggcccagggtgtcaccattcagggagagggcagcaagaggggttgcaccacttcccaattggtgggaacctgcagcaaggccagctcccgaaccagatcccatcctggccgaagctgccgcacgtctcgcttctggcgctccaacaggccgcagtggagtccctgccattggccgaacaacggccgctcccgctaacgaacctgttccggccccaaaggacgatcccgatgccgctccaatgaaaccatggatggtcgtggtgggactgtttgtgttgttcaatgccggtgccgtgattcatccagctctgggctttaccaccctcgcggtggccctggttattggcctggttagatggctgaagcggaggcgcacccggtga

SEQ ID NO: 13370 - RNA, 1842 nt, synthetic construct
  source 1..1842: mol_type = other RNA
atgacgctccgccctggaagcctgactagacagcagctgtatgatagaatccgggaggggagcaaggacgaggtcgtcctggaggagatgatccggttgggctactggccagatggcgcggaacaacccaaccccccagctgaactgattcggcgacggggggagataagtcgggccatcgccgacctgcacagaagggaagccctctggagagatcccgacgccgctctaaaagagatgcaccgccgacggaaaaaggccgcccttgagcggaggagagagacaaagctccgtggtgcacgaggccgccacgaaagagcccttgcatggcatgcgcggagggacgctgagattctgcatctgggagagggcgtctccgctggactgtctggcaccgacgctgatcctagagccctcaaagccggacttcccgccctagccaatcccaaggcggttgccgaagctatgggcatctcgctgggggagctgcgcttcttagcctacgacaggcccctctccaccgtgagccactatcgacggttcactatacccaagaagacaggcggcgaacgcactatttccgcgcccatgcccagactcaaaagggcacagtattgggtgttagacgccctgctggccagggctcctcttcacgaggctgcccacgggtttgtccctggacggtccattgtaacaaacgccgcagctcacgtgggacgcgatgttgtggtgaatttggaccttaaagacttttttccgaccttagactaccgcagaattaagggaaagtttcgtggcctgggctatgccgagcctgtggcaacagttctagctctgatctgtaccgaacctgatgtggacgcggtggagattgacggacagagactgtacgccgccaggggtccacgtagactccctcaaggtgcccccactagccctgccctgaccaatctcgtgtgcacaaggctggatgccaggctggcaggattggcagcatctctggggttcgcatatacccgctacgcagacgacctgactttctcagcctctggcgaggctgcagggaaggtaggtccgctcctgaagtacgtacacgccatcgtagccgccgaagggtttactgtgcatcccgataaaaccagggtgatgcgtcggggcaggcatcaggaggtaaccggccttaccgtgaacgaacgtgtcgcagtgccgcgcgagacgttacggcgtttccgagctctgctacatgggatcgaaagacatggtcccgcgggtaggaggtggggtaaagggggtgatggcacagtgttgcaggccgcgcttggctttgccagattcgttcgaatggtgacgcccgaggctggggcaccacttgttgctcaggtgagggccctcgctgaaagacatggagccagacaggctcctgctcaaccacggatcgctacattcagagcccgctcagcagacggtgttgctccactggcccgttggtggattccagcagccaggcctctcccggcacctgatcctatcatagccgaggcggaagcagctgaggcagaagctcgccggaaacgccaggatggacctggtcgagtccctggtcggagtggactacccgccgttggactcagaccagctccagcaccagaaccggctaggcaggctgatcccgtccaaggggatcgcgacggaactccaatgaagccatggatggcagtgctcggggtcttcgtgctgtttcaggccgcagcggtcttgcacccaggattggggctgttagtcttggtggcagctctggcgatcgggcttagacgctggttgcgaaggaggcgaggccggtga

SEQ ID NO: 13371 - RNA, 1806 nt, synthetic construct
  source 1..1806: mol_type = other RNA
atgtctgcccagcccggaagccttacacggcagcagctgtacgatcgaatccgggagacttccaaagacgaagtcatcctcgaagagatggtgcgcctcggtttctggccagatggggccgaacggcccaatctcccagatgctctgattaggaggaggggggagatagtacggaccctgggcgaactacacctgagagaggccctctggtctgaccctgatgccgccttgaaggagatgcataggcggcgtaagaaggcagcgctcgaacgtaggcgggagacgaagctgcgaaatgctcgcggcagacacgagagggctcttgcttggcacgctcgcagagacgaggatctgtttcacctgggggagggcgtgtcagctgggctatcagcacctgatgcggcagggcacgctccagctccaggattaccagccctcgctagtcccaaagctctggccgacgcgatgggcatcggaatgggggagctgaggttcctggcatacgaccgcgccctgacagcggtgtcccattaccgacgctttactattccaaaaaaagccggcggagagcgactgatctccgcacctatgcctcggcttaagcgcgcgcagtattgggtgcttgacgctctcctggcacatgcccccgtgcatgaagccgcccaagggtttgtgcccggaaggagcatcttaaccaacgctcgagcgcacgttggacgggacgtagttgtgaacctggacctcaaagactttttccccacacttgactacaggcgggtgaagggaaagtttcgcgggctagggtatgcggaacctgtggcaaccgtgctggcgctgttatgcaccgaacccgacgttgatgcagtggaaatagatggccagcgcttgtatgccgcacgtggccctagaagactgccgcagggcgctcctacttctccagccttaacaaacctaatctgtacccgattggaccagagattgtcgggcctggggcggagccttggctttacttacaccagatacgcagatgatctgacattctctgccagtggcgaagccgctggtagggtgggacctctgttgaagtatgtcggtgagatcgtggcctccgaaggcttcacggtacatccagataaaacccgggttatgcgacgggggcgccatcaagaagtgacggggctgaccgttaatgagcaggtggccgtccccagggagacattaagaaggtttagagccctgctccacgccctcgaaaggcatggccccacaggtcgtagatggggaaggtctgccgatgccggcgtgcctagagctgctctcggcttcgcccggtttgtcgccatgatcaccccagaggcaggtgccccattggttgcgcaggcacgaaggctggctgagagacaccgtgccggagcagctatggcaaggccggtcatccccgtcttcagatcccgagccgcacaaggagctgcaccatgggaaccgtggtggaggcctgcaaaaccgcaggcccccactcctgaccccattctgatagaggcagaggccgaggccgccgctctaagagaaactgagggtgaccgcccacgccggagaacttcagctcggagttggttgccaagcattgggcgcagcaccgacacagctcttgccggtactggccgcgctcctatgaagccctggatgattgccctcggcgttttcgtactggtacaagcagccaccgtcattcaccccgccctgggaggtcttgtcttgattgctgcacttggagtggtcctctggagatggttccgtcggcgctga

SEQ ID NO: 13372 - RNA, 1836 nt, synthetic construct
  source 1..1836: mol_type = other RNA
atgagcacccagccaggatccttgacccgccagcagctgtacgacaggattcgcgagagcagtaaggacgaagtaatcctggaagaaatgattaggctcgggttctggcctgatggcgcagatcgccccaacgtgccagctgatctgattcgccgcagaggggaaatctccagagagctcgcggaccttcatcgccgcgaagctctgtggagagatcctgaggcggcgttgaaggagatgcatcgacgtcgcaagaaggccgcactcgagcgaaggagggaaactaagttacggaacgccaggaccaggcatgaacgtgccctggcatggcatgccaggaggaacgaggacgtgctgcacctcggtgagggtgtttctgctggcctgctggcccctgacgagacaggtagagaacccggacccggccttcccagacttgcaaatccgaaggccctggcccaggcaatgggcatacccatgggggagctgcggtttctggcttacgacagggctttggccacagtgtcccactatcggcggttcaccatccctaaaaagacgggcggtactcggctgatttccgcaccaatgccgaggctgaagagagcccagtactgggtgcttgatgcgttgctagcccacgcccctgtgcacgaatctgctcacgggtttgtgcccgggcggtcaatcgttacaaacgcctctgctcacgtcggccgtgacgtggtagtgaatctggatctgaaagacttcttccctactctggactatcggcgggttaaaggaaaattccgaggccttggctatgccgaacccgtggcgacagtgcttgccctcctgtgtacggaacctgataccgacgatatcgagatcgacgggcagagactgcatgccgctagaggccctcgaaggttgcctcaaggtgcaccgacctcaccagcgctaacgaatcttatatgcatccgtctcgaccggcggctaactggtttggcccggaatctcggatttacatacactcgatatgccgacgacctgaccttttcggccagtgggacagcggcagaaaaagttgggccactgttaaaatacgtcggtgaaattgtagcggccgagggtttcaccgtgcaccccgataagactcgtgtcatgagacgggggcggcatcaggaagtcaccggactcactgtcaacgaaagagtggccgtgccacgcgagacactcagaaggttccgcgccctgttacacgccctcgatcgcaatggaccagccggcagaagttggggacgctctgccgatcacgctgtgctcagggccgcattgggcttcgcccattttgtacggatggttaccccagaggcaggggctcccttagtggcacaaacccgcagactggcagagaggcatggcgtcggcgtaggcgaggctagacctcgaatcccaagctttcgacagaggtcagctgagggagccgttccgcttgcacgctggtggagtcctgctgagcctagcgcacctaggcccgacccaatcctggcagaggctgaggctgaagccgcaaaagctgctgagcacgcacgtaggcccgctgctccaggaagatccggcctaccaagcataggcagagctgggccatctggagcagcccgacccttaggagatcccgagccccctagcggatcaggagctgatggcggcacaatgaagccgtggatggtggtgctcggggtcttcgttctgtttcaagctggggccgtggtccaccccgtgattggtctgctggttttggtcgccgccgtcgtgattggactcagacgctggtttcggcggcgaaggtga

SEQ ID NO: 13373 - RNA, 1797 nt, synthetic construct
  source 1..1797: mol_type = other RNA
atgaccgcgcaaccaggggccttgacacgtcagcagctgtacgacagaattcgggagacgtccaaggatgaggtcatccttgaggagatgatccgcttgggcttctggccccaaggcgagactcagccatctcctcccgaagagctcattcgacggcggggcgaaatagcccgggaactggcagcgctccatacggcagaagccaggtggcgtgatccagaagcagcactcaaagaaatgcacaagcgcagaaagaaggccgccctagagcggcgcaaagaaaccaaacgcaggggggctgaacagagacatgccagagcattagcctggcacgagcgccgagccgaggagttagtttttctgggagacggggtgtccgctggattacgcgccgatgcagctgcacctccagctcctaggccagggcttcccgtccttgccacccctaaagcgctcgctgacgctatcggtatccccttggccgagctgaggttcctcgcctatgaccgcgcactgagtagaatcagccactactggcggtttacaatcccgaagaaggcagggggagtacggctcatcagcgcaccaatgccccgactgaagagagcccagtattggattctggacaacctgctcgcacacgccccagtgcatgatgcggcccatggctttgttcccgggcggagtatcgttacaaatgcggctgcccacgtaggacgggcagtagtcgtcaacttggatctgaaagatttcttccctactctttcattccgcagggtgaaaggaaagtttagaggactgggttacgccgaacccgtcgccacagtactggccctgctgtgcacagagccggatgttgacgaggtggaaatcgacggcgaacgactcttcgcagcaagaggaccccgacgtctaccccaaggtgctcccacttcaccgctctttaccaacctgatttgtgccagacttgatgccaggttgtccgggctggctcggtcaatgggcttcacctacaccagatatgcggatgacttgactttcagcggcgcagcggctgaaaagatcggtgccctgattggcctggtgggggagatagtggcagctgagggttttgtggttcaccctgataagacccggatcatgcggcgaggctctcggcaagaggtaaccggcctgactgtcaatgagcgtgtggccgtgcccagagacgtgcttcgcagattcagggctctcttgcatcagattgaggcgacgggccccgctggtaaaagttggggccagaccagagacgttatggccgccgcgaggggctttgcctgctttgtgagaatggtgactcctgaggctggagagccactcgtggccacagtgcgacgcttaggcgagaggcacgggttgacagggaccgctccagctcctgctgccttccgagcaaaagcagcagctggagaaccgcctctcgcccgttggtggattcctgccgctccacctgcgccagaacctgaggctgtcctaagggaacccgccccccctcaaccagccaaacctatgcgcagcgccctagacctggcttcccttagggcagacctgagggatagggctgcaccccctgctggaccagctcaagacccgggtgaacccgccatgaagccatgggttgccgtcattggggtgctggtgctgtggtcggccgcttctgccataaatccggctctgggaacaatcgtgctgatagcagctattgtcatcgccactcgctggcttattagacgttggaggcggaggagacgccggtga

SEQ ID NO: 13374 - RNA, 1821 nt, synthetic construct
  source 1..1821: mol_type = other RNA
atgtcggcccaacccggagagctcaccagacagcagctgtacgataggatcagagagagcagtaaagacgaggtgatattggaggaaatgattcggcttggcttttggccccgaaacgcgaataagccagacgtacctgaagcacttatccgccggcggggcgagattgatcgcgaactcgctgcactgcacgcccaagaggcaaggtggcgtgaccctgacgcggctctgaaagagatgcataagcggagaaagaaggccgccatggagaggagaaaggagacgaagaggggacacgcccagacacgatatgagagggccgttgcttggcgggagaggagagccacagagatcttatatttgggcgaaggtgtgtctgggggccttggagggactgatccagctcggcctttgaaggcgggactccccgaaattactagcccaaaagccctcgcagatgcgatcggagtgcccctcgcagaactgcgctttctggcgtatgaccggaagctgagccgcatctcccactaccagcggttcgcaattgctaagaaaacaggcggtgtcagacagatctcagcccccatgcctagactgaaacgagcccagtactggatcctggatgcactgctagggcacgccgcagtgcatgatgccgcacatggtttcgtccggggcaggtctatcgtcaccaacgctgctcgacatgtgggccgggatgtggtcgttaatctcgatcttaaggacttttttcctacactcgacttccggcgagtgaaagggaagttccgcggactagggtatgccgagcccgttgctacagttcttgccctcatttgcacggaacctgacgtagacgagatcgagatagatggagaacgcctctttgccgcacggggtccacgcagattgcctcagggtgcccccacctccccgttgttaaccaacctgatctgcgctcgcctggatgcccgattaaccgggctggccgcctcacttggcttcgtatacactcgttacgccgacgatatgaccttctctgccagtggcgaagctgccgccaaagtgggcgccatgctgaagtttgtgaacgaaattgtggccgcggaagggttcgtggttcaccccgacaaaactagggtgatgcgacgtggagggcgacaggaggtaacaggactggtggtgaatgagagggtcgccgtgcctcgtgacgttttacgccggttccgggcattgctgcaccagatcgaagcaacagggccagcggggaaaaggtgggggaaggcacgcgacgtcatggatgcagccacgggtttcgcctgttttgtgagaatggttaccccagagattggcgaggagcttctcgctactgtcagacgcctggacgcgagacacggagctgcacgtgcaggagctgctccgtccaagtcaccacacggcgactttcgaggcaaagccgccgctggtgtcgctcctttagccagatggtggactcccgcagaacctccacccccagaaccagagccaatcctgagagaaccggaggcagcgcctgaaccagatcctccgaccagcccacaaaggccgaggagtgctctggacatcgccggactgcgcgctgaaatgagagacagggctgcatccgctcccgaacctcaacccgatgagactgagatgaaaccctgggtggctgccataggcatttttgtcttgctgaatgtcgctttcggcattcatcccctgcttggcctcatagccctggttgctaccgtagtgatggtgattagaagggctctacggcgcagaaggaggcgccgttga

SEQ ID NO: 13375 - RNA, 1833 nt, synthetic construct
  source 1..1833: mol_type = other RNA
atgaccgtccaacccggaagcctgactaggcagcagctgtacgacaggataagggagtcgagcaaggatgaggtcattttagaggagatgatccggcttggcttctggcctggagacgaggcccaacccaacttgccagctgagttaattaagaggcggggcgatatccaccgggaaataagtgagctgcacaaaaaagagaggctttggtcagatcctgagactgccttgaaggaaatgcacaagcggagaaaaaaggaggccctggctcggaggaaggagacgaaattgaggaatgccagaggcaggcatgatcgcgccctagcgtggcacgaacggcgtaagagcgacgtgctctacctcggtgagggagtgagcgccggactgcattctgatggcgttgcgaagcctctaaagccgggactcccggccttagggtcaccgaaagccttggctgaggctatggggatcccccttgccgaactgagatttctggccttcgacagggcactgtccagaatttcccattatcagagattcactatcccaaagaagaccggcggtgaacgtctgatctccgcaccaatgcctcgactgaagcgtgctcagtactgggtcctcgatgcgatcttagacaaggtggctgtgcacgaagcggcccacggctttgttccaggccgaagcattttgacaaacgccggtgcacatgtagggcgcgaagtagttgtgaacctcgatctgaaagattttttcccctccctcacctttaaacgggtgaagggaaagttcagagggcttgggtaccccgagcctgtcgctaccgtactggccctgctgtgtactgaacccgacgtggacgaacttgagctcgacggggagagacttttcgcagccaaaggaccaagaaggctgccacagggtgcaccgaccagcccaatgctaacaaatctcgtgtgcattcggctggacaagagactcgccgctctcgccgcgtctcttggattcacttacactcgttacgccgacgacatgacattttcggccagtggcgaaggggccgcgaaagtgagtgccctgctcaaatatgtgggagagattgtaacggccgaagggttcacagttcaccccgacaaaacaagagtcatgcggaggggtcggcatcaagaggtcaccggcttgaccgtgaacgaacgcgtggccgtgccaagagaaacactgcgcaggtttagagcactgctgcaccagatcgggaaaaatggtcccgagggacgacactggggcaaagcacgcgatgtcttcgacgcggctctagggttctcattttttgtgagaatggtgtcacccgccattggagatccactcatcgcagaggtgcgtagcctggctgctaggcatggacatgcgcctaaagcagtccccgagcctacagccttccgagccaagtctgcacgcggcgaagcacctctggctcgatggtggatacccgctgagcgaccggcacctgaaccagaagccattcttattgaaccccctaagccagcaccccgaccagcacaggccaatgctcctcgctccgctatcggcgctgctgctggtatgcgcgctcggatgcagcaggagggaccttccggcgcatggaaccaagggtctggtcggcagacggtggaggatgggtctatcggcagtgcatttcgcaggttgccccgccgcacctataagatcctcggcatcctgatgctatttggcttggtcgcctctgtttccccacgcttagctgcactggggctgatattcctgattggctatgttatcgccgaaagaaagaaacggtga

SEQ ID NO: 13376 - RNA, 1800 nt, synthetic construct
  source 1..1800: mol_type = other RNA
atgacagtcagaccaggctcactgacgaggcagcagctctatgatcggatccgggaatcctccaaagacgaggtcgtgcttgaggagatgatcagactcggcttctggcctggtgatgctgctcagcccgacttgccggcagcattaatcaagaggaggggagaaatccaccgagagatagcggatctgcacgctgaagaacggctctggcgtgaccccgagactgcattgaaggccatgcataagcgccggaagacagaggcactcgccaggagacgcgaaacgcgcttacgccacgcccaagggaggcatgacagagccctggcctggcatgctaggcgagggtctgaggtcctgttcctcggtcccgaggtgagtgcaggactacattctcacgcagccaggcggcctcttctgccaggattacccgatttggccacaccgaaagcactggccgatgctatgggcctgccgttggccgagctcaggttcttagcgtacgatagggccctcgcacggattagccactatcagcggttcacgattcccaaaaagaccggcggggaacgcctcatttctgctccaatgccgcggctcaagcgtgcccagtattgggtgctcgacgctatacttgcgaaagtgcccgtacacgaggccgctcatggcttcgttccagggcgcagcatcctgacgaatgccggagctcacgtgggtagagacgtggtagtgaacctggacctggaaaattttttccctaccctgaccttcaggcgcgttaaaggcaagttcagagggctgggatacccagagtccgtagctaccgtcttagctctgctgtgtactgaacctgacgtggatgagctggaactagatggcgaacgccttttcgccgctcgcggtcctcggagattgcctcagggtgcccccacatccccgatgcttaccaacctcgtttgcacccgcctggacagacgtctggcagctctggccgctagtctggggtttacttatacaaggtacgcggacgatatgaccttctctgcatcaggggagggagccgcgaaggtgagcgttctgctcaggggagttggcaccgtcgtagctgccgaggggtttacactacatcccgataagaccagagtgatgcgtagaggtcggcgccaggaggtgactggcctgacagttaacgaaagggtcgccgtaccccgagataccctaagaagatttcgtgcgttgcttcatcagattgatcggagcggaccagctggaaaacggtggggggttgcccgacacgtctttgacgccgcgttcgggttcgcctgctttgtgcggatggtgagtccagccactggcgaccctctggtgagcgaagtgagacgcctgtcagccagacacggcactgctcagagagcagtccctgaggcttccgcatttagagctcgcgcagctaggggtgagacaccccttgcccgttggtggtcgcctgctgaacgacccccacctacccctgagccaatccttctcgagagtcctgacccagccccatccactgtcccccaaagcgcaataggagcagcagctggcgcgcaaacagccgacagggatggggtgtggggacgaatgcccgacgacctgcctccaggaaaagccggcttaagccggattgtgtcaggcctccttactctagccgggggtctggtgctgtttgtcgccctcttgaggatctctcccccactggcgttgctgggagcccttgtgctggcaggcttgtacgcagccggcttttttcggcgacgatga

SEQ ID NO: 13377 - RNA, 1830 nt, synthetic construct
  source 1..1830: mol_type = other RNA
atgacagtgcaacctggcagcctcacccggcagcagctttacgataggattcgggaatctagcaaagacgaggtggtattggaagagatgatccgactaggcttttggcctgggaatgagaagcagcctaacctgcccgccgacctcattaaaaggaggggagagatccaacgggaaatcggcgagctctaccgccaacaacgcctgtggagagatcccgagtctgccttaaaggagatgcataaacgccgaaagaaagaggcactgctgcggaggaaagagacgcgcagaagaaatgccgctgccagacatgaaagggcactcgcctggcacgaacgccggaagaccgaaatactttatctcggtgcaggggtgagtggcggacttggagctaacgaacctgagcttggacgatctccacgtgatgggctgcctgaagtcgcaacaccgaaagccttagccgacgctatgggaatccccctaggggagcttagatttctcgcgtatgatcgggccctgtcacgggtgtctcactaccagcggtttactatcccgaagaaaaccggcggtgagcgtctgatctcagccccgatgcccaggcttaagcgtgcccagtactgggtcctggataacctactggccaaggctcccctccacgaggcagcacatggctttgtccctgggagaagtatattaaccaatgccggtgttcacgtgggccgagaggtggttgtgaacctggaccttaaggactttttcccaagcctgacatttcgccgtgtgaaaggcaagttcagaggcctggggtaccccgaggctgttgccacagtgctggccctgctgtgcaccgaacctgatgttgacgagctggacctggacggtgaaaggctcttcgccgcacggggacctaggagattgccacagggcgctcccacatcgccagcactaactaacctggtgtgtattaggctggataaaaggctcactgccctggccggatcattgggcttcgcatatacaagatatgccgacgatatgaccttttccgcgtccggggagggtgctgcaaaagtggccgtcctgctcaagatggtgggggagatcgtggccgatgaggggttcaccgtacatcctgacaaaactcgggtcatgagacgaggacggcgccaggaagtgacgggattgacagttaatgagcgcgtcgctgtacccagggataccctccgccgattccgtgccctcctacacggtattgataagcagggccccgaagggaagagttggggcgtagctagggacgtgttcgacggcgccctgggatttgccttcttcgtgcggatggtcacccccgaaatcggcgaaccccttgtcgcgcaggtaagagctcttgccgctcgacacggaggtcgggacgttgcagctccagccataagcgcatttagagccaaggcggcacgcggggaagcaccattggatagatggtggcagccagcagagcgtccagccccaaagcccgagccagttttagcaggagcagcccccgcgcctgctccaaatggaattagatctgctcctggtgctgctgctggaactgggcggccaagtcccgaagctacgtccgtctggggcccaggacctgctagatctgctccggagtcaggctccccgtccgtgactggtagtctgtggcgcttgagcataggcttgctgaagctggcggccctgttgatgctcttcagcgccgggatggtgttcgcgcctaggttggctattctgggcgtgttcgccctcattggcgtcttagcgtaccgctttatcaggcgagggtga

SEQ ID NO: 13378 - RNA, 1788 nt, synthetic construct
  source 1..1788: mol_type = other RNA
atgaccgaacccggaactcttacccgacagcagttgtacgaccggattcgcgaatcgtcaaaggacgaggttatccttgaggagatgattcgactcgggttttggcccccgggtgccgatcaaccggatgtaccagccgacttaattcgtagaagagcagatctgcagagagaaatcgccgatctacatagacaggaggccctttggagggaccctgaggctgccttgaaggaaatgcacaagcggaggaagaaagcggccctccagagacgcgcagaaaccaagttgcggaacgccaaaggacgccacgaacgagccctggcttggcacgagcggaggcaacaggagctgctttatctaggagacggcgtctccacagggttgcatcagaccggaacggccatggctccaaaggcaggactgccttccatagcttctcctaaagccctggctgaggcgattggagtttctctcagcgagctcagatttctggcctacgaccgcgcagtaactagggtaagtcactatcagcgattcacgatacccaaaaaggccggcggagagaggctgatatcagcgcccatgccccgccttaagcgagcacagtactgggttctggacaacctgttagcaaaggccgtggtgcatgatgcagcacatggcttcgtgccagggcggtccatcctgaccaatgcaaccccccacgttgggcgcgatgtggtagtgaacctcgacctgaaagactttttcccgacccttacattccgcagggtgaagggcaagttccggggactcggttacagcgaagccgtcgccacggttcttgctctcatctgtaccgagccagacgtggacgaactcgaagtggacggcgagagactgtttgccacacggggaccaaggagggtccctcaaggtgcccctacgtcacccgtcctaactaatgtgatctgctttaagctggatgcgcggctgagtgggttagctcgcgcgttaggatttacctatacacggtacgcagacgatatgactttcagcgccagcggcgaagctgccaaaaaagtgggggccctgcttaagtatgtgagagagattgtgaccgccgagggtttcgtggtgcaccccgacaagacacgcgtcatgcgccgtggtgcacaccaggaggtcactgggttgaccgtcaatgagagggtggccgttcctagggatacactccgcagatttcgggccctgctgcaccagattgagacaagcggccccgtgggtaaaacttggggcgctgctcgggatgtcctggatgctgctctcggcttcgcgtttttcgtgcgtatggtgaccccgtcctctggcgaggtgttggtcacccaggtcagggcattagcggctcgtcatggggctactccagttccagccgttgccccaagggactttagagtgaaagcagccaggggggaaacacccctgggtcgatggtggattcctagagagaggcctgcaccagcccctgaaccagttatcgtggcgcatgaagccgctgcacaagcagctgccgcaccaggtacatctcgggccacaagtgctggacaagcacagctaccccccgccttcacacctgctcctgctgctcctgccgctaaacgaggcgggaccctcgcaactatcggcaaatggatcttggggctgctggtctttatcgtactcatgggcatacaccccgtactgggcggactgttcatcgctgcggtggtcggctacatggctactcgtaagagagggggcagagattga

SEQ ID NO: 13379 - RNA, 1572 nt, synthetic construct
  source 1..1572: mol_type = other RNA
atgacggaaactgtttcgcccggtactatgacaaggcaggaactgtacgacagaatacggcagtcaagcagagatgaagtgatactcgaggaaatgatccgtttaggcttctggcctgatgaaggagcacctgctcccgccgcagagacgattcgagagcgggcagaagccatgagagagctcagcgagctgcagagacagaatgccacactggccgaccctgttcgcgcgctaaaggaaatgcacaagcggcggaaagccgaggcgatggctagacgacaagaaacaaaacgacgtaatgcggaggctcggcagacccgtgctttcgcatggttcgagaggcgaaagcgcgacgtactctacttaggggaggatgtctcccccggtctacacagccgcaccacgaccatcccacttcacgacgggctgcccccattggctgacgctaaggcgctcgctgacgccataggagtcccgctcggagagttgaggtttctcgcttttaaccggaaggtggcgagtgtgaatcattatcagagatttaccatccccaagaaaagtggaggcgagcgcctgatttctgcaccgatgcctagactgaaaagggcccagtactgggtgttggacaacatcctggccagagtacccctgcacgatgccgcccacggttttgctccacaaaggtcaattctgacaaacgcccggaatcatgtgggtagggacgtagtgattaatctggatttaaaggacttcttccccaccctgacatacgcacgcgttaagggccttttcgaagccctggggtatgctgaggcggtcgctattcctcttgctctgttgtgtacagaacctgtggtggatgaggtgactctcgatggggagcgccatttcatcgccgacggacctaggctcctaccacaaggcgcaccgacctccccagccatcactaacctcatctgcagacgactggatcggagattgatgggccttgctcgcacactggggttcgtgtattctcgttacgccgacgatctgacctttagcgccagtggcgaggccgtgaagaagattgggacgctgctgaaagctgtgcacgggatcgtcgaggcagagggctttaaggtgcatccagataaaactcgcgtgatgagacggtcaaccaggcaggaggtaaccggccttactgtcaacgaggccctggccgttcccagagacttactgagacggtaccgagccgtgcttcagcaggtcgaaaggcatggaccagacggaaaacacttcggccctggcaaggatgtgattcggtcccttttgggttttggtcacttcgcggtcatggttgaccccgaatctggcactcccctcctgcagagggcacaacgcttggccgcccaatatgcacctacacgctctgaaaggctacccacccgtgcagcctttcgaaaagctgcttccgcagggcagacacctcccggaaggcagtggactccagcagagcgcccacctccagcaccagatccggttctcgtcgccctggctcggcaggaagaaaaaaccagggccgctcagtga

SEQ ID NO: 13380 - RNA, 1815 nt, synthetic construct
  source 1..1815: mol_type = other RNA
atgaatgagacagtcgccccggggactctaacaagacaggagctctatgatcggattcgtcagtcttccaaggatgaagtgattctggaggaaatgattcggctgggcttctggcccgatggtgaagatgccccagcccctgcagccgacgcaatacgaggacgagccgaagccatgcgggagttaaccgagctgcagcgccagaatgccacccttgccgatcctgaaagggccctaaaggagatgcacaagagacggaaagccgaggccatggcacggagacaggagactaaacgtaggaacgcagaagctcgccaaagtagagctttcgcgtggtacgaccgccgcaaacgcgacgtgctctacctgggcgaggatgtgtctttggggctgcatacacgcacaactacaaccccactccgtgacggactgccacccttagcagatgccaaggccttagccgacgctatgggcgtccccctcggagaactgcggttcctcgccttcaaccgcaaggtcgccagcgtcaatcactaccagcggtttaccatccccaagaagtctggcggggaaagattgatctcggcgcccatgccacgactcaaacgggcacagtactgggtgctcgataacatcctggcacgcgtgccgttgcatgaagcagcgcacgggttcgctgcccagcgtagtattcttacgaacgcacgcaaccacgtcggcagagacgtcgtgatcaatttggacctgaaagacttctttcctaccctgacctatgcgagggtgaagggcctgtttgaggcccttggctatgccgaggctgtggccattcccctagccctgctgtgtacagaacccatggtggacgaggttgcactggacggggagaggcattttgtagccgatggacctaggcttctaccacaaggcgctcccacgagcccggctataactaacttgatctgccggaagctcgataggaggctggtgggactggcccgaacccttgggttcgtttactcacgatatgcggacgaccttacgttctccgggagcggcgaggcggtgagaaagatcggcactctgttgaaggccgtacacgggatagtggccgcagaggggttcacagtacaccctgataaaacaagggttatgcggaggagttcccgccaggaggttactggtctgactgtaaatgaagccgtggcggttcctagagacttgctgcggcggtacagagctgtactgcagcaagtggaacgccatggtcccgcgggaaagcactttgggcccggaaaagacgtcatcaggtcactgttgggttttggccactttgcagtgatggtggaccccgagtccggcgcacctctactgcagagggccttacggctcgcccctcagcatgcacctgcacgtagcgctcgcagacccacaagagctgcctttaggaaggctgcagctgctggacagaccccacctggaaggcagtggaccccagctgaaagaccacctccggctccagaccccgtgcttgtcgcactcgccaggcaagatgcaaaaaaacgagctgcccaagcacgagccgctgctccaagcccttcaaggcctccaaatgtgccacccccaccaccaggcgttaccagacctgatggccccccacctgcagcaagacccgctactgctccctctggaaagcgtccgtggtttgttaccgccctggtcattctgctcgccctcgctctgcttcctcttccgggtggacccgctatggcgggtgctttactcttcctgtatttctcccgatggtggaaacggtga

SEQ ID NO: 13381 - RNA, 1425 nt, synthetic construct
  source 1..1425: mol_type = other RNA
atgattcggctgggcttctggccagatggcgaagatgcccccgcaccagctgcagatgtgattcgggcccgcgctgatgccatgcgagaactgacggaattgcagcgccaaaatgccatgctaggagatccccaacgtgccctgaaagaaatgcacaaacgacgaaaggcggaggctatggccagacggcaggagacaaagcggaggaacgctgaggctagacagtctagagcctttgcatggtatgaccggaggaaacgggatgtactatatcttggtgaggacgtctccaggggtcttcatgcgagaaccaccgccactctgctccgcgacggtcttccacccctggctgatgccaaggccctggctgatgctatgggcgttcctttgggagagttgagattcttagcctttaatcgaaaggtcgcaagtgtcaaccactatcagcgcttcaccatcccgaagaagagcggtggagaacgactcatttctgcccccatgccacggttaaaaagggcacagtactgggttctggagaatatcctcgcaagggttccccttcatgacgccgcccacgggttcgcacctcaacgttcgatcctgacaaacgcccgcaaccacgtggggagggatgtcgttatcaatctggacctcaaggatttcttccctactctcacgtatgcccgggtcaaggggctgttcgaggctctgggttacgcagaggctgtagccataccattggccctgctgtgtactgaaccgatggtggaccaggttgccctggacggagagagacactttatagccgacggaccaaggcttcttccacagggggcccccacttctcctgctattaccaacctgatttgcaggaaactcgacaagaggctagtcaggctcagcagagtcctcggcttcgtgtacagtagatgcgcagacgacttgacctttagtggctccggcgaggcggttaaaaagatcggcacattaatcaaagctgtgcacgggatcgtggcagcggagggattcaatgtgcatcccgacaaaaccagagtgatgcgcagatcctccagacaggaagtgacagggctgaccgtaaatgaggctgtggcggtgccccgcgatctcttagtggcactggcccgccaggacgaaaagaaacgtgctgcacatgcacgagtaaccgccccgattccctcacgggtccctaacgtgcccagcccacctgctgatgccactagggcagcgggccctcaagcagctcctgctacaggccctgccacagccccaagcaagaagcgccagccctggtttgtgactgcgctggtgatcttggtggccctcgcatttctgcctttgccgggagggccagctatagctggcgccatgctttttctgtacttttcacgttggtggcggcggtga

SEQ ID NO: 13382 - RNA, 1836 nt, synthetic construct
  source 1..1836: mol_type = other RNA
atgaatcagacagttgcccccggtactctaacccggcaggagctctacgaccggattcgcgaatcctccaaggatgaggtgatccttgaggagatgatccggttgggcttttggccagacgggacagctgctccctctccagcagcagcagctatacgcgagcgcggcgaagccatgcgagaactgggcgagttgcagaggcagaacgcactgtggtccgatcctgagagagcaatcaaagaaatgcataaaaggcgtaaggccgaggccctcgcacaacggactgaaacaaggagaagacatgcacaggcccgacaggacagagctgaggcctggcacatcagacgtcaaagagaagtgctgtacttaggggaaggagtaagtgccggactgagcgccgacccaatccgacgaagtctgttgcccggtctgcccgatattgccgacgccaaggccctcgctgacggcattgggattccgttaagcgagctccgtttccttacctactctcgcaaggtgtcatctgtgagccactatcagagatttcgaattcctaagaaaaccggaggcgagaggcttatcagcgctcccatgccacgcctcaaaagggctcaatactgggtgctcgataatattcttgccagagtcggactgcacgaggccgcccatgggttcgtgcctcagagaagcatcctgacaaacgctcgcaaccatgtgggcaaggatgtggtggttaacctggaccttaaggattttttccccacactgacttacgcccgggtcaagggaatgttcagaagcctcggatatgcagagaaggctgccattcccctggcgcttctatgcactgaagctaaagtagacgaagtgcacctggacggtgaacggcacttcgtgggcgatggccgacgtttgcttccacagggtgcccccacctcacctacgatcaccaacctgatttgccgctatctggatcggcggctcgatggcctcgctaatgagctgggcttcacgtactcccgctacgccgacgatctcaccttcagcggatcaggggaggccgtcagaaaaatcgggacactgctgaaagcggttcagtcgatagtcactgccgaagggttcaccatacatccagacaagacccgcatcatgcgccggtccggacatcaagaggtgacgggcttaacagttaatgagcgggttgcagtcccacgtccactcttacggaggtatagggctgtactgcagcaggtagagaaacacggaccagctgggcgacactttggccctggcaaagacgtcgtgcggagcctcctggggtttggtcagttcgcggctatgattgatccggacaaaggtagggcactattagaacgagcaaggaggctggcctcacagtccacagccaattctaagttgagtcgcagtggaggacaagctgcctttcgggctgccgctgcagctggtagagcacctgccggatgtcactggacccctaccgaaaggactgctcccgcgttggatccggtgctagcagccctcgaacgcgaggaggcgaagaaggctgagcaggcccaaaggaaggcacacgcttctcagcaggcgatggcccagtctgcgcttaggcgtccttcagcagaacccgcagggcaagcgaggggtcaagcacaggggagttccgggcagcctgccagaaaaaaactgagatttacccctaagcggctgctgatgatcgcggccatcgtcatattcccgactttgattcccggcgttggcccatttatcgccggcctgcttctgtatttgtatctgaggtggatgtggaagcagggctga

SEQ ID NO: 13383 - RNA, 1635 nt, synthetic construct
  source 1..1635: mol_type = other RNA
atgtccatcctgcctgagaacacgcagccccggactaggcaggaactgtatgatctcattagacagacttcacgggacgagttcgtgcttaatgaaatgatcaggcttgggttctggaagaagaacgaaggccagccgagcctccctgaacagctcattaggcaagagacacagctgcaccaagaattaaagacccttgtttctgagaaaaagagactcgatgaccagcagaagatgctcaaggaaatgagaaaaaagcggatgttagagagtcgtctgaaacgcgaagagacaaaaaaacggcgcgagttggagaggcaacaaaaagctgagaactggaagaataagaaaaccactgaaatcgggtacctcggagaaaatgtcagtagcggcctgaattttactgcctccaatccagagaaactgtctagatacaatatcccgttttttaccaacgcagtgtccctggcgcaagctctgaacatttccgttggagaactgagattcttagccttcagtagagaggtcagcaaggttaatcactaccaccgattccagattcctaagaagaccggagggcagaggctaatcagcgcgccaatgcctcgattaaaaaaggtgcaaacctggattctggagaacgtgctggaaaagattgagctacacacgagcgctcatgggttcgtggcatcacgcagtattgtgtcgaacgccattccccatttgaaggccgagacagtcgtgaaccttgacttgaaaaacttttttcctactctgacatacgcccgcatcaagggactgttcctgggcctggggtactctgaagccatggcaaccttgctgggtctgctctgtacggaacccgagacagacgcagttatcctggacaaggaaacatggttcgtagcctctggggaacgctttttgcctcagggatccccagcctctccagcgctgacaaatatcatctgcgccacccttgacaagcggttgcagggcctcgctcagaaactaggatttgtttacacacgatatgccgacgatcttactttttccgccaccggcgaaggcaccaagaacatccacaagataatttcactcacacagaaaatcgtcgaagatgaaggcttttcagtgcaccccgataaaaccagaatcatgaggaaaggaagcaaaaaggaggtgaccggtatcgtcgtgaacgagaaaccctcggtagataggacaactttgcgcaagttccgggctcttctgcatcagatggaaaaagaggggttcgctggtaagagctggggtcatacccccgatgtgctcgcagcagtggagggctatgctaattttgtcaagatggtggatgctgagaagggtgacaagtttaagcaacagatcaaaggcataattgcaaaatggggcgactccatacccactcctgtccgtaaggtatatcccaaaaaagagaaacagactgtcagtccagtattcgagacaatgacaatactgcctaccagcgaaacccagatctctgagaatcaggtggtgataccgcaggttacgattccagagactgccaataaggacacttcaaacgagaagccagaggagaaaaaaaccttctggaagacctggaaaaagtga

SEQ ID NO: 13384 - RNA, 1578 nt, synthetic construct
  source 1..1578: mol_type = other RNA
atggccgaggagactccacctcagccacgcactcgacaggaactttacgatcaggtgcgccagagctccagagaagccgttacgcttagggaaatggctcgcatgggtttttggcctaaaggccaagggatccctcccattcctcaggctctcctcgagaagcagcaagccctgcaacaagagctgcagcccctggttgagcagagccgcaagatggaggaccgcgtgcggatgcttaaggaactgcggaaaaaacgcatggcagaatcaaggcagaagaggaaagagactaaagagcggcgtgagcgggaacgacaggccagacaagccgcctgggagcagcgtaaaacacatgagatactgtatttaggagagggtgtctctggcgggttgagtcagacggacgacgacgcccagaagctgcagcactatcagttgccgagatttgaaaatgcaaaagcactcgcggaagacatgggcatcactgtgaacgcactcaggttcctggcatataacagacctgtgtccacactgacccattaccagagattcaccatgccaaagaagactgggggccaacgcttgatttccgctccgatgccgagattgaaggatgcacaatactgggtcctccatcacctgctgcagctgctcccagtgcacgaggctgttcatgggttctgcgctgggcgatccattgtgtcgaatgctcggcctcacgtgggcaggcaggttgtcctaaacttcgatctgaaggacttttttcccacactcacgtacacacggatcaaagggctgttctgcgctctgggttatgcagaggccatagcgactcccctggcgctgctttgtaccgagccagataccgatgaagtgaccctggatggtcaaacgtattatgtagcaaatggagaacgataccttcctcagggcgctcccacctcacctgccttgaccaacctaatttgtttaaggctcgacagacgccttacaggactggccaccaaactgggcttcacttacacaaggtacgccgatgatctgacattcagcgccgacgccgaaggcatgaaacacattaataccttacgcgtcatgttgcacagaatcgtggaagaggagggctttcaggtgcaccccgacaagtcaagggtcatgcgtaagggctctaagcaggaagtaaccgggattgttgtcaatgagaaacccggtgtagacagggccaccctcagacgtttccgggctctattatttcagatcgagaaggacggaatcgcaggaaagcggtgggggacatctccagatgtagttgccgccatccatggatatgccaattttgtcgccatggtggatccggagaaaggcaaggctctccaagagagggtggctcggataattgcgacagtggcacctcactttaagaaaagaccccgaaagacctacccagcgcggagcggaaagtggcttcagacagcatctagtgaagccagcagctccgaagctagtactgactcaggaaacgtgaacgcgatcccagaaccccccgctgccaagaaaccatggtggaaattctggtga

SEQ ID NO: 13385 - RNA, 1629 nt, synthetic construct
  source 1..1629: mol_type = other RNA
atggccgagcaaagcaatcttccagaaggcaccaggcctgccgaccggcaagaactgtacgacctgatcagacgaacgagcaaagacgactttattctcagggacatgaagagactaggattttggcccgacgacgccggccagcctactttacccgagcaggtcatatttcgggagactgatctgaacagggaactgagtgcacttctaaccgaaaaacgcagactcgaagaacaggaggccatgctgaaggagctgaggaagcagaggctggctgagagtcggctaaaaagagaagaaaccaagcagaaacgggaacaggcaaggaaggataaggcggccgattggcagcggaaaaaacaatctggaatcctgtacctgggtgaaggggtcagcggcggcttgaacgagacagcagctgacccaggcaaactcgccgggctgaatttacccgtgcttaccgatgctgccagcgtggctctcgctatgcaggtgcctgtgggtcagttgagatttttagcattctcgcgtcaggtgtctagaactacccactatcaaagattttatgtgccgaagaagacaggaggagagcggctgatttcagcccccatgcccaggctcaaggctgctcaggcctggatcttggctaatattttggatcgcgttccctcccacgaggcagttcacggcttcctgcccgggagatccatcgtgacgaacgctgcccctcatgtaggggcgggtgtggtgattaacctggatctgaaggacttcttcccttcaatcacctaccgcagagttaagggcgtgttccgcgccctcgggtattcagaatccgtcgcgacaatcctgggattattgtgtactgagccccaggttgatcaagccgagcttgatggggagacatggtatgtagccactggagagcgtcatcttccgcagggcagcccggcaagtcctgcaatcacaaacatactgtgcgccacacttgaccgacgactccagggcctcgcacgaaaaaggggatttagctacacacgctacgccgatgatctgaccttctctgcgtctggggagggaactaagaatatcaacattctcaagaacgccgtaaaagcaatcatcgaatccgaggacctcactctgcacccagacaagacccgcattatgaggatggggtcacgaaaagaagtcacgggcgtcgtggtgaatgataagcccggtgtagaccgcacaaccctgaggcgtttccgggctctgcttcatcagatagagttgaaaggcccacagggcaagaagtggggacactctgcagatctgctggctgctatagaaggctacgccaatttcgtgttgatggtggacgcggagaaagggaagaagctcaaagcacaggtcaaggctattgcccagaaatatggtgacgctatgccacgccggcctcggaaggtctaccccaagaaggagaaaccggccgcaccaacacctgccactgcaacggtggccgctttacccccaacccctcctcctccaccagttccagcccaaccgcccgttccaggtcctgatgccagtgctcccgagtccgcggagccaaaaaaaacctggtggaagctatggaaaaagtga

SEQ ID NO: 13386 - RNA, 1608 nt, synthetic construct
  source 1..1608: mol_type = other RNA
atgagttctgacagcgagccactccggcccgcgactagacaagagctgtacgaccgcttgcgtcaagccggaacgcgggatgctttcttattggaggaaatgaaacgcctagggttttggccatcaaatcacgaagtcccaaacgtgtccgaacagtttattctgcgagaggctgatcttgcgagagagctgagagctctgtatagtgagcacagacgtctggaggatgaagccgccatgctgagagagctcaggaagcagcggttagccgagtccaggcagcgacgagaggtcaccaagctgcggcgcgagcgtgaaagaaaggaccgcgccgaccagagaaaaaaaaggcaggaaagcgagatcggctatctcggcgaaggcgtttctgggggcctaaaccatcctgaagccgatgaagcccggctcgcacggtttcatctccccgtccttaccgacgcacagtctgtggcaggctcactcggagtaagcgtgggcgaactgcgctttctggctttctccagagcagtgtccagaaccaaccactaccaacggttctacctgccaaaaaagaccggagggaggagactaataagtgcaccaatgccaagactgaaggccgcgcagtactggatcctggagaatatcctgcggctggtccccgtccatgatgcagcccacggttttgtcggaggtcggtctatagtcagtaatgctcgcccccacgtaggggcgcaagttgtgattaacctggaccttaaagatttctttcccacggtgacctaccctagggtgcgcggtgtgtttcgcaaattaggatactcggaagccgccgcaaccatactggccctactttgcacagagcccgatgtggaccaggccgagcttgacggcgagacttggttcattgctgacggggaacgacatctgccccaaggggctcctacatctcctgccctcaccaacttgctctgtaccaggctggataggcgcctcgctgggttggctgccaaacttggtttcgcttatacgcgatatgcagacgacttaacattcagcgcgagcggcgagaggactaaaaacgtgaataagttgaggtcattggtgcatctcatcgtggaaggcgaggatttccgtgttcaccccgataaaactcgggtgatgaggccaggctcccgtaaggaagttacagggataattgtgaatgacaagccgggtgtggatagaaccacacttcgaaagtttcgagccctcttgcaccagatcgaacaggagggtattgccggaaagcgctggggacacactgatgacgtgctggctgctatccagggatacgcgaggttcgtagcaatggttgacgcacagaaaggccaggtattaacagctagggttaaagccatcattgaccaaatcgaacctgctttcgccaaaaggccgcggaagacatatccgcagggcgcacgccggtggatcaagaagatggtcgtggccgagactcctactgcctcaggcgttcccgccaacccaagcgcacctacccccaatcctgagaaacctcagggaattgtctggaagctgctggggaagctggggggaaagaagaagtga

SEQ ID NO: 13387 - RNA, 1551 nt, synthetic construct
  source 1..1551: mol_type = other RNA
atggcagaacaaagcaacctgccagatggagctaggcccactaccaggcaggaactctatgacttactccggcgtgatggattaaatcgcgacagctttgtcctccaagacatgaaacggctgggattttggccagacacaaaggatcagcctagtgttcccgaacaattcctgaacagggagtcccagctttaccgtgagctgaatgcattggtgactgaaaaacggcgcgttgaggatagggagcagctgctgaaggagcttcggaagcagcgcatggcagagtccagacggaaacgcgaggagactaaaaagcggcggatagaggctgcaagactccgcgcggagaactgggagaaaagaaaggaaaccgaaataaactacttgggcgaaggcgttagtggcggtctgaacgatactgccacagacactgagcgcctcgccctggcacagcttccagtcctcagcgaccctgcagccattgcagctgcgatgaatatacgagtgtcggagttacggtttctagcgttctcacgtgccgtatccaagacatctcattatagacgattcctgatccctaagaaaacaggaggcttccgacagatcagtgcgccaatgtacagactgaaggatgcccagtactggattcttcaacagatcctggataaagtgcctctgcacgaggccgctcatgggttcgtgcctgctcggtctatcgtcagcaatgccaggccccatgtgggagccggtgtagtgattaatgccgatctgcagaatttctttcctagcatcacatatcccagggtgaaaggtgtgtttaggaaacttggctattctgacgctgcagccagtaccctcgggctgctctgcactgaaccggctattgatgaagtagtgctggacggggagaattggtttgtggctgccggcgaacgttttttgccccaaggggcgcccacttctccagccattacgaacatcttgtgtagacagatggaccggcggctgcagggcttagctcagaagctcggcttcacgtatacccgatacgctgacgaccttaccttctcagcctccggcgaaggggagaagaaagttaacttgttgctcaagttcgttcgccagatcatcgagaacgaggggttcgtccttcacccagataagaccagagttatgcgaaccgggagaagaaaggaagtgacaggaattgtcgtgaacgaaaagcccggtgtggatagaaagaccctacgcaggtttcgagcattgctgcaccaactcgaaacggaaggccccgcgggtaaaacctggggacacactcccaacctgctggccgccattgaggggtatgccaattacgtctttatggtcgaccctgagaagggagccgccctaaaggcccaggtgagacaggtagccggcgctctaaccagggctcctaggaagaggtacccggcacgcaaaaagctggcaggatcagctcctctgccagaaacccccacagctgcaccgacagagcaggagtccgccaaaccatggtggaaattctggtga

SEQ ID NO: 13388 - RNA, 1404 nt, synthetic construct
  source 1..1404: mol_type = other RNA
atgcctgatgagcaaccccagacccgacaggccctgtatgataggatcagggagtccagtaaatgggaagtgatactcgaggaaatgatccggtttggcttttggcccgctgagggtacccttccggatgaccctgccgacgaaattagacaaagaggcgaactggaacgggagttaaaagccctcagaacagagcaggcccggcttaagaatcaggctatgatgctcagggagatgaggagaagacgtctcgaagcaagccgccttaagcagaaggaaaatagagagaggagagaacgggaacggcaagagcgagcagcagcctggcaggaaagaaagagccgcgagatcggatacctcggcccaggagtctccggtggtttacaggctgtggagagcgacacagataggctggagtcttttggcctgcccgtcctccataccccagctcagctggcagaagctatgggcctaagagttggggctttgaggtttctcgcattcagtagggatgtgagcaggacttctcattacgtgagattcaagatgccgaagaaaactggcggggaaaggctgatttccgccttgatgccccgactgaaacaggcgcagcggtggattctagaccacctgctggtgcggcttacccctcacgatgcctctcacggattccgccacgggcggagtattgtttcaaacgcccggccacataccgggtgtgcagttgtggtcaacatggacatgaaggatttcttcccaacggttgactatcccagggtgaaaggcttttaccgcgccctcggatactctgaggccgtcagcaccgtattggctctgctgtgcaccgaggctgaaacagaggaagtggtgctggatggcataacttggtatgtcacgttaggcgagagacacctacctcaaggtgctcccacatcgcctgcgatatccaatcttatttgccgccgactggatcaacgcctgtcagggatcgcggggacactcggtctgacgtatacacgctatgccgatgacttgaccttttcagctgaagccgcagacgcccctatgatcggtaagttgctgcgtcagacccgctttgtcgtagaggccgaggggttcgagctgcatcccgctaaaactcgcgtgatgcgacggcaccagcgtcaggacgtaacaggggtcgttgtgaaccagcaacctgccgtggcgaggaagactctgaagagattccgcgcgttgctccaccagatcgagactactggcccagacggaaaacattggggcggaaacccgaacgtgctgcactcaattcagggattcgcaaattacgtatacatggtggacccagacaaaggagcagtgcttaagcagcgggttcagcgaatcttagcctcccaacgttga

SEQ ID NO: 13389 - RNA, 1404 nt, synthetic construct
  source 1..1404: mol_type = other RNA
atgtcagaggaacagccacaaactcgccaggccctgtacgatcgcattagagaatctagccttggggaagtcattctgggcgaaatgatcagacacgggttctggcctgcggagaataaaataccggaggatcctccagaagaggcacagcagagaggggagctggagcgagaactaaaggccctgaggactgagcaggcccgactcaagaaccaggccgccatgctgagagagttacgcaggagacggcttcaagcctctaggttaaaacagcaggagaatcgggagcggcatgagagagagcgacaggctagagcagctgcctggcaggaaaggaaggcccgggatatcagttatctgggcagtggggtgagcggtggtctgcatggaaccgaatccccggccgcacgtctagagcagcttggtctgcccgttttccacaccccatctcagctcgctgaagccatgggtcttagggttgggaccctcagattcctggcattccatcgggacgtgagtcgcacaagccactatatacggttcaaactccctaagaagaccggaggtgagagattgatatccgcaccaatgccccgtctcaaacaggcccagcactgggtcttgtcaaaccttctggtcaagctcacctcacacgatgcctcacacgagttccgccatgcgaggtctttggtgaccaacgcgcaaccacatactggccaggctgttgtcatcaacatggacatgaaggactttttccccactgtgagttaccctagggttaaaggattttttcaggctctgggatactccgaggcagtcgggacagtcttagggctgatttgcacggaagccgagacggaggaagtggtcctggatgataccagctggtacgtggcactaggcgagcgacacttaccgcaaggcgcaccaacatctcctgccattagcaatctgatctgtcgacggctcgaccagaggctgcacggtattgctcgtaaatttggaatgatctacactcgctatgcggacgatctgacgttcagcgctgaagcagaggctcccgccgctatcggcaaactgctccggcagacacggtttgttgtggaagctgaaggatcccagttgcaccccacaaagacccgggtgatgaggcatcaccaacgccaagacgtaacagggggcgtggtaaaccaacagcctgccgtagcacgcaaaacccttaaaaggtttcgcgctttgctgcatcagattgaaacaactggacccgacggcaagcaatggggaggcaatcctaacgtgttgcattccatccagggctttgcgaattatgtgtacatggtggaccccgacaagggcactgccctcaagcagcgtgtgcagagaatcctggctatgcaatcgtga

SEQ ID NO: 13390 - RNA, 1044 nt, synthetic construct
  source 1..1044: mol_type = other RNA
atggtagtgaagcatcaggcaacaatccctaggctcactgagggctccatcgagcaactcaggaaacgaggactgcccgaatgtaataccgatgaagagattgcattagccatggggatttcagtggaaaagctgcattttctggctggtgatagatccatcagttctactagtctgtattcccggttccagatcagcaaaaaaaccggcgctgcccgcacaatcaccgcacctactcccgagcttaaggctgcacaacgttggatcctgaagcacatcttggataagatcgagatccacgacgcggcccatggtttttgccgagacagatctattgtgactaacgccacgccgcacgtgggcagagatgttatcgtgaagctggacctgcaaaactttttccagctcatcacgtataaaagggtcaaagaactcttccatggctttggctactctgaaaccgctgctactatatttggcttgatttgcacaattgcaaccactaacaacagcaataaaacgagctgtaagaacattgagaagaggcacttaccagaaggggcgcccacatcacctgctataagcaaccttgtctgcgaccggctggatacacaccttaccaagcttgccaataatttagggttccgctacacaagatacgcagacgacctgacattctcttgttacggggccgctcacaaggtcgacaagctgattcaagaaagtaagtccatcgtgactcaggagtcgtttaccgtaaattccgataaaacacaggttttgagcaaatctgtgcagcagattgtgaccggaattgtcgtcaatcagcagttgaatctctcacgcaaaaccctgaaagccttccgggctactctatatcagatagagcgcgaaggactgagcggaaaaaagtgggggaacagcaacaacctcatcgccaccattaccggtttcgccaattatgttgccatggtgaacccatcaaaaggagccgagttcctagcgagtgttgagcgtataaagcagaagtgcgaccggtcctga

SEQ ID NO: 13391 - RNA, 1047 nt, synthetic construct
  source 1..1047: mol_type = other RNA
atggttgtaaagcaccaggcaacaataccaagattgatcgagggaagtatcgaacaactgcgcaaaaaagggtttcccgagtgtaacaccgacgaagagattgctatggccatgcggataagcgtcgaaaaattgcgattcctggctggcgatcggaacttaagctcaaattccctgtattccaggtttcagatctttaagaaaactggcgaggctaggaccatctcggcccctaccccagaacttaaagccgcgcagcgatggatcctgaagcaaatcctggaaaaaatcgagattcatgatgcggcacacgggttctgtcgtgacaggtcaattgtgaccaacgcctccccacacgtcggtaaagatgtgatcgtcaagttagaccttcagaacttcttccagtccatcttgtacaaacgggtgaaggagttgttctgctcttttggatatagcgaaacagccgccaccatattctctctcatttgcacggtaacaaagatcgacattaatggaaagaacagctgcaacgatatcgagaaacgccatctgccccaaggctccccgacttctcccgctataagcaatctagtttgcgatagactggatactcacctaaccaagcttgcccacaacttcggcttctgttatacacgctacgctgacgacctgacattcagcagtttcgagaagaccagtaggcaggtcaacaacctgattcatggctctaagctcattatcactgaggaggggtttacggtgaatcctgacaagattaaagtgctttcaaagtccgtccagcaggagatcactggtataatcgttaatcagcagctcaatctgtctcgtaagacactcaaagcctttagagccactctgtaccagattgaacaggaaggtctgtcgggaaagaagtgggggaactctaataatctcattgcagccatcaccgggtttgctaattacgtggcgatggtgaaccctagtaaaggcgcagagtttctcgcatcagtggaaagaattaagcaaaagtgtgaccggagctga

SEQ ID NO: 13392 - RNA, 1047 nt, synthetic construct
  source 1..1047: mol_type = other RNA
atgaatatacagccccaagtgacaatctcacgcctgactgagggatcgatcgaacaacttaggaaaagaggcctcccagaatgtaatacagatgaggagatcgctttagctatggggattggcgtggaaaagctgtatttcctgaccaacaagtatcccacatcctctaccagccactatttccggtttcagatttccaaaaagacaggtgaaacccgtaccattagtgccccctcacccgagctcaaagctatacagaagtggattttgaaacatatcctcgagaagatcgaaattcacgatgccgctcatggcttctgcaggaacagaagcatcgttacgaacgcccgaccacacgtcggcagggatgtcatcgtgaaacttgacctgcagaattttttccagagcatactctataagagggtcaaagaactgttctgctccttcggatacttcgaaaccgctgcaacaatttttagcctgatctgtaccgtggccgaaatcaacgtgaacaataagatcaactacaaggacacggagaaacggcatctgcctcagggatctccaactagtcctgctattagtaatctcgtatgcgatcggctggatacttatctaacaaagctggcaaataacctcggattctgctacactcgctacgccgacgatctaaccttttcaggcttcgagaatgcctctcacaagattaacaacttaattcacgagagccaattgataatcactgaagagggttttaccatcaatccggacaaaattaaagtcctgaataagtccgtgcagcaggaaataaccgggataatcgttaaccagcagttgaacctttcaagaaagaccttaaaggcgtttagaacgactctgtaccaaattgagcaggagggtttgtctgggaaaaagtggggaaatagcacagaccttattgcagcgatcactgggtttgcaaactacgttgccatggtaaatcctagtaaaggcgcagagtttctggcctccgtggagcgcatcaagcagaaatgtgaccgaccttga

SEQ ID NO: 13393 - RNA, 1065 nt, synthetic construct
  source 1..1065: mol_type = other RNA
atgtccccatcagatgagggcgatctgaacagactttggagcaaaggactcccagaatgtaattctgaagcggaaattgctctcgtcatggagatgagtattgagaagcttcgttccctggcttttaattacccgacatcctccaccacaaattatcatcgctttcagatcctaaagaaacccggggagtcacgagccatttccgctccgatgagtgacctgaaagttgcccagaagtggattagcaccagaattttagaaaaaatccaggttcacgacgctgctcatggtttccggcggaaccgaagcatcgtcaccaatgcaaaaccacacgtgagtgccgatatcatcgtcaaaatagatctccaggactttttcagatccatcagttatcaacgtgttaagaagctgtttctcgatgtggactactccgaaactgccgctaggatttttggactgatctgcacagtcaacgaaactgaggagatcgaaattgacggcaagattaattacaagaccatcggcaaacgccaccttcctcagggatcacccgcctcacctgccatctcaaacataatatgctacgatctcgacaggagattatctcaggtggcccaggagttggggttctgttacactcggtatgctgatgacctgaccttctctggcagtcgggacgtgaaaagcaaaattagcaagctgataagcgagacaaggaccctgatcgagtctgagggattcacgataaacccaaacaagactcaaatcctgggcacttctgtgcaacaaaaggtgacgggggtcgtgattaacaagaagttgaacgtagcaaaaaagactctgaaggcattcagggcgaccctgtatcagatcgaacgcgaaggtcttgcaggcaagaggtggggtaactctaccgacatcatggccgccatcacagggttcgccaattatgtggcaatggtaaatcccaataaaggagtggagctattgacatcgataaaaagaattgagcagaagtacgcgcctcctgaaagcccccgctttaccattgaggaggaattctga

SEQ ID NO: 13394 - RNA, 954 nt, synthetic construct
  source 1..954: mol_type = other RNA
atgtataatacggaggccgaattagctttgagtatgaacatctccgtgaagcaattaaggtggctggcatttaaacccttcacctacccagtgattcactactcccggtttcaaattgccaagaaaacaggagagactcggacgatttacgctccaaaaccttatctgaagacagcacagatctatatcctcaagaacatcctggataacctcgctgttcatgatgctgcacatggcttccgccgtcaccggtcaattatcactaatgcccagccgcacgtcggagccgacatcataattaagctggaccttgagaacttcttctcctcaattacttacaaacacgtgcagaagcttttcttgtctctgggttacagccagtctatcgggacacttctttctctcatctgtaccattaaggacgttgaaacttgtcacccacgatgcttacctagtggaagccccgcttctcccaccatcagcaacctagtgtgctacaatttggaccagaatctctcacagatagcctccgatctgggctttacctatacacgctatgctgatgacctgacattcagcggcaaaagagacagagcgaatataagcacactgatcaagcaactgctggccgtgattgcgcagttcgggtttaagatcaaccccaacaagatccagattctaccaaagtctgtcaggcaagaagtcaccggtattgtagtgaaccataaactgaacatcagtcagaccaaactcaaggcatttagggccaccctgcatcagattgagcaggatggactgtcggggaaaaaatggggcaactcacctaatctcatcgccagtatcaccggttttagcaattacgtggcaatgataaatcctgagaaagggggcgaactgcttgaatccgttgagagaattaagcagaagcacatattgaatactccggtactctga

SEQ ID NO: 13395 - RNA, 1065 nt, synthetic construct
  source 1..1065: mol_type = other RNA
atggcctctaaagccacatacaagctgcacgtgacatccgtctctgcggagggccatccaaagaatcttcagcttcatggtcttgccgagtgtaacactgcagaggagatagccttggctatgggcattagtaggggcaaactgcgcttcctgaccctaaacagccccgctagcacaattacccactatacccggtttaagatcagtaagaagaccggggaagaacggagcatcgttgccccaggccccaacctgaagtccgcccaacggtggattctagacaatattctcgagaaacttgaggtgcactctgcagctcatggcttctgcaaaaaaagaagcactgtgactaatgctaagcctcacgtgggcgcggatatcctcgttaaaatcgatctgcagaattttttccagtccatatcgtacaaacgcgtaaagggactgttttcaggcctcggttattccgaaaccgccgcaaacatctttggtctgatatgtaccgctttcgaaatcaaggaaatcgagaaagagggacagataaactacacggccagtggggatcgtcacttgcctcaaggatcacccgccagtccggccatctcaaacttaatttgccgacatttagattccagaatcgcaatcgtagccaagaacctggggttctgttacacaagatacgccgacgacctgacatttagcgggtgcggagaagcagctcggaggatcagcaacctgatgaaagagattaagctcattatcgctgcagaaggattctcgatcaacagggacaaaaccaaaatcatgggacgatctgttcagcaggaagtcactggaatcgtcgtgaatacacagctcaatatttccaagaagactctcaaggctttccgcgcaaccctgtatcagattgaacaggaggggttgtcaggtaagaagtggggcaatagcacgaacctgattgcgtccatagctggctttgcgaattacgtctctatggtggacccttctaaaggggccgagttacaattgagagtggcaaggattaaacaaaagtatgaggggaagtga

SEQ ID NO: 13396 - RNA, 1074 nt, synthetic construct
  source 1..1074: mol_type = other RNA
atgtacggcacgaacctgataaccatcccccttgcaatggatgggaatagtgagcggttggagacagataagtcggtagttctgcggtcccatggcctggctgagtataacaccgtgactgaaattgcctgcgccatgggaatcacacccggacagcttaggttcttaacctcttctttcagtgggtcgcaagtcaaacactacgtccatttccagatctctaaaaagacaggcggggagagactgataagtgccccgaagcctaatctcaaagcggcccaaaaatggattctgcagaatatcttggagaaactcgaagtccataatagtgcacatggcttttgcaaaaatcggagcatagtgacaaacgctcagccacacgtgggcaacgatgttattgtcaacatcgacctgcagaacttttttgaggctattacatacaagagggtgaaggaattgttcagcgggttcggatattctgaaactgccgctaagatctttgccgtcatctgtactacgtcagagatcgaaattcacggccaggctaatgacatcaccagcggcaatcgccacctccctcaaggatcccccgcctctcctgccatctcaaacctgatttgctaccacttagactctagaatcgctgcgatggcagaaaacctcgggttttgttatacccgctacgctgacgatctgactttctccgctagcggtcaggcctcacacaagatttacaacctgatcaagaacgttaagcttatcattaactccgaggggttcacagtgaattttcacaaaacgaacattctctccaaatcagtgcagcaggaggttactggtgtggtggtgaacaccaaactgaacataagcaagaaaaccctaaaggccttccgtgcgacactgtaccagattgaacaggaaggtctatccggtaagcattggggcaatagcaccaatattatcgcagccatcactggatttgcaaattatgtagccatgataaatccagacaaaggagcagaacttaggagcagagtggagcgaattaagcaaaagtatgagtgtcaggagtga

SEQ ID NO: 13397 - RNA, 1050 nt, synthetic construct
  source 1..1050: mol_type = other RNA
atgtacgcgacaaaccttacaacgactccgctagctatcgagggcaattccgcagtgttgagatcacacggacttgctgagtatcactcagctgccgaaatagcgtgcgctatgggcattaatccaggtcagctgcgctttctgacgtcttccttccctggaagtgaggttaaacactatgtgcactttaagatctccaaaaagacaggtggagagcggttgatctctgcccccaaacctcacctaaaagcggcccagagatggatcctggaaaacattttagagaagctggaggtccatcacgccgctcatgggttttgtaaaaataggtccattgtgacaaacgcccagccccatgtgggtgccgacgtcatagtgcacatcgacctgcagaatttcttccagagcattacctacaagcgcgtgaaggaactgttctcagggtgtggctacagcggcatagcagccaacatcttcgctcttatctgcacaaccagtgaaattgaaattcatgagcaggcacataacatcagcattgagaatcgccatctgccccaagggtccccaacttctccagttatcagcaatctgatctgctatcacttagacaggagaatggtaaaaatggcggaaaatttggagttcagctatacccggtatgccgatgatcttaccttttcggcttctggacaagcttctgaacgtaggtacaagctcattaaaaacgccaagctgatcatcaatagcgaaggctttactgtgaattcccataaaaccaacattctgggaaagtcagtgcagcaacaggttaccggggtcgtggtcaacacccagctcaacatctcgaagaaaactctcaaggcatttagggcaacactgtaccagatagagcaagagggcctcagtgggaaacactggggtaacagccctaacatcattgccgcaattactggcttcgccaattacgtcgccatgataaaccccaataagggggcagaactccggagtcgagtagagcgaatcaaggaaaagtacgagtctcaggagtga

SEQ ID NO: 13398 - RNA, 1086 nt, synthetic construct
  source 1..1086: mol_type = other RNA
atgtattcacaaaatctcacgactattcccctagccaccgaatcaaatttagagcgactggagacagataacctggcgcttctccggtcccacggattggcagaatataacacggccgaggaaatagcttttgccatggtaattagccttgagaagctccactttttaacaacatctacctccctgacacgtcactacctcccgtttaaaatcagtaaaaaaaccggcgggaagcggattatcagcgctcctaaacctgagctgaaagccgcccagagatggattttggagaacatcttggaaaagctggaggtgcacaacgctgcacatgggttctgtaagaacaggagcatagtaactaatgccaaaccacatgtgggggccaatgtcatagttaacatcgacctgcagaactttttccagtctatctcttacaagcgaattaaggaattgttttccggattcggttactccgaatccactgccaccatcttcgggcttatttgcacgactgccgaaattgcgatcaacggccaaataaatcataccgcttcagagaacagacatctgccccagggatcacctgcttccccagctatttctaatctcgtttgcaggaatctcgacatacggctggcggcgatcgctgagaatctgggcttctgttacactagatatgcagatgacctgacattcagtaccagcgaagatgcatcaagtaagatctccaatctgatcaagaataccaagttcattatccacggcgagaacttcaccgtgaacgacaacaaaacaaagatctcgtctaaaagcgtgcagcaggaagtcaccggtgtgatagtgaatacacagcttaacatctcgaaaaagactctgaaagcattcagggccaccctatatcagattgagcaagagggattatctggcaagagttggggcaagagcaccaatctgattgccgcaattacagggtttgctaattacgtcgccatgatcaaccccgacaaaggcgcagagtttaagagcagcgttgaacgcatcaaacaaaagtacggaggtagtcagactgatgaggtgcgcttttga

SEQ ID NO: 13399 - RNA, 1041 nt, synthetic construct
  source 1..1041: mol_type = other RNA
atgtcctgccaaaactacacacagaacaacattgagcagctgaagaaatgcaatctcgacgtctataacaacgctgagcagattgctgccgccatggaaatctccatcgataaactgcgattcttaaccttcacttccaaaacatcacagatcagccactacatttactttaagaccgccaagaagttagccggagatcgtatcatcagcgcaccgatgcctgatctgaagagggcgcagtactggattctgcaaaatatcctgcagaaaatcgctatacacgatgctgcccacggcttctgtggggaccgctcaataataaccaatgcaaatccacatgtcggcgccgagatcatcatgaatatcgacctccaagattttttcagtgctataacttaccaacgagttaaggggctgtttcagtcatttggctatgcctcctctgtggctaccatattcggccttttgtgcacagcccccgtggtcgaagagagaaatctagacggaaaaactgatttcgtggagttcaaacaacgccatcttcctcagggaagtcccgcgtcacctgcaatcacgaacattatctgtagaaacctggaccagaggctatgtgctattgcagaaaagttcgggtttacatatactcgctacgtggacgaccttacatttagtgcgagcggcgagaatttgcagcacactaaaaacatcatcaagcaggtacagtctattatttctgatgagggtttcgcaattaatccagacaagacgaggatcctgcggaactctcagcagcaggaggttaccgggattatcgtgaatcagaagattaatatctcgcggaaaaagctcaagagctttagagccaccctgcaccagatcgaaaacgagggactcgaggggaaacattggggtaatagcagcaacttgatagcttccattaccggcttcgccaattttgtggcaatggtaaaccccgaaaaaggagccgaatttcaacagcaaattcagcggattcaggaaaaatatggtaagaacaagtga

SEQ ID NO: 13400 - RNA, 1041 nt, synthetic construct
  source 1..1041: mol_type = other RNA
atgaacttccagaatcacaaccaaaacaatatcgagcagttgaagaagtataatctggacgtctacaacaatgcagaacaaatcgcagcttctatcgagataagcattgccaggcttcattttctggctttcaatagccagacaagccatatctctcactacatccatttcaaaactgccaagaaaattgcaggcacgaggatcatttcagctcctctgccagatctgaaacgtgcccagtactggatcctgcataacatactgcaaaagattgccatccacaatgccgcgcacggcttttgcggcgatcgatccatcataacgaacgctactccccacattggggcagaggtcatcattaatatcgacttgcaggacttctttagcgctattacctacccaagagttaaggggctctttcagagtttcggatacagctcttatgtggcgacaattttcggattactctgtactgcccccgttgtagaagaacgaaacgtggatggagaaattaactttgtagaactcaaacagcggcacttaccacagggttcgcctgcgtcacctgcaattaccaatatcatctgccggtcactagacgagaggctgtccgccatcgccacccagtttggcttcacatatacccgctacgttgacgatctgacattttctgcatccggtgagcagattaagcacaccagtagcttcataaaacaagcccagtccataataagtgacgaaggattcgccatcaatcccgataaaacccgcattcttcggaacagtcagcagcaaaaagtgactggcataatcgtcaaccagaaaatcaatatctccagaaaaaagctgaagagctttcgcgctacactccatcaaattgaaaatgagggattggaggggaagtattgggggaagtcttcaaaccttgtggcttccattactggttttgctaacttcgtggccatggtgaacccggagaagggcgcagagttccagcaacagatccagagaattcagaagaagtatgggaagaaaaattga

SEQ ID NO: 13401 - RNA, 1044 nt, synthetic construct
  source 1..1044: mol_type = other RNA
atggaccttcagaacaatacacaggaaaacatcgagcagcttaaaaaatacggactcgatgcctacaataccgctgaggaaatagcggctgcgatggagatcagttttgacaggctaaggtttctcgtgttcaattccaagaactcaactgtttcacactacattcatttcaagacagccaaaaaaacagaaggagagaggatcatcagcgcacccttaccggacctgaagcgcactcaacactggatccttaagaacattctgcaaaagatcggaattcacgacgctgctcatgggttttgtcgtgatcgaagtatagtcactaacgccacccctcacgtaggcgccgaagttatcattaacattgacctccaggatttcttttccgccatcagttaccagagagtgaaaggcctgttccagtcctttggttattcttccagcattgcaaccatttttagcttgctgtgcacaaccccagcagtcgccgaacgcgatctggatggtaaggcagacttcgtcaagttgaaacagcggctgttacctcagggttctcccgccagccctgctataaccaatattatttgcgggagcctggacgatttgttgtctgccattgctcagaagtcaggcttcacctacactcggtatgtggatgacctgacgttctcaaccagtggggagtctatcaagtatatctcaaacatcatacagcaaacgcagtctattgtcagcgacgagggatttactattaattcggagaagaccagaatactgcggaattcccagcagcaagaggtgacgggcatcattgtgaacgagaagataaacatctccagaaaaaagctcaaaaacttccgagccactctgtaccaaatcgaacacgaaggcctggagggcaaacattggggaaatagtccaaaccttatcgcgtccatcacagggtttgcaaatttcgtagctgtttatcgcaggctcgtgacagggaagaatcctggcctaagcgcaacaaccccctctccctgggtgaaagccccatgttga

SEQ ID NO: 13402 - RNA, 1056 nt, synthetic construct
  source 1..1056: mol_type = other RNA
atgggccttcagtcaaacaaacagggcaatatcgactaccttaacaattatggactggatgcatacaatacagctgaacagatcgctgctgccatggaaatctccgtggataaactgaggttcttagcctttaatggcaaaacctcaactgtgtcccattatatccacttcaaaaccgccaagaagaacgtaggacaaagaattatctcggcccctctaccagacctcaagcgggctcagcattggatcctgaagtccatcctgcagaaaattgagatccacgatgcggctcatggcttctgctgcgaccgtagtatcgtgacaaatgcaactccacatgtgggggctgaggtggtaattaagttcgacctgcaagacttcttcagcagaatatcctaccagagggtgaagggactgtttcaaagcttcggttactctcctgccgtggccgcaattttcggattgctctgtataacggctgccgtcgaagagcgggaactggatggcaagacatattttgttgagttgaagcaccgccagttaccccagggatcacccgcaagcccggcaattactaacattatttgtcgcaacctcgacaggagactgatggctattgcggacaaatacggttttacatacacacggtatgtcgatgacctgactttcagtgcctctgccgagaatgtgaagcacatatcaaacatcatcaaacaaacccagtctatcgtcgcagatgaagggtttgcaatcaatcaggagaagaccagaattctacgaaactctcagcagcaagaagtcaccggcattgtcgtgaacgagaagatcaatataagccgcaaaaccctcaagtcctttcgagcgacgttgtatcaaatcgagaacgagggttttgaggggaaacactgggggaacagcggcaaacttattgccagcatcactggtttcgcgaactacgttgccatggttaatccccagaaaggggccgaatttcaggaacagataaagaggattcagaagaagtatgagataaaacacagtagtgagaatcagtga

SEQ ID NO: 13403 - RNA, 1410 nt, synthetic construct
  source 1..1410: mol_type = other RNA
atgtctgagcagccacgcacccggcaggaactgtatgagcaggtacgcaaagtgggaaaggaagagtttatcctggaggagatgattcggtatggcttctggtcaccacagggaacaattcccgaggatccagccgatgagattcgacgcgcctcacagatccggaaggaattgcaggagctccgtagagaatcttctcgactacacaacgagcagcagctgcgcaaagatgctctgaaaaggcggctggcagagagccggaagaagcagcaggagacaaaagagagaagggaaagagagagactggaaagagccgaggcctggaagcaacgcaaacagagggaaataatctatctgggcgaggaagtgtccgctgggcttaaccacgcagaatctaacctcgagagacttcgaaataacaatctgcctctctgtaacactgcggaagaaatcgctgtggctatgggcattaacataggcaagctgcgcttcctagcttttaatcgtaaaacatcgacagtcagccactacatcagatttaagatgcctaagaagactggtggtgagcgattcatctctgctccaatgcccaatttaaaacaagcgcagcactggatccttacaaatatcctggacaagctcaacgtgcacgaagccgcgcacgggttctgtcgtcagaggagcattattactaacgcaacccctcatgtagagaaggacgtggttatcaactttgacctcaaggatttctttccctccattagctataagcgcgtgaaaggtctttttcatagtttcggctacagcgaaaccgccgccacaatcttcgctttgttgtgcacctccgccgacgtcgaaaagctgcaattggacgccagaacgtattacgtggcggtgggagacaggtacttacctcaggggagtccggcatcaccggcaattagtaatcttctgtgcaggcggctggataaacgcctcaccggaatggctgagaagctggggtttacctacacgaggtacgccgacgacctcactttcagcgcagatggcgagtcccttcggcatatatgcaacattctaaagaggacggagtccatcgtcacccatgaggggctgcgaatcaatcaggataaaactagggtgctgcgcaatactagacaacaggaagtgacaggcattgttgtcaatgaaaagctctcagtttgtaggaaaaccttacgtaaatttcgggccactctcttccagatcgagaaggagggcctggaggggaagaagtggggaaacagtaccaatttgatagccgcaataaccggttatgccaactttgttgcaatggtaaatcccgaacggggacaagaattccaaaaacaggtcaagagaatcaaagctaaatacttgggcaactggtga

SEQ ID NO: 13404 - RNA, 1401 nt, synthetic construct
  source 1..1401: mol_type = other RNA
atgtcagatcagccaagaactcggcaggaactttacgacagaattagacagactggtaaggatgagttcatcttagaggagatgatccgattcggattttgggcaccacaggggaccattcccgaagatccggctgacgaaataaggcgacagggagaaattagacgggagcttgagactctgaggcagcagtcctcccagctgagaaacgagaaggagctgcgaaaacagatgctaaaacagcggctggaagaaagccgccggaagcaaaaagagacaaaggaaaggcgtgagcaggaacgattagaaagggccgcagcgtggcaagagaagaggcagaaagacattatatatcttggggaggacgtgagcggcggactcaataacacagaggccaatattgaacggttgcaatcccataacctgcccctatgtaatacggcactcgaaatagctgaggccatgggcgtaactattgggaagttaagattcctcgcttttaatcggaaaaccagcacaatcagccactatatccggtttaaagtgcctaagaagacgggtggcgagcgtctcatcagtgcgcctatgcccaacttgaaacaggcgcagtactggatcctggagaatattctaaataagctggaggttcatgacgccgcccatgggttccgggaaaaccgctctattattactaatgctacccctcacgtgggggcagatgtaatcatcaacttcgatctcaaagatttcttcccttcaatctcgtacaaacgcgtcaagggactgtttcagagttttggctacagcgaggccgccgccactatttttggactcatttgcaccgctgcagatattgagcaagtggaactggacggcaaaacctactatgtcgccctggacgacagacacctgccccaaggttctccagcctctccggctataacaaatcttttgtgccggcgtttggaccgaaggctgcagggaatggccgagaacataggcttcacatattcccgctacgcagatgacctgacattctctgcaaagacagaaaatcgcaggcacatctgtaatattatgcgcagaaccgaatcaatcgtgacccacgagggatttaacatcaaccacgataaaaccagggtgctcaggaatactaaccagcaggaagtgacaggcataatcgtcaacaacaagctcaatatctccaagaaggtgcttaaaaagtttcgcgcgacgctgcatcaaatcgagcaggaaggcttgcaggggaagcactggggcaacagtcatgacaccctggctgccatcaccggtttcgccaacttcgttgctatggtcaatccagagaaaggggctgagtttcagcagcaagttcaacgcatcaagaagaagagaaaatga

SEQ ID NO: 13405 - RNA, 1410 nt, synthetic construct
  source 1..1410: mol_type = other RNA
atgactgaccagcccagaacaaggcaggaactgtacgacagaatacgtaccatgggcagggaggagtttattcttgaagaaatgatccgctatggattctggccagctgaaggcaccatgcccgaagatcctgcagatgagatacggcacagaggcgagctggagagggaactccgcgagctgaggcaggagaataacagactgcacaacgagcaagctttcaagaaagagatgcttaaacagaggctggaggaatcccgacgaaaaaggcaagaaaccaaagaaaggcgtgaacgggaacgccaggagagggcagaagcctggaaacagaagaagcaaaaagagatcacttacttaggtgaggaggtttctgcaggcctgaataatactcagagcaacgaggagagactcagaagcaataagctccctctctgcaatacaagtgaggaactcgccaccttaatgggtatttccctgggcaagttgcggtttctggcctttaaccgaaaaacaagtactgtctctcactacattcgttttcggatgccgaagaagacaggcggagagcgaattatttctgctcccatgccctctctgaaagccgcgcagcactggatcttggagaatatccttcagaaattgcagatccacgatgccgcccatggtttcacaaaggagcggtctattgtgaccaacgccacaccacatgtcggggcggacgtgataatcaatctagaccttaaagacttcttcccatcgatctcctataaacgcgtcaaaggactatttacctcattcggatacagcgaagccactgccacgatactggccttgatctgcaccgctgctcaggtggaggagctggagttagatgggaagacttactatgtggcacttggcgatcgccaactgccacagggaagtcccgcatcaccggcgattaccaacctcctgtgcaggagactcgataaacggctgactacaatgtccgggcagctgggcttcacctacacgcgatacgcagacgatctgacctttagtgggtcaggggacagcttacgtcatatctgtaatattctccggcgcaccgagagcatcgtgacacacgaaggattcacggttaaccaggaaaaaactcgggtcctgcgcaagtcaaggcaacaggaagtgaccggggtggtcgtaaaccagaaattgagcgtatgtaagaagacactgaagcaattccgggctacgttgtatcagatcgagaaggaaggactagagggcaagcattggggtggttcccctgacctgcttgcagctattacaggctatgctaactttgtggccatggttaacccagagaaggggctcgaactccagaagcaggtgcaacagatcaagaagaagtatagaagacctcgctga

SEQ ID NO: 13406 - RNA, 1410 nt, synthetic construct
  source 1..1410: mol_type = other RNA
atgagcgatcaaccaaggaatagggaggagctgtaccagtatatttcaaaggtcggcagggagaaatttatcctcgaggacatgcaaagatacgggttctggcagggtgatagtcctcagggctctgaagaagatacgcgcaggcagctggagatacagcgcgaaatcaacgagttaggaagacaatccagcaagttgcagaatgagaaactcctgagggagctgagcctcaagaaacgtttggaggaaagtcggagacgaaggcaggaaactaaggagcggcaggaaagagagagacaggaacgggccgaagcctggcgtcaacgcaaggaaaaagaaattctatacctgggcgaggacgtgagcggtgacctgaacaatacggaaggaaacgaagagagactaaactctctcagtctgcccgtctgcaacaccgccgagcagatcgcagcagccatggagataactgtgggaaaactgcggtttctggcttttaaccgaaaaacatctacagtgagccactacattagattcaagatgccaaagaagacaggcggcgagcgaatcattagtgcacccatgcctcagttaaaacaggcccaacactggatactcgcgtctatcctcgaaaagctcgaactgcacgatgccgcacatgggtttcggcgtgagcgatccatagtctccaatgcaacccctcatgttggcgcggaggtgatcattaacttcgaccttaaggacttcttcccctcaattagctataagagagtgaaggggctcttcaggagttttggctattccggcgccgctgctacaatcttcgctctgatttgtacggctgccgaggtagaggaactggagctggacggccagaattactatgtggccgtcggggatcggttccttccacagggatcaccagcttcgccggcgatctcaaaccttttgtgtaggcggttggatcggcgactgaccgagatggcggagaaattgggattcgcctataccagatatgctgatgaccttacttttagcgcatccggggactctctgaattctatctgcaacatccttcgccgtactgaaagcatcgtcacccacgaagggtttactattaatcaggacaaaacccggattcagcgcaaatacaaccagcaagaagttaccggagtggtagtgaatgagaagccctcggtgtgccgcaaaaccctgaatcgcttccgcgccaccctataccagatcgagaaatccgggatcgagggtaagcattggggtaatacatcaaacactattgccgcaatcacaggctttgccgatttcgttgctatggttaatcctgaaaaaggagctgaatttcaagagcaggtgaagaggataaaggagaagctgaagcagaacacattatcctga

SEQ ID NO: 13407 - RNA, 1410 nt, synthetic construct
  source 1..1410: mol_type = other RNA
atgtccgatcaacggcgcagccgggaggagcttagtaagcttatacgcgaggtcggcaaagaagaattcatcctggaggagatgctgcgctacgggttctggaagggggaaagcttgagggagcttgatgctgagattcatagacaggaggaaatcaggcgcgaactagaaactctgcgtcagcagagcttgcagctccaagatgagcagctactccgacagcagtcattgaagaagaggcttgaggaatctcgcaggaaacgacaggagacgaaggagaggcgggaacgggaacgacaggaaagagccgaagcttggaaacaaaaaaaggagaaagagatcgtgtacttaggcgaggcggtttccgccgatcttaacaacacacagggtaatcaggagaaattgaatagcctaggcctgccagtgtgcaacaccgccgaggagattgctaccgctatgggggtgacagtgggaaaactgaggtttctggcgttcaatcggaatacttccacagtgtcccactacatccggtttaagatgcctaagaaaactgggggagagagaattatctttgcccccatgcctaaccttaaacaggcgcagcactggatcctggagaatattctgcaaaaactggagatacatgacgcagcacacggcttcaggagagagcggtctatcgtgactaatgccaccccgcatgtgggtgccgaggttatcattaacttcgacctgaaggacttcttcccctctatctcttataagagagtaaaaggactgttccgtagttttgggtatagcggggccgcagctacaatcttcgcactgctatgtaccgcggccgaggttgaagagctggagctcgacggccagaactactatgtcgcagttggcgaaagacatctgccacaaggttctcctgcaagtcccgctatttcgaatttactgtgcaggcgcctcgactcccgtttgacagctatggcagaaaaactcgaatttatctacaccagatatgctgacgatctcacattttccgtctcaggagaatctcgcagatatatttgtaacatcctgcgtaggaccgaaagcattgtcatccacgagggatttaccattaatcaggagaagacccggatactgcgaaaaagctcccagcaggaagtcacgggactcgtggtgaacaacaagttgtcaattagtaagaagacactgaacagattccgagccactctctaccaaatcgaaacggagggtttagaagggaaacactggggcaactcatcgaacctgattgctgccattactggctttgccaattttgtggccatggtaaatccagaaaagggcgccgagttcctcgagaggataaagagaatcaagaagaagtttcggcgcaacaatatagaatga

SEQ ID NO: 13408 - RNA, 1413 nt, synthetic construct
  source 1..1413: mol_type = other RNA
atgacagatcagcctagaactcgggaggagctttacgacagaataaggaaaatggggagagaagaattcatcctcgaagagatgatacgctacggattctggccggcccaaggcactataccgcaggacccagccgatgagattcgcagggctggagagattcgcagggaactggaacagttgaggagagagagcagtcggttacagaacgagaaagcgctgcgaaaacaaatgctgaaacagcgcctcgaggagtctaggcgaaaacaacaggagactaaggagaggagggaacgtgagcgacaggagagagcccaggcctggaaccaaaagaagcagcaagaaattatctatctcggcgaaggcgtttccgctgggcttaacaacagtcaggggaacgaggaacgtctcaggtcattaggattgcctctgtgcaacaccgccgaagaaatagccgccgctatggagataagtgtggggaaactacgttttttagccttcgatcgcaaaaccgctacagtatcacattacatcagattcaagatccccaagaaaacgggcggggagagactgatttcggctcctatgccaaacctaaagcaggcacagcactggatccttgagaatattctgcagaaattgcaggtccacgatgccgctcacggcttccggatccagcgatccattgtgacaaatgcaacttctcatgtgggagccgacgttatcatcaatttcgacctgaaggacttttttccagccatctcctataaacgggtgaaaggactttttctctcattcggctatagtgaagccgccgctacaatttttggcttgctgtgcactgcggctgaggtcgaggagctggagctcgatggcaagacctattacgtcgcactgggtgagcggcatttgccccaaggcagccctgcaagcccagcaattaccaatctgctttgtcgcagactagatcgaaagctcaccaccatggcagaaagcctgggcttcaactacacgcggtacgctgatgacatcacgttttccgcgtctggagactctctgaggcacatctgtaatattataaagcggaccgaatccattgtaacatatgaagggtttgcaattaaccaggacaaaacacggatcctccgcaaaagcagacagcaggaagtgactggtgtcgtggttaacaataaactgaatgtgagcaagaagatcctgaaacaatttagggccaccctttatcagatcgaaaaggacggtctggaagggaagcactggggaaattctcccaacctgatcgcagccatctcaggtttcgctaacttcgtggccatggtgaatcccgagaagggtgcagagtttcagcagcaggtccaacggattaagaagaagtacgcgcgtcgcaagaattga

SEQ ID NO: 13409 - RNA, 1413 nt, synthetic construct
  source 1..1413: mol_type = other RNA
atgacagaccagccgcggacccgggaggaactttatgaccggatccgaaagatggggcgtgaggagttcatcctggaagaaatgattaggtatggcttttggcctgcgcagggtagcatgccacaggatcctgccgatgagattaggcgtgctggggagatacggagagagctggagcaattgagacgcgaaagctcacgcctccagaacgaaaaagctctgaggaagcagatgctgaaacaaaggctggaggaaagcaggcgcaagcagcaagagacaaaggaacgaagagagcgcgaacgccaggaacgcgctcaagcttggaaccggaaaaagcagcaggaaatcatatacctgggagagggcgtgagcgccgggctaaataattcccagggaaacgaagagaggcttagactactcaatttgcccctctgtaacacagccgaggaaatcgccgccgccatggagatttctgttggaaaacttcgattcctggccttcgatagaaagacggcaaccgtgagtcattacattaggtttaagattccgaagaagactggcggtgagcgccttatctccgcacccatgccaaaccttaagcaggtgcaacattggattctcgagaatatcttacagaaactacaggtacacgatgcagcgcacggctttagaatccagcgctctatcgtcacaaatgccaccccacacgtcggagccgacgtgataattaacttcgacctgaaggacttctttcctgctatctcctacaaacgggtaaaaggactgtttctctctttcggctattccgaggctgctgcaaccatcttcagtctcctttgcacagcagccgaagttgaggagctggagctggatggcaaaacctactatgtggcgctcggggagaggcatctgcctcaaggaagccccgcttcacccgcgattactaacctgttatgtaggagactcgatagaaagttgactataatggccggctctttgggtttcaattacacgcgttatgccgacgacattactttttcgacttcaggcgacagtctgagacacatttgcaacttgctgaagcgaaccgagagtatcgttacctacgagggttttgccattaatcaggataaaacacggatcttgaggaaatctagacagcaggaggtgaccggggtcgttgtgaataacaagctgaatgtgagcaagaagatcctgaaacagttccgggctactttataccaaatcgaaaaagacgggctcgaagggaagcactggggaaactccccaaatctgattgctgccatctcaggcttcgcaaactttgtggcaatggtcaaccccgaaaaaggcgccgaatttcagcagcaagtccagcgaataaagaagaaatatgcacgtcggaaaaagtga

SEQ ID NO: 13410 - RNA, 1410 nt, synthetic construct
  source 1..1410: mol_type = other RNA
atgaccgatcagcctcgaactcgccaagaactgtacgaacgtatcaggcagatcgggagagaggagtttattttagaggagatgattaggtacggcttctggccagccgaggggacaattccacaagatccagccgatgagataaggagagtcggcgaaattcgaagagagctagaggagctccggcaggagtcctctcgccttcataacgaaaaagaactccgcaaggaaatgcttaaacagaggcttgctgaatcacggagaaaacgtcaggagactaaggaacgcagggaaagggagcgacaggaacgggcagaagcttggaaacagaagaagcagcaagagattgtttatctgggtgaaggggtgtcagctggtcttaatgagacagagggcgattccgaacgcctgcagtcatacgggctgcctttgtgtaataccgccaacgagatcgccaccgcaatgggcatcaatgtcggaaaactgaggtttctcgccttcgaccgaaaaacctctacggtgagccactatattagattcaagatgcccaaaaagaccggtggcgagcgcctgatcagtgcacctctgccctcactgaagcaagcccaacactggatactggggaatatattgcagaaactcgaggtccacgaggcagcacacgggtttcggtgcgacaggagcatcgtgactaacgcgacaccccatgttggagctgatgtcattattaacttcgacctaaaggacttctttccgtccattagttataaaagagtgaagggcctgtttagatcgttcggatactctgaggctgctgctacaatcttttccttgttgtgcacggccgcggaggtggaagagttggagttagatggaaaaacttattatgtcgccctggaagaacggcatcttccacagggtagcccggcatctcctgcgatcaccaatctgctgtgtcgacggctcgataagagactcactgccatcgcccaggagctgggcttctcctacaccaggtacgcagacgacctgacatttagtgcgtccggcgattctctgcggcacatatgcaatcttctcaagagaactgagtcggccgtgatctatgaaggattcgccatcaaccaagagaagacacgtatcttacggaaaagtagccagcaggaagtaacaggggtggtggtgaacgacaagctaaacataagcaagaagaccctgaagcagttccgcgcaacgttgtaccagatcgaaaaggacggactcgagggaaaatcctggggcaatagcagcgacgtactcgccgctgtgtctggctttgctaactttgttgttatggtaaatcccgagaaaggtgccgaattccagcagcagatccagcgcattcggaaaaagtacaagcaaaaaaagtga

SEQ ID NO: 13411 - RNA, 1413 nt, synthetic construct
  source 1..1413: mol_type = other RNA
atgagcgatcagcctcgaacccgtcaggagctctatgataggattcggcaggtgggaaccgaggaattcatacttgaggaaatgatccggtacggcttttggagtgcacagggcgaaatgcctcaggacccagctgatgagattcggagggcaggcgaaattcgccgtgagctgaatgagttaagacaagaatctcgcaaacttcaggacgaaaaggagctgagaaagaggcttctgaagcaaaggctggaagaatccaagcgaaagcggcaggaaactaaggagagaagggaacaggaaagaagatcccgagcggaggtttggaaacaaaagcagcagcaagacatcatatatttgggagaagacgttagtgctggactgaataacacccagggtaacgaagagcgtctccactcgtacaatctgcccctctgtaacaatgcagagcaaatcgccgccgctatgggcatcaccgtaggcaaactaaggttcttagcttttgatcggaaaacctccactgtcagccattacatccgctttagaatgcccaagaaaacaggtggcgagaggataatcagcgcacccatgcccaacttgaagcaggcccagcactggattctcgccaacattctggagaaactcgagctgcacgacgccgcgcatggtttcaggcgggatagatccatcgtgacgaatgcaacaccacacgtaggggctgatgttattattaacttcgacctgaaagacttcttcccaagtatttcatacaagcgggtcaagggtctattccatagctttgggtattctgaagcggcggctacaatatttgggctggtgagcacagctgcagaggtcgaatctcttgagatcgacggcaaaacatactacgtggctgtggacgagcgtcatctcccacagggctctcctgcctcacctgccattactaacctgctgtgccgcagactagatagacgactcactgccatggccgagaagcttgggtttacttacacccgctatgccgatgatttgaccttctctgccagcggggacagtctcagacacatttgcaacatcctgaagcgcacagaatcaatagtgacgcatgagggatttaccattaatcaggagaaaactcggatcttgcgcaaatcacgccagcaagaagtgaccggagtcgtggtgaacgataagccgaatgtggacaacaagacgttgaagcgcttcagggccacactgttccaaatcgagaaggacggcttagagggcaaacactggggaaacgcaaatctgatcgctgccatcgccggatttgcaaacttcgtcgccatggtaaatccggagaaaggggctgagtttcagcagcaggttcagcggatcaagaataaatatgtgaggaatgggcgatcctga

SEQ ID NO: 13412 - RNA, 1437 nt, synthetic construct
  source 1..1437: mol_type = other RNA
atgaccgaccaaccccggacgaggcaggagctctacgacagagttcggcaggtgggcaaggaagagttcatcctagaagaaatgattcgctatggattctggttcgctcagggtgagctgccgcaggatcctgccgatgagatccgaagagcaggcgaaatccaacgcgaactccagcagctgcggcaggagaataataggctgcacaacgaaaaggccctccgtaaacagatgctcaaacagaggttggaggaaagtagacgtaaaagacaggagaacaaggagaggcgggagaagcagcgaaaagagaaatccgaggcttggaatcaaaagaagcagcacgagattatttacctgggagaaggagtgagcggtgggctgaataacacagaaggcaaccaagagagacttcagtcttacggcttgcctctgggggacacacccgagcagattgccgccatgatgggcattagcatggggaaacttagatttctcgcattcaaccgaaaggttagtacagtgagccactatataaggtttaagatccccaaaaagacggggggcgaacgcctgatctctgcacccatgccatccctgaagagggtgcaacactggattcttgaaaacatcctcaaccaactggaagtcgacgatgcagcccatggtttcagacgtgatcgatcaattgttactaatgccacaccacatgttggagcggatgtaatcatcaacttcgaccttaaagactttttccccagtatctcatataagagggtcaagggccttttccactcatttggctacagtgaggctgctgcaacaatttttgcgttactgtgcactaccgccgagttcgaggaggtcgaattggatggcaaaacatactacatcgccctggatgagcggcacctgccacaaggttcaccggcatcccctgctataactaacctgctatgccgccggctagacagacgcctgaccggaatggccaagaatctgggttttacgtacactcgatatgcggatgacttgactctcagcggctgcggcaattctctgcggcacatctgtaacatcttgcggcgcaccgactctatagtggcccatgaagggtttaccatcaaccaggaaaagacccggatcttacgcaattgtcatcagcaggaggtgaccggggtggtggtcaacgataaacctaacgtatccaagaagaccttaaaacaattcagggccactctgtatcagattgagaaagacggactcgaggggaaatcgtggggaaatagccatgacattatagctgccattacagggtttgcaaatttcgtagctatggtgaatccacaaaagggagctgagtttcagcagcaggtgaagaggataaaacagggcgtccgctcccagaacaccggagtgagaaatcaggaaagcgaatga

SEQ ID NO: 13413 - RNA, 1707 nt, synthetic construct
  source 1..1707: mol_type = other RNA
atgagccagcaacctcgtacaagacaggaactttacgatctgatcagatctaggggggggaaaagagaattcgtgctggaagaaatgatcagactggggttctggccccaacagggtacactgcccgaggaccctgctgacgagatcaggcaggaaggtgagattaggagggaattatccgagctcagaagggagtcgtctaggctgcacagtgagaagcagctgcgcaaacaagccctcaaacagcgctggagtgagtctaggcggaagcagaaagagactagagagagacgggaacgcgaacggcaagagagagctgaagcctggcaacaacagaagcagagagagattatttatctgggcgaggaggtgagtggcggcctaaataatcaggatggcgaccgtgataggctccagagtcggggcctaccaatggtgaacaatgccgaggagatagcagctgcaatgggaattacggtcggtgagttgaggtttcttgcatttaaccgcaaggttagtagcctctcacattacatccggttcaagattcccaaaaagagggggggagagagactgataagtgctccaatgccgcgcctcaaacgagtgcaacactggattctgcgtgaagtgctggagaagattgaggtgcacgaggcagtccatggattccgacgggatcgcagtatcctgactaacgctcggccccatgtgggggcagatgttgcgatcaactttgacctcaaggatttcttcccgactatctcatacaagcgcgtaaaaggccttttccgctcattcgggtactccgaagccgccgccacaattctgggacttttgtccaccgaagctgaccttgaagaggtcgagctggacggaaagacatactttgtcgcctccggtgatcgtcacttgccgcagggcagccctgcatctcctgctatctctaatattatctgtagaagactggaccggaggctgagcgggatggcaacatcactgggatttacgtatactcgctacgccgacgacctcactttttctgcctccggggaaaacaacttaagatcactctgcaatttgctgcggaggaccgaaagcattgtgacccatgaaggctttatcatcaatgatgagaaaacccggatcatgcggcgaaagtcctcacagctcgaagtcaccggtatcattgttaatgagaggcctaccatcgactccaaaacgttgcgacgatttcgggccacactgtatcacttggaaaaggatggcatccagggaaaatattgggggaactctcgtgacgttggcataatgctggcggtacaggggttcgcgaatttcgtaaacatggtacacccagaaaagggaaaagtgttcttggaacagatagataggattcgcgagaaatggaccctgaaggagacaaaaaagtcatcgccaacccctagcattagcctaccagtgatagaggagaaaacccccgaggcgatcccagaacagtcccttcccgacggcataatcttagaatgctacaagcagggcagcaagctcaaggtccgcgtgatctcccaaggctataacagctcttggaatgtgcagattccccgcaacttaatggccgagggagcccgatatagagttgaggagctgcgagaaagcgctgtgggtggcttttaccggactgtcggatccatacagaagctttga

SEQ ID NO: 13414 - RNA, 1698 nt, synthetic construct
  source 1..1698: mol_type = other RNA
atgtccgagcaaccacgcacccggcaggaactctacgatctcattagatctaaaggttccaagcctgcattcgtgatcgaagaaatgatccggcttggcttctggcccgctgaaggtaccttgcccgatgatccagccgacgagatccggagagaaggcgaactgcttcgggaactgagtgaactgagacgggagtctagtagactacactctgaaaagcagctgcgcaaagaagccctaaaacagaggctgcaagaatcccgaagaaagcaacaagagatcaaggagaggcgggagcaggaacgccgggataggacagaggcctggcagaaaagaaaagagagagagatcatttacctcggagagggcgtgtccggtggtttaaatcaccaggatgggaacattgagaggctccagtcatacggactgcctatcctaaatgacgcagagcagatagctgtcgcgatggggatctctgtaggggaactgcgcttcctggccttcgacagaaagacagccaccctcagccactatatccggtttaagatccctaagaagaccggaggcgagaggctcatctcagctccaatgccaaggctcaagaaggtgcagcattggctgctgcacgaaattctggacaaagttgaggttcatgaagctgtgcacggctttaggggagataggagcatacttactaatgcggtgccccacatcggagcagacgttgtcatcaattttgatctcaaggactttttcccaactatttcctataagcgtgtgaaagggttgttcagggctctcggatacagtgaggcggttggaactatattagcactgttgagtaccgaggccgacgtcgaggaagtggagctggacggcaaaacttatttcgtggcccttggggatcgccatcttccccagggctctcctgcttctcccgcccttagcaatatcatctgccggagattagacaaacgtttgagtggcatggccgcaaacttggggttcacatataccaggtatgccgacgacctaaccttcagcgcatcgggggaaaatctgcgctacatttgcaatcttctccgaaggacagagagcattatcgaacatgagggctttgctatcaatgctgaaaaaactcgtatactgcgacggaagtccagccagttggaggtgacggggatagtggtgaacgagtatcccaacattgatcgaaaaacaatgaagcgctttcgcgccacgctgtaccagattgaacaagaagggattcagggcaaacaatggggacagtcaaataacattatgttgagcgtacagggcttcgcgaactttgtcaagatggtcaaccctcagaaagggcaagtgtttctggaacagatcgatagaatccgcgagaagtggaggctgggtgaatctaaggctcgttccgtgagcccacccccgatttcacctcccattatcgagcaggagatatcccaggagatcctgttagactccataatcctggagtgttataaacagggatctaagctgaaagtacgagtcatcagtgagggctacaaccctacttggaacgtacaaataccgagaaacctcatggaggaaggtgcccgataccgggtcaccgagatttcggagagcgccgttggaggcttttaccgcattgcaggcacaattgagaagctgtcaccatcatga

SEQ ID NO: 13415 - RNA, 1629 nt, synthetic construct
  source 1..1629: mol_type = other RNA
atgagcgatcagccacgcaccagacaggaactgtacgacagagtacgggccatggggaaggagcagtttatcctggaggagatgatcaggtttggcttttggccagccgagggagagatgccagaggatcccgctgatgaaatacgacgcaaagcgcagattcagcaagagctcacacaactccggcaacagaaccggtctttgcaggacgaagctgctgcccggaagcgactgcttcaagaacggttggcagagtcccgccggaaaaggcaggaaacgaaggagaggcgggagagagaacgtcaggagagggccgccgcatggcgtgaacgacagcaacaggacattggatacctcggggagggagtgtcagctggtctgaacgagcgtgactgtcgcgaagaacgactgcaggcccgcggactgcccatcttaaagaatgcggcacagatagctgaagcaatgggaatttccgttggccagctaaggttcctggcttttaaccgtaaaaccagcaagatttcccactacgtctgtttcaacataccgaaaaaaacaggcggtgtgaggagaatatccgcccccatgccaaaacttaaggcggcacaacactgggtgttcgtcaacattttggagcgagtggaggtcggtgaggccgctcatggctttttacgcgacagatcaattgtgaccaacgcccagcctcatgtgggcgcggaagtgattatcaactttgacctcaaggattttttcccctcaatcagttataagagagtaaaagggctttttagggccatcggatatagcgaggccgccgccaccatatttgcccttctctgtaccgaggcagatactgtagcagtggaattggacggcaccacgtattatgtcgccactggcgaccgccatctccctcaaggtagtccagcgagccctgcattgtcaaatgtgctgtgccgacgcctggataaaagactgtctgccatggctgcagaatgcggcttcacctacacgaggtatgctgacgacctgactttctctgctagtggcgaaagcttgaggcacctgtgcaatattatgagacgcacagaggccattgttacacatgaaggctttgccatcaatcctgagaagactcggatcctgcggagaaagtctagccaaatggaggttaccggggtggtggtaaacgagttccccaattgcgatcgggccactttaaaaagattcagagctacactcttccacatcgagagggatggtatcgaggggaagcactggggcaattcgaataatgttcttgctgccatccaggggttcgcatcctttgtggctatggtcaatccagagaaagggcgggaatttcaggcccagatccaaaggatcaaagcacagatccagcctcagtctgtcactccgacaggaattatcgttgaatgttacaagaagggttcgcagctaaaggtgcgcgtcgtgagtcctggatacaacagcgactggaacgttcagttcccccgtaatctgagagaagagggcgcacggttcattgtcgaggaattacaggaggatgtgagagggggcttctaccgcgctgggggaaagattgaaaggatgaactccgaactttga

SEQ ID NO: 13416 - RNA, 1623 nt, synthetic construct
  source 1..1623: mol_type = other RNA
atgtcagactcccctcggaccaggcaggaactgtacgatcgggtgaggcaagtagggcgtgagcagttcgtgttagaggaaatgataaggttcggtttctggcccgcccagggggagattcccaatgaccccgcggatgaaatcagacggaaaagtgagctacggcaggagctcaacaagctgaggcaggaatcccgaaccttgcaggatgagcaggccgctagaaggcggcttctgaaacagcggttggccgaatcacgccgcaaacgacaagaggcaaaggaacgacgcgagcgcgaacggcaagaaagagcagaggcctggcaggaaagacaggaaagggagatagtctatcttggcgagggtgtttccgctggccttaacgattgcgaggaaaacagcgagcgactggcctcaagaggactgccttctctcccaacggccgagcatatcgccgctgctatgggcatttccatcggccagctgcggtttctggccttcaaccggaagacttctacccacacacattatatccgcttcaaaataccgaagaagaccgggggcgagagactgatttcctcccccatgccaaagctgaaggctgtgcaacactggattctgtctcacatcttagagcgcgtagaggtagacgatgccgctcacgggttccgtcgagacaggtctattgtgaccaatgcccaaccccatgtcggtgcggatgttgtcattaacagagatcttaaggatttcttccctactatcagctacaaaagagtcaaaggcatctttcgatcttttggctatgctgaggctaccgctacaattctggccctgctctgtacagaggcagacactactgccgtggaactggacggcaaaacttactacgtggcactgggtgaacgccacctaccgcagggaagccctgcctctccagcaatttccaacatattgtgtaggaggctcgacaagagactgcgcgcgatggcaaatgagctcgagttcacatacacccggtacgctgacgatctcacgtttagtgccagcggagaaagtctgcgctatatctgtaacgtgctcagacgtagtgagtcgatcgtaacccacgaaggcttcgccatccatcctgaaaagacaagggtgctcaggcggaaaagtagccagctcgaagtcactggaatcgtggtgaacgaattcttgaattgcgaccgggcgacacttaagaggtttagagctacgctttttcagatcgagcgagacggattcgaaggcaaacattggggtaatagcactgacgcattggcatcagttcaagggtttgcaaactttgtggccatggttaacccagagaaggggaagaagtttcaggagcagattcaacgtattaaaaccaaatggctgaccccagagcccagcacaaccactggtatcatagtcgagtgctataagcagggatcaaagttaaaagtgagggtcgtgagcccaggctataatcccgattggaatgttcagtttcctcggaatctacgcgaagaaggggcccgtttccgcgtggaagagatcagagagacagcaaagggaggattttacagagttgtgggggacattgagaaaatcgattga

SEQ ID NO: 13417 - RNA, 1404 nt, synthetic construct
  source 1..1404: mol_type = other RNA
atgactgaacagcctagaaccaggcaagaactatatgatcgaatccggcaaacaggcaaggaggaattcatcctccaggagatgatacggtatggcttttggcccgctcagggagagattccccaagatccagcagacgagatacgtaggctgggtgagttgaatcgtgagctgcagcagctgcatcagcagaaccggcagctgcataatgaagccgccctcaggaagcaacttcttaaagagcgcctggcagagtctaagcgcaaacagcaggaaaccaaagagaggcgcgaacgagagcgcaaagaaagagctgaggcatggaaggcccgaaaggagcaggatatcctgttcctgggacagggcgtatcaggcggactggataggcgagagcccaacctggagaggttgcagaatcagaaactccccgtgtttactacgccggaatctctggctagtgcgatgggggtcaccatcggacagcttcggtttctggccttccaccgccaagtcgcgaaaacctgccattacatcaggttctacatttccaagaagactgggggtcagagattgatatccgcaccaatgccccggctgaaacagctccagcactggatccttagatacatactcaaccctatcgccgtgaatgacgctgcccacggatttcggcaggggcacagcatcctcaccaatgccacacctcatgttggtgccgacgtggtagtcaactttgatttaaaggacttcttcccgtccatatcatataagagagtgaaggggctttttcaggccctaggatacggcgaggcaatcgcgaccattttggggttactctgtacttaccctgacgtggaagaggtggaactggacggcagcacgtattacgtggcaactggggatcgccatttaccccaaggctcgccagccagccctgctatttctaatatcctgtgtcggagattggacaggcgactcctgcaaatggctcaggagctaggattcacatatactcgctacgctgacgacctgacatttagcgccagtggcgataacctgagaaacatttgcaacctccttaagagaacagaagccattgcattgcacgagggatttgccctgaaccctagtaaaacccggatcatgagaaaaaactcacagcaagaggtgacaggcatcgtcgtgaatcagttcccaaatatttccaagagcaccctgaagcggttcagggcgactttatttcaaattgaacgcgatgggattgctggtaaaaagtgggggaattctaccgacacaatggccgctattcagggctttgcccacttcgtcgcaatggttaacccagaagttggtacgaaattcgtggaacaggttaagcagatccaagctcagaaccgtaattga

SEQ ID NO: 13418 - RNA, 1410 nt, synthetic construct
  source 1..1410: mol_type = other RNA
atgtccgatcagccaaggactcgacaggaactgtatgataggatacggaagatggggcgtgaagctttcatcctggaggaaatgatcaggtacggcttttggcccgagcaaggcgagttgcctcaggaccctgcggacgaaattcgcaggaggtctgagctctatcggcaattaaccgagttacgccaaaaaaaccggcaactgcaggatgaacaggctatcaggagacagctcagaaagcagcgattagcggagagtcggcgcaagcgtgaagaaacgaaacagcgcagagaggaggaaagacaggctagggcccaagcctggcaagagcgccagcaacaagagatcgtttatctgggggaggaagtgtcaggaggactcggagaacagcagtccaatccttccgagcttgataggcatggactgccacagctggcaacagctgctgatatagcccaggagatgggcatcactttgggcgagttgagattctttgctttcgatcgcaagacagccactgtctcccactacatacggttcaaaatgcccaagaagactggcggtgaacgcctcatttccgtgccaatgccgcgattgaagagagcacagtactggatcctgagccaaatcctggaaaagatcccagtgcacgaagcagcgcacgggttctgtcgggatcgatctatcattacgaacgcctctcatcatgtgggggctgaggtggtcatcaacctggacctgaaagacttcttccctagcattagttaccgccgtgttaagggacttttcagaagtctagggtattcagaggctgtcgccaccatcctcgcactcatttgtaccgcccctgacgttgaagaagtcagtcttgacgggcagacctactacattgcacttaatcagagacatctaccccagggaagccccgcatcacccgcaatatctaatctcatctgccggcgcctcgacaaacggctgacacagatggccgacgagctgggttttacttacacccggtatgccgacgacctgacatttagcgcctccggcgatgtcctgaggaacatttgccgaattctgagaagaacagaaagccttatcaattacgagagcttcaccttgcacccagagaaaacacgcatcctgagacggaagtcatgccagttggacgtgactggtattgtagtaaatgaaggactgaacatcgatcggaaaaccctgaagaaatttagggccacccttcaccagattgagacgcagggtctagagggcaaacattgggggcactcgcgaaatgtgctcgcgtctatacagggctttgctaattttgtggccatggttaacccggagaagggcgcccagtttcaggagcaggtgggtaggattcgtcaaaagtatggcaggaactga

SEQ ID NO: 13419 - RNA, 1416 nt, synthetic construct
  source 1..1416: mol_type = other RNA
atgtcagacaggcctcgcacccgtcaggaactgtacgagcggatcagaactatggggagggaggcatttattctggaggagatgattcggtacgggttctggcctgcagaagggacaatcgccgatgatcccgccgacgagattagaaggcaaggcgagctccagcaagaactcgagagactgaggcaagaaaatagaaggctgtatgacgagaaagctctgcggagggaggctctgaagcaacggctcgcagaaagcagaaggaaacagcaggaaacacaggaacgcagagagagacagcgtctcgaacgggcgcaggcttggcaacagcgacagcaacaagaaatcgtgtatcttggggagggagtctccggcggcctgtctgaatcccaatcacaccaggagcgtctgcagtcatacggcttgccgatatacgagacagccgccgatctggctgcggctatgggtatgtctattggacagttgcgtttcttagcttttaatcggaagacgtccaaggtatgccactacattaggtttaccattcccaagaagactggtggcgagcgactgatctctgcacctatgccccgcctgaaacaggctcagagttggatataccagcagatactcgccaaaattcccctggaggccgccgctcatggatttcgctgtgaccgaagtattctgaccaacgcccaccctcaccttgaagcggacgttatcatcaacctcgacttgaaagatttcttccccagcatcagctacaagcgagtgaaaggactgttcagatcttttggctactgtgaagcagttgccacgttactaggtctgatctgcaccgaggccgatttgacatccgtcgaactagatggtgttacttattatgtagccaccaccgaacgccttcttccgcaaggatcgccagccagcccagcgatatctaatcttatttgccggcggctcgaccggagactgacccaaatggctcaggacttgggatttacttacactagatatgctgacgatctcacgttctccgcacacgagccatacctgcagggcatctgtaacatcttacggcgcacagaggcaatcgtggcccacgagggcttgaccatcaatgatcagaagacaaggattcttaggaagaagagttcacagctggacgtcactggaattgtggtgaacggtgatcgacctagtctcgacaggaagaccttaaaacgcttccgcgcaaccctacatcagatcgagcagaacgggccaactggccagcattggggccatacagaaaacgtgatgagcgccatagccgggtatgctaattatgtcgcaagcgtgctcccagaaaaaggggccaaattccaggagcaggtgcgacacatccatcagaagtggcagcgcctgccctga

SEQ ID NO: 13420 - RNA, 1620 nt, synthetic construct
  source 1..1620: mol_type = other RNA
atgacgaaccagccaaggtcccgacaggaactgtacgatttagttcggcaggtgggtaaacaggaattcattttgcaggagatgatcaggtatggcttttggtcccccgagcaggagacacaggaggatgtatcagaggaactgcgccagcggaaacaacttcagcaggaattgtcacagttgcgccaggaaaacagactccgccaggacgaacaagccctgagaaaacacctcttgaagcagcggttagcagagtcaaggcgtaaacgtagagaaacaaaggaaagacgagagaaagagcgacgggaacgagccgaagcctggcaggagcaaaagaagcgtgatctggtttatctgggggagggtgtgtctgccggcctcaacaatactgaagcaaatctggccaggcttcaatctaacaaacttcccgtcctgtcgacagcggccgagatcgctactgctatggagatcaccgtcgggcaactccgatttcttgcattttctcggcgcacttcccaaatctcccactatatcaggttcaagattcccaagaaaaccggcggcgaacgcctgataagcgccccaatgccgagactcaagcaagcccaacactggattttgaccaagatacttgaaaaaatcgagccccatgcagctgcacatggtttccgccaggagcggagcattatgacaaacgcccaacctcacgttggggccgagattgtcattaacttcgatctgaaggacttttttcccagcatctcctacaaaagagtgaagggcctcttcaggagttttggatacagcgaggccgccgcaacaatcttcgctctgctgtgtacacagcctgaaattgaagaggttgagctggacgggaagacatactatgtggctcagacggagaggcatctaccacagggctcccctgcgagtccggcaataaccaatctgctgtgtaggcgcctggacagacggcttacccggatggcccaggagctagattttgtgtacactagatacgctgacgacctcacctttagctgcgggtcagataaccccagaatttgcaatctactgaggcgtgtggaaagcatcgtcgcccacgagggtctgacaattaaccaggaaaaaactaggattttgcggaagtctaggcaacaggaagtcaccggaatagtggtgaatgagtacccaaatatcgaccggaaaactctgaaacgcttcagagcaaccttatttcagatggagaaagatgggatcgcaggcaagaagtggggcaattctgatgacgtcctcctcgccatcgctggattcgccaattttgtgaaaatggtgaaccctgagaagggagctgcttttcaggcgcagatacaaagaattagacagaagtggctcggagagatccctgacaccactgacacctcgcctcagggtataatcgtggaatgcttcaagcaggggagtaagctgcgcatgcgggtgattagcccaggctataatccagattggaaggttcagttccccaaggctttacgagaggagggagcgaggttcctggtagaggaaatccaggagagtaacggattctatcgtacggtaggcgaaatccgcaaactttga

SEQ ID NO: 13421 - RNA, 1422 nt, synthetic construct
  source 1..1422: mol_type = other RNA
atgactgaacaacagccccggacacggcaggagctttacgatcgcatccgtcagacctctcgcgaggaggttattctcgaggagatgattcgcctcgggttttggcctgcggagggtgaaatccccgctgaccccgctgacgagattcgcagaaggggggaaatagaaagagaactgagcgagctctacaggcagaacagacagctccacaatgaaacctacctcaaaaagcaggtgtacttgcagcgactggaggaatctaaaaggaagagacaagagaacaaggagcgacgtgagagagagcgacaggaacgagcagaggcatggcgtcagcggaaggagcaggagatagtctacttaggcgaccgcgtgagcgccggacttaacgatacggagtataaccaggagaggctggaaagctattcacttcctgcttataacacagcccaggagattgccgacgctatggggattagtatcggcgaattaagattcctggcattttctcggaagacttcccttatcactcactacgtcaggttcaagatcccaaaaaagaaaacaggggaccgcctgattagtgcgcccatgcctagactcaagaaagcccagcattggatcctgaacaacatcttggagaaaatccctctccacaacgccgcccacggctttagacctggacatagtatcgttacaaacgcccaaccccacataggtgcagaagtgattatcaacttcgacctgaaagactttttcccatccatctcctataagagagtgaaaggtctattccagtccctgggatacagcgacatcgctgctaccatctttggtctaatctgtacagagccagaggtagtggaagtggagctggatggcaaaaattattatgtagcactctccgagaggcatctgccacaaggggcgccgacctctccagctattactaatatcatgtgccgccggttggacaggcgattagaacagatggcccagaagttgggctttgtgtacactcgctacgccgatgatctgacgttctcaaccagcggcgagttcaggcggcatatttgcaatattcttaggcggacagagtcaatagttgatcacgaggggttcgtaatcaacgaagagaagaccagaatcatgcgtaataccaatcagcaggacgtgactggcgtggtcgtgaacagcaaactgaatgtcgataagaaaaccttgaagcggtttcgggcaacgttatatcaaattgaaaaggatggactggaaggcaagcactggggccattcggggaatctgctggcctcaattcaaggattcgtgaattacgttgccatgataaatccggaaaaaggcgcagaatttcaagctcagatagaacgcattaaagaaaagcacggaaggggaaagaagagtgtctga

SEQ ID NO: 13422 - RNA, 1401 nt, synthetic construct
  source 1..1401: mol_type = other RNA
atgactgaccaaccccggaccagacaggaattatatgaccgtattcgcgaaacaagcagagaggaagtcatcctcgaagagatgatccgcctgggattttggccggctcaaggggaaattccccaagatcccgctgatgagattagacggagaggcgagctgcagaaagaactcaatgacctgtacaaacagaatcgccagctcaacgatgagaaccttctaaagaaacagctgtacaagcagcgcctcgccgagtcacgccgaaaaaggcaggagacaaaggaaaggagagagagggagaggctcgaacgcgcagaagcctggcgtcaaaaaaagcaacaggacatagtctaccttggcgatcgtgtgagtggaggacttaattacaccgattgcgacgaacagaggctacagagctatggcctgcccatctatgggaccgcggagcaaattgcaaccgcaatggggattaccatgggccagctgagattcctggcctttagtaggaaaacgtcaccaatttctcactatatccggttccggatacctaaaaagactggaggagatcgaatcatctctgctcctatgcctcgcctgaagaaggcacaacactggatccttaataatatcctggagaaggtagagttgcacaacgctgctcacggattccgcccaggtcggagcatcgtgagtaacgcccagccacatattggtgccgaggtggtgataaacttcgacctcaagaatttctttccttcaattagctaccagcgcgtgaagggcctgtttatttccttggggtactccgaagccgccgcgactatttttagcttgctgtccacggagcctgacatagaagaggtggaattagacggaaaaacatattacgtagccttgtcggatcggcatttgccacagggcgctcccacttctccagccatcacaaacatcctctgcagacgacttgataggaggctgacacagatggctgaaaatttaggtttcacgtatacccggtatgccgatgacctgactttttccgcgtccggtgataatagaaggcacatttgtaacgttctgcggagaaccgagtcaatcgttgagcatgaggggttcgtgataaacgaggaaaagactcgtatcctgcgaaactctcggcagcaggacgtcaccggggtcatcgtcaacgacaaaccgaacgttgacaaaaaaacactgaagcgatttcgggccacactataccagattgagaaagatgggctcgagggcaagaggtggggcaatagctctgacctgatcgcaagtatccagggctttgctaatttcgtggcaatggttaaccccgaattgggcgcagagttcaaggaacaggtgaagcgaataagagagaagtacaagtga

SEQ ID NO: 13423 - RNA, 1413 nt, synthetic construct
  source 1..1413: mol_type = other RNA
atgtccgatttgccacagccgcggacccgccaagagctgtatgatcggattcggcagacttcacgggaagaggttatcctcgaggaaatgataagattgggcttttggcctgcagagggaactgtgccagaggatcccgccgatgaaataagactcaggggggagatttggagagagctgagcgatctatacaaacaaaatcgcacccttcataatgaagccgagctcaagaagcaggtctatcagcagcggcttgccgaaagtcgccgaaaaagacaggaaacaaaggaacgaagagagcgtgagcggctcctacgtggcgaagcctggaggcagaaaaagcagcaggatattgtttatctgggggatcgtgtgtccggaggcctgaattataccgagtgtgaccggcagcgactccagtcatacaacctccccgaatatggcaccgctgagcagatcgccgcagccatggggattaccataggccaactgaggtttcttgcattcgatcggaagacttccactgtgtctcattacgtgcgctttaagattcctaagaaaactggaggggacaggataatcagcgcccctatgccgaggttaaaacaagcacagtactggatcctgagcaatatcctcgaaaaggtcgagcttcacgacgccgcgcatggttttagaccaggacgctcgatagtttctaacgctcaacctcatgtcggagccgaggtggtgataaacttcgacttaaaggatttcttcccatccatttcttaccagaggattaagggtgtgtttagaagtttcggctattccgaggcggctgctacgattttcggactgttatgcactaaacccgacatcgaggaagttgaactggacggcaagacgtactacgtcgcgctctcagagaggcacctgccacagggagctcccaccagtcctgccatcacaaacatcctgtgccggcgcctggaccgtaggttgtctggtatggccgagaacattgggttcgtgtacacaagatatgctgatgacctgacatttagtgccagcggagataacctgcgccacatctgtaacattcttcgccgaacagaatctattgtggctcacgagggcctggcaatcaatgaggaaaaaaccaggatcctgcgcaaaagcgggcaacaggaggtcacgggggtagtagtcaacgaaaaacccaatgtagacaggaaaatcctaaagagatttcgagcgaccttgtaccaaatcgagaaggacgggttggagggcaagcactggggtaattcacccgacctgatcgctagcattcagggttttgccaatttcgtggctatgatcgaccctcagcagggcgcagcattccagcagcaagtgcggagaatccgagaaaaatacaggtccacatga

SEQ ID NO: 13424 - RNA, 1404 nt, synthetic construct
  source 1..1404: mol_type = other RNA
atgagtgaccaaccacgaactcggcaggaattatacgaccgtatacgccagatgggaaaagaagagtttatcctcgaggaaatgataagatatggcttctggcctgcgcagggagagattccccaggatcccgccgacgacataagacggatgggtgagatccgccgcgagctagacgagctgcgacagcaatcctcaaggctccacaatgagaaggagttgcggaagcagctcctgaagcagagattggcagaatcaaggagaaagaggcaagaaacaaaggaaagacgagagcgagagcgccaagaaagagccgaagactggcggcagaggaaagaacgcgagattctttacctgggcgaagatgtaagcggtggcttgaattacaccgagtgcgatgaagagagactgcggtcgtacggcctgcctctgtgtggaaccccctacgagatcgcagccgccatgggtattaccgtggggcagctccgcttcctggctttctctcgtaaaacttctacgatctcccactacattaggtttaagattcccaaaaagacagggggcgagcggctgataagtgcccctatgccgaggctgaagcaggcccagcactggattcttggaaacattttggagaagctggaactgcatgatgccgcacatggtttccggcgcgaccgctctatcgtgtctaacgcacagccacacgttaagcgggatgtgatcatcaatttcgatctgaaagactttttcccttcaatctcctacaagcgggtcaagggattattccatagttttggttattctgaagctgctgccacaattttcggccttctctgcacgcagccagacatcgaggaggttgaactagatggcaaaacttattatgtcgctctgaccgaaagacacctgccacaagggtcacctgcttccccggctattacaaacctcatgtgtcgcagattggatcgccggctcacatccatggctgatgaactggggtttgtctacactcgttatgccgacgatttaacctttagtgcaagcggcgactcactaaggaatatctgcaacatccttaagagaacccagagcattgtcgcacatgagggcttcacaatcaacgagcagaaaacccggattctgcgtaaaaatagacagcaagaggtgactggcgtcgtggtgaacgattaccccaacatcagcaagaaagagctgaaaaggtttcgagcgaccctctttcagattgaaaaggacgggcttgagggaaagcactggggaaattccaataacgtgatgagcagcatacaagggtatgcgaacttcgttgccatggtaaatccacagaaaggggtggagtttcaggaacagatcaggaggatcagggacaaatatcgatgttga

SEQ ID NO: 13425 - RNA, 1413 nt, synthetic construct
  source 1..1413: mol_type = other RNA
atgtctgaccaaccccgaactcgccaggagctgtatgaccgggtccggcaaattggtaaagaacagtttatcctggaggaaatgatcagatacgggttttggcccgcgcagggggaaatccctcaggatcccgctgatgaaatcaggaggcgcggagagttacagcaagagctgaacgccctgaagagcgaaaacagacagttgcacaatgaacaagccttgaggaaacaaatgctgaagcagcgacttgaagaaagccgacggaagaggcaagagacgaaggagcggagggagcgcgaaagaatcgcaagaaccgaggcttggcggcagaggaagcagcaagaaatcccctatctgggcgacggcgtctcaggtggactgaattacaccgactgtgatgaagagaggctacaggcctacgggctccctgtctgccagacaccagagcagattgcctctgccatgggaatttctgtgggtcagctgcgctttctggccttcagtagagatacttccactatctcgcattatatcagattcaagatcccaaagaagactggaggagaacggctcatctccgcaccgatgccccgtctgaaaaatgcgcagcactggatacttgttaacattttggaaaagcttgagctgcatgacgctgcacacggcttccggcgggataggagcatcgtgtccaatgcacagccgcacgtgggagccgacgtgattataaacttcgaccttaaggacttctttccatctatttcttacaaacgggtaaaaggcctcctacagtcctttggctacagtgaggctgccgccaccatcttcggactattatgcacacaggcacaggtggaagaggtggagctcgatggtaaaacctattacgtggctaccacagaccgccatttgccacaaggctcccctgccagccctgccatttctaacctcctgtgtagaagactcgatcgcaggcttatgggcatggctgagcagctcggctttgtttatactcgttacgctgacgatctgacattttcggcgagtggagaaagtctgtgcaatatctgtaatgtcctgcgaagaaccgagtcaattgtagcccacgaggggttcgctattaatgagcagaagaccagaattctgcgcgggaagtcatcccaactcgaggtgacaggtatcgtggttaatgaacgtccaaacataagcaaaaaagagttgaagaggttccgcgcaacgttataccagatagaaaaagacggccctgaaggcaagcattgggggaacagctcagatgtgatggccagcatacagggcttcgcaaactttgtcgctatggtaaaccccgagaagggggcggagttccaggagcaggttcagcggattaaagagaaatatgggcgtcgccgatga

SEQ ID NO: 13426 - RNA, 1410 nt, synthetic construct
  source 1..1410: mol_type = other RNA
atgagtgatcaaccgcggacacgccaggagctgtatgatagaattcggcagataggccgggaggagttcatcttagaggagatgataaggtacggtttttggccagcccagggaaccattccagaggacccagcagacgagattagacgtcgtggggaacttcagcgggagctggggaagctcagggaagagagcaggattctgcacaatgaggaagccctgagaaaaaggttgctgcaggaaagactggcagagtcacgcagaaaaagacaggagactaaagagcgaagagagaaggaacggcagcaacgagccgatgcctggcgtgagaaaaaggcccaagaaatcacttacttgggcgagggggtgagcgggggactgaacaacacagacggggacgaggaacgacttcagtcttacggtctgccgatctgcggaaagactgcccagatagccacagctatgggtattactgttggggagctgaggtttttggcatttagcaggcaaacctctactatcacccactatatacgcttcaaaatacccaaaaagacagggggggaaagactgatctcagccccaatgcctaggctgaagaatgcccagcactggattctcaataatatcctcgagaaactagagctgcatgacaccgcgcatggcttccggcataaccggtctatcgtttccaatgctcagcctcatgtgggtagtgacgtgatcatcaacttcgacctaaaggatttcttcccttctatttcatacaaacgcgtaaaaggcctctttcattccttcggctacagtgaagccgctgcgacaatttttggtctgttgtgcaccgagcccgaaatcgcagctgtggaactagatggtaaaacgtattacgtcgcactcacacaccggcaccttcctcagggaagccctgctagtcccgctatcacaaacctcttatgtcgaaggctggaccggagacttagcgaaatggcggaaaatctgggctttgtgtacacgcgatacgcggatgatctcaccttttccgcctcaggcgactcgttacgtcacatttgtaatattcttcggagaacggagagcattgtcacccacgagggctttgcaattaatcccgaaaagactcgaatcctccgcaagaaccgccagcaagaagtgactggaatcgtggtcaacgagaagccaaccatcgccaagaaggaactgaagcgcttccgcgccaccttgtatcagattgaaaaggacggaatcgctggcaagcagtggggaaattccgatgatgtcatggcttctatccaaggctatgcaaacttcgttgctatggtaaaccccgaaaagggagccgagttccaggaaaaagtgaggaggataaaagagcgctatggcgcaaactcctga

SEQ ID NO: 13427 - RNA, 1401 nt, synthetic construct
  source 1..1401: mol_type = other RNA
atgaccgaccagcctaggacaaggcaagaactttacgacagaatcagggagatcggcagagaagaattcattctggaagaaatgatcaggtacggcttttggcccgctcagggggagattcctcaggaccccgctgacgagatccgaagagagggagaaatccgacgcgagctcaacgagctacaacagcagagtcggcaactccagaacgaaaagactctacgtaagcaagccctgcagcagcggctggccgaatctcgacgcaagcagcaggagacaaaagagcgccgggagagagagagacaacagaaagcggaaaactggcagcagcggaagcagcaggagatcctctacctgggcgatggcatttcagggggtctgaacaactttaatgccgaaattgagaggttgcaatcttacgggttgccgatatgcaataccgccgagcagatcgccgcagctatcaacattaacattggcgagctccggtttctggccttcagccgtaaaactagcactatcagtcactatatccgtttcaagattccaaaaaagaccggcggagatcgcctcattagcgctcccatgccaagacttaaaaaagtgcagcattggatacttgacaacatcctggagaaaatggaattgcacaccgcagcccacggttttaggcctcatcattcgatcgtgacgaacgcgctcccccatgtgaaggcggaagttatcataaatttcgacctgaaggacttttttccgtctatctcatacaagagagtcaaggggttgtttcagtccttcggatacgcggaagctgccgctacaattttcggactgttatgcacggagcccgagattgaacaggtggagttggacggaaaaacctattttgtcgctttaacagagcggcacctgccacaaggttcccccgcatccccagccattactaatctgctgtgtcgccggctggataataggctgaccacaatggcagaagacatgggcttcgtatatacacggtatgccgatgatttaaccttttcagccagcggggacagtctccggtacatatgtaacatcctaaagcgaactgagtctattgtcgcacacgaggggttcaccattaatcagcagaaaacgaggatacttcgaaagaatagacagcaggaagtgactggtattgtggtaaacgatagacctagcatatcaaagaaggagcttaaacgcttcagggcaacactgtatcaaatcgagaaggatggacctgaggggaaacactggggcaattccagcgatgttatcgcatccatccagggctttgccaatttcgtggctatggttgatccagaaaagggacgcgagttccaaaaacaggtcaaacagataaaggaaaagctccgctga

SEQ ID NO: 13428 - RNA, 1398 nt, synthetic construct
  source 1..1398: mol_type = other RNA
atgactgatcaaccgcggacccgccaggaactctacgaccgtatccgatcaactagcaaggaagaatttatactggaggagatgatcagatttggcttttggcccgcgcagggcgaaatacccgaagatccggcagacgagattcggcgtatgggcgaaatccgcagggagttagacgagctgagaagggagaactctctgctgcacaatgagcaggcccttcgaaaggagatgctgaagcagcgcctgattcagtcaaggcagaagcagcaggaaacaaaagaaagaagagagaaagagcggcaggagagagcggaaaattggcaacagagaaagcagcaagaaatatgctacctgggagatggggtatctgctggcctgaacaataccaactgcaacgaagaacgtctgcagaattaccaactaccactttgcaatactgccgcagagatcgccgccgcaatggagatcagcgttggccaattaaggttcctggcctttgaccgaaagacatctcatatctcgcactacatccggtttaagattcccaaaaagacaggcggcgaacgcctcatttcagcccctatgccaaggcttaaagcagcacagcactggatcctcgtgaacattctcgaaaaactggagctgcacaattgtgctcatggattcaggtcttcacacagcatcgttacgaatgcccagcctcatgtgggttccgaggtgattatcaactttgacttgaagaacttcttcccctctatttcctacaaacgggtgaaagggctctttcagtccttcggatatagtgaagcggcagccacaattttcggattgctgtgcacggagcccgagattgaggaagtggaactcgattccaagacctattttgttgccgtgaccgagaggcacctgccacaagggagtccagcttctcctgctatcactaacatcctatgtagaagactcgaccaacggttggatcgaatggcttcggagctcgggttcgtctataccagatatgctgacgacttgacattcagcgcttccggggactccttgcagaacatctgtaacattctgcgccataccgagagcatagttgcccatgagggatttgtcatcaacgaagaaaagacacgcattctaaggaagaatcgccagcaggaggtcactggcattgtggtgaacgaacacctgagtatcagcaaaaaagtccttaaacgcttccgggcaaccttattccagatagagaaggatgggcctgatggtaagcgatggggtaatagcgaggatgtcattgccagtatacagggattcgccaacttcgtggcgatggtgaatcctgagaaaggtgctgagtttcttgagcaagtacagaggatcaagaataaacggtga

SEQ ID NO: 13429 - RNA, 1404 nt, synthetic construct
  source 1..1404: mol_type = other RNA
atgaccgatcagccccgcacacgccaggaactgtacgagaggatctggcagataggcagagaggaggtcatcctggaggagatgattcggtacggtttctggccagctcaaggtgagatcccacaggacccggccgacgagattagaagaaaaggcgagattcggcgggagttggatgaactgagacgcgagacgtcccgattacagaacgagcaagctttacgaaagcagatgctaaagcaacgcctagccgaatcaaggcggaaaagacaagagacaaaggaacgtcgagagagggaacggcaagaacgcgcccaggcctggagggaaaagaagcagaaagagattatttatctcggcgaggatgtcagcggaggcctgaatcggaccgaaggaaatctggagagacttcaatcaaacagtttgcctccctgccaaacagcagaagacatagccggcgcaatggggatctccgtaggtgaactgaggtttctcgcgtttgaccgaaagacatctaccacttcccactacatccgttttaagattcccaaaaaaaccgggggagagagattgattagcgcacctatgccccggttaaagcgcgctcagcattggatcctgtcaaacattctcgagaaactggagcttcacgacgccgcacacgggttcagaagggagcggtcaatactgactaatgcccagccgcatgttgctgccgatgttatcattaacttcgacctgaaggacttctttcccagcatttcttatcgccgagtgaagggcctcttccagagttttggctattctgaatccgcggggaccatctttgccctgctttgtacagagccagagatcgaagaagttgagctcgacggaaagacgtacttcgtggctattagtaataggcatctccctcaggggagcccagcatctcctgccattactaatttgctctgccgacgtctggatcggaggctggtccagatggcacaagagctggggtttacctacactcggtacgctgatgatctgacctttagtggcgctggtgaatcgctaaggcatatctgtaacatacttagaagaaccgaatccatcgtggcccacgaaggctttgctatcaacgaacagaaaacacgcatacttaggaagaaccggcagcaggaagtgacaggaatagtggtgaacagccaccccaacatctctcgcgagacgctgaagcgcttcagagccactctgtatcagatcgagagggacggactcgagggtaaacactgggggaatagcgatactctcctggcctccttgcagggattcgctaatttcgtggcaatggtaaatcctcagaaaggcgcggaattccttgaacagatccagcgtatcaaagagaagtatatgttgtga

SEQ ID NO: 13430 - RNA, 1416 nt, synthetic construct
  source 1..1416: mol_type = other RNA
atgaccgaccagccgcgtacccgccaggaattatacgataggattcgccaggttggtcgagaagagtttatcctcgaggagatgattcggtacgggttctggcctgcccaaggcgagatgcccgaggatcctgccgatgaaatcaggcagaggggcgagatacagcgagagttgaatcaactaagataccagaatcgcaacttacacaatgaacaggccctgagaaagcagatgctcaaagaaagactagccgagagtaggaggaagcagcaagagacaaaggagagacgggagcgggagcgtcaagaaagagcagcggcgtggcagcagcggaaacaacaggaaatcctgttcctcggggagggggtcagtggagggctcaaccagaccgaagccaatcgggagagactgcagtcctacggcctgcctgcgtgggaaaccgtcgagcaaatggccgccgctatgggcgtgtcagtgggagaattgcgcttcctggccttctcaaggcccgctgccaaaatctcccactatattcgcttcaagattcccaaaaagaccgggggtgaaagactgattagcgcccccatgccacggctgaaaaaggtccagcacggaattctggaccggatcctttcgaagatcgagttgcatgacgccgtgcacggatttaggcgaactaggagcattgttagcaacgcccgaccccatgtgggcgcagaagctattgtgaactttgacctcaaggacttctttccttccatctcttaccaacgggtgaaaggcctttttcggagctttgggtacgcagaggccacagcaaccatcttggctctgctgtgcacacagccagagatcgaagaagtgcagttagatggccaaatctactgtgtcgcgattggtaatcgccacctgccacagggtagtcctgcttctcctgcgattagcaacctcctttgtagacggctggatcgcaggcttatgggcatggcaactggttttgggttcacgtatactcggtatgctgatgacttgacattcagtgcttctggagaaaatcttcgccatatatgccgaatactgcgccgaacagaatctatagtagctcacgagggatttactatcaacgccgagaagactagaataatgaggaaacaaaggcagcaggaggtaacgggcgtggttgtcaatagccagccaaacattgccaaggagacactgaagagatttcgtgctaccctctatcagatggagaaagacgggccggagggcaaacattggggcaactccaccgacgccatcgcatccatccagggattcgcaaacttcgttgctatggtgaatccatcaaaaggagcaaagctgcaggcacaggtgaaacgtatcaaggaaaagtatggtagaaagtcagctccctga

SEQ ID NO: 13431 - RNA, 1401 nt, synthetic construct
  source 1..1401: mol_type = other RNA
atgtcagagcaacctcgcacgaggcaggagctatatgaccgacttcggcagtccagcaagcaggaatttatactggaggaaatgattcgtctcggcttctgggctactgccgaacagatcgctattgatccaaccgatgagatgaggaggctgggagagatcactagagagttgcagcagcttcggcaagaaaatgcaagactggggaatgagaagaaactccgacaggagttgctgaagcagcgccttgcagaatctaaacgaaagcagcaggagacaaaggaacgccgcgagagagagcggattgaaaaagcacagaagtggcaggaacagaagcagacagggatcagttacctgggagcggaagtcagcggcgggctgaacaacacagagtcgaacgctgagcggctgtctaactatgggctgcccagacttgaaaatgccggtcagatcgccgcagccatgggcatatcagttggccagctgcgctttctcgctttctcccggaagacctccaccatttgccactatatccgctttaccatccctaaaaagaccggcggatcacgcagcattagcgcaccgatgcccaagctcaaagagtctcagaaatggattttagtgaacatcctcaacaagctggagctacatgaggctgcccacggctttagacgtgaccggtccattgtgagcaatgcgctgccacacgtgaaacaagatgtgatcatcaatttcgacctcaaagactttttcccatcaatctcgtaccgcagggtaaaggggttatttcaatctttgggatatagtgaggccgccgcgaccatcttcggactgctgtgtacagaattggaagtcgaggccgtggaattagacgggaagacttactacgtggctaacagcgacaggcatttgccgcaaggcagtcctgctagtcccgccattactaacctgctgtgcaggagactggatcgtaggttaactttgatggccgaaaacctcggtttcacatacacacgatatgcggacgaccttacgttctccgcaaccgggtctaacctcagacacatatgtaatgttctcaaacggacagaagatatcgttaatcatgaggacctaaccataaatcagcagaaaacccggattattagaaaaagccgacagcaagaggtcaccggagtggtggtcaactcccaccccaatatcgctcgggagacgctgaagaggttcagggcaactctttaccaaattgaaaaggatggtctggagggcaagcactggggcaacactacagatgttatggccgctatccaaggatacgcaaatttcgtgaaaatggtaaatcctgccaagggtgccgagtttatcgcccaggtcgaaagaataaagcataaatatccatga

SEQ ID NO: 13432 - RNA, 1413 nt, synthetic construct
  source 1..1413: mol_type = other RNA
atgagtgaccagccccgtacaaggcaggaattatatgatcgcattcgggagatcgggaaagaggagttcgtactggaggagatgattagatatggattttggccagccgagggcgaaatgccagaagaccctgccgatgagatcaggcgtagaggcgaactgcagcgggagttggcccagctacgacaggaatctcagaagcttcaaaatgagcaagcggttcgtaagagattgctcaaggagcgactggcccaatccagactcaagaggcaggaaaccaaggaacgtagggagcaacagcgacttgaaagggcccaggcttgggctattcggcagcagaaggagattctgtatctgggtgaacaggtcagtcctggccttaatcacacggaatccgaccgcattagactacagacctacaagctgcctctgctatcaaccgcacaagacatcgcacaagctatggggatcgcccttggacagctgaggtttctggccttcaatagaaagactgctactatttcacactatatccggttcaagatcccgaaaaaaacaggaggagagcgcctgattagcgcacctaagcccaaactcaagcaggcacagcactggatcttgtccaacatcttagaaaaactcgagctggataacgccgcacatggctttaggcgcgataggagcatagtgacgaacgcccaacctcatgtgggggccgatgtcatcatcaacatcgacctgaagaacttctttccaagcatcagctacccccgcgtcaaaggactcttcagatcttttggatactcggaagcagctgctacggtgttcggtcttttgtgtactgaggcagacatagaggaggtcgagcttgacagcaaaacctactacgttgctaccagcgatcggcatttaccccaaggctccccggcatctccagccataactaatatattgtgccgccgactcgaccacagactcactacagtggctaccgacttgggctttatttatacacgatacgccgatgatctgactttcagtgcctcgggcgaaagtctgaggttcattgggaaactgctcaagcgcacctcatctgtggtcgcacacgaagggtttacaataaaccagcagaaaacacggattttacggaagagccagcagcaggaagttacaggtattgtagtgaaccatcacctgaacatctcccggaaacagctgaaacgctttagagcgaccctgtatcaaattgagaaggacggccccgattctaagcattggggtaactcctctaatgtgattgccgcgatacaagggtacgccaatttcatcgctatggtgaatcccgagaaagcggccccattccaggctcagatccagcggatcaaggacaaatggctctcaaatcagcactga

SEQ ID NO: 13433 - RNA, 1758 nt, synthetic construct
  source 1..1758: mol_type = other RNA
atgaatacgaaccacttaatcacgataggcatcagcctttatcaggagaacaagtatagtgaggcgattgactgttttaaccagataattgccaataatcccaactccgctaccgcttaccactataggggactggtgcgtcggagacaacgcgatgaccagggcgctatcgctgacttacagaaagccgatacccttgtggccgacaaagaatacactaagctgtgcgagaaaatacagaacctgatcggaagggactacccacacaaatacaacaatgatgacaatcaggagttcgattacatcgagtacgaggataactggtacgctgacgaggatgagatcgcagcggcagaccctaactatatcccttcatccgagtttctgtcatgtgctgaggaggtttaccagctgatctcctacgagcttaaccagttcgagaattttctgagtaaccggctcaagactatcgacttactcagaaagaaaagagcggagaatagtaggtttaaccaagagcgactagagagcaaaaaccttcccatctataacagtcatgaggaaattgcccaggccatgggtatctctgtgaaaggtcttagattcctgactttctcacgaaaagggtatcactacattcgatttcaaattccaaagaagcccagcggataccgccagatatccgcccccaagaaattgttgaagaaagcccaaaattggattctggataacatcctggaaaaattggagcttcatgatgctgcacacggatttcgtctgaaacattctattgttaccaatgcgcagatacatgttggcaaagaagtcattatcaatatcgacctaaaggactttttcccgtctatcagctataaaagggtaaagggcttgttcaaatctttcggatattctgagacagcaagtaccatttttgctctgatttgcactgagccgaagatcaaggaggtagaaatcaatgggcagatcaattccctgctgagctggacggataggtacttgcctcaaggcgccccttcttcgcctgcaattactaacatcctctgcaggcggctggatagacggctgaattttatggcaaagcaatatggcttcgattatacacgctacgccgacgacctgaccttttccgcatccggggaaagcctggtgaacgtcaataacatcctcaagctcaccaatctcattgtcaagaaggaagacttcgagatcaatgagaataaaacccgggtggtccgcaattaccgcaagcaggaggttaccggaatcatagtgaatgagaagctgaacatcagcagagataagttgaaaacatttcgggccgtactctataagatcgaaaaagacggcttacagaactatacatgggggcaatcacaggacataattgccgcaattgaagggtttgccaacttcgtggctatggtgaatccagaaaaggggggcaagttcattgaacagatacaccggattaaggagaaatatgtgcgtaaaagagaaaagatcgtgctggtccatcaggaattcttgacacagagcaacattataaagcagattaacgagaaactccgcgaagtgaggtttaacaagattgaaaagcgacaatacctccaggaaacctacaataagaaatacctacaggaactgactgccgaggaactcctagaattcctgcactatcttattacactccagcccgaacagttctcattcggtgatacagacgatctgccattctga

SEQ ID NO: 13434 - RNA, 1695 nt, synthetic construct
  source 1..1695: mol_type = other RNA
atggacaactaccaactcatcactatcgggattagcctgtacaaggagaataaatatagcgaagccatcgattgcttcaaccagataatcgcgcaagaccagaattcatccacagcgtatcactaccggggccttatctgcagaaaacagcgcgatgatcaaggagctattaccgatcttcagaaagcagataccctggtggcagaccaggagtacactaacatctgtcagaagatccagaacctaattggtaaagactatagccacagttctaacaacaaaaataacgacgaattctctgatatcgaatatgaaggcacctggcatctcgaacaggaaatttatgatctcatttcctccgagctgaacaagtttgagaatttcctgagttcaagattagagactatcgaacttctgcgaaaaaaaaggggggaaaatagtcagtttaaccaggaaaaattggaatcgaagcatcttcctatatacaatagccacgaggagattgcccaagccatggggatttccgttaaagggttgcggttcctggcattctctaggaaggacaatcattacataaggtttcagatccccaagaagccttcaggttatcgacagattagtgctccaaaaaagttactgaaaaaggcccaaaactggatcctagacaacatcttagagaagcttgaactgcataacgctgctcatggcttccgactgaaatattctattgtgaccaatgcccagattcacgtcgggaaggaagtgataatcaacattgacttgaaggacttctttccttcaatctcctacaagcgcatcaaaggcttgttcaaatcatttggatactctgaaacagctagcacgattttcgccctgatttgtactgagccgaaaattaaagaagtcgagataaatgggcagatcaacagcttgctttcctggaccgatcgttatcttccccagggagcaccaagctctccagctatcaccaacatcctatgcaggcgcctggataggagactgaactttatggcaaagcagtacggctttgactacagcagatacgccgacgacctaaccttttcggcatccggagaatcactcgtgaacataaacaatatcctgaagctgacaaacttgatcgtcaagaaggaggattttgagatcaatgagaataaaaccagagtggtacggaattaccggcggcaggaggtgacaggactgattgttaatgagaagctcaacatatctcgcgataagctgaaaacattccgtgcagtactgtacaagattgagaaggatggcctgcagaattatacttggggtcaatcccaggatataatcgcggccattgaaggcttcgctaattttgtcgccatggtgaatcctgaaaaaggcggaaagtttatcgagcagattcacagaattaaggagaaatacgtgcggaagagggagaaggtggttctggtttatcaggagttcttgacacagagcaatattctcaagcaaatcaacgacaagctccgtgccgtccgcttcaataaaatcaagaagcgccagtacctccaggagacgtataacaaaaagtatctccaagagttagctgccgaggaactcctcgactttctgcacttcctgataaattggcagcccgagcaattcagtttcgatgacactgacgaccccccgttttga

SEQ ID NO: 13435 - RNA, 1800 nt, synthetic construct
  source 1..1800: mol_type = other RNA
atggacctcttcaacgagcctaggaagaagagcaatgtgcttatttacaaccgcaagtatcacgttatcaatatccttctcattaacctgcaatccgtggccttcaccaacaacatgaacactaatcacctaattaccattggaatctctctgtaccaggagaataagtactccgaggccatcgactgctttaacaagatcatcagtacggatagcaattgttgccaggcgtatcattataggggcctggtcctgcgcaagcaacgagatgatcagggggcaatagcagaccttaaaaaagccgacacactcattgccgatcaggagtacaccaacatcttccaaaagcttcagaacctgataggcaaggactattctcactttagtaagaacaatgacaacgatgagttttcttatatcgagtataaggggacttggcatctagaacaggaaatctacgacctgatatcatccgaattgaataagctggagaacttcctgtcctctcgcctgcagactatagaactgttacgcaaaaagcgggctgaaaactcgcaattcaatcaggagagattggagaacaaaaatctgccaacatataactcccatgaggaaatagcccaggctatgggaattagtgtcaaaggtttacggtttctttcatttagtcggaaaaatgatcactacattcgtttccagatccctaagaagccgtctggatataggcagataagcgcaccaaaaaagctactgaagaaggcccaaaattggattctcgataatatcctcgaaaaacttgaactgcatgatgcggcacacggattccgattgaagcactccattgtcacgaacgcccagattcatgttgggaaggaggtcatcatcaacatcgacctgaaagatttctttccctctattagctacaaaagggtgaaagggttgtttaagagcttcggttattcagagactgcatccaccatattcgccctgatctgcactgaggcgaagattaaagaagtggaaattaatggcgagattaatagtctgctcagctggacagaccggtatttgccccagggcgctccttcatccccggctattaccaatattttgtgtagacgactcgatagaaaattaacctttatggccaaacagtacggctttgactataccagatatgcagacgatctgacgtttagcgcttcgggggaaagcctggtgaatgtgaacaatatcttaaagctgaccaacctgatcgtgaaaaaggaagacttcgagataaacgagaataagacaagagtggtacgcaactaccgtcgccaggaggttactggcgtgatcgtaaacgagaagctcaatattcccagggataaactgaagacattcagagccgtgctctacaaaatcgaaaaagacggactgcaaaattacacttgggggcaatctaaagatatcattgctgccatcgaaggattcgctaatttcgtgagtatggtaaatccagaaaaaggtggcaaatttatcgaacagatacaccggattaaggagaaatacggcatcaaaaaggataagatttccgactactctccagttatcaggacacagtcatacatcatcaaccagatatactacaagttgtcaaagcttagctactcaaagaccaaaaggagaatgtatctgaccaaaacctacaacaagcggagcctgcaggagctcacagaagagcaacttgtcgagttcctcaactatctcaagaatctacagagttcctttgacgacttagacgagccccctttttga

SEQ ID NO: 13436 - RNA, 1704 nt, synthetic construct
  source 1..1704: mol_type = other RNA
atggactttaatgatatcctgaatcgaggaattgacctgtataagtcacaaaagtacatcgaggctctcgaatgctttaatcagatcatatcccaggaccctaacagctaccaagcctatcactacaggggcctgattagaagaaagcagcgcgacgatcaaggcgctatcgcggatctgaaaactgccaacacactgatcttcgacggggagtatacaaatatctttgagaagatccaggatttgataggaaaagactacccacatcacagcaacaatgagagtaatgataatgccgacttcatctatatcgaatatggcgggacatggtacattgagaaggaaatctatgagtggatctcggcagacttgaaaaagctcgaatcattcctcagtaaacgccttgagaagatagatctcctgagggaaaaacatcgtcaaaattctcagttcaaccagcagaagttggaaagcaagaatctgccgatttataactaccatgaagaaattgcgcaagccatgggcatttccattaaggggcttcgattcctggctttttcaagaaagcactaccactataaccgctttcagatcccgaagaaaccaagtgggtaccgtcaaatttccgcccctaagaagttattaaagaaagcccagaattggatcttacacaacatactcgagaaaatcgaattgcacgtcgctgctcacgggttctgtctccagcgttcgattgtgaccaacgcacagattcatgtgggtaaagaagtgatcattaatatggacctcaaggacttctttccctccatatcctacaaacgggtgaaaggactctttaagtctttcggctatagcgagactgcctctaccatatttgctcttatctgtacagaacccaagatcaaagaggtcgagatcaacgaagagcctaaatacatcttgtcctggactgatcggtaccttccccagggggcaccttcttctcccgccatcacaaacattctctgcaggaggctggaccggaggctgactttcatggctaaagaatatggctttgattacaccaggtacgcagacgacctcacatttagtgcggccggagagagcctggtgcacattaacaatatcctgaaattgacgaacctgatagtaaagaaggaagacttcgagataaacgagaataaaacgagagttgtccggaattatcatagacaggaggtcaccggtatcattattaacgaaaagctgaacatcagcaaggagaaactgaagacgttccgcgccgttctgtataagattgaaaaagacggtctgcagaactatacttggggtaagtcccaggatattatcgctgcaattgagggctttgcaaattttgtggtgatggtgaatccagagaagggagccaaattcatcgagctaataaagcggattaaagagaaatatctgcggaaacgcgagaagtctgtcctggtaaaccaagagttcataacccagtaccacatcgtgaagcagattaattacgaattgaaggaacttcgattcaacaagaccaaaaaaagacagcatctgcaggagaactaccacaaggcatcattacagcagctaactgaggccgaactgcttgaattccttcattacctaaccaactggcaacctgaggagttttgctttagcgataccgatgatccagttcccttctga

SEQ ID NO: 13437 - RNA, 1458 nt, synthetic construct
  source 1..1458: mol_type = other RNA
atgagttcttgtgacattaactgcatcatacaagacatcgaaggcagcatagaaggagaatttgaacagctggagggcagactgtctagacgtctgaagcattcacaggttttgcaaaagaaacgaatcaataacgcaaagtttgatccagaaaggttgcaatctaataatctccctctttgcaacagtcacgaggccatcgcattagctatggagatttctgttaaagggctgcgctttctggcattctccagaaaaaaacaccactacatcaggtttcagatcccgaagaagaccgggggcaatcgaaagatcagcgctccaacacatctcctcaaaaaggctcagaagtggatccttgagaacattctcgagaatatccagctgcatgaggctgcgcacggtttcaggttgaagcatagcattgcgaccaacgccgagcaccatatcggaaaggaggtaatcattaatatcgacctcaaagacttcttcccttctatctcgtatatccgggtcaaagggctgtttaaaagcttcggatattctgagactgcctctaccatttttggattgatttgtaccgaacccaaaatgaaggaaattgaggcaaacggtaaaaccgcctttctgttgtcatggaccgaacggtaccttccccaaggagcccctaccagtccggccattactaatgtcctgtgtaggagacttgaccgccggttgcactcaatggccaagcaatacggcttcgattatacgaggtatgctgacgatttaactttctccacatccggcgaaagcctgagaaacatatgcaacatatttcagaacactcgtttcattgtggaacaggaagatttcgaaataaatgagcagaagactcgggtcattcggcgctatcagcagcaggaggtgacagggatcgtggtgaacgataaactaaacgtatcccgagagaagttaaagaacttccgcgctgtcctctaccagattgagaaagacggtcttgaaggtcacaattgggggcaaagtgaggacatcattgcctcaatagagggctttgcaaatttcgtgagcatggtccacccagaaaagggcgcaaagttcaaagaacagattgataggatcaaggagaaatacgggagaaaaaaaaacccaaaagtgcccaatgtgtcccagcctctactgtcgcgaagcgatattgttgccctcatagacacgaaatttcaggagctgaagttctccaagatctacacggatatctacctgaacaagatctacaagaagcagtcactgaagcaattaacagaagcggagctgcttgagctcctgcgggatctgacaagtagcccctccgaggacgatgatcgtactcagctgaatttcgtgaagagactcaaagccctaattgcccagcgcatcaggtattatacacgcgctaccaaggactccgacttttga

SEQ ID NO: 13438 - RNA, 1872 nt, synthetic construct
  source 1..1872: mol_type = other RNA
atggctgaagcgaaaattgaggattcacgcaataatatggacatcaatgagctaatagtgcgtgggataagctattatatgcagggtaaatatggcgaggctctagagtgtttcaatcaggcaatttgccacgacttgaattgtgttcaagcttatcactacagaggcttaattcgccggagacaaaccgacaagcaggaagcaatagaagatctgcagcaggcggctcgactcctgaatgataaggaatacaccaccatcagcaacaacctgcagatatttatcgagcagaactgtttcaagaagactgagaatgtgaaatcagacgacagcgatcaaaacctgatctttcataatgagaactggtacgagtgctacgatgaccttgtggatgcctttcccgatgagtttatgtcatattgggagattgaaagtctgaggcaggagtgtgagagcatcgtggaggaagaattcgagaaactcgaaagatggctgagccggcagttgaaggattcacaggtccttcagaaaaagcgaatcaacaatgctaagtttgaccgggagaggttgcaatccaataatctgccactttgtaacagccacgaggcaatagcacaggccatgggagtatctgtaaaaggcctgcggtttctggcgttctcccggaagaagtcccactatattcgttttcagatcccaaagaagacgggcgggaacaggaagatttctgcccccacccaccttctgaaaaagacccagaaatggattctcgaaaatattttggagaagatccagttacacgacgccgctcacggttttcgacttaaacattctatcgtaaccaacgccgagcatcatgttgggaaggaggtcattataaacatcgacctcaaggacttcttcccttccattagttatatccgtgttaagggactgtttaagagctttggttatagcgagactgcatcgactatcttcggcctgatctgcacagagcctaagattaaagaaattgaggtcaacggaaaaatcgaattcctactcagttggacagaacgctacctgcctcaaggcgcaccaacttcaccggccataacaaatgtcctgtgcagtagactggacaggcgcttacacagcatggccaaacagtactctttcgattacactcggtatgccgacgacctcacgttctctgccagtggtgaatccttggataacatctgcaaaatttttcagaacacacggttaatcgtggaacaggaagatttcgagattaacgagcagaagactagggtgattagaagatatcaacagcaggacgtgaccgggattgtggtgaatgacaaactcaatgtgtctagggaaaaactgaagaacttccgggctgtcctgtaccaaatagagaaagacggcctcgaggacaggaattgggggcagtccgaagatatcattgcctcaatcgagggcttcgcaaatttcgtgtcgatggtgaatcctgaaaaaggggccaaatttaaggagcagattgaaaggatcaaggaaaaatacggaagaaaaaaggaggcgaagatcaacaatatttcacaacccattatgaaccagtccgatatcgtcgctctaatctatacaaagctgaaggaacttcgctgctctaaaaaggtgaaacagatctacctgaacaagatatacaacaagcaatctctgcagcaacttaccgatgaggagctgttggaagtcctccgagatttgacaacatggagctccggagaaagtggaaggcgccagatcaacttcgttaagaaatacagagccctctcctgtgagtacatccgacatgatacgcccgaccgcgaggacgttaacgaattttga

SEQ ID NO: 13439 - RNA, 1833 nt, synthetic construct
  source 1..1833: mol_type = other RNA
atggatatcaacgaacttatcttccagggcgtcagctatttcaaacagcgtaactatgacgaagcgttagagtgcttcaatcaggccatatcctgcgacctgaactgtgtccaagcataccattaccggtgcctgattcacaggcgacaacaaaataaacaggaggccctggagaatctgcagcaggcaacaaaacttcttaacgacaaggagtacactaccatctccaataatctacagattctcatcgagcaagattgctttaaaactagcgagaatgttcagtctgataacagcgaccataatctcattttttacaacgagaactggtacgaatgctatgatgatctggtcgacgcgtttcccaatgaatttatgtcctactgggaaatcgagagtcttcgacaggagtgtgaaagcatcgtggaggatcagtttctcaggcgggagtgctggctgagtcgacaactaaaacagagccagattttgcaggagaaacgcattaataatgccaagtttgactcagagcggttacagtcccagaacttgcccctgtgtaactctcaggagtcaattgcccaagctatgggtgtgtcagtgaaaggcttaagattcctcgctttctcccgaaaaaaataccactatatccggttccagatccctaagaagacgggagggaatagaaaaatctccgctcccacgcacctgctgaaaaagacccagaaatggatcttagagaacatactggagaagatacaactgcatgacgcagctcacggcttccgtctgaaacattccatagttaccaacgctgagcctcacgtaggcaaggacgttatcatcaacatcgaccttaaagacttcttccctagtatcagctatcgtagagtgaaaggactgttcaaaagcttcgggtactccgagacagcatctaccatttttgggctgatttgtacagagccaaagattcaggaaattgaactgaacgggaaaaccgaactcttgctttcatggaccaagcgctacctcccccaaggggcaccaactagtccggccatcacaaacatcctctgtcacaagctggatcgcagactttatagtatggccaaacagtatggatttggctatactaggtatgctgacgatctaacgttctcagcctcgggggagtcactcggacatatcttcaatatctttcagaacacccgctgtatagttgagcaggaggatttcgacatcaacgaacagaagactagagtgatccgccggtatcagcagcaagaagtgacaggtattgtggtgaacgagaagttgaatgtctcgagggagaaattaaagaattttcgggccgtcttgtaccagattgaaaaggatgggctcgaaggtcacaactggggacactctggcgatattatagcctctatcgaaggcttcgcaaactttgtaagcatggtaaaccctgaaaagggtgcgaaattcaaggaacaaattgatcggataaaggagaagtatggcaggaagaatcaggctaaggtgccaaacgtgagccaaccgattctgaatcagtctgatattgttgcccagatccacacacaactaaaggagttcagatttagcaagcgcataaagcaaatttacctgaacaagatctacaataagcagtctctgcagcagttgactgacgaggaactgctggagctcctcagggacctgaccacctggagttcagtcggacatggcagaaagatggtgaattttcagctgaagtacataggattgtcctgcgaaattaggtctgacacaccaaatgaagaagacgtgaatcagttttga

SEQ ID NO: 13440 - RNA, 1731 nt, synthetic construct
  source 1..1731: mol_type = other RNA
atggacataaacgaactgattgtcaagggagtctcctactatacacagagaaactatgacgaggcaattgaatgttttaaccaggctatctctcgagatattaactgcgtgcaggcttatcattacaggtgtcttattcatcggaggcagcaaaataagcaggaggctctggagaatcttcagcaagccgcccgcctgctgaacgacaaagaatataccacaattagcaataacctgcaaattttcatcggccaatactgcttcaagaaaactgaaaacatcaagagtgataactccgagcagaacatgtctagttgggaacgcgacctcgtgagagacgcagaaaattgcgccgaggcgtacatcgaggagaagttctacgagttagaaagatggctgtcaaagcgacttgagcactctcaaatcttacagaagaagagaatcaacaacgctaagtttgaacccgagcgcttgcagagcaacaatttacccttgtgtaatagtcacgaggatattgctcaggccatgggggttagcgtgaaaggattaaggttcttggccttctctaggaaaaaaagccactatatccggtttcagattcctaaaaaaacggggggcaatagaaagatcagcgcacccacccacctcctgaaaaagtcacagaaatggattctggaaaacatactcgagaatattcagctccacgaggcagctcacgggtttaggctaaagcatagtatcgttactaatgctgaacaccacgtgggcaaggaggtcataataaacatcgacctgaaggacttctttccgtctatcagctataggcgtgtcaaaggtctgttcaagtctttcggttacagcgagacagcgtcaacgatatttggactgatctgtactgagcctaagattaaggaggtggaggtgaacgggaagatagagttcctgctgagctggacagagcgctatctcccacagggtgcccctacgtccccagcaataacaaacattctctgctcaaggctggatcgcagattgcattccatggctaagcaatacggatttgactacactaggtacgcggatgatctgaccttttccgcctccggcgagtccctcgacaatatatgcaatatcttccagaacacacggtttatcgtggaacaggaagatttcgaaatcaacgaacagaaaactcgggttattagaaaatttcgccaacaggaggtgaccgggattgtggtgaatgaaaagctgaacattagtcgggagaaattgaagaatttccgcgccgtcctctaccaaattgaaaaagatggcctggagggccataattggggtcagagcgaagacattatcgcctcaatcgagggattcgcaaactttgtatcgatggtcaatcccgaaaaaggcgccaaatttaaagagcagatcgatcgtatcaaggagaagtatgggtgtaagaagaaggcagccgtaccaaatgtgagtcagcctcttctcgggcggagcgacattgtagcccaaatcaataccaaacttaaagaagtgggatgctcttccggctatacccagatctatctcaccaaaatctacaagaaacgatcgcttaaacagctgactgagacagaactactagaggttctgcgtgatttgacctcatcccaggctggagactctggccggaccgaaaccaatttcgttaagcgatggagagccctgatctactcatga

SEQ ID NO: 13441 - RNA, 1740 nt, synthetic construct
  source 1..1740: mol_type = other RNA
atggacttggacgaaatcctgaagaacgggattgaatactactgggagaagagttacgaacaagccatcgagtgctttaaccagatcatttcctttaacccgaattacgcgaaggcttaccactaccgggctctggtgcgtagaagacagagggacgacaaaggcgcccgtgaagatctggtgcaagcggcctctctgcttggtgatcgggagtatacagctatgagtcagaaaatgttaaagcttatcggttgcgattatcgacacaagtcacccccacgcgaagacgattttgacttcatcttctatgacgagaattggtatagcgactatgacgagctcagtgaaatgtttcctgaggagttcccaccttcgtgggaatacgaggttgatattctagatggtattgcctatgctggcgaagagctggacaggttggagacatggctgttcaaaaagctcgaaagagcatgttacatccagaagaaacgagccattaatgccaaattcgacgagaagcgcctgcgcgagaacaatctgcctttgtgtaactctcatgaggagatagcagcagccatcggcatctctattgccggcctcaggtggctggcttactcgcaaaagaagtatcattatacccacttcaagattcctaagaaaacaggcggggagcgaaacataagcacacccatcccccttcttaaaaaagcacagaattggatcctgaacaatatcctgattaagatccaacctcacgatgcagcccatggattttgcaccgagaggagcatcgtgactaacgcacagttgcacctgggaaaggaggttataatcaacattgacctcaaggactttttcccctccatttcatataagagagtgaaaggtgtctttcagagtttcgggtactccaaaaccgcgtccattattttcggacttatatgcaccgctccaaagctaaaagaaatcaaactcgacgaaaaactgcaccaacttttgtcttggaaagaaagatatctgccccaaggaagtccttccagcccagcaatctcaaatctggtctgtaggcgcctggacagcagactcaccgaaattgccgtcaagtacggatttaattatacgaggtacgccgatgatctcaccttctccgcctctggcgactccttacggaatatcagccatattctgaaagatacacggttgatcgtgcggctccaggattttgagattaacgagaataagactaggattatgcgcaaatctagacggcaggaagtgactggcatcgtggttaattccgagctgaacatatcaagagagacactaaagcggtttcgcgccaccttatacaacctggaaaaagatgggctggagaatcgacactggcgcaactcacaggggggggacatcatcgctagcatagaaggcttcgccaacttcgtcagcatggtaaatccgcagaaaggcgcaaaattccaacagcaggtgactaggattaaggaaaagtacaagccaaagaaaacgcagaactccttagctccccagctaatcaccaaaagcgatatcattgccctgatcaacgacgatataaggaagctgcattggagtaatagagatcgacggatatacctccgtcaggtctatggaaagcagtcactccagcaatttactgaagaggagcttctgaaggtacagaatcacttttgtagcttcctcgatgctttgtctcagaagatatga

SEQ ID NO: 13442 - RNA, 1935 nt, synthetic construct
  source 1..1935: mol_type = other RNA
atggacaatctggaccttcaacaaatcttgaatcgggggattgataattaccaggagaagaactacgaacaggcactggaggattttaaccaggtgatcagcatcaatccactgtttgcaaaagcgtaccattatcggggctggatttaccggatcctggagaagaaggaagaagctatccagaatttccagcaagccgcttcgctattcaaagatcgtgagtatagggttctctgcgaacagcttgccgaactcctggaatctctgttcccctcaaagttgaaaaaacagcagtccagcgaaataaacgatgatatctatagcgagtatcggaatttgttttggattgatgaggacggaaattggtatgacgatcctcctgactacgagtgtgacttctatgacattggagattgggaagattacatcaaccaaaaactcattaccatcaaaaaccgcctgttcaaacgcctggaaaagattgagtacctgcagattaagcgagagaaaaatgctcagttcgatcagcgcaagttagaggataacggcctgccgatttgtaacagtcatcaagacatagcaaagctaatgaaaattcgtgtgaagagactaaggttccttgccttttccagaaataaatcccactacacctgctttaagataccaaaaaagatcggaggcgacaggcacataagtgctcctatgccatttctcaagaaggcgcagctgtggattctccacaacattcttgagaagattaaaatccacgacgccgcccatggcttcattctgaatcactctatcgtgactaatgctcagccccacatcgggaaagacatcattatcaacttcgaccttaaagacttcttcccgagtatatcctatccccgggtgaaaggcttatttaagagtctcggttactccgaaaccgcttcaattatctggggcttattatgtactgagccaaccctaaaacagatcgagctggacggtgaaattcattccctgcgctcctggaccgagcgacatttgcctcaaggtgcgcccagctctcccgccatcactaatttgctgtgcagacgccttgaccaacggctgacacagatggcccagaagtacgggtttgtgtacacccggtatgcagatgacctgacatttagtgcatctgggaacagcctgacaaacctctctaacatttttaacgagactggctttatagtcaagacggaaggctttaacctgaatcaggacaagacccgaataatgagaaaatcacaacagcaggaggtaacgggcatgatcgtgaataacaaagtcaacattccccgcgaaacactcaagagattcagggccaccttgtaccaaatcgagaaggaaggactgatcgggaagcactggggcaattctaagaatcaagaattaatggtgtccctggaaggtttcgccaactttgttttcatggtgaatccagagaaggggtcccagtttcgtgatcaggtaaagcgcatcaaacacaagtattattgccagtcaaagaccaggagaagcatcatctctcaggagatattgaatcagtcaaacatcatcgggcttatctatgccgaactgaatagactctactgtaagaatggaaagagaaggtgttatctgatgcaaacatacggaaaaccttgcctacaggagctgactgaggaaaatctcttagagttcctcactgacctcaaaagccatgtcgagaacagtcccttcctggattcaaactttattcgggttctcgattttgtcaacaggctgtcgctgacacctaaccacctgaggcagtaccttataaaaacgtacggaaaacagtctcttctgcagattaaaaccgaggagctcaagaacttttatagcttgttcaagaagacaccaagcaaccgattcttgtggttctga

SEQ ID NO: 13443 - RNA, 1797 nt, synthetic construct
  source 1..1797: mol_type = other RNA
atgaacattaatgacctccttaagaccggcattgaatgttataaagccaaggattatgagacagccctccttgcctttaactctgcaatatcagtgaacccaaatctcgcatcggcttaccattattgcggaagcatctaccttgccttgaaccagaaggaaaatgccatcaaaaatttcagaaaggccgaagctattctcaaggataaagagtactccaaattgtgcaataagttggaagagattctcgttgaactgtttccatccaaaacactggactgccctgagaaccataataacgacgcactggatttccgagagtaccagaatctgttttggatcgacgaggatggtaactggtacgatgacccccctgatcacgacctatacgtgggatacgacagcgacgccaacgactattactgcgacctgttaagtaagctgaccagcattaaggactatttgttctcaaggcttaagaaaatccaaaccctagagctgaagaggtcacagaacagcgagtttgatcgaaagaagctgctcagccagaacctgcccctgtgctcatcccacctggacattgccagactaatgggtttctctgtggggtacctgaggtgtctggccttctcacgcaacaaatatcattaccagagcttcgagataccaaaaaagatcggaggaaagcgaaaaatatccgcgcccaatcagatgctgaagaaagcacagaagtggatccaaaataacatactcgacaagatcaaggtacacgatgctgctcacgggttcaaaatagaacacagtattctgacaaacgctagacctcacgtcaatcaggacattatcattagctttgatctgaaggatttcttccctactatttcttatcggcgggtgaagaagttgtttaaatctctggggtatagtgaaacggcgagcattgtgttcggcctattgtgtaccgagcccattattaaaaacattgaactcgatggccaagcttatgagttagtatgctggactaagagatgtctgcctcaaggcgctccctcctctccaggcatcaccaatctgctttgctgtaacctggatcagcggctttctcaaatggccaataagtatgggttcatctacacaagatacgcagacgatctgagcttcagtgcctctggggagagcttggactacataacgaatatctttaagggtgtcaggtctatcgttaggtccgaaggatttacacttcatgagagtaaaactcgcgtcatgagaaaacaccagcagcagaaaatcaccggcatcgtcgtgaatcaaaaactgaacatctcccggaaaactctgaagaggtttcgcgcgctcctttatcagatcgaacaggagggttttttcggaaaacactgggggcactaccgcaattacgatctgttgcgtttcattgagggcttcagtaattttgtgtacatggtcaatccggacaagggcgtgttatttgttgagcaagtgaaacggatcaaagagaaacatcccgtaaacatcaataagatatcgcagagctccatcattacacttatctattccgaatttcagcggattgattgtagcccgtcaacccgtcgcaagtatttgaaagagacatatggcaagcagtctctccaggacctcactgaggaaaacctgttagaactgctcgatcatctgaaatccactgaagcagtgtactcactcaccaacaaggaaatcaactacttcgttaatatcaacgacccaacctccataagtaaggaggatttattttga

SEQ ID NO: 13444 - RNA, 2232 nt, synthetic construct
  source 1..2232: mol_type = other RNA
atgttctctcagagtaaaaagctggacaagctaatcaaccagggcattgattactataaacagagccaatacgaggccgccctggaatgttttaaccaggccatcgctttaaacccgaattgcgctcgggcgtatcattatcggggttggctccatttggctaacaataacccaggtgagctactgaacgacttgcagaccgtatgcaggctcctgaacgataagtattatgagaggctcgtaaacaaaattgagaaaatcattccgcagctgttctacagggaggactctctcagctggatctactgtgaagaggacgattcttggtatgaatcttatagtgacatacctggcggcgatatttacatcgggataatcggggatatcgaagccgagttgatggaacaaagaagccaggagttctattggttgcgaaattggctcttcgcccgaattgaggagattaataacctacagctcaaacgaaataagaatgcaaagttcaaccaggaaaaactcatcaggtatcagctgcctctgtgcaatagccactcggaaatagctgcagcaatcggactctcagttaatgggcttcgctatctggcattcagtcggaataagctccattataccaggttcaacattcccaaaaaaactggagggaaacgcgaaatcagtgccccattgcccctgctgaagaaggctcagaattggatccttcataatatcctggaaaagctggagattcatccggcagcgcatggcttctgcagacagaagtcaatcgtgacaaacgctctgcctcacgtggggaaggatgtgatcatcaatatagacctcaaggatttcttccctagcatatcctatccacaagttaagggactatttaagtctttaggctattccgagacagctgccgtggtgttcggcttgatttgcaccgaacccagagttcagaaactggagatcgatggagaaagctgtctagtgaacttaaaagagcgcaggcttacacagggggctccctcatcccccgcgattagtaaccttctctgtaaaaaactggaccaccgcctatcaaacatggcaaaaaagatgggattcatgtacacccggtacgccgatgatctgacttttagcgggtctatagatagtcgggagaatattggccggctgtttaaggtgactaatctgatagttcaggaggaaggacttgctattaatcccgacaaaactaaggtccgttggaaaaaccgacaacaggatgtcacaggtctggtggtgaatcacaagatcaacatttccagaaagaccctgaagaaatttagggctacactgtaccacatcgagcaggacggatttagaggcaaacattggggccaaaccaacactaacgaccttatggcatcaattgaaggcttcgccaattttgtatgtatggtgaaccctgaaaagggtgccaagtttaagcagcaggtgcagcgcatcaaagacacttataagaaaacggatcagaaagcacaccaggccaaccacgaatcccccaagacatcagcccaaatatacgacgtcgtgttcttgatctttagcgcccttttctggcttggctggacgtacaagaagaagcttgagtacttgcgtcagacatatgggaacaccgctatcaaacaattaagacccaaccagcaatgggaattcctcaattacttgttggaagcgatcgtcagccaggagattaaaacccacttatctctggccgacctgcagtctaaggagattcacaatttcaaacaagttctgtgctgcctggactactacaaaggacggaagtgcaagtcctacgcaattccaagttttatcatcaataacacgcctatttgggaggacaagatggccgattatctcgattttctttgtcgcatataccgtgaatacctgagactgggttggaccgacaatcaaagggagaactctgccgccaaaacttatctgcaggaaatttaccacgtcctgagccccctcgcattaacactgaagcagctgcaagatttcctcgagtacctcaagctgcagccaacccctgaggtctgttccaattcccagccagactcctatgagtatgactttagcgactcctacgagtacgattttagcgactcatacgaatacgatttttcggactcttacgagtacgacttttccgattcgtgcgagtatgaaccaccttactga

SEQ ID NO: 13445 - RNA, 1548 nt, synthetic construct
  source 1..1548: mol_type = other RNA
atgggagtgtatgatgactatgatgacaacgactacaccgatgatgcgaacgaagaatactatcaagagtatcttgagtgggccacatatttctcccagggcttagtagactcgtcggatcaggggtggttttcatccgacccatcttacgagtccaacggataccagaacatcgaccggatcgtagataaactgtatgagagcggggaggatttcgagtttgacgattgggacaaagaggacgagtaccctttggactttaatgctaaacgggaagaagacgagaagttcaagttggccgaagcgttaaagattcgtgaagagaagcagagattcaataaagaaaggttacaggagaatgggctacctctctgttgcagtcatagtgccattgcaaaagccatgggcatcagcgtcaacaaactcaggttcctggccttcagccggaagcgctatcattaccgaaattttcagatacccaaaaagaccggtgcaaagagagatatttctgctccaatgccatacctgcaacaggcacaatattggattcagcacaatattctcaagaagctggaactgcacaacgcagcccatgggttttgcagggaacggagcatcataacgaatgcccagccgcacgttggctcagaagtgatcatcaacatcgacttcaaggattttttccccacgatatcctataagagagtgaagggactgttcaaaagttttggttattcagaggaagcaagcataattttcgcccttatttgtaccgagcccatgctgaaagaggtggaactcaacgagaaaacaaatctctttctttcatggacagacagaaggctgcctcagggatcccccacttctcccaccatatctaaccttctctgtaggcgcctggatcgacgcctgacacaaatgacagagccgctgggctttatttacactagatacgccgacgatttaactttttccgctagcggcgagtcagtgcgcaatatctgcaatgtgtttaaccgcatgaggtccatcatcaagtacgaggggtttgagatcaacgaggataagactcgagtcatccgaaaaagtcgccagcaagaggtcaccggcgtcgtggtcaatagcaaattgaacgtttccaaggagactttgaagcgcttcagagctacactctatcggatcgagaaggatggctttcagggaaggtactggggccaatctaatgacctgatcgcgagcctacagggattcgctaacttcgtgtacatgataaaccctgaaaaaggggccaagttccaggaacagattaggcacattaagcagaagtacaaacagggtcctaaccagagtgttccagagagtaagttgctcaacctatcagacatcatcgctcttaccaatattgaactgcggagactgaattggtctattcaggaacgtagacgttatctgaagaaaacctacggtaaacaaagccggcagcaactcaaggacgaagaattgctggagttccttaattacctgaaatctctgcccaagccaaaatga

SEQ ID NO: 13446 - RNA, 1308 nt, synthetic construct
  source 1..1308: mol_type = other RNA
atgtctgtcaaccagggcgagtcaagcgatgactcctacgagattgacgaagatattgagcagcaattaaaccgctggtggcgcgaggccaacgatttggagaatgactactggtatcgccaaaagcagctgcagggtaagaatacgaggaataagcaggggaaggaaaagctgcttgagaaatattatcttcctcagtgcaactcttttagggagatttccaagctcatcaacattgacttggccgacctacggcttctggtgttttcccccaaacaggatgccgcaactaaacaccactatatcttgttctacatcccgaaaaagaccggaggagagcgaatcattagtgcaccatcccaaaatctgaaaaatgtccagtactggatactgaaaaatatcctcaagaagctcgagcccagtctgcatgacgccgcccatgggttccggaacagcgagatcattaaggaaaaacacacaatcaacatcaagttcttcatcacacagattctcaaggccaagtatatcagcattttctataaattccggttgatcttgaagctcataatatacgctattgcactgccagagctgattcagtatccaaaatttggcaagaggaggtcaatcgtgaccaatgcagaaccccacgtcggcgctgatgtgatcataaacgtagacattaaggatttcttccactctatctcatataagagagtgaaaggcctttttaggtctttcggttactctgaaagcgcttcgaccatttttgccttactctgtacagtaacttttgtgaaccatcgctcgtacctgccacaaggcgcgcctactagtcccatgattaccaacctaatctgccggcggctggatagaagactgactcatatggcagaaagctttggattcaggtacactagatacgctgatgatttaacattttcctccagtgacgaatccgtctgcaacattggcaaagttctgcgtcatacagaagggatagtgaaacacgaagggttcgaaattaatcgagacaaaacccagatcatgagaaagagtaatcgacttgaggttacgggcatagttgtgaatagcaaaccttcaatcagcagagagaagctcaagcgtttccgtgcgaccctgtaccaaattgagaaggacggactggagggtaagttttggggaaacagcaccgacgtgatgtcatctatccagggttttgccaattttgtctatatggtggaccctcagaaaggggctaaattccgcgatcagatccggataatcaaagaaaagtacaaatgttga

SEQ ID NO: 13447 - RNA, 1308 nt, synthetic construct
  source 1..1308: mol_type = other RNA
atgcccgtttaccagtccgagagctccgatgactcgtatgagatcgacgaggatgtcgaggcgcagctgtcccgaggttggcgtgaaaccaacaatttagagaataactactggtacgagcaaagacagctccaagggaaaacaaaacggaataagcaggggaataaggagcttctggaaaaatactgcctcccccagtgtaatagctttcgtgccatctctaacctcataaacatcaatctagaggagcttcgactgctggtgttctcacctaaacaggacgcggccaccaagcatcattacattcggttttacctgcctaaaaagactggaggggaacgaataatctccgcaccaaaccagcacttaaagaacgtgcagtactggatcctggagaatattctgaagaaactcgacccgagtatccacgatgccgctcatggctttaggaattccaggattatcgagatcgaaaataacaagctagacatcaacctgttgcctatcaagaccctgaacaccagatatagcatcttgtacaagttctggataatagtgaagcagatcatttacgtggatgcttctcatcggctcacccaatacccacgcttcggcaagcgccgctctattctcacgaatgccgaaccccacgtcggcgcagacattatcattaacgtagatcttaaggacttctttcactcgataagttataagcgtgtcaaaggattattcatcagcttcggctattccgagtcagcttctacaatcttcgctctgctttgcaccgtgacttttgtgaatcacagaagctatcttccgcaaggcgccccaacttcccccatgattacgaacctgatttgcagaagactagatcgccgcttgactgagatggctgaaaggttgggatttaggtacacaagatatgccgacgacctgaccttctcagcctctaatgaaaacggctgtaatattggtaaagtactgaggcacacccagggaattgttaaacatgagggcttcgaaataaaccaggacaaaacaaggataatgcggaaaagtaacagattggaagtcactgggattgtggttaacacaaagccaagcatctctcgggagaaactgaagcggtttagggccacactgtaccagattgaaaaggatggactcggtggaaagttttggggggagagtgaagatattatgagctcaatccaggggtttgcaaatttcgtctatatggtggatcctcagaagggcgcaaaattccgagagcaaatccgcatcattaaagaaaagtatcggtattga

SEQ ID NO: 13448 - RNA, 966 nt, synthetic construct
  source 1..966: mol_type = other RNA
atgtctgccccaacaaggcgccttaaagatgcacagtactggatcctcaacaatatccttaaaaagctcgatagctctctgcacgacgccgcccacggatttagatcctcacgggtgattaaaactgagacgaatggcaagaatgatttcctgcgcagcctgcaacacttggagccccggcattttgggaatctttttaacttttggcgcagaattaagagtactatatacctgctcacgctgtctctcagtagcagcaagataaagttcggtaaacgacggtctattgtgaccaacgctgaaccacacgtgggtgccgacgtcttgatcaacatcgacatcaaagacttcttcccgagcatatcctatcgacgcgtgaaggggctgtttaagtcgtttggatattctgagtccgcaagcaccatctttggcctcttatgtactgtcactttcgtgaaccataggtcgtacttaccccagggggcccctacctcacctatgattacaaacctgatctgcaggcggctagatcgacgtctcacacagatgggagagcggttcggcttcagatacactaggtacgcggacgatctgacattttctgcttccaatgagtcattgtgcaacatctgcaacattcttagacaaaccgaaagtatcgttcggcacgagggttttgaaattaacaaggacaaaacacgcatcttaagaaagtgtaatagactggaggtcaccgggattgtggtaaatagcaagctgtccatctccaggcagaaactaaaaaggttccgcgctaccttgtatcagattgagaaggatgggctggaaggaaagcattggggcaagagtgaagacctgattgcatcaattcagggcttcgctaatttcgtatatatggttgaccccgaaaaaggagccaaattccgtgaacagatccgtatcataaaggagaaacatggctgttga

SEQ ID NO: 13449 - RNA, 1548 nt, synthetic construct
  source 1..1548: mol_type = other RNA
atgagtgagaagagacgaactagggaggaaatctttcagcgcatgcgggagacatcaagagatgaggtgatcctggaagagatgatccggcacgggttttggccaagagaaggccggctggccgaggatcctgctgacgaaattagacgcaaaggggaaattgaacgggaactgcagcagcttagggcccagaatcgctctttacagaatgaagccgctttgctcagggaaatgaggaagcggcgctttgcagagtctcgcaaaaagaggcaggaaacaaaagagcgtagagagaagcagcggcaagagcgtgcagaggcctggcagcagaaaaaagccgaggaaattacatttctgggtacgggagtctctgtcggtctatccaacaaaaagtcaaacgaggaattgttgaaaaagtacaacctcccggtgtacagatccccggaggaaatcgctgccgcaatggcagtgacgatcagtacattgcgttttctggccttcagccggaagacttccaccgttagccattacatcaggtttaagatcccaaagaaaacgggcggacaacggttaatcagcgccccaatgccccgactgaaggaagcccagacctggatcctggcgaccattctcgagaaaatccccgttcatcaagccgcgcacggatttcgcgcaggccatagcattgtgaccaatgcagagccccaccttggtaaggaagtcatactcaatgtagaccttaaagacttcttcccttcggtatcctatcgacgagtgaagggcctgttttcaagctttggctactccgaggctgtagcgactctgttcgctctgctgtgtactgagcctgacattgaaaaggtggagctcgatgggaagacctactatgtcactcagacacgccgtcacctaccccaaggggctccaactagccctgcaattactaacctgctttgcaggaacttagactataaactctattgcttcgctgagaagcttggattcacctatacaaggtatgcggacgacttgaccttcagtgcctcgaatgaggccgtcaaaaaggtgggctacattttgaagaagctggaagagatagtcaaaaaagagggcttcgaggtgaatcaggaaaaaacaaggatactgcgctactcaagacagcaggaagttaccggtgtgattgtgaacgagaaactgaacgtgtctcgaaaagttcttaggaatttccgggccacactctaccagatagagaaggacggactagaagggaaacgctggggacaagcacaggatctggtagccgccttacaggggttcgctaactacgtttatatggtgaatccagagcagggcagcctgctcagaactagagtgcaagctatcatagaaaagaccaagtggaaggctgcagctagacctgtgaaacccagtaagatggaggaggttgcgaccctccagaccgaatctgccgtggaggaagtcgagatcgagcagaagaaacaagataaggattacgattcctctaagaaatggtggaagctgtggtga

SEQ ID NO: 13450 - RNA, 1449 nt, synthetic construct
  source 1..1449: mol_type = other RNA
atgactgatcagccatcctctagaaaagaactatatgctcgtattcgcgagatcggcagggaggagtttctgctggaagaaatgacccgctatgggttttggccggagggcgaggaaatgcccttagatcctgtggatgaaatccaacgaagaggagaactggagcagcagctgaagaagttgcgacaagagaacgcccatctgttcaatttgaagaaactgggtcaggaagcgtacaaacagcggctcgtggagagcaggaggaaacagcaagagactaaggagcttagagagcgggagcggcaggaacgtgctaaagcctggcaggagaagaaagagaacgatatcatctacctgggcgaagaaatcagtggcggacttaacaatgtcgaagggaatatatttaggcttgagatctataacctgcccatactgaataccgctcaggatatcgctaatgcaatggacattaccgttggagagttacggttcctcgccttttcgcggccaacgtccacggtcagccactatatcaggttcaagatacccaaaaaaacaggcggcgagcgccaaattagcgcaccaatgccccgccttaagaacgttcagacctggatcttagacaatatcttgtgcaacgtccctctccatgaagcggttcatggatttcgcgccggtcatagtatcctgacaaacgccgagccccatgtggccaaggacgtcattattaatttcgacctgaagaacttcttccctagtatttgctacaagagggtgaagggacttttctttagcctgggctacagcgaggctgcagctaccatctttgcactcctgtgcactgaacctaatgtggtggtggtagaactggatgggcaagtgtactacgtggcccaatcagaccgccaccttccacagggatcccctgctagccccgccatcaccaacatcatgtgtagaagactcgacaaacgcctctcagaaatggccgctaaactcgatttcgtatacacaaggtatgcggacgacctgaccttttcttctagtggcgactctctaaggcacatttgtaacgtgttccggcgaactgaatccatagtatcccacgaggggttcacagtgaacagagagaagactagactactccgtggcaagtcatcacagctggaagttacgggggtggttgtaaatgagtttccgaacatatccagaaaagaattgaaaaggttcagggcaactttgtatcagattgagaaggatggtccacagggaaagcgatgggggcacagcgacaatgtcattgcagccatcgaggggttcgccaattttgtcgcaatggtgaaccctgagaaaggtcgtgagctggtgcggcgcgtcaagcagattaaagagaagtacacaggccggcgaagacggtctacaaagattctcgaacacgatggaacctga

SEQ ID NO: 13451 - RNA, 1401 nt, synthetic construct
  source 1..1401: mol_type = other RNA
atgactgagcaaccacggacacggcaagaactgtatgaccggattcgccagacctctaaagatgagttcatattggaggagatgatcaggttagggttctggcctcgccaagggaccttacccgaggacccagcagaggagattaggcgacagggagagctgcagagggaattggaggccttacgaagcgagtctcggaagctgaacaacgaggaacatttgaggaaagctgcccgcaagctgcgactgcaggaatcgcggcaaaaacagcagcagaataaagaacggcgcgagcaggaaaggattgccagagcacaggtctgggaacagcggaagcaacacgaaatcctttatcttggtgaaggcgtctcaggggggctctccgcaacggaatgcgatcacgagagactagctagttacggcctacccgcccttgggtcagctgagcagatcgcgtcggcgatgggcatttccgtgggtcaactgcgtttcttggcattctccagaaggacatcaaaagttagccactacatccgttttacaatccccaagaagagcggcggggagaggttaatcagtgcacccctgcctcgcctgaagcatatccagcactggctcctcgctaacctgctgacaaacatcccgctgcacgaagccgcacatggattccgaacgggacatagcatagtgaccaatgccagaccccatgtaggcgctgacgtggtggttaacctggacctgaagaatttcttccctaccatcacctacaagagagtcaaggggctcttccgggcccttggttactccgaagcagccgctaccatttttggcctgctctgtacggaacccgaagtagccgcgctgtctctggaccagactacctattacgtgagtcagggtactagacacttgccacagggagctccgacaagtcctgccataaccaatctcctctgtaggcgcttcgatcgcagacttacagccatggcaactgccctgggaagccagtacactcgttatgccgatgatctgacctttagcgcttcaggcgagaacttgagacacatttgcactctacttagacgcattgaatctatcgtgactcacgagggttttgttattaatgaggctaagacaaggattcttcgcggcggctcccagcaagaggttaccggtatagtcgtgaacaacaagctgagcgtgtgccggaaaacactcaggcggtttcgagctctattgtttcagatcgaaagagatggcccttctggaaaacactgggagggagcgccaaatctgtttgcagccatgcaggggttcgccaattttgtctatatggtggacccagagaggggcctccctctcagacagaaagtgcgacatctccgttccctgcatggatga

SEQ ID NO: 13452 - RNA, 1437 nt, synthetic construct
  source 1..1437: mol_type = other RNA
atgactaaccagcccaggactagacaggaactgtatgataggattagaaggagctcacgcgatgaggtgattttggaagagatgattcgtctgggattttggccggccgcaggggaaatgccaaaggatccagctgacgaaattcgaagaaaaggggagatcatgagggagctggaggatctgagagcccagaatcgacagttacacaatgaggaggctctcaagaaagaagccctggcacagcgactcgcagaatctaagagaaagcagcaggaaaccaaggagaggagagagagggaaagacaagagcggctcgaaatctgggaactcaagaaacagcaagagatcgttttcctcggtgagggcgtgtccgcgggccttaacaagactgaatgcgaccgtgatcggctgcagagttacgggttgcccgaatatggaacttctggagaaatcgccgctgccatggggataagcttgggcgaactgaggtttctggctttttcccgccgggcgtccaacgtcagtcactacatcaggtttaagattgccaagaaaacaggcggggagcgcctgatcagtgctccaatgcctcggctcaagcaagctcaaacctggattctctaccacatcctcgagaaggttaacctacatgaggcagcacacggcttctgtcgtggaagatctatcgtaaccaatgctgcaccgcatgtcggtgccgatgtcgtgataaatctggatcttcaggacttcttcccttccatctcatataaacgcgttaagggtctgtttatatctctgggctactctgaggctgccgctaccatcttcgggttgatttgtacggacgctgcggttgaagccgtcgagcttgacggaaaaacttattatgtgtcgcttggcgaccggcatttgccccaaggtgcccctagttcacccgccatcacaaacttaatctgccgcagactagacctgcggctgacaaagatggccgccagcctgggatttgtttacacaaggtacgcggacgacttgaccttctccgggagcggcgaaaatctccgccaaatttgcaatgtgctgaagcggaccgaggccatagcaactcacgagggcttcacaatacaccctcagaagacccgtgtgctgcaccgctcacagcaccaggaggtaaccggcattgtagtgaatgagaaattaaacgtggaccgggagacacttaaacgctttcgggcaacgttattccatatcgaaaaagatggcctagccgggaagcattggggaaactatcctgatctgatccagagcatcgagggtttcgccaattttgtggcaatggtgaacccagagaaaggaggtaaacttaaggaacaggtccagcgaattaaggctaaataccggcccaagagggtgaaacgcattcgaagaaaaagcaactga

SEQ ID NO: 13453 - RNA, 1419 nt, synthetic construct
  source 1..1419: mol_type = other RNA
atgtccgagcctagtcccccaaggacacgtgaagagttgtgggaccgcattcggcagacaagccgggaagaaataattctggaagagatgatacggctgggattctggccagcgcagggcgaacttcctcaggatcccgccgatgaaatcagaaggcggggagagatccaccgagaattacgcgaactcaaaagagaggatcggagactgcaagacgagaagattctccggaagcagatgcttgagaagcgattggccgagtcccgaagaaagcaacaagagacaaaagagagaagagagagagagagacaggagcggagcgctgcttgggaacagcgacgccagcaggagatactttatctgggcgaaggggtgtccggtggtttaaaccagaccgaagggctgtccgacaggctgcagcaacatagactgcccctttgtctgactgccgagcagctggccacagccatgggcttgacgatagctgcccttcggtttctcgccttcgcacgtcgtacctctccgacctcgcattatgttaggtttcaaatccccaaaaagactgggggcctcaggttgatcagcgcaccaatgcctaggctcaaacaggtccagtattggattctcgacaacatcctggataggctaaccccccatgacgctgcccacggcttttgccggggaagaagcatcgtaaccaatgcgctgccacacttgggggcagatgtggtcataaacctcgacttacaggactttttcccaacgatctcctatcgccgagtgaagggcctgttccgcagttttggttactctgaagccgttgcaacaattcttgctctgctgtgcactgagcctgaagtagagactgtggacctggatggacaaacatactacgtggcgctaacagatcggcgtctgccccaaggtgctccgactagccctacaatcgctaatctcatctgtcgtagattggacaggcgactgactgaaatggccaccactctgggcttcacctacacgcggtacgccgatgacctcaccttttctggctcaggagacgctctgcgccagatctgcaatctgctacagcgcagtgtggcaattctcacccatgagggattcaccgtgcacgatcagaagactagggttttgcgaaactcaaggcagcaggaggttaccgggattgtggtcaatcacaagctgaacgtggaccgcgagacactcaaacgcttccgcgcgatcctttaccagattgaaaaagatggacctgcaggcaagcaatggggccattctcgggatctgatggcctcaattcacgggttcgcaaactatgtcgccatggtgaatccagagaaggggcagaaattactagctcaggtcaaaaggatcaagcagaagtacaagagaaaacgcaggtga

SEQ ID NO: 13454 - RNA, 1431 nt, synthetic construct
  source 1..1431: mol_type = other RNA
atgacagaacccgcccagccaagaactaggcaggaactatgggatcgtattcggcaaacttctcgagacgaagttatcctcgaggaaatgattcggctcggattttggcctgcgcagggtcagattcctcaggacccagcagacgaaatcaggcgtcgcggcgagattgaccgcgaattgaaggaactccgtaaggaagacagacaactgcaggatgagaaggtcctgaaaaagaggctgttagagcagcggctcgctgagagccgccgaaaacagcaggaaaataaagagagaagagagagggagcggcaagccaagtcagaggcctggcaggcacggaagacacaggagatattattcctgggtgatggggtatctcagggactgcatcaccagcaaggggatgagcaacgcttgcgttctctcgatcttcccatatgccacactcccgcagagctggcagctgctatggagatctcgatcggagaactgagatttctggcattcgaccgccatgtgagctttgtttcacactacgtgaggttccagatcccaaaaaagacaggggggacgaggttaattagtgctcccatgcctcgacttaagaggagccagtattggatactgaaacacatcctgaccaggataagtccacacgatgcggcccacggattccggcaagagtttagtattgtaacaaacgctcagccccatgtaggcgctgatgtgatcattaatttcgacctgcaagactttttcccgagcatatcatacaagcgggtcaaagggctatttcgctccctcggctattccgaggccgtggcaaccatcctgggacttctgtgtaccgagccagaagtggaagccattgaaatggatggcaaaacttactacgtggctctgaccgaacggcatcttccacagggcgcccctacatcaccggctatttccaacctcctatgtcgacgcctggatagaagattgagcgagatggccgagaacgcggggttcatctacactcgctatgccgatgacctcaccttctcctctgcgggcgacgctcaacgccagatttgcaacgtcctgaagagaacggagagtatcgtcacccacgagggttttacgatcaatcctcagaagacaagggtgttgaggagctcccagcagcaggaagtgactggcattgtggtcaatgacaaactgaacgttgacaaggccaccttgaaacgattccgagccaccttgtatcaaatcgaaaaagatggccttgaggggaagcaatggggtaactcccagaatcttctgtctgccatccatggctttgccaattttgtggcaatggtgaaccctgagaggggaaagatcttcctcgagcaggttcagcggatcaagcagaaatacggaaaaaagaagcggagagacagaccctga

SEQ ID NO: 13455 - RNA, 1413 nt, synthetic construct
  source 1..1413: mol_type = other RNA
atgaccgagcagcctcgtacacggcaggagctgtatgacttgataagacagaccagcaaacaggaattcatcttgagcgagatgattcgcctggggttctgggacgagaattctaacaatccagaggaccccgccgaggagataagaaggcagggagaactgcagagacaattacaagaactccagcagcagaatcgccaattgcacaatgaaaaagctctgaaaaagcagcttctgaaacagcggttggaggagtctaaaagaaaaaggcaggaaacaaaggaaaggaacgagcgtaagagacaagagcggtcacaggcatggcaggaaaagcaagcccatgaaattacatacctgggcgaagatgtcagttccggcctgaacaatctagagaacaactgcgatcgtctccagaagaacaacctgccagttttccagaccatcgaggagctagccgcagccatggggatgaccgtaggtcagctccgcttcttggcattcgaccggaagacatccacagtgtcgcattacatccgcttcaaaatagctaagaagactggtggcgagaggctgattagtgcccccatgcctcggatgaagagcactcaagattggatcttagaccgcatccttgagaagattcccatgcacagcgcggcacatgggtttcgcagagggaggtccattgtcacgaatgccactccccacgtgggaactgatgtggtggtgaacctggacctgcaggatttctttccttctatctcttacaagcgcgtcaagggcctctttcaggccctgggctactcagaagctatcgcgaccgtgctggcattagtgtgtaccgaagctacaacagaggaagtggagctcgatgggaaaagttatttcatcgccacttctgaccggcaccttccccaaggggcacctacctcaccggccataaccaatctgctatgtcggaggctggacaagcgacttgccaatatggctgtgtcccagggctttatatatactaggtatgccgatgacctgacgttttcaaccagcggggacgccattagaaatctgtgcaatatccttaaacacaccgaaaatattgtgagtcatgaaggttttacgatccacccaaacaaaaccagggtcttacgaaagagccagcagcaggaagtgacaggtattgttgtaaacgaaaaactcaacgtagatcgggctactctcaagaaattccgagctactttgcaccacattgagaaagatggactggcgggcaaacattggggatccggcaacgaccttatggcagagatcgagggatttgctaattacgtcatgatggttaacccggagaagggcgagccactggtcaaacaagttaagctcatcaagaagaagtacggactcagaaagcgatga

SEQ ID NO: 13456 - RNA, 1416 nt, synthetic construct
  source 1..1416: mol_type = other RNA
atgaccgaacaaccccggacccgtcaagatctgtacgatcgcatcaggcagagctccaaagaggagttcatcctagacgagatgatccgacttggcttttggtcagccaatggggaaattcccaacgatcctgcagacgagattagaaggcgtggcgagattcagcgagagctcgagactctacgggctgaaaataggcggctgcacaacgaggaagcactgaagaaggaagccttgaagctccgtatggcagagtctcgacggaaacaacaggaaacacgcgaaagaagagagagagaacgccaggagagagcgatagcctggcagacacggcaggaacgggaaatcacatatctgggagccggggtcagtgcgggcttgaatctcacggagtctaatctggcaagactccagcagcataggctgccaatcttacacgcggctgccgacctagctaacgccatggggataactgtaggacagctcaggtttctggcattcagtaggcgcatcgctaccgtgagtcactacgtgcggttccagatccctaagaagactggtggctttcgcgctatcagcgcaccactgccgcgtcttaaacaggcccagcagtggattcttgataacatactcgagggtgtggtccttcacccaactgcacacggctttcgtcgcgggcggtcaatcgtcacaaatgctgagcctcatgttggagctcttgtggtgattaatatggacctccaagacttcttcccctccatctcatacgccagggtgaagggaatcttccgctccttgggttacagcgaagccatagcaaccattctgggtctgatttgcactgagtcggacgtgacagagatcgagttggacggcaggtcttactatatagcccaggagctcaggcatttgccccaaggggcacctactagcccagccctcactaacttactgtgtcgaagattggatagacggcttgataggatggccaagagcaggggatttatttacacccgatatgcggacgacctgaccttttccacgacagatcgcgagcgcctgcgggatataggcaacatcctcaaagggacgcacgggattgtcacacatgaaggactgaccatccatcccgacaagacccgggttctgcgccagtcacagcagcaggaggtaaccggcattgtggtgaaccagaaattaaacgttgacagaacaaccctgagacgatttagggctaccctgtaccaaattgaaaaggatggcctggccggcaaacagtgggggcaaggtgctgatctgttacagtccattgccggattcgccaattatgttgccatggtcgaccctcacaagggccgcgaattcctggcttctgtgcagcgaatccaaaaaaaatatggaagaagaaagcggtga

SEQ ID NO: 13457 - RNA, 1488 nt, synthetic construct
  source 1..1488: mol_type = other RNA
atgacgagccagcctgagacgcggcaagccttgtatgatcgcatcaggcagtccagcaaggacgaggttatcctcaacgagatgatcagactgggattctggccaactgccgggacacttcccgaagatcccgcggaggagattagacgccaggccgaaatacaacaggaattggccgatctcaggaccgagtctaggaagctcaacgatgaaaaagcactgaagaagaaactgctgaagcagcgaatggaagcatccaaacaaaagcagcaggaaacaaagatccggagagacagggaaaggcaagagcgggccgctgcatggaagtctcgacaagcgcaggatactagactcccctgggaaggagtgtcagccggactgtcgcaaaccggctgcgatcgtgaccgcctgcagcagtatcacctgcccgagttagggaccgccgctgacatagctcaggcgatggggttgcctctcggtcagctgagatttctctcattctcccggagaatctctcatattagtcactacgtgcgatttcgtatcgcaaaaaaaaccggcggtgataggctgatttctgcccctatgccacggctgaaggcagcccagtactggattgtcgctaacattcttgagccgctgaaagtacacgacgcagcacatggcttttgcaggaataggagtattgtgaccaatgcgacacctcatgttggggccgacgttgtggtaaatcttgatctcaaagacttcttcccctccatctcatatgctcggatcaaaggactgttccgtgccttaggctacagtgaagccgctgctacaatatttgccttgctatgtaccgaggccgatgtcgaggaggtagagctggacgggcggacatactatgtggcacagagtgctcgccgcctgcctcaaggagctccaacatctcccggcctcactaacatcctgtgtagaaggttggaccgccgacttaccggactggcgcaggaactgggctacacctacactaggtacgccgatgacctaacattcagcgcaagcggtgcagctgccggacaagtcggtagactattgcgccaggttaaagacatcgtcactcatgaggggtttgaagtgcacccgaagaagacgcgagtgcttcggcaaagccgtcagcaggaggtcactggcgtggtggtgaatgagaagcttaacgtggaccggaaaaccttaaaacggtttcgcgccaccctgcaccatattgaaaaagacggattcaagggcaagacatggggtcaccagtccgacgttcagactaacgtgcaggctaatgtccaggcaaacgtacaagagtcagatattcagggctccaatctcttaagcgctgtgcaggggtttgccaattatgtgtatatggtcaaccctgaaaagggcgggccattcctcgaccaggttaagagaataaaacagaagtacaagctggatcgcaaaccaaagagatga

SEQ ID NO: 13458 - RNA, 1428 nt, synthetic construct
  source 1..1428: mol_type = other RNA
atgaatcagcagcctcagacaaggcaagccctgtacgatcggatcaggcagtctagcaaggatgaagtgatcttgaccgaaatgatccggctgggattttggccatcaagcggcgaattgcccaatgatcctgctgaagagatccagaggcagggcgagatccagagagagctatcagagctgagggcagagaatcgcaaattaaacgacgaaaaggccttaaagaagaggctcctgaaggagcggcttgtggcctccctgcagaagcggcaggagacgaaagcccgaagagagcaagagcgccaggaacgcgcagccgcatggaaagctagacaggctcaggacattacctatctcggtgagggggtgtctagcggtctgaaccacgtagaatgcgatgtcgaacgactgcagcgccacaatctaccagagttaggcaccgctgccgcaattgccgccgctatgggcatttcggttggcgaactcagatggcttgctttctccagaagaacttcccaagtctctcattatattcgattccgcattcccaaaaagactggcggcgagagacttatatccgctcccgctccccggctgaagaaagctcaatattggatcgaggcaaacattttgcaactgatcgagattcacgatgcagcccacggcttctgtcggcagcgaagtatcgtgactaacgctcagccacacgtcggggccgatatcgttacaaacttggaccttcaggacttctttccctcagtctcctaccgccgtgtgaaggggatgttcagggcgctcgggtactctgaagcagccgcaaccattttcgccctgatatgtaccgaacctgaggttgagatggtagagctggacgggaggacatactacgtcgcacagagcgacaggcggctgccacaaggagctccgacatcacctagcattaccaatatcctctgccatcggcttgaccgtagactcacgggacttgcccaggagtttgattacgcctatactcgctacgcggatgacctgacatttagtgcctccggagccgcaactgaacaagttggccggctgctacgacaggtgactcagatagtaagtcacgaaggcttccaggtgcacccgcagaaaacacgtgtcctccgaaaaagccggcaacaggaagtcacgggtatcgttgtgaatgacaagctcaacgtggacagaaagaccctgaaacgctttcgcgcgaccttgtaccagattgagcaagacggactggccggaaaggtgtgggggcatagtgccgatctgatgggagctatcgagggtttcgcgaattatgtgtatatggtgaacccagataaagggagccattttctcgcgcagatcaagagaataaagcaaaagcaccgtcctaaaaggcatcagcccaggaaatcttga

SEQ ID NO: 13459 - RNA, 1431 nt, synthetic construct
  source 1..1431: mol_type = other RNA
atgagcaaccaaccaaggactagacaagaactgtatgacagagtgaggcagtccagcagggacgaggtcattttggaggagatggttcgcttgggcttttggcccgcagagggggagatgccacaagaccccaccgatgaaataagacgaaaaggcgagatccagagggaactggccgcccttagggccgaaaaccgcaagctacacaacgaggccgcaatcaaaaaacagctttacaaagagcgcctggctgcatctaagaagaagcgacaggaaaccaaggaacgaagagagcaggaacggcaatctagggctgcggcctggcgtgatcggaaagccagagatattgtatacctgggcacaggcgttagcggtggcctgaatcaaactgaatgtgacagaactaggctccagcaatacggccttcccgcctacggaacggccgaagagatcgccaaggcgatgcagataagcgttggccagctgcgtttcctggctttctcaagacgaaccgcacagatatctcactatgtccgattcaaaatcccgaagaagacagggggggaacgccttattagtgctcccatgccgcggcttaaacaggcccagtattggatcgctgagaaactgctggcagctatccctttgcatgaagcagcgcacgggttctgctcagggaggtccatcgtgactaacgcaaccccacacttgggagccgacgtggtgattaatctcgatctccaggatttctttccctccatttcctatccccgcatcaagggtctgttcaggagctttgggtacagcgaggcagccgcaacaatttttgcgttgctgtgtactgagcctgatgtcgtggaggtagggctcgacggccaacactattatgtggctcagagtcaacggcacctccctcagggagcccccacatctcctatcctaacgaatttactgtgccgcagactcgacagacgtttaaccgcaatggcggccgaactgggctacaggtacacccgatacgctgatgatctcaccttctccgctactggacagccgcagcaacaggtgggaaagctgcttcggcggacacatgcaattgttacacatgaggggttcaccatccatccacagaaaacacgggtcctacgctcgggtagacaacaggaggtcaccggtgtagtggtgaacgagaaactgaacgtggaccgcaagacgctgaagcgtttcagggccttactccatcagatagagcagagtggttatgacgaccagcactggggcggacagccagtgtcatttgctcagattcagggatacgccaattttgtcgagatggtgaatcctgaacggggagcccagtttcaggcccaggttaagcggatcaagcggaagtaccctcctcgcgtccaagcttttaaaccagcttcatga

SEQ ID NO: 13460 - RNA, 1545 nt, synthetic construct
  source 1..1545: mol_type = other RNA
atgtccaaccaacgcccacgaacccgtcaggaactgtatgagaggatcaggcagacgtccagagaggaatttatactggaggaaatgattcgttttggtttctggcctgcgcaaggagaaatcccccaggatcccgccgatgaaatccggcgcagaggtgagctgcagcgacagctgggggagttgaattcccaggagcgcaatctgcgcaatgaagagaagatgttgaaagagctaaggaagcgtcggatggaggaatcaaagcgaaaacggcaggaaactaaggagcgcagggagcggcagagacaagagagagccaaggcttggcaggagaagaagaagcaggacattacctatctgggagagggagtttctgcagggctaaataacaaagaagtgaactcatctcggcttaaccaacacaatctgttaagctactctaatgctagcgagatcgctagcgcaatgaacataagcattaacgccttgagattcctcgcattcactcgcaaaacctcaacgacatcccactatgtgaggtttaaaattcctaagaagacagggggcgaacgcatcataagcgcccccatgccaaggctaaaagcagcccagaattggatactccacaacattctcgaaaaagttacattgcacgacgcggcccatggcttttgtcagaaacatagtatcgtgactaatgctaagcaccatatcggcgcagaggtgatcgtgaacattgacttaaaggatttcttcccctcaatctcttataagagaatcaagggcctcttcctgtcgcttggctactctgaggcagctgctaccatcttcggcctgatctgcaccgaacccattgtcgagcaggtcattctcgatggcaagacttactacgtggccacgtcagaacgtcatttacctcagggggcccctaccagtccagcccttacaaatattctctgcagacgactggataagcggctgagtaaaatggcctcgaatctggggtttacgtacactaggtacgctgacgatctcacttttagcgccaaaagtgaggccagtagaaacgtctgtaatatccttgccaagaccgacaacatagtcaaacacgaggggctgacaatcaactccgaaaaaacacgggtacttaggaaaggtcggcagcaggaggtgaccggtatcgtggtcaacaagcaactgtccatttccaaaaagacactgaaaagattcagggcgacccttttccagatcgagaaggacggacctgacaacaaacactggggacatagcaaagacgtcattgcttctattcaaggattcgcgaactttgtttatatggttagcccagaaaaaggccgcctgctcaaaactaaggtaagggctatcatcaaaaagtacaattggaaagcagcacagcggaagcgattgccactcccgctgactaccgtaccacctacagtgcaggagattcaaaaggtgcccgagacagtgatagaaaagccgcaagaacagaagaccaataagaaatggtggaagttgttttga

SEQ ID NO: 13461 - RNA, 1557 nt, synthetic construct
  source 1..1557: mol_type = other RNA
atgagtgaacggccaagaacccgccaggaactctatgagaggatacggaagacctctaaagaggagttcatcctggaggagatgattaggtttgggttctggcccgccgagggacaaatacctcaggatcccgcagacgaaatcagaaggcgcggcgaaatttccaggcaattaaatgagctgcacactcagaatcgacacctcggaaatgaggagaagatgcttaaagaactgcgtaaaaagcggatggaagagtcaaaacgcaagagacaggaaacgaaagagcggcatgaacgcgagaggaaggaacgtgctgaggcctggaaggagaaaaaaaagcaggacattatctatctcgggcagggggtgtcttcagggctgaacaataaagagtccaatgaagagcggctgaaaagctacaacctccctaagtattccaacgcgagcgaaatcgctacagcaatgtccattagtattggagccctgcgctttctcgcattttctcgaaaaacatcaactaagacacactacgttcggtttaaaattcctaagaagacaggcggtgagcgtaccatcagcgctccaatgccaaggctcaagtccgcacagaactggattctacacaacattctggagaaggtaaagctgcacgacgctgcgcatggcttctgtacccaacattctattgtgagcaatgccaaaccacacataggagccgaagtcttggtgaatatcgacctgaaagatttcttcccgtctatctcatataaacgcatcaaggggcttttcaagtccctgggctacagcgaacttgccgccaccattttcgctcttatctgtactgagcccactgtggaggaagtgtcgttggacaatcagacgtactacgtggcaacttccgccaggcatcttcctcaaggcgcccccacatcacctgccttgaccaatatactgtgccggagactagacaagagactgactgaagctgctaaggagttaggctttacctatacaagatatgccgacgatctgacctttagcactaaaggcgaattttctcgaaacatctgcaacatcttgaacaaagcgcatgatattgtgaaacacgaaggtctgacggtgaactcagaaaagacccgcgtcttaagaaagggtcggcagcaggaagtaacaggagtcgttgtgaacaaaaagctcaacatcagtaagaagactctgaaaaagttccgagctacactctaccagatcgagaaagatgggcccgagggaaagaggtggggtcacacccccgatgtcatagcagccattcagggcttcgcaaattttgtgttcatggttaaccccgagaaaggcagattgctgaaatcgaaagtgaagagcatcatccaaaagtacaattgggtaccagagtggaagcgaaagctcagtagcccgtccgaggttcagcctaatgtgtctacactaagcacccttccagtcaccagtacagagaacaaggtcgagactcagaaaacaaccgaaaataagacgaacaagaaatggtggaagctgttttga

SEQ ID NO: 13462 - RNA, 1575 nt, synthetic construct
  source 1..1575: mol_type = other RNA
atggatagaccccgcactagacaggaactctacgagcagatccgcagaacttcacggcaggaatttatactagacgagatgattcggctcgggttctggcctgcagccggtgttatgccccacgaccccgctgatgaaatcagaagggaaaccgagatcaggcgggaaatcgctgaggtgcaccagcaaaaccgccacctatataatgaggaggccttgaagcgagagatgcgcaagcggaggattgaagagtccaggcgaaagcagctcgaaaataaacagagacgagagctggcacgtcagcagagagctgcggcgtggaacgaaaaaaagcaaaaggaaattggattcctgggggaaacagtaagcggggggctcaaccagaccgaatgcaaccaaggcaggttggagaagttttctttgccccgctttacaaccccggaggagatcgccaagggcatgaatctgtccgtccctcggctgaggttcctggcttttgataggaaaactagccgagtctctcattacgtccggttccagattccaaagaagacaggaggcgttagaatcatctccgctcctaaaccctacctcaaagcagcccaggagtgggtgctgcagactatcctggagagggtaccagttcacccagctgcccacggttttctcgccggacactcaatcgtgaccaacgcccagcctcatctgaaggcggacctcatcctgaacgtggacttgaaagactttttcccgagcgtgcattaccagagggttaaagggttgtttaagagcctggggtatagtgaggccgccgcaaccgtgttcggccttttatgtactgagcgcgatacgcaagaggtagagcttgatggagagcgatacttcgtgggtctttccgaacggcgattaccgcagggagcccccacaagtcccgcgataaccaatctactgtgtcgcaaactggatgcccggctgcataaactcgccatgaagcacggcttcgcatatactcgctatgctgatgaccttacatttagcgcatcaggtcctaatactcgtaacctttgcaatgtactgaaaggcctcgcagccatcgtcacccatgagggctttacaatcaacccatctaaaacccgcgtcctgagaaagggcgaccagcaagaggtgacgggaataattgtgaatgaaaagctgaacctggcaagagaggtcttgaaaaaatttcgggctattcttttccagattgagaaagacggccccgagggtaagagatgggggacatcgcccgatgtcattggaagcgtggtgggctttgctaactatgtgagaatggttaatcctgagaagggcgctcaattccaagcacaggtgaggcgtataattgaaaagtacgggtggaaacgtgtgcggatgacgccagccaagccagctgaaatcgccttcgaccccgccccaaccatgattttaacctccgcaccacctcctcccgaaccggaagaaaagcctcctgttgctccccaggcgccaccaagttctgccgacggaaagagtaaaaagtggtggaagatgttctga

SEQ ID NO: 13463 - RNA, 1554 nt, synthetic construct
  source 1..1554: mol_type = other RNA
atgatggaccaaccacgaactcgacaggaactgtacgaacgcatcaggcggactagcagagaagaattcattttggaggagatgatccggctcggcttctggccaagagagggacaaactccttctgaccccgctgacgaaattcgccgcagaggagagctgagtcgtgagctgaccaaattgagaacggaaaatgcccggctgtacaatgagcaggcacttatccaggaaatgcgaaaacgccgcctcgcagagtccaggcagaaacagcaggaaaccaaagctcggcatgaacgtgaaagacaggagcgcgcacagaaatggagagaaaagaaacagcacgagatagtgtttctgggtgagaaagtttctggaggcctgaattacacggagtgtgatgaggctaggttgaaccagaacggcctgtcagccttcagcactgccgaggatatcgcggccgccatggggatcagcctctcagaccttcggtttctggctttcgacaggaagacctccacagtttcgcactacgtgcgtttcaaaattcctaagaaaacagggggggaacgactgatttcagctcctaaacctcacctgaaggccgcacaagaatggattttgcacaccatcctggaaaaagtcactctacacgaggccgcacacggttttcgaaccggccgttctatcgtcagcaacgccaggccccatcttaaggccgaggtgattataaacatcgacctgaaggacttctttccgagcatcgcataccccagggtgaaggggctcttccggagtctcggctatagcgaacaagcggccacgatttttggcctcatctgcacagaaccggatgtcgaggaggtcgaattagatggcaagacatacttcgtagcgctcagcaccaggcacctgccacagggtgcaccaacctctccagctctcacaaacatcttatgtagacggttggatcggcgccttacaaaactggccgagaaccgcggttttgtgtattcaagatatgctgatgatctaaccttctctgcctccggtaatgcaaagcagaatatatgcaatgtgcttaggggcgtagagtccatcaccgctcatgagggactggccattaacacagagaagactcgaatcttacggcattctcgccagcaagaggtgactggcgtggtggtgaacgagaaactaaacgtttccagagaggagctgaagaggttcagagccgtcctgtttcaaatagaaaaggacgggcccgaaggaaagaggtgggggaactcgaaggatgtgattgctagtattcagggattcgcgaattacgtggctatggtcaatccggagaaaggcgccgagtttcaggcgcaggtaaaggctatcatacagaagtatgggtggcaacggcccgcatcccatagaaggagcatggcctcaagcgagtcccagtatcctggacctgcttccgccccagagcccgaagttacctcacccgcaacacctgaaagtgagtctagtaagagtaatgacaagaaatggtggaagcttttttga

SEQ ID NO: 13464 - RNA, 1524 nt, synthetic construct
  source 1..1524: mol_type = other RNA
atgacaactcagccaaggactagagaagaattgtaccagaggatccgacaaacgagcaggcaggaatttatcctcagcgacatgatcaggctgggattttggcccgacgctggtgtcatgcctgaggatccagcagacgagataagaagaagaggcgaactgcaacggcagctcgatgagttacgtgcccagaaccgaaagctgcacaatgagcaggctctgcttaaggagctgcgaaagaagcggctgctggagagtaagcagaagcaaaaagagacgaaggaacgccgtgaacgggaacgtctggagcgggctgaaaagtggcagcaaaggaaggccaaggaaatcggctacttaggaaaagaggtttcaattgggttgtcgtacgctgagtgcaacgccgaaaggctatctcagtacgggctcccacacttcgaaaatgccgaacagatagcagcagccatgggcattacagtctctgaactgagatttctcagcttctcccggaaaacctcaaacgtaaaccactacgttagattcaaactgcccaaaaaaactgggggcgagaggctgatttctgcgccaatgccccggctgaagcacgcacagcagtggattctgaccaacctcctagagaaggtgcagttacatgatgcggcacacggcttccgcgctgcccatagtatcgtcagcaatgcgaaaccccacctcggcgccgaggttattatcaatcgcgacctgaaggacttctttccctccatttcatataaacgcgtaaagggagtgttcaaaagtttgggttatagcgacgccgctgccactatctttggacttctttgcacagagcctgatgtcgagaaggtggagctggatggtagaatctattacgtggcgaccggcgaaaggcatcttcctcagggggcccccacatctcccgctattaccaacattctctgtcgaaggcttgataggcggatgcagaagatcgcagatgaatgcgggttcgtttataccagatacgctgacgatctgaccttttccacatccggggagagcaagcagaatatatgtaacgttctccggagatctgagtccgtggtggcccacgaaggcctggaactgcatccagacaagacccgtgtgctccggaagtcacgccaacaggaggtcaccggtatcgtagtgaatgagaaattgagtatagatcgcaaagagctgaaacgctttcgagccgtcttgttccaggtggagaaggacggacctgacgggaaacattggggcaagagccccgatgtcatcgcctcgcttaaaggattcgccaactatctccaaatggtggacccggagaaagctgccgagtaccaaaaacgggtgcacgcattgattgagaagcatggactacagccgtcccagtttacatatcgcaatcctgcagctccagtggatgcagctcctgccagacctgacttaccgaaagaagagactaagcctaaaccagaaaagaaacgctggaagctgtggtga

SEQ ID NO: 13465 - RNA, 1515 nt, synthetic construct
  source 1..1515: mol_type = other RNA
atgtctaccgagcggccacagactcgagaggagctctacgagcgaattagggacgggcggaaggaggaattcgttctagaggacatgattcggcttggattttggcccgcccggggggaaatgccacatgatcctgctgatgaaatccggagacgggcggagctgcagcgtgaattgggcgagttgagggcacagcacagaaacctttataacgaggaggcgctgataaaggagcttcgtcgtagacgcctggaggagagtagaaggaagcgccaggaaacaaaggagagacgcgagagggagaggagggaacgtgccgaagcttggcggcagagacagggccaggaaatcgtttatctgggggaggccgtgtcaggcggattaaatcacaccgagtgtgacgcagccaggttgcaatcgtacgggttgcccccccttgggactgcagctgagattgccggtgcactgggtgtaagcgtcggggaactgagattcctcgcctttgatcgcaaaacatctactgtgtcccactatgtgaactttcaggtacctaaaaagacaggcggattgcggcagatcagcgcacctatgccgaggctcaaagcggctcagcactgggtccttagaaatgtactggaaaaggtggaggctcatgagtgcgcccatggcttcagggctggtcgcagcatcgtgtcaaacgctcgaccacacgtcggagcggaagcagtcgtgaatctggatctgcaagacttctttccgagtattggatacagacgggtcaaggggctgtttagggccttcggctactccgaagcggcagccaccatcttcggtctgctctgtacacaacctggtacagaggaggtggaattagacggacgccgctatttcgttgccaccggcgaacgccaccttcctcaaggcgctccaaccagtcccgccgtgaccaacatcctgtgccgacgactggataggaggttgctcaaggttgctgacgagcttggctttgtctatacgcgctacgcagatgacctgtctttttctgcttccggcgaaagcttaagacatctggggaacctgctcgagagagtgaaggcagtggtgcgccatgaagggttcaatgtccaccccgataaaaccagggtgctacggcgcagccgacagcaagaggttactggcgtcgttgtcaatgacaaacccaatgtgtcccgatccgaactaaagagatttcgcgccacgctgtaccaggtagaaaaggacggacccgcaggtaaacgatggggacggtcacccgacgtgatagccagcctgctcggatacgccaacttcgtgtatatggttaatcctgccaagggagccgaactgcagagaaggacacgtgccctcgcagataaatacggccacgagcctgtgaaagtggagcggccgtcaagacggcggcaaccagaacctcaggccgctgctccaagtccagaaccccagccaactcagaaaaaatggtggaagctctggtga

SEQ ID NO: 13466 - RNA, 1509 nt, synthetic construct
  source 1..1509: mol_type = other RNA
atgtccgctctggctgtcaaaccactaactcggcaggaactttacgagagaatggcagaaaccagcagagatgaagtgatccttgaagagatgatccgcttcggcttctggccagcgcaaggcgaagtgcctttcgaccccgccgatgagatccgcagaaggggggagttgcacagggcactggacgaactgagagccgagcagcggaaactgggggacgaagccaagctgcgcaaggaggcccgtaaaaaacggctgcttgaatcacgtcggaagcagcaggagacgatcgtgagacgggaaactgaaagaattgaacgcgctacacagtggcaggagaaaaaatctaaagagatcggctacctaggggcaggggtttccgctggactagataataaggaggccaatgtcgagaggttacagcgatacaatctgccaagattcgacgacgctgcaagcttggcccaggccatgggcctgactgttggtgccctgaggtttctctccttcgcccgcaagactagtaagaccacccattacgtccggtttgcactccccaagaagaccgggggagtacgagtgatatccgccccaatgccccgtctgaaagccgcacagcattgggtcctgcagaacatcctgcagccagttgaattacacgaggcggcgcatggatttcggcctcagaggagtattgtgagcaacgcccgaccgcacgtagcttctagcgtggtgatcaatctcgacttgaaggacttttttccgacactcgattatcgccgcataaagggagtgttccgagctcttggctacgctgaggccacagcaaccattttgggcttactgtgtactgagcctgaggtcgagaaggtggagctcgatggagaaacttactatgttgctacatccgcaaggcacctcccacagggagcccctacctcacctgcgcttacaaatattttgtgccggaggttggataggcgactcctgaaagtggcagaggaaatggggtttgtgtatacccgatatgccgacgacatgacgttttcaacaaagcaggagcaggatagtaagcagattgggagacttctccatagagtagagagcatagtggcgcacgaaggtttctgcattcatcccacaaaaaccaggattatgcgtagcgcctcaaagcaggacgtgactggcatcatcgtcaacgacaagccttctatcgataaagccaccatgaaacgcttcagagctgtcctgtttcaagttgagaaggatggccccataggcaaacagtggaaccactctagggatgtgctggcctcgctgcgcggttttgctaacttcatcttcatggtcgaccctgctaagggagcagcctatcaacggcgggtgggtgctctgattgacaagtacgattggaagccccaacctctcccctatcaaaagaagacgaaaccagttgaacctcccgccccgcaacccgtagcacaaaggccatggtggaaattatggtga

SEQ ID NO: 13467 - RNA, 1506 nt, synthetic construct
  source 1..1506: mol_type = other RNA
atgtcggaacagccccgaacacgccaggaactgtacgaagagatccgccggcaaggtggccgggatgtctacgttcttgaagaaatgattagactcggcttctggcgtgagagcacaggactgcccgacgatccggctgaagagatcaggagagccgctgagctgcaagccgaactggacagactgcgcgccgacaaccggaagctgtatgacgagcaagcgatgctgaatgaactcagaaagaagcgcttggccgaaagcagggagaaacaaaaagaaaccagggcgcgtagggaacgggagcgacaagagaaagcggagaactggcggcgaaggaaagaaaccgagatcctctaccttggagctgaggtgagcgggggcctgaataacaatgagactgatcgggagcgcttagagaggggcggactacctgtgttttctaacgtcgaagaactggcacgcgcaatgaacctgaccgtgggaaagattaggttcctcgcttatgataggcgaacctccgagacaacacactacgtaaacttcaagctgcctaagaaaactggggggcatcggctcatttccgcccccatgcccgcattaaaagccgcccagacttggatcttggagaatatcctgggccgtgtggcagtgagtgatgctgctcacgggtttctgcccgcaaaaaatatcgtctctaatgcaagactccatgtgggcgcacagaccctcgttaatctcgacctcgaaaattttttcccttcaatcgggtaccgcagagttaaaggtatttttagggccttcggttatggtgaagccctggcaacagtcttcgcgctgttaacaaccgctccagatactgaggagatcgaactggacgggaaaacttactttgtagccaccggcgaaaggcatctgccccagggtagtccagcctctcctgcgctgtcaaatattgccgccagacgactggacaagggactagccaagttggccgctgcccacggctgcaagtacacgagatatgcagatgaccttacgttcagcaccgaggaccgcgatgctgcaataggccggttactagcacaggtgaggtttgtggtggaaaaacagggattcaaggtcaacgaaaagaagactcgggtgctaaggcgggggagacagcaggaggtaacaggaatagtcgtgaacgacaagctttccatagatcgcaagaccttgagaaaattccgggccgtgctttttcaggctgagacgaagggcttggagaaccttagatggggaaactctcctgacctggtcgccgccttgaaagggtatgctaactttgtgtttatggtagacaaagagaagggctacgctttccagcagcaggttcgccgaattgccgagaagtatgattggcagccagctccccctcgtttcccgccaaaaaaaaaggttgagccagaggaacctgctccagagaagcccgcaaaggatgagaagccatggtggaaactctggtga

SEQ ID NO: 13468 - RNA, 1506 nt, synthetic construct
  source 1..1506: mol_type = other RNA
atggaacagcccagaacacgccaggagctttatgaatatgtgagacagcatggggggagggacgcttttgttgcggaacagatgatccgtctgggcttttggaagtcctccgacctgccaaatgacccagtggaggaaattaagcggatacacgatctgcaagaggaactgaacaaagtccggaatgagaacagaaagctgttcaacgagcaggccttattgaaggagctgagacaaaggcgcttggctgaaagcaaacagaaacagaaggagacaaagttgaggcgtgaacaggagagaaaggagcgagccgaggcatggcagaaacggaaggagactgaaattgtttacctaggtgaaaaagtgtctgggggcctcaacaacttcgaagagaacgccgaacgtctcacagccaacgacctcccaagtttcgctaacattgagcagcttgctaaggctatgaacctgaccgtaggaaagctccgattcttggcgttcaataggcaaacatcagagacaaagcactatatccactttcagctgccgaaaaaaaccggcgggtttaggctgatttcggcccccatgccacagttgaagacagcacagcactggattcttcacaacatacttcagaaggtgagcgttcatgaagcagcccatggcttcctcccagagaaaaatattgtgtcaaatgcccaacctcatgtgggcgccaaaatcgtggttaactttgacctgaaagatttcttcccctctataaattttcctcgggtgaaaggtgtgttcagatcattcggatactccgaggccatcgcaaccattttttctctcatctgtactgcccccgagacagaagaagtggagatcgacgggaagacgtacttcgtcgctatcggcgagcgccatttaccgcagggtgctcctactagtcctttcctgactaatatcctctgcaagagactggataaagggctacagacgctggctaagaactacgattttacgtacaccaggtatgcagacgacctcactttctcaacaaaaaacgatggcgagaagctcactgatttcatcaataagatccgctacgtcgttgagaagcaagggctgaccatcaatgagagtaaaacccgaattctacgaaagggccggcagcaggaggtgaccggaattgtcgtcaatgacaaaatatccgtaaatcgcaagaccctgaggaagtttcgggccgtcttacaccaggccgagactaaaggactggagggacttagatggggtaatagcaatgacctgatcgcatcccttgacggatttgctaactttgtactgatggtggatgcagaaaagggcaagatgtataaagcccaagtaggccggatagcggaaaagcacggatggaaaagctctaggagcggtaaattcacccctcaagagttgcgcgaagtggtcgaaaagaaggaagagaagcccaacgataatcagggaaaagattggtggaaagtgttttga

SEQ ID NO: 13469 - RNA, 1587 nt, synthetic construct
  source 1..1587: mol_type = other RNA
atgaatcaagcccgccaggccctgtatgataggatccgggagagctctaaagacgaagtcatactggaagagatgatagctctcggattctgggaccctgctcagcctggcaaagaggcagcagccgagctgatcgggaagaccgctgaactggagcgcgaaatgtccgcactgcggtccgagatggccaggatcgataaccaggaggccatgcttaaagccctccggaaacggaatatggagcaggcgaaagcaaggcgcgttgaaactaagaagcgcagagaggcagagcgccaagctagggctgaggcatggaggctgaaaaagcagcaggatattctctacctgggtgaaggttatagccatagtctaggggaacagggagcttgtgacgcagccgccctcgacgaaaacggtgctctgccggcatatgagaatgcggccgcccttgctgccgctatgggaattagtattggagaactccgatggctggcctttgggcgcaaggtgtcacagacaacacattatcagaggttccaggtacccaagaaatctggcggactacgacttatcagcgcaccaatgcctagactgaaggagatccagtcctggattctgagagaaattttagagaaggtgcccattcggtcagcggcccgtggctttgtgagaggcaagagtattgttgacaacgctcggcctcacgttggtgctgacgtggtgatcaacgtggacatcaaagacttcttcccaactgtcacatacccaagagtaaaaggtgtgttccgcaagttggggtatcgtggccaggttgccactatcctggctatgctgaccacagaaccagaaatggtcgctttggaaatggatgggcagcgctattggatggccaagggtgagagacggttacctcaaggcgcgccctcatcgcccgccttaaccaacattatctgcaggggcctggacgccgaattggaggagctcgcgctggttaatgagtacgagtacacacgctacgccgatgacatcactttcagcaccaggggccgagaagccaataggcggatcggaggagtattgagaaagattgaacagcacgtcggcgctcatgggttcaccttgcacccagataagacgaaagtgctgcgtaacaatgcccggcaagaagtgactggcatcgtggtcaacgagaaactttccgtagaccgaaagaccctacgaagatttagagccgtgatgttccaggtggagcaagacgggcctgagggcaaacattgggggcaagcagagcacgtgatagccggccttacggggtacgcccactttctcaagatggtggatcccgcccgagcacagccctttctcgagcagctggcacggatagttgaaaaacacggaaaccctgtctaccccgagagaagagccgcacgtgctcctagctggaggaggtaccagccggattctgatcaagcagaggcgacagatgctgcgccagcagctaatgaagcacccgcccatccgtcaggatctgagggcgaagctgccacccccgtcttggagaagaagccatggtggaagttttggtga

SEQ ID NO: 13470 - RNA, 1599 nt, synthetic construct
  source 1..1599: mol_type = other RNA
atgaataacgcaaggcaggagctgtacgacagaattcgcgagtcttccaagaaagaggtgattctggaggaaatggtcagtctaggcttttggaatgaggccgacccagcctttcagaaggcccagggcgcgatagagaggactggagagctcgaacgcgagatgagggcgctgcataccgagctgagccgcttagagaacaaagaagccatgatcagagccatccgtaaacggaacatggcgcaggccaaggaaaggcgcgcagagacaaaggcgagaagactggccgccagaaaggcacgcgccgagaagtggcgcagggagaaacaacgggacatactgtacctcggagacggccattcgcaaactctgcaggacagggaatcagatgctgcccggttgggcagaaccggcgaccttcctgtcttgcatgatgctgctcagctagccagtgcaatggagatttccgtcggggaattacgatggctggcgttcggtaggaaggtgagcaaagtcgcccactaccagcggttctacgttccaaaaaaaacaggcggtttgaggctgatagccgcacccatgcctcgtctgaaagaaatgcagcgatgggtccttagggagatcctcgagaaggtgcccctacacgaggctgccaccgggtttcgcaatggtatctctatcgtggataacgcacggcggcacgtaggctccgatgttgtgatcaacatggaccttaaggactttttcccgacactgagctatagacgtgtgaagggtgtgtatagaaagctcggctactctgggcaggtggcgaccatcctggccatgctgacgactgagcccgaaatggatagggttgagatggatggaaccctttactgggtcgctcgcggcgaacgacgacttcctcagggggctcctagctccccagcactgactaatattgcttgcaggcgtctggataggcggctcgccgcattagcagaggagtggggctatagatattcacgatatgccgatgacttgacattttcagcaaatggggaagcagctagtagagccggaaaaatcctccggggggcccgattcatcgtagagcaggagggcttcgtggtccatcccgataagacaagggtgctgcgccgtggacgacggcaagaagtaactgggatagttgtaaacgataagctcagcgtggatcgcaaaacgttgcggcgcttccgcgcaacccttcaccaagtggagagacacggtccccaagggcggacttggggacactcccctgacgtgattgcggctctgaccggttacgccacattcgtgaagatggttgactctgaaagggctgaaccctttctcgctcagctcgagcggatcagagagaaatggggctatgagcccccagcttgggaccctggcccgattagagagccctcatggcagcggtaccagccggaaccagaaccagccgaatctgacattgctacggaagctaccgctgaagccgggggagcagcaggaagtgaggctgaagccagagcccctggagaagctgaaagcgccgagaatcataagaagccatggtggaaattctggtga

SEQ ID NO: 13471 - RNA, 1575 nt, synthetic construct
  source 1..1575: mol_type = other RNA
atgtcaagaccagctgcccccagtcagccaacgcgtgagaatctctatcagcggattcgggagacttccaaggccgaagtggtgttagaggagatgattcggctgggtttctggcccgctggagaaggaattccaaaaggacccgaagctgaggacaggcgcacaggcgaattagaaaatgaactcgcagctttgagaactgaaatgagtaggctccaaaatgaagcggccatgcgtcgcgccctttatcagaaacgcctggaggaagcgcgacagaaacggcaggaaacccgaaggcgacaagaagaggctaggagggcaagggcagcagcatggaaacaggcaaaggaaagggagatcggatacttgggcgaggggatttccgcaggccttaaccaccagctatctgacgctacgcgcctcgctcaacatggcttgccattgctgtcgaccgccttggatgttgctagtgcgatggacatatccgtgggagaactccgtttcctcacctttgtgcgtcgcgtttccaaacatacccactatcgccggttcttcattcccaagaagaccggcggacagcgtctgatcagcactcccatgcctcgcctgaagcaggcccagtactgggtgctgggtaacatcctggagcggattccaatacacagctgtgcgcatgggttcgtagccaagcactccatcgtgaccaacgcctcgatgcacaccgggaccgacgttgtcgttaactgcgatctcgaaaacttttttccgacaatcagctaccgaagggttcgcggacttttccgggctctcggctacagtgagcaagtggccaccatcctggccctgctgtgtacagagccggaggtagacagagtggaatgtgatggagagacttatcacctgtgcacatctgagaggcacttacctcaaggggccccctcctcacccatgctgactaatatcctctgccggagactagatagacggctgtctaacctggccgagacgttgggcttttcttatagccgatacgctgatgatctgacattttcaggtagcggggaggccaggggcaaagtaggcaagctgcttaggaagacagaaggtatagtctcacatgagggatttcgcatcaacagagacaagaccagagtgcagaggagagggagacggcaggaggtcacagggatagtggtcaatgagcgccccgccgtcaatcgggagaatctgcgcagaatgagagccgtactattcagactcgagaaagacggcctgagaggccagcactggggtagagggggagaggtgatcagcgccttagagggctacgcacatttcgtcgcacaggtggatcctgccaaaggcgggcgattccttgaacaactggtggctattaaggcgaagctgggttggcagaggccaaagcatcttcggcgccctaaacgaactcctagctggaaacggtctgccactgctccagctgccactcctgcagacgtgatgccagctgtcgcacagcctgccaagccggaacctgcaacacctcccaaaaagccctggtggaagttttggtga

SEQ ID NO: 13472 - RNA, 1263 nt, synthetic construct
  source 1..1263: mol_type = other RNA
atgccaaccgtcgatagccaggaccaggtcgtggaccgcgatttgtgtttggacccactgagaacggagctagagcagcgacttggcgacgaggcccggagaaggctgagaagggagaggaaccttgcagccagacgtaggagtagaacccccagaccaacaccgcctcgggttcctacccagaccctgacatatctcggcgatagattgtcaggagggctgcaagatcgcaggagtaggctggacaggctggctgatcacccccagctccctgtactccacgatgctgatgacctagccgccgccatgggcattgaaatctcagaactgcggtttctcgcatttgcccccacccacagtcgcgtgaaccactatcagcgcttcctgcttcctaagaaaacaggcggtcatcgacaaatttccgcccctatgccccggttaaaagcagcccagcattggatttaccagaggatactcgcacaagtcccggtccaccgtgcggctaagggattcctgcccggccattctattgtggacaatgcccgcccgcatgtaggagccgatgtggtaatcaacatggacctggagaattttttcccaacaatcacctttgcccgcgtgaaaggactcttcagaacactggggtactccgaacaggttgctactatcctaggtttgctctgcactgaacccgaggttgaaacatatgaatggctcggggagaggtatcatgtcgcacgagggcctcgatttttaccacaaggcgctccatctagccctccagtcactaatttgttatgccgacggttggaccgtcgcctcgatggtcttgcgcggtcactgggattccattacaccagatacgccgatgacctgaccttcagcggctccggggaagctactgacagggtggggaagttacttggaaaagcccgcgacatcatagagcacgagggtttccgccctcaccccaaaaagacgagggttctgcgggcaggtagacagcaggaggtgactggaatcgtggtcaatcggaaacttagcctggaccggaagactcttcgcaggttccgggctgttctgttccaggtggagctcgatggccccgcaggtaagcgatggggcaacggaggggatctgctggcatcgctggaggggtacgcgcactttgtgcacatggtggatgctgaaaagggcagagcttttttggaccgggtggaggccattaaggcgcgttacggctctgactccatagaactgtga

SEQ ID NO: 13473 - RNA, 1506 nt, synthetic construct
  source 1..1506: mol_type = other RNA
atgtcagatcggaggcaggaaatttaccagcgcataagagaatcctccaaagacgaggtggtgctggatgagatggtcagacttgggttctggccccaacagggcgtcctccctgaagaccccgctgaggagattaagcggcaagcggccttgagggacgaattggcatcactgactgcccggttacagaagctgggaaatcaggaagctctgcgacaggagcttaagcgtcgcagactgttagagtcacgaagacgccgccaggagacaaagctgagacgcgttcatgcacgggagctgagagcctttgagtggaagcaaaaacagcgcgcatctatcacttatctgggtgaagaggtttcccggggcttgtcgaacacagcctccgatgaagctagactccgagccctgggccttcccgtattccatgaagcgtccgacatcgcacgggccgctcagattgaggttagccacctgcggcaccttgcttttcacagggtggtgtctagacgtagtcactatgttcggttctacctaccgaagaaaacaggcggcactcgcctgatcagcgctcctaaacccaaactcaaatggattcagcactggattttgaggcacgtccttgagccactgaaggcagaagacgtggcccatggcttcgttaaagcccgatctattgtgagtaacgcctcagcgcatgtcggccaggatatcgtgatcaacgtagacctgaaggattttttccctaccctgacataccgtagggtgtgggggttcttccgaaaactggggtattctgggcacgtggccacaatctttgcccttttgaccaccgagccagcagtcgacgagctggaactcgacgggagccgttactttgtcgcgacaggcgagcggtttctcccgcaaggagcaccaacgagtccagcactcaccaatgtaatatgcaggaaaatggaccgcaggttagctggcctcgccaggactttcggtttgacgtataccaggtacgccgacgatttcaccttcagcggtcccggagagacgaatgttggacgcttctttggggcactcactagagtagtgaccgaagagggtttcagcattcatccgggaaagaccaggatctttaggaggggaagacgacaggaagtgactggtctagtggtaaatagcggcaagcctaccgttccacgagccaccctcagacggtttcgggctctactgtttcagatcgagaaggatggcccagaagggaaagtctggaaacctggggtcgatgtcgtgcgtagcatccagggattcgcccgctttgtggctatggtggattccgagaagggccgcgctttagaagcccgggtgcagaagatagtggcagaaagggggcctgcctctctcgctagtactagaacagtggcgaaggccaagtcgcactggtaccccccactgaaacccctgggagagcagccccaactgaaccttcctcatgctcagcaagacacatga

SEQ ID NO: 13474 - RNA, 1563 nt, synthetic construct
  source 1..1563: mol_type = other RNA
atgcagctgctggagaagaacaagaagatactcgaagaaatggtccgcctagggttttggcccgaatcccaaccgctgcccggactgaatcccgaagagcagacaagatacgagacactcagtaatgagctggccgctattcgtaccgagcttacaaggctgaaaaacagagaggctatgttgaaagccattcgcgcccaaaggctcgccgatgctaagcggaagaggctcgaaaccaaggctcggaacgaagagaagcggttggagcgggcccgaacatggaaacagattcaggcaaagcagatcacttacttggggatgggtgtgagcgccggattgagcgagcaggtcggccagtccgaacggctgaaaacccagggcctcccatcttggtccacgcctgcagagctggctaaggccatgaatatctccgtgggcgagctgcggtttttaacattccacagacgcgttgtgaaacattcccactacatccgcttccatatgccaaagaagaccggtggcactagattgatctcagcccctatgccgcgtctcaaagagcttcagcactgggtgctggaacatgtgctagagaagatccctatacacgactctgcgcatggctttaggaaacatcactcaatagtcacgaacgctcagccacacgtagggcaaccaatgttaattaacctagacctgaaggacttcttcccgactcttacatatcggcgagttaaaggccttttcagacagcttgggtatagcgagagcatcgcgactgtgctgggactgctgtgtactgagccagaaatggaccaggtaaagctggacggacagccctttttgattgccaagggcgataggcaccttccacaaggtgctcctagttctcctatgattactaatctgatatgcaggcggatggatcagagactggctaagctggctgcaagttttggatttatctattcgcgctacgcagacgatctctctttctcaggggccgagctggacagccgagaaacaggccggctgctgaagagaatccaaaacattgttaaccatgaagggtttgtggtacaccctcataaaacgaagatctgccgaagtggacagcgcaaagaggttaccggtattgtcgtgaactcgttctgttccgtcgatagaaagactagaaaaaagattcgcgcaatcttacaccacatcgaaaaggatggcccttcagggaaaaattttggtgctaaccccgacgtgttagaggcgctcctctcctacgcacagttcatggccatggttaaccccgaacagggacttcccgtcctgaataaggtgaaagccttggccaatcagatcggctacaaacgtaaaacctatcgacgcctggctagctcttctaaaaggttcaaaaggtttgtgcctgatccagcactcttcgccaaacccgaaccggcccctagcttgcagaaggaaaccgccgagcaaaggccaacccccctacccaagcaagacctcaaaaccaatgcggaggcaccagcaaaaaagccttggtggaagttctggtga

SEQ ID NO: 13475 - RNA, 1398 nt, synthetic construct
  source 1..1398: mol_type = other RNA
atgaacacccaacccgctaccaggcaggaattatatgacagggtccgggcttcgtcactgcaggaagtcatcctggaggagatggtcagatacggctattggcccaaggaaggcgagataccagaggaccccgctgaggacatcaagcgagagggggaactggtgcgagagctaggcaaactcagaagtgagctcgagaaactgcacgacatggagaaactgatcaaggccgctcgccgcaaaaggatgctcgagagccgtgagaggcagaaggagaatcggctgcgtcgcatccgagaaagggaggaacgggcggccgcatggaaggagaggaagcagcacgagatcctgtacctgggcgagggtcactctggaaccctatcatcccaggtgtctgatgaagaaagactggccgcccaccacctccccatttttcatacccccgaagatttggcacttgccatgggactatccatcggtgccctccggttcctgtgcttctctagaaaggttagcaagactagccattatcagcggttttacctgcctaagaagtctggggggaaaaggctgatctccgccccaatgcagcgcctgaaaagtgctcaacactggcttctcgaacacgtgttggagcaagtagctatccacccaagtgctcatgggttcaggaaagaacacagcattgtgacaaacgcggaagcccacgttggagctcatgttgtggtgaacattgacattgaaaacttctttccaactttccattaccctcgggtatgggggtgttttcgagcgctgggctactcacctgccgtctctacatgtatgaccctcctgtgcacagagcctgagatcctggaaattgagttagacggagaattatggtttgtgcagcagggatcgagagctcttccccaaggcgcaccgacgtcacctaccctcacaaatatactgtgccgcagattggataagcgcctcgcaggtcttgcaagagtccacgagtttacatacagccgctatgccgatgacatgacattcagtggcaatgataacgtggatgtaggaaaactgctcgcctctcttaggtccgtgttgcatcaggagggtttgaagatacatcctaataaaaccgcggtttataggagagggcgtcgtcgcgaggtgacgggaattgtcgtgaacgaaaagttgagcgtgagccggaagactctgcgaagatttagagcaactctattccagattgagaaagacgggccagaagggaaaacttggggaaacggcggtgaccttttcgcctccatacaaggctacgccaatttcgtgcacatggtcgatccggaaaagggccgggcatttctgcagcgcgttcagcggattatcaatttacattcccggtga

SEQ ID NO: 13476 - RNA, 1077 nt, synthetic construct
  source 1..1077: mol_type = other RNA
gtggaactgacgtatttgggacccagagtctcaggtggcctaggaccgactggcgatcggagaactagcgacggtgctcggttaagtgcggccggactgccagttgttcacacagcagctgaactcgctaccgcagccggcttggcattgggtcagctgcggttcctggcttttgcgcgagaggtgtctactacaacccactacaggcagtttaccattcccaaacggtccggaggagacagggtcatctccgccccaatggcacggctcaagaaattgcagcattggatcctggagcacatgctcaataagctgcctctcgccccccctgcacatggatttcgcccaggccggagcacggtgagtaatgctctgcctcatcttcaatctgccatcgtgataaacgtggacctgaaggagttcttccccacagtaacataccccagagtcaaggggctgtttcgtaagctcgggtatagtgaggaggtgagcactgtcctgggcctggtctgcactgagcctgacatcgtggagactgttctagacgggattacatactatgtggcacgtggccctaggcggttaccacaaggtgccccgacttcgccagccataaccaacgcactgtgccgccgtctggacaaaagaatcgccggttttgcagcaaagcacgccctgaccttcaccagatatgcggacgacctcaccctgtcaactaaagatcctgccgggcgcgtgggcgcttgtcttaagttccttaggaaggtcgccgtcgatgaaggcttcaccgttcaccccgaaaaagttagggtggtgaggacaggccgacgacaggaagtgaccggcgtggtcgtgaacgaaaaaccaggcgtcgttcgcgccgagcttagaaggtttcgcgctctcttattccagattgagaaggatggacctgccggaaaaaagtgggggacccccgggacagatgtactcacctctgctcttgggttcgcttcctacgtggccatggtagatccagtaaaaggggctgcgcttagaacacaggtgttggccctgcgcgcccgatttcccacgtga

SEQ ID NO: 13477 - RNA, 1440 nt, synthetic construct
  source 1..1440: mol_type = other RNA
atgagcaacttgccccccccacgggatcggaaggaactgtacgagagaatcgcactcggggggaaggatgacgtgattgccgaggagatgacgagactggggttttggtcgggagaacaggctcaattggtggatcctccagtggaggcggccaggaaggctgaactccgggaacggctgggtaagcttagggagcaagccgctcgcatgaggaatctcgtgactttggaggcagacctaaagaagcagcgtatggcagccagccggaagaaacgtgaggagactaagcagcgaagactgggggagcgtgcagcagctaaggagcgaaccaaagccaccaaggcccgcgaacttggctatctcgggcctggagtaagtgctggcttgggcccggagcatagggcgtcagatgtagcacggctccaggcgcagaggttacccgtcgtgcacaccgcggcagaacttgctgccgcaatcggagtgagcctcggagagcttagattcctggcttttgcacgcgaagtgtccacaaccacgcattaccggcggttcactatccccaaaagatcaggcggagagcgggtgataagtgcccctagaaaacgcctgaagcgggtgcagcactgggtgcttgctaaagtcttagaacccctgctgggtgacccagccgctagtgacccagcccacggtttccgctctggtcggagcacagtttccaacgccgtgccacatgtcggagctgccgttctggtcaatgtggacctgcgcgacttttttcctactgtgacatataggcgtgtcaaaggtctgttcgccaagcttggctacggagaggaggtcgccacagttctagccctggcctgcactgaacctgatattgccgaaacccagttggatggcctcacttactatgttgcacgcgggccacgacgattacctcagggcgcacccacctctccggctatcacgaatgctttatgtaggcgattggacaggcgtgtgctgggctgggcagacaaacacggctttgcctacactcggtacgccgacgacctgacactgtcttccaaagatccagctgctagagtcggtgcctgcctgggcttcctgaggcaagtggcaggcgccgaagggtttacagtacatcctgaaaaggtcagagttgtcagaagaggggggaggcaggaggtgacaggcgttgttgttaacgagcgcccctcagtccctagggtggaactgcgcaaattcagggccctcctacaccacattgacatggatgggcccgcgggaaaaacctggggaagaaccgacggagcggatggcggagatgtactggctgcggctctggggttcgcatcctatgtggccatggtggatccggctaaaggtaccgccttgcgagcacgcgtactcgccctcagagccaagtatcccggctga

SEQ ID NO: 13478 - RNA, 1422 nt, synthetic construct
  source 1..1422: mol_type = other RNA
atggcagatctgactccgcctaagaatcgtaaagagctctacgagagaatagcccgagggggcaaggaggaggtgattgtcgacgagatggtgcggctgggattttggccaaacactcaacccccccctggagatccccccgatgaaatccgccgcatggccgaactgagaacacgcttagcccaattgcgccagcaggctcagggtctacgtaacctcgcccagctagagattgacttaaaaaaacagcggctcgcagagagtaagcggaggagagagcttaacaaacagaagctcctgggtgagagagcggctgcaaaggccgcgacccaggagaaaaagaccagagaactgacgtacctgggaaaagatgtcagcgcaggcttgggccccactctggacagacggacttcagacgcacccaagctgacgacccaaaaacttccaattgccaacactgccgctgaactcgctgccgctatgaaggttagtctgggccagcttagattcctggccttctcacgggaagtgtccacaaccagccactatcaccggtttaccatacctaagaaaacgggaggggaaagggttatctccgcgcctcacaagagactcaaggccgtccaacattggatcctcgagcatgtgctggaaccacttgcactggccgagccagcccatggatttgttccgggccgaagcacagtgtctaatgccgttcctcatgtgggcgccgctatcgtggtcaacgtggatctgaaggatttctttcctaccgtgacctaccgacgcgttaaagggctgtacaagaagttgggctattcggaggaggtcgccacagtactgggcctactatgctccgaacctgacatcgcacagaccgagttggacgggaccacctactttgtggcaagggggcccaggcgattaccacaaggagctccaacttctcccgcgattacaaatgcattgtgtcgccggctggatcggaggatcaatggctgggcgaagaaacacggtttcatctacacaaggtacgccgacgacctgactgtcagcaccagggacagaaacgccccggtaggcaagatgctggcattcttacgaagggtggtgacagctgaggggtttgctgtgcaccctgacaaggtaagggtagtacgtaggggccgccgccaggaagtcacaggagttgtggtcaacgatcggccaggggtccccagagatgaccttcgacgtttccgggcactgctcttccagattgaaaaagatgggccagctgggaaacgctggggacacaatgaaggtaatgtgcttgaggctgctctcggttatgcatcttatgtggccatggtggaccctgccaagggcgaagttctgagggccaaagtgctcgctttgagagctaagtataaacagtga

SEQ ID NO: 13479 - RNA, 1425 nt, synthetic construct
  source 1..1425: mol_type = other RNA
atgtcggaaaaagcacctgccaacaggaaggagctgtttgaacgcatcgcaagaggcagcaaggatgccataattctcgatgaaatgcagcggctcgggttctggccatcccagcagagcttgcctaacgaacccccggacgaagtcactcggttagctgccgctagagcccgtctggccgaactccatcgcaatgcctctcgcctaaggaacttggtggaactggagagagaggctaaaaagcagcgaatggctgaatcaagggcccggagagtggctaccaaacagaaacggctcggcgagcgcgcggtaaaaaggaccgcaactcagcaacgcaaaaccatagagttgcgttatcttggcgctacagtgtcagccggtctgcaaccaggtgtcggagcaattaccgacggagctgccgccaccatcgctcaactgggcttacctgcgtggcagacagcggcggacattgcgagggccatgcaggtttccattgggaccttgcgacacctggcatacgcaagagaggtgagtaccataaaccactaccatcgcttcagcatagctaagaagagcggaggggtaagggtcatctcagcgccccaggtcaagctcaaagccgcccagaggttcattctggatgaattactggctaaattcccactcagcaatgcagcccacggatttgcagctgggcgcagtattgtaagtaacgccgcacctcatgtagccgcggcaattttgatcaacgtggacctgcgagatttctttccaaccgttacttaccggcgcgtgaaggggctgtttcggacgatcggctacaacgaggaggtcgccatcgtgctagccctcctgtgtacagagcccgagatcacggaaacccagctggacggcgttacttactatgtcgcaaggggcgagcggaagctgcctcaaggagctccgacttctcccgctatcagcaatgccctgtgccgaagactcgatgccagacttgggggctggtgcgccaagcatgggtttgccttcacaagatatgctgacgatcttacactctcctcacacgatcggaatgccaatgttggggaggcactggccgttgctcgtcgattagtggctgcagagggattcgtggtccacgcagataaagttcgcgtagtgaggcagggtggacggcaggaggtgactggtgtggtggtgaatcaaaagctgtctgtgccaagagacgagcttagacgttttcgggccctgttgttccagcttgagcatgacggccccacggaaaagtcctggcacggcgtgggagctgacggaacaggtgacgtcgtgcagtctgctaggggctacgcatcctatgtccacatggttgaccccgctaagggcgccatcctacttgcaaggctggatgccctgacaaagcgatga

SEQ ID NO: 13480 - RNA, 1527 nt, synthetic construct
  source 1..1527: mol_type = other RNA
atgtctaatcgcaggcaggagctgtatgatcgaataagaagcacatccaaagacgaggtggtgctggaggagatgattcgcttgggcttttggcccaggcagggttcaatgcctctcgaccctggagatgaagtcaggcggcggggggaaattgagcgggaattggctgcattacgcactgagcagactcgcctcggtaatctcgaggccctgaaaaaggaagccttgaagagacggctggccgagagcaaggaaaaacagaaagaaactaaggccaggagagagcgagaacgggttgcaagagcggccgcttgggcacaaaagaaagcgggagagattggctttctggggaccggtgtgtctggaggcctgggacacaccgaaacagatgagcctaagcttgtcgctcagagcctaccagcactccggagcggaaccgatattgctcgggccatggggatcacggttggggagttacggtttctagcctttgacagacgcacgagcgaaacgtcccactacgttagattcaccattccaaaaaaggccggtggggagagacttattagtgcccctatgccacgcctcaagtcagcccaggcgtggatcctggagaacttgctgggcaaagtggccttgcatgacgcagcacatggcttccgggcggcacgttcgatcgtgaccaacgctagaccgcacgtgggggctccactcgttattaacgtggatcttaaggatttcttccctacactgacactgggacgtatcaagggggccttcagagccttgggctatggggaccacgtcgctacagtgctcggtctgctgtgttcagagcccgatgtagatcaggtggtgttagatgggaaaacattttacgtggccaatggcaagaggaggctgcctcaaggagcccctactagtccagcaatcaccaatatcgtctgccggcgcctcgatagaaggctggcgagtgccgcgcaaaagcacggctttgtctatactcgctacgccgacgacctaactctctcctccatagaccccgccgctaacccagctagagtactgggcgtacttaggtggatcgtcgcaggtgagggatttgtggtccatcccaagaagacacgaatccttcgtaagggcgcgcgtagggaagtgaccggcgttgtagttaacgagaaactgagcgtgtcacgcgagcagcggaggaaattccgagccttcctgtttcagctggacaaagacggacctcagggcaagcaatggggagcctctccggacgtattcgcctctgctttaggctatgctgcatacctcgcaatggtcgaccccgaaaggggtaaacccgtccttgcccaggctcgagccatagcaaagaaacatggctggaaagggaaaccccgacccgtgaaggctgtgcaggctgcaccgatgcctcccgttgctccaccagtggccgaacccatggcacccacctccccagaagctccagccgagcctaaaaagaagtggtggaagctgttctga

SEQ ID NO: 13481 - RNA, 1584 nt, synthetic construct
  source 1..1584: mol_type = other RNA
atgacttaccgcagatattcaacccagcccagtagccgccaggagctgtacgacagaattagggattcctctaaagatgaggtaattctcgaggagatgattcgtctggggttctggcctgctgcaggtacaatgcccgatgacccagcggacgaaatcagaaggaggggcgagctggaagcagaactcagagccctgcgaacggagaggagccgactccacaatatcgaggccttgaagaaggaagctcgcaaacgtcggatggctgagtcgcgacggaagagacaggagactaaggaacgtagactgcagcagcgtgtcgaacgggccgctgtttgggcggagagaaaaaaatccgagctgctgtatctgggggaagaggtcagtgccggtctaggagaggctgagcccgacgctcaacgactcgcacgccatgggctgcccagcttctctgatgctgcccagctagctcgagccatgggcctcagtctcggtgccctgaggcaaatgtgtttcgatagggcgacatctcgaaccaccaattatataagattcgtgatccctaagcggacaggtggtgtgagagagatatccgcccccaggccacgtttaaaagaggctcagcgctgggttctggacaacatcctttcaaagatagctctgcacgatgcagcacacggcttcagagataagaggagcatcgtaagcaatgcccacccacacgtgcagccagcagtgcttgtgaacgtggatttgaaagactttttccctacagtcacataccggcgggtcaagggaatgtttcggaagttagggtactctgagtccctgtccacggtccttggactcctgtgttccgaaccccgagctacagaactctcacttgacggagtgacctattacgtggccctgcaggagcgggccttaccacaaggcgcacccacttcgcccgctgtgacgaacatcatctgcagggggcttgacgcaaggctatgcgcgattgcctctaagctggggtttgtctatacccgctacgctgacgacctgaccttttcctctaaagataagactgttaacgtgggtcgcttgcttaggcagctccgcaagattgtggacgacgaaggatttgtggtgcatcctgacaagacaagggtcttgcgcgccggccgcagacaagaagttaccggcattgtggtaaatcatacccccaatgttacccgggatgtcttgcggaaattccgggctaccttgtaccaaatcgaaaaagacggaccgcaggggaaaacttggggccatagcgatgatgtgattgccgccgtggaggggtttgccaactatgtggccatggtcaaccctgataaaggccgccctttagttgaacgggcgagagccctggtaaaaaagcacggcaaaaagccaacccccccgaagaaagccaagaagccagcagcaagcactgcgccgcctcctcaggctaggagtgaagcaccagccgccactgcagcccagtcagaaccacctgagacagacggagatgacggcggaggcaagaaaaagaagaaaaaatggtggaagatcttctga

SEQ ID NO: 13482 - RNA, 1587 nt, synthetic construct
  source 1..1587: mol_type = other RNA
atgtccagaccctcttccaggcaagagctgtacgaccggatccgcgagtcctcgaaagattctgtcattctggaggagatgatcagactggggttttggccccaggcaggcgtgcttcccgaagatcctgccgacgagatcaggcgccgtggggaactcgaggggaggttgaggtccctccgcaccgaacagtcgagactcagtaatgtggatgccttaaaacgggaggcccggaagcggaggatggtggaaagccgccgcaagcagaaggagacaaaggagagacgactgcgggagaggcgggaaagagcggaagcttggaaagagaggaagggccgcgaaatcgtttatctgggcgagggtattagcgccggcctgagcgatatcaagttagacgccacaaagctagcaggccaagggctccccagtttcgcagatgccgccgcagttgcgcagaccatgggtctgtctatgggagagctcagacggtttgccttcacgcggaccaccagcaaaaccactaactacatgagattctccatacctaagcgaacaggaggggaacggcacattagcgcgcctctgccgcgactcaaagaagcccagaggtggatccttgatcacgtgctcgccaaggtgccccttcatgaagctgcccacggtttcgtcgggggcaggagtatcgtctccaacgctacagggcacctgcagccaactgtgttggtaaacctggacttggaaaattttttcccgacagtgtcatacagacgggtcaagggcttgtttcgctctctcggctacagcgagcaggtggccaccatttttggtcttctgtgcactgaaccggaggtcactgagctggagctcgacggagccacttactatgttgccttggaggaaagactactgccccagggagcgccaacctctccagctattaccaatctaatatgtcgcgctctggatgctaggctgacttcaattgccacagctcttggctttcactacacccgatatgccgacgatctaagctttagtgcacagggcgccgacgctgatgctggacgtctgcttagaagggtgcgacatgtcgtagcagaagagggcttcgtggtgcatccaaagaaaacgcgcgttttacgccgggggagacgtcaagaggtcacaggcatcgtggtaaacggtgaccgtccttccttggccagggatgtgctgcgacgtttccgggctaccctgtttcagctggagaaagatggcccagcaggaaaaaggtggggccgagccgttgctgacgaaggtgacgacgtcattgctgcggtggaggggttcgcgaattatgtagtgatggttgaccctgagaaaggccagctcttacaggaaagaacccggaaactggtggccaggtatgggaagaagccaacacctccccgcggaggatctggaggctcaggaggaggtggagggccaagacccgctgctgaagcacctgccgcagcagcacaagcacccgtggttgaggctccccctacggcacctactgaagccccatcaaagaaaaagaaggagaagtggtggaaagtcttctga

SEQ ID NO: 13483 - RNA, 1635 nt, synthetic construct
  source 1..1635: mol_type = other RNA
atggccgagcctccacggaccagacaggaactctacgagcggattgtcgccacttcaaaagacgaggtggtgctccaggagatgattagactggggttctggccagctgctgggaccttacccgaagacccagccgacgaggttagacgtcgggccgaactgcaacgacagctcgatcggctccacgagcaaaatagacatctttacaacgagcaggccctcataaaggaattaaggttacgccggctggcggagtccaagcgcaaacagcaggaaacaaaggagcgcagagagagggaaaggctagctcgagccgaggcatggaagcaggaaaaaacgaggagcattgtttacgtaggggagggggtcagtgcaggtctgggtaagcgggaagcaaagcccgaacgcctgaaggagcatggccttcccaactttacctcggccgccgatcttgcgtcagcaatgaaaattagcgttggcgccctgcggttcctttgctttgcacggaaaacatcatctgtgtctcactacgtgcgtttcaggatcccaaagaaaagcggaggcgaacgattgatatccgcacccatgccgaggctaaaggcagcgcagagttgggttctgcacgagatcctcgagaaattggcgctgcacactgcggctcatggattcgtcaggggacgtagcatcgtctccaacgctaggccccatgtggggcacgcattgatagtcaacgtcgacctgaagaactttttcccaacagtgggctatccaagagtgaaaggactgttcgccagcctgggatatagtgaagaggttgcgaccctgctgggattgttgtgcacagagcctgacgtggaggaactggtgctggacgggcagaggtatttcgtggcccgaagcgaaagacacttaccgcagggggcacccacatcccctgcaatcactaatcttttgtgtcgaagactcgaccgccggcttcagaagatggccgacgaactgggctttgtttatacgagatatgcagatgatctcaccttttcggctaagagcgaggatgtggggcaggccgccgaagtactacgaagactccggaatatcgtggctcatgagggctttgtggttcacccggaaaaaacacgcgtgttgagacgcggccggcgtcaagaagtgactggtgtcgtcgtgaatcacaagcctggcgtacctagggatgtcctgcatcgcttccgcgccaccctgtttcaaatcgagaaggatgggcctagcggcaaacgctggggagcctgtaaggatgtgctggcgagtatcagaggctttgcctcctacgttcgtatggtcgatcccgctaggggtactccgctctgcgctagggtcgacgctattgtggccaaatactctggaaaacctagtcccccagctccctccggtgcaccagcaaagaagcccgacgtaccaaaaccagacgccgcaaaacctggcgccgctggatcagtacctgccgctactaaaaccgccgaggctctggctaaagctgcccccacgcctgcttccgtggtgtctgatgcaaaggagccctcatctcctgcctctgacgccaagacaccaaccggcaagaagtggtggaaggtgttctga

SEQ ID NO: 13484 - RNA, 1677 nt, synthetic construct
  source 1..1677: mol_type = other RNA
atgctggctccttgcggctctccaccgagtaagcgattagtgttcctgggagcctcacggaccctcgagcaatggcttgctgtgcggccgccccaaatgcacgccaatagacctgaaccaagccgcgcgatgtcgcagccttcttccagacaagcactgtacgaccggatcaggaagagcagtaaggatagcgtcattgtggaagagatgattaggttagggttttggcccgcagcaggtaccatgcccgaggatcctgctgacgaaatccggaggcgggcagagcttgaagcacagttacgagctctgcggacagagcagacccggctccacaatatcgaggccctcaaaagagaagtgagaaaacgcaggatggccgaggctcgtgaaaggcgcaaagagactaaggccaggaagctggcagaacggcaggcacgcgctgagacatggaaagcaaaaaaggagactgacatcgggttcttgggcgagggtgtttccgctgggcttgggcataagggatgtgatgcagaacggcttgctgaacatggcttgccggaactggccgatgctgctgccgttgcagcagctatggggatagatctgggaactttgcgcttcctcgcatacgcctgtacaacgagccgtgtctcgcattatgtccactttttcataccaaagcgcaccggaggcaagagagccatttccgcaccgatgcccaagctaaaacacgcgcagcattggattttagccaatgttctagatccagtcgccctggacgaacacgcgcatggtttccgccacgggcgttcaatcctgaccaatgctcagccccacttgggctctcgggttgtagtaaactgtgacctccagaacttttttcccaccgtgagttaccggagaacgaaaggcctcttccagtccttgggctatggcgagcaagtggcgtccatttttggcttgatctgcacagcccctgaaacccaggaggtggagctggacggccagaggtatttcgtggccctcggcgatcgtgttcttccccaggggtcaccagccagccctgcaatcaccaacctgatctgcagaggcctggatcgcgctctcgagaaaacagcgcgccagcttggcttcaggtacactcggtatgctgatgacctgagcttctccagcgatgacgccaatgccgacgtagggcgcctactgggaagggttagatggctggtccagagacatggatttgtcgtgcaccctgacaagacaagagtgctgcgccagagtagacgccaggaggtaaccgggattgtcgtgaatgagaggcctgccgtcccccgtgaaaccctgaggaggttcagagccactctgtttcaaattgaaaaggacggtccagccggaaagagatgggggcgagccaccggagataacggagtggacctcatggctgccatcgagggattcgccaactacgtggcgatggtggacccagcgaaaggtcgacccctcaaagcccaggtggccgctctgatagcccgataccccaaacaagcaacgccatttaagggccggcgaaggccttcacagtctactgactctcccacatctgagcctaagcgagatgccactgctccagaggtggtcgacggtacaaaaaaaaagaagaactggtggaagctgttttga

SEQ ID NO: 13485 - RNA, 1254 nt, synthetic construct
  source 1..1254: mol_type = other RNA
atgtccggtgaccgtccccgcacaaggcaagaactatatgaccggattcgcgagacttcgaaagatgaagtgatcttggaggacatggtgagattgggtttttggccaaggaccggggagatcccccaagaccctgcagatgagatccgccgaaggggcgacctagagagacagatcgctgcacttaggacagaacaggccagactctccaatgttgaagcgctgcgaaaagaactcaagaggcgccggctgctggagtcaaaggagaagcaaaaggcgaccaaagaaagacgcgaacgggaacggttagcgcgggctgcagcatgggctgaggagaaaaagagggccatcgtgcatcttggggccggggtcagtggaggcctgagtaagggagctcctccaaatctggaaaagttgacagctctgggcctccccaggttagccacagccgcagaggttgccgcggcaatgggtattgctgtgcctgagcttaggtttcttgcctatgcacgcaaggtgtcacagaagacccattacgttagatttacaattcccaagaagacgggaggggcacgactgataagcgctccgatgcctcgactgaagagagcccagagatggatcctggatgccgtactggccaaggttgccttggagggtccagctcacgggttcgtcgttgatcgctccattgtcaccaacgcaaggcctcacctgggatcccaggtggtggtcaacctcgacttgcgtgattttttcccgtcacttggattcagaagggtgaaaggcatgtttgagggactcggctacggggaagaagtgtctactatattcgcgctgctcaccacagaaccagaaattgacgaggtcgagctggacggccagacttatttcgtagccaccactgctcggaaactcccccaaggttctcccgcatctcctgcaatcacgaacgtggtatgcaggcgtctggataaacggttagccggaatggcccgggctcttgggtttacctacacgcggtacgctgacgacctgaccttcagcagcaaagatcgcgccgctgatgtgggcaaactcctgagacgtgtgcgatggatagtcaaacaggaaggcttcgccgagcacgagaagaagactcgcgtgctccgaagaggccggtgtcaggaggtaactggcgtggtcgtgaatgataaaccaagcgttcccagagaggccttgaaacgcttccgggccctactgtttcagctgtga

SEQ ID NO: 13486 - RNA, 1560 nt, synthetic construct
  source 1..1560: mol_type = other RNA
atgtcaaaacagcccacaacgcgcaaggccctttatgagagaattgctaagagtagcctggatgaggtcatactagaagaaatgatcaggcttggattctggccttctagcagcgatgctcccagcgatccggctgaggagatcaggcgcagagggcacttgcagaggcgcctcaatgaaatacgaacagagcagctcggtctgcagaacgaggccaaactgaaagaggaggcccgtaagaagcggatgtccgatgcaagagaacgcagattacagaatagggagaggcggctgagggagcgttcagagcggagagctcagtggcatcagaaaaagcaagaggagatcggttacctcggcgatggattttccgcaggcctgggtaagcgtgagtgtgatgacaagcggctccaggcccagggcattcccgttctcggtgacgcaatgtccctatccaatgcaatgggcatttcgctgggccagctgaggttcctggcattctcacggaaaacaagccgctattcccactatcagcggttctccatcccaaaaaaggatgggggggtgagaatgatcagtgcgccaatgccacggctgaaagctgcacagacttggatactagaaacgatccttaacccacttcccatgcatgacgctgcccatggtttcaggcctgggagaagtattgtgagcaatgcgaccccccacataggagcagacgtggtggtcaatttagacctcgaaaactttttcccttcagtgggctaccggcgagtaaaaggtttgttcgggcacttcggatacagcgaggaggtggctacaattctggccctgctgtccacagaacccgaattgactcagatcaagctggacggcgacacgtattacgtcgctaaaggcgaacgattcctcccccaaggagccccgtcttctccagcaattaccaatctgctctgccgtcggctggatagacggttagagggtatctgcaacaagcttgactttcgatacaccagatatgccgacgatctgtcattttctgcaagaggggaacctgcaaagcttgttggcaagttgttgtctcaagtggagtggctggttgccgaagaaggctttaaaatccaccctgacaagacccgcgtattccgcagaggaaggcggcaagaggtgaccgggcttgtcgtgaacgatggactgagtgttccgcgagccgtgttgcgcaggttcaggaccctgctgtttcaaattgaaaaggacgggacagatggcaagaggtggggcgccagcgacgatgtcttagcctccgctatgggatttgctaactttgtcgcgatggtacagccagagaagggagccagtttgcagacccaagtgcgcaaactcctgaagacttacggcaaggccaaagctcctcgcgcgcagtctgccgagtcaaaggggactgaatctaaaggagccgaaagcaaggggaccggccgaggacctaccccaacatcggacgaaactgacaaaaaaactgaggacctcgcccccaagaaaaagtggtggaaactattttga

SEQ ID NO: 13487 - RNA, 1578 nt, synthetic construct
  source 1..1578: mol_type = other RNA
atggcccagcagcctcctcgtaatcgccaggagctgtatgagcgaattcagtcgatcagcaaggaggagtttgtcctggaggacatggtcagactgggcttttggccggcaagatccggcgtacctggcgatccccgggatgaagttcatcggaaggcagagctcgaaaaacagataagggctctgacaagcgagcaagccagactcggcaacctggaaaagctgaaaaaagagctccggaagaagcgtctcgctgaatctaaagccagacagaaggagacgaaggagcgccgcgagagagaacgagttgctcgggccgaagcatggaaggcccggaaagccagagagattttgttccttgggagaggggtgagcggcggactgaatcaccgcacccctgaggcccctaagctcgagagacagggcttaccccgtcttgaaacccccgaagctttagcccaggcgctcggactaagtgtcggtcagctgcgggccctgtgctacgctaggacagtgtccactaaaacgaactacgtgaggtttgccttgcccaaaaagaccgggggcttgcggcttatttctgccccccttccgaggctaaaagcggcccagcattgggtgctgaagaatctgctcgaaaaggtccccatgcatgaagctgcacacggtttccgcccggggaggtcaatcgtgtcaaatgcaaggccacatgtgggggccgcagtcgtggttaacctggatctgaaggacttcttcccaacagtagtatatccgcgcgtaaaggggttcttcgtgaagttgggatatagtgaggcaacagctactgccctatctctgctctgtaccgaacctgacatggaggaagtggaactcgacggccaaaggtacttcgtcgctcagggcggtcgtcgactacctcaaggcgctccaacttccccagcactgaccaatttgttgtgcaggcgcctggatcgacggcttaagggggcagcaggcaaactcggttttacctacactcgctacgcggatgatcttactttttccgtcccaagaggaggaacgggggacgtgggcaagatgttaagactggcaagatttgtcatcaggcacgagggattctttccccacccagaaaaaacccgggttctgaggcgcggtggacaacaggaggttactggagtcgtggtgaacgacaagccaggcgtggatcgggagacactcaggaggttccgggcgcttctgcaccagttagagaagtcaggacccgagggtaagaaatggaacgggagcaccgacgtgatcgcaagcgtggttgggtttgccaattatgttgccatggtggaccccaccaaaggtaaggccttccaggacaaggcccgcgcgttggaacgaaaatacggccgaaaaactgtgctgccccctagacctaaagccccagccgctgctcaacccggaacagctaccgtggcccccacaccaccttctagtgggacagctgctccaggcggacctcccaagccagaggaaccccaggaaccaaacgagccgcctaagaaaaaatggtggaaactgttttga

SEQ ID NO: 13488 - RNA, 1563 nt, synthetic construct
  source 1..1563: mol_type = other RNA
atggcacagcagccccccagaaatagacaagagctgtacgatcgaatccgggagacgtccaaagaagaagtgattttcgaggaaatggtccgtttgggcttctggcctgcgcgtagtggggttcccggtgatccagctgacgagctccacagaaaggccgacctgagggcccaactgcgggcattaacaaccgagcagagcagattaggtaatctggaacggctaaaaaaggaactccgcaagaaacgcttggccgaaagcaggaggaagcagcaagagactaaagagaggcgggaaagggaacgcgtagctagggcagaggcttggaaagcccggaaggccaaagagctgctgttcctcggaaggggcgtttcgggagggctgagccacagaactcctgacgtggcgaaattagaacggcagggtttgcccaagcttgaaacacccgaggtcctagctcaagcgttggggatgaccgtgggacagcttcggggattatgtttcgccagaaccgtcagtaccagaactaattatgtgcggtttgccctccggaaaaagaccggcggcctgaggattatttccgccccgcttcctcgactcaaggcagcacagcactgggtcctcgagaacctgcttgagaagctgcctatgcatgaagccgcccacgggtttcgacctggacgctctatcgtgacaaacgctctcccccatgtcggtgcagctgccgtcgtaaacctggacctgaaggattttttccctacagtggtttatcctcgagtgaagggcttcttcgtaaagttaggctactcagaggccacagctaccgccctggcactgttgtgcaccgaacccgatctagaggaggtcgaactggatggccagaggtactatgtggctcagggtggaagacggctgcctcaaggtgccccaactagccccgccctcacgaacctgttgtgccagcgccttgaccgcagactaaagggcgtcgggcgaaaactggggtttacttacacccgatatgcggatgacttgacattctcactgcccccagggggaccaggcgatgtaggaaaacttctcaggctggtgagatttgttatccagaaggagggcttcgttccacaccctgagaaaacccgcgttctcaggagaggccgtcagcaggaggtgacggggatcgtagtgaatgacaagccgggagtcgaccgtgaaactctccgccgctttagagctcttctgcatcagctggagaaatctgggccagagggccggacatggaacggttccacagacgtgatagcatccgccgtgggctttgccaattacgtgatgatggtggatccgaccaaggggagggtgtttctcgaacaggcccgtgccctggagaaaaaatacggacggaaagcggtggttcctccgaggcgcaaggcagcaccaccagctcaagccggcactgctgccgctccaccttcaggtgcacgccttggcgaggagcccaagtctggggaacccgctagtcccggagcaccagctaagaaaaagtggtggaagctgttctga

SEQ ID NO: 13489 - RNA, 1602 nt, synthetic construct
  source 1..1602: mol_type = other RNA
atgtcaagccagcccccccgcaatagacaggagctgtacgacagaatcagagccggctccaaggacgaggtcgtcctcgaagaaatggtgcggctgggcttttggccagcacgctcaggactgccaggtgatcccgccgatgtcgtgcaccgacgcaacgaactgcaaggcgagattagggcattgacgagcgagcagtcccggctagggaacctcgaggccatgaagcgagagctcagaaaacgccgcctggaagagagtcgaagaaaacagcaggaaacaaaggagcggagagaacgtgagaggctcgctagggctgccgcatggaaagaacggaaaggcaaagagctgttattcctcggcaggggggtcagcggaggtctttcagagcgaacccctgatgaagccaagctaaccaggctcgggttgcccgttttggccacgcctgaggtgttggcccagacccttgggttgtctgtgggcaaactgcgggccctgtgcttcacaagaacagccagcacaacctctaactacgtccgctttcagctccccaagaagacagggggcaccaggctgatatccgcaccgcttccccgattgaaggcagcgcagacctgggtccttgaaaacattctggaaaaggtacctgtccatgatgccgctcacggatttcgggccggtaggtccatcgtgactaatgctcggccacacgtaggggccggggtagttgtgaacttagatctgaaagacttcttcccgtctgttttatacccacgcgtgaagggcgtgttcgtcaagctgggctactccgaggctaccgcgactgtgctggcgttactgtgtactgagcctgatgtggaagaggtagagctggacggacagaggttcttcgttgctcagggaggcaggcgcttacctcaaggtgcccctacctcacccgccctcacaaatatcctgtgcagaagactagaccggaggctcgcaggtgctgcccgtaaactggggttcgtgtataccagatatgctgatgacctgacgttttctgcccatggacctggaccacatgacgccggcgaactactgcggtttgtgcgatggcttgttggggaagaggattttactccccacccagaaaaaaccagggtgttgcgacgcggccgtcaacaggaggtgactggcgttgtggtcaatgacaaacccggagtggacagggagactctgaaacgtttccgggcactcctgcaccagcttgagaagagtggaccagagggcaagcgctggggcaatagtggagacgttattgcgagcgccgtgggatacgccaactatgtggcgatggtggaccccgtcaaggggaaggccctgcaacagaaggccagagccctcgaggcccggtatggtagacgtcctagtccgccacctcgggccaaagcagccaagggtgctgctcaggcagggtctagcgcacctgtatcctcggctgctccgccagcacaagcacctgaaacaccagctgctgctccagcagcacctgctgcgactccagatagcggccagaaacccgcggaaccccccaaaaagaagtggtggaagcttttttga

SEQ ID NO: 13490 - RNA, 1548 nt, synthetic construct
  source 1..1548: mol_type = other RNA
atgagctcacagcccccgaggacccgacaggaactgtatgatcggattcgcgccacatctagggaagaggtcatcctagaggacatggtgagactgggattttggccggcgcgcacagaacagccaggtgatcccgccgaggtgatccaccggagaaacgacctgatgggccagcttcgcgctctgacaaccgagcaacaccgcttaggcaatcttgaggcaatgaagagggagctcagaaaaaggcgccttgtggaatccaagcggaagcagcaggagactagggagcgaagggaacgtgagagagttgccaaagccgccgcttggcgggaaagaaaggggaaggagttgctgtttctgggcagaggcgtaagcggaggcctctctgccagagagactgatgaagcaagattgacaagacttggcctgcctgtgcttaccagcccagaggccctggctgaggcattagggctacgggtcggtcaattgagggccctctgttttacccgcacagcgagtaccacccatcactacgtgcggttcctgctgccaaagaagaccgggggaaccaggttaatctccgccccgttaccgcgccttaaagccgctcaggcttgggtcctgacccaagtcctcgaaaaggttcccgttcatgaggccgcccatgggttcagacctggcaggtcaatagtaaccaatgccagaccccatgtgggtgccgcagtggttgtgaatctcgatctgaaagacttctttcccagtgtggggtaccgacgagtgaaatttgccttcatgcacctgggatactcagaagccacagcaaccgttctggctcttttgtgcactgaacccgacgttgacgaggtagagctggacggccggaggtactacgtctcgcaaggaacaagacgactgccacagggggctccttcctctccagccattacgaaccttctctgccgcaggttggacgctcgtttgacaggaactgcacgcgccctgggtttcgtgtacacacgctatgcggatgacctgaccttttctgcaacggggcctggccatcacgatcctggaactctactcaggcgagtgaggtggctcgtgaaacaagaggacttcaccccccacccggacaagacacgtgtcttacgacggggccggcagcaggaagttacgggtgtggtggtcaacgataaacccggtgtcgatcgccagaccctaaaacgctttagagcattgctgcaccagctggacaagacgggcccagagggaaagcgttggggagcaggggcggatgtactgagctccgcagtcggctatgcgcacttcgtggctatggtggatcccctcaaaggccgggccctcgaactcaaagcacgggagctggaacggcggtatgggcgtaggccaccacctgctccacccactcctccacccgctgctacagccgcaccagctcctgaacccactccacctcctgctcctcccactgagcctactcccgccagtcctgaagcgcctaagaagaaatggtggaagctgttctga

SEQ ID NO: 13491 - RNA, 1629 nt, synthetic construct
  source 1..1629: mol_type = other RNA
atggacaggaggcagcagctgtacgatagaattcgatccactagcaaggacgaggtcgtactcgaggagatgatacggttgggattctggcccgcaaggggcacactgccgtcagatccaggagatgaaatcagagacttagccgaggcccaaagggagctcgctgcactgcggactgagcagagtagactgcataacctggaggcactgaagaaggagctcttcaaacgtcggcttgcagagagcaaagcccgccaagccgaaactaaagcccgtcgggaaagggaaagggtggcgagggccgaagcctggaagaacgagaaaactcgcgctatcgtctttctgggacgcggagtctccgggggtctagctgatacgacctgcgacgaagccagactgcagaaacagggtcttcccgtcctgcggaccgctgaggatttggccagggcagccggtgttacggtgcctgagctccgcttcctcgcttatgctaggacaaccacagccgcccgcgtgagccactacagacgatttcagattcccaaaaagaccggcggcgtgcgaatcatttctgcacccatgcgccggttgaaggcccttcagcgctggcttcttgacgctgttttggccagagttgaggtgcacgatgcggcccacggttttagagccgagcgcagcatcgtcaccaatgctgggccccatgtgggcgcaagagtcgtggtgaatctggacctcaaggacttttttccgaccgttactctgccgaggataagaggggtatttcgaagtttaggctatggagagcacttggcaaccattttcgcactccttgcttcagagccggacacagtaagggtcgctctggacggggctgaatacgacgtagcccaaggaccacggaggctccctcaaggggcaccaacatctcccgctatcacaaacgtgctctgcaggcgcctggacaggagactgttccacgccgccaagaagctgggcttcgcgtactctcggtatgccgacgatctgacgttcagtagcacctctaaagaagagaacgccgggcagttactgaagcaggttcgatttatcgtggcagccgaaggcttcgtgccacacccggataagacccgggtcctgcgaaagggcagacagcaggaagtgacaggcgtcgtggtgaatgacaaactgggggtggatcgggtgactctacggcggttcagagctctccttcatgcgttggataaggacggggcgaatggaaaacgctggggctcctcccccgatgttttcgcgagcgcctgtgggtttgcttcgtatgtagccatggtggaccctgtgaagggcagagctctgttggcgcgtgctcgcgagattgcagcccgtcatggatggaagggaccaccccgaggcccagataggtcaggtggcccatcaggacctggtggtgcccctaaaccccctgccccagcaactcccagtgaacgtgctcccgccccagttgcaggcttaccaggggagccactagcggcaccccctacacctgaacctcccgctccagaacctcctgcaccagcctcccctcctacacccgaaacccccgctaagaaaaaatggtggaagctgttttga

SEQ ID NO: 13492 - RNA, 1587 nt, synthetic construct
  source 1..1587: mol_type = other RNA
atggcacaggataagcgccaggcgttgtatgaccggattcgggctacatcccgtgatgaggtggtcctggaagagatgattaggctaggtttttggcccgctcgaggtgaagtgccacacgaccctgccgacgaaattcgcgcccgcactgagatgcaacgcgagctgagcgcgctgcgaaccgaacagagccgactcgggaacctggaggcgctcaaaaaggaactgtacaaacgtcgcctggctgccagtaaggcgaaacaggctgagacacgcgcacgcagggaaagagagaggctggctagagccgagggatggaaaatccgaaaggcaggcgacatcgtgttccttggcagggaagtaagcgggggcctgtctgacacgacctgtgacgaggcgaagttaacaaagcagggcctcccggtgctgagaaccgctgtagatgtggctcgggctgcaggcgttggtgtgcctgagttaaggttcctcagctatgcccgaacaactagcaggatatcacactaccgtcggttcgccatacccaaaaaagccgggggagtgagggtgatttctgctcccatgccaagactcaagcggctccaacgctggttgctggattcagtcttgtcccatgtcgaggttcatgatgccgcccatgggttcagggagggacggtctatcgtgtccaacgccaaagcccacgtgggagctagagtagttgtaaatatggatctttcagacttctttccgggggttctgtttcctagagtgaaaggaatgttccgggccttaggatacggcgactttgtggccagtgtactggcccttgtcgccacagagcctgatatgcagaaagtcgtcctggacggccggacctttcacgtcgcagaagggccacgtaggttaccacagggtgctcccacctcaccagcggtgaccaacgtgctttgcagaaggctcgatcgcaggttgtttctggccgcccgaaagctaggcttcgtttatactagatacgcagacgacctcacattttcggcccatgatgatgcaagtgccggcagaaccgggcaactcttggcacaggcgcggtttatcgtggaggaggaaggcttcacgccacacccgaagaagactagagtgcttagacgcggtcggcgccaagaagtcacgggcatcgtcgttaatgatggactgggggttgagagagagaaacttcggaagttccgggccctgttgcacagcatccgggcaactgggattgaaggcaagacctggggtgacagtccagacgtgctggctagcgctcgcggctttgcctcctacgtggccatggtgtctccggaaaaagggagagcactactcggacaggtggccgaactggaggccaggtatggagcagcaaggccccctcgagcctccaaggaaggcatgcatgcaaaagccgcccctacctccgcaggacacgctactcccgttgctacatctgaggcaccccgtcccgagaatgtcccacctgaagctcctaagcccgaagctcccaagccagaggcagaggctcctaagaaaaagtggtggaagctgttctga

SEQ ID NO: 13493 - RNA, 1407 nt, synthetic construct
  source 1..1407: mol_type = other RNA
atgtcagaccgcagacaagcgttatatgacagaattagggcctcctctaaggatgaagtaatactggaggagatgatcaggtttggcttctggccagcagctgggttacctggcgatcccgccgaggaagtccgtcgacagggcgaactccagcaacgattgaccgccctgagggccgagcgagacaaactggccaatgttaacgaactgcgccgcgaagctaggaagcagcgtctgcgggcaagcaaggataaacggcgcgagacaaaagcccggagactacgggagagggcagctagagctgctgcatggcgcgccaggcaagcactggaactgacttttctaggggcagaggtgtcaggggggatgcaggacacaacctgtgatcgggccagacttgcggcccagggtcttccagcattcgcaacggcggccgaggtggctcaggcaatgggtataactgtgggggagctgagattcctggccttcgcccggagagctagccgtatctcccactacaggagatttacaatgccaaagaaatcgggaggcgttcgcgccatttctgcacccatgccgaggctcaaaagagctcagcactggctgctggcccagatcttggccaaggtcccgactcatgacgccgcccatggcttttgcgctggacgcagcattgtgacaaacgctcgccctcatgtcggagcggctgtggtggtcaatctggacctgcaggacttctttcctaccgtggaactgccccgagttaagggcctcttccgcgccctgggatatggcgagcaggttgcgaccgcctttgcccttttggctacagagcctgtgacagaggccgtggagctcgacggacaggtctggcatgtggctgcgagtgccgcagcacgcagacttccccaaggaagccccgcttccccagccattacgaacttgttgtgtcggaggttagacaggcggctccgtggcgctgctactgcattggggttcacatatacccggtacgctgatgacctgacctttagtgccactgcacctgcagcggtggagagagcaggcaagctcctgactcaggtacggtggctcgtgggccaagaagggtttgtggtccaccccgataaaaccagagtgctaagacgtggcaggaggcaggaggtgacgggtctggtcgtaaatgaacggctcggggtccctcgagatcagctgaggcgcttccgggcccttctccaccatctggacagacgtggcttagaaggagcccgatggggtgcctccggggatgtactcaccagtgcagctggtttcgcctcttacgttgctatgatcgatcctgttcggggagccccacttgtggcagaagtcgccaggttggctgcgcgacttgctccagcccgctga

SEQ ID NO: 13494 - RNA, 1647 nt, synthetic construct
  source 1..1647: mol_type = other RNA
atgcctgataaacgccaagaactgtacgagcgtatcagagcgagctctaaagatgaggtgattctggaggagatgattagactggggttttggcccgcccagggccatttgccagacgatcctgccgatgagatcagacagcgggcagcattggagcagcagcttgccgcgctgagaaccgagcaagctcgcctgcacaatatagaagccctgaaaaaagccctgcggaagcagaggctcgaagccagcaaggccaaacagcgggagactaaggaacggcgggaacgcgaacgagtagctagggccgctgcctggcgggaacacaaccagagggccatcggatacctggggcgtggggtttcagggggactcaaccagacggccgctgaccgagccgctttaaccaggcatggcgcgccggtcctagaaacagcggcagagctcgcagcagcaatgggcctgacgataccccagctgcggttcctcgcattcgcaagggcaacttccacagtgaaccactatcagcgctttgcaattcccaagaaaaccgggggcttacgccgtatctcggcgcctatgcctcgattaaaggccgcgcagaggtggattctagatcacgtcttagctggcgttgccttgcatgacgccgcgcacggatttagacctgctcgtagcatcgtgactaatgccgcaccacacgtaggtcgggacgtcgtggtcaatctcgacctcaaagacttcttcccaactctgacatatccacggatcagaggcgtgttcaggggcctaggctacggacccgctgtagcaacaatcctcgcgctcctgacctccgagcccgacattgatacggtggagcttgacgggcagacctttcatgtggcctcaggggagcgcaaacttccacagggcgctcccacaagccccatgatcactaatatcgtctgccgccgctttgacgctaggttggccggtgcggccaggaagttgggcttcacatataccagatacgccgacgacctgacctttagcggaccccgcaccgctgatgctggtgcattgctgtcagccgtgcgcatgattgctacggccgagggctttgccgagcatccagacaagacacgggttctgcgcagggggcgtcaacaggaagtgactggagtggttgttaaccagagacttgccgtcgacagagctaccctgcggcgattcagagccctgcttttccagatcgataaggacggccccgcaggcaagacctggaacgatgctcccgacctgttcgcagctataataggctatgcacactttgtgcacatggtcgatgccacaaagggagccgccctcgtggcccaagcaaaagctcttgctgctcggcatgggtggcgaccagcaagaaggccccctcctaagactagaggaggttctggtggaggcggaggtgggcctggtggatctggaccaggtgggtctggttccaggcctggcgaggctgaacgaaccgccacaagtaccggacccacaccgtccactgaaccggctcaacccgctcaaccagggccaccagatgctcctagtccgcccgatgcaccgagtcctgatgccccacctcctgccaagaagaaaaagtggtggcagattttctga

SEQ ID NO: 13495 - RNA, 1545 nt, synthetic construct
  source 1..1545: mol_type = other RNA
atggctgggcaacctacatcacgggaggccctgtacgagaggattcgaagcaccagcaaggaagaggtgatcttggaagagatgatccgcctcggattctggccagcccagggtacagttcctcatgaccccgcagaggaaattcggagaaggggagagctggaacgccagctggccgaactgcgcgagaagtcccggaagctctacaatgaaaaagtcttaatcgctgaacagaggaaagcgcgcctcgcggaaagtcgccggaaacagaaagagactaaggcaagaagggagcgggagcgtcaggagcgtgcacagaaatgggcggccagaaaagcgggcgagatcctgcacctgggggaagatgtgtcgggcgggatgtcccacaagacatccgaccccgagcttctgaagggagagggcttaccagtgctggcatccgccgaggaactggccaaagccatgggactggaggtgaatgcactgagattcttggcttataatcggaaagtatctagagtcagtcattaccaccggtttttgctaccgaagaagacgggaggattcagactaatatcagcccccatgccccgcttgaagagagcccagacatgggcccttgagcacattttcgctaaacttcgtgttgacagcgccgcacatggctttgtggccggtcgcagcattgttagtaatgcaaagccgcacgtaggggctgacgtcgtggtgaatttcgatctcaaggatttttttccaaccgtgacctttcctagggtgaagggagctatacgtcgcctcggctattccgagtctttggctacggccctcgccctcgtgtgtactgaacccgaccttgaagaagtggctttggacggcgttacatggttcgttgctagagggccccgtcatctgccacagggatctccctgtagccctgcgatcactaacctgctgtgccgacgactggaccggaggttaggaggactggcgcaggccctggggtttgtgtacaccaggtatgcagacgacctcaccttctcaggccgcggcgaagcagccgagtcaaaacgggtgggcaagcttctgagaggcgtcgccgatatcgtcgcccacgagggttttgtggttcacccagagaagaccagggttatgaggcgcgggagacggcaagaagtgactggcatcgtcgtgaacgataggccaagcgtccctcgagacgaacttaggaaattccgagctactctctttcagattgagaaagatgggccggctggcaaaagatggggtaacggtggcgatgtactcgccgccgtccatgggtatgcctgcttcgtggctatggtagatccggcccggggtcaaccattactggcgcgagcaagagctcttctagctaagcacggagggccctcaaagtctccaggtggctccgtccctagggtgccctctcctaacccccaaagcgtaaacgcccctgaggcaccaaaacctgctgcacctgccagtcccgcagctccagcaaagaaggggtggaagctgttctga

SEQ ID NO: 13496 - RNA, 1563 nt, synthetic construct
  source 1..1563: mol_type = other RNA
atggcatctcagccgagcactagggaggccctgtatcaaaggattcgggaaagttctaaagacgaagtgatcctggaggagatgatccgcctgggcttctggcctgcagctggagatgttcccaatgatccagcagatgaaattcgtcgccgcggtgagctgcagaggcaactggacgagctgcgggagaaagggagaagattatacaatgagaaggctctgattaacgaagcccggaaggcacggatggctgagagccgaaggaaacaagcggagacaaaagcccggagggagagagagcgaggggaaaaggccagtgcctgggctaagagaaagtccggcgagatactgtacttaggggagggcgagtctggtggcttatcacagaagacttcagatccctcaaaactggcacacttcggtctgcccaaattggataccgccgaacagctagctgctgccatgggtattgagataaaagcgctgaggttcctggcctacaataggcggacatccaaggtgtcccattaccgtaggttttttatccccaagaaaaccgggggccagcggcttatcagtgcgccaatgcgccggctgaagaccgctcagacatgggttttgacgaacatcttggacaaggtgactctgcatgaagccgcacacggctttaggcaggggagatccattgtcaccaatgccagaccccacgtggggtcagccgttgtgttgaacctcgatctcaaggatttttttcctaccgtgaccgtccgccgaatcaagggagtatttcgcgcgcttggctatagcgaagcagtggccacagcattggccctcgtgtgcagcgaacccgaagtagacgaggtcgctctcgacggagagacttattatgtggctcgagggcccagacacctaccacagggatcccctgcatcgcccggaataacaaatcttctgtgtaggcggctcgaccgtcgaattgaaggattggctcagagccttgggttcgtttacacgcggtatgctgacgaccttacgttcagcgccagagccgatagggccggttctgtgaatgtagggaaactccttagagcagtgaaagacatcgtggaacatgaaggcttcaacgtgcatcctgataaaacccgtgtgatgcgcagaggacgcagacaagaggtcactggcgtcgttgtaaacgaccggatgggcgcgcctagagctatgctacgcaagttccgggccactctctaccagatcgagaaggatggcccgatgggcaagaagtggggaaacggcggcgatctcctggcagctatccacggctacgcctgcttcgtcgcccaggttgatgccgacaaggggaaagccctcatggcccaggtcgacaggattttcaacaagtatgggaaacctcgtcgcccaggcggtggtggaggcaaaggaccaggtgggggagggggaaaaacccccgacgctgcacgaccagctacaggagccaccacacaaaagccagctgagcctgcgccagaagccccgaaaaagaagcctgcatggaagctgttttga

SEQ ID NO: 13497 - RNA, 1587 nt, synthetic construct
  source 1..1587: mol_type = other RNA
atggccgctggccagccttcgacgagagaagccctttacgagaggattagggcttcctcaaaagacgaatacatcctggaagagatgataaggcttggcttctggcctgcaagcggtgcagcacccaacgatccagccgacgaaatccgtagacggggcgagctgcagagacagctcgacgagctccgcgaaaagggtcggcgcctgtataacgagaaggcactcatagctgaggctcgcaaactgcgcatggccgagagcaagaggaagcagaaagagacaaaggagcgacgggaaggccagagaattgcgagggcccagctgtgggcacaacggaaggccaaggagctcctgtacctgggggaaggcgtatccggcgggctaagcgaccgggttagtgatgccgggaagctgaagacacatggccaaccccatatcgattctgtggagcagctggcacaggctatgggcgtcgaacttaaggcactgcgtttcttggcgtatagtagacggacctcacgagtcaatcattataggcggtttctgttgccgaagaaaacggggggccataggctcattagtgcgcctatgccacggttgaaaaaagctcagcggtgggtgttagaaagagtgctggacaaggtggctctgcacgatgccgctcatggttttcggaccggcagatctatagttagcaacgccagaccacacgtgggagccgacgtgctagtgaatctggatttaaaagacttcttccctactgtatccctgccgcgcgttaagggggtcttcaagtctctggggtactctgaagccgtcgctactgcattggctctcgtgtgcacagaacctgagatcgatgaggtcgtgctggacggaattacttattttgttgcccgcggtcaaaggcacctacctcagggcagtccagcaagccccgggattactaatcttctctgtagacgtctggaccgacgcttggccggactagcagccagcttgggcttcgtctacacccggtacgctgatgacctgtcgttttccgctcgccgacctgccgttggctcaatcaaggtggggaagctccttcgtgcggtggccgatatcattcggcacgagggcttcaccgtccacccagacaagactcgagtaatgcgcaagggctctaagcaggaggtgacaggggtggtggtgaacgataggcttagcgtcgacagagctacaatccgcaaatttagggcaaccttgtaccaggtagagaaagatggacccgccggaaaaaggtggggtgccccaggaggagatctgcttgcatccctccacgggtatgcatgcttcgtggcgcaggttgaccctcagagagccgctcccctcttagcccaagtgcgcagaatctttgaaaaacacggcaggccgttacgaggaggaccaggtcccggaaaacctccaggggggggtggaggaaaaccacccgaagctcaggtcgccggcaaaccgggtcctcaagcggaagctccccgtaccgagtccaaacccgaggccgagtcaaccgcccccaagaagaaacccttctggaagctgttttga

SEQ ID NO: 13498 - RNA, 1560 nt, synthetic construct
  source 1..1560: mol_type = other RNA
atgagtgccaagccaaatcggcgccaggaactctatgatcggatacgcaacagttcaaaggacgaggtcatccttgaggagatgatcagactgggattttggccccgtgccggcgagattccagctgatccaggcgacgaaatcaggcgaaggggcgaactccagcggcaactcgatgagctgcgacgcaaggcgagtcggctgtacaacgaggcatctctgataagagaagctcggaaacagcgcttagccgacgcccggaggaaaaagcaagaaacccgagaaagaagagagcgggaacgtcaagagcgagccgccgcatgggcagcaaggaaacagcatgaggtcgtgtatttgggggaaggcgtgtcatccgggctagctgaacacacgtccgatgtggggcgtttgcaggctgctggactgcctctcttcgcagaccctggagctcttgcccaagccatgggcgtacccctgggcgaactgcgttttctagccttccaccgacgagtcgccaccttaacccactaccggcgatttcagattgccaagaaatctggtggcacaaggctcatttctgctcccatgccgagactcaaaagagcgcaggcctgggtgctccggaatgtcctcgacaaggtcgcactgcacgaggctgcgcatggctttagggggggcaggagcattgtaagcaacgcagctccgcatgtgggagcggatgtggtgataaatctcgacgtcgaaaacttctttcccaccatcacactgccccgggtaaagggggttttcagggcgttgggctacagcgaggccatcgctacgattcttgccttactgtgcaccgagcccgagacaactgaggttgagttagacgggcgcacctactatgtgggtcttggggatagagttctgccacagggtagccccgctagcccagctgtgactaacgccctgtgtcgccgcctggacagaagacttgatggtctggccgagcagctgggtttcgaatacacacgttatgccgatgacctcaccttctcacggagaggcgacatcaggtcgacagaggtaggggagctactggggaaggcagctgatattgttagacacgagggatttcgggtccatcctgacaagacgagggttatgagacgcggccggcagatggaggtgactggagtggtggtgaatgacaagctgagcgttgacaggaagaccctgagacgctttagggccgcactgttccaggtggagaaagacgggcccgctggaaaacggtggggagatggccccagattgcttgcgtctatgcacggctatgcctccttcgtgacaatggtcgatcgcgcaaggggggaacctttgttgaggcgagtgcaggcccttatcgagcgctacggagtcggagcctcaaatgcgtccgcagcccctggtgaaggtaaagccgccgcaccaactgccactggagaggcaccctccgctgcacagacagatgctccggaaccagaacctactcctccagctcctcaacctaagaaaaagaaatggcgcctgtggtga

SEQ ID NO: 13499 - RNA, 1527 nt, synthetic construct
  source 1..1527: mol_type = other RNA
atgtctcagaggcctacaacaaggcaagagttgtacgagaggatcagggccagttcaaaagatgaggtgatcttggaggaaatgattagactgggcttctggccggcccagggagaaatgccaacagacccggcggaagacatacggcgacgaggcgaaatcgagcgccagctggaggagctgagacgcaaggcctccagattgtataatgagaaatccctgatacaggacgcgagaaagcgacggatggccgaaagcaagcggaagaaagaagagacacggctgaggagggagcaagcgcgtagggaaagggcagcagcctggagggaacgtaagcagaatgagttggtgtaccttggcgagggcgtgagtggaggactgggacagcatgaaggacatccagagcgtctggctgccgcaggactacctgctattgctgacgccagggagcttgcccgcttaatgggggtgagcgtgggcgatctgcggttcttagctttccaccgggcggtggcaacgatcactcattatcgccgctttcagatcccaaagaagtctgggggaaccaggctaatctcagcgcccatgcccagactcaaagcagctcagggctgggtcctgcgatctatactggatcgggtggacctccacgctgctgcccatggttttaggcctgggcggtccattgttagcaacgcccaaccgcatgtcggggcagcagtggttgtcaacctggacctgcagggtttcttccccactattacactgccccgcgtaaagggggttttcgcagccctcgggtactcagaatcagttgctaccattctcgccctcctctgtaccgaacccgaaacctttgaggtagagttggacggaagaacctaccacgtgggcctcggccctagagtgcttccacaaggcagtcccgcttcccccgccatcactaacgttctctgccgcagactggacagacgcctccaggggttggccgatcagcttgggtttacttacacccggtatgcagatgatctgacatttagccggaagaaaggcgcgagtagcgccgaagttggggagatgattaggaaagccgtagacatcgtaggccacgaggggttcacggtgcaccctgacaaaacccgcgtgatgaggcgggggaaccaccaagaggtcactggcgtcgtggtgaatgataaagctagcgtcgatcgtcggacgctgcggcgatttcgcgccacactattccaggtcgagaaagacggcttagcaggcaagagatggggagctggtggtgatttgctggcttcgatgcacggctatgcctcctttgtggccatggtcgatcgagagagaggggccccccttctggccagagtgaagagacttatggctctgcacggtcgaggcccatctggaggtggaggtggcggaggttctgcaggacctcgtcccgcagccactacccctgaaccagcccaggctccagctcctgcaccagaaaagaagaaacgctggaagttatggtga

SEQ ID NO: 13500 - RNA, 1572 nt, synthetic construct
  source 1..1572: mol_type = other RNA
atgagccgtcagccctctacaagagaagagctctacgagcggatccgcaattccagcaaggacgaggtgattctagaagaaatggttcggttgggattttggccagccgcctctgggcaaccaggagatccgggagatgagatcagacgccgaggcgagttgcagagaaagttgaacgatttgcgtacgaaagtcagtcgactttacaatgaacagcagttgatcagcgatcagcgaaaacagaggctcgcggaaagtcggaggaaaagacaggagactaaggaacggagggaacgggagagacaacagaaggcagagctgtggaggcagcgcaaggagagggaggtgctctatctgggtgacggggtcagtggaggcctgctggaacgcaaaactgatcaggctagactcgtgggaggagggctgcctgttttagcggggcccgaagcggttgctgcctctatggggatcacagtgggcgctctccggttccttgcctactccagacgagtgtcaaggatctcgcattaccgcaggttctctatcccaaagaaaacaggtggacgacgtttaatttcagcccccatgcctcgtctgaaagccgcccagagatggattctggagaatatcctagaaagagtacccgtgcacgaggccgctcacggctttttagagcgccgctccattgtcactaatgcggttccacatgtgggcgccgatgtggtaataaacttggatcttaaggacttcttccccaccgtcacgtacgaaagagtcaaaggcttgtttgtatctctcggctattcggagtccgtggcaaccgttctggctctgctcagcactgagcctgaggtcgccgagctggagctggatggcaactcctactatgccgcacagggtccccggcaccttcctcaaggctcaccagcctctcctgcgattaccaaccttctgtgccggagactcgacaggcgactacaagggctggcacgaaaacacggctatcagtacaccagatatgctgacgacctgacctttagcgcacgggggatggtgagcacacggagcagtgaggtgggccgcttactgaggggtgtggccgacatagtaacgcatgagggtttcgaagttcacccggaaaagactagggtcatgagacgtgggcgtaggctcgaagtgacaggtatagtcatcaacgacaaactttccgtggaccgaaaaaccctccgccgctttagggccactctgtttcaggtcgaacgggacggcccagaggggaaaaggtggggagaatccaaggatctgatggccgctcttctgggctatgcctcattcgtggcaatggtggaccctcagagaggacggcccctgatttcccgcgttcgggcagtacatcgcgcacacgggtaccaaccggctgcaccaaagcggagggctgctcctcctacagccgcttcaactgcaccttctagtcccgccagagacaccaccgctagcgtgccaaccccagacagggatcccgatcccacacctcccccaggaaagaaaaagaagaagtggaagctgtggtga

SEQ ID NO: 13501 - RNA, 981 nt, synthetic construct
  source 1..981: mol_type = other RNA
aagaaaacaggcggaatccgtaagatcagcgccccaatgccacgcctaaaaaggctgcaggagtggattctctcaaacatcttggaaaaggtgccgctccaggatgctgctcatggcttcaggcgggggaggtccatagtgaccaatgccgccccccatgtcggacaggacgtcgttctcaacatggacctggaaaacttcttccccacaattgattttccacggatccggggcgtgttccggaaactggggtactcgggacaaatcagcaccgttttcgccctgatttgcagtgagccagagattgaggaagtgcagcttgacgggcaggcatatttcgtggccaccacagacaggagacttccgcagggtgctcccacttctcctgccataaccaatatcatttgtcgagggctcgacgcacgcttaacaggcgtggctcagcggttcggatttacttataccagatacgccgatgacattacgttcagtgggagtggcggtgcgctgcaacagatcggtaagattctccgccagtgcaaatatatcatcgaacaggaggactttaaggtacaccctcagaagtcccgagtgtttagaaagtcatccagacaggaggtaacgggcctgagcgtcaacgaaaggctaggcatcaatcgccaacttctgagacgtttccgcgcattgttatttcagatagatagagatggaccttccggtaagcattggggacactcaactgacgtgatgacctctatagaaggcttcgcgaattttatcgctatggtgaatccagaccaggggcagatttttcagcaacgggtccgccaactgcacgagaagcacggccgagggcaaagaatgtacaaccagaggaataggtggaacgatcaggaggttgtcactcacttgcctgattctagcgaaaaacctgagctgcccgcagagatgaaaaagaaaccctggtggaaattttggtga

SEQ ID NO: 13502 - RNA, 1557 nt, synthetic construct
  source 1..1557: mol_type = other RNA
atgcctactcgccaggagctgtacgacaggattcgagagtcctcgaggcaggaggtcatcctggaggaaatgatccagctgggcttctggccatctggttcacaggttccctacgaccctaaggaagacctgcgccgggaacgtgagctccaacaggagctccagcagctggcaaccaaggacaggaatcttcaaaacattgactatgtccgcgcccaggctaggaaacagagacttgcagaatccagacagaaacagaaggaaacaaaggagcggcgactgcgggagaagcaagaacgggcaagtgcctggcaggcaaggaaagtttctgagattttgtatctgggagaaggagtctctaatagcctcaaccagagagagtccaaccacgagaaacttagctctgccggtttgccaagatttgatggagtggaggacctggcacagctgatgggggtcacagtcggagagctgagattcctcgcctacgaccgcgctgcatcgcaggtcacgcattaccgacgctttggcctcaaaaagaagaccgggggcattcgggagatttctgcgccaatgccgagactgaagcgcgctcaggagtggatcctgaagcaaatcctcgaaaaggtcgaagtgcacgactcagcgcatggattcaggccggggcgctccattctgaccaatgccaggccccacgtaggccaagacgtggttatcaacttggacctcgagaacttctttccaactgtgacattccctaggatccgaggtgtgtttaggtcactggggtacagtggacaactcgctacacttctcgctctcatatgctccgaacctgagaaatcagaggtgatcctggatgggcaacactatcacgtggccagatccgagagacggttacctcagggcgcaccaagtagccccgccttaactaatataatatgtaggggccttgatgccagattggctgccttggccagtcgactagagatgacctacacgcgctacgccgacgatatcactttcagcggctctggcgaagccacccagactatcggtaaagtgctaagacaggctcgttatatcattgcctctgaggatttccgtattcatccgagcaagacccgcatattaaggaagggctcacgccaggaggtaacgggcctgatagttaatgagcagttaggcgtaaaccgggaactattgaggcgttttcgggctcttctgtaccagattgaagtgagcggtcccgcagggaagcattggggagggaagcacgatgttatgacaagtatcacaggcttcgccaattttgtacagatggtggatcctgataaaggccggcccctgcaggaaaaagtggcgtccctgcaaaagaaacatgggatcggacagagacggtatgctagccgtactccttggaacccaagcaccgtggcgcctgatcaacctagcaagcccggaggggaagaagtggcttatccagactccggtccacgggatagattccgaaatgggacccccgaacccaaaaaaccctggtggaagttttggtga

SEQ ID NO: 13503 - RNA, 1575 nt, synthetic construct
  source 1..1575: mol_type = other RNA
atgaccaccagacaggagatttatgacaggatcagggaatctagtcgggacgaggtgatcttagaggagatgattcggttagggttttggagtcgcgacactgacaaaccggaggatcctgctgaagatatccgaaggcaaggggagttggagcgggagcaacggcggttaactcaagaggcggctcgcttgcgcaatatagaggccctccacgaggaagctaggaggaagagaatggaggaatttaggagaagacggcaggagacaaaggaaagacgagaacaggaaagggtccagcgcgccgcagcttggcaagagtccaagcagaaggagattgtctacttgggcgactcagtatcaacgaccctcaaccagcagacgactgatgaagaccgtttgcggtccaatgccctgcctaatcttcaatctatagttgaagtggccgaagcaatggagatttccgtcggggagctgaggtggctggcatttcacaggcgcaccgccgaaataactcattatcggaaattcgctgttccaaagaagacaggcggagtgcgagagatatccgcgcctaaaccccgactgaaacgcattcagcattggattctgcatcacatcctggaccaggtcgaggtacacgatgcggcccatgggtttcgtagagacaggtcaatcgtgactaacgcacagcagcacaccagcagcggagtggtggttaacgtggatatccaggacttttttccaaccgtcactttcagacgtattagaggcgtgttcaagagtctgggatattctgggcagatctccaccgtttttgccctcctttgctcagaacccgaacgtcgggaggttgcacttgatggccgcacgttccacgtagcccgaaccgagaggagacttccccagggtgctccaacatcgccagctctaacaaatgtgatttgtaggggcctcgacgcacgcctgcacactctgagccagaaaaacggtttcacctacacacggtacgctgacgatatgacattctccgcctcgggggaagcaacacagaatgtaggccgcgtgctgcgacaggtgaagcatgccgtcagtcaggaatcatttcaactgcatcctgacaagaccaggatccagcgcgcctctcggagacaggaagtgacgggcctcactgtcaacagcggagtgagcgtgccccgggaaacactgcggaggttcagagccgtactcttccagatcgatagagatggtccaggaggcaaacggtggggggctagccagaacgtgatggtgtctatcgagggcttcgccaatttcgtcgccatggttgatcccgagcgcggagcgaagctgcagcaaaccgttgctgagctccaggaccgccacggcagaggtagaggtacagtcactgtgaggcagcgttggaccttccagcgaccagaacccgtcagctctccgcctggaccaagcgagacagccgtgtccaaccctctacaagccgcagcatccccccctggagcggatcaaagtgctcctaaaccccgaaagccgtggtggatgtggtggaaattttggtga

SEQ ID NO: 13504 - RNA, 1599 nt, synthetic construct
  source 1..1599: mol_type = other RNA
atgagaagcaggcaagaaattctggatcagatccgggaaactagtagggacgagtttatcctggacgagatgatacgccggggattctggccgaaggaaggcgagcttcccgaagatcccgcggacgaaattagacagagggaggagctgcggcggaaattacactcgcttactacggaggatcggaagctgtctgatgtggagaaactcaaacgcgaggccagacgacagcgactggccgaaagccgtctgaaaagacaggaaacaaaggaacggaggctgcgagagcgtgccgagaaagccgaggcttggagagagcagtatactagggatatcgtttatctcggctccgacgtaagcggtggcttgaaccagcagaagatcgaaatcgaggaactccagaagagaggtctgcccgagctacattccgtcgaggagctcgccgaggctatggaaaccacagtggccgaactcagattcttagctttcgaccgtagaacatccacgactactcactaccagcgatttgctatccccaagaagacaggaggcattaggaatataagtgccccgatgcctcggttgaagcgggctcaggagtggattctgtggaacattctcgacaaaattgaactgcatccagccgcacatggattccggaccggcagaagcatcgtgaccaacgcagaaccccacgtcaaggccgaagtggttatcaacgtggacctcgagaatttcttccccacagtgacctggcggagagttcgcgggcttttcaggaaatttggttacagtgaacaattggccacagtgttggcgctgatctgtagcgagcctgaggtaaccgaggtgcagttagaccagaaaacttattacgtacagcaatcagaacgcaggctcccccagggcgctccttcttcacctgcaataaccaatatcctttgccgcggccttgacgcccgtttaacagggctagccgagaagctgggattcacgtacacccgctacgccgacgatctgacattcagccatgcaggacagggttcagcggctgtgggtcggatgctgaggcaagtgagttatgttgtggagcaggagggatttcagctgcaccctgagaagactaggatcttccgcaaaggatctcgccaagaggtcactgggctggtcgtgaacgagcgtgtgaatataccacgcaagaagctacgccagtttcgggcaaccctgtatcagattgagaaagatggcccagaaggcaaacactggggcaatagcccaaatgttctggaagctattgaagggtacgcaaattttgtggctatggttgacccggagaaggggagagaatttcaacttcaggtcaggaccatcatcgagaaggaggggaggacacaacgaaatgatgtccaacgcgatagatggaaccctaacttggcatctgaggagatttccgaaattccagcgaccggggcagtgcctccttccgtatcctcattgctcacgacccaggaaatagaaccagtcgctcccgccgcaggagaggtctttgaatctaagagtaaaccatggtggatgttttgggcccgatggttcaactga

SEQ ID NO: 13505 - RNA, 1566 nt, synthetic construct
  source 1..1566: mol_type = other RNA
atggattcccagccaacatcaagacaggagctgtatgaccgaattcgggagagcagcaaagatgaagtgatattggaggaaatgatccggctggggttttggcgcgacgctgaagctgtagagggagatccagcagacgagattaggcggaagggtgaacttgagcggcaactgaaggccctgagtacagagagggccaggctccagaacgtcgaagcccttaagcgagcactcagaaaacaaaggctggaagatagcagatctaatcgcaaggaaactaaagagaggcgcttgcgtgagaggcaagagcgcgccagagcctggcagcagagaaagaccagggaaatcgtgtacctcggtgatggcgtttcagccggcctggcagagcatgagctccaacgggagaaacttcaggctgcaggactgccagttgtggctaccccggacgaactagcccatgccatgggagtgtccctgggagaactgcgcttcctggcgtttagtagacgcaccagcactactacacactataagaggttctttgtccccaagaaaacaggcgggcagcggctgatttctgcacccatgccaagacttaaaaggtcgcaggagtggattttgcagaacatcctcgagaaggtacccctgcacgatgcagcccatggcttcagacgcggccgttcaatcgtgtccaacgcccgccctcatgtggagtccgacgtcgtggtgaatctcgacctgaaggacttctttcccacagtgacgtatcggagaatcaagggcatgtttcggaatcttggctattcagaggcgattgccgtggttttagctctcatctgtagcgagccagacgtggatgaagtggagctggacggccggacctactacgtggctagacagcagcgtttactccctcaaggagcacctaccagccctgccatcacgaatattatatgccggggtctagatggtagattggctagaaccgcagagatgctggggttctgctacacaaggtatgcggacgatatcacgttttctggctctggagacgccgccgctaatgttggaagggccctgaggcggattgggtacgctgtagagaaagagggcttcgaggttcacccagataagactcgcgtcttacgccgagggcggaggcaagaagtcactgggctggtagtgaacgacagacttaatgttagtaggaaactgctacgccggttccgagcgaccctctttcagatccaccgagatggtcctgcagggaagcgatggggcaacagcaacgatgtcatagctagtatagaggggttcgccaacttcgtcgccatggtggaccctgaaaagggcgcagggtttcagcgaaaagtccgcgaaatcattaaatcccacggacgtggcggaggtcgtgcttacccccagagatcccgttgggtgcccaagacacctccagccgaggggttggcgatggaagaagaacccttgaccgctgaaactgtgcagggaagggtttctcgagtccagaagccccgggagaagaaaccgtggtggaaattctggtga

SEQ ID NO: 13506 - RNA, 1530 nt, synthetic construct
  source 1..1530: mol_type = other RNA
atggcatcccaaccaactacccgccaggagctttacgacagaatccgagaaagttctaagaacgaagtgatactggaggagatgattaggctcggcttctggccacgcggagacacaatacctgaagaccccgctgatgaaattagacggcgcggcgaactggagagacaacttcgatcactcgtgaccgagcgcgctaggctgggaaacgtggaggccctgaagaaggcgctccggaaacagcggctggaccaaagcaggcagaagcagaaggagactaaggaaaggcgccttcgtgaacgggccgagagagcagaggcttggaaaaagagaaaagcccacgagatcggttatctcggcgaaggggtaagcgccgggttagataaccaccaaggagatcatgaaaagctgaccgccgctgggttgccggtcttcgatacccccgagcagttagctcgagctatgggaattggcgtaggagaattgaggtttctggctttcaacaggcgcacgtctaccacatctcactatcgccggttcttgttgcctaaaaaaactgggggacatcgaaagatcagtgcccctatgccaaggctcaagagagcacaggaatgggtcctcgctactatcctggagaaggtggctctacatgatgccgcgcacggatttaggagaggccgcagcattgttacaaatgcccggccccacgttggtgccgatgtggttatgaatctggatctgaaagacttttttcccactgtagtctacagacgcatcaaaggggtctttcggaatttaggttactcagagtcagtggcaaccgtactggggctgctctgcagcgagcctgaagtggacgaggtgcgtctcgacgggagaacatactatacagcacgctcgaaacgttttctgccacagggcgcaccaacgtctcctgcactgaccaatataatctgcaggggattcgatgcccgcctttccagaaccgccgcggacctaggctttgcctatacccggtacgctgacgatgtcaccttctccggccccggtttgccggctgagaacattgggcgtgcccttcgccggattgaacatatcgcaggggcggaaggcttcgaggttcacccaggtaaaactcgtgtactgaggtcctgttctagacaggaggtgacaggcctagtggtgaatcagcgggttaatgtgagccgaaaaatgctgcgaaggtttagggccactctgttccagatcgagcgggatggcccggcaggcaaacattggggccacacggacgatgtgatcgctgccatagaaggtttcgctaactttgtcgccatggtggacgcagagaaagggaagggattcaagcggcaggtggaacgaatcattcaaaagcacggaaggggcggaggtagggtcagagttcagcggtccagatgggtcagttcacctcctccagtggccgccgtcgtggacacagttgagagccctcccgagcccgagaaaaagaagccctggtggaagttctggtga

SEQ ID NO: 13507 - RNA, 1530 nt, synthetic construct
  source 1..1530: mol_type = other RNA
atgacagatcccccaaggacgcgacaagagttgtatgacctgattagggagacaagtagagaagagttcatcctggaggaaatgatcagactgggcttctggagtgagtcgaccgcgcccgaaaaccctgcaaacgagatcagacgtcaggccgaactgcagcgggaacttcagtctctgctcaccgagaatcgccgattggtagatctggacaaagctaagaaggccctccggagagaacgaatggccgagagcagaagacgccagaaagagacaaaggagcgccgtgaagccgagagacaagctcgtgcggccgcttggcaagccgagcaagaacgctctctggcctacttgggtgagggggtgtcagctggcttaatgcgttacgaagtagacgatcggcgccttgctcgcaatggactcgccggaaaccctttggcaacgccactcgcgctggcacaagctatgcagatctccctgggtgagttaaggtttcttgccttcagccgccggacctcccagactactcattatcagcggtttcagatacctaagaagacgggcggcctcaggtccattagtgctcccatgccacgactgaaacgggcccaggaatggattttgcgtaatgtgctcgagaatgtcccgatgcaccccgcggcccatggttttaggacaggcaggtcgatcataactaacgcacagccccacgtcggcgcagcaattgtcgcaaacgtggacctgcaggatttcttcccctcagtgggctaccctaggattaaggggctcttcaggaccctggggctaagcgaggcgactagcaccgtcctcgccctactgtgtagcgaacctgagatcgacgaagtggtcctggatggacagacatattacaccgcccgctccgagaggcgactaccacaaggagctccaacaagcccagctatcaccaacttactgtgccgaggccttgacgcccggctgcaatccaacgcagagaagttgggttttgtgtatacccgctacgccgacgatatcaccttctcctctcagaatgcccaggctgacgttgggcgggctctgagaagaatccgccacgtcgtggccagcgagggatttaccgttcatcctgataaaactcggatacttcggcgggggtccagacaggaggtaactggacttacagtgaatgatagactgggtgtgagccgggaactgctcagacgcttcagagccgttgttcactcagtggaaaaaaccggccctgccgggaaacgatggggggaatctcctcacctgatgagttctctagccggatttgcaaactttatagcgatggtggacccggaaaaaggaaaaccatggcaggctagggtggccgctctcattgagcagcatgggcgcggcccggacttaaggtcacagaggaagcggtgggtcagtccagttcccgcagctgcagcagctccctcaacagaaactgccagcaagccctctgagtcttccaataggccttggtggaagatttggtga

SEQ ID NO: 13508 - RNA, 1518 nt, synthetic construct
  source 1..1518: mol_type = other RNA
atgtctaggcggccctctactagacaggagctgtacgatcgaatccggcagagtagtaaggatgaggtgattattgaagaaatgatccgctatggcttttggccaaaacaaagcaatctgcccaatgacccagccgaagagctccggcgaattggcgagctggaacgcaggatcagtgccctcgcaaccgaggcctccaggctgaacaacgtggacgccatgcggcgtgaagcgcggaaacgacgcatggctgaggcaagggcacgccgagaagagacaaagcggaggcatgaagcccagcgtagagctagggctgaagcgtgggccgctaaaaaacgggaggagatcgtgtacctgggagagggatttagcggcggtttgggccaacgagagggccagtctctccctgggctccctgatttacaaggggccggtgcccttgctagggcaatggaaatcgaagtgggacagctgcggtggttagctttccaccgccgcgtgagtgctaccacccactacgttcgttttcagataccgaagaagactggcggcgtgaggaacatttccgcccctatgccaaggttgaaacgggctcagagatggataaaggagcagattctggacaagatcgaactacacgaggctgcgcatggttttgtccccgggcggtccatagtgacaaatgcatccgcacacgtcggtcgtagggtggtcatcaatctggatctccaggacttcttccccaccctaagcttcagtcggatttatggcgtcttcaggtcttttggctatagccccgaagcttctacgttactcgctttgctgtgcaccgagcccgaggtagcagaggtcgaacttgacgggagaacctggtatgtgcacacaagcgaaagacgcctaccgcagggagcaccatccagtcccgcgttaacgaacatcgtggcacgccggcttgacaggagactcgctggcctggcggcccatctgagcttcacttacacccgctacgcagacgacctcactttctccagcgacgcggcagatgcctccatccatcgccttattcgcgccgtggaaggcatagtttccggagaaggattcgtggtgcaccctggcaagactagagtgatgcgtagagcctcgcgacaggaggtgaccgggcttgtcgtaaacgataggttgggggtacctagacggctggttagacgatggcgcgccacactgttccaagtcagaagagacgggcccggggggaaacgattcggattgggatcagatgtctttgcctcactgtcaggttttgcagcctttgttcacatggtggatgaagccaggggcgccagaatgctgtcggaggttgccgaggttgccgctgctcatggatgggctccgcctccaagaaggtctacagagacgcgggctacagaggccagctcagaggcctcttcagaggccccaggcgtaccagcatcacctagcgccggatggggtgggcctacttgggagtggcccctgtga

SEQ ID NO: 13509 - RNA, 1665 nt, synthetic construct
  source 1..1665: mol_type = other RNA
atgtccgaacgcccgcaggatcggcaggaactctacgatcgtataagagagagctcaaaggacgaagtcatcctcgaggagatgattcgatacgggttttggacccaggaaggcaggcccgatgatcctgccgaagagatccagcgcaagggcgagctagaacggaccgtggctgcactggccacagaggcttcaagactcagagatgtcgacgccatgaagcgggccgctcggaaacagcggatgcaggaggcgaaagcgcgcaggatcgaaacaaaagaaaggcgggaggcacaacggcaggccaaggctaaggcatgggccgagagaaagaccagagagttgctgtatctgggcgccggcgtatctaatgggctcggccaacaggcagagcagatccagcccggactaccatccgtgccctcagctccggacttagccagtgcaatgggtatatctctgggggagctgaggtggttggcattccacagaaaggtgagtacaacctctcactatgctcggtttcagattcccaagaaaaccggaggaacacggctcattagcgcgcctatgccgcgtctgaagaaggcccagcattggattcgggccgagattttggaaagggttgaagtccatgaggcggcccatggcttcgttcgcgggagatcgatcgtgtccaacgctgccgcccacgtaggacagagggtcgtgatcaatcttgaccttcgagatttctttcccagcgtgcactacccccgagtgttcggcctgtttcgctcactaggattcagcccggagacgtctacagtgctgagcctgctgtgcacagaggccgaggtggaggaagttcagctggatggaaggagatggttcgtccacgccagtgagcggcgccttccacaagggtcaccttgttccccagcactgaccaacctcgtgtgcaggaggttagaccgacgcctcactgggcttgcaactcaactcgggttcacctacacgcgatatgcagacgacctgactttttccagtactcgtgacaatgcccaggtaaacagattgatcagagccgtcgaacacattgttgatgacgagtctttcactgtacatccggacaaaacgcgcattatgagaaggggacgacggcaagaagttaccggcctggttgtgaatgataggctgggtgtcccacgtcgtctgttgaaacagtggagggctactgttcatcaaatccggcgagatgggcccgccggaaaaagattcggtcttggtccagacgtgatggcaggcctcacaggctttgctgctttcgtgaacatggtcgacgccgcgaaaggtcaggcaatgttgcagcagatggctgagcttgctgtgtccagaccagcccctccagcgccacaacctcgtccaacacccccagcagctgctcctttgcctccacccatgccagtggcagaacccgcccctacggatgagcccgtccgattaactgagtccagcgcccccgttttaaggcgcacacgcaccctggacgaacctgagccccctctgacccaccaggaaactgctaaaaccctgatagacgagagtcgctctgaagtgcctgaagtggtgaggcctcgcaggagatggtggcaattttggaagtggtttagcagacggggctga

SEQ ID NO: 13510 - RNA, 1641 nt, synthetic construct
  source 1..1641: mol_type = other RNA
atgactcagcccagaaccagacaggagctgtacgacatcatatcccagacatcgaaagctgagttcatcctggaggagatggtccggctggggttttggggagataggcccgtggatccagggggtgcccataagcgcaggggcgaaattctaaaacgactgagcgcccttcagtcagaggcagcccgtactcagaatcgggaggctgtgctaaaagctattagacgggagcgaatggcagagtctcgccggaagcgcgaggaaaataagcaggcaaggatcgaagccaaacgagccagagccgaagcttggagacagcgcaaagccaaagaaatcctgtatcttggcgagggagtcagctttgacctgagtaagaccgctaacaatatggacgcctggcttggagctgagcctgagcctgaggattaccgcgagcgcctggaaggcctcagtgcatccgccctcccgcaacttaagtccccccctgacttggcgagagccttggggatttccctcggggagttacgcttcctcgcttttcaacgggtggtgtcttcccagtctcactacaggcagtttcgcatcgctaaaaagactggcgggctccggacaatctcagcacctatgccgagactgaagagagtacagcggtggatcctcgacgagatcatcaacaagatagatgatatcgggttacacgacgctgcacacggtttccgagctggcaggggtattctgtcaaacgcggctccccatgtgggtcaagccgtagttataaacatggatcttgccgacttctttcctactataacctttagtcggacgagaggccttttcgccagcatgggctacagcccttctgtcgccgtcattctcgcattactgacgaccgaggccgatatcgaagcggtggaactggatggaaggacttggtatgtgcgtggcggcgaacggagactgccacaaggggctccctcgtctcccggaatcacaaatctgatttgtaggcgcctcgatgcgcgtctgagcggctatgcagcccagcacgggtggacctacaccagatatgccgacgatttgacgttcagcggagaggggcaagacttgaaccagttgttatgggtggcacggcggattatagaggatgagggtctgcgtattaatgaagacaaaacacggattctgcgcaggggaaggaggcaggaggtcacaggcttgatcgtaaacgatcagttaggtgtgcctcgacgagccctgagacggtttagggcactgttgcatcaagttcgtctcgacggcccaaaagggaagcgatggggacagggcgaggacctgttcgccagtatgatgggatttgcggacttcgtgtacatggttgacccggctaagggagcacccctacgcgctgaggttagggctcttcaggcgagatatccgtggagggccgctctcgatgaagcacccctctctctgtcaaagccaagcgcaccactgatcgccgcaacccctgaggacgcacctacaccagaagatgctccaactccccccgaagccgcccaggaaattgaagaggtggaagaagcctcccccacccaggaagcccaacctgacccaaatagaccatggtggcgcctgttctga

SEQ ID NO: 13511 - RNA, 1527 nt, synthetic construct
  source 1..1527: mol_type = other RNA
atgaccaggcccagccgcgaagagctctaccggaggatcagggagtctagcaaagactccgtgattcttgatgagatgttgagattaggcttctgggacagcgaagagggtgcgaatgacgtgccagaggagctgatcaggcgagaggctgagctgcgccaggaattgcgcaagctcaccgctcaacagaggagatacgagaaccgagacgctgcacttaaagccatgcggaaagagagactgcgggagtctagagagaaaagagcagctaataaacagcggaggaaggaggaacgcctggcgagagcaatggcctgggacgagactcagaaaactcatattgtttatctgggggaggacgtgagcactcacctggaaaagcttgattacgatgccgagaagttagccaagcacgcccttccagactttcctgatcacgttgctctggcagacgccctcggcgtgtctatggccgagttgcgcttcttagcttatcatagggaggtgtcaaccgtaacacactatcggcgatttcagatgccaaagaaacgagggggtttccgcaatatctctgcacctatgccccggctcaaaagagcccaaacttggatactcgagaacattctggatcatgtgcctctgagggatgaagcccacggatttcggccttcgcgaagtattgtatcaaatgctcgtccccacgtgggacaggacgttgtgatcaacatggatgtcaaggactttttccctaccgtcacactgtggcgcgtgttcggtgtctttgaaagtttgggctatagcccatccgtggccacgattctggccctcctatgtactgaactcccagttgaagaattggaactcgacggcaagacatggtacgtggccacgggggaaaggtgcctacctcagggcggaccgacatcacccgcaatcaccaacatcctttgccggcgtatggatgcaagactcgcaggaatagccgataagcatgggtttgtatacacacgatacgccgacgatcttacattcagtgcctccggggaagcagctgaagccgtcaccaagctgctgtggcatgttaaaaccgtcgtgcaggaggagggattcgagctgcaccccgacaagcaacggatcatgcgcagcggaagacgtcaggaggtcactggcttggtggtgaacgacaggctatctgtgcccagagacgatgtccgggctttccgggctttactgcacagggtcaagaccgccgggctggagagagctcattggaagggtgagagtgataatctgctggatcgtatacacggcttcgcgtcattcgtccacatggtggacgccgaacgctatgccgaactgcgcgccgaagccaaagaggtactcgatgcacatgggtacgcgccgcagcctgttccacccaaacccaaatccgaaaggcaagatgcatccgcggaaggcgacggtgctgctaagccaaaaaagggcctgtgggcgaagattaagggcttttttgcaggagctgactga

SEQ ID NO: 13512 - RNA, 1257 nt, synthetic construct
  source 1..1257: mol_type = other RNA
atgggggaaagggagaaacctggagctagacagggtgctgggaccccttccttggaagaccgggagcaggagtgcagggcgatagaacaagccgcgctggccgcacttgacagggatctagccgaaaaacgtctggacgagggactcaagcgagaacactggtatgagcacctcattgctgctcggcctcgtcggggaaagaggaggtttccctggaaacgaaaccggaagccaaggcccgttttttccgccgaagagcaccgcgttaagttcgattgcccaccactccctagactcgaggacgtggctcatctgctcgacatccccctggccgagttacagttcctggcctttggtgatcgaagactggaaatcagccattaccggcgctttgccatcagcaaaaagagtgggggccaaaggcagatcgctgccccgatgccacgcttgaagcgagtccagcgaatgttgtacgagcagctctttcagcagattcccttacaccctgtttgtatgggattccgccctgggcggtctattgtggataatgcaaggccacacgtgggtgccgacgtcgtggtaaacttggatcttcagaatttcttcccgggcattccttatgctcgcgtcaggggattcctgagagcaatggggtacaacgccgctgttgcaacatgcctggctagactggtcacagagcccagcgtttcgcgtctgcagtggcgtgggcggtcttttacggtggagactggtccgagacgcctaccccaaggtgcaccaacctcccctgccgtggctaatgcgattgcgtatcgtctcgactgtcggcttatgggcctggccaaagccatgggttggcggtactcaagatatgccgatgacttatctttctcagcagtaggcgaacccgccttcgtggtcggcgaccttctagcaagagtgagaagcatcatcggcgaggagggctttactgtgcatcccgataaaaccagaatacagcgcaagggacggcgccaagaagtcactggcctcgtggtgaaccgcgtagtctccgtgccaagggacgagctgcggaggtttcgcgcccttctgcaccagatcgaaaggagtggattcgaaggcaagcaatggggcagagggggggatctgcatgcagcaatcgagggatatttgaattacctggctatggtggatgaaataagagcggagccctacaagaagcagtggcgacggattaaaggcgcagccacagactga

SEQ ID NO: 13513 - RNA, 1179 nt, synthetic construct
  source 1..1179: mol_type = other RNA
atggccgactcatcctataccaagcgccaagccctgtatgagaggatacgtcagagctctaaagatgaggtcattcttgaagagatgatacgcctcggcttttggaaggagaaaacccttcccggacagccgacgactgacctggaaagactccgggacctgcgagctgaactgagtactgttagccagaaactggcccgaactgctaacctagccgcacttcgccaggaggtccacgcaaggagattgcgtgaaagcagagagcgccagcagcaaaacaaggagcgccgtgagcgagagcggagggagaagacagaacgatggagagaacggtcaagacgcgagctactgtaccttggcgccggcgtgagtggcggattagggtcacccacaggcgacgaggcaaggttgagggaacgggggttgcccatctttacggatgccgctgatatggctagacagatgggcttgacactgggggaattgcgctttttagcattccaccggcaggtgtccaccgttcaccattacgtccggttcgccctccctaagaaggcaggaggtgagaggatgatcagcgcccctcgcccccgactgaaaaaagcgcaacactgggtgctcactgaactccttgacagagttccggtgcatgatgccgctcacgggttcagggctggtcgaagtatcgtctccaacgcggagcctcatctcaggtctgccgtggtaattaatctggatctgcaggacttttttccatcaatccactaccggaggatcagaggcctattcagatccctgggctatggcgaagctttcgctaccgtgctggctctcctgtgttctgaagccgacgtggacgcactggacctggacggtactacctattacgtggccaggggacccagacggttgccacaaggagccccaactagcccagccctcacaaatattctgtgctctcggctggatcggcgtcttacagccgtggcccatagatcggggtttaggtacacccgctacgccgacgatctcaccttctctgccccctccttaacaaccaatgcagtcgcggcggctcctgtggttggtgcagctgtggcaagcgctcctgctgctggagcagcagtagcgagtgcccctgtaacagccgccgcagatgcaacgccagatgtcgggtga

SEQ ID NO: 13514 - RNA, 1017 nt, synthetic construct
  source 1..1017: mol_type = other RNA
atggcttcaaactcggatcagaataggcgcgaaaatattcggagggagatcgcccagacaagcaaagacgaattcattcttaaggagatgaagcggttggggttttggcccaacgaggaaggtaagccccgtgttgaggaaaacttgataaagcgacagggagagctcagtagagagatcgccgacctgtctaagaaggcacggatatatcaggatcgtgaggcactgctgaataaacacaggaaagagcgcatgcacaaaagccgagaaaaacaaaaggccaacaaagaaaagagggaagccgagcgcctgactaaaaaggaagcttggaaggagaaacaagccaaggatattatctatctgggggataagtacagtgccggccttaagaataagaccaacgatctggcattactcaaaaagcatcagttgccacagatccagaatgtcctagagcttgctaagtgtctcaaaacaaacgtttccgagctgagatacctcagctattaccgccccgtcactaaggtgtcccattatatcagatacgcgttgcctaaaaaaaacggtggcaatcgccaaatctccgcaccgatgcccagactgaaaaccgtacagagagccatcctggacgagctactggttaaggtgccaatttcacagtacgccaatggcttcgccccgggacggagcattgtgactaacgcttcccctcacgtgaacgccgatctgattgtgaatatggacctcaaggacttttttcccaccattagttacaaacgagtgtggggaatgtttaagaagctggggttctctgaccaaaacgcaacggtacttgctttaatttgcaccgaaccagtcgaggagaaggtggaagtggacggagaaatctattacatctcagagggcgaaagggtcttaccacagggggcgcctacatctcctgcaataaccaatatcatatgcagaaggatggaccagcggatggctggcatcgctaaaaaactcgatttcacatga

SEQ ID NO: 13515 - RNA, 1773 nt, synthetic construct
  source 1..1773: mol_type = other RNA
atgagaagtaataggcgacaggaactgtatgaccggatccgggagtcctctatggatgaggtgacacttcaggagatgattagacatggattctgggctgaagacgatgccatgccctcgctccctgccgagatgattaagagacggggagaactgcggcgagagatttcagagctcgcccaggacgccagactgtaccggtcccaagagcaggctctgcgggccatcatgaagcagaagatgcgggaagccaaagaccgccgcattgaaacaaaaaaaagacagatccaggctcggaatgaccgtgccgcagcctggcacaggaaaaagacagaaggcatagtgcacctgggggacactgtttctggagctctgcagaaccgcgattccaacgcagaaaggttaatcagccagggcttgcccgacttcccagatctgggagatattgccgacgctatgggcatcaccctcggagagctgcgctttctggcatacgaccgggccgtcagtaaggttagccactatcatcgctttcagatccctaaaaaatccgggggaaccaggatattgtcagcccccatgccgcgactaaaacgcgcccagtattggctgctggataacatagtgaatcagatagaacctcatgacgcagcccacgggtttagagcagggcgctctattcttaccaatgcaaagccccacatgagacaggctgtggtcgtcaactacgacctgaaggactttttccccagcatcggctatcgtagggttaaggggttattcgccgccctcgggtatgctgaggctcaagcggctatatttgcgctgctcgcaaccgaagcagatagaactgaggtcgttctagacggtcaaacttggcacgtagcgggaggagagcgcgtattaccacagggcgcgcccactagcccagctattacaaatttgctgtgccgacagttggaccgtcgactgactgggaccgccaggaagctgggagctacctatactaggtacgccgatgatttgactttctccttcgcgacggacgatactaccgccctccgtagcttggactgggccgtaggcgagatcgtgctggatgaaggcttcaatctcaacgatgctaagacccgtactatgcgcaggcacacacggcaggaagtgacagggatcacagtgaatgatgggcttaccatcagtaggaaggagagaagacggttcagggcatacctgcataacgtcgagcagggccgcgacatggggtcatttggctccggtcacccaaagaactccgcattaggctacgcgcaattcctgacgatggttcatggggacggcgtgagcgatcttgtcgcccatgcccgcaccctgtttggtgaccagacgagtgtcccaccagaagatccgaatcacttcaggcaaatgagcgctcggggcgaagctccaaaggcggattggtggcagccagcagagcctgcccaacctgtgcctgaggctcttcctcagcctcccggtacggccgagggtagatctaccaacattccaacagtgggcaaacgccgagcaagagattggggtgcagcccgagctcagccctcgcaatctggacccgctagaccgaggcagggtaaaaaaggcctcgtgggctggtctggctttcaaaagacagcaattaccgtgctcgcccttatcgccctaatcccttttcctttctcacccgtgctcatgggagcaacaatttacttcatctggtttcataggtaccggaaatga

SEQ ID NO: 13516 - RNA, 1929 nt, synthetic construct
  source 1..1929: mol_type = other RNA
atgagctcggtgtccaaccttcgttcccggatttcagatagtagtttagatcaggtcgttttagaggaaatgatcaggcatggtttttgggggcgtgatgcagaggtaggcgagatgcccgcagagtttttcgagcgacgggcggctctgcaggctgagatagcagacatcctggccagggacaggagattgagcgaccctgacaaggcccttcaggctgtaatgaaggagagaatgaggcgcgcccgtctgaaacgggtagaaaccaaaaggaaagccatagaggcacgcaatgccagagcggctgcgtttgatgcgcggaaacgcgcagaagtcatcagtctgggcgatgtttccagcgcgccattgcagtcccgggaggctaacaatgatcggttgaccgctcaggggctgccagtgattgagggagccatagccctgtctgaggcaatgggaatcggcctgcctgagctgaagtttctggcccatgacagaaaggtcgcccgcgtcacacattaccagagtttcgagatccctaaaaagaccggtggggtcagggtgataagcgccccaaagccacgcatgaaacgcgctcagtactgggttctcgacaacatcctggcctgcatcgaaccccacgatgcagcccacggcttccgcacaggaagaagcattctcaccaatgcagcccctcatgtgggccaagaactagtcatcaacatggacctgcaagacttcttccccacaattacttacgggagagtgaaaggattgtttgccgcaatgggctacgctgaagcagatgccgctgtgcttgccctcattgcaaccgaggcccccagagatacgatcaacgtggatggcactgtgtggcacgttgctacgggacccagagccactcctcagggtgctcctacatcccctgcaattgctaatctcgttgcaaggaaacttgacagacgcctgctcggactagcccggagatttggctttagctatacgaggtatgctgacgacatgaccttctcagggccattcccgggtgaccaggggctgaaaatctttcacgctgccgtgcgagctataactaccgaggaagggttcacattgcacagggataaaacaagattcatgcgtaggggcggccgacaggaagtcactggcctcacagtgaacgacaaggtgagcgtgccgagagcggaacgccgaaagttccgggcatggctccaccaggcagaacagtctggaacgccccagaggccatttaggactggcaatccggtgaccaccggccagggttatgcgtccttcctgtacatggtgggcggaaccgaagggctagctctcgccgaaagagcttggctgctgttaggacggcagacaggggcctcgtcagaaaacattgagcaagcccaggcgttcaggacagctagcgcagagggccgattgcccacacccgactggtggcaaccagccgaaccgccaccatttgaacccatccccctgcccgcctatgatcggaaggatcaggagactcgagacgtacaaacttctattcctaaggccggagagcggcaacttcggagagcccagattgagcgcccaggtgctgacgcacgatctagggctgccctgtcacgttctaatcgcgcctggggtggacaggcttctggcacttccccttctgggcaatcctcatgggccaagtggatcatgagtttctttgccttttttctgcaagtgctcccctacattggggtccctcttgctgtcttcgcattctatcatatctggaagcctcaggccggatacttaggggctaccaccgtttggcacaagttgctcgtggcagccaagttcttgttcgttcttctcggcattgattttgcgctggtgatgatcctggccgtatttagcggtatcgggtga

SEQ ID NO: 13517 - RNA, 1512 nt, synthetic construct
  source 1..1512: mol_type = other RNA
atgtccgctaagaagtggaccagcatccccgacgactttgacattgtccgcgcttcacgcgaagaggtacgtaaattgcgctggagcccggtgtggcaggacttcctattgcgcgaggtggtgcggatgggtttttacgaaccggaggatgacacagaacagagctattacattaataggtcaaaggagctgagggcagagctccagaaactgaatattgagattgaagaactcaaggaagaagagtccagcttagtcgatcagcggaaggctatcgctaaagcaacacaacgccagaaggaagctcatagggttcgactggacgagtcgagagcccagcgccaggttagaaagcaacaacgaattgagcagagaaaagcaaagaaggagctctggagcataagaaagcaacaggagctgttgtatattggggccggcgtgtccaggatactcaaagaacgaaattcggacacagccaagctgaagtccctagggtgccctgtggtgctcacagatctggagttactgagcctgctccagcaacctgcgtctgaagacgattccatcgagctgtctatggcacacttgaggaggtttgccttcagaagacggatttcacagcacaccaactatacacaattcactatccctaagaagaccggaggagagcgcttaattactgctcccaccatggccctgaaaaccgtccagcggaggattgtcaaacacattctgagtacaatccctacgcacagcgcagcgcacggattcgtggaagggcggtccattcgaagtaacgcggagccacatacgcagagcgccatcgttgtaaacatggatctgaaagatttctttcccaccatcaccggccatcgagtccggggtcttttccagtcttttggctactcaccagctatctccgccatccttgccttcatatgtacgcgtcccgatgtgtccgtgtttgaattggatggccagaattggtacttttatgagggtaaagacgtgctcccccaaggcagcccagcatctccaatgataagtaacctgatctgccggaaactggacaggaggttggagggcctcgctcagagtacagggtttacttataccaggtacgccgatgatcttactttcagttcatctgaccccgatgctagcgtcggggcattacttcacgccactcgggccatcgtcgcggacgaacagtttgaggtgcacccttccaagactagaatcatgcgcaatgggtcttgtaaagaagttaccggagttgtggtgaacgagtacccaaacatctctagagccagactccggcgtttccgtgccctgcttcatcagctgaaaaccaaaggccttgagaatgcccattgggaggaaaccacaggccctgccctgctcaataaggctctgggattcgcagcccacattaagtcagtaagtcagccaaaaggagcagagatattcgaagagactctggaaatcatcaacgacctaaagggccagtga

SEQ ID NO: 13518 - RNA, 1389 nt, synthetic construct
  source 1..1389: mol_type = other RNA
atggcagatactaaccaaacgaccaactggaggcaggaactgaagcaagtgggcaagcagtactttgagatccaggaaatgattaggatggggtttcttaaaatgcctcccgaagagctagaactgctgaagcagaagtatacagaactgaataaagttaacgcccagctgcggaaactgtcaaaggagctagaaggcttccaggacattacgcccttaattaaggagattcgaaaaaaccgcattgaacgtgttcgtgcggcccgggcaattaaaaaggccgagaaggctcagaaggagaaggcccgcaaggctgaaattgcacagcggaaaaaggatactccttattatctgggcgaaggggtgtcagctggcctcaagtttgagggaactgaggaggccaagctgcaagaggcaggacttccaattgtgcataacgtgaaggacctcgctgagcagatgaacatgcctcagagtgatatcctgtggctgagttaccatcgcaaggctgcatctatcgaccactacagccgctttcaaattcccaaaaggaagggtgggttcaggaccatcgcttcaccaaaacccaagatgcgcgttgcacagcaatggatccttgacaatgtcctgagcaaagtgccaacacatgaagccgcaatggcctttcaggcgggcaagtctattgcagacaacgccaacctccacctaaatgctgagatcctgatacgcatagatcttaaggatttcttcccgtccatcaaattcggcagggtaaaggggctctttaagtccttcggctacaatgagggaatcgccactgtgttaggcctcatttgtacagacgccttgagactcagcgcgaaattggagaataaacagtacttcgtcgcactgggagatcggtacctccctcagggggcctgcaccagtccaaccataactaatctgatctgccgaaaaatggacaatagattgtctaagctttctgataccctgtcctggaaatataccagatatgctgacgatatggtcttttcgaccccgcagaaagaggctgagttgaagcacgtgcttggcctgtccaaaaagatcataggcgaggaaaacttcgaaatccaccctgacaagacaatggtgatgcggggtcaccaaagacaaacagtaacaggagtcgtggttaataacgacgagatcagaatcagccgtcgggatatccgaaacttcagggcctttctgcatcagtacgaacagaatggggcggaagctatgaccaaaaaattggggaaagacgccactgcctatggaagaggatacctcgccttcgtccacatgataaatcccggtcaggccgctaagtttgtggagaaatatggttggttaaagaaatga

SEQ ID NO: 13519 - RNA, 1389 nt, synthetic construct
  source 1..1389: mol_type = other RNA
atggccaatcagaccaccaccaattggagagcggagctgcggtcagtgggtaaacagtacttcgaaattcaggagatgattaggatggggtttctgaagctcgacccggcagagctggatatgctgaagcaacgatacacggagctgaataaagtgaacaaggagcttaacaaactctctaaggaactggaagggctggaagacatcacccccctgattaaggagatccggaaaaatagaatcgaaagagtcaaagcagcccgtgccatccgaaaggttgagaaggcacagaaggagaaagagagaaaggctgagattgcccagcgcaaaaaagacacaccatattatctcggcgatggcgtgtcagcaggcttgaagtttgagggtggcaatgaagcccagttgaaagaagccggattgcctgtggtcaacaatgtcagggatttaagcgaactgatggctatgcctcagagcgacatattgtggctgtcgtaccatcgcaaggcagcaagtatggaccactacagtcggttccaaattccaaagcgcaagggcggctttagatcaatagccagccccaaacccaaaacacggaaggcccagcagtggatcctagagaacatcctttccaaaatcgactgtcacgaggcggccatggctttccggcctggaaaaagcatcgctgataacgctcacttccacctgcaggctgaggtgctcattaggattgatcttaaagacttctttccatctctgaagtttggtagggtgaaaggcctgttcaagtcttttggttataatgaaggcgtggcaagcgttctggcattgatgtgcactgacgcgctgagactctccgccaaactggaagggaagcagtatttcgttgccctcggagagcgctatcttccccagggcgcgtgtacctccccagctataactaaccttatatgccgtaagctggataataggctaagtaagctcggagataaacttgactggaagtacactcgatacgcggacgacatggttttttctagctcaaataaggagacagatttgaaacatatcctcgggctgagtaagaaaattatcggggaggaaaacttcgtcattcaccctgataagactatggtgatgcgtgggcaccaacggcagacagtgacgggggtagtggtcaacaacgatgaaatccgcatatccagacgcgatatgaggaacttcagggcctttctccatcagtacgaacagaaaggcgcagctgagatgacaaagcagttaggaaaggacgctaccgcttacggaaagggttatctagccttcgtacaaatgatcaacccggcccaagctgagaagtttaaggccaaacatggatggttatcccaagcctga

SEQ ID NO: 13520 - RNA, 1386 nt, synthetic construct
  source 1..1386: mol_type = other RNA
atggcaaattatgataagatccaagagctgcgccaggagatccagaccctgggaaaagaatactacatcatgcaggaaatgcttaggactgggtttctgaagatgtctgaggtcgacctggttagaatgaaagccaatttgaacgagttgtcaaaaattaaccaggaactgtctgtgcttagcaaggagcttaaagacatacccgatatcactcccataatcgccgagattcgaaagaatcgtatagaaaaggttaagtccgaaaggttgattagacggattgagaaggagaaactgatcatccaacgcaaggagaagctcaaggagaaaaaaaagaataccccgcattacttgggcgaaattgcacggggcctggaatttaaagcgagcgatgaggaaaagttaaagcagaaaaatatcccatctctgcccgacttgcaagccctcgcagacctctctggactcaccagggagcagctgctgtggctgtcataccataggaagaccgccaaaatagatcattatacgcgcttccagatccctaaacggagtgggggaatgaggactatcgcatccccaaaatcaaaactgcgggtgattcagcactggattcttgaaaacattctgcagaagctatccattcacgaggctgccaaggctttcgctcagggcgcaagtgtggtgaaaaacgccgtaccacacttgaacgcctatgtggtgattaaagtggatgtcaaggacttctttcctagcattaagtttaatcgcgtagtgggttttttcaagtcgttaggctattccagagggatgagctctgttctgggactcctgtgtaccgacgcgatgcgactgaatgctgaatttgagggtgaaaagttcttcgtggctatcggagaaagatacctcccccagggggctagcacttcacctatgctcacaaaccttatctgcaaaaagctggatgctcggctgagcaagttagccgagaaatacggctttcaatacacacgctacgcagatgacatgacgttttcccaccctgagaaagaagctaacgttaaagctatcctaggctggactaagaagatcctagcagaggagagcttcgagctcaaaaaggagaaaacctctgtaatgaagaaacaccagaggcagactgtcaccggggtcctcgtcaaccatcaggaaacaaaaatttcgagaaccgacatccgtaagttccgagccttcctccaccagtacacattaataggtgcggaaaagatgagtgagaagctgggaaaagacgccacatcctacggcaaaggttatttctcctatcttaagatggtgaatgagacacaagccgagaagtttaagaaggaatatgcctggctggccagttga

SEQ ID NO: 13521 - RNA, 1383 nt, synthetic construct
  source 1..1383: mol_type = other RNA
atgaccaattacgataagatgcaagaaatccgtcaagaggtggcgatgctggggaaggagtattatatcatgcgggaaatgctgcggaccggctttttgaagatgtcagaagcggatctggccaccatgaaggcaaaccttggtgagctcacaaagatcaaccaggagctcaatgaactgagcaaagagctgaaggacatccctgacattactccgattatcgccgaaattagaaagaatcgcatcgagaaggtcaagaccgagcgactaatcaaaagggtcgagaaggagaaattactagcccagcggaaggaaaggttggctcagaaaaagaagaatactccccagtacttaggggacatagcaaaaggactcaaattccagaaccagaatgaagaaaagctgaaagagaagaacctccctctgctcaaggatttgcaggatctcagcactctttctcagctcacacgagagcagctacagtggttgtcctatcaccggaaaacagcaaaaattgatcattatacccgtttccagattcccaaacgcactggcgggctgaggactatcgccagccctaagcccaagctccgagtagcacagcagtggatactggagaatatccttgctaagttgtcaattcatgaagccgccatggccttcaacgtgggagcgtcagtggttaagaacgctactccacatctgaacagcgaggttgttattaagatcgacgtcaaagacttttttccctccattaaattcaaccgcgtagtcggattttttaagtctcttggatattcccaaggcatatcttcaatactcggacttttatgcaccgacagcatgagactgaatgtcagttttgagggtgaaaaatttttcgtggccataggcgagagatatctgccacaaggcgcttgcacaagtccaatgctcaccaatctgatttgtaaaaagttagatgccaggctgtccaaactggccgagaagtacggattcgcgtacacgaggtacgcagacgatatgaccttttcccacaagcagaaagatgctaacatcaaggccgttctggggtggaccaaaaagatcctggcagaggaaaatttcgagctgaagaaagagaaaacatcggtgatgcgcaagtaccaaagacagacggtgacgggcgtgcttgtgaaccacgaagaaactaagatcagcagaaaagacattaagaagttccgggcctttctgcaccagtacacattgatcggggcagaaaaaatgtctgaaaaattgggcaaggacgctacagcttatggcaaaggttacttcagttacctgaaaatggtgaacaaaacccaggctgagaagttcaaacaaacctacagttggcttgggtga

SEQ ID NO: 13522 - RNA, 1395 nt, synthetic construct
  source 1..1395: mol_type = other RNA
atgtccgaggataaaaactggaaggaacgtataaaagaggttggcaaggaagccttcgaaattgaagatatgattcgcctgggatttctccagatggacaaggaaactatggctgaaatcctcgacaaacagaaggcctacaacaagctaagcaaccgattcttcaaaattaatagggaactggatagcgacatcgatattaccccctacatcaaaattattagggagaagagaatcaaggagtcccgcgaaaagagagcgttgagaaagattgaaaaggcaaaaaaggaggcagagcggaaacaaaaaatcgccgaaaagcaggagaagatgccttcttatctcggagatgagataagcgccggcctgaagtacgagggtaccaatgaggaaaggctaacgtcaacttccctgcccgtcatctctgacctgaaggagcttgaggtcaagtcgaatatcacagctaagcactggcagtggcttgcgttctacaagaaagtctctaatatcgaccactataacaggttcacaatccccaaaaagaacggggatgtacgtaagatctcagccccaaagaaaaggctccgcgttgctcaagagtggattcaaaatgagatactgtccaagatcgaattacatgagaaggcatatgcttaccggaagaacatctccattgtcgacaacgctaaactgcaccagaatgccaaagtggtcgttcgaatcgacttaaaggatttcttccctagcataaagtttaatagagtgaagggactgtttaagtcgtttggatattctgaagccttggctacaatatttgccagtgtgtgcaccgactctgtgatggtgaaggcgcagatgagtgagaaagtataccatgtgtcaatggggaacaaattcctgccacagggtgcttgcactagccccgcccttaccaacattatatgtaagaagatggacaagcggatcgagaattttaccaaaaaaaacggcatcaggtataccaggtatgcagatgacttggttttcagtacagaggacgagaatataaacctcaaaagcttcttttcctggatccatcggattattaaagaggaaggcttccaaatcaacaacgagaaaactagagtgatgcgccctaatcagcggcaggcagtgacggggattatcatcaatgaagggggtgacattagaattagccgcaaagatattcgcaaattccgggcttttatccacaattttaagctgaagggcgaggaagaagccagaaaacagattggaaaaaacccgaatcactacctggaaggctaccttagttttatacgaatggtgaacaaagatcagtttgagaagatgaaagcatatgccgagtcaaaattggagatggagatcatctga

SEQ ID NO: 13523 - RNA, 1386 nt, synthetic construct
  source 1..1386: mol_type = other RNA
atggccaatcagaatgactccgaaaattggcgagaggagctgaaacgcctcgggaaggagtattttataattcaggagatgctgcggactggcttcttaaagctcaccccagaagatatcgcgctgtacaagaccaaaataaaggagctgaacgatgtaaatggggaaatctatcgtttatcgcacgaactgaggggcattgaagatatcacaccccttattgaggagattagaaagaacagaatcgctcgcgtgaaagccgagaggatcattaagaaggccgagcgggcaaaaactcttgaggaacataaaaggaccatcagtgagaaacagaaatcaaaacccaactttctgggcgaaaaattcgcttccaagctcaagttcgaaggcggtgatgcaggcaaactgcaggcctccggattgccaaccctcaacgacctgcatgacctgtcccaagctaccggcatctctcgagaaaggttgcagtggctgtgttatcatagacaggccgctacaatcgaccactatactcgctttcaaattcctaaacgcaagggaggaatgagatctataagttccccgaaacctcaaatgcggctggcacagagctgggtcctggataacattctgtctaagttgcccatacacgactcagccgtcgctttcagggagggaaagagcattgtcgataacgctaattttcatgcaggaaatgcactgctagttcggttggacttgaaggatttctttcctagcgttagattccaccgtatcaagggcctgttcacaagttttggctataactacggtatcgccaccgtgttcgccctcctctgtactgatgctgctaggatcggggcaaaattgaatgataagcaatacttcgtcgcgcttggagacaggtaccttcctcagggggcctgcaccagcccaatgctcacgaacctgatctgccgcggtctggataaccggttaactaagctgtgcgcgtctcttggatggcggtatacgcggtatgccgacgacctggtgttctcacacgaggatgaacaggccgaccttaagaagctgctaggcctagtgaagaagataatcaaggaggagacatttgaggtcaacgaggaaaagaccctagtgatgcgcccccaccagagacagacagtgacagggattgtgattaatgacgggaaactccgtttaagccgaagagatgtgaggaactttagagcttttcttcatcagtacacgctgaaaggtgccgaggccatgagtcagcgcttgggcaaggacgcaactcagtacgccaaagggtacctcgcgttcatgcgaatggttaatccagaacaagctgacaaatttgtacaggaatacgcatggctcgcctga

SEQ ID NO: 13524 - RNA, 1386 nt, synthetic construct
  source 1..1386: mol_type = other RNA
atggctcaggaaaaccccgataattggagggaccagctgaaagccttggggaaggagtattataccctccaggaaatgctccgccttggattccttaagatgagcgagcaggatctagccttttaccaggctaaggttgccgatctgaacaaagtcagcacagaactccactcaatgaggaaaagcctggagggcgtaaaggatatcactccccttctcaaggagatcaggaagaataggattgagcgggtgcgcgttgcacggtcattgagaaagattgcaaaagagcaagcgttcgctgaggctaaaactaatcgaagagccagacagatggcaacaccaacctacctgggcaagggggtcagtaagcacctgaagttcgaaggcacacaagccgaacgactggcgttatttgacctgccgcgggtggaaaacatggcagagctagccgaagccatgcagctcacccctgaaaagctccactggctgtgctttcatcgagaggcttcaaagattgaccattatacaaggttccagatccccaagaggaaaggaggcttacggtctatcgcctccccaaaaagaacgttacgtgtagcacaacagtgggtcctagagaatattcttcgcaaaatagcccctcattctgccgcaaccgcctttgagcctagggcttccattgtcgagaacgcaaaaaagcacctgaatcaggccctatttatcaggatagatctgaaggatttcttcccctcgctgaaatttcaccgggtgaagggcttattccagtctctgggatacaatgctggcatggcgactgtgctcggcttgctttgcaccgactccgccagaattggggcgaaacttggtgaagaccagttcttcgtggcgcttggtgatcggtatctgccgcaaggggcttgtacatccccaactctgactaacctgatctgcagaaagctggataagcgtctggcccaattctgtgctaagcagggatggatatacacaagatacgccgatgacctgatgttcagccacgctgagagtcagacggacctgaaaccaatgatggggctggttaaaaagatcgtggcagaagaagggtttgtcatcaatcccgagaaaaccttggtgatgcgacctcaccaacgtcagatggtgactggcctcgtggtgaacgatggagagttgagagttagtaaacaggacctcaaacgctttcgcgcattcctccatcagtttgacttggacggcaaagacaaactctctgaacggttgggtaaggacgccgaggcttttggaaagggttactgggcatttattcgcatgatcaaccctacccaggccgaaaagttcaccgagaagtataagtggctggctcattga

SEQ ID NO: 13525 - RNA, 1404 nt, synthetic construct
  source 1..1404: mol_type = other RNA
atgcaactcaccccctctacaactgagaattggcgggccagactccaacgactagggcgagactattttgtcattgaggagatgatacggctcggtttccttgacctttcgcagcagcagtacaagacattacaggatagctacacacgcttgaacgagattaatggcgaattacagaagttgaacatcgaactcaagggtaccgaggacataacacctctgctgaaggaaattcggaaaaatcgtatcgaaagggttcgggcaaagagggctataagaaaagtcgagaaagcccgggtcagccaggccaagaaggcagaaatcgcgctgcagaagcagaagaccccataccatcttggggagggcgtgagtaaagggctgagattcgatgaaactgataccgagaagttatcacaggcaggcctgcctgtgctgcacaccctagaagacctggcacagttcagcaaactggagatgaaacaatgggtgtggctgtcctaccatagacgtgtcgccggcattgaccattatactcgctttcagatccccaagaaaaaagggggcctgagaaatatcgcttctccaaagaagacgctgcggatcgctcagcagtggattcttgagaacatcctaaacaagaggcccatacatcccaatgccatggccttcctgccgggaaagaacatcaggcacaacgctgagaaacacacgggaaagcacaccgttgtgcgagtggacttaaaagatttttttcccagcgtgaaattccctagggttaagggcctctttaagagttggggctactccgaaggcatcgcaacagtgctggcgcttgtatgcacggacgcgactcgaattggagcatctttggacggaaaagcttatttcgtagccttgggagaacgcttcctgccgcagggggcttgtacttctccagccattacaaacattctgtgcggtgataccgggtacctcgatcatagactcaccagactcggtgaaaaattggattggacttatacccgttacgctgacgacctcgttttctcaaccaacatcacagaagataatctgaagagtctgctggggctcatgaataagatcatcaaggatgagggcttcgagatcaatcaagagaagacttcagtcatgcggcaacaccagcgccagacagtgactggagccgtggtgaatggcaccgaaccaagggtgtccagagaggatattcgcaggtttcgcgcttttttgcaccagatggagaaaaacggatccgccgctatgagccaaaaactgggtaaagacgccgaaaggtacgcacagggatattgggcctttattcacatggtacagcctacacaggccgagaagttccttaaccaatattcctggctgaaaaagaaatga

SEQ ID NO: 13526 - RNA, 1404 nt, synthetic construct
  source 1..1404: mol_type = other RNA
atgcaacttcccgccactccaactgagagctggcagtcccgtctcaagcatctggggcgagaatactttattgtggaggaaatgatacgcttaggctttcttgaaatcaccccggaacaataccagttactggtcgacggatatgctaggctaaatgccataaacggagagctgcagcggttggggcaggagttgaagggtactgaggacattacacctttgctcaaggagatcagaaaaaatcggattgagagagtgcgcgccaagagagccctcaggagggttgagaaggctagggccaggcaatcgaggcgggaggaggtgatccgaagaaaaagacagaccccgttttatctcggcgaaggagtaagcgctggcttgcatttcacgggtaccgacgaagcgaaactggcagcagcagggctgcccgttctccacaccctcgatgacctggcccaggcctctggactagaggcacgccagtggatttggctttcttatcaccggcgggtagcccgaattgaccactacactcgcttcgagatcccaaaaaaaaaagggggcacacgcccaatcgcggctccaaaacgcactctcaggcaggctcagcaatggatcctcgagcacctgctgaacggtaggacaatccaccctaatgctatggccttcctgccggggaagaacatccggcataacgctgaaaagcatactgggaaggcagtcgttgtgcgagtggatctgaaagattttttcccctcagtgaaatacccaaggatcaagggcctgtttagacacttcgggtataatgaaggtatagcgacagtgctggccttagtgtgtaccgatgcactgagagtagccgcacgtttggacggacaagactactttgtggctctgagcgagcgctttctccctcagggagcatgcaccagtcccgcccttacgaacattctgtgtggagacgtcggctatttagatcaccggctgacatgcttggcagataagggaaactggcagtacagccgctacgcagacgatctggttttctccaccacagacccagccgccgatttgaagtctcttctcggccctgtgcggaagatagtggctgatgaaggctttgtcgtcaatcccgagaagacccgggtaatgcgacctcatcagcgtcaggccgtcacgggggtcctagtgaatgaggctcgtcccagagtgggcaggcaggaactgaggagattccgcgccttcctgcatcagatgggtcagattggcgttcctgcgatgtcagttaaactggggaaggacgccagacgatatgctcagggctactgggctttcgtgaaaatggtggaacctgatcaagcgtccagtctgcttggcaagcacccctggcttcgggcccagtga

SEQ ID NO: 13527 - RNA, 1413 nt, synthetic construct
  source 1..1413: mol_type = other RNA
atggagacaacagaacagaacacttcttctagcaaaaacaatgcatggcgagaaaagctgaagaatctgggtaaggagaacttcataatatcagaaatgacccggttagggttcctgtctgttgcccctgaaaacctccaggtcctgcgtgacggtttcgatcgtctggaggtgatccagaaggagttggctgccatccgaaaggagctacagggaacggaagacatcactccactcctgaaggagattaggcagaatcgcattgagagggtacgcgcacagaggacgataaaaaaggctgaaagagccgaagctgcagccgcagcccgtaagaaattcttagcagaaaagcaaaccaaacctttttatctcggcgatggggtaagtaagggcttgaaatttgctgcaagcgacgcctccaaattatcggataatggtttgcccgtgctgcacaccctggacgatgtggctgctgcaagtggattggacgcgtctaaatggcagtggctggcgtatcatagaaaagccgctacccttgaccactacacccgatttcagattcctaaaaaaaaggggggcctacggtccattgcctccccgaaagcgactctgcgcaaggcccaggcttgggttcttgccgaaattttgagtaaaagagccgacgcttcatccagtgatgccagctttgcgttccagaagggcaaatcaatcgttcagaatgctgccaagcatctgaacaaggctgtagtggtgcggatggacttaaaggattttttcccctccattaagtttaggagagtgaagggtcttttcaacaaacttggatataacgaagggttggctaccgtctttgcgctcgtgtgtacagattccgtgcggatcgaggcagcactggacggcaagagatatttcgtcgcactgggagagcggtttgttccccaaggcgcgtgcactagcccagcccttacaaatatgctcgcccgggacctggatatgaggcttatgcgcttcagcgagaaatacctgtggacttacacccgctacgcagacgacctcacgttttcgacagatcatccaacacctgacctcaggcaactcctgggggtggctgccaagatcatacgcgatgaaggattcgagatcaatgctgcaaaaacactggtcatgagaagccaccaacgacaatctgtcaccggcgtggtcgttaacaacgcagaggccaaagtgtcaagaagggatgccaagaggtttcgggccgtgctccaccacattgagactgagggcgaggagactgtcagcaagaagctgggaaaatctgccaccgcctatgccaaggggtacatcgcttacctatccatgatcaatccccagcaggccgaaaagttcaaagctaaacataagtggctggcctga

SEQ ID NO: 13528 - RNA, 1014 nt, synthetic construct
  source 1..1014: mol_type = other RNA
atgagcgacgagttaagtttgaatccacactggcgaaagagggtccaagagatcggacgcatgaacttctcaagggaagagattttgagactggggttcttcagcgatctggacgacgcggagagacaacagttaaagacttttcttgatgaggcttacccccgactcgcagaactgcgcaaggaactgaagaaagtcagcactaccatcgaggaggcagacgatctgcaatccctgctccgtgaggtaagacgcgcccgtatcgagcgcgtccgaagagagagggcacagaggaagaacaaaaaggagaggcaggaagttgagcgccagcaggcctgggccacaaagaaatctaagacaccgccttttctgggcgtgggggtatccggaagacttcagttttctggcgaggacgacaaacgcctgttgtcccaagggctacccgtcccaaaagacgctgaagaactggcttcgctcatgggaatcaaatcttccgaattactctggctttgttatgagcgagccgcggccagcgtggatcactatacccggttcgagatacctaagcagagcggcggtaaacggctcattagctcccccaaacctaaaatgcggtctgctcagagatggatcctggacgaagtgctagccaagctgtccccgagcaatgcagcaacagcctttaggccaggtgcctcaatcattaagaacgccgaacctcatttgaatgctgcgattctcgtgcggatcgactttaaggatttcttcccctcaataaccttcccccgtatcaggggattctttgaggctctcggctacaatccaggcgttagtaccctcctgagtttgatttcaacagatgcgcctcgggtgaaagccgttctggatgaaaagactaactttgtggctatggacgaaagaagtcttccacagggtgcatgcacgtctcccgctctggccaacctgattgcatggaaacttgatgcccggataggcgggctatgcaaggtgtga

SEQ ID NO: 13529 - RNA, 1074 nt, synthetic construct
  source 1..1074: mol_type = other RNA
gccgcatggcttgaaaaaaaaagtaagaatcccccatttcttggcatcggggtcagttctcggctgaggttccaaggtggggacacgaagattctaacagccaacgagctgccgacacctaaggacgccgaggagctcgcattactgctcaatattagcacatcagagttgttttggctctcctatgaaagggctgctacctcccttgatcattacacacggtttgaaattccgaaacggtctggagggaagcgtctcatttcatcacccaagccaaagcttaggacagcccaaagatggatcgcagagaatatcctggataagttatcacccgcagcccaggctaccgcgtttaggagcggtgcgtccatcattaaaaatgcggagcctcacctgaacgctgccatcgttgttcgaattgatttccgcgatttcttccctagcataacctatcctcgcgttaggggatacttcgaaagcctcggtttcaatcccggagtggccactctgctggctctgatcagtaccgatgccccacgtgtgaaagtgtcgtttgacggcaagacccagtacgtagccatgggcggcagatctcttcctcagggagcatgcacgtccccagccttggccaacttgattactcggaagttagacgcccgaatagcaggcctgtgccaggcctccactgaccagtggacctacaccagatatgcagacgatttgactttctccacccaggctagagacgcgaacgtcggacgactactagggagcgtgcagaacatagtatctgacgaaggattccggattaacagagagaaaactgctgtcatgcgcgcccccggcagaaggatagtgacaggcctgatcgtggaggacgagatccgactgtctagacgcgatctccggcggctgagggcttttctgcataggtgtgataaagacgggctggcaagagtcagcgaagagatcgggaaggatgctctcgccgtcgctcacggtcgcttggcatacgtgcaaatggtgatgccagaacacgccggccgcatccgtggcaaatatagttggctgtga

SEQ ID NO: 13530 - RNA, 1410 nt, synthetic construct
  source 1..1410: mol_type = other RNA
atggcctcacaggaccttgccttgaatcccgattggaaagagcgaatagctcagatcggtaaacaaaactttgtgcgggaggaaatgctgcgactagggttcgtgagcaaaaaattaggggaagaggagagagctaggatccaggggttcctggaccaagcctatcctcgtttgaaagagctgcgcaaggacttggccgaaattcgaagccagatagaaggcatcaatgacatagaaagtctgttaaaggaggtccgacgcgagagaattgagcgcgtcaagagggaacgcgaagagaggaaggtgcgcaaggcagaggagcaggaacggaggaggcaggctctagccgaagagatgcgtaagactcccaggttcctgggccacggcgtaagtgcccacctctcctttgccggaggcgacgcagttaatcttgcggccagaggtctaccccagcccgaagacgtggaacagctggctgaactgatgcaattggatccttccgaagtgctgtggctgtcttacgagagagccgccacgaccgtggatcattacacacggtttgagattccgaagaaatctgggggccgcagactcatttcctcgcctaaaccaaaaatgcgggtcgcacaaagttggattgcagagaacgtgcttgatctcctgtctccatctcggcacgccatggcattcagaccaggtacatcaatcgttgataacgcgagcccacacctgaacgcggccattgtggtgaaactggatttaaaagacttctttccaagcatcggcttcaccagggttcgtggctattttgaatacttaggatttaacccgggtattgcaactatactggctctgatctgtaccgacgctcccagggtaaaggttacgctcgacggcgccgcaaagtatgtcgccatgggagagcgtgggttaccacagggtgcttgcaccagccctgcgctcgcaaatttgatcgccacccctcttgactcaagactggccggactctgcactgctctcgagagtacctggacctacactcgctacgcggacgacctgactttctcctgtctggacgagagagctgacgtggggaggctgttgaaggctatcgagaggatcgtgggcgatgagggatttaggattaatgcagcaaagacagctgtaatgcgggcacctggcagacaggtagtgacaggactgcttgtcggcgatcagatcagactcagccggcgggatcttcggtgtcttcgcgccttcctccatcggtgcgataaggagggagtggaagctgtttcccgagccattgggaaggatgccctgtcagtggcacgaggacatctggcctatgtcacaatggtcatgcccgggcacgctgctgatatcaagcgcagatacgcctggctctga

SEQ ID NO: 13531 - RNA, 1704 nt, synthetic construct
  source 1..1704: mol_type = other RNA
atgtccgagtcaggcttgcctgccgattggcggactagactggagcggctcgggcaacggaatttcgagattagggaaatgttgaggctgggctttctcagtgcagccgaccctctccgaccaggtgagacaaacgctgccctactcgccaagatagccgagttagagcagttgcaggctgaactggatgaagtggacgatgtggtcgccagcgcatctaggatcgagacactgctagaggaaattcgcagagagcgcctggcctcatcggcgttaaggaaagccgagcggaggagagcgcgtgaagagcaggctaggcagaagcagctggcctgggccacccaacgttgcgaaaggcccccatatcttggcgcgggggtgtctacccgactccagtatacggggggcgatgacgatgctctggcatctgcgggattgcctgaggtgcacacggtgttagagcttgccgacgatatggacaccaccaccagcgaggtccagtggctgagctaccacaggtctgtgacaacaatagatcactacaaccggtttaccaccccgaaacggtccggaggaaccaggacaatcagtagcccaaaaccccgcatgagacaggcacagacgtacatcaagactcacatccttgaccagctctcccctgcctctccagcaacaggcttccgtacaggtctgtccatcgtgagtaatgccgaacctcatgtcggcgccgctgtcgtcattcgaatggacatcaaggacttctttcccacgattactttcccgcgggttagaggatattacgaatcattagggtacaatcccggaatcgcaaccgtattggccctcctctgtaccgactccccgagaactgcattccggtttgaaggggacaggtattacgccgcttctggcccgcgagctcttcctcagggggcatgtacctctcctagcctcgcaaatctggtggccagagggctagacgagagactcatagcttgggccgccggacgccctgaatcatggacttatacccgctacgctgatgacatggtgttcagtagcaatgatgccaattcggacgtggcatccctgatcgcaactgtccacactattgtgcaggacgaaggattctccgtgaacgagcgaaagaccgcggttatgcgggcccctcatcgacagatggtgacaggacttgttgtgaacgatgtggtccggatttcaaggcgccaaatgcgccgcctgcgcgcatttctgcatcagtgcgaagttcgtggtttgaacgctatgaccgaaagcctaggcacagacgctagatgcgcagcaacaggccacctggcctatgttaacatggtaaaccatgatcaagcacttaagctgctgcaacggcatccctggatccagagagagcccctgtctccacccggcgtgagaagtcgcagcaggccaggtcgtactccatcaagcactcagtcagctgttaccccagtaacagccggggtcactcgcctggagcttgctgacccccctgatggtggtaaattctgggaagtatgggtcgatggcgctaccctgtaccggcgatatggacccctgggagctccaggcacaacgtccgagaaagcctttagtactcccgaagctgcgcaaagcgcggctgagcagctgattcagaataagttgtccgggggctacagacccgcctga

SEQ ID NO: 13532 - RNA, 1413 nt, synthetic construct
  source 1..1413: mol_type = other RNA
atgtccaaagaagtcaaaaagctggatcccaattggagggaccggatcgagaaggtcggaaaatccacctttcaaaggcaggaaatgctaaggctggggttctgggagcccaaggatatccctacggacgaactcgcgtccctgcagaataagctcaatgaaacagttaacctgctgggtgagaaaagaacccagctgggagaggtgaacaagaaaataaaagaggcccaggacgtgaaaaagctactggccgagattcgaaagaggcgaatacagaaaagcctgaaagagagggagatacgcaaagctgagacaaaggagcggaaacaggataaaacaacccaggaccggcaaagacgaaaggttactccaccgtacttaggggagggcgtgagtggccgactaacgttcttagagggcgagcaggaaaaacttaaggaacttgaccttccccttctgaacaatctgacagacttgagcaagttgctcctgattgatgagggcaagatagcttggctcgcttaccacagggttgcgactaactgcgatcactaccatagatttttaatcccaaagcgtaccggagcccctaggcttatcgccagccccaaacctgagttgagagaagcacagggttgggtgaaacgggagatcttgtcaaagcttgaaccagaactggaagcaaaggcattcaagaaggaaactaacattaaggacaacgcacagattcactctgggaagggactcgtaattcgcgtggacctgtccgattttttcttctcaatcacattcccccgggtacggggtttctttatcagcctggggtataaccccggtatttcgaccgtgctggcacttctgtgtactgaatcagatcggactaaggtgacttataagaatgaggactggtttattgcccagggggaccgtaggcttcctcaaggcgcctgcacatcccctgctctcagcaatctcatagctcgccgcttggaccggcgcatcagaaactacctcgcttctatggatgaggagtggtcatacaccagatacgccgatgatttagctatctctcacagcaagagtgatgcagaagtgaaaaaagtcctgaaggccctgcagaaaattgacccggatgaaggctttagtatcaacgaaaagaaaaccgcgattatgagaagtcctcatagacagatgatcaccggactgattttgaatgaccaggagccacgcattccgcgcccctatctgaagaaagtccgtgccatggtgcaccaagccgaccaactctataagaggggagccattccagagaatctgtacgaaatcaaaggcaaattgtccttcatcaagatgatcatgcctcagcatgtcgagaagatcgttaacaagtattcttggctcaatccatcttga

SEQ ID NO: 13533 - RNA, 1422 nt, synthetic construct
  source 1..1422: mol_type = other RNA
atggcaaacaccgatggagtgctggacccacgctggaggaagcggatcgatgaggtagggaagaatgcattcgagattgaagaaatggtcagattaggcttcctggacgctgacgagctcgagaaacgtctcaacgcgaatggacagtccttcaaggcatatcagtccgctctggccgatcttgccgaagcaagcgccgctctctctgcgacctcaagggagattgaggctttgggcactgtggaagcagccctggccgccattaggagcagaagaatcgcccgcgtcaaggaggtgcgagaagaaaggcgggtcaggaaacaggcagaacggcaacagcgtgaggaggcgatcaggagacagcggcgagaagtgcctacatttctgggtagaggcgtctccaatcgccttaactattctggcggcaatgatgatatgataagccagctggggttgccaagactgaactcatttaccgatattgcctcagctctatccttagagccgcagcaacttcaatggctggtttacgaacgcggagatagtagggttgaccactacatcagattcaccattcctaaacggtcaggggggagcagactcattagccgaccccgtccctcattgcagcaagcccagcagtggatgcacgactcgatactgcgacggcagccactgcatcccgctgcaatggcttttcggcccggcgtgtcgattgtagacaatgcacgccttcacgtgggtgcccggatcgtggtacggcttgacctaaaggagttttttccaaccataacattcgcccgggtgcggggcctgtttgaaagtttcggatataacccaggcgttgcgacagtgctagctctgctgtgtacagatagtcctagagtcatggttaggctggatgaaagaagtcatgtggtgcctgttggggagcgagccttaccgcagggtgcttgtacttctcccactctggccaatctcgtctcccgctccttggaccgcagaatacaagggtacgcctccaaggccggctggacctattctcgttacgccgacgacctggtcttctccactaatcaggagacagccagcccccacagccttatcaggggaatctgcgccgtgatcaccgatgaaggttttgtggtcaacggcgagaaaacgcgtgtgatgcgcgctcctaaccgccagacggttactggactcctggtgaaccgcgacgtaggtttgacaaggcgcgaccagcgacggatcagggcattcctgcataaatgtacctgccagggactcgaggtcgtttctgcagagatcggaaaagatgctgagtctgtggcgagggggtacttggcatacgtgcagatgattagtgccgaaactgctcagaagctcaggagcagatgcgcttggctcgaccaaatctga

SEQ ID NO: 13534 - RNA, 1419 nt, synthetic construct
  source 1..1419: mol_type = other RNA
atggccaatcccgatggcgtcctggatccacgatggcggaagcggattaaggaggtgggaaagaacgcgttcgaaatcgaggagatggtgaggctggggttcttggagacagatgatctacagaaatatctgtccagcaatggattgtcatttaagagctaccagagtgctctcgcagagctcacggaggcgactgccgagctgactgcgacttcgctggagatcgagagcctcggtaccgtagaagccgcgcttgctgccattcgatcccggcgaattgctcgcgtgaaggaggagcggaatgagcgccgggccagaaaggaagccgaaaggttggtgcgtgaggaagccattcgccggcagagaagagaagaaccgacctttcttggaagaggcgtttcaaataggcttcactacaatgggggtaatgatgacatgctcaatcaactgggcttgccacagctgcacagtttctctgacatcgctagtgctctctgtcttgaaccccagcagctgcagtggctcgtgtacgagcgtggagactcacatgtagatcactacatccgtttcactatacctaaaagatccggcggctctagactgatctcacgcccccgtccaagcttacaacaggcccagcagtgggtgcagtctacaatactgcataaccagccccttcaccctgctgctatggcctttaggcgaggggtcagtatagtggataacgcaaggctgcactctggtaaaaagattgttgttaggctggacttgaaagactttttcccaagcatcacatttgctcgagtcaggggtctattcgagtcgtttggctataatcccggtgtgtccacagtcctgagcctactttgtacagattcaccgagagttcttctgtccctggacaaccagagccatgtggtccctgtgggggaacgcgcattaccccagggcgcatgcaccagtcctgcactggccaacttggtatctaggtccctcgatcgccgcattcaagggtatgccaacaaagctggatgggtctacacgcgctacgccgacgacctggtgctctccaccatccaggaaacagacagccctcatagactgatcagggggatctctgccgtcaccagagacgagggattcgtagtgaacgaagagaaaaccagggtgatgcgcgcaccaaacagacagaccgtcactggcctgttggttaaccatgatgtggggctcacccggaaagacctacggcgggtgcgagcattcctccacaggtgcagttcccaaggcctggaagttgtgtcagctgaaataggcaaggacgctgagtctgtggcacggggacacctggcctatgtccaaatgatcagcgccgcatcctttgagaagttaattagcaagcacgcctggttacaacattga

SEQ ID NO: 13535 - RNA, 1449 nt, synthetic construct
  source 1..1449: mol_type = other RNA
atgtcagagcaagacgccgaccagagcaacagtttgaataatcagtggaagaagcgccttcaagaaattggtcagggtgcctttgagtttgaagaaatgttaaggctaggctttattgacctagatactatcaagaggttcgataaggagatgaccatagaagagtcaaaagaggttttcgagcagctgaccaaaacgtctgcaatcctgtctgaggttgataaggaaattaattccatcaaccgcatcgaggagttactcgctgagatccggtcaaggaggataaaacgggttaaagaagcggccaaagagaaaaagatcaaaaagcaggaggaaaagataaagcgaagtaaggagataaaggagaggaagataaactctcctacctttttgggacgaggcgtgtccaacagattgtctttcgaaaaggtcaagaaagtggacttcaagtccaataagatcccggagcttaattcattcgtcgatgtagccaacgccctggaagtgacaccgtctaaattacagtggctcatctacgaaagaggcgcatccaatatcgatcactaccttcgttatgaaatccctaaaaaaagtggtgggaaacgcctgatatcatcccccaagaaagatatgaagaaagctcagaagtggattctggagaacatacttatcaaccttgatgtggacaaagcggcaatggccttccagaagggactctccatcattgacaatgcgtcgctgcatgtcaagagcaaaattattgtaaggattgacatcaaggacttcttccccacaatcacatttccccgcgtgcgaggcttttttgaaagcctagggtacaatccaggggtggcaaccgtctttgctctgatctgtactgatagccctaaagtgattttgaagcaggaagctatcgatggagacaagaacaataaggattacccccacttcattgccatcagtgagagaagcctgccccaaggagcctgcaccagcccaagcctggcaaacctgatctgcagaaagatagactctcggctgaacggctactcctccaagtctgggtggaaatattccagatatgctgacgacttgattttcagtaccacctccgaagatagttacccacaccggctgattaagagcatttcttcgatcattagcgaggagggctttaaggtgaatcaatctaagactcgcctgatgcgtgctccaaacagacagactgtaactggtctggtcgtgaataacgaagtgacgctcagccggcgggacctcaaacgcatgagggctttcttccatcagtgttcgtctaaagggctcgattttatgtcagagaagatcggcaaagacgccctctccgttgcaagaggatatattagctatgtcgaaatggtgtcacctacaattgccgagaaatttctgagtacaaacagctggatcaaatga

SEQ ID NO: 13536 - RNA, 1419 nt, synthetic construct
  source 1..1419: mol_type = other RNA
atgagcaaggaagaacggagcatcaatcagaactggcgcaagagactcgatgagattgggcaagccgcttacgagttcgaggagatgtctagattgggattcctgtctaataagaagatcgccaaaatgatcgaagcatccggtatctcactggaggagtacgagcaagctaagtcaaagctctctgacatctccaacttcatccgtgcaactaatgaggaaattgaatcgatcgactccgtcgaggtggcccttgagaagatccgtagtgagaggattaaacgcgttaaacagaaaaatgaggacaggaagcagaaaaaagaatcccagcggaaagaaagatcaaaattggcctacgaacagcgcataaagtctccgacatttctggggcgcgacgtctctaataggctgaactttacaggaggcaacactgaaaaactcgagctaaatggtttgcctgtgataaccacattcgctgaattgtcaagcaccctggagacaacgccgaactctctccagtggttgacctatgaaagagactcccaaaaaattgatcactacacccgatttgagattcccaagaagagtggtgggagccgactgatcagctcccctaagcctgcccttagaaatgcccagaagtggatactagaaagcattttgaataagctagacatccatagcgccgcaacagcttttaggcccggcaagtccattctggataacgcgaaattacacgccaacagcaaggttgtgcttagacttgacctgaaggatttttttcctagtattaccttcatccgcatcagggggctgtttgaatctctgggatacaacccaggcattagtaccgtgttttcactgctctgcaccgacagtccccggatcatcttaaaataccatggcgagacacacttcgtgaaagtaggacctaggaatttaccccagggcgcttgcacttcaccagcactcgccaatctgatagctcataagcttgatcgacgactgcagaagtatactgagaaaataggctggatttatagcaggtatgcggacgatctggttttctcctccaacgcagaggagatgcccgcatatcggctggtaaaggcagctagcaagatcgtggcctctgagggcttccggatcaataagcacaaaactaacattatgcggcatccacatcgccaaactgtcaccggactcgtggtcaacaaagatgtccgtattagccggaacgatctcaggaaatttagagcgttcctgcaccactgtgaaaccaaaggactggagttcgttagtaaggacatcgggaagaatgcgatcgccgtggctagaggttatctctcatacataaacatggtgagtccagaacttgccacgacattatcttccaaacacctgtggatttcgaagtga

SEQ ID NO: 13537 - RNA, 1428 nt, synthetic construct
  source 1..1428: mol_type = other RNA
atgagcgaggaaacaacagagattcccgcggactggagggcgcgcatcaaagagcaaggcaaggaggcatttcagctcgacgaattaagaagattgggcttctggcctccctctgcgggccttcaagagcaggttgccagagctgaagaggaagtgaagcgcttggacagggagatggctccactgcgggcacagttacgcaaaattgagggcgacatctcacgggctgccgacgtacagtctgccctggacgaaatccggaaggcaagaatcggtcgagtgaaagccgctagggaggccaagaagattgccagggccatggagaagatcgaccgggagacgttatggaaagagaagagagctagcgaccctcagttcctgggaaggggtgtcagtgtggggctccagttcgaaggaggggacctggagaagctcaccaagaacgaagtgcctcagctgcagaccactgctgaaatagcccttgccataggcatcgaaacccgggaactgacctggctgtgttaccataggggagcttccacaattgatcactaccatagattccagattccaaagaagcgcggcggcatgcgaaatgtgtcagcaccaaaaactaaactgaggcgggcccagcggtttgttctcgagcaaatattggcaaacctccctgtacacgaggccgccatggccttctgcaccggagtcagcacattggataacgcgagaaaacacgctggtaaacgcatagtagcaaggctagacctgaaggatttctttcccagcattgattttagccgcgtcaagcgcttttttcagtctctgggatataacgaggggtgcgccacaatttttgcactcctgtgtactgaggccccaagggcgcaaatctcactggacggccagcgacgctatgtggcaatcggagaaagacgtctgccccaaggtgcttgtacctccccggcactgtccaatctcctgtgccggcgcttggatgctaggcttagtgggcttgcaggtaaacgggggtttaaatatactcgttacgctgacgatctggtgttctcaagcgatgaagcaaggccagacatcggcgccttgctggtcctatcgcagaagatcgttgaggatgaaaagtttgttgtcaactccgagaaaaccttagtcatgaaaactcagaatcggcaaagtgtgacgggactcgtggtgaatgctcagtctagagccacacctcgggtgagtcgcgatgacttgcgaagattccgtgcgttccttcacgggttcgagactctcggcagagaagccatgaccgaaaagctggggcaggatgcactcttttacgcccgaggatatctggcttacattgccatgtccgatcccctaagggctgggaagctgcgtgtgatgcatccgttccttgcccgagattga

SEQ ID NO: 13538 - RNA, 1464 nt, synthetic construct
  source 1..1464: mol_type = other RNA
atggctaataagaacagcacaccagagcccgagccggaagtagccccaaaagactggagggcaagaatgagggcccaggggaaagaggcgtttcagctggaagagatgcgacggctaggtttctggcctcccgcagagggcgtcgaagcacagattgaagttgccgagcgggaagtggcccggatagatagggagctggctcctctgagagtcgagcttgccgccgttgaaacggaaattactcggcttggcgatgttcagtccgccatcgatgatgtgaggaagaatcgaattgcaagagtaaaaagggagaggggagagcgtcgagctcggcaagaactggaaaaggccaggcgcatcgaggccgctaaggtgagagccaagaacgagttaccctttctcggtcaccgcgtgtcttccgggctcgcaaaaactgaatctgatgtccagaaactcgctctgctagacctccctcttttccacagcgctttggatgtcgccgacgctatgggcatgtcagcccctcacctggcctttctgaccttccaccgtggtgccgccacagtagatcattaccatcgcttccagatccccaaacggaggggcgggatgaggaatgtttccgcacccaagacgaagctgagagctgcacagaatttcgtcctggaacaggtccttacaaaggtgccagtccatgaagccgtagcggcctttgccccagggacctctacagtgcagaacgctgcaaggcatatgggcgctcaggtggtggtgcgcttagatctgaaagactttttcccttccatcgactttgcccgggtccgaaatgctttcagttcgttgggatactctggcgcagtttcaaccgtgttgagtctgttgtgcaccgagtcaccccgtgttcagatgtccctggacggtgaaacacggcatgtggcgatcggagaacgcgttctgccccagggcgcatgcactagtccggctctgagtaactggatatgtagacgactagacgccagattgtccggcttagctaagagattcgggtggacctattcacgctatgcggatgatctcattttcagctcatccgagcttacgcccgacattaagactctcataagctgcgcacgcagcatcatccgggatgagaagcttgtggtgaacgacgagaaaactaggatcatgcggccaaacgcccgccaatgtgtgaccggactggtgattaatgcacaagacgcgaacgcgccacgtcctgcccgtactgaccaacggcgatttcgcgcatttctccacgcttacgaaacccacggaagagacgagatgacccaaaagatgggaagagacgcgctggctcatgccagaggcatgatcagttatctccacatgtctcagccagggaaggctagcgccctcattgagaaacacccttggttggcactggagtctgagacagccagctga

SEQ ID NO: 13539 - RNA, 906 nt, synthetic construct
  source 1..906: mol_type = other RNA
tcctatcataggggtgctagcttcgtggaccactaccataggtttcaaataccgaagaaacggggggggcttcggaatgtgtcagcccctaaaacaaagttgagacgggctcagaactgggtcctcgctaatattctaacccccctacctgtacacgaggccgcggtagcgtttaggccaggcatctccacagcgcaaaacgccgcgcggcatgctggaaaggaggtagttgtgcgcttagacctgaaggatttctttccctcgatctcctttactcgagtgaagcgtcttttccagagttttgggtacaatgaaggctgtgctaccgtcttcgccctgttatgtacagaggcacctagagttgagctggcattggatgggcagaaacgacacgtggccgtgggcgatagagtcctcccccaaggcgcatgcacttctccagcaatcacgaacctcctctgcagacgccttgatgctagactgactggagtggccgccaaggaagggtttacctatagccgttacgctgacgatctgatctttagttcagacactaagcgcgctgacgtgggatggatttttaccttcgcccagcgcatagttaccgatgagaaattcgtcgtgaacgcagaaaagacaatggtcatgaaaccccagaatcgacagagcgtcaccggtctggttgtgaactcccaggatggcctgggcccaagggtgagtagggacgacctgcggaagttccgcgccttcctgcacggatatgagattaagggcagggaagcaatgacggaaaaaattggtcaggacgccttgcactatgcaaaaggatacctcgcctacatcaatatgtctgaccctgccaaggccgccaaactgagagctgcacattctttcctgggtagctga

SEQ ID NO: 13540 - RNA, 1530 nt, synthetic construct
  source 1..1530: mol_type = other RNA
atggccgccgagactccaccatcagtgccagaaaacgaccttttcccgaaggattggcgacagcaggtcaaactctatggcggcagaaagggatttattcgtaaagaactcaaacgcctgggattctggcccccagcacctggtagtaaatacaagcacgtcacagctagcgaagaggctgaattggaacagttgtataatcagctgatcgaattgcgggcacccctcttggagcagctagacgcggtggatgctcggatcagagacgcgaagaagcaactcgggaatattggaaacgaagccatcctggccaaaaaaatagagactctgatagcggagattaggctgaagagaattgagagggttcgccaggagagagccgcacgaaaggcacagcgggccgaagcagctgccgctaaggctcaaaaagacaaagcatggcgcgccgccactcttcctcatttgggcagggcagtcagcgctggtctgtcctacgctggcggggatgaagataaactcggcgctcagggcctgcctaatctgtcctcagcaggggaggttgcagctgccatgggcattacaaccgcccaactggcctggttgacctatcacagaggcgcagcggccctcgaccactaccaacatttcactatcccgaagaaaagtggcgggagacgggccatttcatctcccaaggccaagctgagggaggcacagagttggctcttagagaatgttcttgaaaagatcgccgtacacgaggccgcgatggcctttagacccgcactgaatattgcccataacgccgctcgtcacgctggggctagcgtaattgtgcgtctggatcttaaggattttttcccttctatcaccttcaagagggtaaaaagaatgttccagcgcctcggattcaacgagggggtggccacactgtttgcactcctcgccaccgaagcccctcgagtgcagctaactctggacgggcagcagcatttcgtggcggttacggagagattcttaccacagggagcctgtacctctccagccataaccaacatactatgccgatccttagatgctcggttgagcggcgctgcttgcaaacttgggtttacctacaccaggtacgccgacgacctggtctttagcgctcggggtgacaagctgaagggcatcgcaatgagggagcttgccacaaaaatcatcgcggatgagaagttcgtggtgaacgaggctaagacagcagtcctgcgcccccacagtaggcaaaccgttacggggctggtggtgaatgcccagtccacaggtgagggtactggaactcctcgcgtctcgaggcgggacatccgcaactttcgagcatttcttcaccagtatgagttacggggacgcgaagccatgacagagcaacggggacaggatgcactgagctacgccaggggctacctgtcctttgtgcatatggtgtctcccgctcaagcggctgctctacagcagaaacacccctggctggaacgttatacgctctga

SEQ ID NO: 13541 - RNA, 1419 nt, synthetic construct
  source 1..1419: mol_type = other RNA
atgaacgccgagcagaggacacggtttaaggaactgggtaaatcagcttttattcgcgaggagatgactcggttgggctattggcccccatcatcggaaattgctaaccaatctgcactggctgagagcaagctaaaaccactgtatgaggaactgatccgcgttcggaaggaattcgacactgtctcggctgagatagcggtgtctggcgacattcccaccctgctagccgaggtgaggaagcggcgaatcgaacgggtcagagccgagagggccgtcaaaaaggcagagagagagcaggcccgctccgaagccaaaaccgccgatgccgcttggagacgtaagacgctcccttaccttggcgtcggtgtgtcaggagggctggcttattctgatggggatagcgcgaagatcagcgagagagcccttccatcactgaccacagcggctcaggtggcagctgccatcggcataggggaaaatgagctcgccttcttatgctatgagcgcgccgtgtctggcgtcgatcactacgccaggttcgcaatccctaaaaagaagggtggagttcgagtgctcagtagccccaagcgtcgcttgcgtgtagcccagtcctggctgctaaaaaatgttcttgaacctcttccagtgcacagcgccgccatggccttcagacctggcaaaagtgtcgttgacaacgccgccccccatgcaggccaagctatagtagtgaaaacagacctcaaggattttttcccaagtcttggcctccgtcggattaaaggattgttcgagggtctggggtacaatgaaggcgtagcaaccctcttcgctttattggctactgagacaccgcgcattgccgttatgttcgacggaaagaggcgctttgtggcagtatctaaacagagagggctccctcaaggagcatgtacctctccggccttgaccaatctgttatgccgaaatttcgatgcgagattagctggggctgcagcagcatttggcttcagatacactcggtatgccgatgacctgacctttagtcatgcttccgacaaggcccctgtgggtgtgctgctggcccttataaggaaaattgtcgcagatgagaacctcacagtgaatgaagaaaagacgcaggtcctgaggctgtccgatagacagtccatcaccggcctggtggtgaacgggagcgaaactcccagggttagccgagaggacctgcgaaggtttcgggctatcctgcaccagtgtgagagagacggttttgaagcggtgacagcgaggctcggaaaagacgcgcaagcttacgcaggagggtacttgtcctttgtgcacatggcacggcccgacatcgcaggaaagattgccgctgctcatccatggctggccaagtggcgccaggccaacatctga

SEQ ID NO: 13542 - RNA, 1356 nt, synthetic construct
  source 1..1356: mol_type = other RNA
atgactgccgccgagagacagcgtttgaaagagattggcaaagatgcattcatcagggaggaaatggtccggctaggtttttggccccccagtcctgaaatagcggagcagtctgcagaggccgagcggaaacttagaccattatacgatgaactggttggagttcgccgtgaactggacggagtggagaaggctataagggaatcaggcgacgtgcctgccctattggcagagattcggagaaagaggattgagagggtacgcgcggcacgcgtggtgaaaaaagtggaacgggaggcggctcgggttaagaagcaggagcaggatgccctgtggagacgaactgctttgccccaccttggacgcggcgtatcaggtgggctcacattcgttgaaggggagatcgagaaactgtgtgcagccatgggactgactgagagggaattagcctggctctgttaccaacgccctgcgtctaagaccggccattactccctgttcaccattccaaagaagcgagggggcaagagagtgttggcctcaccaaaaagcaagcttcgccaagcacagcgctggatcctctctgagatccttgccaatcaggctccccatgccgccgctatggcattttcaccaggggcctccgtggtcaagaatgcggaaccacatacggggaaatctgtggttgtgaaggttgatctccaagacttctttcctagtctaggagtaaagagggtgaagaactatttcgaacacctcggacatagtgaaggggtcgctactgttctcgctctcctctgtacagactgcccgcgggtagccgtcgaatttgacggtgaaaagaagttcgtggccgtaggaccgaggggtgttcctcaaggcgccctgacatcccccgcactgtcgaatctgctcgtcgagaaactggacaaaaggctgacgggcgcagctcagaagcttggctttgtgtacaccagatatgccgacgatctgacctttagccacgctgatggaagcgcccctgtgggtttgttgctgactctggtccgacagatagtggccgacgagaaattaacagtcaacgagaaaaagacacaggtcctgcgctccagcgatcgtcagatcatcaccggcctcgtcgtgaacggtgagcaaggcgtgcggctgagtagagacgacgtgagacgattccgagcaatccttcaccactgcgataccgaagggtttgataaagtgagcgaaagattaggccggtccgcacaggcttattgccaggggtatctggctttcattaaaatggtgaggcccgagcttgccgacaagctggtgaccgctcacagctggctggtccggtga

SEQ ID NO: 13543 - RNA, 1416 nt, synthetic construct
  source 1..1416: mol_type = other RNA
atgaactcagagcagcggaagcaactcgcggccatcggcaaaagcgcgtttgtccgggaggagatggtgcgtctgggattttggccaccctccccagaagtcgccgagcttgctgcaggcgccgaaaaggaactccgtgtctattacgatgagatgattgctctccgcactgaactaaacggcgtcgaggcaaagatcgccgaagccggaaatataccagcactgctggccgaggtgcgaagaaagcgcatagagagagtccgcgcagagaggatagcccgacgtgagcgcagagctcaggagaagattgaaagtcatgctaaagacactgaatggcggaaacgcgcgctcccatatctggggcatggagtctctgacgctctcgtgtacaaaggaggagatcccgaaaaaaccgccaccctaggtttgcctgctctgacgaccgcatctgatgtggccgcggccatcgggatctctgagagcgatctggcctggctcacttatcacagaggcgccgccactattgaccattactccaggtttaccatcccgaagaaaaggggcggagtgcgggtaatcagctctccgaagaggagactgagaacagctcagagctgggtgctggagtccgtgttatcacccgtgccggttcacgacgctgcaatggcctttaggccagcccgctccgtcgcagacaatgctagacgtcatcagggccaggccgtcgttatccggatagatctgaaggatttctttcccagtatcaccctccccagggttcgcactctgttccggtccctagggtataacggcggggtagcaacactgctggccctgcttaccaccgaggcccctagggtggcagcaaccttggatggcgccagacggttcgtagccgtagggggtcggtcacttcctcaaggggcatgcacgagccccgcggttactaaccttttgtgccgcaagctggacgctcgattaacgggcgctgccgaagctatggggttcgtttacacaagatatgccgacgacttagtgttttcgcacgcaaaacctgatgccccagtgggaatgttgctcgatctgacaaggcgcattattgctgacgaaggcctcacagtgaatgaagaaaagacaagcgtgcagagaggccagcatagacagaccgtgacaggtctggtggttaacggtggcgcgcccaggcttagtcgagaaaatcttaggaggttccgggccatgttgcaccaatgtgagcgagacggtctgcctgccgtgtcagagcggttggggcagaatgcacaagcctacgcagctggatacgtcgcattcattcacatggtggaccctgagaaagctcggcagattgttgccgcgcacccttggatcgctcgctggaagcgagctggaggggcttga

SEQ ID NO: 13544 - RNA, 1326 nt, synthetic construct
  source 1..1326: mol_type = other RNA
cctccaagccctgaggtcgcagccaagtccgttgaggccgaggcaatcctgaggcccatgtacgaggagctcgccatccttagaactgagcttacggggattgaaaaagagatcgctctgattggcgacattcctaacttgcttgccgaggtgcgccgaaagaggattgaaagggtgagagctgcaagggtggtcaaaaaagcagcgagagagaaggagcagggtgaacggaaagcatcagacatcgcgtggcgccggagtacactccctttcttgggccatgggatctctgccggccttcgctacgccggaggtgatccagctaagttgacggcaagtggcttgcccgtcctcgtcacagccggtgatctggctgccgggattggtatcgggaccagggacctggcttttctgacgtatcatcgcggagtcgccatgctcgatcactacagccggtttactattcctaaaaagcgcggaggcgtgagagtcatctcctccccaaagcgccggctgcgagttgcacagcagtacgtactcgaaaaagtgctagccctgctaccagtgcacgatgccgccgcagcctttaggccagggctgtcaatagtggataatgctgctaaacatgcagggaaacccgttgtgatcagaatagatttgaaggacttctttccgagcgtgcccttcccaagagtaaagaggctcttcgaatcgtttggctataaccctggcattgccacactctttggattactgtgtaccgaggcgccccgtgctgccgttacattggatgggtcagccaaacggttcgtagcagtgggagagcggtgcctgccgcaaggagcttgcacttcccccaccctgaccaatttactgtgtcggcgtctggacgcccgcctttctggactggctgatgcagcgggctttacttacacacggtacgctgacgacctggtgttcagccatgctgaggccggtgctgcagttggggctctcctacgagccgtgcgccagataatcaccgaaaccggattcgtggtaaatgaagaaaagactgtggtgctcaggccccatcacagacagtctgtgaccggcctggtcactaacaccgaaacacctagggtttctagacaggacctgcgtcgattcagagccttccttcaccaatttgagacaaagggcgcggaggccgtcacccagcaaatagggaaggacgctctggcttatgccggcggctatttaagcttcattcacatggtcagtcccgaacaggcagaaaaaatcgcggccaagcacccatggttgtcccgatggaagaagctgtga

SEQ ID NO: 13545 - RNA, 1416 nt, synthetic construct
  source 1..1416: mol_type = other RNA
atgtcatccatctcaaagcgcgatctggaccaagtggacgaaatgatagctcggggcttttacaccccgagtggtgacgttcggcgcgcacttgacgccctccgtgagaaccaagggcagatagatcggattgagcaggagctggctaggctcagggcagagttagcagacggccccagtctcgcggagttaattaaacaggccagagccaggcgaattgaacgagtccgcgaggaaagggccaggagacgggctctgagagaagcagagcagagcgagagacgcgccgcgtttgctgctcggaaaagacgagccccccttttcctgggcgaaggagttagcgccggccttcgtttcgatggaggggacgcagccaggcttgctgagcgaggtctgccagcgctaactgatgcggctgccttggccacagccatcgggctaccagtaaagcctgcccgggggatgcccacctttactgaaggtgcagatcagctggcctggctatgctaccatcgaagggtagttgaccacgaccactattcaagatttcggattcccaagagaagtggtgggtatcggcagttagccagccctaagcctctgttgagaaaggcacaacagtgggtgttggaccacctcacatcccggcttgagccacatgcacgcattgccacggcctggcgcaagggaaggagtgtggtcgataacgctcgcccacatgtgggaaaggctgtggtgatccgggttgacatccaggatttttttcccagcatctcttggagacgtgtaagaagagtcttcatggacctggggtattccgaaggtgtgggaaccatgttggcgctgctgactaccgataccgacagagtcgcagtgaggctggatggagaactgagattcgttgcacggggaaaacggggcctgcctcaaggcgcatgtaccagcccttccctggccaacttcgtggccctgcgactcgacaaacgcgtcgatggcctttgcagatctctgggcttcgattacactcggtacgctgacgatctcacgtttagccacgcacaaccaagggccaatgtggcagtgctgctgcagcaggtgtatgccattctgagggacgagggcttcgagcccaatgagcggaagacagctgtaatgcgagcgggaggccgacagatggtgacaggtttgatggtgcaggacgctatccgtgtctctaggcgcgatgtccgccgcttccgtgctatagctcatcagtgtaaattacacgggttcgagacaatctcccagcgtctcgaaaaggatgctaggtcttacctcgacggctttttggcctgggttcgcatggccaatgaggagcaagcccagaaactcgaaatgtggctggaatcgcttgggctcccgaggagggatatgtga

SEQ ID NO: 13546 - RNA, 1581 nt, synthetic construct
  source 1..1581: mol_type = other RNA
atgcacctgcggcatgtcagtgctcggaggcacgaccctcgagcactccatccccacagagggggcgaccatgtacacgctgtcgccggtactcggagaagaggtacccgcggtggtacatgtcgagcgggaaggggacctggaatacgggccatgagcggggatatcacgagtctccgagcaagagtggcaaaggtcgggcggggacaagccgtgtatgaggagatgatccgaagtggctggtggaccgtcaggcccgaagatacacagctgctggcagaggcatctaagcgcgtcactgatatcttggtggccctagatccattggtgctcgaaaggcagcgtattgacgaggaactcttaacactagctaacattgacgtcaaggccgtgcttgaagagattcgggccgagcgcatcgcagagagcagagctaggagggctgcggccaaagaggagcgaagacgccgaagagaagctgcagcagcggcccatgcagcccgagttagaaaaactccactgcatttgggccatggcgtttcaagccgtctggctttcaccgaggcacctaacccggaacttgatcgcgccggactgccacgggtttgcaatgcagaggaactggcggccgccataggaatagatgcggggcgcctccaatggctgtgctaccacaggcaggtgtctgctgtggaccactacaatagattcactatccccaagaggtcgggtggctctagacccatcgctgcccccaagaaatcactgcgcgtggcccagcgttgggtgttcgaacacattgttgagaaactggtccctaacatggccgtgacgatggctttccggcctggggtgtccatcgtagataacgcaagactgcatgccgggcgggccgtagtgatgaggatcgacattcggaatttttttccatcagtgacctttcccagagtgagggggctgtttgaaagcattggctactcaccaggcgtggcaacgttgctggggcttgtctgcaccgaagcacctcgcagggtagccgatttgcacggacgccgctatgctgtagctacaggcccccggggtttaccccaaggagcttgcacatccccgggcctggctaattttgcctgtaggaggctggacgcccgcattcgaggctacgccaggaagctcgggttccggtatacccgctacgcggatgacctagtcttctctcacgaggacgcagacgccccggttgacggtatgagaagggctgtctacaggattctcagggcggaaggattcgagccaaatgaagccaaaacatgtgtgatgcggcgtcaccagctgcaggtggtgactggaatagctgtgaataccgtgccccgtgtaagccgagaggccgttcgcagatttcgtgcgatcgcccatcagtgtcgcaccagaggcgttgaggccgtgactgccgacatcggcagagatgctcttgcttatttaaacggctatctgtccttcgttcggatggttaacccagctcaggcagatcggcttgccgcactcgtccctgaatccggctccgagaaggggcctcaggcctga

SEQ ID NO: 13547 - RNA, 1452 nt, synthetic construct
  source 1..1452: mol_type = other RNA
atgtctaactggcaagatgagattaaacggctgggaaaaagggaattcgaactgcgggagatggaacgcttaggcttctggccacctgcgacagttggggatgtacctcagacttttgacgacatgcgagctaagattgcacctataaatcatgagcttcgcgacattgctgagcagacaagacccctgagactacggcagagcgaggtagaacgcgagttggctcagaccggggatatcgaagcccgactcacgctcatcaggcagcagagaattgagcgtgtgaaaattgcacgcgctgaaaggaaggagagacgcgccagagagagggaagaacgcctggcgaccgacaaggtgaggaggcgagagcttcttccgcatttggggcgcggagtgagtagccgtctgcacttctgcatcccttcagatgcagagaaattggcacggtttcagctacctgtttggaacgagccagccgaccttgcaaattcgctgggcataagtcgggaacaattggcttggctatgctaccatagggaggtggcccctatcgaccactatagccacttctctatcccaaaaaggtctggtggaacgcgggcaattagcgccccccgaccatatctcaaagccgcccaggcccagatccttaccggtgtgctgaaccaagtcgaggtacatgaagcagccgctgcctttctcccgggcaggaatatagctaataacgcgcagaagcatgctcactgcgccgaaggtggccccagcgtagtcctgagggtcgacctgaaggacttctttccctcaattacttttgcgagggtggctggagtcttcgcctccctcggctataatgctggcatttcaaccctgctggctttgatctgtaccgagtcccccaggatcgaagccacattcgatggccagaaatccttcgtcgcactgggggatcgttttgttccccaaggggcacctactagccccgctctcacaaatctcctgtgtcgacgtctcgatgccagactcactggactggccaagcactacaactttacatatacacgctacgccgatgatttagtttttagttcgccgcgctcagacgcacgggtgatatccctgcaacgggggatcttcaagatcctggactccgagcagtttaccgttaaccccgataaggtcgccatcatgcggcggggtagccgacagtctgtgactgggctcgtggtgaactctgatctgggcccaagactgtctagaagagacttacggagattcagagctatccttcacgatattgaaaccgacggagccgacaccgtctccgagaagatgggcaagagtgcgcttcactacgccagaggatacttggcattcgtgcacatggtgaatccagagacagccaccaagctgcgcttaaaacatacgtggctgaacactaatggcccagtgtga

SEQ ID NO: 13548 - RNA, 1446 nt, synthetic construct
  source 1..1446: mol_type = other RNA
atgtctaactggagagacgagatcaagaagctggggaaacgggagttcgagagaagagaaatggagaggcttggtttttggccaccagcgtcctccggcgatgaagctcagaccgtggaagcactgcgtgctaagattgcacccctgaatgatgagctgagggagatcactgaaaagacacgtccgctgcgattgcggcagaccgaggtggaaagggaactcgcagccacaggggatatcgaggcccaactcgccgagatacgcaagcaaaggattgagcgggtcaaggctgctcgggttgagcgaaaagagcggcgcgcaagagaaagggaagctagactagccgctgatggcgagaggcggcacgctttgctgccacacctgggacggggagtctcaaggcgtttgcatttcgacgtggcgtctgacaacgagaagctcgccagattccagctgcctgcttggaatgaacctgcggacctggctgcctttctggagatcacccgcgaacagctggcatggttgtgctatcacagagaggttgcccccctggatcactactcacatttttccatcccgaaacgctcgggtggaactagagctattagtgccccgcgcccatatcttaagaccgcacaagctaaaatcctcgaaggcgtcttgaaacaggtagaggtccaccaggcagccgctgcatttctgcccggcttgaatatcggcgacaacgcccataagcatacgcatactgaagccggaggtcctgcggtggtgatgagaatcgatctgaaggactttttccctagcataaacttcaaccgcgtggccggggttttcgtgagcttaggttataatgccggcatctctactctcctggccctcatatgcacagagagtcctcggatcgaagctacattcgatgggcagaagagttttgtcgcactaggcgagaggtttgttccccaaggagctccaaccagccccgcccttaccaatttactttgtcgacgactcgactctcgcctgtccgggatggctaaacattatggcttcacatacactaggtacgcggatgaccttgtcttttctagcccccactcagacgccagggtaatttcacttcagcgaggggtgtttaaaattttggaagcagagcagttcattgtgaatccagacaaagtggccattatgcgtcggggagcacgacagtccgttaccgggctcgtagtcaacaacaatctgggtcctcgcatttcccgccgggatcttaagagatttagagccatcctccacgacatagagactaacggagccgagagcgtgagccagaaaatgggcaagagcgcattacactacgcacggggctacctggcgttcattcacatggtgaatcccgaaaccgccacaaagttcaggacgaaacatacgtggctagccgccagtgaatga

SEQ ID NO: 13549 - RNA, 1470 nt, synthetic construct
  source 1..1470: mol_type = other RNA
atggccgaggaagatattaagcaggaagccgggccccttactagagaggaatggattgctaaggtccgctcgcagggacgggacaacaccataagagaagaaatgatccgtttgggcttttggagcaatgatgagttgagttcagaagagcaaaggcagcaagccacagaagatgaggaataccagcagctgctgaaagagctgaacaagttaaaagccgagtctgccaaacttagtaacctcaacgagcttctgaagattgcgcgcaagaaaagaatcgaggagagcaagaggaagcgagcagagagaaaagctcgccgcgagagagagcaagcagaagccgcccagcgatggcaagcccacaaacaaactcatgtgatccacgctggaaggggggtaagcggtggcctgcaatccacagtgtacgacgaagctaagcttatagagaataatttgccgctcattcggtcaagcctagagttggccgaagccatggagattcctgtagggcggctcaaatggctgacataccataggaagacggcaactctgaatcactatcagcggtttactattccaaaaaagagtgggggcaggagagagatctccgccccgaaaaagtctctccgagccgctcagcagtgggtgaaaacacacatcctcgacgccctgaccgtgcatcctgcagcaaggggctttgtttccgggaagtccacactggaccatgcagagccacacctccagcaggctgctgttgtgaagatggatcttaaagactttttccccaccatccggttccgccgcgtgaaagggttcttccattacttaggatactcagaagccgtcagcaccatcttcgccctgctgtgcaccgaacctcctagaaaagagatccagttcaatggaaccaggtactatgttgcgatggacgagcgccagcttcctcagggtgcgtgcacttctccagcactgagcaatctgatctgtcgacggctagaccaacgattacgcggtctggcagaaaagcacggctttcactacacaagatatgctgatgacctagcattctcctgcggtgaggatggcctcaacgaaatcggcgctattataaacacgagtcgtgacattataagattcgaaggctttgcggtcaatgaggaaaagaccaggatcctgcgtgcgtcaaacaggcagaacatcaccggcattgtcgtgaatcagaaaccaaacatacgacggaaggatctgcgggcttttagggccctgctctattctgtggagaaaaacggattggagcaggagaaccgccataatcacccacatttctgggattatatcaaggggtacgcctcttatatccggatggtgcggcccgacctcgaagagaagctggctccccgtttattgagaatttcccagaagcacggactgcacgcacccgattggtgtaagcaggtcgccgctaagtga

SEQ ID NO: 13550 - RNA, 1467 nt, synthetic construct
  source 1..1467: mol_type = other RNA
atggcagaagaggaaaccaggccattgacgagggaggagtggcgaaagagggtccagagtgaaggtcgaatggagactatacgcaaagagatgattcggctggggttttggaacgacgcacagctgtcccccgaggagaagcaacaacaggccctggaagacgaagagtacgaaaggctgcagaaggaactgaacaagctgaagatggaatccgccaaactctctaacctgaagcagctcctgaaagaagcacggaagaaacgaattgaggaatcaaaacgtaagagggctgagcgcaaagcccagagagaaaaggagaaagcagaagccaaaaaacggtggcaggaatacaaggaaacccacgttattcacgccggagagggggtcagtggcggcttacaaaatactgagtacgaggaggcgaagctacgcaagaatgggcttccagtgatcggcagcgccctccagttggccgaggagatgaatattcccctacaaagacttaaatggcttacctatcaccgcaatacggccaccctctgccactatcaccggttcactattccaaagcgatcggggggtaaacgggaaatcagcgctccaaagcgcagcctgagacaggctcaggaatgggttaaacaccagctgttggatagactccctatccatcccgcagcctgtggcttcgtccctggtaagtccaccttagtaaacgctagacaacatctgggccaatcagtggtggtaaaaatggatctgaaggacttctttccctcaattacatttaggcgggttaagggcctgttccagtcttcatttgggtatagcgagagcgtgtccacactgttggccctgctctgtacagagcctcctcggaaagaagtggagttcgatgggacttactattacgtcgccatgggagacagacagctgccgcagggtgcatgcacctctccgacgctcaccaacatcttatgtcgacggcttgacagacgtctccagggactggcgtccaaattcggatttcagtacagcagatatgctgacgatcttactttctcttgctctaagcatgacgcagagaaactcggcgggttgatcaatggtgcgcgaagcattatccagtccgaaggattcaagacaaacgagaagaagactaggattttacgggatacaaatcgtcagaccgttacaggaatagtggtgaatcaaaagccaaacatcaggcgtaaggagctgcgcaggtttcgggccctcctgcatagagtggagataaacgggctgaacgaagagaatagagataatcaccctaacttttgggaatacatctcgggcacagccggctacatacgcatggtgaggcccgacttggaggctcgccttgctagtagtctaatcggcatcggagagaaatataacctacatatccccccttggtgcaaacaggctaccgtcgctgatcgctga

SEQ ID NO: 13551 - RNA, 1461 nt, synthetic construct
  source 1..1461: mol_type = other RNA
atggccgaaggcgagaacagacccctcactcgcgaggaatggatcgcccgcgtgagggaggaaggacgagaggagacgatccgctccgaaatgataagacttggtttctggtcgaatgacagcctgcccgaggaagagagacggcagcaggccctggaagacgaggagtacagacggcttcgccagaaactggcagagctacagcgggaatctgcgaagttggaaaacatcgaccagctgttaaaggaggctcgcaggaaaaggatcgaagaaagcaagaaaaagagggctgagagaaaagagcgacgtgaacgggagagggctgaggccaagaaacgatgggagagttatagacaacatcatattgtgcatgccggggtgggcgtttctggaggcctgcaagagactgagtgggacgaggaaaagctgcgacagcaccagctcccactgatcagaactgccgaggaactcgcggaggcaatgggaattaccctgtcacgcctcaaatggctgacataccatcggcaaaccgccactgtgtgccactattacagatttacaatccccaagaagagcgggggcaggagggagatttctagtcccaagaaagcactccgtgaggctcagtcatggataaaggagcagatcttggatcgcattcctccgcacccggcagcttgcggattcgtgcctggcaaatctaccctggatcacgccaggcagcatctccggcagcacgtggtagtcaagatggacctaaaggacttctttccatctatcaccttttacagggtgaaaggccttttccagtccttcggttactccgagttaatttcaacattacttgctttgctgtgtacggagcctcccagaaaagaggtgaccttcgatggcaaggtctatcacgtggcaatcggagaacgtcaactgccacagggggcttgtacctccccagccataacaaatctgatctgtagaagtctggataggagattggaggggctggcaaaagccaaaggttttaggtatagcaggtatgcagacgacctggcattctcaggtggaattgatggggagcaacagatcggatccttgctgaatatggcccggcggattattcgggatgagcggttcgaggtgcaggaagaaaagacacgagtcatgaggagcagtaaccgtcagaagatcactggcattgtagttaatgaaaagcttaacctccgacgccgtgaattacgggcgtttcgggctctgttgcacagcgtcgaaaagaatggcctcgctcaggaaaaccgccaccaccatcctgacttttggggctacatcaagggtatggccaactacattcgcatggtccgcccagattgggaagcccgactagccaagcagcttgttagaatagggaaaaaacatgaactccccgtacctaaatggtgccaacaagctgttgttaaggggtga

SEQ ID NO: 13552 - RNA, 1464 nt, synthetic construct
  source 1..1464: mol_type = other RNA
atgggaggcgaagcaatggccgaggagcaaaatcaccctttaacaagggaagagtggctggaacggctccagcaggagggaagaaccgaggtcatcaagaaagagatgatccgtctcggcttctggagcgaagaacccctgactccagaagaggaggaacagctagctatagagaaccgcgagcgtcagcaactcgaaaaggaactccagagattgaaagaggaatccgagaaactaccaaacattcaggagaagattaacgaggtgcgcaagaagagaattgaggagtcaaagcgaaaaagggccgaacggaaggcccaacgcgaattagcccgccaggaggctaaaaagcgttgggaagaacaccaggccacccacattgtgcatgttggagagggctactccgcaggcctgaccagtatccactacgacgaagagaagctgataacgcaccagttgcccttgattcggtctgccatggagcttgcggaggcaatggagatgccactgtcccgcctcaaatggctgacctatcaccgggataccgctacactatgccactacgcacgcttcactatccccaagaaaagcggtggggtacgggagataagtgcacctaagaaggagcttagacaagctcaggcctgggtgaaagaacatctgctggacccaatccctgttcattccgctgcatacggctttgtgcagggtagaagtacggttgataacgctaaacaacatctgcagcaggcggtcgtaatcaaaatggatctgaaggacttcttccctactattgacttctatagggtcagaggagtctttcagtcattcgggtattctgaagctatttcaactctgtttgggctgctgtgtactgagccgcctcggagtgaagtggaattcgatggacgctattattacgtggcgatgggcaagaggcagcttccgcaaggtgcctgtaccagccccgcgttaacaaatatcatctgcaggagattggaccaacgactgtcgcgccttgccgacacccatgggttttactatacaaggtatgccgatgacctgacattttcttgcaaagaggctagcatgtcccggattggtctgctgctcaaaaagattagagacatcgtgtcttccgagggcttcatgatcaatgaagctaagactcgtatcctcagagcctctcgaaggcagcgggtcacaggcatcgtggtcaatgagaagcccaacctttcaaggaaagagttaaaagcctttagagcattgctgcacaacgtagaaaagaatgggctcgaaaaggaaaatcggagcaaccatccccacttttgggagtacatcaagggctacgttaactacataaggatggtgcgaccagatctgggggagaagttcacccagcagctcgtgaggattgccggaaaataccgactgaatttgagccttcctgtgaataacctctga

SEQ ID NO: 13553 - RNA, 1446 nt, synthetic construct
  source 1..1446: mol_type = other RNA
atgtccgaagagcagttccagcccatgacgcgcgaggagtggattgaacgaataaagaaggaggggcgagaggaagtgattaagaaagaaatgattcggctcggcttctggaaagaagagccagtcgacccagccactgctgaacagattgcaaaggaacaagaggaaagaaagcagctggttgaggagctgaatcaacttaagaaagagtccgaaaagctgccgaatatcaaagagaaactcaaggaagcaagggagaaaaggattgaagagtccaaacgcaagcgggccgagagaaaagccgagcgggagaaggagcgtcaagaagcgaagaaacggtgggaagaatataaagcgacgcatgtaatacacgtcggcgatagcttcagcgccggcctgcagaactttgatcatgatgaggagaagctgattaggttgggcttacccttgatcagatcagcgatggagatggccgaagtaatgcacctgcctctgagtcgcctgaaatggttaacctaccaccgtaacaccgctactctttgtcattatgcccggtttacaatacccaaaaagaacggtggagtgagagaaatcagcgccccaaagaaggaattacgacaagcccaggcatgggtgaaagagcggatcctggataggatacctgttcaccaggctgcctacggctttgtgcctggtagatctaccgtcgaccatgctaagcagcacctgaaacaggctgcagtgattaagatggatctgaaagacttcttccccacaattaatttttggcgcgtcaaaggagttttccggtcattcgggtactccgaggcaatctcgaccctgtttgccctcctctgcaccgaacctccgcggacagaggtggagttcgatggcaagtactattatatcgcaatgggagagcgccagctaccccaaggagcttgcactagtcctgccctaaccaacatcatttgtcgaaggctggaccacagactgtctcggcttgcagagactctcggtttcacttatacaagatacgccgacgaccttgcgttttcttgtgacgagagtgccttgtgcagaatcggggcactaatgacaaaggccagggacatcatcgactctgaggggtttatggtgaacgaggaaaaaacaagggtcttgagatcctcacaacgccagaaggtgaccgggatagtagtcaacgaaaagccaaatatcagccgtaaagagctgaagaagtttcgcgctctcctgcacaatgttgaacgtaacggtcttgagaaggaaaatagacagaatcatcccaggttctgggagtatatccagggatacgtgagctacattaggatggtgaggcctgatctcggcgaaaagttttcagaacagttggtgcgaatcgctcgcaagtaccagctccgcctgagtgctccagtgagcaaatga

SEQ ID NO: 13554 - RNA, 1422 nt, synthetic construct
  source 1..1422: mol_type = other RNA
atgtctgaggaaacacaacccctgactaaggaagagtggagagaaaggatccagcgggagggcaaagaagagacaatcaagcaggagatgattagattgggattctggaccgataaaccactgacccccgaggaaatggcaagcgttgaggctgatgatcaggctgaagccgcacttaagagcgagctgaataagttgcggtctgagtcccgaaaatggtctgatacggaccagctgatcaaaaaagcccgtcagaagcgcatcgaggaatctaaacagcggagagcggaacgcaagaaggcgcgtgcaatcgagcgcaagcagcaagaggagaggtgggccgagtacagacaaaaccacctcgtgcatttgggtaacggtgtctccggtggactggaacagtccacaaccaatcaggaacggctcaagcaactggaccttcctctcatagaaacaccacagcagctcgcatccgaaatgggcatcaccctagggaggctgaaatggttgacctaccaccgcgatctggccaccctcagtcactactatccttttactatccccaaaaaaaacggagggatcagagagataagtgctcccaagaaagagttacgagccgcccaggcctgggtgaagcagtcactcctggaccagctttccacacatccagccgcatacgggtttgtgcagggaaggaatactgtggatcacgcaaagcagcatctgaatcaggccatcgtcgtgaagatggacttagcagacttcttcccgacaataaccttttatcgcgtacgcgggctgttcgcaagttttggctactcacaacaaatgagcactgtcttcgcccttctgtgtacggaacctccgaggaagagggttcgatttgacggaacatattattatgtagccatgggcgaacggcagctgccccaaggagcttccaccagcccagccattacgaatctaatatgccagaggttagatcagcgactgtcgggccttgccgaaaaagagaactttatttactcacgctatgctgatgatctcactttctctacatcagaccagcaagataggagagtgggggcactacttcagactgtgagacagattattcacttcgagggcttccagcctaatgaggctaagactagaattctgcgaaaaagtcggcggcagcgtgttaccgggatcgtcgtgaatgagaaggctaacttgagccggcaagatcagaggcggttcagggctattctgcacaatgtgggtaagaacggctttgacatcgagaaccgtgaccaccacgacgattttctcgcgtatctccagggctacattagctacgcccatatggtccgccctgacctggccgaaacctggcagaaccaattggacagagctattgctgcgcatctgaaagactga

SEQ ID NO: 13555 - RNA, 1464 nt, synthetic construct
  source 1..1464: mol_type = other RNA
atgtccgaggagcaaagtcaggagacgcagcagctcactagagaggaatggatacagagaatccgggaagagactaagggggaagtcatcaagaaggagatgatcaggctggggttctggagcgaagaacctcttcccccggaggagaaggagcagcaagaacaggaagatcgcgaattcgccaggcttcagaaggaactccaggctctgcaacaggagagcgagaaactggaggataccgacaccctcatccgggaggctcgcaaaaaaagaatcgaggaaagtaaacgaaagagagccgagcggaaggctgaacgcgagcagcgtctagccgaggccaagaaacgttgggaagagtaccaggcgaaccacgtggtccacgctggaatcggcgtcagcgcaggcttgcagaaccacactatgaacggatatcagcttgaacaacttggtctgccaattttgacctcccccgctattatggctgcagagatgggtatagagctgtcacgccttaagtggctgacataccatagagacacagcggccctgtcacactatcacaggtttaccatacccaagaaaagcggcgggaggagaataatttctgcacccaaacccgaactgcggcatgctcaagagtgggtgaagacctacattgtggatcgagttccggtccatgaagccgcctacggctttatccccaaacgatcgaccgtggacaatgcacagcaccatctacagcgcgctgccgtgatcaagatggatcttaaagacttcttcccttccattacattccagcgcgtgaagggcttgtttcagtcctttggttattctgaggctgtctctactctgctagccttactgaccacagagccacctcgtgaaaaagtcagctttgacgggaagttctactacgttgcagtgggtaagcgccaactgccacagggggcatgtacaagtcctggaatcacgaatctcatttgcagacggctggacgccagactcacagagctggctgagaagatgggctttacctacactcggtatgcggacgatttaaccttctcatgcgaccaagacgggctcgaacagttgggagtgctgttacgaggagtaagggatattgtgcggttcgaaggactgcaagtaaacgagaagaagacacgtgtcctgagggcctctcgaagacagcgggtgacgggaatcgtggtaaacgataaaccttccttgccaaggcaggagctccgcacttttcgggccctcctccacaacgttgaaaaaaatggcctggaggccgagaatagagaaaataggccacatttctgggagtatattcagggctatgtgtcatacgttaggatggttcggcctgatctgggggaacaatttggcgaacagttacagcgcatcgccgcaaagtatggcttgaaactgaatgccgcgagggaacgagaggcaaaatga

SEQ ID NO: 13556 - RNA, 1443 nt, synthetic construct
  source 1..1443: mol_type = other RNA
atggcagaagaggagaagcagccactaacgcgcgaagagtggattcagcgaatccaggaagagtcccgggatgaagttattaagaaggagatgatcaggctcggcttctggatcgagaagccactcgaccccgaggacgagaagcaacaggctcaggagaatgaagagtatgcccgccttcagaaagagcttaatcaactgaagcaagagtcagcaaagctctctaatgtggatgctctgattagagaagccagaaagaaaaggatcgaggagtctaaaaggaagcgcgccgagaggaaggcccagagagagagggaaagatcggaagccaagaaacgatgggagacttacagatcccagaatatcattcacgctggcataggggtttctggggggctgcagtaccacgaaagtgacgaagagaaacttaaatcactgcaattacctcttctcagttcccccgccgtcctggcagatgaaatgggaatggatctgtcccggctcagatggctcacttatcatagagacaacgcaaccttgtgtcactatcatcgctttacaatcccaaagaaggggggtggcgagcgacttatcagcgctcctaagcaggagttacggaaagcccaaaactgggtcaaagaacatatactggaccgaatccccttgcacgatgctgcatatgggttcgtgcccggacgatccaccgtggacaatgctagctgccatcttggccaggaagccgtcataaaaatggatctccaggatttcttccctagtattacattcaggcgtgtgaagggggtatttggatcctttggctacagtgaggcaatttctaccctcttagctctgctcacaactgaaccccctcgggaagaggtgatgttcgacggtaagtactactatgtggctattggagagagacagctgccacagggagcctgtacaagcccaggtattaccaacatcatctgccgccgcttggatcagaaattggaggaactggcgcggggtctgaacttttactacacacgttatgcagacgatctaactttttcatgcggtaaggaaagcactcaacacatcggcattttgctgaggggcgtcagggaacaggttcgctttgagggcctgcgcgtaaacgaagggaaaacgcgaatactgcgtagctcaagaagacagagagtgaccggaattgtggtgaacgaaaaaccgaatctgacccgcaaagagctacggcggttcagggccctgctgcacaacgtggaagccaatggcttggaggcggagaaccgggacgatcatcctcggttttggagcttcatccaaggatatgtctcgtacatacagatggttaggccggacgtagcggccaaaatgagcgaccagttaaatcgtatcgcggagaagcacggcctgcaccggacaatcaggacctcttga

SEQ ID NO: 13557 - RNA, 1461 nt, synthetic construct
  source 1..1461: mol_type = other RNA
atggctgaggagaaccagcaggaaacacaacctctttcacgcgaggagtggatagagagggtcatgcaggaggggaaagacgaagtcattcgccaggagatgataagaatgggcttttggtcggaaaagcctattccacctgaagagaaagcaaaacaagaacaggaggatgaagagtatgcactcctgaccgaagaactgaatcggctcaagcaggagagcgagaagctcggcgacattgaaagtatgatacgggaacggagaaagcaaagaatcgaggagtccaagaggaagcgagccgagagaaaggcagaaagggagcgccttagagcggaggcacgcaaacgttgggaggaatacaagtctaagaacgtcatccatgtgggagccggatttagcaaggacttgcagtcttttgatatggacgaggagaagctgcgactgaacaaacttcccgttatcaggacggctgaggagctagcgggcaagatgggcatctctctgtctgaactcaaatggctgacatatcatagagacacggctaccatttgccactaccatcgtttcaccatcccgaaaaagagcggtggcatgcgggagatctcagctccaaaacccaaattacggcgcgcccaggagtgggtgaaaactcatatcttgggtgggagcgaagtgcacccaagcgcgtacggtttcattcccgggaggagcactgttgacaacgccaagtgccatctgaagagggcagccgttatcaagatggatttgaaggattttttcccctccatcactttctggcgtgtgaaaggtcttttccaatccttcgggtattcagcggccatttcaaccttactggccctgctatgcacagagccaccccgcaaacaggtgcagtttgatgggaaattctactatgtggccattggagagagacagctaccacagggggcctgtacaagtcctggcatcactaacctgttgtgtcggagactggatctccgcttaaccggattgggagaagctaatgggttcacctactctagatatgctgacgacctcaccttttcctgtgatgaagaaggcctgccgcagatgggcggagtcatcaatacagctcgccacatcattcgatttgaaggcttcagggtaaatgaggaaaagaccagggtacttcgaagtagccgtaggcagaaggtgactggtatcgtgctcaacgaaaaggtgaacataagtcggaaagaacttagagccttccgagccctgctgcacaatgtggaaaaaacagggcctgagaaacaaaatatctatcaccaccccgacttttggggatatataaagggatacgcatcctacattcgcatggttcggcctgatctcaatgagactctggaacagcaactgaaccggattaacaggaaatacaatctggagaagtccgcagtcgccgaggctaagggctga

SEQ ID NO: 13558 - RNA, 1464 nt, synthetic construct
  source 1..1464: mol_type = other RNA
atgtcagccaataatccatcagaggaggttcaacctctgagtagggaagagtgggtccagaaaatgagggaagagggggggaagggcaatctggtgaggaaggagatgatccgcctgggattctggacagaaaagactctgacggtggaagagtaccagaagaagagagagctcgaccaggagtaccaggagttatcccaacagctcgaaaaatttcagcaagagaacgccaaactggaagatgtgaagaccctggtgaggcaggctcgggccaaacggattaaagaatctaaagagagaagggccaaacggaaggctgagagagaggaggccctggcacaaagacaacggaaatggcaggagtatcgtgatactcatattttgcatgtcggagagaatgtttcaagccacctcgaagatcaagaatacgaagaggagaagctgatatcccagcagctgccaatacttcggggcagccttcatctagccgaagagatgggtgtgtccctaagccgcctcaagtggcttacatatcaccgaaagaccgctactatatcccactaccacaggtttacgattccaaagaaaagtggaggaaaacgcgagatttcgagcccgaagagtgaattgcgtcaggcgcaatcctggatcaaacaggagatcctggaccacctgaaagtccactctcaggcatacgggtttgtgcccagtaaaagcacagtggacaacgcgcttccgcatgtggggaagcaggttgtggtcaagctggatctccaggacttcttcccctctatcactttccccagagtgcggggtttatttcgaagctttggctactcaggtgaggtatctaccgtgttagctctcctctgcaccgagccccctcatcgcgaaatcgagttccagggcaagaagtactatattagtattgaggaacgccagttgcctcagggcgcatgtacctctcccgctatcaccaacttgctctgcctgagactggatgaacgccttgctcagttggcctcaaaaagaggattcacatatagccggtatgccgacgacctcactttctcctgttctggcgattcggagcagcagatcgggaagatgctgggcacaatcaggaagattgtacaagcagaaggatttcaggtcaacgaaaaaaagacaagagtcctaaggtctagtggccggcaacgtgtaaccggagtcgttgtgaacgaaaagccttccctcgacagaaagcgcctgcgaaacttcagggccctgttgcacaacgtagagaagaagggtctggacgcggagaatcgagaaaaccacccaaatttttggcagtatatactggggaatgcttcatacatccagatggttcgacctgatttaaaagaagagattagccagaaacttgccaaaatcgcagaaaagtatggccagaactactccctgcaaagcgtgaataagtga

SEQ ID NO: 13559 - RNA, 1458 nt, synthetic construct
  source 1..1458: mol_type = other RNA
atgagcaatgaaaccaactatgagcaacatcagcccctgaccaaggaggagttccaagctagaatgaaagaaatggggaaaagccagtttattcgagaagagatgctcagattgggcttctggacagaggaaaccttgacacccgaagaacaggcagaaagaagccaagatctgtcagagttgcagatagtccagaaggagcttgacgagttgcgcagtgaggcacgcaagctcggcgatattaaggaacagctgaagatcgcgcggcagaagcggattgaggagtccaagcgtaagcgagacgagaaaaaggcccagatggaacaggcctccgcagaggcccagaaacagtggacaaagtacaaaaagattcacattccccacgttggtaatagatactctatcggcctcgaacatacaggcatggataaggagaaactggaggcttggcgtctgccagtgctgcagactgccaaggaactcgcatgcgctatggagatcgaacttaaccggttacagtggctgacttatcaccgagacactgcgaccctgtgccactaccatcgattttctattccaaagaagagtggagggacccgcgagatctctgccccaaaaccagaactccgacaggcacaacagtgggtgaaagaacatatacttgacctgctgcctatacatcctacggcttacgggttcgtaaaaggcaaaagcactgtggataacgcccgggtgcatatccaaaagaggattgtggttaagatggatctgcaggacttttttcctactattaccttctggagggttcgtggactatttgagtggatgggctacagtagacagatctcaacactgctagccctgctgacgaccgaaccccctcaccagcaggtcaagtacgacggaaagtactattatatcgccatcggtgagcgccaactaccgcaaggcgcctgtacgtcacccgccatcaccaatctcattacttggggcatggaccagcaactccacgcttggactgaaaaaatgggttatgcctacagccggtatgctgacgatctgacctttagttctgagacactgtcaagctcccagcaagtgggggtgctcttgaaaagggttagatctacagtaaagcttcatggattccaggtgaacgaggagaaaaccaggatcttaaggcacacccggcggcagcgcgtaacaggtatcgtcgtgaatgaaaaaccaaacctgactaggcgcagattacggcagttcagggctttactgcatgacgtcgaactgcacgggcttgaggcagctaacaggcagaatcacccgaatctctgggcctacataaacggatatatctcctacatggcgatggtgcgccccgatctttcccacaagtataatgagcaggcaagcagaatttcccaaaaatatggattgtcgtacgtggggatccctgtctga

SEQ ID NO: 13560 - RNA, 1449 nt, synthetic construct
  source 1..1449: mol_type = other RNA
atgtcagaagagaacaaagtgctgacccgcgaggagtggataaataaaatccgatcagagggcaaggccgagacaattagatccgaaatgatcaggcttggcttttgggaggcacccaatcttagcgaggaggagcgagagcagcaagctaaggaagacgaagagtataaggaagtgagaaaggaattacaggaattgcagaagaaaagcaagcagctaaaagacatcgatttcctgctgaaggaagcgcgcaaacgcaggatggaagagtcgaaaaagcggcgagccgagaggaaagcagtgcggaagaaagctcaggctgaggccaaagagaagtggcgcaaataccgacagaatcacgtaatccacgtaggagatggggtcagtgcggggctcgctagcacagagacgaacgagcagaagctgatgcaacaccaacttcccctgattcgttccgctttgcaactagcccatgacatgaacatcaccctctctgagctgaagtggctcacctatcatcgaaatacagcgacaatcaaccactatcaacacttcaccattcctaaaaagtctggcgggaagcgggaaatcagcgcccctaagagtaagttaaggagtgctcagagttggatcaaggcaaacattttagataagctggccgtccacgatgctgcgtacggcttcgttacgggtaaaagcactgtggataatgccaaacaccacataggtaaagatgccgtggtgaagttcgaccttaaagactttttcccatcaatatctttcgtacgggtgagaggtctgttcgaatctttggggtatagcagggctatttccacgctctttgcacttatctgcaccgagccccctcgccaggaagtggagttcaatggcaaaatgtactacgtggctatcaatgagagacagctaccacagggagcctgcacttcccccacactgacaaacctgctgtgtcggagacttgacgaaaagctcactcacctcgcaaaggagaaaggattcacctatactagatatgccgacgacctgactttttctggaaatgaggaagcactcaagcagatagggtcactgatgggctcggttcgcagcgtcgtggactttgaaggatttattattaacgaagccaagacccgtgtcttgaggaacggcagaaggcagcgggtgaccggaatcgtggtcaacgaaaagccgaacttgactcggaaagacattcgctccttcagagccctgctgcataacgttgaacatcacgggctggaacaagagaaccatcggaatcatccacatttttgggagtacattaatggttatgtctcctacgtccagatggttaggcctgatatcgggaagaaatttgccatccaggtgcagaggattgcagataagtacggcctcccaatccgtgtttacatagagaaactgggctga

SEQ ID NO: 13561 - RNA, 1449 nt, synthetic construct
  source 1..1449: mol_type = other RNA
atgtcagaagagaacaagatgttgacccgagaggaatggattgcaaagattagaagcgagggcaagcacgaaaccatccggggcgagatgattaggctaggattctgggaagctccaaaccttacagacgaagagattgagcagcaggcaaaggaagacgaagaatacacggaggtgcggaaggagcttctcgctctgcaaaaggagagcaagcagctcaaagacatcgatttcctgctgaaagaagctcgcaagcgacggatcgaagaatccaaacagagacgcgccgaaaggaaggctcagagggagaaatcccaggcggaggcgaaggaaaaatggaaacagcacagggagacacacgtcatacatgtgggagatggtgtgtcagccggtctggcctcaaaagagacaaacgagacgaagctcatggagagacaacttcctctgattaggagcgcactccagctagcagaggagatgggcatcacgctgtccgagctgaagtggttgacttaccataggaataccgctaccattaatcactatacaagattcacgatccccaagaaaaacggaggacaacgggagatcagcgctccaaaggctaagttacgaaccgcacagacttggatcaaagaaactatcctggataacctcactgtgcacccagcagcgcatggattcgtaaccggcaaatccacagtcgataatgctaaacaccacataggcaaggatgctgttgtgaagtttgatcttaaagacttcttccctagtattagctttgtgagagtccgcggactttttgagagtttagggtattcccgcgccatatctaccctgtttgccttgatctgcactgaggcccccagaaaagaagtggagttcaacgggaaaatctactatgttgccatgaaggagaggcaactgccccaaggggcctgcacctctcctactattactaatctactgtgtcgacggctggacgaaaagctcacccagctggcccgtgacaaaggctttacatactcacggtatgccgacgatctgaccctgagtgggaatggggacacattgcagcagattgggagcatcatgaactctatccgcaatatagtgtcgtttgagggcttcgtcgtgaacgaagaaaagactcgcgttcttcgtgccggtcgacggcaacgcgtcacaggaatagtagtgaacgaaaagaccaacctcacaagaaaggatattcgtagttttagggcactgttgcataacgtggagcagaaaggtttagaggaggaaaatcacaagaatcatccttacttctgggagtatatcaatgggtatgtttcttacgttcagatggtccggccggacatcggccagaaatttgccacccaggtgctcaggattgcggaaaaatacggcctccccatcagagtacatgccaagaagctgggctga

SEQ ID NO: 13562 - RNA, 1458 nt, synthetic construct
  source 1..1458: mol_type = other RNA
atgtctgaggactctaagcctttgacaagggcagagtggtatgaacggataaagcaggaggggaaatacgaaaccatccgatcggatatgctgaggttgggcttttatcaggaacccgaggtgagcccccagaagaaagagcagtggaagcaggaggacgaagcctaccaacagctgctccaagaattacaacaggtgcaactggaggccggaaaactgccaaaaatcaacgacctcctagcagaggcccggcaaaaacggattgcagccagcagacaaaagagggtcgaacgaaaggccgtgagacttaaagaaaaggaggagcagcaggcgcactggcagcagtacaaggcagaccacataattcatttgggaaggggggtttcagctggcctgcagcagcaggaaactgatgaaacacagctcaataagctggggctccccgtcctgacaagctcgaaacaaattgccacccaaattggcctctccctctcagagctgaagtggctgacgtaccaccgtaacaccgcgactattagccactaccatcatttcaccatcccgaaaaagaacggtgaaaagagagttatcagctctccaaaacctcttctcagaatcgcccagagttggatcaaagaggctattctggaccatattgatgtgtccccacatgctttgggtttcttaccacagaaaaatatcatggacaatgcaagacctcacgtaaaaaaagacctgatcgcaaagatggacttgaaggatttttttcccaccataaccttctggcgcgtccgcgggctgttccagtcttttggatattctgaggccattagtactcttctcgccctggtttgtacagagcccccccgcaaaaaggtgagctttgctggcaaggtatatcatgtggcgcttggggaaaggcagctaccacagggagcgtgcacctccccttccctcacgaacatcatctgccgtcggctggattcccgcatgaacggcttggccgacagtctgaatatgacctatactcgctatgccgatgatctgaccttctccggcactaaggtgaagaaccaccacattcggacactgttaagtaagtctagatcaattatcaccttcgaaggatttcacattaacgaagagaagacaaggatccttcgagccacacagcggcagaaagtaactggcatcgtggtcaataagaaactgaacataagcaggcaggagctacgttcattcagggctctgctccacaatgttaaacgctcaggccttgtcgaagagaatcgggaccagcatccgtacttctggggatacatcataggttacgctgggtacatcagaatggtgcgacctgatttaactcagagaattgctagcgagctgatcgagatagcacaaaagtatcagcaagaaattcctgcttgggtgcaccagacgtccaagagtgagtga

SEQ ID NO: 13563 - RNA, 1455 nt, synthetic construct
  source 1..1455: mol_type = other RNA
atgactgaggagcagaaccaggaagaggttaaacaactgacacgcgaagagtggatcgagcgcattaaatcagaaggacgaaccgaggccatcaaaaaggagatgctgagactgggcttctggatagaaaaacccctcacaccagaagaaaaaagagagcaggcggaagatgagctcaaactgaaacaactgcaggccgagctccaggagctgcaaaaagaatctgccaagatctcgaatttgaacaaaatcctgaagcaggcacgcgctaagcggattgaagagtcgaagaagaagcgagctgatcggaaggccgccattgagaagcgcgaagctgacaggaaagcccgctggcaggactataaggaatcccacatagtacatgttggcgacggcctctccgccgggctacaaagttttgaaacggacgagaaaaagcttatggaacagcgactgcccctcattaggagcgctgtgcagtgcgcggatgaaatgggaatcaccctatctcagttgaagtggctgacataccatagagacaccgcgaccatcaaccactattatagatttacaatccccaagaagaacggcggggagcgagagatatcatccccaaagcccttacttcggcaggcacaggcatggatcaaagctcacatcctggaccaaattcaagttcattccgctgcctacggattcgtgccgcagattaacaccgtcgacaacgcgaagcagcacgtgaatcaggccgccgtcatcaaaatggatctgaaggactttttccctagcattactttctggcgcgtccgtgggctctttcatagcttcgggtactccgaggctatatccacactgttcgcatgtttatgtaccgagccgcctcggaaagaggctagctttaatggtaaaatttaccacgtggcccttggcgagaggcagcttccacagggggcatgcacgtcaccatctataactaacatcctgtgccggcgtttagatgaaaggctgacaggccttgcccagactaatggattcatctacaccaggtacgctgatgacctgacttttagctgtcaagaaagtagcttgtcaaagattggaaccttgttgaatagtgtgcgcaacattgttaagtttgaaggttttaccgtgaatgaggagaagaccagagtgctcagggccagccgaaggcaaagagtgactggtatcgtggtcaacgaaaaacctaaccttacaaggcaggatttgaggcgtttcagagcactcctgcacaatgtggaaaagaatggtctagaggcagagaaccggtctaatcatcccaatttctgggcctatatccaggggactacgagttacattagaatggtgcggcctgagctgggcgagaaactgggcgagcaggtagaacggattgctatcaagtatcacctcgcaggatctgtcgtatctaagtga

SEQ ID NO: 13564 - RNA, 1458 nt, synthetic construct
  source 1..1458: mol_type = other RNA
atgcaaggaaagaacgacggcgaggtccagcccctgtcaagggaggagtggcttgaaagggtaatgcaggaaggccgtgacgaggtcatcaggcgtgaaatgatccgaatggggttctggtccgaggaaccgttacctccagaggagctggagaaacagaaacaggaggaaaaagagcttgcccagctcaaggaagagctggaatccctggaggaaaaaactagaaaattgggagacttagaagccatgatccggcgccgacggcaggagagaattgaagagtctagaaggaggagagctcagagaaaggaggagagaattcgtcgccgggccgaggctcaagccaaatggaaagaataccgagagcagcacgtggttcatgttggcgagggatttagtggcgatctggagcttctgaattccgatgaggaaaggctccgggaaagcggtctgcccttgattcataccccccaggaactggccgaagccatggagatccccttgggccggctgaaatggcttacgtaccaccgggataccgccacaattagccattatcaccatttcactatcccgaagaagaacggtggcaagcggattctcagcgccccaaagaagcacctccgccaggctcaggagtggattagggctcacctgttgaatcgagtcgaggttcacccatgtgcctatggattcgtgaggggaaagtcaatagtagataacgctgcgcaccatgtggggaaggcagcggtcatcaagatggacctgaaggatttttttccttctgtacattatccgcgagtcaagggcatgtatcagtcttttggctactcacccgcagtgagcaccctgcttgctttactgtgcacggaacctcccaggaggaaggtggaatttgacgggcgcatctatcacgtcgctgtgggcgacagacatctaccacaaggggcgccaacctcgcctgccattacaaatattctctgccgcagattggacgaacgcctactggggctggccgactctcacggtttcgcatacaccagatacgctgatgatctcactttcagttgttggcctagcggagaaaaacggattggcgccctactcggaactgcccgcggtatcgtgaggtacgagggttttgaggtgaatgaggaaaagacaagagtgctccggagatcccgccggcaagcagttacagggatcatagtgaatgagaagaccaacttgaatcgtggagaactgcgggcattccgagccctgctgcatcaggttgaacaaaaaggccttaaagggcagaacatacacaaccaccctaacttctgggagtatataaaaggctacacatcctacatcgagatggtgcgcggagaggctgcagctccatacagagaacaggtgaagaggatcgcacgcaaatatgggctcgaccccaaggtcgcaagtgatcacgcgtga

SEQ ID NO: 13565 - RNA, 1455 nt, synthetic construct
  source 1..1455: mol_type = other RNA
atgagtgaagagaaacggccacttacacgggaagaatggatccagaaggtgtcggccaacgggagggaggctacgattcgcgaggaaatgatcagaatggggttctggagcaacgacagtttaacagaggaggagaagaaacagcagcaggcagaggatgaagagcgagccagactcgcagccgagctgcaaaggcttcagagcaaaggaatgtcaatgccgaaggtgcaacagctgctccaggaagtccgtcagaaacgcattgaggcctcccgcaaacgaagagaggagcagaaggcagagagggagcaaaagcgccgggaagccaaggcggcttgggaacagcacagggctcgccacgtagtgtacgcaggcgaaggcgtgtccggcggacttgagaataaggaaacgcagaccgagatgttgcggcaggccggactccccatcgtgactacagctgaagaattggcagaggccattggtatcagcgtgagcaagctcaaatggttaacgtatcataggaatactgccactctgtctcattactttaggttcactattcccaaacaaaacggtgaggagagagaaatcagtgcacctaagcagaccctgcgccaagcgcaggcgtggattaagacccacctcctggacaggctacctgtccactctgccgcccaagggtttgtccccggcaaatccattgtggacaacgcaaagcagcacgttgggcaagccgctgtaatcaagatggatctcagggatttcttccccagcatccacttctatcgggtgcgcggtctgttccagtcatttggttactccgaaatgatcagcacattgcttgctctgctgtgtaccgagccacctagaagagccgtcacactcgggggaagggtctatcatgttgcaataggagaacggcagctgcctcaaggcgcttgcacttccccagcaatcaccaacctgctgtgtagacggcttgacgaaaggttgtctggtctggcacagaagtacggctttcagtactcacgctatgccgatgatatgaccttttcatgcagtgaggctgggattggacaaataggcgcggtaatcaatcaggttagacgcatagtggctttcgaagggtttaccgtcaatgaagacaagacacgtgtcttaaagcgaaccaatcgtcagacagttactgggattgtagtgaatgagaagatcaacgttaaccggcgagagtggaaacagttcagagccctgctgcataatgtggagaagaatggactagaggccgagaacaggaagggccacccgcactactgggattatattaaaggctacgctaactttgtgcgaatggttcgtcccgacctggaagagaaactcatccgacagcttcgggccatagccgtgaaacatcggttgtctctgccaggctgggctagaaaaaccgtgcagtcttga

SEQ ID NO: 13566 - RNA, 1470 nt, synthetic construct
  source 1..1470: mol_type = other RNA
atgagtgacgagcgcatggaagaaaaacggccacggacgctggaagagtgggtagagcaggtgaggaggcttggccgggaacacgccatcaggaccgagatgatacggcttgggatgtgggaagaaaaagagttgacccccgaggaaaaagcccaacagcaacgcgaagacgctgagtatcaaaagctggcagaggaatcgatgcggctgcagcgcgaactgacaaagctgggcaatctccagcacttattggcggaggcaaggaagaaaagaatcgaggaatctcggagacgccgcgaggagcgtaagaaagaaatcgccaagagagaagcagaacgcaaacgacgctgggctgagcacctggaaatgcacattgtccacgctggcgctggtgttagtgggggtctgaacgccttcgagcaccaggaggaaaagttgatggcagccggcttgcctctgatcaggtctgcccgtgagctcgcagagctaatggatatgccaatatcaaggttgagatggcttacttatcaccggaacgccgctacggtgtgtcattaccacaggttcacagtccccaagaggggaggggggttgcgagagattagctcacctaaaccagaactgcgccgagcccaggaatggatcaagcgggagatcctcgatcggttccccgtgcattcagctgctaccggctttctccctggcaagagcgtgctggacaatgccgcaccgcatctgggacaagccgccgttattaaactcgatcttaaagacttcttccctggcattaccttccatcgtgtgaagggactgtttcgctccttcggatattccgaggccatagccaccctgttagcattactgactaccgagcccccaagaaggcccgttgagtttgacggcaaaatgtaccatgtagctctgggggaacggcagctaccacagggtgcctgcacctccccagcaatcactaatctcttgtgcaggaagctggatgccaggctcgaagggcttgctcgaaagcacggctttcggtacagcaggtatgccgacgacctcacatttagctgtccggccgaacgcaccgatgcgatccctgtcctgctgggcactgccagagccgtgatccgccacgagggatttgaggtgaacgctgaaaaaacaagagtgttacggtccagtactcgacagcaagtgacaggagtagttgtgaacgagaagcccaacatctctagaaatgagctgcggcgattcagagcaattctacatagagtgtggcagaatggtccggaggctgagaacagggacggacatccccgtttttgggagttcatacaggggtacgcggcgtggattagaatggttagacctgatcttgaggggaagctcgcagtccagctcgctcgaattgctgagaaacatcgtctgcctgtggcgggatgggtcaaggaaacagcagtcagaggttga

SEQ ID NO: 13567 - RNA, 1395 nt, synthetic construct
  source 1..1395: mol_type = other RNA
atgaatgaggacgagaaggcccgattgtaccgggaagtcaccagatctgcctctgagtcagctgtgctccggcgtatgcatgccctggggttttggccgcacggcgaaggactaccccctgatccaccagaagagcatgccgagcgcgccaggattgaggcagagctcgctgacctcaggagaacacatgcaagagtggaagatcccgaagccgctctcgtagaggaacgcagacggcggtgggaggaatccaaagcaagaagagctgaggcacgggctaggcgcttgcaggaacagcaggtccgtagagaggagtgggatcgccaccgttcctcaaccatggtacacgcggggataggcgtgtcagcggggcttcaggacgctcgaagtgacgaagaggccctgagtaggcgcgggttgcctgtgctacaccgagctgaagatctggccggacagatcggaatagagctcggtgccttacggtggctgacgtatcaccgcaggagcgcgtccgttgtgcattatcatcgttacgaaatcgcaaagaagaccgggggcgttaggtgtattagcgcccccaaaccagcacttgcattcgcacagcggtgggtgttcgaccagatcttgcggcggttagatcccgagccacaggcccatggtttcgttccggggagatctattgtcactaacgcatcgacccatgccggccgagcagtggtagtcaacttggacatgaaggattttttcccctctgtcacatttcgccgtgtcaaaggtctgtttcgagctattggttacagcgagcatctggcaaccgtactggcgcttctatgcacagagccccctcgcgttccagccactctggatggcaagacaactcacatcgctctgggcgaccgcgttctccctcaaggagcttgtactagtcctagcattaccaacgctctttgcaggaggctcgaccgacgactggatggcctcgctcggagacacgggttcacatatacaaggtacgccgatgacctgaccttctcaggtgacaggccagcggtggttggacggcttctccgttctgtgagatccatccttgccgccgaaggattcgtcgaacacccaagcaaaacgcggatcatgcggagaggaggaaggcaggaagtgactggcgtgactgtgaatgacagacccaatgtgtccagacgagaattgaggacgctgagggccatcctgcacaatgccgctcgcctggggctggagagccaaaaccgggaggatcaccccgattttgccagtcacctgcgcggcagagtggagtttgcttgcatggtggaccctagcagggccggcacctatagggacgcactgtcccgcgccttacaaggccctggagcaccgtga

SEQ ID NO: 13568 - RNA, 1395 nt, synthetic construct
  source 1..1395: mol_type = other RNA
atgaaccaggatgagaaggccagactgtatcggcgggtacgacacttagcctctgattctgtagtcctgaggcggatgcagacactgggtttttggccgaaaggggagggcctaccccctgatccacccgaagaagccgctgagcgcgcacgaatcgaagctgaacttgccgacttgagacagaaatttgctaaggtgagcgaccccgaagctgccttagcggaagaacgcagacggaggtgggaggcctcaaaggcaaggagattggaggcaaagcggaggagggctgaagagcagcgtaacaggcgagccggctgggatcaaacaagatccgccacagtggttcacgctggtattggagttagcgcggggctgcagggacgccaatctgatagtgaggctttacgccggaggggactgccgatccttcatcaggccgaggacctggccgatcgcattggcatcgagcttaaagcactgaggtggctcacctaccatagacggggggccacagtcgtgcattatcgtcgatacgaaatcgctaaaaagagcgggggcgtccggtgtatttccgctcctaagccagctttggcctgggcgcagaggtggatcctggacgagattcttcggcgcttggagcctgagcctcaggctcacggctttgtgtccggtagatccatagtcagcaatgcggagccacactccgggaaagccgtggtgattaatctggacgtcaaagaattcttcccaactataacttttcgcagagtgaagggcctcttcggatcattgggatacggagagcatatcgctaccgtcctggcactcctgtgtacggagccaccacgcgttgccgcaactctggacggtaagacatatcacgtggctctcggggaccgtgttctgccccaaggcgcatgcaccagtcccgctctgactaatgcaatttgccggagcctcgatcgcaggcttgatggactggccagacggcatggttttacttacacgagatatgccgatgacctcaccttctcaggaaatcgtacggctgcctctggtagattgctgaggagtgtgcggataatcctagtagatgaaggactcattgagcaccccaccaagacccgagtgatgcgaagaggcggccgacaagaggtgaccggcctgactgtcaacgacaggcctgcggtgagcagagaggagctacgcacccttcgcgccatcctccatagcgcctcacggtttgggctggacagtcagaaccgcgacggccaccctgatttcgcatcccacctccgtgggcgggtggaattcgcatgcatggttgacccttcgcgaacaccagcactcagggaagcactggacagagccttaagggggccctcgggctcttga

SEQ ID NO: 13569 - RNA, 2343 nt, synthetic construct
  source 1..2343: mol_type = other RNA
atgtctgacaacgaaaaggcccaactctataagaggctcattcaacagacgaacgactggtttgtgcttgagcgaatgcgcgagctgggcttctggcccgaggatcagccattgccaaccgtgccgcaggaggaagctgtggaacgtaccgaactagaggctgagatcgctaagctgagacaacagaatagcaaagtagcaaatcctgaggccgctttagccgaggaacgcaaacggcgttgggaggcctcaaaagcccgtcgtgcggaggctaaaatacagaaagaaaaggaaaggcaggcccgaagagaagctcatgaggcacataaggagactaccattgtgcatgccgggcttggggttagcggcggtctacaaggtactgggtcaaatccagtcgctctgaagtcccgatggttacccgtcctccacagggctgaagaactcgccgccgagatgggcatcgaactcaacaccctacgctggctgacctaccataggaggggggcggcagtcgtgcactaccatcgctacgaactgcctaaaaaaacaggtgggagcagagccatctccgcacctaaggcggctctggatcaggctcaacgatggatcctggtgaatatcctgaacaggctgaacgttgagagccaagctcatggctttgtctccggacggagtattgtcacgaacgcaactgagcacgttggcagggaagtagtgataaacctggacttaaaggactttttccccaccattacatttcgacgagtaaaggggctttttgtcgccttgggctacggcgagcacattgccacagtcctgggactgctgtgtaccgaaccaccccgcgttgcagctgaattcgcggggacaacttaccacgtcgccttgggggacagggtccttccgcaaggagcgtgtacgagccccgcgatcacaaacgctatctgccggcggctggatagaaggttagccggattggccaagaagcacgggttcaactatactcggtatgcagacgacctgacattctccggcgatgcaccacgaagggtgggcagattgctgaaatccgtgagagcaatcctagtggacgaggggctcactgaacacccaagtaagacccggataatgcgcaagtcttctcgacaggaggttacgggtgtgacagtgaacgaaaaaccatccctgtcacgcatggaattccgcaagctcagagcaattctgcacaatgccgccaaattcggcctcgagagtcagaatcacgagcagcaccccaattttgaaaaccatctcagaggaaaagtggcctttgcagctatggtcgaccctagcaaaagcgcggcactttgggacgcctttcacaaggcaatcactgaaccccagatgacattctccagtgtgcaggagggctcagtggatgacaggcggaggggaacgctgattggcctggcagtaggtgatgccctgggggctgccgttgagttcaaacctcctggaacctttgagcctgtgaccaattatagagctggagggccccaccgcttaaaccccggagagtggacagatgatacaagtatggccctcgcacttgctgactctattgctaaggcaggctgggatctggacgatcaggccagacggtattgcgattggtggcgggatggcaagtactccgtgaatgggcgctgtttcgacataggtattacttgccgctcttcacttggtcagtttcatctcaccggagatgcgagaaaagccgcaagcaccgacgagtactcaagcggcaacgggagtattatgcggctggccccagtgagcatccagttcgcttccctgttcccggacagaatcgatgaattggcacacctagctgaagaatcctctctcactacccatgcgagtgcacagtgcttgtccgcttgccgctacttcgccctgattttggcaggactgatctcgggccggtctagagaggaggttctgtctcctgattgggagcctctttcgcagcttcgggagctcaagccccttgccgagcctgtagaggatgtggccctcggctcttttaggcggctcaatccgcccgagatcaagggaagcggctatgtagtgaagtcattggaagcagctctctgggcttttcatgacgcccgggacttcgaagaggccgttctgaaagccgtcaatttgggagacgacgctgacactaccggcgccgtgtgtggtcagttagcgggtgcctactggggcgagagcggaatcccagcccgttggagaaattatctggccaggacagatttgctggaggctgccctgaaaggaatgatagaaaaggattga

SEQ ID NO: 13570 - RNA, 1386 nt, synthetic construct
  source 1..1386: mol_type = other RNA
atggctacagaccataaggccgctctgtaccggaggctggtgcgagaggcatctgatgctgccgccattgagaggatgagggtaaatggcttctggccatggggccaaggtatccctagggatccgccagacgaactgaaggagagagcccaaatcgaggccgagatagcgaagatacaggctcagtctaccaagtccgtggacccagacaaggcccttgctcaagagaggaaacggcggtgggaggagagcaagaaacgacgcgccgccaagcgcttagagagggctagcctcctaaagaagcgtagagacgattttatccggtatcggaaagcaaacgtcctgcatcttggcgtgggggtgtcagcgggcttacaggacactcggccagataccggagagttaactcgccgggggctccccagcctgactaatggatccgatctcgctatgatgatgggagtcccgctggcttcactgcggtggctgtgttttcacagacgcggggcagccctaatgcattatcatcgtttcggcatacccaaaaagtcgggaggtaccagatcaatttcagcaccaaaaccccgacttgccaacgcccagcgatgggttctgcagaatattctcgagcgtctcgacaccgctcctcctgcacacggatttgtgaggcatagaagcattctcacaaatgccacaccgcacgcgagaagggcagtcgtgatgaacttcgacctcaaagactttttcccctctatcacctttaggagggtgaaaggactgttccgtaagctggggtacaacgaacacgtagcgacgatcctcgggttgctgtgcactgaaccccctcgggccagggtggaagttgatgggcgcgtcatttatcttgccctgggcgatcgcgtactgcctcagggtgcttgtacaagtccagctatcacaaacgcactgtgcaaacgcctggatgcccggttgctggctttggctagtcgccatggcttcacttacacccgctacgccgacgatcttacattcagcggcgatgacggtgccttggtggggagactgagacgctccgtggtttccgtcgtcagtagcgaaggatttacagaaaacaccgctaagaccaggatcatgagacaaggtagtcgtcaggaagttactggcctcacggtgaatgaccgacctactatgcctcgcgacgagttccggcagttgcgagccatgctacacaatgcagcaaaacacgggctcgaatcccagaacagaacccagcaccccgcctttgcacagcacttggcgggacgagtggaattcgcatgctgggcggatcccacgagagctgagaagctgagatctgcccttgccgccgcattagcacggggctga

SEQ ID NO: 13571 - RNA, 1386 nt, synthetic construct
  source 1..1386: mol_type = other RNA
atgccagacaatgaaaaagcgcggctctataagcggattgtgcagcagaccaatgagcacacacttctggagcgtatgagaatccatggcttttggcccgccagagagggtctgcctcaaggacctgccgaggaagcagctgagcggacaaggatcgaggccgagctcgccgaactgagaaaggcccactcagccgtgaagaatccagaaaaggctctggcagacgagaggaaacgaagatgggaagagtccaaaaagcggagagccgctaacaaagccaagcgcgaagaggaggccaagcaacgccgggaagcatgggcagctgtgcgccaagaaagcgtggtgcatgctggggccggggtatcagatcggctgcaccagacaaccagcgacgtcgcagagctcacccgaaggcacctgcccattctgcaccaaagtgcagatgttgcgaagcagctgggaataggactcccggccctcaggtggctaacgtaccataggcgcggcgccactctggtacactaccaccgatactccatagctaagaagaccggcggagctagatgcatttcggcccccaaaccagccctcgccaaagctcagcattgggtgctggaaaacatcttagacagattagacgtggaccctgccgctcatgggtttatcagaggctgcagtattgtttctaacgcaatcccccacgcaaatagaggcgtggtggtaaaccttgacatgaaagacttcttcccctcaataaccttcaggcgcgtgcagggattgtttcgtaaactgggctactccggacatgtggctactctgttggccctcttgtgcacagaacctccccggattgctaccgagctagatgggaaggtctatcacgttgcacttggtgagcggatccttcctcagggagcctgtacgagccctgctatcaccaacgctctctgtcgtcggctggatagacgcctcgatggtttggcgcgaaagaatggctgcgcctatacccggtacgctgatgatctgacattctctggcgatgacccaggggtagtcggacacgtcctgcgaaacgttaggtatattctgaaaggcgaaggctttgtcccgcatcctaacaagactcgcgtgatgcagagggccagccgacaggaggtgacaggtgttactgtcaatgttcgtccaactctagcccgccaggaaatgaggactcttagggccatcttacataacgccgcgaaacacgggttagagtctcagaatcgcgacggtcggccaaatttcgccgcttacttgcgcgggagagtggcatttgcatgtatggtcgatcccacgagggcggaggctcttagagcggcattggctctggcactgaggccggtgtga

SEQ ID NO: 13572 - RNA, 1383 nt, synthetic construct
  source 1..1383: mol_type = other RNA
atggccaacgacgagaaagcccagctctacagaaggatagtccagcagaactcagaacagcagctgctcgagcgcatgaggattcatggtttttggcctcagagagcggggttgcctcaagacccaccagccgaagccgcagagcgagctagaatcgaagccgagttggaggagttgcgccggacccaatccgccgtgaagaacccggagtcggccctacatgcagaacgtaagcgccggtgggaagagtctaaaaaacgcagggccgagagaaaggctcagaaactccaagaacagcataaacgcagagaggcatacgaagcactgcgacagactacaattgttcacgctggcgctggtgtgagcggacgactgcaagagacgatcagtaatgaggccgaattacgcaggcgtcagctgccggtgctccacattgcagcagatctggctagagaaatggggatgcccctttctaaactgcggtggctcacataccatcgacgaagcgccacgctggtgcattaccaccgttatgagatcgagaagaagacaggaggcgttaggtgtatctctgctcctcgccccgcccttaagcaagcccagggatgggtgttagagcacattctgggtaaattgactgtggaaccacaagcccacggcttcgtaccagggcggagcatcgttaccaatgcactgccccacgtcggaagagcggcagtgattaatctagatctcaaggacttctttccgaccataacctttaggagagtgcagggcctgttccggaagctgggttattccggtcatctggccactctcctggctctgctttgtaccgaaccccctcgtgtccccgctgagttagatgataaggtatatcacgtcgcacttgggcagcgggttctgccacagggagcatgcacttcacctgccataactaacgctctgtgcagacggttggaccgccgcttggacgcacttgctcggaggcacggcttcgcgtacacgagatatgcggacgacctgacattgagtggcgataatacagaaatgatcggacatgtgctacggaacgttaggtatatcctcaaggccgaaggcttcacactgcatcccaccaaatcccggcttatgcggagaggccagaggcaggaagtaaccggagtgactgtgaacgtgaggccaggcgtgagtcggcaggaggtaagaaccctccgcgccattctgcacaatgccgcccgtcacgggcttgagagccagaatagggagaaacgacctaactttgctgcttacctcaaggggagggttgagtttgtgcgcatggtcgatccccaaagagggagagtcctgagggccgcgttacaggctgtcctgcgaggctga

SEQ ID NO: 13573 - RNA, 1413 nt, synthetic construct
  source 1..1413: mol_type = other RNA
atggctgacgatgaaaaggccaaactgtaccagcagattgtaagtcgcgccgacgagcagcggatagtggagcgaatgcgcctgcacggtttttggccggccgacaaacctcttcccaaggaccctcccgatgaagtacgagaacggcagcaggtcgaggccgagcttgctcacctgagaagagagcatagcacagttagagatcccgaaaaggctttggcgcaagagaggatccggcggtggcaggaatcaaaaaaaaggcgtgctgatagaaaggtacagaagctacaagagcaggtgcgcaggcgggaagcctggaagaaaaccagggacgccaacattgtgcatactggcgagggattttccgctggactgcagcagaagaactccgatgctgcagccttacaggcccgaggactccctgtggcaaacgatagcccagagctcgcgaacctgataggtatcaagctgagcaccctgagatggctgacatatcatcgcaagggagccaccgtggtgcactatcaccgctacagcatctctaagaaaactggcgggctgaggtatatatctgcgcctaaagccgcgttacgtcaggcccaggagtgggtcctgcagaatatcctcagccggctgccagtggagccacaagcccatggttttgtgctcgagcggtccgtggtgtccaatgcactgcctcacgtgaacaaaaacgtagtcatcaatctcgacctgaaagacttctttcccagtatcaccttccgccgtgtgaagggtttattcaggcaggttgggtacggggagcatgtcgcaacagtcctggctctcctgtgtacagagcctccgagggtcgcaactgaactcgacggcaaggtttatcacgtggctttgggacagagggttctaccacagggcgcatgcacgtcgcccgctattaccaacctgctttgcagacgtttggatcggaggcttgcgggactggctaagagacacgacttcgcctacacccgctacgcagacgatctcaccttctcaggcgagaatggcaaagctgtcggcaggctcctccgtagtgttaggtctattttaacttcagaggggtttgccgaacacccacgcaagaccaaagtcatgcgccgggccagcagacaggaagtaactggcttgacagttaacgtgcgccccactgtcagtaggaaggaagttcggcaactacgggcaattatccataatgtggcaagacacggtctggaatcccaaaatagatctgaccatcccgattttgaagggcacctgagaggcagagtgcaattcgtgcgaatggtggacccgcaacgaggggagccattgcttgcagctcttcatcgagccttggggacgtcagccggcgatggaacagccaatatttcttga

SEQ ID NO: 13574 - RNA, 1386 nt, synthetic construct
  source 1..1386: mol_type = other RNA
atgaatgagaaagctagactctaccagcgcatcacaagtgagatgaacgaggagacagtcctagcccgcatgcgaatgcatgggttttggcccgctagcgcgggtgtacctccagatccccctgaagaggtgaaagatcggcagcgcattgagaaggagatcgcaaggttggccggcgaaaggaagaaagctgccgaccctgagaaggcactcgctcaggagaggaatagacggatcgaggagtcacggaagagacgggccgagcttaaagagaagcgtgcggctgagagggaagcccgccaaaaggaatgggccgcttttcgagaacgttccgtcgttcacgctggcaccggtgttagcgccgggttggaaacccccggcaggtcttccctggaagagctcgtaaggaggggcctgcccatgatgcatgacgggcaggatttagctcgctggctgggcatcactataggcaagctgcgctggctgacgtatcaccgtaatgcagccgcacttgtgcactaccaccggtttgggataccaaagaaaagcggtggtatcagggctatttctgccccaaaagcttccctcgccgtggcccaaagatggatactgaccagaatcctctcacggttgacgcccgatgatgctgcccacggattcgttcatgggcgtagtattgtctccaatgccgccccacatgccggacgaagagtggtaattaacatggacatgaaggacttctttccgacagtgacttttaggagagttaaagggctgttccgccgtctgggatacaatgagccagtagcagtgctcctggccctgctttgtaccgaacctcccagagtcgcagcggaattgggcggcaaggcttatttcatcgccctgagcagtcgaaccttacctcagggggcctgcacctctccggctattaccaacgcagtgtgtcaccgccttgataggcggttaacaggcctggcagcgcgacacggcttcacgtatactagatacgccgacgatctaacattttcgggagatgacgcaacagcagttggacgccttctgagatctattcaatccatcgcaggtagcgagggattcgtgccccacccagaaaagactagggttatgcggagaggggagcggcaggaagtgactggcgtgaccgtgaacgacaaagtgggcgtgtcacggcgcgaagtccgagagctaagggccattttgtgcaacgctgctcgcctgggactcgccactcagaaccgggaggcccatcctgacttcgcaggatatttacgggggagagtcgcgtacgtggccatggtcgacccgtcaaagaagagcaaactggaagctgccctcgcacgagcactggaagcgaggacatga

SEQ ID NO: 13575 - RNA, 1386 nt, synthetic construct
  source 1..1386: mol_type = other RNA
atggacgagggtgagaagcgcaacctgtatcgcagaatcgtggcaagcgtaccggaggacatgctgctcgggcggatgcgtgtttacggttactggcctactggagtgccaatacccgcggatcccgccgacgaagtagcacagagaaaggaaatcgagcgcgaaatagcaaaactacaatctgctcatagcaccgccaaagatccagataaggctctcgctgaggagcgcaagagaagatgggacgaatccaaaaaacgccgagccgagaataagaagaaaagggaggcagagaacaaacagcgtcgtgaagcgtgggatatttaccgcaaaaaaactgtagttcatgccggcgaaggagtcagttcaggcctgcaggacgtgctctccgacacagacgccttagtcgctcgggggctgccagtcatgcactgtgccgcagatgtcgccgttatgttaggcctcccactgcccactctgagatggctgacttttcaccgccgggctaccgctctcgtccactatcacaggttcgatattcccaaaaagaccggcggacggagacttatcagcgcccccaaggccaccctaaaaaaagcccagcaggtcgtcctggataatatcctgagcaggctccccacagagcctgaagcgcacgggttcgtcgcacagcattctatagtgactaatgccgcttgccacgcaggaaaagccgtcgtgatcaatgtggatttgaaggattttttcccttcaatcggttttcggagggttaggggattattccagcggctgggatactccggtcaggtggcaacgatgcttggactgttgtgcaccgaacctccccgaattaaggctgaactggatggcaaagtgtttcatgtggcccttggagagcgagttcttccacaaggtgcctgtacgtccccagccattacaaatacaatttgcagaaggctggacagaaggctggtgggcctagcgagtaagcacgggttcacctatagtcgatacgcagacgacctgaccttctcagggaacgtaccgaagaaggctggccgattgttgcgctcggttcgggcaatccttgaaaacgaggggtttgctgagaacggcaagaagacacgggtgatgcgccaatcacggcggcaagaagtgaccgggctcacagtgaatgacaaacctagagtgtctagggaacagcgacgggagttacgcgccattcttcataacgccgctaagagcggcctggagtctcagaacagggagggccgtagtaattttgctagctatctgagggggagagtggcatacttgtccatggtggaacctgagagagcggccctcctcaaggccactctggagagggctttggccaagaggtga

SEQ ID NO: 13576 - RNA, 1383 nt, synthetic construct
  source 1..1383: mol_type = other RNA
atgtccgatgataaagccaaactttacaaactgatcaccagccagttgtcagaacatcaggtactctggagaatgcgcgagttgggcttttggccagagggacagccaattccggacgaaccactcgacgctcaggaggagagggccaaattgacaaaggaactggaacaactaagaaaacagggcgccaagatcgctaaccccgagaaagctctcgcacaagagcgtatcaggcggtggcaggagtcaaagaagcgccgcgccatcgcaaaggccgaaagagccgcgtctgctaaagagagaagcgagaagtggaaagctcacaaagcggttgcactagttcacgccggggaagagcacagcgcaggcttacaagatcgggagtctgatgctgccaaactagcttccaggagcctgccagtgctgcatgatgctcctgatctcgctaaggccatggggatagaactgtcagcactgcgctggctgacttatcacagacgcgctgcagcactcgtacactaccaccggtacaccattccaaagaaagcgggtggaacgagagctatcagtgctcccaagcctgcacttgctaaggcacaagagtgggtcctgggagcaattctggatcggctggtgcctgaacccgaagcacatggctttgtggccgagcactctgtgctgactaatgccgcccctcatgccaagaagaagatagtcgtcaacctggacctgcgtgacttttttccctctctggggtttcgtcgggttaaaggcctgttccggaaactgggatacagtgaacacattgccacattactctcgcttctgtgcaccgaacctccaagggtggaggctgagctcgacggaaaggtgtggcacgtcgccttgggagagagagtgctacctcagggtgcctgtacctcccccgcgatcaccaatgccgtgtgcaggaggcttgaccggcgattgagaggactcgcaggccgccatggtttcgcctatactcggtatgcggatgaccttacattcagtggggacgataggaagaaggtggccagactgcttaaaagcgtgagggccatcctgcagagcgagggcttcgttgaacacccgaggaagactcgggttatgggctccgggtcccgacaggaggtaacaggcctgacggtgaacgcaggcgtgaagcttgggcgcggggataagcgccgattgcgagcaattctccacaatgccgctaagcatggtttagcgtctcagaaccgccgtgaccatagagacttcgccgcccatctcgctggtctggtcagttatgccagcatggtcgaacccgagcgagcggcagactggaaagctcggttggacagggccttatcatcgtcctga

SEQ ID NO: 13577 - RNA, 1386 nt, synthetic construct
  source 1..1386: mol_type = other RNA
atggcagatgacgagaaggccaggctctacaaacgactcactaccacttggaatgaatttgaagtgctggcgagactgcggcataacggtttctggcccgctggggtagggataccccaagacccaccaaaggagctgaaggagcgggcaacgcttaccaaagaactggcctcattgagggcctctcagctggccgtgaaagatccagagaaagccctctcagaggagaggaccaggcgctttaaggcaagcttagagcggcgaaaagctgcccgcgccagacgtctggctgatgagaaaacaagaagggaacggtggttgaaggcacgcaaggatagcgtggtgaacttaggtgagggcgttagcgccggcctgcaggatgtgtcttgcgacaaggctcagctccaagctcgcggactgcccgttctgggcgatgctgtagccctggcaggagccctaggggtgaaactgtctgtgctgaggtggctaacctttcacagaaggggcgcgacgttggttcattatcaccggtatgccatccccaagaaaaccggagggcagagggcaattagtgctccgcgcaggaagcttgctggctgccagtgttgggtactgacacaggtcctggaaaaactgcacgctgagcctccggcccacggctttgttcggcatcggtcagtcgtgactaatgccaccccccacgttgggcggagagtcgttgtaaatctcgacttgcgagatttctttccaagtgtcaccttcaggcgagtgaaaggactgttcagaaaggtggggtacggagaacaggtcgccacagtccttgccctcctctgtactgagccccccagggtcccagtgacttttgacgataagaggttctacgtcgcccttggtcaacgagtcctcccccagggagcttccacttcccctgcaatcaccaatgctctgtgcagacgtctcgaccggcgccttcaaggcttagcgagacgccacgggttcacgtatacaagatacgccgatgatctgacattctctggcgacgaaccaccaagagttggccgacttctaaagtcggtgaaggctgtggtggttgacgaggggtttcaggtgcatcctaccaagacacgagtgatgcgttccacacgccggcaggaagtgaccggagtcgtagtgaaccacagggtcggcgtgcctagagacgaattacgggccttgcgtgcaactctgcacaactgcgcaagacatggattgcagagtcagaaccgggaacatcacgccgacttcgccgcacatctgcgcggtaaagtaagctgggtgtgtatggtggaccctgctagaggtcctgcgcttcgcgcagctttggagcgtgcactcgcgtccccttga

SEQ ID NO: 13578 - RNA, 1386 nt, synthetic construct
  source 1..1386: mol_type = other RNA
atggcttatgatgacaaagcacgcctgtataggcgtttggtcaccgggacttccgatgcgactgttctggcgaggatgcgcctgcatgggttctggccacttggcagagggttacccgctgacccaccagatgaactgaagaagcgcctggatttggagcagaagctggttattttgcgggatgccgaagtggtggccacccagtctcctgagaaactgctggaggccgaacggaaaagacgctgggccgctctaaaacaacggcgagccgaaaagaaagccgcccgggctaaagcagtgcaggcacgacgagacgcctttgccaagctcaggaggtccagtgtcttgcacgccggaatcggtgtgagcaagctcttgaacgatactaagagcgaccatgccgcgttaagggcacgagggctgccggtattagacgctggccccgatttggctatgatgctgggcattccactgggggtgcttagatggttgacgttccaccggaggggcgccacactggttcactaccatcggttcagcctccctaagaagaccggaggccagagagcaatctcagcaccaaaacctcgcctgaaaacagcacaggcttgggtcggacaaaacgtgctaggtccgttagctctcagccctcacgcgcacggatttgtgcctggacggtcgaccgtgaccaatgcggctctacatgtggggaagaaggttgtcgtgaacctcgatgtacgggacttttttcccacattcggctttagacgggtgagaggtctttttcggcaccttggctacagtgggcaagtagcaacgcttctggcactgctttgtacggagcccccaaggcttgaggcctcagtcgatggaacacgcgtgtgggtggctctcggtcacagagtgctgcctcagggcgcctctacttctcccgcgctcaccaatctcctctgccaccgtttggaccagcgactcgccggattagcacgtcgccacggtttcgctttcagtagatatgctgacgacctgactttcagcggtgatcatcccgaacgcctgggaaggctactcaagtctgccagagccatactggcagccgagggactggtagaacatccggacaaaactaaagtcatgagggcatcacagcaacaggaggtgacagggatcgtcgttaatacacagctgggcctgcctcgtgacaccatgaggaggctgcgcgcaacccttcataattgcgcccgacacggcctcgactcccagaacagagagggacatcccaacttccggggctacctggagggcatggttgcttacgcctccatggtcaatccagaaaaggctgcccccctcagagctgccctgacactagccctgggcgggtga

SEQ ID NO: 13579 - RNA, 1392 nt, synthetic construct
  source 1..1392: mol_type = other RNA
atgtcagatactaaggatgaccccctcaaaaagctgaaagctcaactatcagccttgccagacgccaccgtacgtgagcggatgattgcactgggcttctggcctccaggggaacctttgcccgccgatcctatcgacgaggccaatgccagagccgctctcgaaagtggtcgcgctcggcttctagcacaggcaggcacagctgagaaccccgaaaaagcgttgcgaagggaacgcatcaggcggcttcgagagtcccagaagcggcgcacgttacgtaagctggagcgagagaatgagaagaaagccagacgggcggcctgggatgcagaaaaggcgggtcgcatcgtggatgcaggggaaggtgtcagcgcagggctcgctcagaccggatctaacgctgatcagctgaccggactagggcttccggttgtccacgacgccagcgaactggcggagagattgggcctgagtctgagccagctcaggttcctgacctatcatcggcgcggcgcaactctggtgcactatcacagattcggcattccaaagaaaactggagggatacgggccatctcggctccgaagccagctcttgcgagagcccagagatgggtgttggctcaagtactggacaagctggaagttcgagccccagcccacgggttcgtccgacataggtcaatagtgactaacgcagctccccatgtgggaaggcgtgtggtcctcaacctcgatttggagtccttctttcccaccgtgggcttccgtagggtgaaagggctgttcaggaagctgggatacgccgaacaagtggccacactgctcgctctgctgtgtacagaacctccacgcgttgaggcccggttggacggaaaaagactgtggatcgctttaggacagcgagtattaccgcagggtgcatgcacctcccccgccattacaaatgccatttgccgaagacttgacgcacgcctgtctggactggcgaagcactttggctttacctacaccagatatgcagacgatcttactttttctggcgatgaccgcggcagagtgggtaggttactcgggtgtgtcaggaaagtcgtgacatccgaggggtttagggagcacggggacaagacgcatgttatgggcagcggccggagacaggaagtgactggagtggtggtaaatcaaaaactctctacagccagggatgagaggagagcactacgggctatgctccataacgtcgcccggcgcggcttagctgctgagaatcgggacggccacgccgacttcgccagttacctgcgcggaagggttgcatttgcctgcatggtggaccctagcctcgagcctgttcttcgtcccgctctggatcgcgcactggccagaggttga

SEQ ID NO: 13580 - RNA, 1407 nt, synthetic construct
  source 1..1407: mol_type = other RNA
atgtccgatgagaaagacccacagaaagcagccctcgtcaaggctgtactggcaagtttagacgatgccaccgctctgagcagaatgaagacgctcggcttctggcctgttcatgagcccgtgcccggagatccaccaggcgaaattgtggagcgggccgagctagacgccgaattggcaactctggtcaaaatcgcttccgatggcgaaaagccagagaaagctctgcagcgagagaggataagacggtggaaggagagcagggaaagaagaaaggcgaaaaaggcagagagaattgcagaggccaaacagcgagctgacgcctggcgagctcaaagagctgagaggctggtctacgccggtctgggggtgtctgcaggtctgcacgacgtggagtcagatgtggccactctggaagcttgcggcctcccaatctggcgtgatgcgcgagatgtggctagtgccctgggaatctctatagcgaaactgcgttggttgacctttcaccgcaggggggctacactggtgcattatcaccggtacggcatacctaagaagacaggcgggattcgggctatcagtgcaccaaaacccgctctggctgaagcgcaacagaatgtacagagccttgtcctgcagcgcatcgccccttccgatgaagcacacggcttcgttcgtgagaggtcagtggtgtcaaacgccagaccgcatgttggacgggccgtggtggtgaatctggaccttagagacttttttcccacaattagtttcaggagagtgaaggggctcttcgccaagctcggctactccgagcaagtggctaccgttttggccctgctgtgcactgaaccgcccagagtccctgcagaactagacggacagcgttatcacgtcgccttaggcgcacgggtactccctcagggggcatgtacttcacccgccattaccaacctgatctgtcgtcggcttgacgcccgccttcgaggtatcgcacgagccttaggcttcacctatactcggtacgccgacgacttgacgtttagcggggacgatcctacaaagctcgcctctctgtttgggatggtgcgcaaggtaattgcctcggagggtttcgcagagcatgaagggaaaacccgcgtaatgcggaggggtgcgagacaggaggtcacaggagtggtcgttaacagggcagtccgcctccctcgggatgaaaagcgcgctctaagggccctcctctacaattgcgcgagatttggaatggagagccaaaaccgcgacggtaggccgtctttcgcgagctatttgaggggcagggtggcctgggccgttatggttgaacccgctttgggaccccgcttattcccagcccttgagcgcgctcttgaaggacggcggtccgatctgtga

SEQ ID NO: 13581 - RNA, 1404 nt, synthetic construct
  source 1..1404: mol_type = other RNA
atgccggacgacgccaaaccaaagccagagaaatccgagaagcagaagctctgggagagaataagcgcgcgccctgactggattgttgtagagcgcatgcgagtgaacggcttctggcctgccggcgagactttgcccgaagacccacctgacgaggtgaaagagcgcgccgccttagaagttgagcgggctaggcttctgaaatcagccctggccgtacagcaccccgaacaagccctcaaggctgagaaccagaggcgtatcgaagtcagtagaaaaaagaaggcggaacggaaggtcctcagagaagctgccgctagagaacgtcgggaggcttttattaagaagaagagagccaccctcgtacatctcggccttggagtgtctggcggacttgaaaagacgggcgcggatgaagcacggctgcaagccttcgagctgcctgtgctacgagacgggaatgatgtggcagcagccatcgggatccctttaggggaattgagatggcttacctatcacaggcgcggtgcgccgctcgttcactatcaccggtacgatattcctaagaagacaggcggtgctcggcacatcagtgcaccaaagggcaagctggcccgggctcagcaatgggtgctggatgctgtactggacaaagttcccgccagcgctcacgcccatggatttgtcagagggagatccgtcgtgacaaatgcgcgcccccatgtgaaatgtaaatctgtggtcaacctggatctgaaagattttttccccacaattacctatcggagggctaaaggactttttgagcatctgggatacggtgagcatgtggcaactgttctggccttattgtgcactgagcctccgcgtgttcttgtggaacacgatgagcgacgcacccacgtggctataggggaacgcgttcttccacagggcgcctgcacttcgccagctattaccaatctgctgtgtaggcggctagatgctaggctcgccgggttggccagacgattaggtctagcctacacgcgatacgccgacgatctgactttctccggggacacagtggacgagagagcactgctgggcgcagtccgacgcgttatcgctgcagagggctttgtggtccaccccgataaaaccagggtcatgaggaagggtagacggcaggaagtcacaggggtcgtggtgaatgcgaaaccatcaatcgcacgcgagcagtggaggtctttgagggccgtactccataactgcgcaaaacatggcctggccagccagaaccgtgagcagcatcccgacttcgcaggacacctggcaggtaaggtggcttgggtgaggatggtggaccctcggaggggagcacagttgggactgctcctgcaacgcgctctcgccagaccctga

SEQ ID NO: 13582 - RNA, 1404 nt, synthetic construct
  source 1..1404: mol_type = other RNA
atggccgacgatgcaaagacaaaaagcgagaagagcgaaaaacagaagctctgggagcgggttagctcgaggcctgactgggtggtggtcgaacgcatgcgcgtgaacggtttctggccacagggagagaaactgccagaggatcccccagacgaagtcaaagaacggacagctctcgaggctgatcgcacaaagctgctgaaaagtgcgcttgcagtgcaggaccccgagagggctctgaaggaggagaacgaacgtagaatactggaaagtcgcaagaagaaagctgaacgtaaggttcttcgggacaaggcccggagagagagacgggaagcctgggtcaaaaagaaacaagcagcactggtacatctgggattgggggtgtcagccggcctagaacacgtggagtctgacgtagcccggctccagaccctgggtctaccagtgctgaatgatgggactcagctcgcagcttccatgggtatcgccctggctgaactgcgctggttgtcatatcaccgccgcggggctccgttggtgcactatcacaggtacgacattcctaagaagactgggggcgcccgccatatctctgcacctaaggcaagactggccagggcccaacagtgggtgttggccaatattctcgacaagcttccagtttcagagcacgcccatggattcgtccgcgaccattccgtggtcaccaacgccaggccgcacgtcaaaagggcctgtgtggtcaatttggacctcaaggatttttttcccactatcagctttcgcagatgtaagggactgttcgggaaaatgggctatagcgagcacgtggccaccgtactcgccttgctctgcacggagcctcctagagtgctggtggaactggacgataagaggacccatgtagccctgggcgagcgagttttaccacagggcgcttgcacatctcccgcacttaccaaccttctctgcaggagactggacaaacggctcgcagggcttgcaagacggcacggtctggcttacacaaggtacgctgatgatctaactttctccggagactcactcgatgagtctgcactgttaggaagtgttagacgtgttgtggaagccgagggtttcagggtccatcccgacaaaacccgagtgatgcgaaagggacggcgacaagaagtgacgggcgtcgtagtgaacactaggccctccatcgcgagagaggattggcgacagcttagagctattctgcacaatgcggcgaaacagggcctgcagtcccagaatcgggatcaacggcccgactttgcggcccatttagctggccgtgtggcttgggtcagaatggttgatcctaggcgtggcgctcaacttgggctattactgcagcgagccttggcccggggctga

SEQ ID NO: 13583 - RNA, 1386 nt, synthetic construct
  source 1..1386: mol_type = other RNA
atggccgacgacgagaaggcaaagttgtacaaggagatcgtccgaaggacatccgatgccttcctgcttgaccgcatgagaacacatggattctggccagagaaggagcccttgccaaaagatccccccgatgaactgtctgaaagagctaagatagaggccgagctgcagaagctgaagcagacgtctctcgcagtcaaggaccctgaaaaggccctggcagaggaacagaaacgtagatgggaggagtcgaagaagcgcaggaaggaagccaaagagaaaagggaggccgagcagaaggcaagaagtgaggcctgggcgaaagtgaggaaacagaaagtggttcatcttggacttggcgtgtccaagggactggaggatacgaaaagcgatgccgagaagctcctggaaaatggcctccctgttctgcacacctcagccgatgtggcctccatgttgggggtatcactgcctgtccttcggtggcttacctatcaccgcaagagcgtggctctggtgcattaccaccggtacggcattccaaaaaagactggagggatccgaaatatctctgcccccaagaagtcactgagcgctgcccaagagaaagtgttggttctaatactcgaaaaaatcgcccctgagcctcaggctcacggttttgttgctgggaggagcatcctgactaacgcagctccgcacgccggtcgaaaggtggtgatgaatttagacctgcgggacttcttcccaacaatcacatttaggcgggttaagggcctgttccataaactggggtattccgagcacgctgctaccgtcttagcccttttatgcaccgaaccagcccgagctaaggcggagctctctggccgagtgtaccacgtagcgctgggagaacggtttctaccccaaggaacctgtactagccccgcgatcaccaacctcttgtgccgaaggctggacaaacggctctccggtctggcacagaaagcaggctttttgtatacacggtatgcagacgatctgacctttagtggcgacgacactggtgaagtaggccgcctactacgcgctatacggaaagttattaccagtgagggcttcgaggaacacgctaagaaaacaagggtcatgcgcagagggagacgccaggaagtcactgggttaattgtaaattcaagaccagcggtgccgagagaggaaattcggcgcctccgcgcaattctccataacgccgcccgtagcggtctggatgctcaaaacagggaaaatgtgcctgatttcgcagcacatctccggggcagagtggcctttgtcgagatggtggacaaagaaaggggggaaaaactgagagcagctttgaaccgtgtgcttgccggacgttga

SEQ ID NO: 13584 - RNA, 1386 nt, synthetic construct
  source 1..1386: mol_type = other RNA
atggcaaagcaggacgacaaagcgaggctgtatcaccgtatcactcaggtacaccacggcattgttttggatagaatgagggttaacgggttttggccaatgaatcaaggtctaccaccggatccagcgcccgaagcacaagagagaaagcttctagaggccgatctggccgtgttgaaacaggacgcagccatgtcccccggagatgtggagaaggctctcaaagccgagcggatgaggcggtgggaagagtcgaagaaaaaacgtgcggaaaagaagaaactgcgggaggcacgagctgctgctaggagagccgcatgggtggaaaggcgaaaggggcttgtatttcacgccggagaggggcattctggcggcctacagcatgctacatctgatgaggccgcgctgaccaaacgcgccttgcctgtgctccacaccgctcacgacctggctgttgcccttggaatcagtctcgcacggttacgatggctcacctaccatagagagggggccacactggtccattatcaccgttactccatccctaagaaaacaggggggattcggggaatcagcgcccccaaacctgcactggccaaggctcagaaatgggttttcgatagtgtcgtgcagaaactggtcattgaaccagaagctcatggcttcgtggtggatagatccattgtgactaacgccaagctgcacgtaggcaagagggtggtcacgaacatggacctgaaggactttttccccagcgtcacatacaagcggacaaaaggtcttttcgtgagtttcggatattctgagcaggtcgccaccctgatggctcttttatgcacagaaccccctcgcgttgcagcctccgtggatggaaagccagtcaacatagcaatcggagagcgacgccttcctcagggtgcatgtactagccccggactgactaacgccgtttgccgcgccttggacagacgcctaggaggtctggcccagaagctcgggtttacctacaccaggtacgctgacgacctgactttttcagggaatgacgacaagcgactgggcttattgttacgcagcgtgaggtcaatcgtcaaggatgagggtttcctggaacacccgaccaagacgagggtgatgcgtcgaggcaggcggcaagaggttaccggcgtggtggtgaatgatagacctactatagccagagaagaactgcgcgagctcagagctatcctccataatgcgatgcgccaaggcctggaagcccagaatcgcaaaggccatcccagatttattgaccacctccagggccgggtggcatatgtcgctatggtagatccagtacggggggagaaactggagcaggctttggcaagggtgctcggccggtga

SEQ ID NO: 13585 - RNA, 1386 nt, synthetic construct
  source 1..1386: mol_type = other RNA
atggacgcggacgagaaggcaaagctatatcgtagaattagttcggccaatattcatcttgtactggaacgtatgagggttcatggtttttggccccagggacagggacttccaccagaccctgctgatgaagtagcggcacgcgccgctatcgaaaaggagatcggccagctgcaaggagcagctgtcgctggggggcttgctgcaattgaggaggctctgagagaggagcgaagacgcaggtgggaggccagcaagaaaaaacgcgcagagaggaaaaaaatccgccaggcccaggatgctgaaagacgggctcagtggcgcgaggaaaaaaagagcagggtcgtgcacgccggtgtcggagtttctgcaggtctggaagaccgtcagagcaacgaagaggagttacagaggcggggcttacctgttttgcacacagccgctgatgtagctgcatctgccggagtggcctttccgaaactccggtggctgacctttcacagacggggcgccgccttggtccactatcatagatacagtatccctaagaagacaggcggcatgcgagcaatatccgcccctaaatcagccctcgccgatctgcaattgtgggtgctctcaaggattcttacacccctccacgtcgaacctgaagcgcacgggttcgttcccgaaaggtccatcgtgaccaatgccaagcctcacgttcgccaaagagtggtggtcaatctggacctgaaagacttcttcccaagtgtgaccttccgccgggttaagggcctcttccagaaagtgggctattccgagcacgtggcgactctcctggcacttatctgtaccgagcccccccggatccccgttgagattgatggaaagaaattgtacgtggcactcggtgagaggatgctcccacaaggcgcctgcacttcaccagccatcacgaatctggtgtgcaggcggctcgaccgaagactggctggactggggcatcgatgggggtatacctacactcggtacgcagacgatctgacgttctccggcgacgggaaacagggcctagccctactgctgaagggcgtgcggggaattgtatctgatgagggttttgccgaacacccgacaaagacccgagtgatgaggccaggccgcaggcaagaagtgactggagtcgtagtgaatgataagttgggtgtggcaagaaaggatgtccgacagttacgcgctattctgcataacgctaaggtccacgggcttgccagccagaaccgggataaccatcccaactttgaggcccatctgcgtggcagaatagcttttgtgcacatgatagacgaggccaaggggaaaaagttgctggaccttctgaaagaagcgatccatgggtga

SEQ ID NO: 13586 - RNA, 1389 nt, synthetic construct
  source 1..1389: mol_type = other RNA
atggccgacgaccctaaggaaaaaaagaaggccctctatcagcagctggtggagtccgctgacgaagaacttgtcctggcacgcatgcgagagctggggttctggccgtctagtgaacccctccctgaagaccccgacgatgaggtgaaggagacactggagctggaatacgaactagctcagttacggaagaaggcgaccgttgtagccgatccccagaaggctttggaacaggagagggtgcggagatggaaggagagcaaggaaagacgggcaaaagcaaagattgagagagaattggaggcaaaacaacgcagagaggcttgggaaacggcgaagaaagagcgggtatggcatgccggagagggtgtctctgccggattggaatcccataccccatcgcctgatggtgtgaggttcggagccccacctatcgccacccctaaagcactggccgaggccatgggcatcgatctcccaaagctgcgctggctaacttaccaccgcagagccgcagcactggtccactatcaccggtttagcgttcctaagaagactggcggactgaggcatatcagcgccccgaaaaaggatttaagaagggctcaggagtggattctggtgcatgttcttgagcgcgttggaccccaaccaaccgttcacggcttccagcgggggagatcagtgaaatctaatgctacaccccacgtgtcaaaacgcgtcgtggtcaatttggatctcgaggacttctttcctactctgggatttcgtcgcgtaaagggtgtttttcgaagtgttttcggctatcccgagtccgtagcaacagtgatggctctcctttgtaccgaacccccacgggtggaggcagaacttgacggaaaggtgttccatgtggctctgggggagcgtgtcttgccgcaaggcgcttgcacctcccctatgctgacgaatatagcctgctacgccctcgaccggcgattaggtggcttagctggcagcctagggttcgcttatactagatacgccgatgatctcacattttcttcagacgacccacggaaaacaggccgactgctgaaagcggtgagggacgtcgtcaagaacgaagggtttgtggtgaacgaggccaaaacccgagtgatgcgtcgaggcggaaggcaagaggtaactggggtgaccgtgaacaggaaagcaaacgtcagtcgcaaagaaaggagacgtctcagagctctgttgcacaatgccaagaaaactgggcttgcggcacagaacaggacaaaacacccaaggttcagagagcaccttcggggccgcattgcgtggatcgggatgctcgatgctgcccagggtgccaagctgagggccatgctggatgcctgtcccgactga

SEQ ID NO: 13587 - RNA, 1479 nt, synthetic construct
  source 1..1479: mol_type = other RNA
atgatggaaaaccaggaaaacaatcgtaaggattatagagaagctgtgaatgctatgggtaagaaggaattcactctgataaaaatgcaggagtacggcttctggcctcagaatctgccgactccctatgaacgccaagaaaacgaaacctctgaacagtacgaaaataggaagaatctgctagagaagtatgagaaggtgatcgacgagattgccaatctatacgaggagaaagacaagataaattccaagctgatagagctccaaaaaaaatatgacgagacatgggattatgagaagatcagactcgatgtttcaaagaccataatggaggagagtatagcccgcagggctgagcggaagaagcagagggaactggaaaaaaggcagcgaagcgaggagtggaaaaaggagaaggaggataaaatcgtatttattggaaagggctactcaagtctcttgaaagacaaggagactcacaaagaaaagttacttgctcaagaccttcctatcatcaatgacgataaagagctcgctagtttcctcggaatcgagtacaagaaactgcggttcctggtgtaccaccgtgatgtcgtgtcggttgaccattactatcggtacacaataccaaaaaagagaggaggggtccgaaatatcgcagctccaaaatccgtgctgaaaaattcccaacgcaagattctggacgatatccttcttaagattcccacatcggatgaggcccatgggttcttgaaagggaaatccgtggttagcgcggccgagtctcactttaagcagcctgagttgctgatcaacattgatctcgaagacttttttccaactattaccttcgaacgggtgagaggcctctttaaatcatttgggtacagcgggtacatcgccagtatgctagcaatgatttgcacatactgtgaacgcatgaagattgagatcagaggcgaagaaaaatacattaaaacgtcaaaccggatccttcctcagggaagccccgcatcacccatgatcaccaatatcatttgcatcaagttggataaaaggctgaagggactgagcagcaagtataactttacctataccagatatgcggacgacatgtctttctccttcaatggtgatgactatgagttaaacattggcaggttcattggcttagtatccaagattgtgaaagaagagggcttcaatatcaacaaggacaagacgaagtttctgaaaaaaaacaactgccagtgtatcactggtatcgtcatcaacaacgaagagatcggggtgccaaagaaatgggtgaagaaattgcgcgccgcaatttataacgccaacaaggcacgaaacagtggagaagtcctgagctctaaagtcatcaatgagatttccggcatgacaagctggattaagtctgttaacgagaagcggtacaaagccataatcgattctgccatggaactgataaattcctga

SEQ ID NO: 13588 - RNA, 1488 nt, synthetic construct
  source 1..1488: mol_type = other RNA
atgatggaaaatcaggaaaacaacatgaacaataggaaaaactaccgtgaagctgtgaataccatgggcaagaaggagtttacacttatcaagatgcaggagtacgggttttggcccaagaacctgcccacaccctatgagcgccaggagtctgagactgaggagcaatacaaggaaagaaagtgcttgcttgagaagtacgagaaggtcattgatgaaataagcaagctttacgaggagaaagataagattaacttgaaactgcgggagctgcagaaaaagtacgatgaaacctgggactatgaacggatccggctagatgtatccaaaactatcatgcaggagtcaattgaacgacgagcggaaaggaaaaggcagagagagcttgagaaagaacagcgctccgaagaatggaaaaaggagaaggagaacaaaattgtgtttatcgggaagggatacagttctttactttacgacaaagaaacggatgaaaacaagttgctcctgcaggaactacctatcatcaaggacgacaaagaattagccaatttcctggggatcgaatataaaaagctccgcttcttggtatatcatcgtgacgttatcagcgttgataactatcaccgttataccattcccaagaaaaaaggtggcgtcaggaacatcgctgcccctaagagcattctcaagaacagtcaacgcatcatcctcgaggaaatactgagcaagatcccaacctctaattatagccatgggttcctgaagggtaaatcagttgtttcagccgccaaggtgcacgtcaagaaaccggatctgctgattaacattgatctggaggactttttcccaacaattacttttgagagagtgaggggcatgttcaaatccttcgggtattccggctacgttgcatcaatgctcgctatgatctgtacctactgtgaacggatgaaggtggaggtgcgcggcgaggagaaatatgtgaaaatatccgatcggattctgccacagggctctcctgcctccccaatgattacgaatatcatctgcgtgaaactcgataagcggttgaatggactgagtacgaagtacgacttcatttatacaagatatgccgacgacatgagttttagtttcactggagacattaatgagctatccgtcggaagctttatgggcttagtgtcaaagatcgtcaaagaggagggcttcaacataaacaaggacaaaaccaagtttctccgaaaaaataacagacaatgcatcacaggaatcgtcataaacaatgaggagattggtgtgcctaaaaagtggataaagatcctgagagctgcaatttacaatgcaaacaaggtgaagaatagcggggagatactgagcaacaaggtaattaatgaaatctcgggaatgacctcttgggtgaaatctgtcaacgaagagaggtacaaagatatcataaatgacgcgatgaatctgatcaataattga

SEQ ID NO: 13589 - RNA, 1494 nt, synthetic construct
  source 1..1494: mol_type = other RNA
atgatggaaaatcatgagaataacatgaacaaccgccagaattaccgggagacggttaacaaaatgggtaagaaagagtttactcttatcaagatgcaagagtatgggttctggccgaaaaatctccctacaccctatgaaaaacaggagaacgagacaaaggaacagtatgcccaaaggaaagatctgctggagaagtaccagaaaatcatagacgaaatcgccaatctatacgaggagaaggataagataaacgagcggctacgagagtttcagaagaagtacgacgagacatgggattacgagaagataagacttgatgtgtcgaagattatcatggaagagagtattgcacggcgtgctgagaggaaaaagcagcgcgaattcgaaaaacgtcagcgctctgaggcatgggaaaaggagaaggctgacaagatagtctttattggaaaggggtattctagcttgttgcaggacactgaaacagacgatgaaaaattgcttagccaggaacttcctctcatcaaagatgataaggaattagccaactttctgggaatagagtataagaaactcaggttcctggtttatcacagagatgtcgtatctgtcgaccactacaatcgctacaccatccccaaaaaaaaggggggcgtgaggaatatcgcggcaccgaagtcaattctcaagaattcccagcggaagatactggaagagattttgtccaagatcccaactagtaattatgctcatggctttctgaaagggcggagcgtcgtaagcggcgcaaaagcccacactaaacaaccagagctgctcataaacatggatcttgaagactttttcccaaccattacctttgagagggtgcgcggcatgttcaaaagcttcggatactccggttacgtagcttctatgatcgctatgatctgtacctactgcgaacgaatgaaggtggaggtgagaggggaggaaaaatatgtgaagaccagtaataggattctgccacaaggaagtcccgcttcccctatgatcacgaacatcatttgtgtgaagctcgacaaaagactgtctggactggcgtcaaagtattcatttgtgtacacaagatacgcagacgacatgagcttcagcttcatgaatgataacagtgacctgaacattggcaaatttatggggctggtttccaagatcattgaggaggaaggattcaacatcaacaagaacaaaaccaagttcttacggaagaataataggcagtgcattactggcatcgtgatcaacaacgaggaaattggcgttccccgcaaatggatcaagagactccgagccgccatctacaatgccaacaaagtcaaaaataacggcgatctgccttcaagcaaagtgattaatgaaatttccggtatgacctcatggatcaagtctgtgaacgcccgtagatatgaggacattattaacgacgccatggatctgatcaattcccagttatga

SEQ ID NO: 13590 - RNA, 1158 nt, synthetic construct
  source 1..1158: mol_type = other RNA
atggaagagtccataaagagacgggctaagagaaagaaacagcgagaattcgagaagcagcagagatcagaagcctggaaaagaacaaaagaggacaagatcgtttttataggcaagggttattctggttctttgcaagacgtggagacaaatatagagaagctcaaagcccagaaattgccaatcattaaagatgacaaggagctggctaagttcctagggatcgaatacaagaagctgcgctttctggtctaccatcgagatgtagtgtcagtggataattatcacaggtacaccattcccaaaaagaaagggggggtgaggaatatcgcagcacctaaatctctgctgaaaaacgctcaacgtaaaatcctcgaagagatactctccaaactccctgtctccgagtatgcccacggattcctgaaagagaaatctgtcgtgagtggcgccaaggctcataagaataagcccgaattactgatcaacatcgacctggaggatttctttccaacgattaccttcgagagggtgcggggaatgtttaagggctttggttatagcggctatgttgcttcacttctgtcgatgatttgcacctactgcgaacgcatggaggtggaagtgagaggcgagatcaagtacgtcaaaacatctcaccggattctgcctcaaggatccccagcctcccccatgatcaccaacattatttgtaggaaactcgataaacgccttagtggcctagcatctaagtatagcttcacttacacaaggtacgccgacgacatgagctttagcttcattaacgaaaacacggacctgacttacggtcgcttgattggcttgataagcaaaatcgtgaaggaggaagggttcaacatcaacaagaacaaaaccaagtttcttcggcagaacaatcgtcagtgtattactggaatcgtaattaacaatgaggaaatcggggttcccaagaagtggataaagaacttacgggcagccatttataatgcgaacaagctgaagaacaatgagcagattccgtcgagtaaaactatcaatgaaatcagcggaatgaccagttggattaaatccgtcaatagcgaaaagtacaagaacatcatcgatgacgcgatgaatcttatcaattcactcgagtga

SEQ ID NO: 13591 - RNA, 1506 nt, synthetic construct
  source 1..1506: mol_type = other RNA
atgatcgaatctcaagagaacagtaaaaacaatcgtcaggaatacaggaagcaagtgaatgagctcggtaagaaagagtttaccctaatcaagatgcaggaatatggtttttggccaaaaaatctccctacaccctatgaaaagcaggaaaacgaaactaaagaagagtatctggagaggaaaaatctcaccaaggaatacgaaaaaatcataaatgcgatcacagacttgtacgatgagaaagatgagatcaacgccaaattgcgcgacctgaataagaaatataacgaaacttgggactacgagaaaatccgccaagacgtcagcaaggccattatggaggaatctatcgctaggaggaaagaaagaaaggaaaagcgagagctcgagaaacggcagaagtctgaagcctggcagaaggaaaaggccgatagaattgtctttattggcagaggatacagcagtctgctgtatgacaaggaggacaatgaggagaagctcctgaaccagggccttcccgtcatcaaagacgaccgtgcactggctgatttcttcgggatcgagtacaagaagttaagattcttagtgtatcaccgcgatgtcgtgttggtggatcattataaccggtatacaattcccaagaaaaaggggggcgagcgcaacattgcagctcctaagctgattctaaagaacgtccagcgaaaaatcctcgaggagattctgtccaagatccaggtttctgactacacccatggcttcctgaagggaaaaagtgtggtgagtggggctaaaagccacattgccgacaaagcctcgggagaaaacacagctctgctgatcaacatggaccttgaggactttttcccgacgatcactttcgagcgggtgcggggcatgtttaaggccttcggttactccggatacatctcctcgctgcttgcaatgttgtgtacctactgcgagagaatgccaattgaagtgaagggaaaggtgaagtacgttaaaacctctgaccgcatattacctcagggctcaccagcaagccccatgatcacaaacataatatgcgtgaaactggataagagactcagcggcctgtccagcaagtacaattgtgtctatactcgttacgcagatgatatgtcattttcctttatggaagagtctagcgatttgaatcttgggaagttcatggggctgatttccaaaatagtaaacgaggagggctttaatatcaacaaaagcaagacccgattcctacggaaaaataacaggcaatcaattacaggagtggtaattaacaatgacgaaattggggtttcaaaaaagtggatcaaaactcttagggccgcgatttataatgccaataagctcaaaaactccggggaaaagatccctcagagcacgatcaatgagatatcaggtatggtgagttgggttcggtccgtaaacgagaagcgctatgctgatatcatagagtctggcatgaacctgattaatacctga

SEQ ID NO: 13592 - RNA, 1581 nt, synthetic construct
  source 1..1581: mol_type = other RNA
atgatggaaaaccaggagacgtctaaaaataagcggcaggattacagagaaatcgtcaatcaaatgggcaaaaaagagttcaccctgcttaaaatgcaggagtatggattttggcctaaaaatttgcctaccccttacgagaggcaggagaacgagacacaagaagagtacgcgcaccgtaaatcgctgataaagaagtatgagaagatcattaagcagattagcgatctctacaacgagaaggacaagattaatcaaaaactacgcgaactgaagaagcgctacaacgagacatgggattatgaaaagatcaggagcgacgttgctaaggcaatcatggaggagtcaatcgccaggcggaaggaaagaaaagagaagcgagccttagagaaagaacagaagtctgaggactggaaaaaagaaaaggaacgtcgcattgtcttcattgggaaaggctacagtaactcactttttgacaaagaatctgataccgagcggctgctctctctcggccttccaataatcgaggacgataaagagctatctgagctgtttgagattgagtacactaaactgcggttcttagccttccacagggacgtggttactctagaccattatcacagatacacaattcccaaaaagaaggggggagagagaaatattgccgctcccaagagcattctgaagaatgtgcagcgcaaaatcctcgaaaaaatcctgtccaagattcccgtgagccactatgcacacggatttctcaggggacggtccgtggtgtctggcgcaaaggctcatgctatcgatgaaaaacacgttatcatagaggattcccgaatcagcaaaaacattgataccgaacgcagtgcccaagagcgggtaccgttgttgattaatatcgacatcgaagacttcttcggtaccatcacattcgagcgcgtccgaggcatgtttaagagctttgggtactccggatatgtaagctctttgctcgccatgttgtgtacgtattgtgaaaggatgcccatcgaagtccgtggggagatcaagtacgtgaaaacttccaataggatcttacctcagggttcaccagcttccccaatgataaccaacatcatatgcggcaaactggacaaaagactgagtggaatggccctgaagaacaactgcggctatacaagatacgcagacgatatgtcattttccttcaaacaggagatcaacaagcaggaactgagaaattttatagggctgacatcaaagattgtgatggaggaagggttcaagatcaaccataagaagactcatttcctgcggaataacaatagacagtgcatcaccgggattgtgattaataatcatgagatcggcgtgccaaaaaagtggattaagaccctgagggcggccatctacaatagtaagaaactcattaagtccggcgaaaaggttcccatgtcgaccattaacgaaatcagcggtatggtaagttggataaaaagcgtgaacgaagaacgatatgtcaacataattgaggagggtacaaaccttataaaggaacttacttacactccgtattcctga

SEQ ID NO: 13593 - RNA, 1563 nt, synthetic construct
  source 1..1563: mol_type = other RNA
atgattgagaaccaggagacactgaaaaacaagcgccaggattaccgggagaaggtgaatcagatcgggaaaaaagagttcacgctgctgaagatgcaggagtacggattttggcccaaaaatctgccaacgccgtatgaaaaacaagaaaacgaaaccaaggaggaatacgcccagcgcaagaatctcataaaagagtacgagaagatcattaacgagatatcagatctctacggggaaaaggacaaaattaacgagaaactgcgtgagctcaagaagaagtatgacgagacttgggattacgaaaagatccggatagacgtgtctaagacaattatggaggagagcatcgcaagaagaaaggagagaaaagagcagcgagagctggagaaaaggcagaagtccgaagcctgggtgaaggaaaaggctaaggggatcgtatttatcgggaaaggttatagcaaccttctgtatgacaagcagaatgatgaggataaactattgtcccaggaactgcccctcatcgaggatgacaaggcactagccgagttcttaggaatcgagtataagaagttgaggtttttagtctaccatcgcgacgttgtgacagtggatcactatcatcgcttcagcatcccaaaaaagaaagggggcgagcggaatatcgccgcccctaagtctatccttaagaacgctcaacgtaagatcctcgaagagatcctatctaaggtcccggtgtcagactacgcccacgggtttcttaagggcaaaagtgtcgtgtcaggcgctaaggcccatgtcgctgctaaagcggacttgggggaaaaggcgagtggagtcgaaaagactcacgatgaggagaaagtaagcggtgaaaaaacccagctgctgattaacatggatctggagaattttttccccactattacattcgaaagagttcgaggaatgttcaaggccttcggctactccggctatatcgcatctttgttggcaatgatttgcacctactgcgaacgtatgccaatagaggttcgaggtgaaatcaagtacgttaaagcctcaaataggattctcccccaaggaagtccagctagccccatgatcaccaacatcatttgtgtgaaacttgataaacggctgtccggcctggcacctaagtacaattgtacctataccagatacgccgacgacatgtcttttagcttttgtgaagagaactcggacttaaacctgggcagattcatgggtctggtttcgaagattatcaatgaagaaggcctgaaggtcaacaagaaaaaaactcgcttccttcggaaaaataataggcaatgcatcacaggaattgtaataaataaccacgaagtgggggtgcctaaaaaatggattaaaactctcagggcagctatctataatgcgaacaagctcacccggaacggcgaagtcgtacctgccaaaacaattaatgaaattagcggcatggtgagttgggtgaagtccgtgaacggagagaggtattccggtattatagaggacggaatgaacctgattaataatatatga

SEQ ID NO: 13594 - RNA, 1578 nt, synthetic construct
  source 1..1578: mol_type = other RNA
atgatagagaaccaggagaacactaagaataaacgacaagactaccgcgagattgttaatcagatgggcaagaaagagttcacccttctgaaaatgcaggagtacggattctggcctaagaacctccccaccccctatgaaaggcaggaaaacgagacgaaggaagaatatgctcaacggaaaagcctgattaaggagtacgagaagatcatcaaccagatttctgaactctacgagggaaaagacaagattaaccagaagctgcacgagttgaaaaaaaagtacgacgagacgtgggattacgagaaaattagggttgatgtcgctaaagccattatggcagagtcaatcgcaaggcgaaaagagagaaaagaaaagagggcacttgagaagcggcagaagggagaggcttgggaaaaaaggaaaagcgaaagtatcgtgttcataggtaagggctatagctccctattgaacgacaaggagaatgacaatgacaaactgctgctgcaaggtctaccaatcataaaagatgacaaagccctagccgaattcctcggaatcgagtacaaaaagttgcgcttccttatttaccatcgcgatgtggtcagcgtggaccactatcacagatttaccatcccgaagaagaaagggggagagagaaacatagccgctcctaagagcattctgaagaatgcacagcggaaggtcctggaggatatactttccaaaatgccagtgtctaactatgcccacgggtttttaaaaggcaagtctgtggtcagtggggccaaggctcatgtggcagagaaggggtatctgagtgaagagactgatatggtagaaaaagcgtttgtagtcgaaaaagtccatggcacagacaaagtttcatcagaaaatacacagctgctcatcaacatggacctcgagaattttttccccactatcaccttcgagagagtgcggggtatgtttaaggctttcggatattccgggtacatctcgagtctcctggctatgatctgtacctattgcgaacgcatggcgatagaagtgcgcggcgaaatcaaatacgtgaagacaagcaatcgaattctgcctcaaggctccccagcgagcccaatgataactaacattatttgcgccaagttggacaagaggctcagtggcctggcttacaagcacaactgtacatatacccggtacgcagatgatatgtccttttcctttaaggaggagagctcagatttgaatattgggcgttttatggggctcgtgtccaagatcgtgtctgaggaaggtctgaatatcaacaagaagaagactagattcctgcgcgagaacaatcgtcagtgcatcacaggcattgtaatcaataacgacgaaatcggagtgcccaaaaaatggattaagacattacgggccgccatctataatgccaacaagcttaagaataacggcaaagaggttcctgttaagaccattaatgaaatctctggtatggtatcttgggtgaaaggagtcaataccgaaagatacgccgggattatccgtgagggcatggaattaatcgattcatga

SEQ ID NO: 13595 - RNA, 1356 nt, synthetic construct
  source 1..1356: mol_type = other RNA
atgatggataacaatgtgaacaatatagaccgcaaacaaaactatcgggaggcggtcagtgtaatggggaagaaagagttcacgctcttgaagatgcaagagtatggtttctggcccaaggacctgcccacgccttatgaaagacagaagtcagaaacccaggaggaatacgagaatcgcaaagccctactggaaaagtaccacaaggttataaatcagatcaatgacctatgcaaggacaaggaagatatcaacaacaagttaaaagggctgcagaaaaagtacgatgatacctgggactacgagaagatcaggaaagatgtggcccagacaatcatgaaggaatccattgagcgtagaaaggaggtcaaaatcctgagagagatcgaaaagaaagaaaagtctgatgcatggaagaagaataagagcgagaacatagtgtacatagggaaaggctactcaaagtggctttatctgaaagacactgacgaggagaagttgaaggaacatgagatcccaattataaaagatgacaaggagctggcacagtttctggggattgagtaccgacagctccgctttttaacttatcatcgagacgtggtgaaattcgataactataccaggtacaccattccaaaaaaaaaaggaggcgtgagaaacattgctgcccctaagaagattctgaaagacagtcagcgcaagatccttgatgaaatcctctgtaaaattgaggtgagtgaatctgctaatggatttattcagggcaaatccgtcgtgtctggtgccgagtcacacattgacaataaagttgaactcctcatcaatatggatctggagaattttttccctactatcacattcgaacgggtacggggaatgttccagaagcttgggtactcgggatatgtttcctccctgctggccatgatctgcacatattgtgagaggatggaaatggagatcaaaggtgaaaaagtgtacgttaagactacagatagaatattaccccaaggcgccccgtcttcccccatgatcacaaatataatttgcagcaagctcgacaaaaggttgaagggacttgcagataaatacggcctggtgtattcacggtatgctgatgacatgagctttagcttcggagaaggtaacattatcctgaacgctatcaacaagtacattaatctcaataccgataaggagaataaccaggacgacctgaatgtcggcaagataatcggcatcatcagcaagattatcaaagaggaggggtttaacatcaacaaccaaaaaaccaagttcttgaggaaaaacaaccgtcagagcattactggcattgtcattaataacgactga

SEQ ID NO: 13596 - RNA, 978 nt, synthetic construct
  source 1..978: mol_type = other RNA
atgctgatttcttcaatcgaatataagcaacttcgatatctgacctatcatcgcgatgtcgttaaatttgacaactataatcgctacaccatccctaagaagaagggcggtgtgcggaacattgccgctcccaagaaagtgctgaagggcgttcagcggaagatcctggacgagattctcaagaataagattaagatcagcgactctgcaaacggctttatcaagggaaggtccatcgtcagcggcgcagagaagcacaaggattcaaatgtagaactcttgatcaacatggacttggaaaacttcttcccaactataacattcgagagagtgagaggaatgttcatgaagtttgggtattctgggtacgtgagctccctgttagccatgatttgtacttactgcgaacgtatggagatggaagtcaagggagaaaacgtctacgtgaaaacctctgagaggatccttccccagggcagtccagctagtcctatgattacgaatatcgtgtgctccaaactggacaacagattgaatggcctagcctccaaatacgagttcacctacagtaggtacgccgatgacatgagctttagctttaacaagggcaacaaagtgctggacgatgctaaagatagcctaaacgttggaaaaattctcgggattatatccaagatcattaaagaggagggtttctcgatcaatgaggagaagacaaaattcctgcggaaaaataaccggcaggcaataacagggatcgtgatcaataatggcgaaattggggttccgaagaaatgggtgaaaaatttacgcgcggccgtctttaacggatcaaaactcatcgaaaacggatctattcttccctgtgatctggtaagtgaaattaaaggtaagtccagctggctgtcatgtgtgaatcgagagaggtatctcaagataatagaggaatgcgagaagatcataagattcaaagggtga

SEQ ID NO: 13597 - RNA, 1509 nt, synthetic construct
  source 1..1509: mol_type = other RNA
atgatagagaacaatcggaacaatatcgacaacaagcagaattataggagcgcagtgaatacaatgggcaaaaaagaattcacactgctgaagatgcaggagtatgggttttggcccgaaaatttacctacaccatatgaaaagcagagtaacgagtccccagaggaatttaaaaaacgtaaggaactgctggagaaatacgaaaagatcatcaacgacattaacgacttatacaaggagaaggacgtgattaataataagctgaccgagttgaaaaagaaatatgacgatacctgggattacgagaagattagaaaggatgtcagccaaatcattatgaaggagtcgattgagcggcgcaaggagatcaagaccttacgggccctcgagaagaaaaacaagtctgaggcctggcggaaaaagaaatctgagaacatcgtgtacatcgggaacggttacagtaaggggctgtacaagaaggataccaacgaagaaaagctgctgaaaattggactccccatcataaaagacgataaagagctgagcgaattgttgaatattgagtaccgacagcttcggtttctcacatatcacagagatgtggtgaagtttgataactacactaggtacacaattccaaaaaagaaaggtggcgaacgcaacatcgcagccccgaaaatgatcctaaagaacgcccaaagaaagattcttgaggagatcctgtacaaaatacaaatctctgaagatgctcacggctttgtcaagggcaaaagcatcgttagtggtgcttccgtgcataccaaaaatagcgacatcgagctccttattaacatggatctcgaaaatttcttcccaaccattaccttcgaaagggttaggggaatgtttcagaacttcggctattccggctacatagcgtccctgcttgcgatgatctgtacatattgcgagagaatggaaatgaaggtcaagggagaaactgtgtatgtaaaaacgtcagaccgtatcttgcctcaggggtcccctgcctcacctatgatcactaacatcatatgtagtaggctggacaaacgcctaaacggactggccctaaaatacgatttcatatactcccgatatgctgacgacatgtcattttcatttaacaaagggaacatggtgatggaggagaatgagcatattaacgttgacaagatactcggaattattagcaagatcattcgcgaagagggcttcgctgtgaataacaagaagacgaaattcctccgaaataataataggcagtccataactggtatcgtcataaatgggactgaaattggcgtccccaagaaatgggttaaaaacctgagagcagctatctataatgcatctaaattgaaggagtgcggcagcaatatcccctctgatgtgattaatgaaatcaaaggaatgaccgcctggctggagtgcgtaaataaggaccgctactataagatcattatgaagtctaaggagcttttcgaatga

SEQ ID NO: 13598 - RNA, 1467 nt, synthetic construct
  source 1..1467: mol_type = other RNA
atggacaccaagtctgaataccggaagttaattaatgagatgggtaagaaagagttcactttcctaaaaatgcaagagtatggcttttggcccagtcatctgcctacgccgtatgagaggcagcagaacgagacagagcaggactttcagaatagaaaaaagctgctcgatgaatttcagaaactgagcgaacagattgcccaagcctataaggagaagcgagaaattgaaattaagctctctagcctacagaaacagtaccaggatacctgggactatgaaaagatccgcgctgttgtctcccaagagataatgaaggcaagtatcgcccgcagggctgagcgaaaggcagaacgtcagagacagaaacaactgaaaacagagcagtggcaaaaacgcaaatccgaaaatatactgttcattggccggggctacagcaacattttgcacaaaaaacagacagatatccaaaaactgaagcagaataaccttcctatcctcgaaactgacaaggacatcgcccagttactgcaaattgagtattcaacactgcgctacctcgcttaccacagggacgtcgttacctttgacaattactataggtttgatgtgcctaagaagtcgggcggaatgagacatattgctgctcctaaaacacagctgaagacagcccagaagcagatattggaaaaaatcttggagaagacagaaatatcggatgtggctcacgggttcatcaaatctaaatcagtgcttaccggagccaaagcacaccaaactagtccagaccttcttatcaacatcgatctagagaacttcttccccaccataactttcgaaagggtgcggggcctgtttcaatatctggggtatagcgggtacattagctccatcctcgccatgatctgtacctactgcgaacggatggcggtggagattaagggtgagactaagtatatcaagacctcagagagaatcttaccacagggatcccccgcctccccaatgattactaatatgatctgcaagcgtatggacaagcgaattaatggactctgtcagaagctgggcgtaatttacaccagatatgcagatgatatgtctttttcttacactggggaacttgagaattttgcaatcgggtctttcctcaatagcattcagaagattattgaagcagagggattccatataaacaaacagaaaacgcacattctgaggaaacataaccggcagtacatcaccggcatcgtgataaacaatgcggagatcggagtaacgcgcaactggatcaagattttgagagctagtatccacaacgcccaaaaattgaagaatgccggtgaagcgatacccaaacagaccaagcaagagatatcagggaaaatcgcctggctgaagtccgtcaacgagacacggtaccagaagatcatccagcagggcaagcagctcctgcagaacagctga

SEQ ID NO: 13599 - RNA, 1464 nt, synthetic construct
  source 1..1464: mol_type = other RNA
atggacactcggagcgagtaccgaaaattagtctccgagaaaggaaagaaggaattcacatttctcaagatgcaggagtatggattctggcccagtcatctcccaaccccttatgaaaggcaacagaatgaaaccgaagaggacttcgagaaccgcaagaaacttctggatgagtttcaaaaactgtcggatgtcatctcaaaagcatatacagaaaagaacgagatagagaagaaactgttctctctgcaaaaggagtaccagaatacatgggactatgaaaaggtgcgcgccgtagttgctcaggaaattatgaaagaaagcattgcaagacgggccgaacgtaaggcggagagagagcgtcaaaagcagttgaagaccgaggcttggcagaaaagaaaggccgagaacatcctctttataggacggggttattccaacattctccacaaaaaggagacggacgtggctaagctggaacagcagaagcttcctatcatacagaccgacagggagttggcaaataccctgggcattgaatataatactctcaggtacctggcataccacagggatgttgtgacgtttgataattactatcggttcgacatccccaagaagtctggcggcactcgccatatagctgccccaaaaatccagctgaagatggcccagcggcaaatcctggagaagattctccagaaggttgagattagtgatgtggcacacggatttgttaagtcaaaatccgtgctcacaggagctaaagtacaccacacctctcccgatctgctgattaatatggatttggaaaacttcttccccacgatcacattcgagcgcgtgcgcggtctataccagcaccttggatacagcggttatattgcctccctactcgcaatgatctgcacctattgtgagaggatgccagtcgagattaaaggggaaaccaaatacattaagacttccgagcgaatactgccacaaggcagtcctgcgtcacctatgatcaccaatattatctgtcatcgtatggacaaacgcatttacgggttatgccagaaactgggtgtgacttatacaagatacgctgatgacatgtcattttcctacatcggggaattggaaaatttcgccatcggcagctttctgaacagcattcagaagatcattgagtctgaagggtttcacatcaataagcagaagactaacatccttcggaagcataacaggcagtacataactgggatcgtcatcaacaacgacgaaatcggcgtggcccgaaagtgggtgaaaatcctaagagccagtatacataacgctcagaagttaaagaacgcgggggaggctattccgcataaaacaaaaatggaaatcgccggcaaaattgcctggcttaaaagcgtcaatgagaagagataccacaaaatgatccagcaaggcatggagctgttgaaatcttga

SEQ ID NO: 13600 - RNA, 1470 nt, synthetic construct
  source 1..1470: mol_type = other RNA
atggaccgaaaagctgagtatcgtaatttggtaaagaacatgggtaagaaggaattcaccttcctgaagatgcaggaatatggattctggcctgaaaaccttccaaccccatatgagcgccaacagaatgaaacagagcaggattttgagaatcgcaagaaactgttagacgaatttcagaagctctcagaaaagatcagcggagtgtatcaggagaaatcggagatcgagagaaagttaagccaactgaagaaggagtaccagggtacatgggattatgagaggatccgggccgccgtcgctcaggaaatcatgaaggagtcaattgctcgccgtgcggagaggaaagctgagcgggagaggcagaagcagctaaaatccgaggcctggaaaaagagaaaggccgaaaacattatattcataggaaaggggtacagcaatctgctgggcaaaaaggaaactgatgtccagaaactgaaagagaaccaaatgcctgtgatcgagacggaccgcgagctcgcacggtttctgcagattgaatacaatacactcaggtacctggtctaccaccgggacgtcgttacgttcgacaactactaccgatttgatattcccaaaaaaagtggcggcatgagacacattgccgcccctaagacacacctgaaaactgctcagagacaaatattggaccaaatactccagaaggcaggaatcagcgatttgagccacggtttcattaagtcacggtcagtgctaaccggagcgagagcgcatagtacatctcccgacctgctgattaacatcgacttggaagatttctttccaactataacattcgaacgagttagggggttataccagtcctttgggtattccggttatatcgcatcccttttggcaatgatttgcacttattgcgaacgcatgcctctggagatcaagggcgagactaagtatattaagacctctggaaggatactgccgcaaggttctccagccagccccatgattaccaatatcatctgtcggaacatggacaagagaataaatggcctttgcaaaaaacttgggatcacttacaccagatacgccgatgatatgagcttttcctacatcggagacacttctggatttgccatcggctccttcctgaattcaattaatacgattatcgaggccgaagggttccacatgaaaaaagagaaaacccatatcctacgacggaacaaccgccagtatattaccgggatcgttattaataacgaagaaattggggtgcccaagaagtgggtgaaaatcctcaaggcttctatacataacgcacagaagcttaaagctagtggcggctgtgtgagtaacaagacaatcaatgagattagtggcaaaatcgcctggctcaaatccgtaaacgcaaagaggtaccagaaagtgatcgatcagggcaccgagtttctcaagtctctgacctga

SEQ ID NO: 13601 - RNA, 1470 nt, synthetic construct
  source 1..1470: mol_type = other RNA
atggacactaaggccgagtatcgggagctcgtgaacaatatggggaaaaaggaattcaccttccagaagatgcaggagtatggattctggcccagccacttacccactccctatgaacgccagcagcacgagacacaagaagattttgagaaacggcagaagctgttgggcgaatttcaggagctctctgagaagatcgccggcgcatatcgcgaaaagaccgagatcgagaagaagctttcacacctgaaaaaagcctacgaagggacctgggattatgaaaaaattcgggcagccgtggctcaggacattatgaaggagtccattgctaggcgtgcagagcggaaggctgagcgagagcgccaaaagcaactgaaatccgaggcttggaataagagaaaggcggaacagattctttttataggcaagggctactcgtctctactcggaaagaaagaaactgatactgagaagctcaaagcactccagatgccggtcatcgagacggaccgagagcttgcaaatgccctggggatcgaatacagtgcactgagatatctggcttaccatagggacgttgttgcattcgataactattacaggtttgagattcccaaaaaatccggtggcacaaggcaaatcgccgctccaaaaacccaactaaaagcagcccagaaacagatcttaacacaaattctgcagaaggccgagatctccgacaagagtcatggttttgtaccatctaggagcgttctgacttcagcgaaaacccactccacttcacctgatgtgctcatcaatatcgacttggaaaacttcttcccaactatcaccttcgcgagggtgcgggggctattccagtcgttcggctattctggttacaccgccagccttctggccatgatctgcacatactgcgagcgtatgcctctggaagtgaagggcgaaatgaagtacataaaaaccagcggcagaatattgcctcaggggagccccgcctctcctatgatcacgaacatcatttgtagaaacatggacaagcgcattagcggattatgtcaaaaattgggtgtgacatacacccgatatgccgatgacatgtcattcagttacaccggaagtgaagatgggctggccataggcagttttctgaactccctgacaaagatcatagaggctgagggatttcatatcaagcaggagaagactcatattcttcgtaaaaataaccgccagtatattacgggtattgtcattaacagcgaagaaattggcgtaccaagaaagtgggtcaaaatcctcaaagcgtccatacacaatgctcagaaattgaaggaatctggggggtcagtcccgaataagaccatctacgaaatctccggaaaaattgcttggctgaagagcgtgaatgctaagagatacgagaagatcatacggcagggaacagagtttctgaaaacactcgcctga

SEQ ID NO: 13602 - RNA, 1464 nt, synthetic construct
  source 1..1464: mol_type = other RNA
atggacacaaagagtgaatatcgaaaacaggtgaatgagatggggaaaaaagagttcacctttttgaagatgcaagagtacggtttttggccctcacacctgcccacaccatatgagcggcagcaaaatgagtcggcagaagactttgaaaatcgaaagcaacttctggacgctttcgagaaactgtctgagcagattgcacaagcctaccagaagaaacaggaaatcgagaaaaagttgtcctcactcaaaaagcagtaccagaacacccttgactatgaaaagattaggagcatagtggcgcaagagatcatgaaacaatccatcgcaaaaagggcagagagaaaggccgagagagaaaagcagaaacaactgaagtctgaggcatggcagaagaagaaggcagaaaccatcgtgttcatcggcaaagagtactcttcactgctcgccaaaaaggaaactgatatccaaaagctggaaaaaaaccatctcccaataatccagacagataaggatttagctgatctactgcagattgagtacaaaacccttcggtacctggtctatcacagggacgtcattacttttgacaactactatagattcgacatcccgaagaaatcgggaggaacacgtcatatagctgctccgaaaacacatctgaaaactgcgcagagacaggtactagaacagatactgcagaaagtcgaagtgtctgatgcggcccacggattcatcaagagcaaaagtgttcttacgggagctaagatgcaccccacctccccagatctcttgattaatatcgatctcgaggacttctttccaaccataacctttgagcgggtacggggcatgtaccagtcactggggtatagcggctacattgccagcctcctcgctatgttatgtacatattgtgaacgcatgcctttagagattaagggggagataaagtatatcaagactagccagaggatcttgccccagggctctcccgccagtcctatgattaccaacatcatttgccagaagatggataagcgcattcacggcctttgcaagaagctcggtttcacttacacccgttacgccgatgacatgtccttcagctacacaggacagactgacaatctagccattgggagcttcctgaactccatccacaaaatcatcgaatccgagggatttcatatcaagaaagagaagacccatatcctgaagaaaaataaccgccagtacatcacaggtgttgtgattaatcacaaagaaattggtgtgcctcgcaagtgggtgaagattctgagggccagtatatataacgcacagaagctgaagaacgccggcacagctgttcctactaagacgaagcaggagatcgctgggaaaattgcctggctgaaaacggtgaatgaaactcggtatcaaaaaatgattcagcagggcaccgaactgttgaaacactga

SEQ ID NO: 13603 - RNA, 1464 nt, synthetic construct
  source 1..1464: mol_type = other RNA
atggacaccagaacagagtacagagaacaagtcaacaaaatggggaagaaagagttcacattccagaagatgcaggaatatggtttttggccctcacacctccctactccatacgagcgacaacagaatgaaaccgaagaggactttgaaaatcgtaaaaagctcctggatgaatttaacaaactcagtgagcagatttctgaggtgtacaaggaaaagcgggagatagacattaagctctctagtctgaaaaaagagtatcaggacacctgggactacgagaaaatcagagccgttgtgtgtcaggaaataatgaaagagagtatcgctaggcgcgccgaacgcaaagccgaacgcgaaaggcagaagcagcttaaatcagaggcctggaacaagaagaaagcggagaatattatcttcattggacgcggctactccgggcttttaagccaaaaggaaacaaatatcgagaagttggagaagaacaatttaccgatcatcgagaatgacaaagatctcgccactctgctccaggtggaatataaaacactgcgttatctgacttaccatagagacgtggtgacctttgacaattattaccgttttgacatacctaagaagtctggcggtaaacggcacatcgctgcccccaaaaccgaactgaaaaaagcacaaagacaaatcctggaggagattttggagaaaattgaggtgagtgagtttgctcacggctttatcaaatcaaaaagcgtagtcacgggcgccaagttccataagtctgggccggatctcctgatcaacatggacttggagaattttttcccaacgatcacattcgaaagggtacgaggattgtttcagagcctgggttactcgggctatatttcctccctactggccatgatttgcacctactgcgagcggatacccgttgaaatcaagggagagactaagtacatcaaaacgtccgagcgcattctaccccagggatctccagcttcccctatgatcacaaacatcatatgcaacaagatggataagcgaatcaacgggctttgtaaaaagttgggattcacctatactaggtatgcagatgatatgtcattcagctatattggcgatacagaaaatctggctgttggtagcttcctgaacagcattaaaaagatcatcgaggatgaggggttcaacattaagaaggaaaagacccatattctgcggaagaataaccggcagtacatcactggcatagtcataaataatgaggagattggagtccctagaaagtgggtggatattctgcgggcgtcgatacacaacgcagaaaaactgaagaactccggggaatctatcccaaaagaaaccaagatggagatcaagggcaggattgcatggcttaagagcgtgaatgaggagaggtacaagaagatcattgacaagggccttaaattactagaaaactga

SEQ ID NO: 13604 - RNA, 1488 nt, synthetic construct
  source 1..1488: mol_type = other RNA
atgatcgatcagactcactcacagaatcagcggcagagctaccgatccgaggtgtcccaaaaaggtaagaaggaattcactctcctgaagatgcaggagtatgggttctggcccaagaacctgcctaccccttatgagaaacaaaaggcagaaactaaggaggactacgaaaagcggaaggccctcctgaaggaatatgataaactgtccaatgacctagccaacctttatggcgaaaaggaagccatcaacctcaagttgcaagagctcaagaagaaatataccgcgacctgggactacgaaaaaatacggcaggacattgcgaaaacaatcatggccgagtctatcgccagacgagctgagcgcaaaaaagagcgggaagtggcacaggcagagaagtccgcagcctggcagaaggccaaaaccgagaacattgtattcatcggaaagggatatagcagtggtctgcaggataaactcacacacacctctaaattggagtcattaggactccccctgattgagacggatcatcaactggcatcatttcttggcctgacctacacagaactgaggttcctcacatatcaccgtgacgtcgtcacaagcgaccattactatcgatacgagatccctaaaaagaagggcggcttcagacagatagcagccccgaagccactgcttaaacaagtccagagaaagatacttgtggagattctggaaaagctacccattgccgaagaggctcacggctttatcaaaaataggtctgtggtttcgagtgcagaagcccacattaaggctccaaccctgctgatcacgatggatctggagaacttttttccgactttaactttcgagcgcgtgagggggatgtacaagtcctttggttactcgggatacatcgctagtcttctggctatgttgtgtacttactgcgaacgcatgaccatagaggtttctgggaccactaagtacgtgaagacctccccaagaatccttcctcagggcagtcctgcttcccccatgatcacgaatattatctgcaagaatttggaccataggctgaaagggctgagtgccacctaccagctcacatacagcaggtatgcggatgacatgtcattttcatataacgaagccgaggagaatcttaaactgggacagttcttagggctggtgagcttgatcgtggaggatgagggcttccacattaaagcctctaagacaaaaatcctaagaccccataaccggcagtgtttgactggaattgtaatcaacaacgaggaaattggggtccccaaaaagtgggtgaaaaatctgcgtgctgctatccatcacgctaagctcttgaatcaaacgggccagccaattcccacatccctcagccaggaaattcagggcaagaccagctggctgaaatctgttaacccagagcgctataaaacaataattgaagcgggtttaagcgtcatagcacacttttga

SEQ ID NO: 13605 - RNA, 1515 nt, synthetic construct
  source 1..1515: mol_type = other RNA
atgatggacagttctagtgcaaaacgggagaactatagagacatggtcgggaagcttggtaagaaagagtttactctgctgaagatgcaagagtacggattctggcccaaggatctcccaactccgtatgaaatccagaaaaacgaaagtcctgaaagctacgcgaaacggaaaaaactccttaaggagtatgagaagattattgacaacatcgccaaggtatacgaagagaaggataccatcaacgacaaactgaaggaactgaagaagaaatacgatgagacatgggattatgagaagatcaggctggatgtggcccagcaaatcttcaaggagagcattgagcgccgcgagaatagaaaacgactgaaggaggaagagagaattaagcgcagcaacatatggaaacagaaaaagtccgaaaacattgtattcatcggcaaaggatactctaatctgcttaaggataaggagtccaacaaggataagctgctaaagaatggactcccaattattgaggatgataaggctctggccgaatttctccgacttgactactcccagctcagatttcttgcgtaccacagagacgtgaccacctgcgacaactattacaggtatatcgtccctaaaagaaatggaaaactgcgcaatatcgccgcccccaagtctgtgctgaagtttagtcagaagcgcattctcgaagatattctggggaagttagaggtgtcaaaaaatgcacacggttttctgaaggagaaaagtgttattacaggcgccttggctcatggcactgggattgacttgttgatcaatatggacctggaagatttcttccaaaccatcacgttcgaacgtgtgcggggcatgtttaagtcttttggatactcgggatacataagctcattactcgctatactctgtacatattgtgagcggatggagatcgaggtcaaaggcgaaaagaaatacgtggctacaagcaggagagttctgccacagggtagccctgcatctcctatgatcactaacatattatgcctccggctggacaaacgcttggagggtttggcctcaaaatacggatttctgtatacaaggtacgccgatgacatgtctttttccctggaagacaaaagcaaactactacttttcaaggaggaaaaagtcgacaaggagtccgaaaataaggaaattaacaagttcttgggcttggcatccaaaatcatcatagaggaggggttcaagattaacaaatcaaagaccaagttcctgcgtaagaataataggcagtatattacggggatcgttattaacaacaaggagatcggggtgcccaaaaaatgggtgcggaaccttagggcaaccatacataatgcctccaaactgaaaatcaatggcgacattcccgacgaactcgtgaatgaaatcagcggcaaggttgcgtggttaaggtcagtgaacggcgagcgatataaggctatcatagaaaaagctatggaagtcatcaaatga

SEQ ID NO: 13606 - RNA, 1491 nt, synthetic construct
  source 1..1491: mol_type = other RNA
atgatcgagaatcgacatcagtctactgccaattacaggaaaagcattgagatcatgggtaagcgcgagttcactctcttgaagatgcaagaatatggattctggccaaaaaatctgcctaccccttacgaacgccaagctaacgagtccgaggaggaattcgaagcccgccagaagctgacaaaaaagtacgaaaaactgggggaggacatagccaaactgtacgaagagaaggagaagatcgaagaaaagctcagacagctgaaaaaggagtacaatgatacatgggaccttgataagattcggaaagatgttgctcgcaaaattatggaggagtcaaaggcccgtcgtgctgagagaaagagacaaagagagctggagaagaaacaaaggtcagaggcatggaataagcgtaagcaggaggaaatagtgtttatcggaaaaggttatagccagctgctgcagcagcgggaaagcgatgacgataaactctccaaacttacgctccccattgtcaagactgacagggagttagccgagctcttgggaattgaatacgcgcagctgcgcttcatcacctaccaccgggatgtggttacagaagaccactatcaccggtatgccgtgccgaaacggaagggcggatatagaaacatcgccgcacccaagccaattctgcgaaaggctcaacggaagatcttggacgaaatactttgcaagattcccgtttcagattgcgcccatggcttcatcaagggcaagtctgtcgtgtcaagcgcgagtgagcatatcgggagtccagcactggtgattaacatggacctggaagattttttcccgacaatcacctttgaacgagtgcggggaatgtttaagagtttcggatatagcggctatatagccagcctactcgcaatgatatgtacctactgcgagaggatgccaatggaggtgaagggggaaaaaaggtacgtacgaacatcccccagaattcttcctcaggggtcccctgcttcatcgatgattagcaacatcctctgcattaagctggataagagactgagtggcctggccaaaaagaacaactttacttataccaggtacgcggacgacatgtcgttttccttaaagggggaagaaaagattaaattaggcagtttctgtggtctggtgagcaaaatcgcctctgaggaagggttcaagatcaataaatctaagacgcggtttttgagggctaacaacaggcagtccattaccggcattgttgtgaacaacgaaaagctagctgtccctaagaagtgggtcaaagtcctccgcgcagcaatccacaacgctaaaaaagagaaagagaaaggcgagcttgctccccagactatcagaaaaatctctggtatggccgcctggttgaaatctgtgaatgaggaaaagtacaagaaaatcatctccgaggcaaatgagctaataaatcgctgtcagaaatccgacgtatga

SEQ ID NO: 13607 - RNA, 1482 nt, synthetic construct
  source 1..1482: mol_type = other RNA
atgaccgaaaacaacgagctcctgcagaataaaaaggcagattaccgcgagtctgtcaataacatgggcaagaaggagttcacattgttaaagatgcaggaatacgggttttggccaaaagatcttccaacaccctacgaacggcaagacgatgagacgcccgaacagcataaggaacgtcagacactgctcaaggagtaccaaaaaatcatcgacaatattgccaaactctatgaacagaaggacgaaatcaacaagagattccaagagttgcgtaaagagtacgatgaaacatgggatgtcgacaaaattcggctggacatctccaagaagatcatggaggagtccatcactagacgatccgaaaggaaaaaaagaaaggaactggaaaagcagcaacaggcggagatctggcagaaaaaaagagccgaggagatactgttcattggtaagggctatagccagctgttacaggatcgatcaagcgatgacaacaaactctctacccaggggctgccactcataaaaaccgacaaagaattggccgagtttctgggggtggagtacaaacaacttaggtttctggtgtaccaccgcgacgtgatttctgtagaccactatcatcgatataccgtgccgaaaagacggggcggagtaaggaacatcgctgccccaaagcctatgctcaaaacgattcagaggaagatcctggaggagattcttagtaagcttactgtttcagagtacgcgcacgggttcttgaagggcaaatcagtcgttagcggcgcccaggctcacattggacagcataccctgctcattaatatggacctggaaaacttctttcccaccatcacttttgagcgagtaagggggatgttcatggctttcggttactccggctacattagctctctattagcaatgctgtgcacttattgcgaacgcatggcaatagaggttcggggcgagatccggtatgtgaaaactagtcctagaattctgccccaagggagccctgcttctcctatgataaccaacatcatctgcgtgaagctggaccggcgcttgagtggattggcagaaaggactggatacatctacacacgttatgcagatgatatgtccttcagcctgaaagaggaaaattatatggatgaaggtaagctatgtgggctcgtgagcaagatcgtcaacgaggagggatttaagctcaacaagacgaaaacccgcttcctaaggaagaataacagacagtgtatcacaggcattgtgataaattcagagcagcttggtgtgcccaggaagtggatacgggcctttcgcgcagctgttcacaatgctaataagcttaaactgaccggaacagtgccgtcgaaggtgaagaacgagatttccggcatggccgcctgggccaagagtgtcaatgctgaaagatataaagaggtcatcgcggccgctatcgccgtgattcaggactga

SEQ ID NO: 13608 - RNA, 1539 nt, synthetic construct
  source 1..1539: mol_type = other RNA
atgatggacaacaatatcgaacgggaccgcagggctgagtatagagataatgtgcagtcaatggggaagaaggagtttaccatctacaaaatgatcgagtacggcttttggccaaaagggctgcccactccattcgaaaggcaggcgaacgagacacctgaacagtatcaagagcggcaacgactcttctctgagtacaagaaaattgcagatgaaatcgccaaagtctacaaagagaaaagcgagattgacacaaaactgagagagctcaagacccagtacaacggatcatgggatgaggaaaggattcggaaggatatagctcaacgcataatgaaggagagcaaggaaagacgggaacagagaaagaaacaattagagctggccaaagaacaaaagtcctctgcctggaaaaagaaaaaggaggactctatcgtttacattgggaacgggtattcgtcaatgctgcattataaatccggtaatcaggatcgtctggttgcaaatggcttgcccatcatcaacactgatcgcgagctagctgatttcctgggcgttgaatatagagcccttcgcttccttgtgtatcaccgggacgtagtgacgatggatcactaccaccattacaaagttccaaagaggaagggaggcacgcgaaacatagcggcgccgaagaaggtgttaaaaaacgtgcagaagaagatcctggaggggattctggaaaagctggcttgtcaggataatgactgcctcggaaataataggttttcgaatgcatgtagtgacaacgcgcacggctttataaagggacgttcagtggtcacgggcgccgacatccatgtgaaatcccccgctctcttgataaacatggacatagaggacttcttcccaactattactttccagcgagtgaggggtatgtttgtcggatttggctatagcggctacattgcaagcctgcttgcaatgctctgtacatattgtgagcgtatggaaatcgaagtgaatgggaagaggaagttcgtcgccaccaccggcagaattttgcctcagggaagccctgccagccccatgataactaacatcctctgcaggtccttagacaagagactgaatggtctggctagtaagtttggctttatctataccagatacgccgatgacatgtcttttagtacaaaggaaaccgtgctggccgatgctggcaaactatgcggacttgtgaccaagatcatcagtgatgagggattcaagctgaacttcaaaaagactcggttccttaaaaagaataactgccagagcattaccggtgtcgtagtgaattctcaccagttgggtgtctccaaaaaatgggttaagacattgcgcgcagccatttacaatgctcgcaaagcaatggccaaagggaaagtaccttacgaaatcgtctccgagatctccgggatggccgcttggctgaaatgcgtgaacgaggaacgatacaagtctattattacagacgcctatgacctcatccgggacatcaacaagattatttga

SEQ ID NO: 13609 - RNA, 1485 nt, synthetic construct
  source 1..1485: mol_type = other RNA
atgatcgaaaacaatcgtgtacctaaggacaaaaaagctaattaccgtgagctggtgaatcagatgggaaagaaggagttcactctcctaaaaatgcaggagtacggcttttggcctaaggatctacccaccccatatgagatacagaaaaatgaaacaccggagcgctacgcaaaaagacaaggtcttcttaaggagtaccaaagactgatagaccagattgccaaactttacgaggagaaggacgatattaacaagaaactgtgggaactcaagaaggagtacgacgacacatgggacctggagaaaattcggttagatattagccagaagatcatgcgcgaatccatcgaacgcagagctgagagaaaaaaacagcgagagctcgaaaagcagaaaaggtcactggattggcaacagaagaaaagtgagcagattgtgttcattggacgtgggtattctagcctgatgaacgatacgcaaattgacgaggaaaagctgaagacgcaggagcttcctatcatcaagacagatcgggacttggcagaggtgcttgggatcgactacccatccttgcggtttctgacctatcatagggaagtcgtgtctgttgaccactatcaccattttaaaatcccaaagaagaagggcggcgaaaggtcaataagcgcacccaagtccaagctgaaaaccgctcagagagctatcctcgagaagatactctccaagctgaacatcagtgatcaagcgcacggattcttgaaggggcgctccgtcgtgtcaggagcccaaacacatatttctcagccagcgctcttgatcaatatggacctcgaggatttcttccccactttaactttcgaaagggtgctgggcatgttcagggcctttggctacagtggctatatctcttccttgattgcaatgctgtgcacctattgtgagaggatggaaatcgaagtaaaaggcaaaccgaagtatgtcgccacatccaagcgaattcttccccagggatctcccgcgtctcctatgatcaccaacatcatatgcagggatctggacaaaagactgaacgggctggctaagagctttggctttatctacacccggtacgccgatgacatgagctttagtattaatgaggtgagtgatctcaacgaaggtcgcttctgtggcctggtttcgaaaatcgtatcagaggaagggtttaagataaacaaggcaaagacccggtacctccggaaaaacaactgccagagcgtgactggtattgtcgttaataacgaccagttagccgtgcgcaaaaaatgggtcaagcgattccgggctgccatttataatgctagaaagcagaaagccgcaggggagctatcaaacgccactaagaatgagatcagcggaatggccgcctggctgaaaagcgtgaatgaagaaaaatatcgagacatgatcggtgctgtgatggatattgttaaagaagattga

SEQ ID NO: 13610 - RNA, 1461 nt, synthetic construct
  source 1..1461: mol_type = other RNA
atgaccgaaaacactaaacaggactataggacgctaataaatcagatgggcaaaaaggagtttacaattatgaagatgcaggaatatggcttctggcctaaagatctccctacaccatacgaaaaacagctgaacgagactccggagcagtatagtaagcgaaaagcactcgttgaggattacaagtcaatcattgaaagaatctccaagctgtacaaagagaaacaggagattaatgacaaactgcgggatctgaggaagaaatacgacgagacatgggacattgaacggattaggaaggatattgcgcaaaccatcatgaaggagtctatagcgcgacggacagaaaagaagaaacaaagagaactcgagaaacatgctaaaagcgaagcatggaaaaagaaaaaggccgagcagatcattttcataggtaaaggctatagctcctttctgtacgataatgaaactgatcagcccaaactcgagttacagggtcttcccgtaatcaagtccgatattgatctggccaactttcttgagatcgactataagaagctccggtttttgtcataccacagggacgttgtcaccgtagaccactatcaccgttacaccatcccgaagcggaaggggggaatgcgtaacatcgccgcacccaagcccatcctgaaatccgtgcagcgcaagattctggaggacatattgaataaattcagtctgtcccagcaggcccacgggttcatcaaggagcgttcaatactgagcggcgccctggcacataatatccaacctgctttggtgataaacatggacatcgagaatttctttcctaccatttcattcgaacgggtgcgcggaatgttcaaatctgctgggtacagtggttttataagctctctgctcgcaatgctgtgtacgtactgcgagagagtgtccattgaggtcaaaaataaaacccgctttatcgctaccacgaagagaattcttcctcaaggaagcccagccagccccatgattaccaacattatctgccgacggttggatcaacgcctaaacgggctggccagcaagtttggtttcacatacactagatacgccgacgacatgagctttagtatcaatgatgaaacaaacgtgaaggtgggaagattctatggcctcgtttctaaaatcgtgaaggatgagggctttgagattaacaaggaaaagactcgcttcttacgcaagaacaatcggcagtctatcacaggagtcgtggtgaacaatgagaagcttggggtcaataggatgtggatgagaaggttcagggctgccatccataacgcctccaaattaagaagtaatggcgacctgccaatcgaagtgaagcgcgaattgtcaggaatggcttcttgggtccgatcggttaacccagaaaggtataaaaagcttattgaaactgcgatggaggtaatcaagtga

SEQ ID NO: 13611 - RNA, 1491 nt, synthetic construct
  source 1..1491: mol_type = other RNA
atgaccgaaagcaacgacattcagaagaggaccaagtccgattatcgggaaatgatcaataagatgggtaagaaggagttcacgctcatgaaaatgcaggaatatggcttctggcctaaggatttgcctaccccttacgagagacaggagaatgagacaaaggagcattacgaggctcgcaagcaactacttaagaaatataagggaatcgtcgatcagattgcagacctgtaccaggaaaaggctgacattaacaagaaactgcgggacttgcagaaacagtacgacgaaacttgggatattgaaaaaattcgcaaagacgtagccaaacagatcctcaaggagtcagtgacaagaagggcagaacgtaaacggcagaaggaacttgagaagcaaaggcgatctgaggcctggaaaaagaaaaaagccgagacgatagtgtttctggggaagggatactcatcttttctgaatcactttgaaaccgatgaaagcgcgctgcagagttttcagttgcccatcataaaaaccgacaaggacctcgccgagttcctgaacatcgactacaaaaagttacggttcatcacctatcaccgagacgttgtcgacatcgatcactactttcgttacactatacccaaagcctccggggggaaaagactgatcgcagctcccaagaacatcctgaaatcggctcagagaacaatcctgaacgacattctcacaaatattccaatagacgagcacgcccatgggttccttcagggcaagagcatcataactggagcaaagtctcatccaatccaaccggagctgttaataaacatggacttggaggaattcttcccaagtatcacatttgaacgtgtccgaggcatgtttcattcttttggctattgcgggcatgtgagcactctgctggccatgatatgtacttactgtgaacgaattcctctcgaaatcaaggataaagagaagtatgtggccgttagtaagagaatactaccacaaggctcccctgctagccccatgattacaaacatcatttgctataagctcgatcggcgcctttcaggactggcaaaaacctttaatctgacttactcccgctatgcagatgatatgtcattcagccttaaggacaaaaacgaggcggaggtgaatatctctaggttcctcggcctggctatgattatcattaaggatgagggtttcaagattaatcacaataagacacggtttctgcgccagaacaatagacaggcaatcaccggaattgtgatcaacaaagataggatcggggttccaaggaaatggatcaaacagttcagagcggctatttataacgccgagcaactgcaaacgaatggtggcttgccgggcgaaattaagagggagatcgccggaatggcctcctgggtaaaatccgtgaatcccgaacggtacaagaaatacttaacccgcgctcacaacctcctaagtgagaaatga

SEQ ID NO: 13612 - RNA, 1350 nt, synthetic construct
  source 1..1350: mol_type = other RNA
atggccatccagcgtcagaccgaccccagcgacttgtggagggccataatccaagcgggcggaatccagccctacattgatgctcagctcgctgagcgcggctttctggtggccagaagggagacagacggcctgagtgagcgggaactggccgactacaagaagtccctcaaagccgaggcccaggagagagcacgactgagacgggaagcatgggccgcataccgggcagagcatattgtccacctgggggatggagtgtactggaacgacgaaccgggccccgataagtgggacttgccaaacgcagaggaaagagccgccgagaatgagcttcctcctctagactctccgaggcaactggctgacgcccttgggttgaccattcctcaactgcggtggttggctttccaccgcgaagccgcgacgcgcatccactataggcgcttcaccattcctaaacgagacggaagtgaaagagccatttgggcaccaatgccccggctgaaaagggctcagcattggatcctacgcaacgtagcggaaaaactcccagtgcatggggccgtgcacggttttgtcgccgggagatccatcttatccaatgcaagcgcccatcacgatccaaaggttgctgtgcgaattgaccttaaggatttttttccaactgtcaccctgcgtcgggtaaagggtctgttcagaaaggccggctatcgggaacacgtagctacactcctggctcttatctgcaccgaatcacccagggaaatcgtgcagaacgagggggctacctattacgtggctctcgggccgaggtgtctcccacaaggagctcccacatctccagcactcacaaatgccttatgcctgcggctggatcggcgcttatcaggcttggcacgcaggcagggttggagatacacacggtatgcggatgatctgactttctcccgaccctctgactttggagggcctcctgctatcggaaaactcctgggctcggtgcgcagaattgtggaggcggagggcttcgcagtccacgatggaaagactgctatacgtaggcgcggcggtcgtcaggcaataactggccttgttgttaatggcgacagaccccctcgtgctactagggagttcaaaaggaacctacgagccgccatacataatctcgagtccggacgagcgacgccagaagccgaaccaccgcaggtgcttgttggtcgggccgcatttgtcgctatgagcgaccctgcactggggttgagcttactggacagactgagcagagccaccgagcgggatggaagtggcgatgattcaaggtctgagccccctcgccccgagtcatga

SEQ ID NO: 13613 - RNA, 1314 nt, synthetic construct
  source 1..1314: mol_type = other RNA
atggccatgcaacggcagactaatcccttcgacctctggcggagcattgtccaggcgggaggaatccagccatacattaacgcccaattgtcagagagaggatttctggtcgcgcgtagagaaactgacgggatgagcgaaagagaactcgctgattataaaaaatccctgaaagctgaggctgccgagcggaggcgattacgacgtgaggcctgggccgctttcagagcagaacacatcgtgcacttgggcgacggcgtctactggagcgacgaacccggtcctgatagatgggatcagcctaacgccgaggtacgcgcagccgaaaacgagctgcccccacttgattcaccaagacagttggccgaagccctgggcctcacgatacctcagctgcgctggttagccttccatcgggacgctgcacgaaggatccattaccggcggtttacaattcccaagcgcgacggcagcgaaagagctatttgggcacccatgcccagacttaagagggcccagcattggatcctgcgcaatattgctgagaagttgcccgtgcacggagccgcccatggatttctgccagggcgctctatcctgagcaatgctgcgccgcactgtgacagtaaggttgtggtgcgcatcgacctcaaggatttctttcctacagtcactcttcgacgggtgaagggccttttccggaaggcaggctaccgagagcacgtggccaccctactggctttaatatgcacagagtcgcctagggaaatcgtggaacaggatggtgaaacatattatgtggccctgggtccaagatgtttgccacaaggagccccgacctcccctgcgatcactaatgcactatgcctgaggctcgatcagcgcctgtcaggcgtagcgaggtcccaaggttggagatacacaaggtatgcagacgacctcacctttagtaggcccgcagattccaaagaggccccagggatagggcggctcttgggaaccgtcaggcgcgttgttggggatgagggcttcaccattcacgacaaaaagaccgccgtggggcataacggaggcaggcagagggttacaggccttattgtgaacggggatcggacccctagagcacccagggagtttcggcgaaatctgcgtgctgctatccacaacctcgtcactgggaaagagtctccgagtgctgagcctccctctgtactagccggtcgtgctgccttcgtggcaatgacggacccttctctgggccgcgcaatgctggagcgcctgtcacaggctgtggagagatccccagaagcatga

SEQ ID NO: 13614 - RNA, 1305 nt, synthetic construct
  source 1..1305: mol_type = other RNA
atgtcccggaccacatccagaacgaacgatcccatgactctgtggcgggccattgaacaggccgggggaacacaggcgtatgtggaggcacagcttgccgagcgcgggttcctcgtcaagaggagggagacagataaaatgtccgagagagaattggacgcatacaaaaagagcttgaaggccgaggctaaagagaagagagccttacaggcagacgcttggagagcttacaagaccagccatatagtgtacctgggcgaaggtatcttctggaaggatgacccaggcggtcccgataagtgggatctgcctcacgcagaagagcgggcagcggagaatgaactgccccctctagactcacctcgccagctcgccgaagccctagagctgagcctcagtgaattgcggtggctcgccttccacagagatgcagccactaggattcactaccggcgtttcactatcccgaagcgggatggctctgaaagagccatttgggcccccatgccaaagttaaaaagtgctcaacattggatcctgcgaaacattgcagagaagctcctggttcatgggagtgtgcacgggtttctgcctggcaggagcactctgaccaatgcggcagctcatgcgaaccccaaagtggtcgttaagatggacattaaggacttttttcctacggtgaccttgccaagggttcggggaattttcaggaaagccgggtatcgagaacaggtagccacccttctcgctctgatctgcaccgagtccccaagagaggtggtggaacacgacggacaaacctactatatcgcattgggccctcgttgtctgccacaaggagctcctacgtcccccgctcttacaaatactctttgcctgaggatggaccaacgcctgtcagctctggcgaaacgctttggatggcgatacacacggtatgctgacgatctgaccttctctctcccgcatgatcacaaagaccagcccagactgggggccttggttggcaccgtccgaagagtcgtggaagccgagggatttacaatccacccctctaagacacgcgtagctcgatcaggcgcccgtcagactataaccgggcttgtggtcaatggtgatcaggccccacgcgctccgaggaaatttcggcgcgaactcagggccgcaatccacaactcgcgcaacggcaaacctttacatgagggagagagcccaacaactctcgccggctctgcagcttacgtgtatatgaccgaccccgagctaggtgccaagctgcttgacgctataaaacaggaggcatga

SEQ ID NO: 13615 - RNA, 1320 nt, synthetic construct
  source 1..1320: mol_type = other RNA
atgtcccgtgcaactgacctgctgtcactgtggcgggcaattgaacatgccggtgggatcgatgcgtacgtgaatactcagctcgctgagagggggtttttagtggcccggcgcgacgtcgatacgatgagcgaccgcgagagaactgcatacaagaagcagctcaaggaggaagccgcccaccggagagagcttaagcgtgaggcatggaaggcttatcgggcaagacacatcgtacacctgggagaagggatttattggaatgaccaggccacaaaggatccctgggacgcccctgatgcagaggagagagccgccgagaacgaactcccacctctagacagtcctcgcgatctcgctgaagctctgggactgaccattagccaattgcgatggcttgccttccatagagacgcggcgacaagtatccactatcgcaggttcacaataccaaaacgagatggatctgagcgtgccatctgggcaccactgcctaccctcaaggccgcacaacactggatcctgcgaaacattgcagagaaactgccagtccatggcgccgcccatggtttcttggccggaagatctatactcagtaatgctagcaatcacgtggactctgctttggtcgtgaaaatggacctgaaagacttttttccgtccgtcaccttccggcgcgtgaaagggattttccgaagggctggctaccgggaacaggttgcaactcttctagcactgatatgcactgaggctccccgcgaaatcgtggagcagggaaaaactacctactacgtcgccttgggtcctagagctcttccgcagggcgctcccacatcaccagctctcacgaacaccctgtgtctgcgcctcgacaggaggctggatggccttgctcagtcattgggatataggtacaccagatatgcggatgacctcacatttagcctgcccagatcccacgaaggggatccgaaactcggcaccttacttgggaaggcccggcgggtggtagaatcggagggctttaccgtgcggctggagaaaacaagagtggctaggcccggtgcgcgtcagcaagtgaccggtttagtagttaatggcgctgccagtcctcgcactcctaggacattacgacgccagttgagggccgcagttcataacctgcagacaggcaagcctaggcccgacgcggatactccagaacggttggccggcctgatctcatacgttgccatgacagaccccaccctgggacaagccctacaggcccagtggaccaacccctccaagccaacgagctctgatgatagcccctcctga

SEQ ID NO: 13616 - RNA, 1296 nt, synthetic construct
  source 1..1296: mol_type = other RNA
atgtcgcggaccactgatctgacgtccttatggagagccattgaaagggcgggcggtatcgactcttatgtgaacggccagttgtcagagcggggatttctggtggagcggagagaaattgacacactctccgatagggagcgggaagcctataagaaacagctgaaggaagaggcagcacgcaggctggagttacgacgcgaagcgtggcaggcgtataaagccaggcatatcgtgcaccttggcgaagggattttctgggacgaccatgccaccgaagacaaatgggatgcgccagatgctgaagagcgggcagccgagaatgagctccccccactcgacgggcccagagatcttgctgaggctttgggactgacaatacctcagctccggtggctggctttccatcgagatgctgctacctccatccactacgcaaggttcactgtagccaagagagacgggtccgaacgagccatctgggctcccatgcctactctgaaggccgcccaacgctggatcctgcggaacatctcagaaaaactccccatacacggcgcaagccacggtttcttgccaggccgaagcatcaagagtaacgcacaggagcatgtagggtctaagctggtgctgaaaatggacctggctgatttttttcccagcgtcacctaccctcgcgtgagaggtattttcagaagggccgggtacagagagcaggtgtcaacgctgcttgccctcatttgcacagaggcacctcgcgaagtggtggaggaaggcgggaccacatactatgtggcccttggtccccgttgtctgccacaaggagcccccactagtccgtctttaaccaacactctctgcttgaggcttgaccgccgcctatccggactggccaggagtctgggctggagatacacacggtacgccgacgacctgacatttagcttgccggcttctcacggaggcgagcctagactaggggctctccttggcggagctcgtcgggtagtcgagagcgagggttttgccgtcaggttagataagactcgtgtggcacgagctggggctcgccaacaggttaccggcctggtcgttaatggtgaaggacctgcccgcgttccacgtcggttgagacgacagctaagggccgccgcccacaatctggaggttggcagagcgggccctgatgcagacccggttgatagactcgcaggactggccagcttcgtctgtatgaccgatccagcactcggagcggctctgcttggaaggttgcgtggcgggtcagcagggtga

SEQ ID NO: 13617 - RNA, 909 nt, synthetic construct
  source 1..909: mol_type = other RNA
cggtggctcgcctaccatcgggatgctgccacaaagttgcactaccgccgcttcgtgatcccaaaacggggcggaggggaacgagctatttgggcccctatgccacttctcaaggccgctcagcactggatcctccggaacgtggcagagaggttacccgtccatggtgcagcccacggtttcctagcaggccggagcatactgtcaaatgcagccgctcacccggatgcgagaatcatcctgaaaatggacattaaggagttctttccaaccgtttctctgacccgagtcaaaggcattttcaggaaggccggctatagggagcaggtcgccacactcatggccctcatctgtacagaggccccccgtgaggtcgtggaaagagatgggaagacatggtacgtgtccttaggacctagatgcctgccccaaggggctcctacttcccctgctcttaccaacaccctttgcctccgattggacagacgactagcagggttggctgcgaaactgggttggaggtatacgcgctatgccgacgatttaacctttagcctgccagacggacacaaggatgaacccaagacagggcctttgatgggctttgtaaagcggatagtggccgctgaaggcttcgcggtacatcccgacaaaaccagtgtgaggagaaaaggaggcaggcaacaggtgacggggctggtggtgaacggaggaggtccaccgcgcgttactcgtgatctgaagagacggctgagggcagctgcccacaatctggctcgcggcaaaggcctgaaagagggcgagactcctgccagactggaaggttttgcagcctacgtccatatgactgacgagaagctggggggaaagctccttgcagcgtttcgtgggggagttcgccagggctga

SEQ ID NO: 13618 - RNA, 1401 nt, synthetic construct
  source 1..1401: mol_type = other RNA
atgaatcaaaccaaccaagatcctcgtccatcagttgacctgggtgctttgtggagagccatcgagcaggctgggtccatccaggcttacgttaaccagcagctgtccgcacgaggttacctcatagagagaagggatacagcccggatgtcggcagctgaactcaaacgttacaaacagcagctgaaggatgaggcggtcgagaagcgcaggctgaaagcggaagcatgggccgcttacaaggccgcacatatcgtgcacctcggggaagggattttttttaacgaggagaatgacttcgacaggtttgatctgagggaacccgaagcccgagctgccgagaacgaactcccaacactggacaagcctgctcaactggcggaggcactgggtctgagcgtgagtgaactcagatggctgactttccatcgtgaggccgcagaaagcattcactaccagagatttaccatccccaaacgccgagggggagagagggagatttgggcccctatgcctaaactgaaggccgcccaacggtgggtgatgcgggagatcgtagagcacttaccagtgcatggggccgctcacggattcattgccggacgctcaatccttaccaacgcccaggtccatctgaatgcagaaatcttagtcaatttcgatctgcaggactttttcccgaccgtgacatggagacgggtgaaaggcgtctttagaaaagccggttatcgtgaacaggtagcgactctattggccctgctttgcactgagcccccacgcgaggttatcgagcacgaggggaagagatattatattgcactcggtcagcggtgtttgcctcagggagcgcccacgtctccggctataacaaatgctctgtgcttaaggttggatcggcggctctcaggacttgcccgcagtctgggctggagatacactcgctacgccgacgacctaaccttctccttgcctgccagcgaggcgaagccgaaagcaaagaagggcaaggctaagcccactaaagcaaagcccaccaaagcaaagaaggcccagggcgctcttaccggagaagcagcattggcacgccttatggggggcgtgaaggccattgtcgccgctgaagggttcgctctgaatccagacaaaacggcaataaaacgcccctctggacggcaaggcgttacaggactcgtggtaaacggcgatggaagcccacgcgttccccgagaggtgagaaggaggttgcgggcggccctacataacctcgaacgaggccagccactgagagagggtgaatcttatgctcacctggccggcttagccgcattcgtgtatatgacagaccctgctctgggcggcgctcttcttaagaggattggggccctcgccaggcagggctaa

SEQ ID NO: 13619 - RNA, 1302 nt, synthetic construct
  source 1..1302: mol_type = other RNA
atggccacaaggccaaatcttgtgactcagtgggtggaactttggggagcaatcgctcgagcagggggcatcgatgcttacatcactgcccagctcacagagagagggtatctggccaaacggagatcgaccgatggtatgtcagctgctgagttaaagcgctacaaggcagagctcaaacgcgaggcagcggagaggcgcaaactcaaagctgatgcttggcaggcttatcgggccagccatattgtgcacttgggggaaggcgtcttcttcaacgacgacctggacttcgatgccttcgaccttgcagagccagaggccagagctgccgagaacgaactccccaagttagataaaccccagcaagtggcagatgccctggggatgacgctggccgagcttcgatggctgtctttccaccgagaagccgccaccggggtacactaccgaaggttcgagattcggaaaagatccggagggatgcgagcaatctgggcgcctctacccaggctgaaggcagctcagcggtggatactgagggagattgtcgaacatctcccggtacacggggcggcccatggttttcttgcaggccgttccattcttactaatgctcaagcccataccgggagcaagctgatcctgaacgtggatctgaaggacttttttccttcagttacatggagacgggtgaagggactgttcagaaaagctggctaccgcgaccaagtcgctacactgctagcattgctgtgcacagaagctccacgggaaatcgtggagcacgagggcgagaaactctttattgccttagggcctcgttgtttgccacagggagccccgacttctcccgccataaccaacgccctctgcatgcgcctggataggagactggcaggcctggcgagaagtctgggatggcggtacacgcgctatgccgacgacttaaccttctcccttcccgcagaccacaagggagcccctggattgagtaagctgctgggcgcattgcacgctgttgtggccgccgaaggctttgccgtcaatcccgccaagactagggtgtctcgtcccggagcacggcagaaggttaccggcctcgttgtcaacggtgacgccgctccaagagtccctcgtgcgctacgcaggaaactccgcgctgctgcgcacaatctcgctcagggtaagccactgcctgcaggtgaaagcgtggcccagttggctggctatgccgcatttgtgcatatgaccgatccggtactgggcgccgcgttgctaggaaagtttggcgaacataggtga

SEQ ID NO: 13620 - RNA, 1311 nt, synthetic construct
  source 1..1311: mol_type = other RNA
atggccacaaggcccaacgatcggcaggccctttgggctgcaattgccagagccgggggcatcgatgcatacgttcaagctcagctggtagccggcgggttcgcagctgaacggaagccaactgacgggatgtcaaagagggagctggctagatacaaagccgaactgaaagccgaagccgccgagaagaaaaggctgaaagccgaggcctgggccgcatataaggctactcatatagtccatctgggcgagggagtgtacttcaatgacgctgatgacttcgatcgattcgatctcgccgagcctgaagcaaggctcgcggagaacggcttgccgaggatcgacgatcctcaggccctggctgaagctctagccctttccgtgcccactctgcgctggctcacgtttcaccgtgacgctgccacaatgctgcactatcggcgcttcaccatccccaaaaaatccggcggggaacgagcgatctgggctccaatggacacgctcaaaagcgcacagcgatgggtgctgagacacattgtcgagcctctacccgtccacggagcggctcatggcttcgtccctggaagaggtatcgtgtctaatgcacaagcccactcggaggctcgcatcttgataaatgtggacctcaaggacttttttccgactgtaactgttcggagagtgaagggagtttttcgaaaggctgggtaccgggagcaggtagcaaccctgttggcaatgctgtgtaccgaggcacctcgagaagtcgtgcgccacggcgaaaccgactactttattgctcttgggccccgttgccttccacaaggagcccctaccagtcccgccctgaccaacaccttatgcttacgtttggatcggaggctgtctggtctagcccggcaaaggggttggcgctatacacgttatgctgatgacctcaccttcagcctccccgttaaggcggctaagggagccgatggtaatgtgggcacactgctgggtgcagttagagccattgtcgaagcggaggggtttgccttaaacccaaagaaaacacggatttgtagaccaggggggcggcagaaggtgacaggactcattgtgaacggagctgaacctcctcgcgcaccaagggccctgaggagaatgttgagggccgccgtgcataacctggagcagggaaaaccgcttcccgaaggcgagactgtggctcgccttgcgggctacgcagctttcatctatcagacaaatccacaggagggcgcagagttgctcagacgctttgcagcgttcgccggcgagcaggcatga

SEQ ID NO: 13621 - RNA, 1302 nt, synthetic construct
  source 1..1302: mol_type = other RNA
atgagtacccgcaccacagaccttgccgctctgtggctggccattgccgaagctggtggaatcgataactatgttcagaatcaactggtggaacatggattcctcgtggaaaggagggagacagacacaatgagcaaggccgagctgaagaggtataaggcacagctgaagagggaagcagccgagcggcgggagcttaggaaagccgcttgggctgcctacagagagacacatatcgttcacttgggggatggtgtatactataatgacgcagcgactatggaccgatgggacttagatgagccggaagcccgggcagctgcaaacgaactcccccgactggacggccccgatgatttggccaaggagctgggcattaccgtggcacagctgcgttggctggcggttcatcgcgacgcagcaactagaattcactacacccgcttcaccatcccaaagcgtgatggcagcgaacgcgcaatttgggcccctttgccgcgcctcaaagctgcacaacggtggatcctccggaacgtcgtggagcatttacccgttcacggggccgcgcacggctttttagctggcaggtccgtagttaccaatgctgcagctcacgtgggctcaaaattgattgttaacattgacctcaaggacttctttccaacgatcacatggcgcagagcccgggggatgttccggaaagcgggctatcgggagcaggtggcgactctcctggccatgatatgcacggaggccccaagggaagtggtggagtgggaaggtcagtcctactttgtagcccttggtccccgctgtctcccccaaggagcaccaacgagccctgccatcaccaacactatctgcctgcgtctggacagacgcttgtcagggctcgcgcgcagattcggatacacatacacccggtatgctgatgatctgactttttctctgcctcttgcccacactggagaaccccgagtgggagccctgataggcgctgtggggcacattgtcagggccgagggctttcaagtccacccatccaaaacaagagtgcagcatactgggagacgacagcaggtcaccgggctggtcgtcaatggcagagagcagcctagagtgcctagaagtctgaaacggcagcttcgagctgcagtgtacaatctacgacgtggaaggccccttcctgccggtgagaggttcgaaaggctgatcggttatgctgcttggatacatcaggctgagccggagttggggtctgaattactcgccgccctaggcggactaaacccaaccgcctga

SEQ ID NO: 13622 - RNA, 1113 nt, synthetic construct
  source 1..1113: mol_type = other RNA
atggccgccttatggagagggatcgacgaagccggctcatgcgaaaactgggtgcaacagcagctcgtggagcacgggttcatagttagccggagggacacagataacatgtccaagagggagctcgcgaactataaaaaacaactgaaacgcgaagctgccgagaaaaaggcattgaagaagaaggcttgggaggcgtataaggccaatcacattctgcaccttggggaaggcgactggtggaatgatgcagcaacattcgacaagtgggacttgcccgagccagaagccagagccgctgagaatgagctgccgcaactcgatagtccagacgatctggctgaagcgctggggctgaccatcaaagaactgcgctggctatcttttcatcgggatgctgccaagacgattcattacaggcggtttaccatccccaagcgaaacggatctaaacgacccatttgggctcctctgccgaaactcaaagaagcccagcggtggatactgcacaatatcgtggaacatctccctgtgcatggggcagctcacggcttccttacagggaggggtatcgtgaccaacgcccgcccacatggaggctcagccttactgcttaacatcgaccttaaggagttctttccaactgtgacctggcgaagagtcagaggcgtgtttagaaaggcaggctatcgtgagcaggtagctaccctcctggctctgatatgtaccgaggcaccccgcgaggtggtagaattcaacggcgagacatggtatgtggcccttggtcctaggtgcttgccccagggtgcgcctaccagtccagctttgacaaataccatttgtctgcggctggaccgtagactaagcggcctcgccaaaaaaaatggatacacttacacacgttacgccgatgacttaacttttagcttgccccacggattcactgggccgccaaagacgggcatgctcattggtgcagtcaaaaagatcgtcgtggcagagggatttgccgttaaccctgataagactagggtactgagatccggcggacggcagcaggttactggacttgtcgtcaatggtcctcgcggaccccgcgttcctaggaagtga

SEQ ID NO: 13623 - RNA, 1320 nt, synthetic construct
  source 1..1320: mol_type = other RNA
atgacaactgcacctgttgcccccgctcctagcgctgaccctcaggttctgtggcgcctaattgtgcaggccggtggtatgaaagcatacatcgacggccagctcaaggagaaagggttcctcgtaaccaggagggacgccgattctatgtcagacagggagaaggacggatataagaaggccctcaaacaggaagcggatgaacgacgaaaactgaggagagagacatggggagcatacaaggcaaaccacattgttcacctgggtgagggagtattttggagtgatgatctcgctcccgataaatgggacacccctaatagtgaagagcgagcggccgagaacgaactgcccgctatagatcggcccgagcagctcgccgagttactaggggtcacaatcccccagctgaagggcctggcatatcatagggacgccgctaccagcctgcactacgtccgcttcacgatcccgaaaagggatgggactgagcgaccaatctgggccccaaagaaaagactgaaagctgcccaaagatggatcctgcacaatatcgtagagcggttacctgttcacggcgctgctcagggcttcctggtgggtaggtctatcctatccaatgcggcggtgcatgctaacgccaaggccattctcaagatggacattaaggagtttttccccaccgtcaccgtgcgtagagtgaaaggggtatttcgacgcgccggctacagagatggaatatccacactcttggccttgatttgcaccgaggcaccacgggaggtggttgaagtcgagggcgagacatattacgtgtcactaggcccacgctgcttgcctcaaggggcacctacgtcgccatctttgactaacgcactgtgtatgcgccttgatcgtcggctcgaaggattagctaagaagctgggctggcgctacactaggtatgcagacgacctgactttctcccttcccgccgaacataaggggaagccgaggcttgggaccatgatcggatgtgtcactcggattgtcgcagctgaaggctttgaagtgaaagcggaaaagacaagagtgcatcgcacggggggacggcaaagcgtgactggactggtggtcaatggagatggcccccctcgtgtttcacggaccgtgagacggcagttgagatccgccgtgcacaaacttaagaccggcaagccactgaaagaaggcgagagcctggccagacttagtggttatgctgcctttgtgtacatgaccaatccagacctagggaaaaagctgctcgccgacataaacggcgccacaggggcaggttga

SEQ ID NO: 13624 - RNA, 1329 nt, synthetic construct
  source 1..1329: mol_type = other RNA
atgtcaactacaacaccagcaccatcgcctgatgctcagaccctctggcgcctgattgtgcaggcaggaggcatgaaggcttatattgatggccagctgagggagcgggggtttttggtcactcggcgtgatgccgatgcgatgagcgaccgcgagaaagacgcatacaagaaagccctgaagcaagaagccgaggaacggagaaagctgcggcgagaaacttggggagcctatcgagccaaccatatcgtgcatctaggagaaggcgttttttggacggacgaacccaaagaggacaagtgggatacacctaattcagaagaacgggccgccgagaatgagctgcctgcattggataaagcggaacaactggctgaggcactcggcgtcactattccccaactgaaagggatggcttaccacagggacgccgccacaagcttgcactatgtccgcttcacgattcctaaacgcgatgggaccgagaggccgatttgggctcccaagaaacgcctcaaggctgcccagagatggatactccatcacatcgtggagaggctgccagtacacggtgcagcccagggctttctcgttggacggtccatcttatccaacgcgctggtccacgagaatccaaaaatactactgaagatggacatcaaggagttctttcctactgtgaccgttaaaagagtaaagggcgtgttccgcagggctgggtacagggacgggatcagcacactgctggcgcagatttgcaccgaagcacccagggagatcgtgaacgtggaaggtaagacttactacgtgtctcttggtcccaggtgcttgccccaaggtgcccctaccagtccggccataaccaatgccctttgtctgagacttgacagacggctcgcaggcttggcaaagcgctatgggtggcggtacacgagatacgctgacgacctgactttctctctcccaatggagcacaaaggccagcccaagcttgggtccatgttaggatgtgctagacgaatcgtcgaagctgagggatttgaggtgaagaccgagaaaaccagggtacatcgaactggcggaagacagagcgtgacaggcctggtcgtgaatggagacaacacaccgcgcaccccaagaaaactccgacgtcagctgcggtctgccctacataaactcaagaccggcaagcctctgaaggatggggaaagtctggcccgtcttacaggttatgctgccttcgtgtatatgaccaaccaggaattgggaaggaagatgcttgcggatttacacggcttcgaggataaacccgaggggccagcagtttga

SEQ ID NO: 13625 - RNA, 1314 nt, synthetic construct
  source 1..1314: mol_type = other RNA
atgaccactgctgctcctgctccacctccaacggcccctgatctggccactctatggagactgatcgtgcaggccggaggcatgaaagcctatgtcgacgcccgcctggaagagcggggttttctggtcgtacggagggacgctgatgctatgagtgacagggaaaaagatgcttacaaaaaggagctgaaacaggaagcagaggagaggcgaaaactcaggcgtgaagcctgggcagcctataaggccaaccacgtggtgcatctgggtgagggagtcttttggaccgacgaggtcagagaggataaatgggatactccgaactctgaagagcgtgccgctgagaatgagctgcccgcattggataagccagaacagctcgccgaagctcttggagttaccgtgcctcagctgcgtgggatggcatatcaccgcgacgccgcaacctcactgcattacgtaagattcacaatacccaagagagacggcacagagcgtccaatttgggcacccaaaaaacgactgaaggccgcacagagatggatactgcaaaacatcgtggaacggctcccagtccacggtgctgctcaagggttccttgccggacgctctattctgacgaatgcggcagtgcacgtgaacgcaaagatcatccttaaaatggacatcaaggaattcttccccaccgtcacagttagaagagtgaagggcgtgtttaggagggcgggttaccgggatgggattgccacactattgtcgcagatctgtaccgaggcccctcgcgaggtagtggaactggatgggaagacctattacgtgagcctcgggccgaggtgtctaccacagggagcacccaccagccccgctttgacaaacgcgctgtgcctccgattggaccgcagactcgccggcttagctaagcggtatgggtggcggtacacccgctacgctgacgatatgactttctcccttcctgccgaacacgcaggccctcccaagttaggcgcggtcatggggtgcgttcgcaggattgtagcagccgaaggctttgaggtcaaagacgacaaaactcgagtgcatagaacgggcggaaggcaggccgttacaggactcgtggttaatggcgatggtgaaccccgagcctcacggaccttaaggcgccaattgcggtccgctattcacaagctgaagactggcaagccgctcaaagagggggagactgtggcgcggcttcatggctatgccgcctttgtttacatgacagatccaaagctgggtaagaagcttctcgcggacctgaatggagtggagtga

SEQ ID NO: 13626 - RNA, 1305 nt, synthetic construct
  source 1..1305: mol_type = other RNA
atggccacaactaccaccgacccaattgccctttggcagagtatcctccaggcaggcggagtgcgagcctacatagatggacagctgaaggagcggggatttctcgtcgaacggcgtgacactgatgcaatgtctgaccgggagaaggatcagtataaaaaggcccttaagcaggaagcagctgagcggaaaaagctcaaaaaagaggcctgggccgcctacaaaactgctcacatcgttcatctaggggacggcgtctactggtccgacgagagcaaaccagacaagtgggacacaccgaattccgaggaacgagccgcggagaacgagctccctgcgcttgattctcccaaacagctggctgaagcgctggggctgactattcctcagctcaggggcatgtgtcaccatagggatgctgcaaccaagctccattatgtgagattcactattcccaaaagagacggaaagccacgccccatttgggctcctttaccgaagctcaaggccgctcagcggtggatcctccacaatatagtggagcgcttaccagttcacggcagcgcccagggcttccttgtaggtagaagtacgctgtccaacgcagcggtgcacaccaatgccaagatcctgctaaagatggatgtgaccgattttttcccaaccgtcacgtggagaagggtgcgaggagtttttcggagagctggatacagggagcaaattgcaacactgctggcactgatctgtacagaagctccccgcgaaatcgtgcaacacgatgggaagacatactatgtgtcgttgggagcacgatgcctgccacaaggtgcacccactagcccctcattgacaaacgcactgtgcttgaggctggacaggcgattgaccgctctggccgccaagttgggttggcgctacagccgctacgctgatgatatgacattctcattacctgcagatcacgcggggaagcctcagttgggcaaattactggggtgcgtgaagcgcgtagtcaccgccgagggcttcgaagtcaaggacgaaaaaaccagggtgcataggaaaggcgggaaccaatctgtaaccggcctggttgttaacggggacggcactcctcggacgcccagaaaagtgcggagagaactgagggccgccatccataatctagagaaaggaaagccgctgaaagaaggggagactctgcctcgtcttatgggtatggccgcctatgtctatatgacagacgctaagcgcggcaaagagctgcttaccgctctcagacgttttgctgccggtgaatcctga

SEQ ID NO: 13627 - RNA, 1296 nt, synthetic construct
  source 1..1296: mol_type = other RNA
atgaactccacccgcccagatcctctgaccctttggagacagatcacccaggccggaggtacccaggcatatgtcacagagcagctaagggaacggggattcctcgtagagcggagagatgtcgaaggcatgagcgatcgagagaaagaccagtataaaaaagcccttaaacaggaagctatcgagactaaaaaactcagacgagaggcctgggctgcttataaggccgcacacgttgtacatctgggggagggtgtattctggactgatggcgccaagcccgacaagtgggatactccgaatggccccgagagagccgcagagaacgaactgcccccactcgacacgccggaacaactggctgaggctctggggatcacgctggcgcaactgagaggattatgctaccacagggacgctgcgaccagtattcactacgtgcgcttcgccattcctaaaagggacgggagtgaacgccctatttgggcccccctgcctagactgaaggcagctcagcggtggatcctccacaacatcgtcgaacgcttgccagtccatggtgccgcacatggctttcttgccgggcggtccattgccacaaatgctgccgctcacgctagcgcgaaaatgatactgaagatggacgtgaaggagtttttccccaccgtcacttggcgcagggttagaggcgtgtttcggcgggcagggtacaacgagtctattgctacacttctggcattgatctgcactgaggcgccgcgcgaagttgtggacctcgaaggaacaacttactacgtgagcctgggtcctcgatgtctgccccagggagctcctacatcccctgccctcactaatgcattgtgtttacgacttgatcggcgactaaccgggctcgcggcgaagttaggctggcgttatacaaggtatgccgacgatatgaccttttcactgccagctgcccatgccggacccccaaagttaggcgctctgttggggtgcgttaagcgtgtggttgaaggagagggcttcagggtgcatgcagacaaaacgcgcgtggcccgttctggtggacggcaaaccgtgaccggcttggtggtcaatggaacatcgcagcccagagtctctaggaagctcaaacgcgaaatgagggcagccgtgcacaacctagggaaggggaagccactgccagagggcgagtcagtggccagactcctgggctacgcagcctatatctacatgaccgatcctgagacaggcaggaagttgcttgccgatctgaatgcaatacccgactga

SEQ ID NO: 13628 - RNA, 1287 nt, synthetic construct
  source 1..1287: mol_type = other RNA
atgaccactccaagaaccgatcctctgactctttggcgtcagattgatcaagccggtggagtccgggccttcgttgacgctcagctccgggagaggggcttcctggtggaacggagagatgctgataagatgtccgaccgtgaaaaggaccagtacaagactgcgctgaagcaggaagccgctgaacgcaagaccctcgcaagagaggcctggaaggcgtatcaggcagcacatatcgtgcatcttggagacggaatctactggagcgatgacgcgacccctgataaatgggatacgccaaactctgaagagcgcgctgctgagaatgagttgccacccttggatagcccagcccagctggccgaagcattaggcgtgactgtcgctcagctgagggggcttacctatcaccgggacgccgcaacctccctgcactattgccgctttgcaatacccaaaagggacgggagtgagcggcctatttgggccccattaccgagattgaaggccgcccaggcctgggtgctccataacgtggtggagagacttcctgttcacggggctgcccatggttttttggccggcagatctacattaacgaacgccgccgtgcacaccaatgctaacctggtcctgaagatggacgttaaggagttctttcccactgtgacatggcgtcgagtcaaaggggtgtttcgccgtgcaggttaccgggagcgagtagccacactgttggccctactgtgtacagagagtcctagggaagtggtgcagctggacgggacaacttactacgtgtcactcggccccaggtgtttaccccaaggcgcaccaaccagcccagctctgaccaatgccctatgcctgcgcctggacaggagacttacagggctggccgccaaactcggctggcgatacactagatatgctgatgacctcactttctcacttccggctgcacatgtcggtcccccaaggctcggagctatgattggctgcgtaacacgcgtggtagagacagaaggattccggatacaccccgaaaaaacccgggttgctaggcctggaggcaggcaagcagttacgggcctggtcgtcaatggagacgctgcgcccagggcacctagagcattgcgacgccaactacgggccgccctgcacaacagaaaggtgggtaaacctcgacccgacggcgatacagaggctcagctgcacgggctggcagcgtacatctatatgaccgatccggtactcgggcgcaaactcttggcggagatcgatggatga

SEQ ID NO: 13629 - RNA, 1305 nt, synthetic construct
  source 1..1305: mol_type = other RNA
atgaccatgacacgaatcgcagatcctctcaccttgtggagaaatgtggttcaggccggcgggcgacaagcctatatcgctgcgcagctcgaacagcgcggattccttgtggctcgccgcgaaacggatgggatgagcgagcgggaactggcacagtataaacagtccctcaaggcagaggctgcggagcggagaaagctcagacaggaggcctggttggcttacagggctaaccatatagtacacctcggcgatggagtctactggcatgacgaggctaccaaggacaggtgggacctgccctacgccgaggagagagctgcagagaatgagttgcctgctctcgattcaccgcagcagcttgcggatgctttgggcttaaccgtggctcagctgcgctggctcgtcttccatcgggaagctgccacgaggattcactaccatagattcacaatcgccaaacgtgacggcagcgagcgacccatttgggccccatgcaagaaactcaaggctgcacagagatgggtgcttagaaacattgtggagaaactcctgattcacggagccgcccacggatttactgccgggtgttcggtgctgagcaatgctcgccagcacactaatagcaggatcgtggttaaattagacatccgcggtttctttcctacggtgactctgccaagggtacgaggggtctttaggcgcgcggggtatcgcgaccagttagccactctgcttgccctgctgtgcactgaagcccccagggaggttgtcgaacaaaacgggcagacctactacatcgccctaggcccaaggtgcttgccccaaggagcccctacttctccagctcttacaaacgcactgtgtctgcggctggatcggagacttaccggcctggcacaccagctgggatggcgatataccaggtacgccgacgatatgaccttctcattgccagcaggtcacacaggggctcctcgtctgggcacactcctgggaatagtgcaacggatcgtcgaagaggaaggctttcggctacatccggacaagacccacgttgcgcgggccagttctagacagaaggtgacaggtctggtggtcaacggtgatggggtgccccgcgtatcccgtaaactgcgtcgggaacttcgggccgcggcacataggctgaaacatggcaagccattaaaggagggagaatctttggccagactggctggctatgcagcatatattcacatgtccgaccctcaaaggggtgccgccctactggcagcatttaagagtgccgcccccgccacatga

SEQ ID NO: 13630 - RNA, 1308 nt, synthetic construct
  source 1..1308: mol_type = other RNA
atgatgacaacccgaagcgattaccagaggttgttcgacctgtggagagctatcggacaggcggggggcgttaatgcttatgtgcagcagcagctgcgggaacggggcttcgtgctggagagaaaaaagacagatggtatgtcaaaagctgagctctccgcctataagaagagccttaaagaggaggccgcagaaagaagacgcttaaaaaaggaggcatggcaagcatatagggccacccacattgtgcacttgggagaagggatcttttggaacgatgagtctgaccttgacaagtgggaccatccgcatgccgctgagagggcagcggaaaacgaactcccacctatcgacagtccccagaagttagccgaggcaatgggcctgtccctgcctgacctccgctttctgtcttttcatcgggaggctgctgaaagcatccactaccgtaggtttaccatcccgaagcgtaacggctcagagcgagcaatatgggctccattgccaaagctgaaggcagcacagcactggattcttcgcaatgttgtggaacggctggccgtccatggcgcttcccatggtttcttggccgatagaagcatagcaacaaatgccgcagctcacactggggccaagattgtcgtcaaagtcgacctgaaagacttcttccctaccgtgacattgagacgcgtaaagggcatttttcggcgtgcgggctatcgggatcaaatagccaccctgttagccctcatctgcacagaggccccccgagaaattgtagaacacgaagggaagcagtattacgtggcattgggccccaggtgtttaccacagggagctcccacttcacctgccctcaccaacactctgtgccaacgcctggatagacggctcgccggactagcgaaacgactcgggtggaggtacacacgctacgcggacgacctaactttcagtcttccagagtcgcacaaagataaacccaagctaggcgtgctgctgggttctgttggcagaattgctaacgatgaaggctttcaagtgcatcccgataagacgaacgtggctcgaaagggatcccgccagaaagtcacgggtctggtggtaaatgggactggagctcctcgggttcccagggctctgaagaggcagatcagagccgccatccacaatgccggacgcgggaaaccactccaagcgggagagtctctgagtaggcttgccgggtacgctgcctacatccacatgaccgaccctaaacttggtgcaaagctgctccagcagctggccgccattgaggccaaatga

SEQ ID NO: 13631 - RNA, 1302 nt, synthetic construct
  source 1..1302: mol_type = other RNA
atgactcgctcagagcaccagcggctggtcgatttgtggagggccattggaaacgccggtggggtggatgcctatgtgcgagggcagctcagggaaagagggttcgtactggagcggaaagacacagcccagatgtccaaggcccaactggcagcctataagaagtcactgaaggaagaggcagccgagcggaggcgcctcaagaaagaggcttgggttgcctatagagctacccacctcgtccaccttggagaaggcatccattggtccgatgaagctgacgtggatcgcttcgatcacccccgtgccgaggaaagggcagctgaaaatgagctgcccccgtttgacaagcctgagcaactcgctgaggccctcggcctgagtattcctgaactacgctggttagcgtttcatagagacgcggccgagaaaatccactacaggaggttcactatccccaagcgcgatggaagcgagcgtgctatctgggctccactgccaaaactgaaggcggcccagcggtggatactgcgtaatgtgctggaacccatacctattcacggagcgagccatggtttcgttccaaaccgaagcatcctctctaacgccagccgtcacacaggcgctaagctagtggtaaagattgacctcaaggacttttttccaactatttcgtttcggagagtgaagggggtcttcaggcaggccggctacagagacagaatcgcaaccctcctagctctgctgtgcacggaggcaccaagagagatcgtgcaggacggcgacaaagaactctttgtggcactgggacccaggtgccttcctcaaggagcccccacatcacctgctattacaaacatcgtgtgtttccggttggatcgcaggttgacgggcctggccaaaaagttaggctggagatacactcggtacgcagatgatctcaccttctccttgccagcagagcatgtgggcgcccccaagcttggccttctgttgggaagtgtcggccgcgttgtcgctgatgaaggtttccgggtgcatcctaggaaaaccagagtggcacggtctggtgggcgacaggctgtcaccggattagtggtaaatggggccgcatctccacgcgttccccgagaaatccgcagagagattcgggctgtgctgcacaacttgaaacatgggaaacctttacgagacggtgagaatcttcaccgaatagccggctacgtcgcgtatgtacatatgaccaatccggagctggggaaatccctgaggaaacagcttgaagccctggacgcagtttga

SEQ ID NO: 13632 - RNA, 1338 nt, synthetic construct
  source 1..1338: mol_type = other RNA
atggctacgagcacagactactctcgcctggtcgacctgtggcagggcattgaccgagcgggagggatcgataactatgtgcagaagcagctgaaagaaaggggctacgtcgtggaacgcaaagccaccgatgagatgtcccgggttgaactgagccggtacaagaaagcactgaaagccgaggccgccgaacgtaggaacttgcaaaaagaatcatggttagcgtacagagccactcacatcgtacatctcggtgagggcatcttctggaatgatgatcttgacttcgacagatgggacctgcgtaatcctgaggagagggcccgagagaacgagctgccggaacttgaagacccgaaggcccttgcatccgcattagggctgtctatcgcagcattgcgctggtttgccttccatcgtgacgatgctacattcgtccactatcaccgcttcaccattcccaagcgcgacggttccgcacgggctatatgggcacccagtccccgcctaaaggctgtgcagagatggatcctcagacaaatcgtggagcgactgcctgtacatggagcttcgcacggttttatggccggtcgcagcattaagagcaatgcctcagtgcatactggcgctaagattgtggtcaaggtggatctgaaggacttttttccaacggttactctgccgagggttaaagggatctttagacgggccgggtatcgcgagcaggttgctactctgctcgccttactatgtaccgaggccccccgggaagtggtggagattaagggcaagacacactttgtcgcacttggcccccgatgcttaccacaaggggcgcctaccagccctgggttgactaatacactgtgcctgaggttggacaggcgtttggccggactcgccgcgaaactgggatggagatatacgagatacgccgatgatttgaccttcagtctcccaaaggccaagaagacaaggaaaaaaaagggcacaaaagctaaaaaggagcctccacacgtcggggcacttctgggaggcatcgcaaaaatagctgcgtccgagggcttcgtcgtacatcctaacaaaacccgggtggcccggagtggtggaagacaacagataacaggcctggtggttaatggcgatggaccccctagggtgccaagggctcttagacggcaggtgcgggcaaccttgcacaacctcgggcagggaaagccaatgaggtctggcgaaaccctctcacagctggccgggtacattgcctatattcagatggctgatcccaaactcggaactaagctgcgagctcagctcctagctctcgacctgtcttga

SEQ ID NO: 13633 - RNA, 1074 nt, synthetic construct
  source 1..1074: mol_type = other RNA
atggcaacacagatcgattatactcgcctactggacctctggcgcgcgattgagcaagccggtggcactgacaaatacgtgcaacagcagctgcaggaacggggatacctggtcgagcgcaaggccactgatgacatgtccaaagctgacttagagaggtacaagaaagccctgaaggcagaagcagccgagcgcagaaagataaaaaaggatgcttggttagcgtatcgggcgagtcacatcgtgcatcttggtgaaggggtgttctggaacgatgacttagactttgaccgttgggaccttcgtaatcctgaagagcgcgctaacgagaacgaactgcccgccctggataatccaaaacagcttgccgaggccctgggagcctctattgccgaactgaggtggctggcatttcaccgggatgacgccacgttcgtgcattaccatgcctttacgataccgaagcgcgatgggtcaatgagacaaatctgggctcccaaccgaaagctcaaggcagctcagcgatggattaacagagagattgtggaacggttgcccgtgcacggtgcaagccacggttttttggccgggagaagcataaagtccaatgcagcagcacacaccggggctgagatcgtcgtgaagattgatctgaaggacttctttccgactgtcaccatgcccagggttaaaggcatcttcagaaaagccggctatcgggaacaggtcgcaaccctgctcgcgctgctctgcacagaggctcctcggcatgttgtagatattaaaggcaaagtgcactacctcgcgttgggcccacgatgcctaccacagggagctcctacatcaccaggcttgaccaatacactgtgtcttaggttggatagaaggctcgctggacttgctgccaagctcgggtggcgatacactagatatgctgacgatctgaccttctctaggaagaaaggcgccagtagcgccgaggtaggagaaatgatccggaaagccgttgacatcgttggacacgagggcttcacagtccatcctgacaagaccagggtgatgaggcgtgggtga

SEQ ID NO: 13634 - RNA, 1296 nt, synthetic construct
  source 1..1296: mol_type = other RNA
atggccttcaggatcgacaccacccgactcctggacctgtggagatccattgaacaggcaggcgggcgtgacaggttcatccagcagcagctgacagaacgaggttttttagttgagcggaaacctactgaaggcatgagtaaggctgagctggaacgttacaaaaagagtctaaaggaagaagccgcagagagacgcaaactggccagagaggcctggcttgcctatcgagcctcacatttggtgcacctgggcgagggggtgttctggtctgacgatcatgactttgatcggtgggatctgcggaatccagaggagagggcagctgagaacgagttgccaaagctggaacaccccaaggcactggcagaagccctgggattgtcgattgctgagcttcggtggtacgctttccacagagaagatgctaccttccttcactaccacgcctttaccatccccaaacgcagcggcggtctgcggtccatatgggcaccaaaccgccggctgaaacagattcagcgctggatccaccgggaggtggtagagcgactaccagtgcacggcgcggctcatggatttttggccgggagatctataaaaagcaatgccgcggtgcatgctggtgccacaaccattgtgaaagtagacctgaaggactttttccctaccgtcacatatgcccgcgtcagaggcgtctttaggaaggctgggtatagggaacaggtggctacgctcctcgccttgttgtgcaccgaggcaccgcggagggtgcttgagatagacgggaagacacactacctggcacttggccccagatgtcttccgcaaggcgcacccacgtctccagggttaacgaatactctctgccagaggctcgataggcggctcgttgggctggcgaagaaatacggttggagatatactaggtatgccgatgacctgacattttcactgccagccactcatcagggaccccctcggttaggggcgcttctaggcggagtcgctatgatcgcagctggcgagggtttcgtggtccaccctgataagactcgcgtttcccgtgccggaggcaggcaacaagtgaccggactcgttgtgaacggagagcagggaccccgagtagccagagagacaaaacgccaaattcgcgcagccctgcataacttagcccgcgggaagcctctccaggaaggagaaactctgagccgaatcgccggcttcatcgcgtacattcaaatgagcgagcctgaactgggtaagagactccgtgcacagttggctgctctctga

SEQ ID NO: 13635 - RNA, 1308 nt, synthetic construct
  source 1..1308: mol_type = other RNA
atggctactacgttccgcatcgactataccagactgctggacctctggcgtgcgatagaaactgctgggggccgtgacaaatacatctccgctcagttgaaggagaagggctatctcatcgaaagaaagcccacggatagcatgagcaaggccgagctggaccgctataagaaaacactcaaggaggaggctgcagagaggcggaagctggccaaggaagcctggcaggcgtacaaggccgcacatctcgtgcatctaggcgaaggcgtgttctggaacgacgatctggatcatgataaatgggatctgcctgacgctgaagaaaggcaggccgagaacgagttacccaaacttgacaagcccaaacaacttgcagaggccttaaaagtatcgatggctgaactcagggttttggcatatcacagggatgctgccaccaaactgaactactacagatttactattcccaagcgagacggatcaaagcgagccatctgggccccccacagacgactcaaggctgctcagagatggattctgcgcgaggtggttgagcgcctgccagtccatggtgcagcccatggctttatgcacggccggtctattgcttcaaacgccgcagctcacactaatgcatccaccgtgctgaaagtggaccttaaggactttttccccactgtgacattgacacgcgttaaaggagtgtttaggaaagctggctacagggagcagattgcaacacttctggccctgctctgcaccgaggccccaagacaggtgagtgaagtcgacgggaaggtgtattacctggcccttggtccgcgatgtctgccacaaggggccccaactagccctgggcttaccaatacgctgtgtatgcggcttgatcgaaggctgcagggagccgcccacaagctaggatggcggtataccaggtacgcagatgatctgacattctccttacctgttggtcacaaagggaaaccacagttgggcaaactactggggtgcatctctgctatagccgtgggcgaaggtttcgtggtgcaccctgataagaccaaggttagccgtagtgggggaaggcagcgggtcacaggcttggtagtcaatggacaaggagcgcctcgggtaccacgcgagttgaagagagaagtccgggcggccctgcacaatctctctaaaggtaaaccgttgcgcgacggtgagacactgtccagactcgccgggatggtcgcgtttatcaccatgaccgacagaaagttaggccaaaagctgcgggcagaactcgataaactaggagcatga

SEQ ID NO: 13636 - RNA, 1302 nt, synthetic construct
  source 1..1302: mol_type = other RNA
atggctaccactaacagaattgattacaatcgaatgctcgaaacttggcgggcagtggaatctgccggaggtcgtgataagtacatcgaagctcagttgaaagaaaagggttatctggttgagcggaagcccacggagtcaatgagcaaagctgaattggagcgctataagaaaagcctgaaggatgaggccgcagaaaaacggcgcctggcgaaagagagctggcttgcatataaagcagcacacctcgtccacctcggcgaaggcgttttctggaatgaccagctagaccatgacaagtgggatctaccgggggcagaggagaggcaagctgaaaatgagctccctaaattggataagcctaaggagctcgccgaggcactgggtgtatccatcgccgagttgcgccgcctcgcttaccatagggacgcagctacaaaactgaactattaccgcttcgagattcccaaaagggacggatcgaaaagggccatttgggccccacaccgaaccctgaaagcagcgcagagatggattctgagagaagttgtggagaggttacccgtgcatggagccgcccacggcttcttgcatggcagaagtacagcctctaacgccgccgtacacagagacagccagatcctgctaaaggtcgacctgaaggattttttcccaaccgtgacacttccacgggtcaagggggtatttcggaaggcggggtatagggagcagatcgccaccctgctggctctgttatgcacagaagcccctcgacacgtcgccgaggtcgaaggtacaacttattaccttagtctggggcccagatgcctgccacaaggagctcctacttcccccgctatcacgaacaccctgtgtttgcgtctggatcgccggttacagggcctggcaaaaaagcacggctggaggtacacgcgctatgcggacgatctcactttctcactgccaaacgatcataagggcaaaccacacgtgggctcacttcttggtggcatttccatgatagccgctgcagagggctttactgttcaccccgacaagaccagagtccatcggtccgggggaaggcagcaagtgaccggacttgtggtgaatggagggcagggtcctagggctcctagagaatttaaacgggaggtgcgagccgctgtgcataatctcgcccacgggaaaccgttgaaggaaggcgagacactctctagtcttgccgggcgtatagcgtacatctacatgaccgacaagaagctcggaaagcagctgttagccgctctgtctcgagtgtga

SEQ ID NO: 13637 - RNA, 1377 nt, synthetic construct
  source 1..1377: mol_type = other RNA
atgactcgagctagaccaacaagcagcgcgtcgccgagttcatccctgactggaacttggacccgcccaagaggtgaaccgatgaccacgcgatctgagcgcctcagggacctgtggcgaagcatagaacaggcagggggagccgagaagtacatccaggctcagctgcgggaacggggttttgtagttgaaaggaaacctaccgataagatggggaaagccgagctggctcgatataaacaacagctgaaggctgaagccgcggagagaaagcggttagccaaagaggcgtgggaagccaggagagagcaccgcgtgatccacctgggcgagggtgtcttctggaatgatcagacagacttcgatcgatgggacttagagggagcggaggaaagagccgctgaaaatgaactaccccagttagacaaccctgcacagctcgccgaggcactgggtgtgactattccccagcttcggtggttggcctttcatagggatgccgccactcacgtccactactaccggttcactattcctaaacggacaggcggcgaacgtgccatatgggcaccccatcgtaggctcaaaggcgctcagcgctggattctcagaaacatcgtcgagcgtcttcctgttcacggggcagcccacggttttctacccggcaggagtattgcttccaatgcagctcaccataccgacgcagcagctgtcgtgaagatcgatctgaaggactttttccccacagtgacactgcccagagtaaagggagtcttccggaaggcgggataccgcgagcaaatcgccaccctgctcgccttgctgtgcaccgaagcccccagagaggttgtggaacaagacgggaagacatactatttgtcccttggccctcgatgtcttccacagggggcccctacctctcctggactcaccaataccctgtgcatgcgcctcgatcggaggctactggggctgagcaggaagctcggctggaggtatacccggtatgcagatgacctcacgttctccctgccgaagacacatcagggcccaccaaaactgggcgcactgctctcaacggtggctcggatcgctgcagacgaggggtttacagtgcatccagagaagacaagaatagccaaacgcggcgctaggcagcgtgttactggactggtggtgaacgatgcccatggtccaagagtgcccagaacccttcgccgcagagtacgcgctatgattcacaacttggccaggggcaaacctctgagggagggggagactttggggcagttagcaggccaaatcgcctttatccacatgacggatcccgctttgggaaagcggctggcggcccaactttctgccattgacggatga

SEQ ID NO: 13638 - RNA, 1305 nt, synthetic construct
  source 1..1305: mol_type = other RNA
atggccacagattcccaggcgacaaggctgcgtgacctctggagagccgttgagcaagcaggcggggtcgataagtacatccagagtcagctccaggagcggggattcctggtggagagacgagaaaccgacaaaatgagcaaagcggaactgcagcggtataaacagcaactgaaagctgaagctgccgaacgtagggccctcaaacgggacgcatgggcagcctaccgggaacagcacgtagtacacctgggcgagggagtattttggaatgaccaatctgatctggatagatgggatctcagagatgccgatgagcgagctgccgaaaacgagctcccccaactggagaatcctgggcaactggctgccgctctaggcctcgagataccccagttgaggtggatggcgtatcaccgcgatgccgcaactaaactacactactaccggttcaccatccctaagcggtctggcggagagcggccaatttgggcaccccataagcagctgaaggcagcgcagcgttggattctgcgaaacatcgttgaaagactccccgtgcacggagccgcacatgggttccttccgggcagaagcatagcttccaacgccgcacaacacgccgactctaagattatagtgaaggtggaccttaaggacttcttccccaccgtcactcttccaagggtcaaaggtgtgtttcgcaaggccggctaccgcgaacagatcgctacgcttctggccctgctctgcactgaagcgccgagggagattgtggaatcaggtgggcgcacgtactatctgagcctaggcccacgctgtcttcctcagggagcccctacctccccagggttgaccaacaccctgtgcctaagattagatcgccgcttacagggccttgcctcgaagctgggctggaggtacacacgatatgccgacgacctgactttttccctccctggcggacatagtggtgccccacgcgttgggacattactgggtagcatcgcccggattgcagctgatgaggggtttgcagtccatcccgataaaacccgagtggctagaaagggtgctcgtcagagggtgactgggttggtggttaatggcgacggaacccccagagtcccacggacaatcaagaggcagttgagggccgctatccataatctgtcacagggaaagccgttaaaagagggtgagacgctgtcaaagttgactggctggattgcttatgtgcacatgacagaccctaaactcggaaagcagttgcaggctcaactggacgcagtggggaggggctga

SEQ ID NO: 13639 - RNA, 1305 nt, synthetic construct
  source 1..1305: mol_type = other RNA
atgagcactgacccaatcgccctatggcgagccatcgccaacgctggtgggatcgacgcatatgtttccgctcaattggttgagaaagggtttcttgtcaaacgaagacccacagacaatatgagtaaaagagatctcgccagatataagcagcaactgaaggacgaagctgccgaacggagaagactcaagaaagaggcttggctggcatataaggccaatcacatagtgcacctcggcgaaggagtgtattggaatgatgcagcggatgccgaccggttcgatcatccaaaggcagaggagaggttggcagaaaatgggcttccggtgctggataagccccagcagctggcagatgctctcgaggtcccgctaaccgagctccgctggttgacttggcatagggacgcagcggctagagtgcactaccgtcgcttcactattccaaaacggagcgggggcgagagagctatatgggcccctctgccgaaacttaaggctgcccagaggtgggtccttcgtgaaattgtggagaagctgcccgttcacggcgccgcacatggtttcgtagcgggtaggagtattgcgacaaatgccgccgtccatgctgatgccagggtcgtggtgaaagttgacctgaaggactttttcccaacggtcacactgcctcgcgtgaaaggggtgtttaggaaagcaggctaccgcgagcaagtggccacactgctggccctgctgtgcacggaatcacctcgggaagtggttgaggaagatggcaaaacctggttcctgtctttgggaccccggtgtttaccacagggagctccaacgagccctgccttaaccaacaccctctgcttgcgcctggatcgacgcctgaccgggttagctcaggccttaggttggcgatacactcggtacgccgatgacctcaccttttcgctccccagaccccagggaaggaaaaagccaaagccccctcagacagctaagttgctgggaggcatcaagactatcgtagcagacgagggctttaccgtccatccagacaagacacggttcgcccgctctggcggaaggcaacagattactggaatggtgatcaacgatgatcacggacctagggcacctcgggagttgcgtcgacaactccgtgcggcaattcacaacctgaaccagggtaagcctctgcccgagggggaatccatcgacagactgcggggctacgtagcttacatacgcatgacccagcccgaacttggcgagtccctatctgcccagctcgacgctgccctttcaggggcttga

SEQ ID NO: 13640 - RNA, 1395 nt, synthetic construct
  source 1..1395: mol_type = other RNA
atgtcagacctaaccactctctggttggccgtgaggactgctggctccgtggacaactatgttaggcagcaacttgaagctaaaggcttcttggtgaagcgcaggcccaccgatgggatgtccccaaaagagctggagaaatataagcaagagctaaaacgcgaagccgctgaagcgcggtcgcttagggcagctgcctggaaggcacacaaggccaatcatattgtccatgtgggcgagggcgtctattggaacgacgccgacgacctggatagattcgatgttccgcagcctgaggagcggcaggcagaaaatgggctgccacctctggatagcccaaagaaactggccgaggcactgggcctttccattatagagttaagatggctgtcttggcaccgcgaccttgcaacaggcgtccactaccgacgttttaccatccccaagcggtctgggggagagagggccatatgggcccctatgcctaagctcaaaaaggcccagaggtggatcctacgggagatcgtggaaaagctgcccgttcacggcgccgctcatggcttcttagccggtcgaagcatcgctaccaacgccgcagcccacaatggagcgctggtcgtgctgaagctggacctcaaagatttttttcctaccctgacgctgcctagggttaagggactgttccgtagagccggttacagggaacaggtcgcaacactcctcgcgctcttgtgcacagagagtccccgggagatcgtggaacaggatgggaaacggttgttcgttgctttagggccgcgatgtttacctcagggagcgccaaccagccccgccataactaacgccgtgtgcatgagactggacagaagactcgcgggggcagctgctaaacttggctggcgatatacacgctacgctgacgatctgacttttagccgggtgcgtcctgcagaagccccagtagtagaggctgcagccccagcagctaagcccgcaaaaggtaagaaggctactgcggccgcagagacaacccctgcaccatctcaagctcccgccgctcgcctcagtaaactgctgggagtggtgcatgaggtggtgaaggatgaggggtttattgtccacccggacaaaacccgcgtagctcgctcaggaggcagacaagcggtgacagggcttatcattaatggggatcagggcccaagacctccaagagaattgaggcgtcgggttcgagctgccttgcaccatctcgcccagggaaagccgctgcccgaaggagagacggtcgaaagggtggccggtctgatcgcttacattcggatgacgatgccccaggagggtgaacgcctctacgccgaacttcagaaggtcactggcgcagtagcccccgcctga

SEQ ID NO: 13641 - RNA, 1299 nt, synthetic construct
  source 1..1299: mol_type = other RNA
atggccgacgacttgatgactctctggcgcgctgtgaggtctgcagggggaagagacgcgtatgtccgcgcccagctggaggagaaaggctttctggtgcgccgcagagagactgatggcatgtccaagcgggagctggctaaatataagaaagagctcaaagctgaagcagccgagcggaaacgattggccaaggaagcctgggacgcctataaggcagcgcacatcgtgcatctgggggagggcgtctactggaacgatgccgcggatttcgacaggttcgatcacccaagagccgaggaacgtgtcgcagagttgggactgcccgcactggatgacccagacgctctggcggaagccctgggattaggcgtcgcagagttacgctggctcacttaccacagggacgccgctaaagccatacactatcgtcgctttacgataccaaagagctcgggtggagaaagggccatatgggcgccgctgcctaagctgaaggaagctcaacggtgggttctgcgggaaatcgtggaaaggctacccgtgcatggtgctgcccatgggttcgtccccgggagatccacagcgactaatgccgccgcacatgccgatgcagagatcctcgtcaaggttgatctcaaagatttttttcccacagtgacactcccccgtgtgcggggagtgtttaggcaggctgggtatcgcgaacaggtagctaccctgctggcccttctgtgtaccgaatcaccacgagaggttgttgagagaggcggcgagacatggtacctggctcttggacctcggtgccttccccagggagctccaacctctcctgccttaaccaacgccctgagtatgaggctcgacaggagactcactggtctagctaagaaactggggtggcggtacaccaggtacgccgacgacttatcattcagcctgcccgtgagtaagaagaagcgaaaagctgcacctaatattggcagcctgctgggtggcgtaaggattattgtagagtccgaagggttcacggtgaacgaaaaaaaaacacaagtggcccctcccggtgctcgtcagaaggttaccgggcttgtcatcaatgatggcttgggtccgcgggtgccaagagcagatagacgacggattcgcgccgcacttcaccgcctaagactcggcaagcctttgccagagggagagtctatcgaacggatcgaaggctggattgcatacatccagatgagccagcctgagctcggggaaagacttgctgccgagttggcagaggtgcgaggaggctga

SEQ ID NO: 13642 - RNA, 1299 nt, synthetic construct
  source 1..1299: mol_type = other RNA
atggcaagacaacgtacagatattgccactctgctcaggggtatagaacaggcgggcggaattgacgcttacgtggacgcacaactccgcgagcacggtttcctagtgcagcgaaagcccactgacaatatgtcacaacgcgagctcgcccgatataagaaagagctcaaagacgaggcggccgaacgacgaaagctgagaaaagaggctcgcgaggcttatgagacacagcacatcgtgtacttgggggaaggggtcttctggaacgacgcgtatgattatgacaaatgggatcttgaagatgcagaagagcgagctgccgaaaacgagctgcctgcactagacaagcccgttcagttggcagacgccctgggaatcaccgttccccagctgaggcatctcgcctaccacagggattgcgctgagatggtgcattatcggcggtttactatccccaaaagaaacggaggggaacgcgctatttgggcacctctgcctaggctcaagggtgtgcagcggtgggtgcttagagcaattgtggagcgtctgcttattcacggtgccgcccatgggttcgtacctggaagaggaatccacaccaatgctaggatacatagagatgccagcatcgtgctgaagatggacatcaaagacttcttccccagcgtgacatttcctagggtcagaggggttttccggaaggcaggctaccgcgagcagatcgccaccctgttagccttaatttgtacagaggcacctcgggagattgtggaggaagacggcaagcgatggtttgtatccttaggcccaaggtgtttgccccagggcgcaccaacatcgccagccttgaccaatgtggtctgcctcaagcttgaccggaggctgactgggctggccgaaaaactggggtggcgctactctagatatgccgatgacatgacctttagtcgcccgcggggtgctaaaggacctccgaactttgcgactctgaggtccagggcccgccaaatcgtcatggatgaggggtttcgggtccacccagacaagacgcacgttgcccgccgtggtgcaagacagactgtgaccggccttgtcaccaacggcgacttgccaccgagagttccacgccggaatcggaggcagataagagctgctatacacaatctcggacagggcaagccccttcatgatggagaaacggtagataccctggccggctacatcgcttacatcgccatgacagatagggcggctgctgatcggctgcgtcaggaattatctgccgccctgggcggctga

SEQ ID NO: 13643 - RNA, 1293 nt, synthetic construct
  source 1..1293: mol_type = other RNA
atggccacgactacccccaactacgatgacctctggagatccatcgcgcaggctggaggtatcgatgcatatgtcacacagcagctgaaagaaaggggcttcctgactgaacgtagcgacgccagccagatgtctaagaatgagctgaagaggtacaaggcctccctgaaggctgaggccgctgagaaactgcgcttaaagaaggaggcatggctggcgtaccggtcacagcatatcgtccatttaggcgagggcatgtattggaatgacgctgccgatatcgatgggttcgatctggcagaacctgaagcgcgggccagtgagaacgaattgcctcagctcgacaacccgaaacagctggccgacgccctctccctgactgttgccgacgtgaggtggctctcttatcaccgggacgccgctcgatcgctgcactatcggagatttaccatacctaaaaagtctgggggagaacggccaatctgggcgcccatgcctaagcttaaggcggctcagcgctggattgcccggcatattgtggaaagacttccggtgcacggccacgcccatgcatttcttccagctaggagcataaatacgaatgcaaagcaacacatcggaagcaaaatggtgttacagatggatttggtcgggttcttccccaccgtcacatttcccagggttaaggggattttccgaaaggccggctacagagagcaaattgccactttgttggcagccatttgcactgaagcaccgagagaggtgttggagcacgagggaaagacatggtttatcgccatgggaccaagggctctcccacagggagctcctacatccccaggtctaaccaacacactctgtctacgtctcgatcgtcgcttgacagccctggctgcaaagctggggtggaactacaccagatatgctgatgatctgactttcagtctactgaagtcacataaaggcaaacccaatctcggggcacttatgggctgcataaaaaaagtcgtgaccgacgaagggttcgtagtgaacgcagacaaaacccgcgtgtcaaggaagggaggtagacagaaagttaccggcctggtggtgaacggagtacaaccaccccgagttccccgcgaatttaaacgacgcctgcgcgctgcaattcacagactggagaatgggggtgccttatttgagggcgagacactggacaccctgaagggccaagctgcctacgtattcatgacggaccctgaacttggccggaagatgcttgagaggctcgccaaactcggttga

SEQ ID NO: 13644 - RNA, 1338 nt, synthetic construct
  source 1..1338: mol_type = other RNA
atggccagaaagcgtacagacccagtgtacatatggagggccattctccaggctggcggcatcgatgcatatatcgaagcacaacttgccgagagaggggtgaaggtagagaaaaaagagactgccgggatgtcagcccgggaattggagcagtacaagaaacagctcagagcagaagccgaggagagaaaaaaactgaagaaggaggcttggaaagcctataaagctaaccatattgtgcatctgggagagggtgtctattggaacgacgagaaaaggcaggataaatgggacgtggctcacgcagaagagagagcagcggagaatgaactgccgcccctggacaccccacctcaacttgccgaggcgctgggactgaccgtaccacagctgcgctggttggcctaccaccgagaagccgccactaaagtgcactattaccgcttcaccatcccaaagcgcaatggatctgagcggcctatatgggctcctctgcctaaactgaaggcggcacagcagtggattcgggtccatatcgtggaaaagctcatcgttcatggggccgttcacgggtttttacccggccactcgacactgtccaacgccagcgtccataggaaccctaagatcgtcctcaagatggacattaaagagttctttcccaccgtgacattgccaagggtcaagggagtgttccgcaaggccggctatcgggaacaggtggccacgctcctggctttattgtgcacagaagcacccagagagatcgtccaccatggaggcaaagactattacgttgcactcggaccacgatgcttaccccaaggcgctcctactagtccgggcctcacgaatactctctgtttacgacttgaccaacggctggccggcctggcaaagaagtacggctggcggtacaccaggtacgccgacgatcttaccttcagcctgccgaaggcacacgatggcgatccccacgtggggactttgattgggctcgtgcgcagaattgtggaggatgaaggcttcgcggttcatccagataaaacccgcttggctaggtctggtgggcggcagaagatcactggcctggtggttaatggagatcttaagccccgtgtacctcgaaagctgcgcaggcagatgcgtgccgctctacacaacctacagtgtggtaagcccctaaaagaaggagagacatttgcgaggttggctggttacgcagcttatataaacatgtccgaccctaatctgggggccagaatgcttgaaacatttaagattggtctggctgctacagtcacgaccaatggagagcagaccgccgaagacaagtga

SEQ ID NO: 13645 - RNA, 1308 nt, synthetic construct
  source 1..1308: mol_type = other RNA
atggcccgccgtagaacaaatgtggctgacctgtggcgcgcaattgagcaggctggtagcgtccaagcctatgtggatcagcagctccgggagcgaggcttcttcgtggagaggcgggatgccggccagatgtccaaacgagaactggcagcatataagaagcaactgaaagaagaagcagctgaaaaaaggaagctaaaagccgaggcctggcaggcgtacaaagccaaccacatagttcacctcggggagcacgtattttggaatgacggactcgattgggacaaatgggaccttgagcatgccgaggaaagggctgcagaaaacgaactgcccgccttggatagtcccggacagttagcaaaaaagttagacgtgagtgtagctgaactgagatggcttgcctaccatcgcgaggccgcaactatgctgcattatcgacggtttacaatcccaaagcgggacggatctgagagggccatctgggccccactgcctaaactgaagagtgcgcaacggtggatcctccgcaacattgtggagaagctggtcgtccacggtgccgcacacggattcctgcctgggagatcaatactgagcaatgcggctcagcatacagattcaaagattctcctgaagatggacctacagaatttctttccgaccatcaccctgcctcgggtcaagggcgtgtttcgcaaagctggctatagagagcaagtggccacgcttctggccctaatctgcactgagtctcctcgtgaaattgtggagcactcagataagacatacttcgttgccctcggccctagatgtttgcctcagggagcgcccacttccccagccttgactaacaccatctgcttgagactggataggaggctcgctggcctggctaaaaagcatggttggaggtacaccaggtacgccgacgacctgaccttttccctgccccaggaccacaagggtccacccaacctcggcaccgtaatgggaggagtcaaagttgtggttgctggcgaggggttccggattcacccagaaaagactagagtggctcgtgtgggggggcagcagaaggtgacaggtcttgtggtaaatgaagatcgcccgcccagagtctctcgcaaattgaagcgacagttacgagcggcaatacataacttacaacaagggaaaccgctccacgaaggcgagacgctggagtctcttaagggccatgccgcttacatcgcaatgagcgagcccgagctcgggcagtcgttgcttgaacagattgctgcagtcagcgagccagtttccaattga

SEQ ID NO: 13646 - RNA, 1299 nt, synthetic construct
  source 1..1299: mol_type = other RNA
atgaccgaacgtactactgacctggccaccatcttcaggggcattgagcaggccggcaccatagatgcctacgtcgatggacagcttcgagaaaggggctttctggtggagaggcgagccacggatgatatgtctcagcgagagctggccaggtacaaaaaagagttgaagcaagaagctgcagaaaagaggaagctccgggctgtcgcgtggaaggcatacaagacccagaacatcgttttcctcggcgaaggagtgttttggaacgacgccctggactgggataaatgggacttggagaacgctgaggcacgcgctgcggaaaatgagctacctccattggacaaaccacagcagcttgccgaggcgcttcaattaaccatctcacagctgaggtggctggcctatcacagggacgtagccacgtctattcattaccgaaggtttacaataccaaaaagagatgggtccgagcgcgcgatttggtccccaagacccacattaaaggctgcacagcggtgggtcctgcgtaacatcgtggagcgcctcacagttcacggggcaacacacggctttctggccggaagaagcatagccagtaatgccgcagcccataccgacagccagatgattgtgaaaatggatctcaaggacttcttccccactgttacctaccctcgcgtgagagggattttccgtcacgctggatatcgggaacaaatcgccaccctgctggctctgctctgcacagaggcacctcgggagattgtggaagaagacggtcagaccctgtatgtgtcactcggcccccgctgtttgccacaaggagcacccacatctcccgccctgacaaatgtgatctgcgtgaaaatggatcgccggattagtggcttggcacagaaactggggtggagatatactagatacgccgacgatatgactttttccctcccgtcgaataccggtaaagctaagacgaagcaggatgctaatcctgccccactaatagggtgggtcaagcgtatcgtggcggatgaggggttccgggtccatcctgacaagactcgcgtaattaggaagggaggtcggcaagccgttaccggcctcatcgtgaacggaactggggccccgagagtacctcggaaaacaagacgaatgcttcgggccgcaatgcacaacctaagcaagggtatcccccttcgcgatgacgagacactggctactttacagggctatatcgcttttatcgctcagacggaccccgaacaggcacagagactgaaggaacaactggcttga

SEQ ID NO: 13647 - RNA, 1362 nt, synthetic construct
  source 1..1362: mol_type = other RNA
atgtctacagagaaccagaaagccttagttgccctctggaacgagattcagcacgccggcggcagagaaagctatattcgcaatgaactcacaagaatggggattgaaatccccgctagagtgaaaatcactaacatccgcaataaagagaagaaagccgcgtacatcgctttgcggcagaaggaggaggaagcaaggggctttattaacaagaaagtgtgggccgcatatcgggccacccatatcgtggacctgggagatggaatattttggaaggacccaaccaaggatttctatgatacccacgaccgcgcccagagacgtgaggataatggtattccggagctagaaaccgttgaccagctggtcgaggctttatcagaggcttacgccaatggggattccaatattgaactcgatatccccactctcagatggctgtgttaccatcgcgaagtggctactaccacccactacaagtcatttagcataccaaagaagaccggtggaaacagacagatatgggcacctatgccccgcttgaagagcgtgcagaagtggatttctaggaacatcgcagagaaactggtcaaccacggcgcagctcacggatttatctccggtcggagtatactcagcaatgccagcgtacatacgaactctaaaatcgtggtatccatggacctgcaagacttctttccaacgttcacatttaatcgtgtgaaagggattttccgagcggccggctatcttgaagggatagcaacactgttggcgctgctttgcaccgaggctccacgaaagaagatcaaattccctgacgagaagaaccctggtaaagagaagtgggtgtatgtagcctccggcgatcggtgtctgccccaaggatcacctgcctccccctctctgacaaacgcagcctgcctgaggttggaccggcggttagccggatacgccactaagtacggttggcgctacactaggtatgcggatgaccttaccttcagtttcccggctgactctgctaaaagccctaagacagatctgttgatcaagagggtccaggagtttgttgtctccgagggcttcatcgtgcaccctaataaaacagacaaaatgggcactggggggcagcaaaaggttactgggctcattgtgaatggagtgggaaaaccccgagtcagtaagggctttcgtgataacctgagggcagccatccataatcaagaggaaggcaaggagctgatgtacgaagaagaatcacttgagacacttatgggctatgctagtttcatcttctcggctgacccaaccaaagggaccacgctaattgagaagctccaggcactggaagaggaatga

SEQ ID NO: 13648 - RNA, 1341 nt, synthetic construct
  source 1..1341: mol_type = other RNA
atgagtactgaaaattccaacgagctcgtcgagctttggaatgagatccagcaagttggcgggaaggaagcctatatcaggagagagctcgcaaggatgggcatagaggtgccagaacgcgtaaagatcaccaatattcgagacaagacaaagaaagctgagtacatcagcctgcggcagaaggaggataaggcacgcgctataataaacaagaaaatctgggccgcatatcggaaaacgcacatcgtggacctcggggatggcatattttggaaggaccccagcaaggacttcttcgacgttcacgatagggaagaaagacgtaaagacaatggcattccagagctagaaaccgttgatcagctggtggaggccttacgttctgtagatagcgacatcgacgtgcccacaattcgatggatgtgctatcaccgcgaggttgcgaccactactcattaccgggctttcaaaattccgaaaaagaccggaggtgaacgccacatctgggccccaatgcccaggctcaaagccattcaaaaatggatcagtaggaacattgccgagaagttggcaacacatggggcagcccatgggtttatcgtcggcagaagcattgtgtctaatgcgatggtccacacagattccaaagtggtggtcagtatggacctgaaggacttcttcccaacctttacctttaaacgggtgaagggcatttttcgcgccgcgggttaccttgacgggattgcaaccttgttagccctgttctgtacggaggcacctcgggttcctatgtgtctgcctgacgagaacgacccgtcaaaggaaaaatgggtctacgtagcttccggagagcggtgcctgccacaaggatcacctgcctctcctgcgctgactaacagtgcttgcctacgcctggatcgtagattggccggttatgctcagaagtatgggtggaggtacactcgatacgctgacgatctgaccttcagctttccctcttccgattcccgatcagcaaatgtggatcttctgaagaaattcgtccacgatatcgtgacttccgagggctttgttgtgcatcccgacaaaaccgatgtaatgggaacaggaggccagcagaaggtgactggactgatagtcaatggtaccggctcacccagggtgcccagagaatttagagataagctgagagctgccatccataaccaggaacaggggcagcctctctttgaagacgaaacaatgagcacgctgcttggctacgcctctttcgtgttctcggctgatccagaacggggaaaaacacagttagagcaattgcagaagctcaacgagcagtga

SEQ ID NO: 13649 - RNA, 1326 nt, synthetic construct
  source 1..1326: mol_type = other RNA
atgattgagcggcttagtgagaagcttagcggggttgagagagaggcactggaggcgaaggcggagttatggagcgcagtcgagcaggctggtggcgcaagacgctatgtggaggctgaactgcggcgacgtggggtgttcgtggaaagacaggatgtgctcgccatgggattcgacgaaaaaaaggcctacgtggaacgggtggcagccgagcaggaagtcaggaggccgctgcaaagcaaagtatgggccgcttacacagcgctgcacataacccaccttggagaggaagttttttggcaaggcgacgtgtctgtggacttcttcgacccggatcatttagccgcccgcctggaacagaagggtctgcctccactggagcgcccagaggacctgtgtgaggcgttaggtctaacactgtccgaattgcgctggctctgctatcatcgtgaagcggcaacctctctccactatcgcacctttgagatcccaaagaaaacgggaggcgtgaggaggatttgggcccccttacccaagctcaaagccgctcaggagtgggttctgcggtcgattgccgaaagactcgtcgtccatggcgcagctcacggcttcgttgcaggcaggtcaatctactcaaacgcactcgagcatctggactcccgccttgtggtaagtatggatttggctgacttcttcccttcttttacattcaagcgggtgaagggaatctttcgacaggccgggtacatggacggcatagccgctctgctggctctgttgtgcacggaagccccaagagaggtcacagagcacgagggccagcggtactatctggctctcggaccccggtgtctgccacaagggagtcctgcttctcccgccctcactaatgcagcctgccttaggctggatcgaaggctagcagggtgggccgcaaaagccggctggagatacactcgttacgctgatgatctcaccttttcagtccccgcctccgctgctgaggaaccttcagtatcccagttgcttggggtcgtgcacgctatcgttgccgaagaggggctggtggtcagagacgacaaaacccatgttatgcgacgcggtgccaggcatcaggtgactggactcgtagtcaatgatgccactcctcctcggcccccaagagaattgagacgccgagtacgcgccatggtgcacaacgtcgcgtccggaaggggtctaagagagggcgaaagcctgagccaattggttggctttgtggcatatttgcacatgtgtgatcccgtggaaggacggaggctgatggaggtgcttcgtggggcctga

SEQ ID NO: 13650 - RNA, 1329 nt, synthetic construct
  source 1..1329: mol_type = other RNA
atgagtgagcacctaaacgaccgtacctcccatcaggaattctggaccgaaatcgtcgaggcaggcggcccacggaagtacgtggaaacccagcttagggagagaggggtgtgggtgaagcggcaggacgttttgagtatgggagctaaggccaaacaagcctacatcgagcagatcaaagctgaggacgccatcaggaagccgctgcaggaaaaggtctggaagacatacaccgccctgcacatagtgcatctcggggaagatattttttggcagtcagacgtgtctatagatttcttcgatcccgcccacaggcagtcccgccttaagcagcgccaactccaagatatcgaaagcgctgaggagctcagcgaccagatgggaattactctcggagaactgcgatggctctgttaccatagagaggcggcaaagtccattcactatcatcgcttctctatcccaaagaagtccgggggggaacgccaaatatgggcgccaatgcctaaactcaagacagcgcaaacttgggtgttacggaacatcgccgagcgactcacggtacacggtgctgctcatgggtttatggccggcagaagcatttattccaacgcattggagcacacaaatgcatcggtgatcgttagtatggacctggccgatttctttccctcatttacattcaagcgggtcaaagggatctttcgtcaagccggatacatggacggaattgcaaccattctggcacttctgtgcacagaggcacctcgggaagtagtagaggacgaaggcgagacttattatgtggcaatgggaccgaggtgcctgcctcaaggaagcccagcttcccccgctctaactaatgctgcctgtctgagactggaccggcgcttatctcagttcgccgagaagaaccagtggcgctacacacgatatgcagacgatctgactttctctgtgcctaaagctgaaagcaaactgtcagaggaggaactgagcgccaagattaaacagttgatcggcacggttcacgctgttgttgaagacgaggggcttcaggtccgttctgataaaacccatgtcatgaggcccggcaagagacagaaagtgaccggtttggtggtcaatggtcaggataccccaagaactcctagggagctgcgaaggcgggtcagagcgatgatacataatctcaaggtgggcaaaacgttacacgagggcgaaagtctaaaccacctgaccggtctgatcgcctttatttacatgtcagatccccagcagggccagaaacttttggagcagctgaaacaggccacagcccccagctga

SEQ ID NO: 13651 - RNA, 1314 nt, synthetic construct
  source 1..1314: mol_type = other RNA
atgaataaagagcgagttcaggagctggagaagcgttggcagaagatccaagaccaaggcggtccccaggcttacctcgaacagcaacttagaaaggcaggggtgtggagaagatacaggcccaatatgatagagcctggtatcaacaagagtgacgaaatccgcgctagccggctggaacgcgaaaagaggctcgagctcaagaaatatatttgggaggcgtacaaagccactcatatcagccatctgggactggacgtctactggaacgatgaggtgggagaagactttttcgacgtgcatgaacggctgaagaggcaggaagagcagggccttcccagcattgagacagtggaggaactagtagaagccctgagtcaggcagtgccagaaatgaccatcccaatgctgcgctggttgtgttaccaccaggacgtcgcgacccatctgcactatagacactttgagattgagaaaaagaccggaggttttaggcagatctgggcacctcttcccaaactgaaggccatacagcactggatcttgcagaatatcgtagaacacatgccaatacacggcgccgcacacgggtttgtatcaggccgatccatattctcaaacgccgaggaacattgcaattcggatgttgtggtcgggctggatctgaaggatttcttcccttctttcacattcccccgggtcaagggaatcttccgtaactatggctacaagtctgagatttcaaccctcctcgctttactatgcaccgaggccccgcggagaattgtgcagattgagggcaagacagtctacgttgccacaggctctcgcgcactacctcagggaagtcctgtgagccctgctcttacgaatgtggcctcaatgagattggaccgacgcttatctggttatgccctgaaacacggctggcggtatactaggtatgctgatgatctgacgttttccgctccgaccggccaaggccgcaagaacattaaagcgcttttagagactgtcgacaccatcgtgacagaagagggactgaaggtgcatccaaagaaaactcacgttatgggaaaagggcgaaggcaggaggtgactggactggtcgtgaacgggtccgaaagcccacgggtgcccaaagagcggcgtaaaatgcttagggcagctctcaataatgcccaaaaagggaaggaagttgagttggggtatgcactccagcaactcatgggtcatgccgcctttgtttacgctgcccagccagagctggggagatccttgattgaggctttctccgaactgatgaacgaatga

SEQ ID NO: 13652 - RNA, 1290 nt, synthetic construct
  source 1..1290: mol_type = other RNA
atgaccgacctcctcaagctttggcaggagattgaagccgccgggaatatagacaattatatcgagcagcagctggtgaagaacggctatctggttgagcggcgggatacagatgatatgtcaaaaaaggagctcgatagatacaagaaacagttgaaacaggaagctaaggctaagaaggagctgaaaaaaaaaacctggctcgcctacaaggcttcgcacatagtccatgttggtgaggggattttttggaatgatggagccaacttcgaccagtgggaccacttgagggcagaggagcagacctcagccaacgagctccctcctctagatagtccaaaggaattggcgaaaactatggggataacaatcgaagaactgaggtggttcacttaccatcgcgacgacgccaagaagatccattataggcggtttacaatccccaagagatctgggggagaacgcaacatctgggcgcctctcccaaagttgaaagagttacagaggtggattctgcgcgagatagccgaaaagcttcccatccacggagcctcccacggttttgtggctggacgtagcattctgtctaatgcagctgtgcataataactctcacattgtggtgagaatggacctgaaagacttcttccccacgttaaccttcccacgggtaaaaggtatctttcgccacgcgggttaccgagagcagattgctaccctgttagccctgatctgcaccgaggcaccacgcgaagtgattcagcacgagggggaactgcattatcttagccttggaccgaggtgtttaccccagggtgcacccacaagtcctgccctgagtaacgtcgctagcttgaagctggatcggcgcctatccggactcgctaagaagctgggctggcgatatacacggtacgcagacgaccttactttttcccttccagagaaatacaagaaaggcaactcacaactcggagccctgctaaaaagcgtgcctaacatcgtgagcgatgagggatttgagatcaataggaaaaagacttgggtcgcacgaaagggcggcagacaatgcgtcactggcctggtggttaacggcaaagagatgcctagagtcccccgtaagaaacagagggaaatcagatccgccatccacaatctgcagcaaggcaaggggctgagagaaggcgaaacgatagaacaaatcctcgggtacgtagcattcatttatatgtctcagccggataaaggcaagaaactgctggagaagattgggaatattaagttgcaatga

SEQ ID NO: 13653 - RNA, 1302 nt, synthetic construct
  source 1..1302: mol_type = other RNA
atgtcagagcacaaggccaaccgttatgagcaaatctggcaggcaatcgagcaggcaggaagcgttaatgcttatgtgcgggagcagctgcagcaacatgggttcttggttacacgcagacccacagacgagatgagtaaagccgagttagaaaaatacaggcaggccctgaagaaggaggcggcagagcaaaaccgcctcagacagcaggcttggcaagcataccaggctaaacatattgtccacttaggtgaaggcatctactggaccgatgacagctcagaggatcagtgggatgcccccaatgccaaccagcggctactggaaaatcagcttcctgctatcacccaggtggctcaactctgtcaggctctccagttgtctgtgagcgagttgcgctggctgtgctaccagagggaagtttctactcattcacactacacccgatttgaaatccccaaacggagcggaggcattagagccatttgggccccgctccctaaactgaaacaggcacagcattggatattgcacgagattctggaacgcctcgtggtacacggcagcgcacatggttttattactggcaggtcgatagccactaatgccgcggaacacggggacagtcaggtccttgtgaagcttgacatagagaattttttccccacgattagttggaggagagtgaagggcgtatttaggaaagccggctatcccgaacagattgccacacttcttgccctgctctgcactgaatccccacggcagctggtcgagcatgagggcaagtccgtgtatgtggctctggccgagaggtgtctcccacaaggagcgccaacgtctcctgcactgaccaatgcgctgtgcttgagacttgatcggagactcacagggttcgcccacaaagccgggtggcgatacacacgatacgctgacgatttaagtttttccctcccagcaaccaaccaagcccccccagagttgtccaggctcctaggcaccgtgaagcgtgttctgggcgaagaagggttcgcgctgaacctgtccaagacccgcgttatccgtccggctgaagtgcaaactgtaaccggactggtggtcaatggagcacagccacctagagtcaagaggtctttaaagcgccagatgcgggctgccgtgcacaacctgaaccagggtaaggcactgcctgcaggagagtcactgagccggctaaaaggatatgccgcttatatcgctatgacagatcgagacttgggtttcgacctgcttaaccagctgcaacctgtcggggaaatctga

SEQ ID NO: 13654 - RNA, 1290 nt, synthetic construct
  source 1..1290: mol_type = other RNA
atgtccgagctgagtagatatgagcaggtctggcaagcaattgaaaaggccgggtcagtaaatgcttatgtacgagagcagatgcagaaaaacggatttatggtggccagacggcccactgataacatgaataagaccgagctcgagaagtataggcaggaacttaagaaggaggcggccgaacagcggagacttaataaagaagcttggcaggcctacaaggccaagcatattgtccacctgggggaaggcatctactggactgatgatagttccgaggaccagtgggatgtaccgaacgctaacaaacgactgctcgaaaaccagttgcctgccattactaaggtgccacagctatgcgaggcgctcaaattgagcgttaatgagcttcgctggctgtgctaccaacgggaagtggcagataagagccactatacgcggttcgagatacctaagaggtccggaggtctgcgagcaatatgggccccgttgccaaaactgaaacaggctcagcattggattctccatgagatattggaccggcttgtggtccatggttctgcacacggtttcatcgcgggaagatcgattgcaaccaacgctgccgagcacacgaactcacaagtcctcgtgaaagtggacatcaaagactttttcccctcaatcagctggaagagggtgaagggcgtattcagaaaggcaggctacccagagcagatcgccacactgcttgctctcctgtgcaccgagagccctagggaagtggttgagcacgccgggaaacaggtttatgttgcattggctgataggtgtctacctcagggggcacccacaagtccagccttgacaaatgtgctgtgtctgcgactcgaccgtaggctcaccggctttgcccagaaagccggctggagatacaccaggtacgcggacgatctatctttcagcctgccagctacttctaagaatcctgctgaaatctcaagactcctggggaccctgaagagggtgctgggagaagaagggtttgacctgaatgacaagaagactcgcgtgattcgccaaggtgctgtgcagacagtgaccggcctggtggtcaacggcgaacaatctccccgggtttcccgtgtcttaaaacgccagatgcgcgctgccgtccacaatctgaaacagggaaaagttctgcccgagggcgaatccttacaacgtttacgcggctatgcagcctacatcgccatgacagaccgggagttaggacttgggctgctcggacaactgcagcaagagcagtga

SEQ ID NO: 13655 - RNA, 1287 nt, synthetic construct
  source 1..1287: mol_type = other RNA
atggccaagcagaccaaactcgaaaagctatggaccgaaattgagaaagccggcagccgtgacgcctacattcaagagcagctgcgtaagaacggatttatggtccagaggcggagtaccgacaatttgagcaagtctgagctcgagaagtataaacaggagctgaagaaagaggccgctgagaaaagacgccttcaacaagctgcatgggcggcgtacaagacacagcatatcgtgcacctgggagaaggcatatactggacagacgacaccagcgcagatcagtgggaccttgataatgctcacaaaagactcttagccaatcagctccctcagctgacccgagtgaaacatctctccgacgctctcggtctgagcattgccgagttgcggtggctttgctaccagcgcgatgcggcactgaagactcactatacaagattcgaaataccaaagaggtcagggggagtgcgcgctatatgggcccccttgcctaaattaaaacaggcccaacgctggatcctggatcatatcttggaccgactgctcgtacacggagccgcccatggttttctcatgggcagatcgattgcatccaacgcagcagagcacagtgacagccagatcctggtgaaaatggacattgccgactttttcccctctatttcctggaagaggatcaaaggggtcttccggaaggcaggatatcctgaacaaatcgcaacgctgctggcgcttctgtgtactgaatccccgcgagagcaggtagagcacaatggtcagtcttattacatcgctatggccgatagatgcctgccacagggtacgcctacctctccggctctgactaacgcgctatgtctgaaacttgatagaaggctggctgggttcgcctcaaagaccgcttggcgatatactcggtatgccgatgacctgacttttagtttcccaaatcactccacaagcaaggcaaatatatcacaactgctgggcacagtgaagcggattcttggggatgaagggtttaagctgaacaactcaaaaacccgtgtgattaggcagaatactgttcatgaagtcacgggcctggtggttaacggcacacaggccccaagggttaagcgcaccttgaagcggcagttgcgcgctgctatccacaacttaaaacaaggcaagcccctccccgaaggcgagagtatccagagactaaaagggtacgcagcctacatcgccatgacagagagggaattaggactcaagatgcttgctgagttggataacgtctga

SEQ ID NO: 13656 - RNA, 1284 nt, synthetic construct
  source 1..1284: mol_type = other RNA
atggccaccgagtgggaagaacgatgggccgagattgaaaaagccggtagcatcaatgcatacattcagcagcagctcgtcgccaaaggcttcttggtggaacgacgggctactgataaaatgacccctcgcgaactggagcaatataaaaagagtctgaagactgaagctacagaaaaggctcaactccgcaaagcggcttggcaggtgtacaaagcaaatcacatggtgtacttgggagaagggatctattggagcgatgactcctcagaggatgacttcgatttagcatctgccgagaagcggttactggataaccagcttcctgctatcaccaaagtgaaacagctggcggagcagctgaaactgacaattcctcagctgcgacagttgtgttaccacagagaggctgccaccgacctcaattacacaagatttgagatcccaaagcgaagtggagggatgcggccgatttgggcgcccagactcctcctgaagaatacccagaggtggatcctcgagcatatactggagcgactgctagttcacggagcagcccacggatttctgatgggcaggtctatcgccacgaacgccgcacagcacaataactccgaaatattgatcaagctcgacattaaggacttcttcccctctatatcctggagaagggttaagggagtgttccggaaggccggctatcgggaacaggtcgctactcttctggcactgctgtgcaccgaagctcccagggaagtggtcgagcgtcaggggaagaagcattacgttgcccttggcgctcggtgcctacctcaaggtgcgccaacttcaccggccctgacaaacgtgctttgtctcaggttagaccggagactgaccggcatcgccacaaagttcggttggcgctacagtcgctatgccgacgacatgacttttagcctccccgtagggcatgctggagatccacaaatcgccaaggtgcttggatcaattcagcgcgtaatgggtgaggagggctttgagctgaatcgcgccaaaacgcacattgttaggaggggtgcacgtcaggaggtcaccggcttggtggtgaacaacgaggggctgccacgcgtcaaaagatccacgaaacgtcaaatgagagccgcacttcataacttaaagacagggaagggcctgaaagagggggagtcgctaaataggctgaagggctatgctgcatatatggcaatgactgaacgggagttgggccttagactcctgtctgaattgagcgagtttgggtga

SEQ ID NO: 13657 - RNA, 915 nt, synthetic construct
  source 1..915: mol_type = other RNA
atggcaaatcaacagcagaataagatcgagaagttgtgggcggctattgagaaagccgggagcatggatgcttacgtccgcggtcagttgcgggacaaggggttcctcgtggagcgtcgtgacaccgatgacatgtcgaaaagggctctgaacaaatataagcaggaactgaaggccgaggctgaagagaaaaggaaacttaccaagaaggcttggcaggcgtataaagccaaccacatcgtgcatcttggagaaggcatctattggacggatgatacgtccgaggaccgctgggatctcgataatgctcagaagaggctgctggaaaatcagctgcctaacatcactcgcgtaaaacagctcgcagaggccctggaactgagcatctcagagctgagatggctctgctaccatcgggaagctgcgacctctagccattacattcgattcgagataccaaaacggtctggcggccaacgcgcaatttgggcccccatgccaaagttgaaaaaggtacagaggtggattctgggagagatcttagacagattactcgtgcacgggagtgcccacggatttcttgccggtcggtccatagcaaccaatgcggctcagcatactgactcacgcctaatcgtcaagatggatattgaagacttttttcccagcgtttcctggaaaagggtgaagggcgtgttccgaaaggccggttataacgagcaaatagccacactcctggccctcctgtgtacagagtccccccgagaaatggtcgaacacaacgggagaacccactacgttgccttggcagagcggtgtcttcctcaaggcgcaccgacaagtcctgcactgacaaacgtgctgtgcttaaaactagacagaagaatttctggaactgccggcaagttcaattga

SEQ ID NO: 13658 - RNA, 1287 nt, synthetic construct
  source 1..1287: mol_type = other RNA
atgggaaggaccagtaacaaagtcgagaaactgtgggctgacattgaaaaggctggttctattaaccgatatgtccggcaagagttagacaacaaaggctttcttgtcaagcgagtgaataccgataatttgtctgtgcgcgaactgaagcagtacaaagcagctctgaagaaggaatcagccgagaagcgtgccttgaataaggccgcttgggaggcatataaagcacaccatattgttcacttgggggacggcatatattggaccgacgacacatcgacagatcagtgggatcttgacaacgccacgaagagactccttgagaatcagctgcctcagattacccgggtgaaggccttagccgaggcgctaggactcacaatcagccagttgcggtggctgtgttaccatagggaggtggccacacaatcacattacacgcgcttcgaaattcccaagcgttctggtggggttaggaccatttgggcgcctcgacctaagctgaaaaaagtgcagaggtggatcctgaacaatattttagactccttgctggttcacggcagtgcacacggcttcttagctggcaggtccatcgccactaacgctatcgagcacactgatagtcaggtgctgatcaagatggacatcgaaaattttttcccgactatcagttggaagagagtcaaaggagtatttagaaaggccggttactccgagcagattgctacccttctggctcttctatgcacagagtccccaagagaagtgatcaacaaagatggacaagatctctatatagcattggctgacagatgcctcccccaaggtgctccaacaagccccgcgataaccaatgcgctctgtctgtcactagatcgcaggatgactagcatggccaataaggcagggctgcgatacactaggtacgccgacgatctgacgtttagctacgctgcgaagaaaaagaaagcccccgaaatcagccagctgatcggaggagtaaagcggatcctcggagacgagggcttcaaggtgaacactaaaaaaacccatgttatccgccagggcagcacacaggaagtgaccgggctcatagtcaacggcaagggcatgcctcgggtgtctcggaaactgaagagacagatgcgcgccgccatttataacctgaaacaagggcgtgagctgccagaaggtgaatcaatccagcgcctccgggggtatgcagcctacattgcaatgactgatagagccctgggccttgggatgctcgaggcactgtccgattga

SEQ ID NO: 13659 - RNA, 1278 nt, synthetic construct
  source 1..1278: mol_type = other RNA
atgagctcaacactggagtctctgtggattgtaattgagcaggccggaggcatcgaccggtacgtcgataaggaactcaaggccaagggctatctggtcgaaaggtcagatacagcgagtatgagtaaacgagccttgggcatctataagaaagcactgaaacaagagagtgtagagaagaggactctgaaaaaacaggcttgggctgcttacaaacagacacatcttgtgcacctcggagagggcattttctggagcgacgcagaagacgaggacaagtgggacgtggagaatgcccataagcgcctgcttgaaaaccagctacccgctatcacgaaaagcaaacagctagccgaggccttggatatatctatcgctgagctgcgctggctgtgctaccacagagaggcctcgacttcaagtcattacacccgattcgaaataccaaaaagggatggctctagccgtgaaatctgggccccacgtccgttgttgaaaaaggtgcagacctggattctgcgggaaattctggagcggttgcttgtgcacggtgcagcacacggctttctggcaggcagaagcatcgcgactaatgcctcccagcacatcaactcgaagattttagtgaaaatggacattgaggatttctttccgtccatctcctggaaacgagtgcgcggagtgttccgcaaggccggatatcaaggtcacatcgcaaccctcctggctctcctgtgtaccgaagcgccaaggaagatcgttgaacaccgtgggaaaactacgtatgtcgccttgggggaaaggtgcctaccccaaggtgcgcctacttctcctgcattaagcaatgctctctgcctttctctggaccgaagactgacaggagttgccaccaagctgggatggcgctacagcagatacgctgacgatcttgctttttcacaggtggctaccaagaagcaggccccagagttaacccccctctttggctccataaagagaattctcggggaggaaggattcgtcgtgaatcagaagaaaacacatgttgtgcggcagggggcccggcaagaagttacagggctcatagtgaacggtaaaggggagcctcgggttccccgcaaactcaagaggcagctccgggcagccgtccataactttaagtgtgggaagcctctgagagatggcgtatccttaatggagctgaagggctatgccgcatacatcatgatgaccgacagaaggctgggagaggagatgaagtccgtgcttgtcgaatga

SEQ ID NO: 13660 - RNA, 1281 nt, synthetic construct
  source 1..1281: mol_type = other RNA
atgtcggctaactgggagacactctgggacgaaatagagaaggcaggtaatgtggagcgatatgtgcagcagcagctcgagctgaagggcttcgttgtgaagcggcgcgctacagataccctcagcaccagggagctagagaactataaaaaagagctgaagacggaagcccttgaaaaaagaaaactgaaaaaggaggcatggcaagcttaccgcgctacccatattgtgcatcttggaacgtctatctattggtctgacgactcaagtcacgaccggtgggatctgcaggatgctgagaaacgtctcctggagaatcaactgcctcccctcactcaagtcaaacatctcaccacagcccttaatttatctataccacagcttaggagtctgtgttaccagagagacgctaccacagacactcattacaggcgcttcgaaatcccaaagcgatccggtgggctgagagcgatttgggcaccgaggcctcagctcaagaaggcccagagatggatattgcgcgagatcctggataggatgctggtgcacggcgccgctcacggatttttggcagggaggtccatcgttaccaatgccgcccagcacaccaactctcaggtgattgttaagctggatatcaaggactttttcccttcaatctcatggcggcgcgtgaaaggcgtgttccggaaggccggttacagagagcaaattgcgacacttctggccttgctgtgtacagaaagcccccgggaagtcgtttcccacgaggacaaaacctactatgtcgctctgggcgaacgatgcttgccccagggagctcccacaagcccagcactgactaacatcctatgcttacagctcgaccgaagattgactggtattgcccagaaattcgggtggtgctacagtcgctacgccgatgatctcacattttcatttccgcaagacaccgccgaaacttccaatataagtcacttactaggaagcatccagcgcgtaatgacggatgaggggttcagcgtaaacatgaagaagactcacgtgatcagagcgggaaacgtgcaggaggtcaccggcctgctggtaaatggccagcatgcccctcgggtcagcagaaccaagaagaggcagatgagggccgcgattcataacttacagcaacagaaacctctccccgaaggcgaatcccgtgaacggctgatgggatatgcagcatttattgctatgactgatcgtccattggggcaacagatgatccacgcacttatggccctgtga

SEQ ID NO: 13661 - RNA, 1458 nt, synthetic construct
  source 1..1458: mol_type = other RNA
atgtccacagtgaatagtcagcagaccgattatattagcccggcccagacaatgactcccgccgagagacaatggcaacagctgtggcaagacatcgaggaagctgggggccggtatcagtatatccagcagcaaatgttgcagcacgggtttattgtagagaggaagccgattgataatatgaccgcaaaggaacgggagagatacaaaaagtctctgaagaaagaggccgccgaagagaaatccctaaaaaagcaggcttggcaggcctataaggcacagcacattgtgtacctgggaagacacatatactggagtgacgacacgtccatggacaagtgggatgttaaagacgccagtaacaggctgatcgagaacaagctccctctcatcagcaaacatactcagcttgccgaggcagtgaatctgactgtgccacaactgaagggcttatgctatcagcgcgacgtcgccacaaacatcccttacactcacttcaccatcaataaaagaaacggtacacccagacacatttggagccccattcctagactcaagttcgtgcagcgctggatactcgagaatatcctgaataacctcatgactcatggggctgcgcatggcttcgtccgcggaaagagcattgttacaaacgccgctgtacactccaattctgccctactgattaagctggatgtgaaagacttttttcctagcgttcattggcgcagagtgaagggtgtgttccgacacgccggttacccagaaaagatcgcaattctcctcgctttattgtgtacagagtccccaaggcaggtcgtccaacagaacggcacaacctattacgtagcgctatcagatcgggcactcccacagggagctccaacctcccccgcacttacaaacatcgtctgcctgaacctggataggcgactcactggattagccgacaaagttggattgcgttattcacgctacgcggatgatctgacgtttagcttgccagtcagttcaacctcagccgagaacaatgtgcaggcaaacgtgcaggcaaatgtgcaacctgcagaccataaccaactcatcggtcagctgctggggtccgtccaaaaaatcttgcgtgaggaaggcttcacacttaataatgacaagacccgcgtgattcggactggcaatcagcacaacgtgaccggcatggtaataaatggggagggagtgcctagggttcccaggcatataaaacgaatgttacgggctgccctgcacaatctggcctcaggccagccccttagggaggatgaaaccctggaaacccttagtggctacgcttcttggatcgcttctgctgagcaggaacttgggcagaactacttggctaagatcgacactctgcgggaacaggcgaaagtggttgaaaccaagagctctgccgagtctacgtcgctgctgaacgaatga

SEQ ID NO: 13662 - RNA, 1440 nt, synthetic construct
  source 1..1440: mol_type = other RNA
atgaccacccatacagcaaatcacaacgactatatttctcctgaacctgttccaacctccttcgaaaggcaatggcagcagctgtggcaggatatagaattggctgggggacgataccagtacgtgcagcagcaacttgtttcccaaggtttcatggtggagaggcagcctgtggacaacatgtcacccaaagagcgagacaggtataagaaagcgctcaaaaaggaggccgccgaggaaaaatccctgaagaaggctgcttggcaggcctacaaggctcatcatatggtatacttaggccggcacgtatattggactgacgataccagcactgacaaatgggatatcaaggatgcagccaaccgcctgatcgagaacaagctgccgttgctaagaaagcacaatgagctcgcagaggcggtcaacctgactattccccagctaaaagggctgtgctatcagcgggaggtagccactaacctttcgtattcccacttcacgattgccaagagaaacggaacagcaaggcagatttggtcccccataccaagattaaagttcgtgcagagatggatactgcacaatattctcaacaaccttacgactcacggcgctgcacacggctttgttaggggaaaatctattgtgacgaacgccgccgtccatagtaactccgaactgatcattaagctggacgttaaagactttttcccatctgtgagctggcggcgtgttaagggcgtttttcgtcacgccggctacccagaacagatcgctactctcctggcactgctctgcaccgaaagtccccggcaagtggtccagcaggatggcattacctactatgtcgcattgggagacagggcattacctcaaggagcgcccactagccccgcattaactaacatcgtgtgtctcaatctggaccgccgcctcacaggtctggctgagaaactaggcctgcgatatagccgctacgccgatgacctgacctttagcgtcccaactatcgaagacaccaagcctaagcttaaagtgaaaacgaccataaaagccacaacatcaaccgctaagaagcaggccgatacacagcataataagctcatcggtcagctgctcggctcagtgcataagattcttcgggaggagggttttgccctgaataatgataaaacccgcgtgatccgtaaggggaatcagcagcaagtcacagggatggtggtgaatggccaaggggtcccgagagtgagtagacaaatcaaacggatgctgagggcggccgtgcataatctggaggccggagggaccttgagagccgatgagacacttaatacactgagtgggtacgctgcgtggatcgcttctgctgaacctgagctcggacactcatacttggatcgcatcgaacgattgcaggtccagcaggaaacaagcgtatga

SEQ ID NO: 13663 - RNA, 1338 nt, synthetic construct
  source 1..1338: mol_type = other RNA
atgagttccacatctacacagaacttgagggagcattggcagactctatggcaggacatcgagcaagctgggggccggtaccagtacgtgcagcagcagcttgtgacccagggattcgtggttgagcgcagacctattgacaatatgtccaaggccgagagacagaggtacaaaaccatgcttaaaaaggaggcggccgaagaaaaaaacctcaagaaggatgcctggcaagcctataagtcacaacatatggtctatctgggaaggcacgtgtattggagcgatgaccacagcgccgacaagtgggacgtcactgacggcgaacgcagacgtgtgagcaatcagttgcctactttaactcagccgaaagagctcgcagctgcactcaacctttcaatagcccaactgaaaggcctgtgctatcaacgcgaggtggctacctgcgttccttacacccatttctccatccagaagcgcaggggaggtacccgggaaatctggtcgccaatccccacgctcaagacggcccagcgttggatcctgcaccacatcttggatcaactgccaacccacggcgcagctcatggatttgtcagcggacggtccattgtcaccaatgctgaagttcatcgagactctgctgtccttattaagctggacctgaagaacttttttcccacaatccactggcgccgtgccaagggcgtatttaggcaggcggggtatccagaatctatagcaacattgctggcactgctatgttcagagtccccccgccagatggtccaacagaacggggtgacatattacgtagccctggctgatagagcgctcccacagggtgcccccacttcacctgccctttccaatattgtgtgtgtgaatatggaccgacggctgacaggcctcgcggataagcacgggctccggtactctagatacgcagatgatctaactttcagtatcccctccagctctgcggccaattcagacgcccagaacgcattaattggtttgctgctggggagcgtgtacaaaatagttaaagaggaagggttcgttctcaacaccgataaaaccagtatagtgaggactggacagcagcagaatgtaacaggtatggtggtgaatggcgagagtgctccaagagtcccgcgaagaattaagcggatgctgagggctgcaatccataacctgcagcagggacgagctctgcctgaaggcgaatctttggccaccttaagcgggtacgccgcttggattacgagtgcagaacccgagctcggccggcactatcttgagcaaatcgaggcactggctaaagccacacctgcctga

SEQ ID NO: 13664 - RNA, 1521 nt, synthetic construct
  source 1..1521: mol_type = other RNA
atgagcaaccggaacaataattcaaacaatccgaataacgctcagcagctctcccagtatatccataacaaccaggcgcaccacggaaacctgataaaccctaatggaaacgaaaagctgaacgaattacagcaactgtggcaggacatagagcaagcaggcgggcgctatcaatatgtccagcagcaactcgttaagcaaggcttcctggtggagaggcaacctatagacaatatgtcacccaaagagcgggaccgatacaagaagcagttaaagcaggaggcccttgaagccaagaaactgaagcaacaagcatggcaggcatacaaagcccagcatatcgtatacttgggaagggatatttattggacagatgatacctccccggatcaatgggacgtgaaggatgcgagtaaccggttgatcgaaaaccagctgcccctgatagataagcctcagaaattggccagcagtctcaatctgacaattccacagcttaaaggcctctgctaccagagggacgtagcaaccaatcttacttacaatcatttcaccatcgcaaaaagaaatggcaccccaaggcagatttggtcgccgattcccagactgaagtatgctcagagatggatccttgacaacatactgaataacctgccaatccatggttccgcccacggcttcgtgcagggcaagagcattgtgtctaatgcctgcgtccatacggattctgagctccttattaaactcgatatcaaggacttctttccctccgtccactggcgacgtgtgaaaggcgtgtttcgccacgccggataccacgaacagatcgcaaccctgttagctctgctatgcacagaatccccaaggcagatcgtacgccagaatggtgttacttattacgtggccctggccgaccgatgtctacctcagggggctcccaccagccctgctttgaccaacattgtttgtctgaatctcgacagacggctgacggggctcgctgacaaactgggtcttcggtacagccgctatgcggatgatctgacctttagtctccccaaaacagacaccacaactggaaagccatctaagaagcccaatactaagaccgctaagaccgcaaatgataactctaccaacaacaacaatgagcagaatcaactaatcgggcagctgctgggctcagtgtcaaaaattctgacggaggaaggcttcgccatcaacagtgacaagaccaaaatcattagaacaggtaaccagcagaacgtcactgggctcgtcgtgaatggtgacggaacacctcgggtgccacgtaaaactaaaagaatgctccgcgcagttatccacaacttgcagaatggggggaaattgagggccgacgagaattttaacactttaatgggctacgccagctggattgcgatgacagatcctgaacttggagcttcttacttgcagcaactgggggaactatccaaggagtttgccaagaaggctgagaaggaggacaaaactgagtga

SEQ ID NO: 13665 - RNA, 1356 nt, synthetic construct
  source 1..1356: mol_type = other RNA
atgacgaataacaagcacacaagccttccccagcaatgggaacagagatggcacgcaatcgagcaggcgggcggtcgttaccagtatatcatgcaacagatgaaagaacacgggtttctggtcgaaaggaaacctattgacaacatgtcccccacagagagagagagatataagaaacaacttaagcaggaggctgcagagcagcataagatcaagaaagacgcttggcaggcctacaaggccaatcacatcgtgtatttgggccacggcatctactggagcgacgacacgagcgaggacaagtgggacgctaccgatggagcgaaacgccttctcgagaatcagctgcctaccttcaagaatgtcaaagctctcgcagagcaactgaatcttaccatttcccagctgaaaggtctatgctttcacagggaagtggcaactaggattccctattcccatttcaccatcgtgaaaagatctggaggcgagcggcagatctgggctccagttcctaggctcaagtacgcacagaggtggatcctggataacgtgctgaatccgatgctcatccacggggccgctcacggttttgtgaggggcaagtctattgtcaccaacgcagagaatcatactaacagccagttgattattaagatggacattaaggacttcttccccagtatagggtggcgcagagtgaagggggtcttccgacaagctggatatcctgagcagatcgccacactttttgccatgctgtgtacagaatcaccacggcagctggtaaaacagggcaacgtaatttactatgtggcactagccgatcggtgcctcccacaaggggcaccaacaagtccagccttgactaacatcatatccctgaacctggatcgccggctcacgggcttagctgagaaacacggcctgcgatactctcgatacgcggatgatctgactttttcattgcccgccgaagccaccatcgataccaaggccaaaaatactctgattagcactttgctgggaagtgtaaccaagatactcacagaagaaggcttcgccatcaacgctaagaaaacccatatcatacatcaaggaggggttcaacgtatcacaggtctagtggttaacggagattctgtgccccgggttcctcgcaatattaaacgtatgctgcgcgccgctattcataacctggaacagggtaagccgttcaaggagggagagtcatttaatactctgcaggggtacgccgcgtggattgccatggcagaacccgacgtcggcgaagccctcttaaaaaagctccggcagttaaaaaacagacctcttcagatagagccagtgtcggactga

SEQ ID NO: 13666 - RNA, 1287 nt, synthetic construct
  source 1..1287: mol_type = other RNA
atgacagatttccagcagctctggcaggatatccagcacgccgggtcaattgacgcgtacgttaataaacagctgcagaaaaagggctatttggtgaaaagattagacgctaagcaactgtccgcaaaggagctggcacgttacaagcagcaactgaagcaggaggcggaggccaagcagaaactgaatcaggaggcctggcaggtgtacaaacagaacaacatcgtgtatcttggcgaccaggtgtattggcatgataatgacgattgggataaatacgatcgggagaatgcagataaggccttagtcgggtaccagctccctgtgattcacactccggctgagctagctgaacaactacagctgactatcaaagagctgaggtggttcacctatcaccgcaacgccgctgaatattcccattatcagcagttctctattcccaagcggagcggtggggaaagatccatttgggctccaaaacccaagctgaaagccgctcagcgatggattctgctcaacatagtggaacgaatgctcatccacggcgcggcacatggattcgtcggaggtcgctctatactgacaaacgcacagcaacacacacaatctgaactggtagttaagtttgacttggcggacttcttccctagcattagttggcgcagagtgaagggcatctttcggaaagcaggatacaaagagcaggtcgccacccttctggccctcctctgtaccgaagcccctagggagcggattgagcatgaacacaaaacctattttatcgctcttgctgaccgctgtctgccacagggtgccccaacctctcctagcctgaccaatatcctttgcaaatcaatggaccgcagattgactgccttcgccgaaaagaacgggtggaggtactcaaggtacgctgatgacctaacatttagctggtctggttcccaaagtaaatccaacattaagcaactgattggcatagtgcatcaagtggtaaaggatgagggccttaatatcaattccaagaagacgagaatcctgcggccggggagctgtcagcagataacgggcttggtcgttaacgagcatgcccagcccagagtaccaagggcaactaaacgagaggttcgtgcaatgctccacaacctcagtaagggaaagtcgcttcacgaagacgaaactttgagtcagttacaaggaaagatcaattttatcaggatggtggagcccgaactcggggccagctttctgacacagttccagcaaatcgtccagtcagcttga

SEQ ID NO: 13667 - RNA, 1299 nt, synthetic construct
  source 1..1299: mol_type = other RNA
atgaaacagcaatccaagatcaatcagctctggaatgcgattgagaaagccggaagcatgaacgcctacatagacggacagctacgcgagcacggatttctggtcaagcgccgcgatactgacaacatgtcaaagcgggaactggatcgttataaaaaagagctcaaggctgaggcagcagagaagaagcggctgaaacaggtggcttggcaggcatacaaggccaaccacatagtacatctcggggatggaatctattggaatgatcatgatgatttcgacaggtgggatctaaataacgccgaagagagagccgccgaaaatgaactgcctcccctggacaaaccacaacaactggcccatgcactcggcattaccattccgcagttaaggtggctggcattccatagagacgcagccacagaacttcactataggcgattcactatccctaagaaggacggtagtgatcgcgccatctgggctccaaaaacactgctcaagcaggctcagtattggatcaacgacaacattacccgaaagctgattgtccatggtgccgcccatggatttatccctggcagatcaatactttccaacgcagaagtccacacgaattctaagattatcctgaagatggatcttgaaaacttctttcccacaatcactttgaaaagggtgaaggggctgttccgcaaagctggctacagggagcagatagccaccctgttggcactgcttgtgacagaagcgcctcgggaagtggttgaggaccagaataagacttatttcgtgtctatggggcctcgttgtttaccacagggcgcccccacaagccccatgatcacaaatgctttatgcctgaagttggatcgcagactgaccgggattgcagaaaaatacgggtggagatacagcagatacgccgacgacttgacctttagtttgccagacggaaaagataaacagcccaacctcggcaagctcatgcacgttattaagcagatcgtcaaggacgaggggtttataatccacccagaaaagacgcgaatcactagaaaggggggtcggcagaaaattaccggcctggttgtgaacggccaaggcacccctcgggtaccccaaaaaaccaaaagggagctcagggcggccattcacaacctaaagaacggaaagccgcttcgggagggtgagacattagctcacctggagggcctggctgcgtttatctgcatgacggagcccgccttgggccacaaaatgctcaatcagctgaaagctgtggctaatactctttga

SEQ ID NO: 13668 - RNA, 1299 nt, synthetic construct
  source 1..1299: mol_type = other RNA
atggcccagcggtccgaaattgacaagctgtggaatgctatcgaaaaggcaggctcaatggatgcttatatagatggtcagctgagagagcatggattccttgtgaagagaagggccacagacaacatgtcccgacgcgagttagacaagtataagaaggagctgaaaggggaggcggccgagaggaagcgcgtaaaaaacacagcctggcaggcgtataaagccaaacacatagtccatctaggtgacggggtgtactggaatgacaatgatgatttcgaccggtgggacctggacaacgcagaggagcgtgccgcagaaaatgaattgccgacattggacaagccccaggatctcgccctcgcactgggcattacgatacctcaactgaggtggctcgcttatcatagagacgccgcaacggagctccattacactcgtttcaccattcctaaaagagacggaagtgaccgggccatatgggctccaaagaccctgcttaaaaaagcccaatactggatcaatgacaatatcgtgtcgcagcttattgtccacggggcagctcacggttttatggccggtcgctccatcctgactaacgctaccgtacataccgattcaaagaccgtgcttaaaatggatttaaggaactttttccccaccgtgacatttagacgggtcaaaggcttgtttcgcaaagctggctatcgcgaacaaattagcacactcttggccctgctggtgacagaggcgcctagagaggtagttgaggagaataacaagacctacttcgtgtctctcggccctcgctgtttaccccaaggtgcgcctacctctcccatgattacgaacgtgctgtgccttcagctggatcggcggctgacaggcattgcggaaaagtacggatggaggtatactcgttacgctgacgatcttacctttagcttacctaacgggccggataaagaaccaaaattgggagctctgatgcacgttgttaagcagatcgtcacagacgaagggtttgtggtgcacccagaaaaaactagagtcactcgaaagggcgctcggcagaaggttaccggcctcgtggtgaatgataagggcgcccccagggtcccacagaaaaggaaaagacagctaagggcagccatccacaacctccagaacggaaagccattgcgagaggacgagactctggcccagctggaagggctagctgcattcatctacatgactgatcccaagctgggaagtagcatgctggcagatctccgaaatatcgccaacaagatctga

SEQ ID NO: 13669 - RNA, 1305 nt, synthetic construct
  source 1..1305: mol_type = other RNA
atgactaagtcaatcaagcaactcgctcttgaaattgagaaagccgggtcaccggaggcatacgtgaagcagcagatgcagaagcaggggtttactgtgaccaggaaaaacgtagctgacttgtctaaaaaggagctgtctgcgtacaagcaggctttgaagaaggaggcatccgagaaacataaactgcagcaggaagcttggcagggatacaaagcctacaatatcgtccatctaggcgatgatatctactggaacgaccaagacgtttgtgataaattcgattgtgacgatagacacgtcagaatgcaggaaaatgcaatacccgatttcaaaaatccccaggctctggctgcatggctcggcgtatctatgccacagctacgcggattgacttaccaccgggaatgcgcggagagtatcaagtatcggcatttcacaattgaaaaacgcagcggagggatgcgttccatctgggctcctaaccacgaactgaagcaagtgcagagacaaattctggatgaaatactctcctcgttactagttcacgatgcttcacacggatttatgcaggggagatccatcttcagcaacgcactccgccacacggatgccaaaatcgtggtcaagatggacttaaaggacttctttcctaccattagtttcaagagagtcaagggtttgttcaggaaggccggctatcaagagcagattgcgaccttgttagcactgctctgcacagaggctccacggaaaatcattgaacgcgacgggaaaaagtatttcattgcactcggagaaaggtgccttcctcaaggcgcgcctacatcacccgctatcagcaatgtggtgtgtcttcgactcgaccgaaggcttcaggggcttgccgaaagcctgggttatcgctatacccggtacgccgacgatctgacttttagtcagctgaacgactgtaaaaaacctatgtctattggcgccctcaaggccgccatcaaaaatattatcgagtctgagggttttgtgctgcacacagaaaaaacccgtataacatatccccatcggtcccagcaggttactgggctggtggtgaacggtaagggactgccaagggttccgagaaagacgaagaggcatctgcgagccgccatacacaatttgcagcaaggcaagcccctgcaggacggcgagagccttgagcagctgaaaggctacgcagcctttatcgccatgtccgaccccaagaccggccaagagatgctcgccaagctgaacgagtgccagctgagcctgccagagagtacctga

SEQ ID NO: 13670 - RNA, 1344 nt, synthetic construct
  source 1..1344: mol_type = other RNA
atgtctcaagccgattataccttacctccaatcgagacgtcagaggagaggagggaactgtggagtcacattgacgaagcaggcggtgtgagggcgtacattcggcaggaaattcacaggcaagatctcgctgcgactggcaacccagagcacatgaacgcctcccaacgtcagcggtataagcaggcgaaaaaactagaggctgaatttagaaccgctctgcggaagagaacttgggcagcatacagggagacacacctcgtgcatttaggggacgacattttctataacgaccttatcgacatcgatgcctttgatattgataacagagagcagaggcgcgaggctaatgacattccctccattgagacagtggacgagcttgccactttcctgggcctgaccatccccgagctgagatggctcagctaccaccgaaatgccgaagcatcccctcactacgtccagttcagtataccgaaggccgacggtagccgccgtgttatatctgcccctaagcccaagctgaaagcttgccagaccaaaatatatcatgagatactgtctctgctgcccgtacatggagccgcgcatggcttcgtacctggcagatcaatcgcaacccacgccagcttgcacgctggagggaacatcatcgtcaagatggacatccgccacttttttccaacaatcgtgttcccgagggtcaaaggcttcttccgaaagattggctacccagaacaggttgccacagtgatggcactgctttgtacagaatcgccgcggcaggagatggaacacaagggacaagtcttgcatgtggcccttcaggaacgctgtttaccccaaggcgcgcccacatctcctaccctgacgaatctgatgtgcgtgcgtctcgatagaagagttctcggattggcccgaaaactgggatggacttacagccgatatgccgacgacctcgccttttcatggcatcaggatagtgagcccgatctggcccagctacttggatgtacgaaggccatcgcaggagacgaggggttcaaaattcatccaaagaagactcaggttatgcgggccaagagccgccagatggtgactggcttggtgctcaatgctaccggtggggatgaacctaaccacccccgcccagtgcgaaggctagtacgccagattcgggccgctatccataatcggaaaaatggtaagcctggcaaagctggggagtcccttctccagctccaagggctggctgcatttgtctgccagaccgatccaagaaggggggaacctttgatggaggatatccgggcactgatcgcagctgaactggctgaatga

SEQ ID NO: 13671 - RNA, 1341 nt, synthetic construct
  source 1..1341: mol_type = other RNA
atgtctaaaatcaaggtgcctccaaccgaaacacatgagcagcgcgttgaactttgggaagagatcaagaaggccggcgggattgaaccttatatacagcagaccctgtcagcccagggactcgctgtgcacaataacgacacctctcggatgaaccaaaaacaaaaaagcgcctacaagaaatccaagagggctgaagcagaagcggaaaaggtcgtcaggaaagccacatggaaggcatactgtgccactcacttggtgcacctgggcaatggtgtattttacaatgacctggtagatgccgataagtttgacatcgagaaccgcgaacagcggatcagtaataacgatcttcctaacattgaacatgttgacgccctggctgaatttctaagtctgacgttgccagaaatgcgctggcttgcttaccacagagatgccacaaagaatcctcactacaaacagtttacaataccgaaatccgacgggagtgagcgtgtgatcagcgctccccgacctaagttgaaaaaggcacagcacactatactccataaaatactcgacaggatgcccattcacggcgcagcccatggattcgtgcctggaagatctattgcctcgcacgctgacaaacatgccgggcgtaagatcgtggtcaaaatggatttaaaggacttcttcccgaccctgactttcccccgagtgaaaggcctgtttcggaagattggatacccagagcaggtagccacggtgatggcattgatttgcactgagccaaagcggaaggaggtcgaacacgatggcgagatgtatcacgtctcactgagccacagatcattgccacagggtgcgcccacaagtccaaccatcaccaacatcgtttgtatgcgactggaccggagaatgtccggccttgcaaaaaagctgggatggtcctattctagatatgcagatgacctggtgttctccaccaatgatactgacatcaatattggcgccctcttacgcctctctgagaaagtgatcagagcggagggatttcggaggcatcccaagaagactcatgttatgcgccagtgcaataggcaaaaagtcactggcttaattgtaaaccccacacccagcgaggagaaaacaacctcacgggttcctagaaaagtcgtgcgacaagtgaaggctgggatctataaccgtctgaatgggaaaccacataagagcggtgagagcctcgagcaactgaggggtctggctgctttcatcaaccagaccaaccccacgcttgggaggaagttcctagatcagataaagaccctcgtggagcgcgaggaaaacgagatttga
